United States Patent Application Publication US 2021/0199660 A1 - sequence listing, part 26

SEQ ID NO: 364159 - DNA, 120 bp, Artificial Sequence
  ENSG00000140945_41 (sequence is synthesized)
gttttatttccactgagcaaatagtcacaccttcacttctttttattaatactcaaccaacttagttgattaaaaatcacattttctccctcattttacatacgataaattaattatttt

SEQ ID NO: 364160 - DNA, 120 bp, Artificial Sequence
  ENSG00000140945_42 (sequence is synthesized)
ggataatttgttttaataagaatatgcacacattttctaatttcaataaaagtcaccttcaataccgccagttctctccaaatgagcatcattccaggcagatatacctgctgtgcctct

SEQ ID NO: 364161 - DNA, 120 bp, Artificial Sequence
  ENSG00000140945_43 (sequence is synthesized)
tggccgacaccagcaaatctaagcattataacgaaataaatccagccagatttcatggtaggtatcaaataagactttggctcttaaagaacatcgttagaaattttgatagctcattcc

SEQ ID NO: 364162 - DNA, 120 bp, Artificial Sequence
  ENSG00000140945_44 (sequence is synthesized)
agagtttcagaatgtcatttaaaacagtctgataaatggaacaaccatctaccatcacactcatagagtagctcaaattgcattttacccaaataaatacactgggtcttaatcttaaga

SEQ ID NO: 364163 - DNA, 120 bp, Artificial Sequence
  ENSG00000140945_45 (sequence is synthesized)
tgtgacaactaaaaaatttttaacaagtctgtgtttgatcctggatttagtgcagttgcacccaggcacgagctctccagatgattctgaggaaaggagtctacaattttcctagggggt

SEQ ID NO: 364164 - DNA, 120 bp, Artificial Sequence
  ENSG00000140945_46 (sequence is synthesized)
gtatgaacatggtaccaaaaaggtgattaataattataataatggtttatatttatcaactgcttattatgtgcccacactgtacaaaatccttacagatagtaactcattaatccctcc

SEQ ID NO: 364165 - DNA, 120 bp, Artificial Sequence
  ENSG00000140945_47 (sequence is synthesized)
agtaacatatgagacaagcactactatcttctccaactcacagataaagaaggctgaggctcagaaaaattgaatggcttgcccaaggtaagtggcctccagaaccaaacctcaggctat

SEQ ID NO: 364166 - DNA, 120 bp, Artificial Sequence
  ENSG00000140945_48 (sequence is synthesized)
ctggctccagggttcatgttcttccgacaacatcacaatgccactctcaacccaggagcaaaaccagacaaagtgcctactgcagaccggaagaccctcgtttgaagcctccattagcgt

SEQ ID NO: 364167 - DNA, 120 bp, Artificial Sequence
  ENSG00000140945_49 (sequence is synthesized)
gactatgcagctagaccaacttactgttaagcaacagtaccttttactatgaggtaccctttactattaagtaccttttactaacagtatcttctgttacctattattaagttcatgcta

SEQ ID NO: 364168 - DNA, 120 bp, Artificial Sequence
  ENSG00000140945_50 (sequence is synthesized)
tacttcttcaatctgaaagctttctgttaaaaaaaaaaatgttaacatcgttctaaattaatattgagaccttagaaatttttcctgtgcaagataacgtaattatttgccccttccctt

SEQ ID NO: 364169 - DNA, 120 bp, Artificial Sequence
  ENSG00000140945_51 (sequence is synthesized)
aattatttgccccttcccttccatggcttgttagcaggtagatgaggggcttctcctagattaatttaacatctcagttaatcaaaagtagccgggcatggtgactcatgcctgtaatcc

SEQ ID NO: 364170 - DNA, 120 bp, Artificial Sequence
  ENSG00000140945_52 (sequence is synthesized)
gaaagaaaaggaaatttatgaactccagagtacccattcactaccaaaccaactgaggggagagaaaactgagggagaaagtggggtggggtctcaaagggtttgcactgtgctttgcta

SEQ ID NO: 364171 - DNA, 120 bp, Artificial Sequence
  ENSG00000140945_53 (sequence is synthesized)
taaatcattcaaaggggcaaattctaaaggatctctaagtagttgctgattttgtaaaggtagcccataaatctgtttacgtgtagctgccttaaacatgagtcaacagggtaagtcaca

SEQ ID NO: 364172 - DNA, 120 bp, Artificial Sequence
  ENSG00000140945_54 (sequence is synthesized)
ccaacaggaaacccaagcactaaaaaagccacctaccttttctgtttaccaaatactaagaataataatctaataatctggctacatctttcataaagacctccatcttctctccttaac

SEQ ID NO: 364173 - DNA, 120 bp, Artificial Sequence
  ENSG00000140945_55 (sequence is synthesized)
tgactgttgagatttgataattttcacagtctaatgataaaatgctttcaaaatggttcatctaacacaattaacaattcttttactatatgcaatgtgttacccttactatatttccta

SEQ ID NO: 364174 - DNA, 120 bp, Artificial Sequence
  ENSG00000140945_56 (sequence is synthesized)
ttgctaatagattagcccactattgaaaaaattctgcagttgtgaccgtgttcacatgaaagcatatacaagacatggagagacagcaaaaaatggtgggaatgggtgtgtgtatgaggg

SEQ ID NO: 364175 - DNA, 120 bp, Artificial Sequence
  ENSG00000140945_57 (sequence is synthesized)
tttcagataagaacttcaattatataatttaagaagagtcagtctataatttaagcagaaataattgagatactcatcaaattaagtaagcggaaaaatttcctctctctcatactatgt

SEQ ID NO: 364176 - DNA, 120 bp, Artificial Sequence
  ENSG00000140945_58 (sequence is synthesized)
tgctatcatcacatctatcgttggagggttgctgagcttgatacgcctttgaaccattttatttgactttccacgtgccgtctcattggtagggagatggtgaaaagcgttgggtggtgt

SEQ ID NO: 364177 - DNA, 120 bp, Artificial Sequence
  ENSG00000140945_59 (sequence is synthesized)
aggacgagggaggttttcactctgaagctatgaagatttggagaaaggggcttatagaagcactatgaaaataaactggagactatttttttgctactttttaaaaagctttttctttag

SEQ ID NO: 364178 - DNA, 120 bp, Artificial Sequence
  ENSG00000140945_60 (sequence is synthesized)
agagtactaaagccattctatatctgtcgtacacatgaattcagactattattagagagttatatctgtgttgtcatgcacatgtcaacactgtcctgatgacaaaattttatgtatccc

SEQ ID NO: 364179 - DNA, 120 bp, Artificial Sequence
  ENSG00000140945_61 (sequence is synthesized)
cccagataaaaattttaagaaattttaaatgctttttattcacacacacttttcaaaagggataaaagttaatcatgttaaaatattcagtctatggcagatgtcgctcctttgggccct

SEQ ID NO: 364180 - DNA, 120 bp, Artificial Sequence
  ENSG00000140945_62 (sequence is synthesized)
cactgctgaattgcttacagtttctgagctgtaaactaacatttgctttactatgtagttacagagaaatgtgcaacttgtttgtgaaacattcaaataaagcttatctgggatttttaa

SEQ ID NO: 364181 - DNA, 120 bp, Artificial Sequence
  ENSG00000140945_63 (sequence is synthesized)
gcgacattattgctttaaaggaataaatcacaaacattttacttcccactagcactcggtatttcaaatccattttctctacagaatgatgtgtttaaataaattgtcctgttgactgaa

SEQ ID NO: 364182 - DNA, 120 bp, Artificial Sequence
  ENSG00000140945_64 (sequence is synthesized)
caaaatgcagccgagaactccgctcgttctgtgcgttctcctgtcccagtcaggtggtcctgtgtgcaagtcccagttccaggcccttccactggctgtccaatggcttggagtctgagg

SEQ ID NO: 364183 - DNA, 120 bp, Artificial Sequence
  ENSG00000140945_65 (sequence is synthesized)
atcaatcagccagctgaattcattgaggaccagtcaattctaaactatggtaggaaatctatgccttttggattttcatccccaagaaccaccttcaaaagaaagaaatggaaaagcata

SEQ ID NO: 364184 - DNA, 120 bp, Artificial Sequence
  ENSG00000140945_66 (sequence is synthesized)
aaatcaagtgaccttcagtgactgtaagggaaacgacaagctacgctatgaggtctcgagcccatacttcaaggtgaacagcgatggcggcttagttgctctgagaaacataactgcagt

SEQ ID NO: 364185 - DNA, 120 bp, Artificial Sequence
  ENSG00000140945_67 (sequence is synthesized)
gactcttctcatatttgaatttactaatgtttatgactgtgtctcaggatgtggtatttcctaaactaagtgttttctgattatttttcttatgtcactgcttgacccaaagtggaaatt

SEQ ID NO: 364186 - DNA, 120 bp, Artificial Sequence
  ENSG00000140945_68 (sequence is synthesized)
cttgaatgagggcctggccaacttagaggttaatagagtgatatgcatctctttttagtattttatcatcagtgggtatctccatactgctgtcagaaaagggggctgtcagcctccaat

SEQ ID NO: 364187 - DNA, 120 bp, Artificial Sequence
  ENSG00000140945_69 (sequence is synthesized)
gagagttgtacactgtgcaaaggaaatgaaattcatttcccctgggcagatccccaaaatcaaaatcattgccttctcgcagattgctgttctacctgtagtttctcatacatagcatta

SEQ ID NO: 364188 - DNA, 120 bp, Artificial Sequence
  ENSG00000140945_70 (sequence is synthesized)
gatcaaaataatggtgagagtatgacattggcttctgggaatttttagacacagacatcaaaaactcttattcttaaggctaataagatgggttttagaaagattcaaaacctctactga

SEQ ID NO: 364189 - DNA, 120 bp, Artificial Sequence
  ENSG00000140945_71 (sequence is synthesized)
gctcaactcatcctgaattccaattgatttatttaaaatatgcatctttcatatctgtggtgatgatctctttttgtttttaatgtcaatattatattgctttatctttaagaagtgtta

SEQ ID NO: 364190 - DNA, 120 bp, Artificial Sequence
  ENSG00000140945_72 (sequence is synthesized)
gggtacattgctaaatgcataacaagtacagttttagtgcaatagaatttaaaattggtggtagacaaatagctatttcattgtaggctcttgagtaccttgcttaacaactggaaatga

SEQ ID NO: 364191 - DNA, 120 bp, Artificial Sequence
  ENSG00000140945_73 (sequence is synthesized)
agaatatggaaacaactgatctaaactgatcagatgcagtcgggtgtgatggctcatgcctgtaatctcaccactttgggaggccgaggaggatggatggcttgaggccagaagttcaag

SEQ ID NO: 364192 - DNA, 120 bp, Artificial Sequence
  ENSG00000140945_74 (sequence is synthesized)
accagtctgggcaacctggtgaaaccccatctctactaaagttacaaaacttagctgggcatggtggcatatgcctatagtcccagctacgcgggaggctgcggcagaagaatcgcttta

SEQ ID NO: 364193 - DNA, 120 bp, Artificial Sequence
  ENSG00000140945_75 (sequence is synthesized)
agctgatcatacgctccaaggtcttttcaaggaaggtgattccacattggctcttatggtctcaggtttacgttccacgctagctaagttcctttagtcctatgctatgtggctgacaag

SEQ ID NO: 364194 - DNA, 120 bp, Artificial Sequence
  ENSG00000140945_76 (sequence is synthesized)
acaaaatgcagccgagaactccgctcgttctgtgcgttctcctgtcccagacaccagtgaggcctaccatatacctatgtcaaaacctgcaatttatcaaaaataaagcccgagatagta

SEQ ID NO: 364195 - DNA, 120 bp, Artificial Sequence
  ENSG00000140945_77 (sequence is synthesized)
ccatgagaaggaaatctgcagtagacaaagcaagatgcttagttaacagcagcaacccagtgcctgtaattttcaagtccttggaggcacaccatgtcacccaagtgaccttcagtgact

SEQ ID NO: 364196 - DNA, 120 bp, Artificial Sequence
  ENSG00000140945_78 (sequence is synthesized)
agtgcagccgcgtgcatgaatgaaaacgccgccgggcgcttctagtcggacaaaatgcagccgagaactccgctcgttctgtgcgttctcctgtcccagtagagacgggttttcaccgtg

SEQ ID NO: 364197 - DNA, 65 bp, Artificial Sequence
  ENSG00000140945_79 (sequence is synthesized)
tatcgtgccctttcaacagatgaagaaactgggccaaacaacccacctgcactgcatggttcccc

SEQ ID NO: 364198 - DNA, 120 bp, Artificial Sequence
  ENSG00000140945_80 (sequence is synthesized)
acccacctgcactgcatggttcccccagcaagaacatcccagtgagaatggcccacagatgcctgggcgtgacccacctgcagcttcaaccatgcaggctgaagtgcagtggcgtgatct

SEQ ID NO: 364199 - DNA, 120 bp, Artificial Sequence
  ENSG00000140945_81 (sequence is synthesized)
tcgtgcctcagcctcccaagtagccaggattgcagggccaagatgtctaaagttgaccttcagtctagtccaacatctggaaatgagtactaaagccaccagcacagacaaaaatggaga

SEQ ID NO: 364200 - DNA, 120 bp, Artificial Sequence
  ENSG00000140945_82 (sequence is synthesized)
ccaaccctatgactctgggttctggagaggtgaaagagcatctccaggtggctcaaaactgtggctccaggtactactcctccaggcgggctgctccctggggcacgtgttctcagtcca

SEQ ID NO: 364201 - DNA, 120 bp, Artificial Sequence
  ENSG00000140945_83 (sequence is synthesized)
ccagtgggccatgccgcatcagcccacctgcttcctggcacatgggatgcacagcccatgaccttggacccagcagtaggcagcatgctttccagttttgaaggcaaggacggaggcata

SEQ ID NO: 364202 - DNA, 120 bp, Artificial Sequence
  ENSG00000140945_84 (sequence is synthesized)
gaacacactgagtgatgagaaacttggcaaatcttgttggcaaatctctcaccttgattccctttggcatcctttgtgtctgtctgatccttccagcctggcctttggatagcaggtacc

SEQ ID NO: 364203 - DNA, 120 bp, Artificial Sequence
  ENSG00000140945_85 (sequence is synthesized)
cacttcttaggatgtgccagacaccacgtttcaagccacagtcgaggaaggagctgtgggagttattgtcaatttgacagttgaagataaggatgaccccaccacaggtgcatggagggc

SEQ ID NO: 364204 - DNA, 120 bp, Artificial Sequence
  ENSG00000140948_0 (sequence is synthesized)
ggcgatgagttcctgctgctgttcaccatggcctccaaccacccggccttcagcttccaccagaagcaggtgctgcgccaggagctcacgcagatccagagcagcctgaacggcggcggg

SEQ ID NO: 364205 - DNA, 120 bp, Artificial Sequence
  ENSG00000140948_1 (sequence is synthesized)
ggccacggcggcaagggcgcgcccgggccgggcggcgcgctgcccacttgcccagcctgccacaagatcactccaagaactgaggcccctgtcagcagtgtcagtaatagtttggagaat

SEQ ID NO: 364206 - DNA, 120 bp, Artificial Sequence
  ENSG00000140948_2 (sequence is synthesized)
gccctgcacacatcagcacattccacggaggagtcgctgcccaagaggcccttaggaaaacacagcaaagtgagtgttgaaaagatagacctgaagggattatcacacacaaaaaatgac

SEQ ID NO: 364207 - DNA, 120 bp, Artificial Sequence
  ENSG00000140948_3 (sequence is synthesized)
agaaatgttgaatgttcctttgaggtcttgtggtctgattcttcaataacatcagtaaccaaatcttcctctgaagtgacggaatttatttcaaagctatgtcagctctatcctgaagag

SEQ ID NO: 364208 - DNA, 120 bp, Artificial Sequence
  ENSG00000140948_4 (sequence is synthesized)
aacttggagaaactcattccttgcttagctggtccggacgcattttatgtggagcgaaaccacgtggatctggactcaggcctgaggtacctggcctcattaccttctcacgtgttgaaa

SEQ ID NO: 364209 - DNA, 120 bp, Artificial Sequence
  ENSG00000140948_5 (sequence is synthesized)
aatgaccatgtcaggaggtttctcagcacttcctctcccccacagcagcttcagagtccaagtcctggcaatccctccctttctaaagtaggtaccgtgatgggcgtgtctggaaggcct

SEQ ID NO: 364210 - DNA, 120 bp, Artificial Sequence
  ENSG00000140948_6 (sequence is synthesized)
gtgtgtggagtggctggtatcccgtcctcgcagagcggagcccagcaccacgggcagcacccggccggctccgccgcccccttgcctcactgctcccatgcgggcagcgcgggctcagcc

SEQ ID NO: 364211 - DNA, 120 bp, Artificial Sequence
  ENSG00000140948_7 (sequence is synthesized)
ctggcctaccggacccagatggacacatcacctgccatcctcatgccttccagtctgcagacccctcagacccaggagcagaatgggattctagactggcttaggaaactgcgtttgcac

SEQ ID NO: 364212 - DNA, 120 bp, Artificial Sequence
  ENSG00000140948_8 (sequence is synthesized)
aagtattaccccgtctttaagcagctctccatggagaagtttttgagccttactgaagaagatctgaataaatttgagtctcttaccatgggggcaaagaagaagctcaagacccagctg

SEQ ID NO: 364213 - DNA, 120 bp, Artificial Sequence
  ENSG00000140948_9 (sequence is synthesized)
gagctggaaaaggagaagtcagagagacggtgcctgaacccctcggccccgccgctggtcaccagcagtggtgtggctcgagtgccccccaccagccacgtcgggcccgtgcagtcgggg

SEQ ID NO: 364214 - DNA, 120 bp, Artificial Sequence
  ENSG00000140948_10 (sequence is synthesized)
cggggcagccatgcagcagagctgcgggtggaagtggagcagccccatcaccagctgccccgggaaggcagttcctcggagtactccagctcctcctccagccccatgggggtacaggcc

SEQ ID NO: 364215 - DNA, 120 bp, Artificial Sequence
  ENSG00000140948_11 (sequence is synthesized)
cgggaagagagctccgacagcgctgaggagaatgacagacgtgtggagattcacttggagagctctgacaaggagaagccggtgatgctgctgaatcacttcacttccagttccgccaga

SEQ ID NO: 364216 - DNA, 120 bp, Artificial Sequence
  ENSG00000140948_12 (sequence is synthesized)
cccacggcccaggttctccctgtgcagaatgaggccagctccaatccatcaggccaccaccccctgcccccgcagatgctgagcgcagcctcacacatcacacccatccgcatgctgaat

SEQ ID NO: 364217 - DNA, 120 bp, Artificial Sequence
  ENSG00000140948_13 (sequence is synthesized)
tccgtgcacaagccggaaagagggagcgcggacatgaagctcctctcgtcttctgtgcactcacttttgtctctagaagaaaggaataaaggatctggaccaagaagcagcatgaaagtg

SEQ ID NO: 364218 - DNA, 120 bp, Artificial Sequence
  ENSG00000140948_14 (sequence is synthesized)
gacaagagctttggcagcgccatgatggacgtgctgcccgcgtccgcaccccaccagcctgtgcaggtcctctctgggctttcggagagcagctccatgtcacccacagtctcctttggt

SEQ ID NO: 364219 - DNA, 120 bp, Artificial Sequence
  ENSG00000140948_15 (sequence is synthesized)
ccccggaccaaagtcgtgcatgcatccacgctggacagggtgctgaagacagcacagcaaccggccctggtcgtggagaccagcacggccgccacggggacgcccagcacagtcctccac

SEQ ID NO: 364220 - DNA, 120 bp, Artificial Sequence
  ENSG00000140948_16 (sequence is synthesized)
gccgcccgtccgcccatcaaactgctgctgtcgtcatctgttcctgctgattctgccatttctgggcaaacttcctgtcctaataatgtgcaaataagtgtgccccctgcaataataaac

SEQ ID NO: 364221 - DNA, 120 bp, Artificial Sequence
  ENSG00000140948_17 (sequence is synthesized)
ccccggactgctctgtacacagccaacaccaaagttgccttttctgcaatgagcagtatgccagtgggccccctgcagggtggcttctgtgcaaacagcaacactgcctctcccagcagc

SEQ ID NO: 364222 - DNA, 120 bp, Artificial Sequence
  ENSG00000140948_18 (sequence is synthesized)
cacccctccacgtcctttgccaacatggccacgttgcccagctgcccagcccccagctccagcccggcgctgtcctccgtccctgaaagcagtttctatagcagcagtggcggtggcggc

SEQ ID NO: 364223 - DNA, 120 bp, Artificial Sequence
  ENSG00000140948_19 (sequence is synthesized)
tccacaggaaacattcctgcctcgaatccgaaccaccaccaccaccaccaccatcagcagcccccggcacccccgcagcccgccccacccccgccaggctgcattgtgtgcacgtcctgt

SEQ ID NO: 364224 - DNA, 120 bp, Artificial Sequence
  ENSG00000140948_20 (sequence is synthesized)
ggctgcagcggcagctgcggctcgagtggcctgactgtcagctacgccaactacttccagcacccgttctccggtccgtccgtgttcaccttccccttcttgcccttcagtcccatgtgc

SEQ ID NO: 364225 - DNA, 120 bp, Artificial Sequence
  ENSG00000140948_21 (sequence is synthesized)
agcagcggctacgtcagcgcccagcagtacggcggcggctccaccttccccgtcgtgcacgccccttacagcagcagcgggaccccagaccctgtcctgagtgggcagtccacgtttgcc

SEQ ID NO: 364226 - DNA, 120 bp, Artificial Sequence
  ENSG00000140948_22 (sequence is synthesized)
gtgccacccatgcagaacttcatggcagggacagcaggggtgtaccagacccaaggactggtgggcagtagcaatggttccagtcacaaaaagagcgggaacctatcttgttacaactgc

SEQ ID NO: 364227 - DNA, 120 bp, Artificial Sequence
  ENSG00000140948_23 (sequence is synthesized)
ggggccactggtcaccgcgcccaggactgcaaacagccgtccatggacttcaaccggccaggtacttttaggttgaaatacgcccctccagcagaaagtctggactccacagattgatat

SEQ ID NO: 364228 - DNA, 120 bp, Artificial Sequence
  ENSG00000140948_24 (sequence is synthesized)
ttttctctggcaacagaacgttattaagccatggagacataaggaaaattaaatacaaaactgagaagtctagttgctgttgagcttaatctttttaatccaaaggtgctttacttttcc

SEQ ID NO: 364229 - DNA, 120 bp, Artificial Sequence
  ENSG00000140948_25 (sequence is synthesized)
tagactggatagaaaatctagcgtagaagtgcatcaaactcgatttattgccaaaaccctagattggagcttggtgtcagaactcgcctagtgggcatctctgtggctggtgagatcggc

SEQ ID NO: 364230 - DNA, 120 bp, Artificial Sequence
  ENSG00000140948_26 (sequence is synthesized)
cacctccacttttggttgcagtgcagagacgccatgtctcccgaagagcattgccatcactggccctcctaggctcacacgtcaattccagggcagctacacgtggtctgaatcgagaac

SEQ ID NO: 364231 - DNA, 120 bp, Artificial Sequence
  ENSG00000140948_27 (sequence is synthesized)
cgagcttggagttctccaagtggagttccacccgccggactcctgacacccctgggctagggaaaatgtcgactttgttttgttctgttcctaaagtgattagcactaatctctgggatt

SEQ ID NO: 364232 - DNA, 120 bp, Artificial Sequence
  ENSG00000140948_28 (sequence is synthesized)
agaacagtcagtgcaagagactccaataatccatattgaaagagtcagcaccagcagaggctactcgacttaggacgcaacagaggttttagtatttccttccctcctccaagcacttgt

SEQ ID NO: 364233 - DNA, 120 bp, Artificial Sequence
  ENSG00000140948_29 (sequence is synthesized)
agcagtttcaggtttttaatttttttctgcaaataaatctaaactacgttattaaatagaaatagtttactcgcaacaacttaatttctaagggtccaagtcccagagaatccatagtcg

SEQ ID NO: 364234 - DNA, 120 bp, Artificial Sequence
  ENSG00000140948_30 (sequence is synthesized)
tcaaagctttgagagtatctttcttcccagccagtcagtggctttgagccctatcttccactacaaatgacctctcgaggggggacggcgacagcgcggctctgtgagtggctgtgagga

SEQ ID NO: 364235 - DNA, 120 bp, Artificial Sequence
  ENSG00000140948_31 (sequence is synthesized)
tgctgcacgtcctcagcagagtttgcaagttgctttatctcccacgggctccccaagaacctccaaccccgaggcttatcgctagcggattcacacctgagacagacatttcaacaatga

SEQ ID NO: 364236 - DNA, 120 bp, Artificial Sequence
  ENSG00000140948_32 (sequence is synthesized)
tacagtcctgtcatttatcagcaaaagattgggaattttctcctgtcaacttcttttgtattaggctgtgtattgatagttaattccgttaaaaattacttggaaaacagtgggaagtgg

SEQ ID NO: 364237 - DNA, 120 bp, Artificial Sequence
  ENSG00000140948_33 (sequence is synthesized)
taggactctggaagaggccacacacccgagagctgcgagatctgtgcaagtctggttttggttaggtagtaataaaagtcctcactgtagatctctaaatttcaacccacggaaatgaaa

SEQ ID NO: 364238 - DNA, 120 bp, Artificial Sequence
  ENSG00000140948_34 (sequence is synthesized)
gccttttgtctgaaatttacggacttaaatcttcaaggttaaagggaattttctgctcaaataatactcttatcgaaaatgctaaagtcttcaatgttaaaatactgattggtaaaatct

SEQ ID NO: 364239 - DNA, 120 bp, Artificial Sequence
  ENSG00000140948_35 (sequence is synthesized)
tgcagttgggattttgcagttggatatttattttaaaaaaaattataatattcagactattcttaaaatgggacaatcagcctcatgaaaaattgatgtaaatcagaagaataccctaga

SEQ ID NO: 364240 - DNA, 120 bp, Artificial Sequence
  ENSG00000140948_36 (sequence is synthesized)
atgaggccttgtgatgtgagcgttcaatttgaagagcagttcctaacttcatagaaactaaagcagaaagttgttacattttttttatgacaggcttttagtagaattttttagttttat

SEQ ID NO: 364241 - DNA, 120 bp, Artificial Sequence
  ENSG00000140948_37 (sequence is synthesized)
tttagttgaattttatttctatgcaatgcagaattaacagacctcttctcctcatggtacacagtattacagtgttgaagtaatggtgatgcttattacaacagctatttaggggaatgt

SEQ ID NO: 364242 - DNA, 120 bp, Artificial Sequence
  ENSG00000140948_38 (sequence is synthesized)
tacgttgatctcttaaattgtaaacactacaaaatgtcaaaataatgagaactgacacaactttgccttaaagagtactagactggaccttctcatattacgtttaaggaagacttagag

SEQ ID NO: 364243 - DNA, 120 bp, Artificial Sequence
  ENSG00000140948_39 (sequence is synthesized)
tgttcattgatgtttacgattttaatatttctgaaggccattacagtggcctggatatgtgctgaaagccaaacttttaaattttttggtttttttaagcaaagaaatattttaaataaa

SEQ ID NO: 364244 - DNA, 120 bp, Artificial Sequence
  ENSG00000140948_40 (sequence is synthesized)
tcctatttcaacactgaaattgttgaaaaccgtctcataacaaaaggaaaaaacattggaatttttgttttagtggtcagtataggggaatgaaagcgtctgttgttacccacgtaacta

SEQ ID NO: 364245 - DNA, 120 bp, Artificial Sequence
  ENSG00000140948_41 (sequence is synthesized)
ttttgataagtattagaggttaaccttaaatccagcaaaacattaaaacagaaacttttcaacttggagcctgccattcagcgttgaggtagatgagttccgacactgtcacggctgtgt

SEQ ID NO: 364246 - DNA, 120 bp, Artificial Sequence
  ENSG00000140948_42 (sequence is synthesized)
tcccagcagcgaaggcctctgcggagctgccagtcgtcttgaacgtgcatgggcggcgtgtgacatctccagggaggccgtccgaagtcgagaatcgtcagctgtaagtaggagctacac

SEQ ID NO: 364247 - DNA, 120 bp, Artificial Sequence
  ENSG00000140948_43 (sequence is synthesized)
agcgcagagaaaatggaaccacccatccgtgaggcctctttccggagggagccgcacacttggacttgagagtttgccagcagcgagctcggatgcatctctccaaaagccaccaaggtc

SEQ ID NO: 364248 - DNA, 120 bp, Artificial Sequence
  ENSG00000140948_44 (sequence is synthesized)
ggcgcgtctgaagagcgttttgcggtcatcagacttcctcatctgaaaacacagaacatactgaccctttcaagtacttagtcattttcctgaaagtgtggtctgtttcagaatgctgtg

SEQ ID NO: 364249 - DNA, 120 bp, Artificial Sequence
  ENSG00000140948_45 (sequence is synthesized)
gcaaccaggtaggtgtggcactggccatgtgccacgtctttgccctttgtagtctgtcagatattaaagtttctaaccctgtttttttaatctccaagaatggggaaagtggaatgtaga

SEQ ID NO: 364250 - DNA, 120 bp, Artificial Sequence
  ENSG00000140948_46 (sequence is synthesized)
gatggaagcagaacgtgatgtttggatacaacagctatttaatccttttttattttttaagcaaaacactcagttttctaccttattttctaatgttgatttcatggtaatactgacagt

SEQ ID NO: 364251 - DNA, 120 bp, Artificial Sequence
  ENSG00000140948_47 (sequence is synthesized)
tggaagtgtttaacataaaaactcattgctaaagagcactgaggaaatgggagctagcgcacttgtaataaaaataaagacaaaatattttcttgaatgcatatatgtgattgggtattt

SEQ ID NO: 364252 - DNA, 120 bp, Artificial Sequence
  ENSG00000140948_48 (sequence is synthesized)
taaaaaccagtatcatctgtcatctccaaaagattacaggagtcagcttgttaatacagtagtgttagtaggttctgtatttttaattcagtacttagaattctaggtcctttattgccc

SEQ ID NO: 364253 - DNA, 120 bp, Artificial Sequence
  ENSG00000140948_49 (sequence is synthesized)
aaagtcagcacagttagtttataccacagactctgtcttggggcacagtagtggggcggggtagtgactttgcctaaacatcacccagctggaacagaggctgagcggggctttaggcac

SEQ ID NO: 364254 - DNA, 120 bp, Artificial Sequence
  ENSG00000140948_50 (sequence is synthesized)
ttgccagatgggaactgggttgcaccctccttgctccctgtcattttcttgtcactcttcctgcttcccagtgttttattttatgccttgctcgttgtacatcatgatgactgatggtct

SEQ ID NO: 364255 - DNA, 120 bp, Artificial Sequence
  ENSG00000140948_51 (sequence is synthesized)
tcaaggttgtgaggaaagccgtctccctgcttgactcgactgctgtcccagaggagagtcctgtgcgacctgagcgggggtggctgccatttccagcatgcaggtgacttccaaagaatg

SEQ ID NO: 364256 - DNA, 120 bp, Artificial Sequence
  ENSG00000140948_52 (sequence is synthesized)
agtcaggtggcactgaaagccatgggttctgaagaggcgaatttgttgaaaagtcccaagggtctgaatgaaagcatctttaatcaacactcaacactcgcaatattctagaaaaccata

SEQ ID NO: 364257 - DNA, 120 bp, Artificial Sequence
  ENSG00000140948_53 (sequence is synthesized)
tactgtgctggttgaggccaaaggttaacattgctccactgttcaccaaggaagggggcagtggccatccgccgcggcctcacgtgcgttgtaacaagccctcatcacatgtgtgagtct

SEQ ID NO: 364258 - DNA, 120 bp, Artificial Sequence
  ENSG00000140948_54 (sequence is synthesized)
tacgtgcacaaaaagagaaggctttggtactgaaactggacaccttgtgtactcgataccttcacagcttctattggacatattttctttttaggaatgaaggaaaattctcccattttt

SEQ ID NO: 364259 - DNA, 120 bp, Artificial Sequence
  ENSG00000140948_55 (sequence is synthesized)
gagccattcttttgtcaattctacaaaattgcatgtaactttataaatatttttaaaagatatagttttgtaaatatttaatattccgctaatttgattttgaattgtaaatgtcaagta

SEQ ID NO: 364260 - DNA, 120 bp, Artificial Sequence
  ENSG00000140948_56 (sequence is synthesized)
ttctgtttttggggtttttatgttttattatactttgttaaaaaggacaaattgtacatttttagaatgtttttatgagtaaatttaatgtactgaaaataaaaattttaaaaaaggctg

SEQ ID NO: 364261 - DNA, 120 bp, Artificial Sequence
  ENSG00000140948_57 (sequence is synthesized)
aaggtggttggggagggagggcagtcatagcacagcagtgttggcagttcagggtggcctgtgacaacagggccggccaagaggcagaggctggcacagaaaggcctggaagtgaggtct

SEQ ID NO: 364262 - DNA, 80 bp, Artificial Sequence
  ENSG00000140948_58 (sequence is synthesized)
acttctgctgatcccggccgcccgtcagccgcgagcgcgacgatccctccgctcctcggccggcgcctcctccgccgtcg

SEQ ID NO: 364263 - DNA, 80 bp, Artificial Sequence
  ENSG00000140948_59 (sequence is synthesized)
gcaagtcccggccggatccctccgcgcctcccgccgcgcgtccctccccctccagcgtccgtttcgcggccgcggccccc

SEQ ID NO: 364264 - DNA, 80 bp, Artificial Sequence
  ENSG00000140948_60 (sequence is synthesized)
cagaccctgcggcgcggggggagatgggggcggccgcctcccgggcgacgacgacgacgacgacgaggagcagccgccgc

SEQ ID NO: 364265 - DNA, 120 bp, Artificial Sequence
  ENSG00000140948_61 (sequence is synthesized)
gcggtccccggccccgggtcgcggcgcggcgcgggcggcagcatggtggagaagcgctgcccgctgcagagggacggcgtgtaccgctggttctcggagctgccgtcgccgcagcgcgtg

SEQ ID NO: 364266 - DNA, 120 bp, Artificial Sequence
  ENSG00000140948_62 (sequence is synthesized)
gagctgccgtcgccgcagcgcgtggagttcctgtgcggcctgctggacctgtgcatcccgctcgagcttcgcttcctcggctcgtgcctggaggacctggcccgcaaggactaccactcg

SEQ ID NO: 364267 - DNA, 120 bp, Artificial Sequence
  ENSG00000140948_63 (sequence is synthesized)
ctgcgcgactcggagatcaaggccaacaacccggccgacctgggcagcctcaccaacctgacggacgaggtggtgcgcagcaagctgctggtgtcgctggcgctgctgggctcggagcag

SEQ ID NO: 364268 - DNA, 120 bp, Artificial Sequence
  ENSG00000140948_64 (sequence is synthesized)
gacttcaaccggccaggtaagcgcgcgccatggccgcgcccaccaggctcccgcaggaccagtgcacacaaatgcttggtttttatgaagagtaaacttctttctttgtaaagcaaataa

SEQ ID NO: 364269 - DNA, 120 bp, Artificial Sequence
  ENSG00000140950_0 (sequence is synthesized)
ctcgagaggagcccgtgggctgctggaccggaccggacagcaccaggaagcccggcaggagaattctgccagatatcaggacagatggggaacagcagaagccgtgtggggcggagcttt

SEQ ID NO: 364270 - DNA, 120 bp, Artificial Sequence
  ENSG00000140950_1 (sequence is synthesized)
tgttcacagtttcttcctgaggaacaggcagagattgatcaattgtttgatgctctgtcatcagataaaaacagcccgaatgtctcatccaaatccttctctctgaaggcactacagaac

SEQ ID NO: 364271 - DNA, 120 bp, Artificial Sequence
  ENSG00000140950_2 (sequence is synthesized)
cacgtcggggaagctcttcccccagagatggtcaccaggctgtatgatggcatgcggagggtcgacctgacagggaaggcgaagggacccagtgagaacgtgtcccaggagcagttcaca

SEQ ID NO: 364272 - DNA, 120 bp, Artificial Sequence
  ENSG00000140950_3 (sequence is synthesized)
gcatccatgtcccacctgttgaaaggaaactccgaggagaagagtctcatgattatgaaaatgatttctgccacagaaggtcccgtgaaggccagagaagtccaaaagtttacagaggat

SEQ ID NO: 364273 - DNA, 120 bp, Artificial Sequence
  ENSG00000140950_4 (sequence is synthesized)
ctggttggctctgtggtgcacgtgctaagccacagacaggagctgagaggctggactgggaaggaagccccagggcccaacccccgggtgcaggtgctggctgctcagctgctctctgac

SEQ ID NO: 364274 - DNA, 120 bp, Artificial Sequence
  ENSG00000140950_5 (sequence is synthesized)
atgaagctgcaagatggcaagagacttctggggccccagtggctggactatgactgtgaccgagctgtgatcgaggactgggtgttcagggtcccccatgtggccatattcctgagtgtg

SEQ ID NO: 364275 - DNA, 120 bp, Artificial Sequence
  ENSG00000140950_6 (sequence is synthesized)
gtcatttgcaagggctttctcatcctgtgctcgtctcttgatctgactaccctggtccctgagcgtcaagtggaccagggcaggggttttgagagcatcctggatgtcctctctgtcatg

SEQ ID NO: 364276 - DNA, 120 bp, Artificial Sequence
  ENSG00000140950_7 (sequence is synthesized)
tacatcaacgcccagctgcctcgggagcagcggcaccgctggtgcctgctcttttcgtctgagctccatggacacagcttctcccagctctgtggccacatcactcaccggggaccctgt

SEQ ID NO: 364277 - DNA, 120 bp, Artificial Sequence
  ENSG00000140950_8 (sequence is synthesized)
gtggctgtcctcgaggaccatgacaagcatgtgttcggtgggtttgcctcttgctcttgggaggtgaagcctcagtttcaaggggacaacagatgcttcctgttctccatctgccccagc

SEQ ID NO: 364278 - DNA, 120 bp, Artificial Sequence
  ENSG00000140950_9 (sequence is synthesized)
atggctgtgtacacacacacgggctacaacgaccactacatgtacttgaaccatggacagcagacgatcccgaacggactgggtatgggggggcagcacaattactttgggctttgggtg

SEQ ID NO: 364279 - DNA, 120 bp, Artificial Sequence
  ENSG00000140950_10 (sequence is synthesized)
gatgttgattttgggaaaggacacagcagagccaagcccacgtgcaccacgtacaacagcccgcagctgtcggctcaggagaacttccagtttgataagatggaggtgtgggcggttgga

SEQ ID NO: 364280 - DNA, 120 bp, Artificial Sequence
  ENSG00000140950_11 (sequence is synthesized)
gacccctcagaggagcagttggccaagggcaacaagagcatcctggatgcggaccctgaggcccaggccctgctggagatcagtgggcattcgcgccacagcgaagggctccgggaagtc

SEQ ID NO: 364281 - DNA, 120 bp, Artificial Sequence
  ENSG00000140950_12 (sequence is synthesized)
ccggacgatgaatgaggagccgcctgagccttcctggagccaggacctggattcctctgggtagagggcaacgcctgcagcccctcttccctcccacatggtttaactgtaatagcgtac

SEQ ID NO: 364282 - DNA, 120 bp, Artificial Sequence
  ENSG00000140950_13 (sequence is synthesized)
cgcacgggtcacagcctggtagtcccacatgtgccaagaagacgccctctgaagccatgtcctgactcatgggtggatctcccagaaatagatgttttttaagttttctttttttcccta

SEQ ID NO: 364283 - DNA, 120 bp, Artificial Sequence
  ENSG00000140950_14 (sequence is synthesized)
cagggtcaccctcaggatctctccaagaaatcttgtgtcaaattagtaactcagtcttatactttgttcttttttaccaacgaaatcctaagcagctgagacctttcagacccccgctgg

SEQ ID NO: 364284 - DNA, 120 bp, Artificial Sequence
  ENSG00000140950_15 (sequence is synthesized)
cattagggaattccgctggcattagggaattccgctggcattagggaattccgctggcattagggaattccgctggcattagggaattccgctggcattagggaattccgctggcattag

SEQ ID NO: 364285 - DNA, 120 bp, Artificial Sequence
  ENSG00000140950_16 (sequence is synthesized)
ggaattccgctggcattagggaattccgctggcattagggaattccgctggcattagcattgctgggatctcaacttctctattgaggagggggttcctcccgctggggttcatatggcc

SEQ ID NO: 364286 - DNA, 120 bp, Artificial Sequence
  ENSG00000140950_17 (sequence is synthesized)
tcactcaggccatccctgttagaaggtggtacctgatggtctgttctgacgggtgagggacagaggcatctggatgaaaatctcgacgctttctgggaacagcttccaatggcatgggag

SEQ ID NO: 364287 - DNA, 120 bp, Artificial Sequence
  ENSG00000140950_18 (sequence is synthesized)
ttctgtatttaaaagcatgaactgtgtataaaatggggaaatggaggcaggagactttgaggtaacatggtctggtggtggcatgagtcctcagaaggtatttgtaataaggttccacac

SEQ ID NO: 364288 - DNA, 120 bp, Artificial Sequence
  ENSG00000140950_19 (sequence is synthesized)
ccagctctctcagctgtttttaaatgaatgtgtgtgaggaacagatgggaaagttgggagatctgtctacagagaagcaaagttgtggttctcttgctaacttcaaggtgagggacattg

SEQ ID NO: 364289 - DNA, 120 bp, Artificial Sequence
  ENSG00000140950_20 (sequence is synthesized)
ggaaccagcacctgagtcacagctgtctaggcctcggtgctggcctgggttctagatctctgggaaccagtgcctgagtcacagctgtcagtgcagccatttgcccagggctgctcccga

SEQ ID NO: 364290 - DNA, 120 bp, Artificial Sequence
  ENSG00000140950_21 (sequence is synthesized)
gggggatgatgggaaattcagcagtgtagactgactttaaacaagctccggtgatcctgaaatgctgaagatcgtgtaggtgggttgtggggtcagcagagctgccatctgcccacgtct

SEQ ID NO: 364291 - DNA, 120 bp, Artificial Sequence
  ENSG00000140950_22 (sequence is synthesized)
ggaaaacaacacacggtgagtcaccggttggccatgagatctccccacttaaaggtgctgtgagcttgtctctaagatatatacctcttccttttgtcttttgctgtaagctttgacctt

SEQ ID NO: 364292 - DNA, 120 bp, Artificial Sequence
  ENSG00000140950_23 (sequence is synthesized)
ttgcagatctgatgaaaatacaacctcttattgtatagtttgccttgattataagccatagtaaatcgagctgttcgcatttttgcaggccttgcattttctactgggaggttcatcaaa

SEQ ID NO: 364293 - DNA, 120 bp, Artificial Sequence
  ENSG00000140950_24 (sequence is synthesized)
ccttccacttagcaatagccctgactcaggcagaatgcctcataaattagccttcgaaagaaaagtgcacgctcagacagtgtgtggaggggcaggagcgtgatgcagacaaggacttag

SEQ ID NO: 364294 - DNA, 120 bp, Artificial Sequence
  ENSG00000140950_25 (sequence is synthesized)
tcatgactgattttccttagccagtttgtaatggcttatggggaacattgtgagcttcctacctgacatgttggcagaagtagaatattaggatcctcaagcatctctaccgtaagtcca

SEQ ID NO: 364295 - DNA, 120 bp, Artificial Sequence
  ENSG00000140950_26 (sequence is synthesized)
aagaatttaggtccctattgtcactttgttttgcaatgttttttataaaaatgcaattaaatacctcactattaaactgccatgatgcctcagttaaaaaaaaaattaaatgtccgtcag

SEQ ID NO: 364296 - DNA, 120 bp, Artificial Sequence
  ENSG00000140950_27 (sequence is synthesized)
tgtctgtgccttggtgaccattgattgctgcttctgcccaggccgctgcaaaggttaggactttgtccactcacatgctttccaccctgagcttgttctaaggagagtgcagatcacgaa

SEQ ID NO: 364297 - DNA, 120 bp, Artificial Sequence
  ENSG00000140950_28 (sequence is synthesized)
tgcacctgcttccaggcagtgcacttagagaaaggtcactggcccgggcttgggagcctgggggatgcagctctctctgtgggcttctcttggtgcacggttctgcctctggacactcaa

SEQ ID NO: 364298 - DNA, 120 bp, Artificial Sequence
  ENSG00000140950_29 (sequence is synthesized)
acctttttagggcgtgtgcagggctggggccagtggacctgacagtaccttacctggctctgagaaactcgcaatcctagtttgcacaaatgaatagtttgttcttttgtgaaaccagaa

SEQ ID NO: 364299 - DNA, 120 bp, Artificial Sequence
  ENSG00000140950_30 (sequence is synthesized)
tgagaattcaggttctaaggactagaggtctccctacaaatgaagacttatcagggccctagaaagtgctaggaggaaggggttaaaaaaaaaatttgtccgcgttgcaaactattataa

SEQ ID NO: 364300 - DNA, 120 bp, Artificial Sequence
  ENSG00000140950_31 (sequence is synthesized)
aaaaaatttgtccgcgttgcaaactattataaatgattgccacattgcaagctattattttctcccaccatattttttaattaaaaaaaagtctggggccgggtgcggtggctcacgcct

SEQ ID NO: 364301 - DNA, 84 bp, Artificial Sequence
  ENSG00000140950_32 (sequence is synthesized)
gggcaacaagagtgaaactccgtttcaagaaaaaaaaaaaggctgggtgcttgaggcaggccgattgcttgagcccaggagttc

SEQ ID NO: 364302 - DNA, 87 bp, Artificial Sequence
  ENSG00000140950_33 (sequence is synthesized)
ttaaccaggcatggtaacacatgtgaggatcatttaggcctggaaggttgaggctgctataagctgtgattgtgccactgcactcca

SEQ ID NO: 364303 - DNA, 120 bp, Artificial Sequence
  ENSG00000140950_34 (sequence is synthesized)
tccagcctgggcaacacagcaagaccctatgtttaaaaaaaattgtgtacctggtttagaaaaaaaagataaaaggatacaacttaaagtcagtcatcttcctgcctcttctccagctat

SEQ ID NO: 364304 - DNA, 120 bp, Artificial Sequence
  ENSG00000140950_35 (sequence is synthesized)
ttctccagctattttccctcctgacaggcaaaggcactgatgcaaaaatcactcaggtctcctccctgtgacttggtgcacacctgggcatcactgtcttttacacactgatgtgtccct

SEQ ID NO: 364305 - DNA, 120 bp, Artificial Sequence
  ENSG00000140950_36 (sequence is synthesized)
cgctttcttttttaaagggaggtccgtaaccacccacctgcctccctcttgtctttatggactgcgtgatgtcccaccatatggatgctctcgggcctagcgttccaccgtctgcagctg

SEQ ID NO: 364306 - DNA, 120 bp, Artificial Sequence
  ENSG00000140950_37 (sequence is synthesized)
gggaacattttgtttgcagctaatcattgtcatgaatatcgtttatgtgtgccttgctgtgatggtgtctgtgggataaactcttagaattggaattgttggattgagaggtatatgcct

SEQ ID NO: 364307 - DNA, 120 bp, Artificial Sequence
  ENSG00000140950_38 (sequence is synthesized)
tttatttagatatagatgaattaaaaaaacctcttgagctcaatttatactcaatataccggggtgcctgtttgccatgttttcagcaaaactgtattaaaatatgtttttttaacctga

SEQ ID NO: 364308 - DNA, 120 bp, Artificial Sequence
  ENSG00000140950_39 (sequence is synthesized)
agtggcccattttctcttggcaggcaaggttgtgcggatatgagtgtccagtctccagcttcgtgggtgcctggaggcaggtgcggagagaattctgccagatatcaggacagatgggga

SEQ ID NO: 364309 - DNA, 120 bp, Artificial Sequence
  ENSG00000140950_40 (sequence is synthesized)
taaaaaaaaaaaccttgtggcaaatcactttgcaaagcagacttactttataaatatgttgcccttttgttttaaagccagattttaaagtacagcttgaaaataggttatatttcagaa

SEQ ID NO: 364310 - DNA, 120 bp, Artificial Sequence
  ENSG00000140950_41 (sequence is synthesized)
gttagtttagatgaggtatttggaacttggaaagaattttacaagtaagtatcagtaattcgtcttatgggtaaactgttcatccatctagaatcagtatgttttaaaagaagaatcatg

SEQ ID NO: 364311 - DNA, 120 bp, Artificial Sequence
  ENSG00000140950_42 (sequence is synthesized)
aaaataaaaattaaagttttcagtgaagtagaaaaggtaattcagacgattaaaattatccttaagatttcaagtaatatataggtaatgagaaatgaaactgtttgaaaaataaataga

SEQ ID NO: 364312 - DNA, 120 bp, Artificial Sequence
  ENSG00000140950_43 (sequence is synthesized)
aatgataggaattttgaattatcagaagttgggagtacttttacatttcctgcttaataaaatgggcctgagttacacaaaatatttcagcttagtcaaattttcgctaggttgggaatt

SEQ ID NO: 364313 - DNA, 120 bp, Artificial Sequence
  ENSG00000140950_44 (sequence is synthesized)
ataatctctgtaaatggggcctttgtgtcagcaagagcttaagacgtaaaagctcctctgttccttgtaataaccgagcggggcaggttctggccttacctccattttatacctgaggaa

SEQ ID NO: 364314 - DNA, 120 bp, Artificial Sequence
  ENSG00000140950_45 (sequence is synthesized)
actgaggcacagaggtccagaccttggcaaggtcatgctgttcctgagctcgggtttgaagccagctgttcgagtcccaggtgtgtgctcccacgctcttactgtcacctccactcttag

SEQ ID NO: 364315 - DNA, 120 bp, Artificial Sequence
  ENSG00000140950_46 (sequence is synthesized)
tgggtgagggatggaaaatagggctccaagtgctgtatgattaagcctgattagtggcgaatgaaacccgcacttcccagataaactgcaggagtcccaggaagtgccctaccagcccct

SEQ ID NO: 364316 - DNA, 120 bp, Artificial Sequence
  ENSG00000140950_47 (sequence is synthesized)
tgactggctgggaacattccccttccagtgaccttggcaggaccgacgcccttggatgagcggctccaggtgtagctcaggcatttattccagccccattgccagggcactgccatctcg

SEQ ID NO: 364317 - DNA, 120 bp, Artificial Sequence
  ENSG00000140950_48 (sequence is synthesized)
aggggttctgaaatgctgcttggagaggagagaaaagtgttgaagtcggattgtttagatcagtgctggccaatagacaaagcaagccccatgtgaaattttcccttttctagggaccat

SEQ ID NO: 364318 - DNA, 120 bp, Artificial Sequence
  ENSG00000140950_49 (sequence is synthesized)
gttaaaagagtaaagagaaacaggggaaaactgattctaataatatgtcctaaatacaattttgaaatgtaatgaatatttaaaaattgagatattttacattcttttttcataccaaat

SEQ ID NO: 364319 - DNA, 120 bp, Artificial Sequence
  ENSG00000140950_50 (sequence is synthesized)
cacctctcaattcacacgagccctgttttctgtgctcagtaattgcatgtgactcgtggctcccacactgatcagtgtgggtttagatagtagctaaatggtgacataacagccccacta

SEQ ID NO: 364320 - DNA, 120 bp, Artificial Sequence
  ENSG00000140950_51 (sequence is synthesized)
gagtggcacagcacgggcaaagagctctggagaaagggagagggtgggggtgctaaatagggctctcccatcttctccaagtgtttctctagacgcagtcggggcgataggaaaatgtga

SEQ ID NO: 364321 - DNA, 120 bp, Artificial Sequence
  ENSG00000140950_52 (sequence is synthesized)
tgctgctctatggtgtttatcacatcagagttcttcaggacaggccgtgtgacccccagttttcaggcgaggacacgggcccagttattacacggtgccgggtctatggggcgtgggaga

SEQ ID NO: 364322 - DNA, 120 bp, Artificial Sequence
  ENSG00000140950_53 (sequence is synthesized)
agtcaagccacagatgcctccgaggggaccaggagatggtaattggttcagatcggacattttccttccctgggccttcctgcccctgcccccaccgccacgcgtttgcttgttggaatt

SEQ ID NO: 364323 - DNA, 120 bp, Artificial Sequence
  ENSG00000140950_54 (sequence is synthesized)
tggaagctttgtgcatgaccttgaatgcactggatgaaaggttctaagtaaattcttttccttccctcaaggaagaatactctgatgaaaagagtcctttaaaaatatttaaaacacagg

SEQ ID NO: 364324 - DNA, 63 bp, Artificial Sequence
  ENSG00000140950_55 (sequence is synthesized)
tctgatgaaaagagtcctttaaaaatatttaaaacacaggccaggtgcagtggctcacacctg

SEQ ID NO: 364325 - DNA, 83 bp, Artificial Sequence
  ENSG00000140950_56 (sequence is synthesized)
gagaggagcccgtgggctgctggaccggaccggacagcaccaggaagcccggcttgtgatcttggctcactgcgacctctgcc

SEQ ID NO: 364326 - DNA, 120 bp, Artificial Sequence
  ENSG00000140950_57 (sequence is synthesized)
tcctggttcaagcgatcttcccacctcagcctcctgaatagctggaactatagtcacacgccaccacacccggctgagagaattctgccagatatcaggacagatggggaacagcagaag

SEQ ID NO: 364327 - DNA, 120 bp, Artificial Sequence
  ENSG00000140950_58 (sequence is synthesized)
tgatctgtcatgtccagaatggtttattcctagtcagatatgtttttagtttacagaggatctggttggctctgtggtgcacgtgctaagccacagacaggagctgagaggctggactgg

SEQ ID NO: 364328 - DNA, 120 bp, Artificial Sequence
  ENSG00000140950_59 (sequence is synthesized)
ccgtgggctgctggaccggaccggacagcaccaggaagcccggcagggacagtgagctgataactgttcccaggccatgtaggtggccagcacaggacaggtcaccttctggcccacagg

SEQ ID NO: 364329 - DNA, 120 bp, Artificial Sequence
  ENSG00000140950_60 (sequence is synthesized)
aacttcttgcccaggctcaagctgccccttcgcacaagggcctctgggctctgagacacagacaggacttcgaagcctgtccagatgaggcagttggaatctccccagcttgtggggaga

SEQ ID NO: 364330 - DNA, 120 bp, Artificial Sequence
  ENSG00000140950_61 (sequence is synthesized)
tcgtgtgtctcttgaaccacgtccctcctgactgccctcccagagatggggagacagacgcggtgatgggtctgccctcctggactcgtcggtccaggaaccatgacgtgtcaggtgcac

SEQ ID NO: 364331 - DNA, 120 bp, Artificial Sequence
  ENSG00000140950_62 (sequence is synthesized)
ctgaaaagttggttttctgtaaagggccagatgtgacctagttttggctttgtgagctatgcggtctctgttgtagctcctctgctctgccgttactgtgtgaaaatagccatagacagt

SEQ ID NO: 364332 - DNA, 120 bp, Artificial Sequence
  ENSG00000140955_0 (sequence is synthesized)
gtgctccccacgtgaaggcacccgccctgcgcgtgtgaaagggcgagagcagcgcgagatagggcctagcgcctcagatcttcgttggcggccatggcttcggcttctcagggcgctgac

SEQ ID NO: 364333 - DNA, 120 bp, Artificial Sequence
  ENSG00000140955_1 (sequence is synthesized)
gacgacggcagtcgtaggaagccccgcctggctgcatcgttgcagatcagcccccagccccgcccctggcgaccgctacccgcccaggcccaaagtgcctgggggcccgcgcccgcgccc

SEQ ID NO: 364334 - DNA, 120 bp, Artificial Sequence
  ENSG00000140955_2 (sequence is synthesized)
gcgacgtatcgcgcggagggcgggtggccccaggtctcggtgttgagggacagtgggcctggggcaggggccggagtcggggaactgggggcagcccgggcgtgggaaaacttgggggaa

SEQ ID NO: 364335 - DNA, 120 bp, Artificial Sequence
  ENSG00000140955_3 (sequence is synthesized)
cagatggggaaggccccgagggtccctgtgcccccagcagggctcagcctgccgctcaaagacccacctgccagccaggccgtgtccttgctcacggagtacgcggccagcctgggcatc

SEQ ID NO: 364336 - DNA, 120 bp, Artificial Sequence
  ENSG00000140955_4 (sequence is synthesized)
ttcctgctcttccgggaggaccagccaccaggaaaagtgttcaaatatagagcccctggaggagaggaattgaaagcaatgtgtctgtggcaggtggaagtgctcagagccttcctcctg

SEQ ID NO: 364337 - DNA, 120 bp, Artificial Sequence
  ENSG00000140955_5 (sequence is synthesized)
agaacagggtggcgtgggctctggagaggggacctggatttgggtcctgactcaagttgggcaaaccgcctgccgtttctgctcatctgtgaaatggagtcacgcatccctgctgtggag

SEQ ID NO: 364338 - DNA, 120 bp, Artificial Sequence
  ENSG00000140955_6 (sequence is synthesized)
gagttgggtccctgcttccccttctcggtgagcgcggaactggatggggtggtctgccctgcgggcactgcgaatagcaagacggaggccaaacagcaggcagcgctctctgccctctgc

SEQ ID NO: 364339 - DNA, 120 bp, Artificial Sequence
  ENSG00000140955_7 (sequence is synthesized)
tacatccggagtcagctggagaacccagagtccccccagacctccagccggcctccactggcccccctgagcgtagagaacatcctgacccatgagcagcgctgcgcagcgttggtgagc

SEQ ID NO: 364340 - DNA, 120 bp, Artificial Sequence
  ENSG00000140955_8 (sequence is synthesized)
gccggctttgacctcctgttggacgagcgctcgccatactgggcctgtaaggggactgtggctggagtcatcctggagaggggctgggccgtctctgccccctcctgcacagagatcccg

SEQ ID NO: 364341 - DNA, 120 bp, Artificial Sequence
  ENSG00000140955_9 (sequence is synthesized)
gccaggggccacgtgaaggagatctacaagctggtggctctgggcaccggcagcagctgctgtgctggctggctggagttctcgggccagcagctccacgactgccatggcctggtcatc

SEQ ID NO: 364342 - DNA, 120 bp, Artificial Sequence
  ENSG00000140955_10 (sequence is synthesized)
gcccgcagggccctgctgaggttcttgttccggcagctcctgctggccacacaggggggccccaagggcaaggagcagtccgtgctggccccccagccagggcccggacccccattcacc

SEQ ID NO: 364343 - DNA, 120 bp, Artificial Sequence
  ENSG00000140955_11 (sequence is synthesized)
ctcaagccccgcgtcttcctgcacctctacatcagcaacacccccaagggcgcggcccgtgacatctacctgccccccacctcggaaggtggcctcccgcacagcccacccatgcgcctg

SEQ ID NO: 364344 - DNA, 120 bp, Artificial Sequence
  ENSG00000140955_12 (sequence is synthesized)
caggcccatgtgctcgggcagctgaagcctgtgtgctacgtggcgccctcgctctgtgacacccacgtgggctgcctgtcagccagtgacaagctggcacgctgggccgtgctggggctg

SEQ ID NO: 364345 - DNA, 120 bp, Artificial Sequence
  ENSG00000140955_13 (sequence is synthesized)
ggtggtgccctgctggcccacctggtgtccccactctacagcaccagcctcatcctggctgactcatgccacgaccctccgactctgagcagggccatccacacccggccctgcctggac

SEQ ID NO: 364346 - DNA, 120 bp, Artificial Sequence
  ENSG00000140955_14 (sequence is synthesized)
agtgtcctggggccatgcctgccacctccctacgtccggaccgccctgcacctgtttgcagggcccccggtggccccttccgaacccacccctgacacctgccgtggcctgagcctcaac

SEQ ID NO: 364347 - DNA, 120 bp, Artificial Sequence
  ENSG00000140955_15 (sequence is synthesized)
tggagcctgggggaccctggcatcgaggttgtggatgtggccaccgggcgtgtgaaggccaatgccgccctggggcctccctcccgtctctgcaaggcctcctttctccgggcctttcac

SEQ ID NO: 364348 - DNA, 120 bp, Artificial Sequence
  ENSG00000140955_16 (sequence is synthesized)
caggcggccagggctgtggggaagccctacctcctggccttgaagacctacgaggctgccaaggctgggccctaccaggaggctcgcaggcagctgtctctcctcctggaccagcagggc

SEQ ID NO: 364349 - DNA, 120 bp, Artificial Sequence
  ENSG00000140955_17 (sequence is synthesized)
ctgggggcttggccctcgaagccactggtgggcaaattcagaaactgaagccagcctcggcgggaccgaggtcccggagccaagctgtacccctgctgggggagtgccctatctgaggag

SEQ ID NO: 364350 - DNA, 120 bp, Artificial Sequence
  ENSG00000140955_18 (sequence is synthesized)
cgttgtggggagaacatgggttgtgcggggtgaaactggggctggagggaaggaggagcctgctgtggttgggaggcggctgctgcacgtttgggcttgaataaagaagtatttctggtt

SEQ ID NO: 364351 - DNA, 120 bp, Artificial Sequence
  ENSG00000140955_19 (sequence is synthesized)
ccaccagagacaccgccggagcaggacctggcctgagcttgggaccttggggtggaccctgctgtgagcagcgatctccaaggatcaccagccacaccagatgctcaactgtgaaagagt

SEQ ID NO: 364352 - DNA, 120 bp, Artificial Sequence
  ENSG00000140955_20 (sequence is synthesized)
tgagcatcaggacgtcacctgcagggagctggggcggggtacatgtgccggtccctgctttcacgtcctctggggacaccgggggtagggaccgctagaagagcagctcgtgtaatgtcc

SEQ ID NO: 364353 - DNA, 120 bp, Artificial Sequence
  ENSG00000140955_21 (sequence is synthesized)
tgtgtctggaagatgaaaacttcctctccccgcctccttggcttcctgagggacggagggtgggccttggcacccacaccagcccgccctccttgcctctttcagagtccccccagacct

SEQ ID NO: 364354 - DNA, 90 bp, Artificial Sequence
  ENSG00000140955_22 (sequence is synthesized)
gtgcccccgtgcccagctaatttttttgtgtttttgctggtcttgagttcctgtcctcagccccacaaagtgctgggattacaggagtga

SEQ ID NO: 364355 - DNA, 120 bp, Artificial Sequence
  ENSG00000140955_23 (sequence is synthesized)
aggagtgagccactgtgcccggcctcatctatatttcttaaaaacaagggcatctcttatgtaactacaatacaattatcaaatcctggaaatttaacattgatataataccatcttcta

SEQ ID NO: 364356 - DNA, 120 bp, Artificial Sequence
  ENSG00000140955_24 (sequence is synthesized)
atcttctaatttctattcacattcaaattttgccagttgtcccagtaatgacctcatggccattgtttcccatcccagtatgacattacagttagctgtcatgcctctttaatctcttac

SEQ ID NO: 364357 - DNA, 120 bp, Artificial Sequence
  ENSG00000140955_25 (sequence is synthesized)
ctgaaacagttcctgtctttgtctttcacaacattgatgtctttgaagagtaagggccagtagttttgcgaatgtccttcagcttgggtttgtctgtttcctcagaactgagttcaggtg

SEQ ID NO: 364358 - DNA, 120 bp, Artificial Sequence
  ENSG00000140955_26 (sequence is synthesized)
atgtgttattgaagtgatgtcgagtctttggcacgcatctcaccaggaagtgtgcgatcttgctttgtcccctggcgatgcgagctgtggggatttgactagggtggcatctaccaggtg

SEQ ID NO: 364359 - DNA, 120 bp, Artificial Sequence
  ENSG00000140955_27 (sequence is synthesized)
tcttcactttctcctttgtgctgaataagtcatccaggggaggcatttggagatcatgtagatatcctgtccctataacattgtcacttgtggttttagaaaatcatgctttgatggttc

SEQ ID NO: 364360 - DNA, 120 bp, Artificial Sequence
  ENSG00000140955_28 (sequence is synthesized)
tccccagattcagtcgctgttaggatggcagccacatgctggctttctaaggccaacatcccttccacgtctgtctgtggttgctggttttgatgcctgtttagagcagacagatctcag

SEQ ID NO: 364361 - DNA, 120 bp, Artificial Sequence
  ENSG00000140955_29 (sequence is synthesized)
cgcagtggggagtgctgaaatgggttcccttccaaaagggaaacccccagaggggcagtccttgggagaaacaatttagcagcaagtactgtgaaattaaccctgcacctttgaccatgt

SEQ ID NO: 364362 - DNA, 120 bp, Artificial Sequence
  ENSG00000140955_30 (sequence is synthesized)
tgtgagtcctgtgacattgtcacagtgtgagaggaggtagtgtgaggtgtgtagcaggcctgctggtccagcttgtatctctctgatctcagtggtatcctctcttcatccagtgccgcc

SEQ ID NO: 364363 - DNA, 120 bp, Artificial Sequence
  ENSG00000140955_31 (sequence is synthesized)
tggtgagggtctcattattctgaccgtcctcgatatcaggtgtcaggaggaggcagaggtggtacctgtcacagggcgaaggccagggggctgcttcctcacctggctccttccccaggt

SEQ ID NO: 364364 - DNA, 120 bp, Artificial Sequence
  ENSG00000140955_32 (sequence is synthesized)
agtcagctggagaacccaggtaatggagggagggccaggcagctgagccgcagctggggacaagaggactgaggctggcagtcccgtggggaggcggaagtggctgtgcgtgtgagcagg

SEQ ID NO: 364365 - DNA, 120 bp, Artificial Sequence
  ENSG00000140961_0 (sequence is synthesized)
ggagcaactcagcaattctgttaccgataatcacctaacaggtaaacaagatggcagggaggaaagtccacgtctcgccccacagttccccatatcagcaaatcttcaaattctagaaca

SEQ ID NO: 364366 - DNA, 120 bp, Artificial Sequence
  ENSG00000140961_1 (sequence is synthesized)
aggtcagggtcagcaggggcagggcaggtttggaggaaggccaggccaagcccaggagaagagacagggtccagggaagcccacctccttcctgggtctcccctccagacccccaagacc

SEQ ID NO: 364367 - DNA, 120 bp, Artificial Sequence
  ENSG00000140961_2 (sequence is synthesized)
cccagcctcaggccttctcaagccccagccttaaggagttgagcactccagggtggggggtctctgatcctgggtgcctgtctctctctgcctcagtttacacattcaaaaccactggga

SEQ ID NO: 364368 - DNA, 120 bp, Artificial Sequence
  ENSG00000140961_3 (sequence is synthesized)
agccacagaccaggcaccgtgggatggggaagtggagaccgagaggctgctgccggggaaatatgcagtgcagacaagaggtccgctgccagccccaagccccccaccagccatgagctc

SEQ ID NO: 364369 - DNA, 120 bp, Artificial Sequence
  ENSG00000140961_4 (sequence is synthesized)
ctccagaaaggaccacctcggcgccagcagctcagagcccctcccggtcatcattgtgggtaacggcccctctggtatctgcctgtcctacctgctctccggctacacaccctacacgaa

SEQ ID NO: 364370 - DNA, 120 bp, Artificial Sequence
  ENSG00000140961_5 (sequence is synthesized)
gccagatgccatccacccacaccccctgctgcagaggaagctcaccgaggccccgggggtctccatcctggaccaggacctggactacctgtccgaaggcctcgaaggccgatcccaaag

SEQ ID NO: 364371 - DNA, 120 bp, Artificial Sequence
  ENSG00000140961_6 (sequence is synthesized)
ccccgtggccctgctctttgatgcccttctacgcccagacacagactttgggggaaacatgaagtcggtcctcacctggaagcaccggaaggagcacgccatcccccacgtggttctggg

SEQ ID NO: 364372 - DNA, 120 bp, Artificial Sequence
  ENSG00000140961_7 (sequence is synthesized)
ccggaacctccccgggggagcctggcactccatcgaaggctccatggtgatcctgagccaaggccagtggatggggctcccggacctggaggtcaaggactggatgcagaagaagcgaag

SEQ ID NO: 364373 - DNA, 120 bp, Artificial Sequence
  ENSG00000140961_8 (sequence is synthesized)
aggtcttcgcaacagccgggccactgccggggacatcgcccactactacagggactacgtggtcaagaagggtctggggcataactttgtgtccggtgctgtagtcacagccgtggagtg

SEQ ID NO: 364374 - DNA, 120 bp, Artificial Sequence
  ENSG00000140961_9 (sequence is synthesized)
accaggaaccaggcccagcagcccttctcgctgtgggcccgcaacgtggtcctcgccacaggcacgttcgacagcccggcccggctgggcatccccggggaggccctgcccttcatccac

SEQ ID NO: 364375 - DNA, 120 bp, Artificial Sequence
  ENSG00000140961_10 (sequence is synthesized)
catgagctgtctgccctggaggccgccacaagggtgggtgcggtgaccccggcctcagaccctgtcctcatcattggcgcggggctgtcagcggccgacgcggtcctctacgcccgccac

SEQ ID NO: 364376 - DNA, 120 bp, Artificial Sequence
  ENSG00000140961_11 (sequence is synthesized)
tacaacatcccggtgatccatgccttccgccgggccgtggacgaccctggcctggtgttcaaccagctgcccaagatgctgtaccccgagtaccacaaggtgcaccagatgatgcgggag

SEQ ID NO: 364377 - DNA, 120 bp, Artificial Sequence
  ENSG00000140961_12 (sequence is synthesized)
cagtccatcctgtcgcccagcccctatgagggttaccgcagcctccccaggcaccagctgctgtgcttcaaggaagactgccaggccgtgttccaggacctcgagggtgtcgagaaggtg

SEQ ID NO: 364378 - DNA, 120 bp, Artificial Sequence
  ENSG00000140961_13 (sequence is synthesized)
tttggggtctccctggtgctggtcctcatcggctcccaccccgacctctccttcctgcctggggcaggggctgactttgcagtggatcctgaccagccgctgagcgccaagaggaacccc

SEQ ID NO: 364379 - DNA, 120 bp, Artificial Sequence
  ENSG00000140961_14 (sequence is synthesized)
attgacgtggaccccttcacctaccagagcacccgccaggagggcctgtacgccatggggccgctggccggggacaacttcgtgaggtttgtgcaggggggcgccttggctgtggccagc

SEQ ID NO: 364380 - DNA, 120 bp, Artificial Sequence
  ENSG00000140961_15 (sequence is synthesized)
tccctgctaaggaaggagaccaggaagccaccctaacactcggccagacccgctggctcccaggccctgagaggacagagatgaccacatccctgctggatgcaggacccgtccaaagat

SEQ ID NO: 364381 - DNA, 120 bp, Artificial Sequence
  ENSG00000140961_16 (sequence is synthesized)
gccccggggaggggtgtcagcccacgttgctggcctttggggtcaagaggagtagggatcccaggctgccctggacttagaccagtgtctgaggtggtaacagcggccgcaggccagggt

SEQ ID NO: 364382 - DNA, 120 bp, Artificial Sequence
  ENSG00000140961_17 (sequence is synthesized)
tggcctagacctgggatttgtggggaaagctgctggtgtgaccagctgagcacccagccaggagacctgcagccctgcgccttccagaagcaggtcccaaataaagccagtgcccacctg

SEQ ID NO: 364383 - DNA, 120 bp, Artificial Sequence
  ENSG00000140961_18 (sequence is synthesized)
agagcctcttggatccccacagggtaatgggtgtcccgatctcgcgggggactctgtgatccgtgttcccctgaccctcctagtgcacaacttggccgggctcactgggctcctgcacca

SEQ ID NO: 364384 - DNA, 82 bp, Artificial Sequence
  ENSG00000140961_19 (sequence is synthesized)
ccaaggttgaggacgcgcccgtgacagcctcaggaagtcctaatgacatgtgcccaaggtgatccggcacagcttggtttta

SEQ ID NO: 364385 - DNA, 120 bp, Artificial Sequence
  ENSG00000140961_20 (sequence is synthesized)
ctgcctgtcaggtgacctggggcaagacgcccactcctcctgaccagcttttcttcctctgcacaatggggataagaacacccacctcctggggtgtcttcaaaggcaaaggagtaaatg

SEQ ID NO: 364386 - DNA, 120 bp, Artificial Sequence
  ENSG00000140961_21 (sequence is synthesized)
atgccgcacacttgaaagaaacgtcagtcgaaggtgcaactgttttcatttcttttatcctgtttgcctttgtgaaatttgaaacatcaatttttaatgttaacttctttccatcaacat

SEQ ID NO: 364387 - DNA, 120 bp, Artificial Sequence
  ENSG00000140961_22 (sequence is synthesized)
ctgccatcttcaattaaagggacttaaaaagataacattaaaaattgattcttccaactccgtaaaactaaaaagcacaaaaggaattgaaatgaaacttttgaactctcttttgtaagt

SEQ ID NO: 364388 - DNA, 120 bp, Artificial Sequence
  ENSG00000140961_23 (sequence is synthesized)
gtcgggggggtgtcccctgggggagggccaaccccagtgtgtccactcctccccggccaaactggtcacctctgtcacctctgctgcacccggccccttcgttgtcagatggagtctcgc

SEQ ID NO: 364389 - DNA, 120 bp, Artificial Sequence
  ENSG00000140961_24 (sequence is synthesized)
aatttggaggatcacgtcacaagctctcaatagccacttgaactcatggccttaaagagcacaagtatcggcctttgtcttagtcaagctttcgaggagcaactcagcaattctgttacc

SEQ ID NO: 364390 - DNA, 120 bp, Artificial Sequence
  ENSG00000140961_25 (sequence is synthesized)
gataatcacctaacagtttacacattcaaaaccactgggaagccacagaccaggcaccgtgggatggggaagtggagaccgagaggctgctgccggggaaatatgcagtgcagacaagag

SEQ ID NO: 364391 - DNA, 120 bp, Artificial Sequence
  ENSG00000140961_26 (sequence is synthesized)
ggaaccagccccagccccagccccagcccctgctggcagatgctccggtaccctgggctgtggcttccaggatgtgcctgactccagggcagggctgtggccaccagggccaggacgagg

SEQ ID NO: 364392 - DNA, 120 bp, Artificial Sequence
  ENSG00000140961_27 (sequence is synthesized)
agtgtgtccactcctccccggccaaactggtcacctctgtcacctctgctgcacccggccccttcgttgtcagcgagctccattcagggctgagcaagaatggcctccaggatcccacaa

SEQ ID NO: 364393 - DNA, 120 bp, Artificial Sequence
  ENSG00000140961_28 (sequence is synthesized)
ggaaaggcggggctgcggtttgaacccagatctctccagactgttccactacaacccatggctgcccatgagaaccacctggaaagctttggacaacaccgaaacccagttcccaacccc

SEQ ID NO: 364394 - DNA, 120 bp, Artificial Sequence
  ENSG00000140961_29 (sequence is synthesized)
agaccgcaagtagagtccctggtcaggggccccacccagccctgtgatcccagctccaccagcagaggcagcagatcgggggtccagggcctcagtgcactcccatccccgtcggggtgc

SEQ ID NO: 364395 - DNA, 120 bp, Artificial Sequence
  ENSG00000140961_30 (sequence is synthesized)
tccggccctgctcctccacccctcagccctggctcccagcactccagactcacacttggttttggagtctttgcccaggagtaacccccaaacgtgtcctggtccttcctacggtggcag

SEQ ID NO: 364396 - DNA, 120 bp, Artificial Sequence
  ENSG00000140961_31 (sequence is synthesized)
gcactggggaaccctcagctctgagtgtgggaacacgtgctgggacttatcggcgtggtaggtccagccaggtttgaagttggacaggcccactccctggagagacacctggtcccatgc

SEQ ID NO: 364397 - DNA, 120 bp, Artificial Sequence
  ENSG00000140961_32 (sequence is synthesized)
acacacaaaggccacggagcctgttaggtggaggctcctggggcctcagctgctccgacctcacctcaggaggctcagccgctctgaccccacccccgccacttcctggcaggatgacct

SEQ ID NO: 364398 - DNA, 120 bp, Artificial Sequence
  ENSG00000140961_33 (sequence is synthesized)
tgggaaggctgttttgcctcagtttcctcatctgtaaaatgcctagaacggcagctccctcatgaggaggctgagacaccccacggtgtaacacaggaaagatgctgagctctgccggtg

SEQ ID NO: 364399 - DNA, 120 bp, Artificial Sequence
  ENSG00000140961_34 (sequence is synthesized)
tggtggggagcgatgagtgctccagaaacggtccccacgctccactgtgtgccggagcctctgcacttgggccaccgtttcctgcgccttctgtaggagcagcatggccttggcgcacgc

SEQ ID NO: 364400 - DNA, 120 bp, Artificial Sequence
  ENSG00000140961_35 (sequence is synthesized)
ggctccagggtcacagccaagggcagatgagatcaagtacagccacactgccacccttgttcccttcattttgtgagacttcgcctccggcaaacacgaggcccagaatgttccaccagg

SEQ ID NO: 364401 - DNA, 120 bp, Artificial Sequence
  ENSG00000140961_36 (sequence is synthesized)
gtagcagcaggtgcccagcttggggagggaagaggcgccgagcgacccccccagcccctgccctgcgcatgccccttgtctcctcgatgcgcctcccccacctctacagggccggcagct

SEQ ID NO: 364402 - DNA, 120 bp, Artificial Sequence
  ENSG00000140961_37 (sequence is synthesized)
gtgctggagcccagacctgaaactggaaggaaagatgatcctccacagacttctcatcaatccttttgccggggtttaatccccctgcaattcctcctgaatgagtttcctgtacctgac

SEQ ID NO: 364403 - DNA, 120 bp, Artificial Sequence
  ENSG00000140961_38 (sequence is synthesized)
atcaccagtgaccacaaactaagtggcttaaagcaacagaaatgtaccctctcatcatctggagcagaagtcaaaattcaaggcatcagcaggacccccgccctctggagcttccaggga

SEQ ID NO: 364404 - DNA, 120 bp, Artificial Sequence
  ENSG00000140961_39 (sequence is synthesized)
aggatcttcgttgactcctccggcttcagggggctccaggcgtcccttggttctaaccgctgcctctgtggtcttgtggccgccttccctgggtcctcagatcccccccttgcatataag

SEQ ID NO: 364405 - DNA, 120 bp, Artificial Sequence
  ENSG00000140961_40 (sequence is synthesized)
gacacttgtcgtgggatatggggcccaccctaaatccaggatggtctcattcgaagatccctaactgaatgaattctgtaaagaccccttttccaatcaaggccgcatttacagattccc

SEQ ID NO: 364406 - DNA, 120 bp, Artificial Sequence
  ENSG00000140961_41 (sequence is synthesized)
gacacgtcactgggaagccaccatttggtcctcaacatcccgtctcctccgcccccagatgcgacggcgtctcagcagcgacttggagccatgcagggtttctgttgtggttgttcactt

SEQ ID NO: 364407 - DNA, 120 bp, Artificial Sequence
  ENSG00000140961_42 (sequence is synthesized)
gggtaagcttcctgctcttaccgacagtggatgacacactccccactcccacgccacttcatgttccttcgggagcggagggggttggaagaataaacacccagatcttcaagacgtaaa

SEQ ID NO: 364408 - DNA, 120 bp, Artificial Sequence
  ENSG00000140961_43 (sequence is synthesized)
actgcttccatttccccaagtccatcccagctcctggggcaggccacagcgctggcccattccctgtggcagattcactccaggcaggtgcttcccgtctgtgatcctactgtgtccctc

SEQ ID NO: 364409 - DNA, 120 bp, Artificial Sequence
  ENSG00000140968_0 (sequence is synthesized)
gcctggagcgcggcagcaagcgtgggaacgcgggcggcgagacggcggcaggacggcggcaggatgtgtgaccggaatggtggtcggcggcttcgacagtggctgatcgagcagattgac

SEQ ID NO: 364410 - DNA, 120 bp, Artificial Sequence
  ENSG00000140968_1 (sequence is synthesized)
agtagcatgtatccaggactgatttgggagaatgaggagaagagcatgttccggatcccttggaaacacgctggcaagcaagattataatcaggaagtggatgcctccatttttaaggcc

SEQ ID NO: 364411 - DNA, 120 bp, Artificial Sequence
  ENSG00000140968_2 (sequence is synthesized)
tgggcagtttttaaagggaagtttaaagaaggggacaaagctgaaccagccacttggaagacgaggttacgctgtgctttgaataagagcccagattttgaggaagtgacggaccggtcc

SEQ ID NO: 364412 - DNA, 120 bp, Artificial Sequence
  ENSG00000140968_3 (sequence is synthesized)
caactggacatttccgagccatacaaagtttaccgaattgttcctgaggaagagcaaaaatgcaaactaggcgtggcaactgctggctgcgtgaatgaagttacagagatggagtgcggt

SEQ ID NO: 364413 - DNA, 120 bp, Artificial Sequence
  ENSG00000140968_4 (sequence is synthesized)
cgctctgaaatcgacgagctgatcaaggagccttctgtggacgattacatggggatgatcaaaaggagcccttccccgccggaggcctgtcggagtcagctccttccagactggtgggcg

SEQ ID NO: 364414 - DNA, 120 bp, Artificial Sequence
  ENSG00000140968_5 (sequence is synthesized)
cagcagcccagcacaggcgtgccgctggtgacggggtacaccacctacgacgcgcaccattcagcattctcccagatggtgatcagcttctactatgggggcaagctggtgggccaggcc

SEQ ID NO: 364415 - DNA, 120 bp, Artificial Sequence
  ENSG00000140968_6 (sequence is synthesized)
accaccacctgccccgagggctgccgcctgtccctgagccagcctgggctgcccggcaccaagctgtatgggcccgagggcctggagctggtgcgcttcccgccggccgacgccatcccc

SEQ ID NO: 364416 - DNA, 120 bp, Artificial Sequence
  ENSG00000140968_7 (sequence is synthesized)
agcgagcgacagaggcaggtgacgcggaagctgttcgggcacctggagcgcggggtgctgctgcacagcagccggcagggcgtgttcgtcaagcggctgtgccagggccgcgtgttctgc

SEQ ID NO: 364417 - DNA, 120 bp, Artificial Sequence
  ENSG00000140968_8 (sequence is synthesized)
agcggcaacgccgtggtgtgcaaaggcaggcccaacaagctggagcgtgatgaggtggtccaggtcttcgacaccagccagttcttccgagagctgcagcagttctataacagccagggc

SEQ ID NO: 364418 - DNA, 120 bp, Artificial Sequence
  ENSG00000140968_9 (sequence is synthesized)
cggcttcctgacggcagggtggtgctgtgctttggggaagagtttccggatatggcccccttgcgctccaaactcattctcgtgcagattgagcagctgtatgtccggcaactggcagaa

SEQ ID NO: 364419 - DNA, 120 bp, Artificial Sequence
  ENSG00000140968_10 (sequence is synthesized)
gaggctgggaagagctgtggagccggctctgtgatgcaggcccccgaggagccgccgccagaccaggtcttccggatgtttccagatatttgtgcctcacaccagagatcatttttcaga

SEQ ID NO: 364420 - DNA, 120 bp, Artificial Sequence
  ENSG00000140968_11 (sequence is synthesized)
gtcgcttgggcgccccaccccgtctgcgtcctgcatccatctccctgttacagtggcccgcatcatgattaaagaatgtggatccctctgtctggggtgggatgccttactttgcactta

SEQ ID NO: 364421 - DNA, 120 bp, Artificial Sequence
  ENSG00000140968_12 (sequence is synthesized)
atttaataagggcattctcggaggagtagacgtttaatacgaagtggcggcatagccctgccgagatgtcggtgatggcctggatgctgtaaccacaacctgtggctaaaaattttattt

SEQ ID NO: 364422 - DNA, 120 bp, Artificial Sequence
  ENSG00000140968_13 (sequence is synthesized)
tctatcctttacccgtcattatcattagttgctatgattctttctgcattttcggttaactatcatttccaaagacttgtcattcagtaatattagcagatagctgcttcgataaaggaa

SEQ ID NO: 364423 - DNA, 120 bp, Artificial Sequence
  ENSG00000140968_14 (sequence is synthesized)
tttggagtttaaaaatcaacttgtgaaaacaaggttgtttttgtctttatcgtttgttagagttatagatttatgatttcataggcttgattctatgtgaaatatctttttacttttatg

SEQ ID NO: 364424 - DNA, 120 bp, Artificial Sequence
  ENSG00000140968_15 (sequence is synthesized)
cattttaataagatttaaaaatatttagattaaagccccctttaatgagtacaagaaaaactcttggcttgttagaagaaagtatattctttctagaatttggtgcaggaatatgtgttc

SEQ ID NO: 364425 - DNA, 120 bp, Artificial Sequence
  ENSG00000140968_16 (sequence is synthesized)
atatccaggcaaacgggtgtgtttttatcttcagacaatgaaaccttctcctctggggctttgttgccaggaagattagaactaaatttatttttttcatttctgtcatgaaatcattcc

SEQ ID NO: 364426 - DNA, 120 bp, Artificial Sequence
  ENSG00000140968_17 (sequence is synthesized)
agatacctcttttcttctttccaaatggttttcacatgtgtttgaaatatttgtacttcgaattgtcggattttccatgtcctcctttctcctttgtgcccagcctgagtcagcaccaat

SEQ ID NO: 364427 - DNA, 120 bp, Artificial Sequence
  ENSG00000140968_18 (sequence is synthesized)
cccgcattcagaacctcccagtgaaagggcagccttcattttgagaaggtggaaggtgttagggtttgggagacagctcatccaatctcccaagtctcatggtggatttgtgactgtgag

SEQ ID NO: 364428 - DNA, 120 bp, Artificial Sequence
  ENSG00000140968_19 (sequence is synthesized)
agtttccggtttaaaatctgaaaagccagatatgcctgtttccttttcccagcaccatgcctgtggaggggacagtcagacccagaggtcctttacgtgtggatggagttcacaggcgaa

SEQ ID NO: 364429 - DNA, 120 bp, Artificial Sequence
  ENSG00000140968_20 (sequence is synthesized)
tagaggagaggaccaggggacgtggcttgtcccttttgtccaacaaagcattatatttttaagaatggcagacctgtttgctgaagtgttcataagataacaataggcttgaatctccaa

SEQ ID NO: 364430 - DNA, 120 bp, Artificial Sequence
  ENSG00000140968_21 (sequence is synthesized)
ccaattcaaatgaatgtcaaagcacatatctttaatatgctgaatgaatatttatttttgtatccattaaaacagtatattgatctcttttattctttattaaaataaaatgctcttttt

SEQ ID NO: 364431 - DNA, 120 bp, Artificial Sequence
  ENSG00000140968_22 (sequence is synthesized)
cctggagcgcggcagcaagcgtgggaacgcgggcggcgagacggcggcaggacggcggcaggaggctcaggaactgtggattctagtttaagaaacttgtagcaaggaaatcaggggagt

SEQ ID NO: 364432 - DNA, 120 bp, Artificial Sequence
  ENSG00000140968_23 (sequence is synthesized)
tgaaagtctcagaagccaacccctatgttgtgttctggccacctctgtgcagctcattcctcaatctaggagaaatttttctaccttgccccaggaaagagctgctaacttgttttcggg

SEQ ID NO: 364433 - DNA, 120 bp, Artificial Sequence
  ENSG00000140968_24 (sequence is synthesized)
tcaggtaccctctcccaagtctgtcccttctttatgataaacacagtggcctgctttagaattctgggtctcttgagatacagcctctcaacttacaggatgtgtgaccggaatggtggt

SEQ ID NO: 364434 - DNA, 120 bp, Artificial Sequence
  ENSG00000140968_25 (sequence is synthesized)
tgttcactgtggttgtatctgcctgaaaggaaagggcagatgaaagctggaaggagcacagccagcacagtgggaggggcctgcagggggctgctggtggctgcaggtttcccacggagc

SEQ ID NO: 364435 - DNA, 120 bp, Artificial Sequence
  ENSG00000140968_26 (sequence is synthesized)
tttcagtttgcactcagggctgtgaggtcatggaggccagcattgccttctcatggcaggtgtcccggagtccctgaatctgtgggtttcccccaagccagcacctttgctgcaaacctc

SEQ ID NO: 364436 - DNA, 120 bp, Artificial Sequence
  ENSG00000140968_27 (sequence is synthesized)
tgagtttcctgttagcagtttttgggttgctgtgatgaatgagacaatatccgtaatatcacagcgtgtatttctgtctttccaaggatgtgtgaccggaatggtggtcggcggcttcga

SEQ ID NO: 364437 - DNA, 120 bp, Artificial Sequence
  ENSG00000140968_28 (sequence is synthesized)
agagcaaaaatgtaactatcctttatgggcatgaaaccttccagaagctgccctggcctgtagccttcaccacagaacttgggtctggggtagacacagggtctggggcacatagtttca

SEQ ID NO: 364438 - DNA, 120 bp, Artificial Sequence
  ENSG00000140968_29 (sequence is synthesized)
gttaaacaaagcagttctctccttcgtgtaagcagaaattgagatctctttccagtgacctcagagggaagggcggaggagattgggtgctgcccaacctgtgccccacttgctgcctga

SEQ ID NO: 364439 - DNA, 120 bp, Artificial Sequence
  ENSG00000140968_30 (sequence is synthesized)
ccacagacatttgtagggcctccctggacaggaacaagcatcctccagcagtttctgatgaggaatcctttcattttccagcagcttgcagaggaggccaggggaaaatatggtgaccac

SEQ ID NO: 364440 - DNA, 120 bp, Artificial Sequence
  ENSG00000140968_31 (sequence is synthesized)
agaaggcctggatcatgagggttgggagtaaagctctcagatgaagttgtcaaagatggcaccatggccttcgttgttggagatgggatatgcctcagtgtgttactagatcctgattgt

SEQ ID NO: 364441 - DNA, 120 bp, Artificial Sequence
  ENSG00000140968_32 (sequence is synthesized)
tatttgggaactccgggatgtgatcattcctgaggtttcttccagctctcaaatcccaagaaagcatttgtgacagattaaagcaggacagcaaaaacatgccgcaccctggtcctacat

SEQ ID NO: 364442 - DNA, 120 bp, Artificial Sequence
  ENSG00000140968_33 (sequence is synthesized)
cactaaaataaatcccaaagtactgagctgggatctggcctcagaaggcttctcaaagccctgtgctgtgccgctgccatgaattgtagctgatttatgagataaaacctaattaccagc

SEQ ID NO: 364443 - DNA, 120 bp, Artificial Sequence
  ENSG00000140968_34 (sequence is synthesized)
tggggaaaagcactgaattcagcggaagcctgtgctccctggagcctctggcacgccatgtgcagccttttaagggacttttggagaaggagcgattggggttactccctgtacaccaca

SEQ ID NO: 364444 - DNA, 120 bp, Artificial Sequence
  ENSG00000140968_35 (sequence is synthesized)
tgtgggagtctgggaggtggcagctggccccggaggccttgaaggttgccaggccttgggtgtcgagtaagaggtccctggaaaggcacctctgtctgtgctgcaggaacaccatccgga

SEQ ID NO: 364445 - DNA, 120 bp, Artificial Sequence
  ENSG00000140968_36 (sequence is synthesized)
aatccagttttttaaaagcaaacattggttcaggagtgctgaatgtgtctcagacatgtacatgagctgatttcacatcttttgaattacggagtcacttttgtggtcgcttgtattctg

SEQ ID NO: 364446 - DNA, 120 bp, Artificial Sequence
  ENSG00000140968_37 (sequence is synthesized)
atgaggagatcgaaggctcttttcttctcttttctgctgcttccttttcctgatgagccaagtgggagaaaatacttcgagaccttcacgctaagacctttccccacgggcttccattag

SEQ ID NO: 364447 - DNA, 120 bp, Artificial Sequence
  ENSG00000140968_38 (sequence is synthesized)
agaggtccctggaaaggcacctctgtctgtgctgcaggaacaccatccggaaagctagcttgcacccccaggctctcccccagagataagccctgggtggtgggtatgcagtccagtggt

SEQ ID NO: 364448 - DNA, 120 bp, Artificial Sequence
  ENSG00000140983_0 (sequence is synthesized)
agagcgaaaggcttgaggaccaggtcggggccgggttccgggtcggggagcggctccgggcggcagctatgaggcgggacgtgcgcatcctgttactgggcgaggcccaggtggggaaga

SEQ ID NO: 364449 - DNA, 120 bp, Artificial Sequence
  ENSG00000140983_1 (sequence is synthesized)
cgtcgctgatcctgtccctggtgggcgaggagttccccgaggaggtccctccccgcgcggaggagatcaccatccccgcggacgtcaccccggagaaggtgcccacccacatcgtggact

SEQ ID NO: 364450 - DNA, 120 bp, Artificial Sequence
  ENSG00000140983_2 (sequence is synthesized)
actcagaagccgagcagacggacgaggagctgcgggaggagatccacaaggcaaacgtggtgtgtgtggtgtatgacgtctctgaggaggccaccattgagaagattcgaactaagtgga

SEQ ID NO: 364451 - DNA, 120 bp, Artificial Sequence
  ENSG00000140983_3 (sequence is synthesized)
tcccactggtgaatggggggaccacgcaggggcccagggtgcccatcatcctagtgggcaacaagtcagacctgcggtcggggagctccatggaggccgtgctccccatcatgagccagt

SEQ ID NO: 364452 - DNA, 120 bp, Artificial Sequence
  ENSG00000140983_4 (sequence is synthesized)
ttcccgagattgagacctgcgtggagtgttcggccaagaacctgaggaacatctcagagctgttctactacgcccagaaggccgtcctgcatcccacagcccccctctatgaccctgagg

SEQ ID NO: 364453 - DNA, 120 bp, Artificial Sequence
  ENSG00000140983_5 (sequence is synthesized)
ccaagcagttgaggcccgcgtgcgcccaggcgctgacgcgcatcttcaggctctcagatcaggacctggaccaggcgctcagtgacgaagagctcaacgctttccagaaatcctgctttg

SEQ ID NO: 364454 - DNA, 120 bp, Artificial Sequence
  ENSG00000140983_6 (sequence is synthesized)
ggcaccccctggccccgcaggccctggaggacgtgaagacggtggtgtgcaggaacgtggcgggcggcgtgcgggaggaccggctgaccctggatggtttcctcttcctgaacacgctct

SEQ ID NO: 364455 - DNA, 120 bp, Artificial Sequence
  ENSG00000140983_7 (sequence is synthesized)
tcatccagcgcggccggcacgagaccacctggaccatcctgcggcgcttcggctacagcgatgccctggagctgactgcggactatctctcccctctgatccacgtgccccccggctgca

SEQ ID NO: 364456 - DNA, 120 bp, Artificial Sequence
  ENSG00000140983_8 (sequence is synthesized)
gcacggagctcaaccaccttggctaccagtttgtgcagagagtgtttgagaagcacgaccaggaccgcgacggcgccctctcgcccgtggagctgcaaagccttttcagtgtgttcccag

SEQ ID NO: 364457 - DNA, 120 bp, Artificial Sequence
  ENSG00000140983_9 (sequence is synthesized)
cagcgccctggggccccgagctcccacgcacagtccgcacagaggccggccggttgcccctgcacggatacctctgccagtggaccctggtgacctacctggacgtccggagctgccttg

SEQ ID NO: 364458 - DNA, 120 bp, Artificial Sequence
  ENSG00000140983_10 (sequence is synthesized)
agaagggacagacgcagcggagcgtcctcctgtgcaaggtggtaggggcccgtggagtgggcaagtctgccttcctgcaggcctttctcggccgcggcctggggcaccaggacacgaggg

SEQ ID NO: 364459 - DNA, 120 bp, Artificial Sequence
  ENSG00000140983_11 (sequence is synthesized)
agcagcctcccggctacgccatcgacacggtgcaggtcaatggacaggagaagtacttgatcctctgtgaggtgggcacagatggtctgctggccacatcgctggacgccacctgtgacg

SEQ ID NO: 364460 - DNA, 120 bp, Artificial Sequence
  ENSG00000140983_12 (sequence is synthesized)
ttgcctgcttgatgtttgatggcagtgacccaaagtcctttgcacattgtgccagcgtctacaagcaccattacatggacgggcagaccccctgcctctttgtctcctccaaggccgacc

SEQ ID NO: 364461 - DNA, 120 bp, Artificial Sequence
  ENSG00000140983_13 (sequence is synthesized)
tgcccgaaggtgtcgcggtgtctggcccatcaccggccgagttttgccgcaagcaccggctacccgctcccgtgccgttctcctgtgctggcccagccgagcccagcaccaccatcttca

SEQ ID NO: 364462 - DNA, 120 bp, Artificial Sequence
  ENSG00000140983_14 (sequence is synthesized)
cccagctcgccaccatggccgccttcccacatttggtccacgcagagctgcatccctcttccttctggctccgggggctgctgggggttgtcggggccgccgtggccgcagtcctcagct

SEQ ID NO: 364463 - DNA, 120 bp, Artificial Sequence
  ENSG00000140983_15 (sequence is synthesized)
tctcactctacagggtcctggtgaagagccagtgaggcccctggtacccaagccccctcccctgacctgggtgtgcctcgctgctggggctctgcaggggcagcacagctggggtgcagg

SEQ ID NO: 364464 - DNA, 120 bp, Artificial Sequence
  ENSG00000140983_16 (sequence is synthesized)
ccaggctgccactccgggaacgcctttgcgccgggactttttgtttctgaaggcagtcgatctgcagcggggccttatgctgccatgcactgccctggctcctgccggacccccagggtg

SEQ ID NO: 364465 - DNA, 120 bp, Artificial Sequence
  ENSG00000140983_17 (sequence is synthesized)
ggccgtggcaggtggctgagcaggagctcccaagtgccggccaccgctgtcagggattgcccacccctgggcatcatgtgtgtggggccggggagcacaggtgtgggagctggtgacccc

SEQ ID NO: 364466 - DNA, 120 bp, Artificial Sequence
  ENSG00000140983_18 (sequence is synthesized)
agacccagaattctcagggctctacccccctttcctggtcctaggtggccagtgggtatgaggagggctggaaggcagagctttgggccaaaagcaggcgttggggggtcccccctcaag

SEQ ID NO: 364467 - DNA, 120 bp, Artificial Sequence
  ENSG00000140983_19 (sequence is synthesized)
tttggagccgtttccgtggttgtagcagaggaccggaggttgggttcctgattaaacttcactgtgtgttttctatctcggatcccagtctctgaagacaacttgctttgattcaaccta

SEQ ID NO: 364468 - DNA, 120 bp, Artificial Sequence
  ENSG00000140983_20 (sequence is synthesized)
ggcggcgcggcctgtgcccgagggtggacccggggacacccaggcctgcctggcagatctggcccagcatggccctagggggaccgagccccagggacccttcctaaggccgctgtctgt

SEQ ID NO: 364469 - DNA, 120 bp, Artificial Sequence
  ENSG00000140983_21 (sequence is synthesized)
tcggcctaatccgcttcgcagcctgggggattggaccgaggtgctccgggtgtccttggccctgataattctgtgacctccgcactgagggttgtcggggcccctacagcgcaccccgct

SEQ ID NO: 364470 - DNA, 120 bp, Artificial Sequence
  ENSG00000140983_22 (sequence is synthesized)
gggagccggcaccgctcagtccagtggtgctccagggataacaggacccttccccgcgggctctccctccctcctgccggggtggcagcagcgtttgctcttcctgtgggctctgtgtgc

SEQ ID NO: 364471 - DNA, 120 bp, Artificial Sequence
  ENSG00000140983_23 (sequence is synthesized)
gccacgtccccgtgctgtgtgctccagcccaccgtcccggcctccgggcacccggagctcccagtaccagagcacgtgtgccggggacatctccaggcaagggcacaggccacagccacc

SEQ ID NO: 364472 - DNA, 120 bp, Artificial Sequence
  ENSG00000140983_24 (sequence is synthesized)
cagggcagcccctgctgttggcacccctcactgcggtcctgtcactctgtctgtagcgaggggggaggcaggggccaaggcggcggctgtcttgcagggtgttgggttgcaggtgtggcc

SEQ ID NO: 364473 - DNA, 120 bp, Artificial Sequence
  ENSG00000140983_25 (sequence is synthesized)
gtgtctgtcctgagccctctgctccaagggtcttgctgaccacagttatgcttctggggcctggtgtccctgcactggcagtgggcggggaagaggcttctctgagggttcagcagcagc

SEQ ID NO: 364474 - DNA, 120 bp, Artificial Sequence
  ENSG00000140983_26 (sequence is synthesized)
tcccagtgtgacactggggagtgcctgctctgccaacaccaggctggaggcaggttttagggaaggctgggctttcccggcctcagagctgcacccatgctacctgtgagcttctggggc

SEQ ID NO: 364475 - DNA, 120 bp, Artificial Sequence
  ENSG00000140983_27 (sequence is synthesized)
ctcctggagcctcgagatggcgtggaacggccagggtcgtcggtggtgagccagcagccctgtcacccacacctcatcactgttccctcaggcaaacgtggtgtgtgtggtgtatgacgt

SEQ ID NO: 364476 - DNA, 120 bp, Artificial Sequence
  ENSG00000140983_28 (sequence is synthesized)
ctctgaggaggccaccattgagaaggtgagccctcagtgcagaccccaacagcagagacacagtggccggtggtggcccaggtggaccttcacccaacccgtggccagtgccatcgctca

SEQ ID NO: 364477 - DNA, 120 bp, Artificial Sequence
  ENSG00000140983_29 (sequence is synthesized)
cagcattttggggagcctgacgtggagttgcctgacgtggagtcacccggccctctcctgtgatcccacttcccctgagagggtctggggcgtcccgcagtctgagccattgaggccggc

SEQ ID NO: 364478 - DNA, 120 bp, Artificial Sequence
  ENSG00000140983_30 (sequence is synthesized)
agtcctctttcttccccagtttccaaacccccggggggggacccgcagagggcctgcgttgggggcggccctaggcttgggccccagtgacttgggggtgtttgggagccattggggtca

SEQ ID NO: 364479 - DNA, 120 bp, Artificial Sequence
  ENSG00000140983_31 (sequence is synthesized)
gacagatgaggctgcacctgctgcctgccttctcccaccagctttgttcctgtggccgggacttgggccctcagtgggccttgacctcccccttctgctctcccccagccaggctcatgc

SEQ ID NO: 364480 - DNA, 120 bp, Artificial Sequence
  ENSG00000140983_32 (sequence is synthesized)
cagcggtggtgtcaggcctggaactggggactagcagtgtctgtcatccgagcagtgggcagcagtggcgtcaggcctggaactggggccagagtggcggggtggagctttgtgtggcag

SEQ ID NO: 364481 - DNA, 120 bp, Artificial Sequence
  ENSG00000140983_33 (sequence is synthesized)
aaagtcctttgcacattgtgccagcgtctacaaggtggggccctgcaggggccacgtggccatggggcagggtctgtccctccagctgtgcctcggccaccccaggactgtacctcatac

SEQ ID NO: 364482 - DNA, 120 bp, Artificial Sequence
  ENSG00000140983_34 (sequence is synthesized)
gtgttcggccaagaacctgaggaacatctcagagctgttctactacgcccagaaggccgtcctgcatcccacagcccccctctatgaccctgaggccaagcaggcgctgacgcgcatctt

SEQ ID NO: 364483 - DNA, 120 bp, Artificial Sequence
  ENSG00000140983_35 (sequence is synthesized)
ctctcccctctgtgagtgatgccggggcttgaggcctgccctccccgagggtcaggagctgactgccgactatctctcccctccatgagtgacgctggggtttgaggcctgccctccctg

SEQ ID NO: 364484 - DNA, 120 bp, Artificial Sequence
  ENSG00000140983_36 (sequence is synthesized)
agagcgaaaggcttgaggaccaggtcggggccgggttccgggtcggggagcggctccgggcggcagctatgaggcgggacgtgcgcatcctgttactgggcgagggtaggcgccggcccg

SEQ ID NO: 364485 - DNA, 120 bp, Artificial Sequence
  ENSG00000140983_37 (sequence is synthesized)
tccccaccataacactgtgcctgcctcccgcccacccccagcctggtgacctacctggacgtccggagctgccttggacacctaggctacctgggctaccccaccctctgtgagcaggac

SEQ ID NO: 364486 - DNA, 120 bp, Artificial Sequence
  ENSG00000140986_0 (sequence is synthesized)
actcgacctctggcggctagcggcgaggccccttcctgaccttcagggatcggccaccatgtcccaccggaagttttccgcccctcggcacggacacctgggcttcctgccccataagag

SEQ ID NO: 364487 - DNA, 120 bp, Artificial Sequence
  ENSG00000140986_1 (sequence is synthesized)
gagccaccggcaccggggcaaggtgaagacgtggccgcgggatgaccccagccagcccgtgcacctcacggccttcctgggctacaaggcgggcatgacccacaccctgcgggaggtgca

SEQ ID NO: 364488 - DNA, 120 bp, Artificial Sequence
  ENSG00000140986_2 (sequence is synthesized)
ccggccggggctcaaaatttccaaacgggaggaggtggaggcggtgacaattgtagaaacgccgcccctagtggtggtgggcgtggtgggctacgtggccacccctcgaggtctccggag

SEQ ID NO: 364489 - DNA, 120 bp, Artificial Sequence
  ENSG00000140986_3 (sequence is synthesized)
cttcaagaccatctttgcagaacacctcagtgatgagtgccggcgccgattctacaaggactggcacaagagcaagaagaaagccttcaccaaggcctgcaagaggtggcgggacacaga

SEQ ID NO: 364490 - DNA, 120 bp, Artificial Sequence
  ENSG00000140986_4 (sequence is synthesized)
cgggaaaaagcagctacagaaggacttcgccgccatgaagaagtactgcaaggtcattcgggtcattgtccacactcagatgaaactgctgcccttccggcagaagaaggcccacatcat

SEQ ID NO: 364491 - DNA, 120 bp, Artificial Sequence
  ENSG00000140986_5 (sequence is synthesized)
ggagatccagctgaacggtggcacggtggccgagaaggtggcctgggcccaggcccggctggagaagcaggtgcccgtgcacagcgtgttcagccagagtgaggtcattgatgtcattgc

SEQ ID NO: 364492 - DNA, 120 bp, Artificial Sequence
  ENSG00000140986_6 (sequence is synthesized)
tgtcaccaagggtcgaggcgtcaaaggggtcacaagccgctggcataccaagaagctgccgcggaagacccataagggcctgcgcaaggtggcctgcattggcgcctggcaccccgcccg

SEQ ID NO: 364493 - DNA, 120 bp, Artificial Sequence
  ENSG00000140986_7 (sequence is synthesized)
cgtgggctgctccattgctcgggccgggcagaagggctatcaccaccgcacggagctcaacaagaagatcttccgcatcggcaggggcccgcacatggaggacgggaagctggtgaagaa

SEQ ID NO: 364494 - DNA, 120 bp, Artificial Sequence
  ENSG00000140986_8 (sequence is synthesized)
tattgctggtaccaagaagcgggtcattacgctgagaaagtccctcctggtgcatcacagtcgccaagccgtggagaatattgagctcaagttcattgacaccacctccaagttcggcca

SEQ ID NO: 364495 - DNA, 120 bp, Artificial Sequence
  ENSG00000140986_9 (sequence is synthesized)
tggccgcttccagacagcccaagagaagagggccttcatgggcccccaaaagaagcatctggagaaggaaacgccggagacctcgggagacttgtaggctgtgtggggtggatgaaccct

SEQ ID NO: 364496 - DNA, 120 bp, Artificial Sequence
  ENSG00000140986_10 (sequence is synthesized)
gaagcgcaccgcactgtctgccccaatgtctaacaaaggccggaggcgactcttcctgcgaggtctcagagcgctgtgtaaccgcccaaggggttcaccttgcctgctgcctagacaaag

SEQ ID NO: 364497 - DNA, 120 bp, Artificial Sequence
  ENSG00000140986_11 (sequence is synthesized)
tagagaaagagtaattcacacagagctggctgtgcgggagaccggagttttatgttttattattactcaaatcgatctctttgagcatttgcggagcagaggtttttttttttttttttt

SEQ ID NO: 364498 - DNA, 120 bp, Artificial Sequence
  ENSG00000140986_12 (sequence is synthesized)
ttttttttttttttgagagagtcttgatcttgtcgcccaggctgctggagtgccggggagcagagtttttaaggataacttggcgggtggggagagccagtgagccaggagagccgattg

SEQ ID NO: 364499 - DNA, 120 bp, Artificial Sequence
  ENSG00000140986_13 (sequence is synthesized)
ccaggagagccgattggtcagggaggaaatcacagggagtcagctgtcttcttgcgctgagtcagctcctgggtggtggccacaagatcagatgagccagtttatcaatctggttggtgc

SEQ ID NO: 364500 - DNA, 120 bp, Artificial Sequence
  ENSG00000140986_14 (sequence is synthesized)
cagatgagccagtttatcaatctggttggtgccagcagatccatcaagttgcagggtcggcaaaatatctcaagcactgatcttaggggcagcttagggagggtcagaatcttgtagcct

SEQ ID NO: 364501 - DNA, 120 bp, Artificial Sequence
  ENSG00000140986_15 (sequence is synthesized)
gcctccagatgcacgactcctaaaccataattcccaatattgtggctaatgttagtcctaaaaatgcaatctagtccccaggcaaggaggtggtctgctttgggaaagggctgttactgt

SEQ ID NO: 364502 - DNA, 120 bp, Artificial Sequence
  ENSG00000140986_16 (sequence is synthesized)
gagattacgagcccactggcaggatgaacaactccagacgcgcggcgccttaagagctgtaacaccgcgaaggtctgtagcttcattcctgagctagcgagagcgcgaacctaccagaag

SEQ ID NO: 364503 - DNA, 120 bp, Artificial Sequence
  ENSG00000140986_17 (sequence is synthesized)
gaagaaactccgaacacatcggaacatcagaacgagcaaactccggacaccccgcctttaggaactgcaacactcaccgcgaggccctcaggacaggaaccccctctgcctccaagtcgg

SEQ ID NO: 364504 - DNA, 120 bp, Artificial Sequence
  ENSG00000140986_18 (sequence is synthesized)
tggccagtcctgtcctgggagggtcatgacccagccccagggccatcgaggaaaggagtgccagccctggctccgggtgccccactcaggctgtctatctgatgcccccaacactgcccc

SEQ ID NO: 364505 - DNA, 120 bp, Artificial Sequence
  ENSG00000140986_19 (sequence is synthesized)
gcccctgcctgctcctggcaccggagaccctgctgactgtgccaggggctaatctgggaactggcagctgtgagtcctggccctgccactcgacctctggcggctagcggcgaggcccct

SEQ ID NO: 364506 - DNA, 120 bp, Artificial Sequence
  ENSG00000140987_0 (sequence is synthesized)
gccgctgacttccggcccggaggctgagggagtttgtggagtcgcgagtgctggtgtccgacatccttcaaagttgagccctttttttccgctgtgagtctctacacatgtctgacactc

SEQ ID NO: 364507 - DNA, 120 bp, Artificial Sequence
  ENSG00000140987_1 (sequence is synthesized)
tcatgtcccacggattacagaaagacattccttgcaggagaacatggcttcccagtgatgtgggaaagatggactctgatctccagggtagaagtggcaaccagagtaagccagttcgtt

SEQ ID NO: 364508 - DNA, 120 bp, Artificial Sequence
  ENSG00000140987_2 (sequence is synthesized)
gaagcaaatgatggctgcagtgaagagtaccgaggcacacccatcctcaaacaaggatcccacacagggccagaaatcagccctccagggtaacagccctgactccgaggcctcccgtca

SEQ ID NO: 364509 - DNA, 120 bp, Artificial Sequence
  ENSG00000140987_3 (sequence is synthesized)
gcgcttcaggcagttttgctaccaggaggtaactggcccacatgaagcttttagcaaactctgggaactctgttgtcagtggctgaggccgaagacccactcaaaagaggaaatcctgga

SEQ ID NO: 364510 - DNA, 120 bp, Artificial Sequence
  ENSG00000140987_4 (sequence is synthesized)
gctgctggttttggagcagtttctgactatcttgccagaggagatccagacctgggtgagggagcagcatccagaaaacggcgaggaagctgtggctctggttgaggatgtacagagagc

SEQ ID NO: 364511 - DNA, 120 bp, Artificial Sequence
  ENSG00000140987_5 (sequence is synthesized)
tcctggacaacaggttctagattctgagaaggacttgaaagtactcatgaaggagatggcccctttgggagcaaccagagaatcactgagatcccaatggaaacaggaggttcagccaga

SEQ ID NO: 364512 - DNA, 120 bp, Artificial Sequence
  ENSG00000140987_6 (sequence is synthesized)
ggaaccgacttttaagggatcacagagctcacaccaaagaccaggggaacagtcagaagcctggcttgctcctcaggctcccaggaacctgcctcaaaacacaggtctccacgaccagga

SEQ ID NO: 364513 - DNA, 120 bp, Artificial Sequence
  ENSG00000140987_7 (sequence is synthesized)
gacaggtgctgtggtctggacagctgggtcccagggaccagccatgcgtgacaacagagctgtatccctctgtcagcaagaatggatgtgcccaggccctgcacaaagggccctctacag

SEQ ID NO: 364514 - DNA, 120 bp, Artificial Sequence
  ENSG00000140987_8 (sequence is synthesized)
gggtgccacccagaggaaggacagtcacgtctcgctggcaacaggtgtgccctggggctatgaagagaccaagacgctcctggctattcttagtagttctcaattttatggaaaactcca

SEQ ID NO: 364515 - DNA, 120 bp, Artificial Sequence
  ENSG00000140987_9 (sequence is synthesized)
gacctgtcagcagaacagccagatctacagggccatggcggaaggactctgggagcagggttttctgcggaccccagaacagtgtcgcaccaagttcaaaagcctacagttgagttaccg

SEQ ID NO: 364516 - DNA, 120 bp, Artificial Sequence
  ENSG00000140987_10 (sequence is synthesized)
caaagtgaggagaggccgtgtgcctgagccttgtatcttttatgaggaaatgaatgctctttcaggctcctgggcctctgcacctcctatggcaagcgatgctgttcctggccaagaagg

SEQ ID NO: 364517 - DNA, 120 bp, Artificial Sequence
  ENSG00000140987_11 (sequence is synthesized)
aagtgatattgaggctggagagctgaatcaccagaatggggaacccacggaggtagaagatggcactgtggatggtgcagacagggatgaaaaggacttcaggaatcctggccaggaagt

SEQ ID NO: 364518 - DNA, 120 bp, Artificial Sequence
  ENSG00000140987_12 (sequence is synthesized)
aaacaaggctttacagagaaagtccagaggagtttattggcactctgagctacaaaaaggcttggagagtgagccaacatcaagaaggcaatgtagaaattctccaggggagagtgagga

SEQ ID NO: 364519 - DNA, 120 bp, Artificial Sequence
  ENSG00000140987_13 (sequence is synthesized)
gaaaaccccatcccaggagaagatgagtcaccagagtttttgtgccagggacaaagcctgtacacatatcctctgtgggaaaaactgctctcagagtgtgcactctccccacaagccagc

SEQ ID NO: 364520 - DNA, 120 bp, Artificial Sequence
  ENSG00000140987_14 (sequence is synthesized)
gctcaaactggaaaaagtatctcaatgtcctgaatgtgggaaaacctttagccgaagttcttatcttgttcggcatcaaagaatccacacaggcgagaagcctcacaagtgcagtgagtg

SEQ ID NO: 364521 - DNA, 120 bp, Artificial Sequence
  ENSG00000140987_15 (sequence is synthesized)
cgggaagggctttagtgagcgctccaacctcactgcccacctacgaactcacacaggggagaggccctatcagtgtgggcaatgtgggaaaagcttcaaccagagttccagcctcattgt

SEQ ID NO: 364522 - DNA, 120 bp, Artificial Sequence
  ENSG00000140987_16 (sequence is synthesized)
ccaccagaggacccataccggggaaaagccttaccagtgcattgtctgtggaaagagattcaacaacagttcccagttcagtgctcaccggcgcatccacactggggagagcccatacaa

SEQ ID NO: 364523 - DNA, 120 bp, Artificial Sequence
  ENSG00000140987_17 (sequence is synthesized)
gtgtgcagtgtgtgggaaaatcttcaacaatagctcccacttcagtgcccaccgaaaaacccacactggtgaaaagccttacaggtgttctcactgtgagagaggcttcactaagaactc

SEQ ID NO: 364524 - DNA, 120 bp, Artificial Sequence
  ENSG00000140987_18 (sequence is synthesized)
tgccctcacccgtcatcagacagtacacatgaaagcagtactctcatcacaggaaggaagagatgcgttatgagtgtgtcggtaaactgtcagattaagttcctcaggtcagcatgtatg

SEQ ID NO: 364525 - DNA, 120 bp, Artificial Sequence
  ENSG00000140987_19 (sequence is synthesized)
agctttcttctgctgtggagagatctagccagtccctgactttgcaacagacctactgactactggatcttaagacccatgtctaggaccaggagtcagcataaggacgctgacctctcc

SEQ ID NO: 364526 - DNA, 120 bp, Artificial Sequence
  ENSG00000140987_20 (sequence is synthesized)
tggctgtgcctgtgactccagagtcctatcttactgtgacttaaagtttgatggagagaaagctgtaggatccataaattctaccaggaaaccagggtcttcctgttcctagcactgaga

SEQ ID NO: 364527 - DNA, 120 bp, Artificial Sequence
  ENSG00000140987_21 (sequence is synthesized)
atgggcacccagtggtccaagaacactttctgggctaacatagtcctcacacagggctgagaaagaaagtgtctcctttcctggaaagcacatgtaaaagttaagggcctgaatctcttc

SEQ ID NO: 364528 - DNA, 120 bp, Artificial Sequence
  ENSG00000140987_22 (sequence is synthesized)
taaaccaataattgacctctaggcacccaccgtaatactgctaccttcagggcagaagacactgctctttgtaacccagccaccaccaaaaagcaaacagaaagaaggaaggatggttaa

SEQ ID NO: 364529 - DNA, 120 bp, Artificial Sequence
  ENSG00000140987_23 (sequence is synthesized)
gccattggataatactgaatctgtttccctaagtgacttaaccttagagcaagcacaacatccaggttaattttttgtaagatttctccttttattattgccctcatcatagttcctgat

SEQ ID NO: 364530 - DNA, 120 bp, Artificial Sequence
  ENSG00000140987_24 (sequence is synthesized)
tgtctcttaaagtaagtggtttatagacattactatttctgataataatttacaaactactataaacaaatttataaacattactaatttctgatgaaaataaagttgtttctccctcca

SEQ ID NO: 364531 - DNA, 120 bp, Artificial Sequence
  ENSG00000140987_25 (sequence is synthesized)
atggtcaaaggatggcaaagtccactttagaggccattagcctagcagttgagtaggagctgtcactgatcctggcatcatcatcatcttgatgtgtgaccctatccaagttttggtttt

SEQ ID NO: 364532 - DNA, 120 bp, Artificial Sequence
  ENSG00000140987_26 (sequence is synthesized)
gtaatgggcggagcgaatcgcgccgctgacttccggcccggaggctgagggagaatgtttgataggtttatattgtctttttccatcctcttcagacatccttcaaagttgagccctttt

SEQ ID NO: 364533 - DNA, 120 bp, Artificial Sequence
  ENSG00000140987_27 (sequence is synthesized)
cttttgttattctgctgctagaagttagaacattcaagaattgagggtacacctataaacagactggcagatgatatagtgcttaatgtcttgcctcagtttgtcattgtgtcagaacat

SEQ ID NO: 364534 - DNA, 120 bp, Artificial Sequence
  ENSG00000140987_28 (sequence is synthesized)
ccgaaaaaagataggagaaaagttggagtttagggcataattttcctgtaataatttggagctcaaaaatattacaatgagaaaataaaaagctattaattagcaggagacttaatcaca

SEQ ID NO: 364535 - DNA, 120 bp, Artificial Sequence
  ENSG00000140987_29 (sequence is synthesized)
tgaagaatttcaattagatatttcttctacgtagtatagttataactttgcattccattgttttccttctctatagtccattgtatttctgtggggtttttttttttcaggttttgagtt

SEQ ID NO: 364536 - DNA, 120 bp, Artificial Sequence
  ENSG00000140987_30 (sequence is synthesized)
cagcctcccaaatagctggggttacagattcacaccactacacccagctaatcttagggatcacagagctcacaccaaagaccaggggaacagtcagaaggaggctgagtcaggagaact

SEQ ID NO: 364537 - DNA, 90 bp, Artificial Sequence
  ENSG00000140987_31 (sequence is synthesized)
cttagggatcacagagctcacaccaaagaccaggggaacagtcagaaggaggctgagtcaggagaactcaagcagtcctcctgcctcagc

SEQ ID NO: 364538 - DNA, 120 bp, Artificial Sequence
  ENSG00000140987_32 (sequence is synthesized)
ttccatctctccaaagaagtcccacaactgtcaaggcaggcaagccactacccttattgccagccacctctccatcattatcagtggagggaatgtcttttgtattataatattagccct

SEQ ID NO: 364539 - DNA, 120 bp, Artificial Sequence
  ENSG00000140987_33 (sequence is synthesized)
ttgtcagaacatccgaaaaaagataggagaaaagttggagaaaataaaaagctattaattagcaggagacttaatcacatgaagcatcaaagaatccacacaggcgagaagcctcacaag

SEQ ID NO: 364540 - DNA, 120 bp, Artificial Sequence
  ENSG00000140987_34 (sequence is synthesized)
actgctggttaggcctccagaccaggtccatcttctccctttttctctagcatggccttgcctttcacagcctgagcctatgctggctgggtacttagcaccttgctttcttcctgtttg

SEQ ID NO: 364541 - DNA, 120 bp, Artificial Sequence
  ENSG00000140988_0 (sequence is synthesized)
cttcttttccgacaaaacaccaaatggcggatgacgccggtgcagcgggggggcccgggggccctggtggccctgggatggggaaccgcggtggcttccgcggaggtttcggcagtggca

SEQ ID NO: 364542 - DNA, 120 bp, Artificial Sequence
  ENSG00000140988_1 (sequence is synthesized)
tccggggccggggtcgcggccgtggacggggccggggccgaggccgcggagctcgcggaggcaaggccgaggataaggagtggatgcccgtcaccaagttgggccgcttggtcaaggaca

SEQ ID NO: 364543 - DNA, 65 bp, Artificial Sequence
  ENSG00000140988_2 (sequence is synthesized)
ggaggagatctatctcttctccctgcctattaaggaatcagagatcattgatttcagacccgtgc

SEQ ID NO: 364544 - DNA, 79 bp, Artificial Sequence
  ENSG00000140988_3 (sequence is synthesized)
gtgttaagtgctccaaggaggtggccaccgccatccgtggggccatcatcctggccaagctctccatcgtccccgtgcg

SEQ ID NO: 364545 - DNA, 80 bp, Artificial Sequence
  ENSG00000140988_4 (sequence is synthesized)
acgcctcatccctgcacccaggggcactggcatcgtctccgcacctgtgcctaagaagctgctcatgatggctggtatcg

SEQ ID NO: 364546 - DNA, 68 bp, Artificial Sequence
  ENSG00000140988_5 (sequence is synthesized)
tgatgccataccaagtctccctatcaggagttcactgaccacctcgtcaagacccacaccagagtctc

SEQ ID NO: 364547 - DNA, 120 bp, Artificial Sequence
  ENSG00000140988_6 (sequence is synthesized)
ctctggaaggagactgtattcaccaagtctccctatcaggagttcactgaccacctcgtcaagacccacaccagagtctccgtgcagcggactcaggctccagctgtggctacaacatag

SEQ ID NO: 364548 - DNA, 61 bp, Artificial Sequence
  ENSG00000140988_7 (sequence is synthesized)
ccaagttgggccattaaggcatttgttgctatcggggactacaatggccacgtcggtctgg

SEQ ID NO: 364549 - DNA, 120 bp, Artificial Sequence
  ENSG00000140988_8 (sequence is synthesized)
gccagcgcaccaggttcaaggtacccggctgtcctggagggggctgcgctgggcttgccgggactctctcggctctgcatagttgcacttggcttcacccgtgtgactttcgtaacgggg

SEQ ID NO: 364550 - DNA, 120 bp, Artificial Sequence
  ENSG00000140988_9 (sequence is synthesized)
acaggccctgggcggtgggcagtgattgggtgtagggccaccagctgcctcacacacatcttttcgcaggctccctcgggcccccgtctcctgactccttccctcaccaggtgacaggcc

SEQ ID NO: 364551 - DNA, 120 bp, Artificial Sequence
  ENSG00000140988_10 (sequence is synthesized)
aaaacacgtgagtcctgttggtcgctgcagcgggcctctgcgtgggcggcgggaatccgcggacatcgggtcgggtctaggctcccgagtccgcgctcctgggcgggagcccttgtctgg

SEQ ID NO: 364552 - DNA, 74 bp, Artificial Sequence
  ENSG00000140988_11 (sequence is synthesized)
attaagcaaggtacggtggtcatggctaggccaaagctggacaaagcaaaaggaaatctgagtggaaagccaca

SEQ ID NO: 364553 - DNA, 120 bp, Artificial Sequence
  ENSG00000140988_12 (sequence is synthesized)
agctggacaaagcaaaaggaaatctgagtggaaagccacatctcaccaaacaagagaaaaagggcaaataggaagaaacgattgagatgcagaaatagggtaaccttacatacaagcttc

SEQ ID NO: 364554 - DNA, 120 bp, Artificial Sequence
  ENSG00000140988_13 (sequence is synthesized)
gaggagatctatctcttctccctgcctattaaggtacgcgtcggtcgttggggcgttgagcaagtgcgaccccggagtcatttgggctggggttggaggattagcatctgccattgactc

SEQ ID NO: 364555 - DNA, 120 bp, Artificial Sequence
  ENSG00000140988_14 (sequence is synthesized)
gcattaaagggcccagcgtctcgcgtgagaggttgaggttgtgttgcgggctggctgaggagaggattccacttagaggttggatggatacctgagcgaagccagagccacaaaaggcat

SEQ ID NO: 364556 - DNA, 120 bp, Artificial Sequence
  ENSG00000140988_15 (sequence is synthesized)
ttcagcgcatcttcccacattcgcagcgaattcatttcgaaagaactgaaagagaagcagcgcttggttcatgccatccgagaggatgatgaagttcaggttgtgggaggacactgtaag

SEQ ID NO: 364557 - DNA, 120 bp, Artificial Sequence
  ENSG00000140988_16 (sequence is synthesized)
ggttagcaaactgtcatagtccgcgtgtacgggacagctgtcatctgcatccagcgggtgcagtggggaaaggctaatggcatatttgtcatgtgagcgttcgccctagcaaggtacggt

SEQ ID NO: 364558 - DNA, 120 bp, Artificial Sequence
  ENSG00000140988_17 (sequence is synthesized)
ggtggtccacacatggggcatagccatggtctctcagctccgcttaaccacacgggtccagtgtgtgcttggcgtgttttcagggaggcagagaaaggctctcctaatgcacgacagacc

SEQ ID NO: 364559 - DNA, 120 bp, Artificial Sequence
  ENSG00000140990_0 (sequence is synthesized)
gtagcgggcgacctaggccgcgggacccggacggaggtagaggccagggcagcgcgtccgggagcggagtccgcgcccgccgccgccatgccggacagctgggacaaggatgtgtaccct

SEQ ID NO: 364560 - DNA, 120 bp, Artificial Sequence
  ENSG00000140990_1 (sequence is synthesized)
gagcccccgcgccgcacgccggtgcagcccaatcccatcgtctacatgatgaaagcgttcgacctcatcgtggaccgacccgtgaccctcgtgagagaatttatagagcggcagcacgca

SEQ ID NO: 364561 - DNA, 120 bp, Artificial Sequence
  ENSG00000140990_2 (sequence is synthesized)
atgtgcatgtatgaagccgaaatgcagtggaagagggactacaaagtcgaccaagaaattatcaacattatgcaggatcggctcaaagcctgtcagcagagggaaggacagaactaccag

SEQ ID NO: 364562 - DNA, 120 bp, Artificial Sequence
  ENSG00000140990_3 (sequence is synthesized)
cagaactgtatcaaggaagtggagcagttcacccaggtggccaaggcctaccaggaccgctatcaggacctgggggcctacagttctgccaggaagtgcctggccaaacagaggcagagg

SEQ ID NO: 364563 - DNA, 120 bp, Artificial Sequence
  ENSG00000140990_4 (sequence is synthesized)
atgctgcaagagagaaaagctgcaaaagaggccgccgctgccacctcctgaggcagctgtgggtgcccctgctgtgtggctctgtatgactgttgctgaaatataaagccctgcaacctg

SEQ ID NO: 364564 - DNA, 120 bp, Artificial Sequence
  ENSG00000140990_5 (sequence is synthesized)
ccaaggcctaccaggaccgctgtgcgtgccccacccacccccaaccccccaccatcctcctgaggcctgggggccagaaccattgcaaatcttccctcccctcccttgtgctcacttgac

SEQ ID NO: 364565 - DNA, 120 bp, Artificial Sequence
  ENSG00000140990_6 (sequence is synthesized)
tttgccccctttgcatgtagcagaggcctcggttcccagcttgtttccattgcttccccagatcaggacctgggggcctacagttctgccaggaagtgcctggccaaacagaggcagagg

SEQ ID NO: 364566 - DNA, 120 bp, Artificial Sequence
  ENSG00000140992_0 (sequence is synthesized)
attgctggggctccgcttcggggaggaggacgctgaggaggcgccgagccgcgcagcgctgcgggggaggcgcccgcgccgacgcggggcccatggccaggaccaccagccagctgtatg

SEQ ID NO: 364567 - DNA, 120 bp, Artificial Sequence
  ENSG00000140992_1 (sequence is synthesized)
acgccgtgcccatccagtccagcgtggtgttatgttcctgcccatccccatcaatggtgaggacccagactgagtccagcacgccccctggcattcctggtggcagcaggcagggccccg

SEQ ID NO: 364568 - DNA, 120 bp, Artificial Sequence
  ENSG00000140992_2 (sequence is synthesized)
ccatggacggcactgcagccgagcctcggcccggcgccggctccctgcagcatgcccagcctccgccgcagcctcggaagaagcggcctgaggacttcaagtttgggaaaatccttgggg

SEQ ID NO: 364569 - DNA, 120 bp, Artificial Sequence
  ENSG00000140992_3 (sequence is synthesized)
aaggctctttttccacggttgtcctggctcgagaactggcaacctccagagaatatgcgattaaaattctggagaagcgacatatcataaaagagaacaaggtcccctatgtaaccagag

SEQ ID NO: 364570 - DNA, 120 bp, Artificial Sequence
  ENSG00000140992_4 (sequence is synthesized)
agcgggatgtcatgtcgcgcctggatcaccccttctttgttaagctttacttcacatttcaggacgacgagaagctgtatttcggccttagttatgccaaaaatggagaactacttaaat

SEQ ID NO: 364571 - DNA, 120 bp, Artificial Sequence
  ENSG00000140992_5 (sequence is synthesized)
atattcgcaaaatcggttcattcgatgagacctgtacccgattttacacggctgagattgtgtctgctttagagtacttgcacggcaagggcatcattcacagggaccttaaaccggaaa

SEQ ID NO: 364572 - DNA, 120 bp, Artificial Sequence
  ENSG00000140992_6 (sequence is synthesized)
acattttgttaaatgaagatatgcacatccagatcacagattttggaacagcaaaagtcttatccccagagagcaaacaagccagggccaactcattcgtgggaacagcgcagtacgttt

SEQ ID NO: 364573 - DNA, 120 bp, Artificial Sequence
  ENSG00000140992_7 (sequence is synthesized)
ctccagagctgctcacggagaagtccgcctgtaagagttcagacctttgggctcttggatgcataatataccagcttgtggcaggactcccaccattccgagctggaaacgagtatctta

SEQ ID NO: 364574 - DNA, 120 bp, Artificial Sequence
  ENSG00000140992_8 (sequence is synthesized)
tatttcagaagatcattaagttggaatatgactttccagaaaaattcttccctaaggcaagagacctcgtggagaaacttttggttttagatgccacaaagcggttaggctgtgaggaaa

SEQ ID NO: 364575 - DNA, 120 bp, Artificial Sequence
  ENSG00000140992_9 (sequence is synthesized)
tggaaggatacggacctcttaaagcacacccgttcttcgagtccgtcacgtgggagaacctgcaccagcagacgcctccgaagctcaccgcttacctgccggctatgtcggaagacgacg

SEQ ID NO: 364576 - DNA, 120 bp, Artificial Sequence
  ENSG00000140992_10 (sequence is synthesized)
aggactgctatggcaattatgacaatctcctgagccagtttggctgcatgcaggtgtcttcgtcctcctcctcacactccctgtcagcctccgacacgggcctgccccagaggtcaggca

SEQ ID NO: 364577 - DNA, 120 bp, Artificial Sequence
  ENSG00000140992_11 (sequence is synthesized)
gcaacatagagcagtacattcacgatctggactcgaactcctttgaactggacttacagttttccgaagatgagaagaggttgttgttggagaagcaggctggcggaaacccttggcacc

SEQ ID NO: 364578 - DNA, 120 bp, Artificial Sequence
  ENSG00000140992_12 (sequence is synthesized)
agtttgtagaaaataatttaatactaaagatgggcccagtggataagcggaagggtttatttgcaagacgacgacagctgttgctcacagaaggaccacatttatattatgtggatcctg

SEQ ID NO: 364579 - DNA, 120 bp, Artificial Sequence
  ENSG00000140992_13 (sequence is synthesized)
tcaacaaagttctgaaaggtgaaattccttggtcacaagaacttcgaccagaggccaagaattttaaaactttctttgtccacacgcctaacaggacgtattatctgatggaccccagcg

SEQ ID NO: 364580 - DNA, 120 bp, Artificial Sequence
  ENSG00000140992_14 (sequence is synthesized)
ggaacgcacacaagtggtgcaggaagatccaggaggtttggaggcagcgataccagagccacccggacgccgctgtgcagtgacgtggcctgcggccgggctgcccttcgctgccaggac

SEQ ID NO: 364581 - DNA, 120 bp, Artificial Sequence
  ENSG00000140992_15 (sequence is synthesized)
acctgccccagcgcggcttggccgccatccgggacgcttccagaccacctgccagccatcacaaggggaacgcagaggcggaaaccttgcagcatttttatttaaaagaaaagaagaaaa

SEQ ID NO: 364582 - DNA, 120 bp, Artificial Sequence
  ENSG00000140992_16 (sequence is synthesized)
aaaacacccaaccacacaaagaacaaaaccagtaacaaacacaaaggaattcagggtcgctttgcttgctctctgtgctccgtggaggcctccgtgtgccctcgttgccgtggggaccca

SEQ ID NO: 364583 - DNA, 120 bp, Artificial Sequence
  ENSG00000140992_17 (sequence is synthesized)
gctccatgcacgtcaacccagtcccgcccagactagtggacagacctggtgtcaccagtttttcctagcatcagtccgaaccatgcgcccgccctgccccaactgtgtgctggtcctgct

SEQ ID NO: 364584 - DNA, 120 bp, Artificial Sequence
  ENSG00000140992_18 (sequence is synthesized)
gtggccgaggggaccgggtgtgtttggctctttatgcccctcccgctgtggtcctggaactcttcaccagggagggagccctgcgggggccgcagctttgtggagggagccgccgtgctt

SEQ ID NO: 364585 - DNA, 120 bp, Artificial Sequence
  ENSG00000140992_19 (sequence is synthesized)
ctgtcacctgctccctttcttgcgtctccctgtgatgggcccttaggcctggctgggcccattacatatccctgtggtggctctggtggcagctttctgtggcccctgctgtgttggcag

SEQ ID NO: 364586 - DNA, 120 bp, Artificial Sequence
  ENSG00000140992_20 (sequence is synthesized)
gcaggtttgcgtggtgaggagcgggaggggttggagtggtgcgggagcaggctgccgagtggagggtgccatcgagggctccggatcccttatcctacttagcagtgttggtctctgggg

SEQ ID NO: 364587 - DNA, 120 bp, Artificial Sequence
  ENSG00000140992_21 (sequence is synthesized)
ctggaagccgagcgcatgctgggagcggtactgtcagaagtgagcccagttagtaccccgctggctcactgcacgagagagtcctgccccgagccctaggtggggccaggaggtgccttg

SEQ ID NO: 364588 - DNA, 120 bp, Artificial Sequence
  ENSG00000140992_22 (sequence is synthesized)
gagaagccagccagagcagagagggctgctgacttccgtgtggagcagagaggcctgagggcctcctaaaaggtttaaatgtccacgcctctccagttgctgaagtagggtctgagagaa

SEQ ID NO: 364589 - DNA, 120 bp, Artificial Sequence
  ENSG00000140992_23 (sequence is synthesized)
ccctggcatcagcagacccagggtgcttctgtctcctgcagaccacgccagggagtgcagacaccaccgtcacacacgccccttttgtgttttggttcaagtttctcagagcccctcaga

SEQ ID NO: 364590 - DNA, 120 bp, Artificial Sequence
  ENSG00000140992_24 (sequence is synthesized)
gcttctacatctgtgcatcagaaatctcacagccttctcatgctgccggctcatctgggcccatagagtgggctttgccagttgctgttgcacaggaggcgagaacagcacacttcaacc

SEQ ID NO: 364591 - DNA, 120 bp, Artificial Sequence
  ENSG00000140992_25 (sequence is synthesized)
ccagcttgctggtcggctttcctctagagagagccggttttggggccatttccctttgatgctttggtggccttgccccgctctgcagcacagacaggccagatgcatttgtcctttgcc

SEQ ID NO: 364592 - DNA, 120 bp, Artificial Sequence
  ENSG00000140992_26 (sequence is synthesized)
tagctactccccaggtagagagtgctcctggtggcctggcaggtctgggcccttctctccctgcccaggttgtccctggagggcagccctcactccctttgggggagaggcagacattgc

SEQ ID NO: 364593 - DNA, 120 bp, Artificial Sequence
  ENSG00000140992_27 (sequence is synthesized)
tgcccacagacctgcctctgactcaactgtgtccaccctccctggtccctacccccaagtcacaggtgactcagcagtgaccctgtgtgccaggccagatccaaactgagagggaaggtg

SEQ ID NO: 364594 - DNA, 120 bp, Artificial Sequence
  ENSG00000140992_28 (sequence is synthesized)
tcgtttttacactgctaatgacgagagtggctctttttagctaggcgagtacagacggggcctgggagggggcagagatgttccccaggccctgcctgtggttcctgcctgggccttggc

SEQ ID NO: 364595 - DNA, 120 bp, Artificial Sequence
  ENSG00000140992_29 (sequence is synthesized)
acgttgccctgggcctgtggccggagtcggagtcctctctcctcctcctggcttttggaaaggcttggctgtgttggggagtctctcttagccctttcaggaatttctgttcaggcttcc

SEQ ID NO: 364596 - DNA, 120 bp, Artificial Sequence
  ENSG00000140992_30 (sequence is synthesized)
tcctcctcatcagctattttacccatctcagaacgtcctgtgtctccatgtaggagagtggctctctcagatctctcagggcgtctggttatagggaaacaagtggagcagggacgtggc

SEQ ID NO: 364597 - DNA, 120 bp, Artificial Sequence
  ENSG00000140992_31 (sequence is synthesized)
tttaattggagcactcggctgggctgcttggggagactcttccgtgcgttcttcctctggatagaaccaccacctcctgggcgtcactgacaagctccatcttaacctccaaagccacag

SEQ ID NO: 364598 - DNA, 120 bp, Artificial Sequence
  ENSG00000140992_32 (sequence is synthesized)
aactaggggctcagagccagagctggcagccgccagccaaaatgatgccattgcctgagctgacagccaagcccttctgtgggtcacctttctcctcacccagccccttgctcttccctt

SEQ ID NO: 364599 - DNA, 120 bp, Artificial Sequence
  ENSG00000140992_33 (sequence is synthesized)
ttgaaaggcccgtgtgttttctttccttaccctgtgcttgctcatgtctactccggttttctctaccacatccttagagccatcacctggcacgcaggcgccttacattctacggtagaa

SEQ ID NO: 364600 - DNA, 120 bp, Artificial Sequence
  ENSG00000140992_34 (sequence is synthesized)
cgtggggtactgtgtgtgcacatagacacacttacgtggaattacagttgtgggtttatccaagatgaggaagatttcacctgctgtttaatagacttggggccatgtgcctccccacac

SEQ ID NO: 364601 - DNA, 120 bp, Artificial Sequence
  ENSG00000140992_35 (sequence is synthesized)
atgggcaaggacaggtggaatgtcgggaccacactgtgcggcttctcggcacaaagcggagggaggctgtggtcgctgccggcctaggtgtcccaggtgccccgcctttctctgggacac

SEQ ID NO: 364602 - DNA, 120 bp, Artificial Sequence
  ENSG00000140992_36 (sequence is synthesized)
agttgggggctggcttctgagggattcctttctcccctctttgtgtggccccagccagggcggtgggcagtcctggtgtagagcacaagcctctccaccctagagaaatgcctctgtacc

SEQ ID NO: 364603 - DNA, 120 bp, Artificial Sequence
  ENSG00000140992_37 (sequence is synthesized)
acggctaccatgtggaaccttaacttgcagaaggcttgttaacaattgttttgagagagatggctggtcatgccacagctgctggggactccgcctactccagccctcttgggacacact

SEQ ID NO: 364604 - DNA, 120 bp, Artificial Sequence
  ENSG00000140992_38 (sequence is synthesized)
gtgggatttgtggcccttccccagaggaattgtggagactgtcccatggaacaaaccctcaggcaccagcacagggctctgggtgactcagtaaaactaacgtttgtctctgacaagatc

SEQ ID NO: 364605 - DNA, 120 bp, Artificial Sequence
  ENSG00000140992_39 (sequence is synthesized)
agctgtaggctcaccggccagagaagaccactgtgagcattttgccgtatatcctgccctgccatttgttcactttttaaactaaaataggaacatccgacacacaccgtttgcatcgtc

SEQ ID NO: 364606 - DNA, 120 bp, Artificial Sequence
  ENSG00000140992_40 (sequence is synthesized)
ttctcccttgatattttaagcattttcccatgtcatgagtttctcagaaacatgtttttaacaattgtactatttagtcattgtccatttactataatttatctgaccatttccctactg

SEQ ID NO: 364607 - DNA, 120 bp, Artificial Sequence
  ENSG00000140992_41 (sequence is synthesized)
taaaatacttaagacggtttctgatttttccactatttaaataatgctgtgatgaatatctttaaaatcttctgatttcttacttttttcccccttagatgcctggaagtggtattttga

SEQ ID NO: 364608 - DNA, 120 bp, Artificial Sequence
  ENSG00000140992_42 (sequence is synthesized)
ggtgaaagagtttgttcattttgaagatatttctgtctctctctcgacctgatgtgtagacgctcacttccagtagcagaaccaccttagttgtgtcttacagattctgaacaaatcggt

SEQ ID NO: 364609 - DNA, 120 bp, Artificial Sequence
  ENSG00000140992_43 (sequence is synthesized)
ttctgataagccatgtgttccaaagaatgtctgaataagaccgctctttatttaaatgctaagaggatgtcactactgcaatccatctgtggccgattttttccaagagccaatttcctt

SEQ ID NO: 364610 - DNA, 120 bp, Artificial Sequence
  ENSG00000140992_44 (sequence is synthesized)
gttttggttgcaagaacctggctctgcctgcatgtcagctctctgccctccctgctgccgtggctttcaagcgcttggcagaatcttgtacttcgtgtccacaatggtactgaatttgca

SEQ ID NO: 364611 - DNA, 120 bp, Artificial Sequence
  ENSG00000140992_45 (sequence is synthesized)
tctgcacagtcagcagagataacaagtgttgaactgaccttgccacatgcttagtgagtgatttgtaattaagtttatagactcagaaggtatattaggacatttggaatcagtagcaga

SEQ ID NO: 364612 - DNA, 120 bp, Artificial Sequence
  ENSG00000140992_46 (sequence is synthesized)
gcaaagcctctttgaaaaaaaccacgtagctgattgggttttacaagagtgcatttgtctcccccttccacccgtggggccccaccttcaggtcttagtggttcacaagagcccagcagc

SEQ ID NO: 364613 - DNA, 120 bp, Artificial Sequence
  ENSG00000140992_47 (sequence is synthesized)
caggctggctttttcattgtagggcgtggttgtcccagctggtgtagatttcaggccgccccccccaactccctgcccacagtgttgcagattgcctggctggcagcaagtccagaccac

SEQ ID NO: 364614 - DNA, 120 bp, Artificial Sequence
  ENSG00000140992_48 (sequence is synthesized)
ccaaatttggttggattcttcatttctccactgtagttggggtccattgattgtgcaggggaacgtgcaggaggtttttctaggcaccgtgttcagtgctgcttcactctaccagagatt

SEQ ID NO: 364615 - DNA, 120 bp, Artificial Sequence
  ENSG00000140992_49 (sequence is synthesized)
atggccaaattgcacggaatttggtttcttgccctctgaagcctgagggcccccccttgcctggctggttgacagacccggggtggtcactgctgagacttcagagatcgcagctgctgt

SEQ ID NO: 364616 - DNA, 120 bp, Artificial Sequence
  ENSG00000140992_50 (sequence is synthesized)
gagaatacggtgaaggtactttgttctggaagatgttgtcatacacttttccccagttattttcaaacttgacatgagcctatgttgactcactgggtgggggtcccttcttacgcagca

SEQ ID NO: 364617 - DNA, 120 bp, Artificial Sequence
  ENSG00000140992_51 (sequence is synthesized)
cacgtggcaagtgcctgaatcggggctggaggcacttcagagcctctgaggggccaccacttctggcccaaaattgcagggttgtagatgaggctgcctgtggagaactggtgtgaggag

SEQ ID NO: 364618 - DNA, 120 bp, Artificial Sequence
  ENSG00000140992_52 (sequence is synthesized)
gaagctgtttccaacaaagagcactttcatctgttgagatggctgtggtgagcaactgaacgagcctacgtgtgtacctgaattttccccgtaactcatttcttccatatgaagaaacac

SEQ ID NO: 364619 - DNA, 120 bp, Artificial Sequence
  ENSG00000140992_53 (sequence is synthesized)
caaactatgtacagagaactttttacaaaaggcagaccttttttaagctgtgtaacccacatagcctaaccacctggcagaatgactacgaataggggtcattgtgctggtaaaagcctc

SEQ ID NO: 364620 - DNA, 120 bp, Artificial Sequence
  ENSG00000140992_54 (sequence is synthesized)
tattacgactgtaagtaagttggatgttggcaaaattaaattgttacagtatttagagctgctgtagctgttccttcacaacataaaataggataaatgactagtacgtctttcaggtgg

SEQ ID NO: 364621 - DNA, 120 bp, Artificial Sequence
  ENSG00000140992_55 (sequence is synthesized)
gtggcaagcagaacatgcgtaatattctctacctggtctgtagctgtaactgtgatgtacagacaaagcaaaaattaaaagaacttatgaaaacaaatgcaatgatactaggatatacac

SEQ ID NO: 364622 - DNA, 120 bp, Artificial Sequence
  ENSG00000140992_56 (sequence is synthesized)
ttttgtatttttattcttatataaggttatttgctggctattgttggcctctagttcagtctgtgttatttaaattctaatatatgaattatttgaattgaattcatgttcggggccacg

SEQ ID NO: 364623 - DNA, 120 bp, Artificial Sequence
  ENSG00000140992_57 (sequence is synthesized)
ttgttgtatgtattgatgtacagccttgaatgtgaataattattgtaaactatattttacaactttttttctggctttattatataaattttctattgggtcagtgatttaatcatataa

SEQ ID NO: 364624 - DNA, 120 bp, Artificial Sequence
  ENSG00000140992_58 (sequence is synthesized)
tttaatgaatctgtttatcctttttttttttccaaatacttgtgctttaggtgtagttaccagatgatgaattttcctcgtatggtcagtagtcttgtaataaaaagcatgtagagtgta

SEQ ID NO: 364625 - DNA, 80 bp, Artificial Sequence
  ENSG00000140992_59 (sequence is synthesized)
cctccttacctgcagccgggcggccgggccggggatggcgggcgccggccgagggcgctgcttggctgcggcggggagac

SEQ ID NO: 364626 - DNA, 120 bp, Artificial Sequence
  ENSG00000140992_60 (sequence is synthesized)
cgggcctgggttgcggcgggcggcggcctggccgggggcgctgacagacgcgcggagggcgggggaggccgggaggtgtcacccggcccagcggggtggaagtgcctggaaagtttgttt

SEQ ID NO: 364627 - DNA, 120 bp, Artificial Sequence
  ENSG00000140992_61 (sequence is synthesized)
acccggcccagcggggtggaagtgcctggaaagtttgttttcggcttggcgcagcctggagccgagcctccagggttacctttcggttctgtctgtagaggaaccgccctgggcttccac

SEQ ID NO: 364628 - DNA, 120 bp, Artificial Sequence
  ENSG00000140992_62 (sequence is synthesized)
ctggaacggggtccttggcgcctccgcctgcgagagaagcagaaggtgcaagttcttgctgaaagcacctgatgctcctgggcccccttttccagattcttgatgacagtggtcgggaaa

SEQ ID NO: 364629 - DNA, 120 bp, Artificial Sequence
  ENSG00000140992_63 (sequence is synthesized)
actcgcctttcacggcccggccaaggggcatttgggtgcttttgctgcccgtggctgtgctcagcgttgtgggaagcccctgggaggccgaatgtgcaggatcaccgaggggaaagtgag

SEQ ID NO: 364630 - DNA, 120 bp, Artificial Sequence
  ENSG00000140992_64 (sequence is synthesized)
tgtgtggcgttgttgaacatggtcctctctcctggccactacatcacattcagagttgattctcccctccctgttcagagactggtggtgggtgttctttatccggcatctctctgtgac

SEQ ID NO: 364631 - DNA, 120 bp, Artificial Sequence
  ENSG00000140992_65 (sequence is synthesized)
agcagcagcatttgtggccataattggcctaaattcatgaactcattagagagtgcagaaaggtcacagcctgatacattcatgagatgcaattcattaaagagcaacttctccccagca

SEQ ID NO: 364632 - DNA, 120 bp, Artificial Sequence
  ENSG00000140992_66 (sequence is synthesized)
gagttggctggaggctcaggcagcgcgagggacaggaggagggcgaggcgctgcctggtggattagcggggagccatggcacgggcaggactcaggagaggaggccggcagctcacagca

SEQ ID NO: 364633 - DNA, 120 bp, Artificial Sequence
  ENSG00000140992_67 (sequence is synthesized)
tggccccggggtcccacgtacggggcctcctgcccggcctgtcgcatctgcgcttggcttggtgcttgtacaactgtgcggccaagatgctccagaacactgcctgtctttccacagaaa

SEQ ID NO: 364634 - DNA, 120 bp, Artificial Sequence
  ENSG00000140992_68 (sequence is synthesized)
tgccgagtggaggccgagcgcatgctgggagcggtactgtcagaagtgagcccagttagtaccccgctggctcactgcacgagagagtcctgccccgagccctaggtggggccaggaggt

SEQ ID NO: 364635 - DNA, 120 bp, Artificial Sequence
  ENSG00000140992_69 (sequence is synthesized)
tgccttgagcttgccgccattctagcttaggctggatcacccacccccggcacagagaggagctgccttcaagacggattttcctgcatgatggaaagtggagtttgcacaataaaagag

SEQ ID NO: 364636 - DNA, 120 bp, Artificial Sequence
  ENSG00000140992_70 (sequence is synthesized)
agagtccccattctcccatcaccaagagcagctcttcccatcttcacgtggtttattttggtcttttccagattggcattcatttaggattggctatgatgcatggggctggggagaatt

SEQ ID NO: 364637 - DNA, 120 bp, Artificial Sequence
  ENSG00000140992_71 (sequence is synthesized)
actgcttattgtaaaaaattcactcggtgctagtgacctgatgcccagcatcctcagtgggttttccctgtaaaaattccagtatgtgtcgctaaaatacaaatctttttaaaagcgtaa

SEQ ID NO: 364638 - DNA, 120 bp, Artificial Sequence
  ENSG00000140992_72 (sequence is synthesized)
cattgctggggctccgcttcggggaggaggacgctgaggaggcgccgagccgcgcagcgctgcgggggaggcgcccgcgccgacgcggggcccatggccaggaccaccagccagctgagg

SEQ ID NO: 364639 - DNA, 120 bp, Artificial Sequence
  ENSG00000140992_73 (sequence is synthesized)
attgctggggctccgcttcggggaggaggacgctgaggaggcgccgagccgcgcagcgctgcgggggaggcgcccgcgccgacgcggggcccatggccaggaccaccagccagctgattc

SEQ ID NO: 364640 - DNA, 120 bp, Artificial Sequence
  ENSG00000140992_74 (sequence is synthesized)
gacttcaggaccctactgagagatggaatcaagagctctccggggttctttgagtggggagttgtatcggaaaccaccatcagcgcgcctgagctcgcctcgcattgttcttctgtagtg

SEQ ID NO: 364641 - DNA, 120 bp, Artificial Sequence
  ENSG00000140992_75 (sequence is synthesized)
cggggggccactgccaccaccgtgaggacacgttggggtctggggagggattgttatggctgtgggtgcaccttgcacgtcttgccgacctagctttgcacgctgatcttccctccgtgc

SEQ ID NO: 364642 - DNA, 120 bp, Artificial Sequence
  ENSG00000140992_76 (sequence is synthesized)
ccgcttacattgttaactgggtttctgccctccctcctctccttcgtatttctgtgtctcattgacaactgttctgtagtcgctttgttgacagttgccaaactgctttccaaaaacatt

SEQ ID NO: 364643 - DNA, 120 bp, Artificial Sequence
  ENSG00000140992_77 (sequence is synthesized)
tccactgcaatcccggtttttggtgccagccgcagtggtgtgagtgcgctcgctttattatagtcttgccagcactgggcgtctctgtgtattgtaaacacatgcgatcatcactcttat

SEQ ID NO: 364644 - DNA, 120 bp, Artificial Sequence
  ENSG00000140992_78 (sequence is synthesized)
tgtaagctggccgggatggcgggcgaggcaggtggcactgggtcctccgtgcactgggcttcatgcccgtgcgccagacccacgtgtgatttgtagccgaaaggggagggtgtctgtgcc

SEQ ID NO: 364645 - DNA, 120 bp, Artificial Sequence
  ENSG00000140992_79 (sequence is synthesized)
actgcggcaggcctgctggtggttgtagtctttgctgccgtgaggcagtggcgggtgaggtgctgggtgggtcattttctcctcatttccgtggccgtggacaggctagtgagtttccac

SEQ ID NO: 364646 - DNA, 120 bp, Artificial Sequence
  ENSG00000140992_80 (sequence is synthesized)
aaggctctttttccacggttgtcctggctcgagaactggcaacctccagagaatatgcgagtgagtatgggctgcagggagctgtgcgtccgggagcagggcaagcggctccgtgcaggg

SEQ ID NO: 364647 - DNA, 120 bp, Artificial Sequence
  ENSG00000140992_81 (sequence is synthesized)
caggacactgttggctttagagaccaccaggctgttgtgtacaatgtttgaaagactttaatttgtaccagttacctttgtgagtcatgtctttagtgttttttgttgtttctgatagta

SEQ ID NO: 364648 - DNA, 120 bp, Artificial Sequence
  ENSG00000140992_82 (sequence is synthesized)
tgttaagctttacttcacatttcaggacgacgagaagctgtgtatcctttgcgtggttggtgccgtctgaagccacaccagtcacccctctcacttggaatcagaccctgtgtgttccca

SEQ ID NO: 364649 - DNA, 120 bp, Artificial Sequence
  ENSG00000140992_83 (sequence is synthesized)
caagcagcccccgctccctgccgagtggggtccctcaggccgctgacattcagggaggcagccgaggcagcgccagggtgtggctgggagtctgcacaggacgttacctcccggagaagc

SEQ ID NO: 364650 - DNA, 120 bp, Artificial Sequence
  ENSG00000140992_84 (sequence is synthesized)
caccgatgtggctccagcacagtcctctctgctgcggcttgcttggtcggcgtcccttgctcccctagagcgccatcttttctgttattaaaccttggctcaggaatctgggaggcaagg

SEQ ID NO: 364651 - DNA, 120 bp, Artificial Sequence
  ENSG00000140993_0 (sequence is synthesized)
gagcccggcctacttcctcgccagagaaactgctgtcttccccggcggtagggaagggttaatgccaccgagtatccagacccgctgaagcctagagggccttgtaccggctcaccgcgt

SEQ ID NO: 364652 - DNA, 120 bp, Artificial Sequence
  ENSG00000140993_1 (sequence is synthesized)
ggctgtcgctgtctcgtgtccccagtgggggaggcgtcgcactgccgcgtctgttctgcgtggctgtcgggcggcgtttggtcccgggagcctcgccggcacctggaatggataaaagtg

SEQ ID NO: 364653 - DNA, 120 bp, Artificial Sequence
  ENSG00000140993_2 (sequence is synthesized)
gcagtttttgtttcttcccatgaggttgtgtatctggactgagaaccaggaaattaatctagactaagacatttctaaggacctggaatggctttggggagcaccaggaggacccgaaaa

SEQ ID NO: 364654 - DNA, 120 bp, Artificial Sequence
  ENSG00000140993_3 (sequence is synthesized)
gagtatttgagggcctagagggacagaagagtttgccagtaggatttatgagaaacaattgatcagaaacagcagcagagaaaccttttagatttcttctgtggaaaagttgagtcttgg

SEQ ID NO: 364655 - DNA, 120 bp, Artificial Sequence
  ENSG00000140993_4 (sequence is synthesized)
ttcaaattaagtaaaataaacactgaagagaaatcaaaatctcaaatataaaaagtatgttacttatagtgtaaatttaggaaaacaaatgaaaggacagatctttaaaaatttttaact

SEQ ID NO: 364656 - DNA, 120 bp, Artificial Sequence
  ENSG00000140993_5 (sequence is synthesized)
atggtgaaatatttgtaaaacttttgggctcatctctgagaattgctgtgattctgaaacttgataatatctcaaatagagaacagtttcagtgaaaaatagcacttgagaataaatcag

SEQ ID NO: 364657 - DNA, 120 bp, Artificial Sequence
  ENSG00000140993_6 (sequence is synthesized)
atgttcccaagaaagaagatctgagaatggtaaagtgccactgacaaataaattatttacatacttacatattaccttggcaaacacaagagacattcaagttaaagcacggtgcttgac

SEQ ID NO: 364658 - DNA, 120 bp, Artificial Sequence
  ENSG00000140993_7 (sequence is synthesized)
aatactatattgaatgcaataaaagttggatttcattcatatgtacaacaaactactttcttcttcacttcaagattcggtacaactgttcctgaattccaactctccatacatcccaat

SEQ ID NO: 364659 - DNA, 120 bp, Artificial Sequence
  ENSG00000140993_8 (sequence is synthesized)
gtcagggtccctgtagctcggagcccttatccaggtagatgaactgctgcccagtgaacactatgtacaaagcaatttgagcaccattctcttttctggcagtgaggtaaaatcaggtct

SEQ ID NO: 364660 - DNA, 120 bp, Artificial Sequence
  ENSG00000140993_9 (sequence is synthesized)
ttttggaaggggagaagccacattgcatctctgctacacacaagattactctgtcattgcctttgagtctttcacgctcccttcttctgaagcatcagtttttatggaaacttatcacac

SEQ ID NO: 364661 - DNA, 120 bp, Artificial Sequence
  ENSG00000140993_10 (sequence is synthesized)
ctgtcttgtgggcacatcttgctccatccctcctctcttcatattgtccgttttccggtattgagttagggaaagtatgcaggtattcctgtcattcctgactgaggctgttgtatctgt

SEQ ID NO: 364662 - DNA, 120 bp, Artificial Sequence
  ENSG00000140993_11 (sequence is synthesized)
caaaagagaggagaggtagggggcattctgaaaaatgatcactcatggcttgcaggagcaagagccagacaggactttgcaactggcagctttctgagtgcataagacctccacctctag

SEQ ID NO: 364663 - DNA, 120 bp, Artificial Sequence
  ENSG00000140993_12 (sequence is synthesized)
actagctcttcagtcatggttagccccttcagtccattatcctccaatacaatgcccatgccttctggggctttcagctaagttttgtttaaaaaatgtgggttttttttttgccaattc

SEQ ID NO: 364664 - DNA, 120 bp, Artificial Sequence
  ENSG00000140993_13 (sequence is synthesized)
attaaggcttttccctttgttttctcctgttggtggttcagagttaaattcagtatgaataagagagggaaatatacaacactgaatttggaggagaaaatgaaggttctaagtagaatt

SEQ ID NO: 364665 - DNA, 120 bp, Artificial Sequence
  ENSG00000140993_14 (sequence is synthesized)
atgacattaaaaaaaataagaagttaattctggactttgtactgaagcaggacatgccattagtaggggctgagaagagaaagaggacaacgggagccaaatatggtgatgtagatgatg

SEQ ID NO: 364666 - DNA, 120 bp, Artificial Sequence
  ENSG00000140993_15 (sequence is synthesized)
cggtctacatgtggtaccaacagaaacgctcagccggtgttccggtaagaggcgtggagcttcaggctgctgcagagagatttgcacggtgttttgggcgaacagatttcaaagctagca

SEQ ID NO: 364667 - DNA, 120 bp, Artificial Sequence
  ENSG00000140993_16 (sequence is synthesized)
ctggttggctttttagatttcgaaatcggcatgcaattgggaaccgaaaaggatgtggggaacaagtcctaagttcagtttctgaaaatgttgagccatttcgacaaaaactgtccatga

SEQ ID NO: 364668 - DNA, 120 bp, Artificial Sequence
  ENSG00000140993_17 (sequence is synthesized)
taatcaaagaggagaaactgtgtctagctcagctatacagtggggatgaaacagacctcttttggaagtcaatgccagaaaattctcaggcaagtaggaaagatatctgcctaccaggga

SEQ ID NO: 364669 - DNA, 120 bp, Artificial Sequence
  ENSG00000140993_18 (sequence is synthesized)
agaaaataaacaaagaaaggttgtctgcctttttatgtgcaaatgcagacggaactcataaattaaagtcaatcattattggaaaatcaaaactgcccaaaagtgtgaaagaggacacaa

SEQ ID NO: 364670 - DNA, 120 bp, Artificial Sequence
  ENSG00000140993_19 (sequence is synthesized)
gtacattgcctgtgatatataaacccagtaaagatgtttggttcaccagagaattgttttcagaatggttttttcaaaactttgttcctgaggtccgacattttcaacttaatgttctaa

SEQ ID NO: 364671 - DNA, 120 bp, Artificial Sequence
  ENSG00000140993_20 (sequence is synthesized)
gatttcatgacgaggacgtcagggcattgttacttctggacagttgcccggctcatccttcctctgaatccctaaccagtgaggatggtcgaataaaatgtatgttcttcccccataaca

SEQ ID NO: 364672 - DNA, 120 bp, Artificial Sequence
  ENSG00000140993_21 (sequence is synthesized)
cttcaaccttgattcaaccaatgaatcaaggtgtgatcttgagctgcaaacggctgtatagatggaagcaacttgaagagagtcttgtaatatttgaagaaagtgatgatgagcaagaga

SEQ ID NO: 364673 - DNA, 120 bp, Artificial Sequence
  ENSG00000140993_22 (sequence is synthesized)
aaggagataaaggagtttccaaaattaaaatctacaatataaaaagtgcaatttttaactgggcaaaaagttgggaagaagtaaaacaaataaccatagcaaatgcatgggaaaatcttc

SEQ ID NO: 364674 - DNA, 120 bp, Artificial Sequence
  ENSG00000140993_23 (sequence is synthesized)
tttacaaaaaggaacctgaatatgattttcaaggcttagaacatggggattatagagaaattcttgaaaaatgtggggagttggaaactaagttggatgatgatagggtgtggttaaatg

SEQ ID NO: 364675 - DNA, 120 bp, Artificial Sequence
  ENSG00000140993_24 (sequence is synthesized)
gagatgaagaaaagggttgtctcctaaaaaccaaaggtggaataacaaaggaagttgttcaaaaaggaggagaagctgagaagcagactgctgaatttaaattatctgctgtaagagaga

SEQ ID NO: 364676 - DNA, 120 bp, Artificial Sequence
  ENSG00000140993_25 (sequence is synthesized)
gtttggactaccttcttgactttgttgatgccacacctgagtttcagagattccacttcacactgaaagagatgcaacaagaaatagtcaagaaacagttccagagtaaaatccattcta

SEQ ID NO: 364677 - DNA, 120 bp, Artificial Sequence
  ENSG00000140993_26 (sequence is synthesized)
gaattggtagctttttgaaacctaggcctcataatattaaggactccttcagtgggccttcaacttctggttctaatcattagattttgtgtttaaagatttctgccattatatgatgta

SEQ ID NO: 364678 - DNA, 120 bp, Artificial Sequence
  ENSG00000140993_27 (sequence is synthesized)
ggccagctgtgaattgtcttgttttagcaactgacattattttgtatatcagtgcccatttatataatggttataaaatttacagtttgaaaataatacatttgtgtttctttaaattta

SEQ ID NO: 364679 - DNA, 120 bp, Artificial Sequence
  ENSG00000140993_28 (sequence is synthesized)
gacttgctcagggtcacatagctcagcagtggcggccgctaatcggaaatagctctcctgttgtggtatcctctgcgttttccactccagtattcttccctggaaaatgggaaccttgtt

SEQ ID NO: 364680 - DNA, 120 bp, Artificial Sequence
  ENSG00000140993_29 (sequence is synthesized)
acggaaaatggctgcctccctgcggccgccgccgctccagcggctccagggtcgaagccataggggaagccgcttctcggttacctcggccagcttggcttccgtggaggccgctcctcg

SEQ ID NO: 364681 - DNA, 120 bp, Artificial Sequence
  ENSG00000140993_30 (sequence is synthesized)
cgacagagcgagactccgtcgcaaaaaacaaaacaaaacaatacaaaaaagtaaatcctggagcaccatttgagcgttttggactgagctgctttctatggcagttcatctaagcacctg

SEQ ID NO: 364682 - DNA, 120 bp, Artificial Sequence
  ENSG00000140993_31 (sequence is synthesized)
gtgctcgagctgttgctgggctcgtcgccgcctcctcgaggaagaggcattttgtccgggtcgggccactcgctaggtcagaaacagcggccccccgagggttttgtaccgttttctagg

SEQ ID NO: 364683 - DNA, 120 bp, Artificial Sequence
  ENSG00000140995_0 (sequence is synthesized)
agctgaatcttccacgcgagaagcctaagagtagggatacgggggcggggagcagcaggcctgctctgtgtgtaaacaacgggaaagcaggaataacgccagggcccgcggacaccagct

SEQ ID NO: 364684 - DNA, 120 bp, Artificial Sequence
  ENSG00000140995_1 (sequence is synthesized)
gcctccgaagtcccgctgcccggcgcctgcatggagcagcctcctgagcgcagtgtggcgcgtcctcctgtgtaaagagggtagagccgcgccgggtccctccctctgcagccgtgaagc

SEQ ID NO: 364685 - DNA, 120 bp, Artificial Sequence
  ENSG00000140995_2 (sequence is synthesized)
ccccgcggggccctgcaggtggctggcggcacctgcacacggtggttctctgttcctttttcctcctcaaccactgaggttaaaaaaagtgttaaaagccaccctttttgtttttttgag

SEQ ID NO: 364686 - DNA, 120 bp, Artificial Sequence
  ENSG00000140995_3 (sequence is synthesized)
agcgctgggatgacaggcgtgagccgccgcgcccgcccattttttttaaacgtgttggggtttgggtttcagccacaggccttctgcgatgagaggaaacccaggacgcgcagccccagg

SEQ ID NO: 364687 - DNA, 120 bp, Artificial Sequence
  ENSG00000140995_4 (sequence is synthesized)
tcaggcccgcggaacagccgggcggactccggggctcgcagactcgcgacccgcgtgccatgaacctccgcgccggaggcggcagcagcgagcgcggggctggatccagcgtagcggggc

SEQ ID NO: 364688 - DNA, 120 bp, Artificial Sequence
  ENSG00000140995_5 (sequence is synthesized)
ggccgggcggatccagcgcagccgggagacagatgcgaggcggcggtcagcaggtgccgaacccacggccaggcttccgtggccagcagccctagaggaatggccatcctgtccctgcga

SEQ ID NO: 364689 - DNA, 120 bp, Artificial Sequence
  ENSG00000140995_6 (sequence is synthesized)
gcccctgggccctggcaggcgatgcaggtgggatgctatggaatatgatgagaagctggcccgtttccggcaggcccacctcaaccccttcaacaagcagtctgggccgagacagcatga

SEQ ID NO: 364690 - DNA, 120 bp, Artificial Sequence
  ENSG00000140995_7 (sequence is synthesized)
gcagggccctggggaggaggtcccggacgtcactcctgaagaggccctgcctgagctgccccctggggagccggaattccgctgccctgaacgcgtgatggatctcggcctgtctgagga

SEQ ID NO: 364691 - DNA, 120 bp, Artificial Sequence
  ENSG00000140995_8 (sequence is synthesized)
ccacttctcccgccctgtgggtctgttcctggcctctgacgtccagcagctgcggcaggcgatcgaggagtgcaagcaggtgattctggagctgcccgagcagtcggagaagcagaagga

SEQ ID NO: 364692 - DNA, 120 bp, Artificial Sequence
  ENSG00000140995_9 (sequence is synthesized)
tgccgtggtgcgactcatccacctccggctgaagctccaggagctgaaggaccccaatgaggatgagccaaacatccgagtgctccttgagcaccgcttttacaaggagaagagcaagag

SEQ ID NO: 364693 - DNA, 120 bp, Artificial Sequence
  ENSG00000140995_10 (sequence is synthesized)
cgtcaagcagacctgtgacaagtgtaacaccatcatctgggggctcattcagacctggtacacctgcacagggtgttattaccgctgtcacagtaagtgcttgaacctcatctccaagcc

SEQ ID NO: 364694 - DNA, 120 bp, Artificial Sequence
  ENSG00000140995_11 (sequence is synthesized)
ctgtgtgagctccaaagtcagccaccaagctgaatacgaactgaacatctgccctgagacagggctggacagccaggattaccgctgtgccgagtgccgggcgcccatctctctgcgggg

SEQ ID NO: 364695 - DNA, 120 bp, Artificial Sequence
  ENSG00000140995_12 (sequence is synthesized)
tgtgcccagtgaggccaggcagtgcgactacaccggccagtactactgcagccactgccactggaacgacctggctgtgatccctgcacgcgttgtacacaactgggactttgagcctcg

SEQ ID NO: 364696 - DNA, 120 bp, Artificial Sequence
  ENSG00000140995_13 (sequence is synthesized)
aaaggtttctcgctgcagcatgcgctacctggcgctgatggtgtctcggcccgtactcaggctccgggagatcaaccctctgctgttcagctacgtggaggagctggtggagattcgcaa

SEQ ID NO: 364697 - DNA, 120 bp, Artificial Sequence
  ENSG00000140995_14 (sequence is synthesized)
gctgcgccaggacatcctgctcatgaagccgtacttcatcacctgcagggaggccatggaggctcgtctgctgctgcagctccaggatcggcagcattttgtggagaacgacgagatgta

SEQ ID NO: 364698 - DNA, 120 bp, Artificial Sequence
  ENSG00000140995_15 (sequence is synthesized)
ctctgtccaggacctcctggacgtgcatgccggccgcctgggctgctcgctcaccgagatccacacgctcttcgccaagcacatcaagctggactgcgagcggtgccaggccaagggctt

SEQ ID NO: 364699 - DNA, 120 bp, Artificial Sequence
  ENSG00000140995_16 (sequence is synthesized)
ctctgcagagagggcgacgtgctgttcccgttcgacagccacacgtctgtgtgcgccgactgctccgcggtcttccacagggactgctactacgacaactccaccacttgtcccaagtgt

SEQ ID NO: 364700 - DNA, 120 bp, Artificial Sequence
  ENSG00000140995_17 (sequence is synthesized)
gcccggctcagcctgaggaagcagtcgctcttccaggagccaggtcccgatgtggaggcctagcgccgaggaacagtgctgggcaccccgcctggcccgccaggacccaccctgccaaca

SEQ ID NO: 364701 - DNA, 120 bp, Artificial Sequence
  ENSG00000140995_18 (sequence is synthesized)
tcaagttgttccttctgctccggagacccctggggtgcggccctggccccctccacccctgctgggccagagcgggtgggcagtgtcaaggcccgctgtctcccaggtgcttgctgggac

SEQ ID NO: 364702 - DNA, 120 bp, Artificial Sequence
  ENSG00000140995_19 (sequence is synthesized)
tcggggcggctgcacctggctgtcacctgggtgtgctgctgtgaggggtccttgcgtggcccccatccttcccccaatgcagaactccatgggcagggagctggggggacatctcacctc

SEQ ID NO: 364703 - DNA, 120 bp, Artificial Sequence
  ENSG00000140995_20 (sequence is synthesized)
ccccatggcacagagccctccacacccctggaccagggcatccgggccctagaaattccacagctcccgtcctggccaccctggaagctcatcaggccaagacccggacagagcttcaga

SEQ ID NO: 364704 - DNA, 120 bp, Artificial Sequence
  ENSG00000140995_21 (sequence is synthesized)
ggagtgttgagtgacacctgaggatgcggctgcacacactcagccaagggccgagtctcacctgcggtggggtgtcggctctgcctgggggctccatccctttcagccactcgtggcctt

SEQ ID NO: 364705 - DNA, 120 bp, Artificial Sequence
  ENSG00000140995_22 (sequence is synthesized)
ggggatttctggttgtccccagctgggactgttcacagttgtcacctgcagacctgcctctccctggcctgaggttcaaaggcctcatcggatggtcagtacagtggggtcacctgttgt

SEQ ID NO: 364706 - DNA, 120 bp, Artificial Sequence
  ENSG00000140995_23 (sequence is synthesized)
ttctatacaacagcagggaaggggccatggagcttttccctgctgggtgctcctgctttggcccagcccacctttcctggtgctccaagctaggaggctgtggccccagcctgaggaggg

SEQ ID NO: 364707 - DNA, 120 bp, Artificial Sequence
  ENSG00000140995_24 (sequence is synthesized)
tgtcctggcctccaggtgtgcagcaggggctgtgtgctgggggaggttccagttaggcgatgggatcctgcagtggtctggtggcatttcttggaaccagatttacctgaggagctctgt

SEQ ID NO: 364708 - DNA, 120 bp, Artificial Sequence
  ENSG00000140995_25 (sequence is synthesized)
cctgctccctgtggagggctccagatagctcagaaatgaccagccaatggccttttgtttgggggcctgaggtcaagagagctgagagtattcgctcgactgagcacattcaggaagatc

SEQ ID NO: 364709 - DNA, 120 bp, Artificial Sequence
  ENSG00000140995_26 (sequence is synthesized)
agggcaggcgtgtgggaggtccctcactccacgggacagaggcccctgggcagcagaggaaacctacagctctgggtgaggggacacttggctttggtgtttgcactttacagatcctgc

SEQ ID NO: 364710 - DNA, 120 bp, Artificial Sequence
  ENSG00000140995_27 (sequence is synthesized)
ggtccacgaggggcctcaggagaggacgtgtcaggacgtggcttcccagccttctgccttgggcagtgggggtgctcctgtctgtccttttcccccacaccctggactgtgcttggctgt

SEQ ID NO: 364711 - DNA, 120 bp, Artificial Sequence
  ENSG00000140995_28 (sequence is synthesized)
tggtgcacatggttggcacacggtgggcagagggcagagaatgccactgcttggttattggtcccctttgaccaggaaacccaagaggagacacctcagtcagcagaaaggccacctggc

SEQ ID NO: 364712 - DNA, 120 bp, Artificial Sequence
  ENSG00000140995_29 (sequence is synthesized)
tcactggctcattccaggagtgggagagacggcagggtctcctctttgtcctccggcatcaggaaggggatggtgtccactccccactgtggtggctttaggcaaggttcttattgtctg

SEQ ID NO: 364713 - DNA, 120 bp, Artificial Sequence
  ENSG00000140995_30 (sequence is synthesized)
ctctgcctcggtttccccatctggaaaatgggggcaggggtcctgacctacctcaggtggaacggtgagcagggaacatgtcggagtccttcagagaatgtgatgtgaggttggatcaac

SEQ ID NO: 364714 - DNA, 120 bp, Artificial Sequence
  ENSG00000140995_31 (sequence is synthesized)
agtgtgggttcctgtcctgtttccccttcctctttggggctgaggaggaggttaaaggccaaatgctgtttcccaacaccccaaagtctgcacacgtctcatgaatgcatcacatttctg

SEQ ID NO: 364715 - DNA, 120 bp, Artificial Sequence
  ENSG00000140995_32 (sequence is synthesized)
tcatatggatattagccattccgaaatctgtgtaatcaacttcacattattcaagttacaaatcactgtgtccatagaaaaactgtgctggtatttgctggacaaagggttgggcccctt

SEQ ID NO: 364716 - DNA, 120 bp, Artificial Sequence
  ENSG00000140995_33 (sequence is synthesized)
ttatttttacctgccacccagcatctcccccacctgccccttctgggtgacacagccggtaaacggaatcacgtatggttctttctgtgggtctgtggcacagcaggaagagcccggtgc

SEQ ID NO: 364717 - DNA, 120 bp, Artificial Sequence
  ENSG00000140995_34 (sequence is synthesized)
cgccagcaccttgtggaagaccacacatgggtggtcccacagcatgggaccaggctggcctgagggatgcccagttgtaacaatgctgctgtcactgtctcattaaatatacatccttta

SEQ ID NO: 364718 - DNA, 120 bp, Artificial Sequence
  ENSG00000140995_35 (sequence is synthesized)
gcccggaggagagctggtagcctagagtacagctgctgggcagaacggaggtgtccctgccagcgtgccttccttgacgctcctctggccatgttttaaacaccaggaggtttccagcgg

SEQ ID NO: 364719 - DNA, 120 bp, Artificial Sequence
  ENSG00000140995_36 (sequence is synthesized)
cttccccaggcgtagctcctgcacctttttcctgggctggtcaccatatgtgatgacagtgccagtctgttctgagcagctctgggctcctggcttcactgacatcataaacaagtcctt

SEQ ID NO: 364720 - DNA, 120 bp, Artificial Sequence
  ENSG00000140995_37 (sequence is synthesized)
gtccttgggtctgtgtgtgctttggcctggctgccctgtgtcccctgtgctgattcaggtatccctgggaatgtagaaagtagaatattcatgaggaaacaggaccccaatgaggatgag

SEQ ID NO: 364721 - DNA, 120 bp, Artificial Sequence
  ENSG00000140995_38 (sequence is synthesized)
agatgcgaggcggcggtcagcaggtgccgaacccacggccaggcttccgtggccagcagccctagaggaatggccatcctgtccctgcgagcccctgggccctggcaggcgatgcagaag

SEQ ID NO: 364722 - DNA, 120 bp, Artificial Sequence
  ENSG00000140995_39 (sequence is synthesized)
gaggagtgatgttgggatggcctgatttctcctgtgtcctgggtgctccctgggagactggggaggtgctggcatcgggtggccgcctctgactctgtgacccacccacagtcatcaggt

SEQ ID NO: 364723 - DNA, 120 bp, Artificial Sequence
  ENSG00000140995_40 (sequence is synthesized)
gctcattcagacctggtacacctgcacaggtgggccgagacccagacgaggagtgaggaatgagagagaccaaagttcctgcctccgctgggctcacattcagatgtgagctatccagtg

SEQ ID NO: 364724 - DNA, 120 bp, Artificial Sequence
  ENSG00000140995_41 (sequence is synthesized)
tggtggccactagccaaacatggccagtcaaagttaaattaactaaatatgcatttcctcgttgtactgtctacattggacagggctgttctggatgagaaattaaactagtgaattaca

SEQ ID NO: 364725 - DNA, 120 bp, Artificial Sequence
  ENSG00000140995_42 (sequence is synthesized)
tcctcccacctcagcttcctgattagctgagactacagggtctgttcctggcctctgacgtccagcagctgcggcaggcgatcgaggagtgcaagcaggtgattctggagctgcccgagc

SEQ ID NO: 364726 - DNA, 120 bp, Artificial Sequence
  ENSG00000140995_43 (sequence is synthesized)
gcgtgccatgaacctccgcgccggaggcggcagcagcgagcgcggggctggatccagcgtagcggggcggccgggcggatccagcgcagccgggagacagatgcgaggcggcggtcaggt

SEQ ID NO: 364727 - DNA, 120 bp, Artificial Sequence
  ENSG00000140995_44 (sequence is synthesized)
agatgcgaggcggcggtcagcaggtgccgaacccacggccaggcttccgtggccagcagccctagaggaatggccatcctgtccctgcgagcccctgggccctggcaggcgatgcagagg

SEQ ID NO: 364728 - DNA, 120 bp, Artificial Sequence
  ENSG00000140995_45 (sequence is synthesized)
aaaagcaactttcaaacattaggttttcagaggtctgtgggcaggcaggtcaggctaggagcacgcagcaccgggtggaccttgaccgtgctgccacctttcctgccctggagcaagtcc

SEQ ID NO: 364729 - DNA, 120 bp, Artificial Sequence
  ENSG00000140995_46 (sequence is synthesized)
tcggtgccctctgggttgagtttccttctctgggtgaggggtgtcggggtctgctctgggcctgtctcggcggatgggccttaacagggagctcctgcaggatgggcctttgactgcccc

SEQ ID NO: 364730 - DNA, 120 bp, Artificial Sequence
  ENSG00000140995_47 (sequence is synthesized)
gtagcggggcggccgggcggatccagcgcagccgggagacagatgcgaggcggcggtcaggtgccgaacccacggccaggcttccgtggccagcagccctagaggaatggccatcctgtc

SEQ ID NO: 364731 - DNA, 120 bp, Artificial Sequence
  ENSG00000140995_48 (sequence is synthesized)
cgaggtgggcctctgcccgagggccgctcttctccaaccccagccctgaggggggattggcaggagaagcagcccagcccagtgtgtccctggcctcagagtgcccagaggagctggcac

SEQ ID NO: 364732 - DNA, 120 bp, Artificial Sequence
  ENSG00000140995_49 (sequence is synthesized)
atccagcgcagccgggagacagatgcgaggcggcggtcaggttctcggggtggcagctgcagtgatgacaccgcttcctggtggtcacgccgcgggcaggacgcgggaggccaggtggga

SEQ ID NO: 364733 - DNA, 120 bp, Artificial Sequence
  ENSG00000140995_50 (sequence is synthesized)
agatgcgaggcggcggtcagcaggtgccgaacccacggccaggcttccgtggccagcagccctagaggaatggccatcctgtccctgcgagcccctgggccctggcaggcgatgcaggaa

SEQ ID NO: 364734 - DNA, 120 bp, Artificial Sequence
  ENSG00000140995_51 (sequence is synthesized)
gttgtgtgctggggtggtgaactctgtgacaagatagagaaggaagggtggggaatgtgggaagcgtggggagtgcggggatgcggtgtggctgggaggggctgccttagggagtggagg

SEQ ID NO: 364735 - DNA, 120 bp, Artificial Sequence
  ENSG00000140995_52 (sequence is synthesized)
gcggggggctacacaggtcaggaaacgtggcccgggtccatcttcccctgtcggcttcctggggctcctggattctactcctggggcccagacccttgtgtagctcgtttctctgtgagc

SEQ ID NO: 364736 - DNA, 120 bp, Artificial Sequence
  ENSG00000140995_53 (sequence is synthesized)
acctgggccctgaccactgcagcgaccatgggtgggcggtgggaggggccctccccggtgcagggcgtcacggctgctgggacttggcagctccaggatcggcagcattttgtggagaac

SEQ ID NO: 364737 - DNA, 120 bp, Artificial Sequence
  ENSG00000140995_54 (sequence is synthesized)
caaagtgctagcattataggtgtgacccactgcactcagcttgttttgtatattacaacattttgagcacttcctttgggccacaggctgagctgcaagggggaggggagggtgccacct

SEQ ID NO: 364738 - DNA, 120 bp, Artificial Sequence
  ENSG00000141002_0 (sequence is synthesized)
gtgcgcaggcgcgccgacagccgagttttctgcgcttccttctccctctctccagacgtcgtggtcgttcggtcctatgtcgcgccgggccctccggaggctgaggggggaacagcgcgg

SEQ ID NO: 364739 - DNA, 120 bp, Artificial Sequence
  ENSG00000141002_1 (sequence is synthesized)
ccaggagcccctcgggcccggcgccttgcatttcgatctccgtgatgacgatgacgcggaagaagaagggcccaagcgggagcttggtgtccggcgtcccgggggcgcagggaaggaggg

SEQ ID NO: 364740 - DNA, 120 bp, Artificial Sequence
  ENSG00000141002_2 (sequence is synthesized)
cgtccgagtcaacaaccgcttcgagctgataaacattgacgatcttgaggatgaccctgtggtgaacggggagaggtctggctgtgcgctcacagacgctgtggcaccagggaacaaagg

SEQ ID NO: 364741 - DNA, 120 bp, Artificial Sequence
  ENSG00000141002_3 (sequence is synthesized)
aaggggtcagcgtggaaacacagagagcaagacggatggagatgacaccgagacagtgccctcagagcagtctcatgcaagtggcaaactccggaagaagaaaaaaaaacagaaaaacaa

SEQ ID NO: 364742 - DNA, 120 bp, Artificial Sequence
  ENSG00000141002_4 (sequence is synthesized)
gaaaagcagcacgggagaagcatcggaaaacggactagaagatatcgatcgcatcctagagaggattgaggacagcactgggttgaaccgtcccggcccagctcccctgagctccaggaa

SEQ ID NO: 364743 - DNA, 120 bp, Artificial Sequence
  ENSG00000141002_5 (sequence is synthesized)
gcacgttctctacgtggagcacagacacttgaatccagacacagaactgaaaaggtattttggtgcccgggcaatcctgggggagcaaaggccacggcagagacaacgtgtgtaccccaa

SEQ ID NO: 364744 - DNA, 120 bp, Artificial Sequence
  ENSG00000141002_6 (sequence is synthesized)
gtgcacatggctgaccacccctaaaagcacctggccccgctacagcaaaccaggtctgtccatgcggctgctggaatcaaaaaaaggcctctccttctttgcgtttgagcacagtgagga

SEQ ID NO: 364745 - DNA, 120 bp, Artificial Sequence
  ENSG00000141002_7 (sequence is synthesized)
gtaccagcaggctcagcacaagttcctggtggccgtggagtctatggagccgaacaacatcgtggttctgctccagacgagcccttaccacgttgactcactcctgcagctcagcgatgc

SEQ ID NO: 364746 - DNA, 120 bp, Artificial Sequence
  ENSG00000141002_8 (sequence is synthesized)
ctgccgctttcaagaggatcaggagatggctcgagacctcgtagagagagcgctgtacagcatggaatgtgcgttccaccccctgttcagtctcaccagtggggcctgccggctggatta

SEQ ID NO: 364747 - DNA, 120 bp, Artificial Sequence
  ENSG00000141002_9 (sequence is synthesized)
gagtactgcaagctcatcctgagtctcgagccggatgaggaccccctctgcatgctgctgctcatcgaccacctggccttgcgggcccggaactacgagtacctgatccgcctcttccag

SEQ ID NO: 364748 - DNA, 120 bp, Artificial Sequence
  ENSG00000141002_10 (sequence is synthesized)
gagtgggaggctcatcggaacctgtcccagctccctaattttgccttctctgttccactggcgtatttcctgctgagccagcagacagacctccctgagtgtgagcagagctctgccagg

SEQ ID NO: 364749 - DNA, 120 bp, Artificial Sequence
  ENSG00000141002_11 (sequence is synthesized)
cagaaggcctctctcctgatacagcaggcgctcaccatgttccctggagtcctcctgcccctgctcgagtcttgcagtgtgcggcccgacgccagcgtttccagtcaccgcttctttgga

SEQ ID NO: 364750 - DNA, 120 bp, Artificial Sequence
  ENSG00000141002_12 (sequence is synthesized)
cccaatgctgaaataagccagccccctgccctgagccagctggtgaacctgtaccttgggaggtcacactttctctggaaagagcccgccaccatgagctggctggaggagaacgtccac

SEQ ID NO: 364751 - DNA, 120 bp, Artificial Sequence
  ENSG00000141002_13 (sequence is synthesized)
gaggttctgcaagcagtggacgccggggacccagccgtggaagcctgtgagaaccggcggaaggtgctctaccagcgtgcacccaggaatatccaccgccatgtgatcctctctgagatc

SEQ ID NO: 364752 - DNA, 120 bp, Artificial Sequence
  ENSG00000141002_14 (sequence is synthesized)
aaggaagccgtcgctgccctgcccccggacgtgaccacgcagtctgtgatggggtttgatcctctgcctccttcggacacaatctactcctacgtcaggccagagaggctaagtcctatc

SEQ ID NO: 364753 - DNA, 120 bp, Artificial Sequence
  ENSG00000141002_15 (sequence is synthesized)
agccatggaaacaccattgctctcttcttccggtcactgttgccaaactataccatggagggggagaggcccgaggaaggagtggctgggggtctgaaccgcaaccagggcctgaacagg

SEQ ID NO: 364754 - DNA, 120 bp, Artificial Sequence
  ENSG00000141002_16 (sequence is synthesized)
ctgatgctggctgtgcgcgacatgatggccaacttccacctcaacgacctggaggcgccgcacgaggacgacgctgagggggagggggagtgggactgagcgtccgcagaggtgaccgaa

SEQ ID NO: 364755 - DNA, 120 bp, Artificial Sequence
  ENSG00000141002_17 (sequence is synthesized)
aagccgtatgatgatgttcccgatttctctgttggtcggagtcggccagttgcctgaagtagggaagctgagtgtgtcgctccctggtccactgtttctcctataaatgtaaatgggtca

SEQ ID NO: 364756 - DNA, 120 bp, Artificial Sequence
  ENSG00000141002_18 (sequence is synthesized)
ccaatgctgaaataaggctcacggcacatacctgtgtgccccagccccacgccctcaggccagcagcccaggggcctcctttcactccaggccacagggcactccctggaccccccgtct

SEQ ID NO: 364757 - DNA, 120 bp, Artificial Sequence
  ENSG00000141002_19 (sequence is synthesized)
cccttctctgcggctgcccttctctgcggctgcccttctctgtggctgccacagagacttcgtgggaggaaaaggttctctaaaaaaggaaaaataaaatgtactgtctttatttaaaaa

SEQ ID NO: 364758 - DNA, 120 bp, Artificial Sequence
  ENSG00000141002_20 (sequence is synthesized)
ggagaagcgaggctgcccgcgcacggcgctggagtactgcaagctcatcctgaggtgagtgtctgctcagggccaagcccgtccacgctccctgtcctggctgcaggcccactctcagcc

SEQ ID NO: 364759 - DNA, 120 bp, Artificial Sequence
  ENSG00000141002_21 (sequence is synthesized)
tgacgatgcccctgttcccctttgctctgctctctgtgctgcctccggaagtctcgagccggatgaggaccccctctgcatgctgctgctcatcgaccacctggccttgcgggcccggaa

SEQ ID NO: 364760 - DNA, 120 bp, Artificial Sequence
  ENSG00000141002_22 (sequence is synthesized)
cctaaaaaaagataaaactccttcctggttattaactgaaatgctgatcgagctttatcctaaagaagatcagtcgtggacaagaaccttgtgaaatgttccccatttgagaccctaaaa

SEQ ID NO: 364761 - DNA, 120 bp, Artificial Sequence
  ENSG00000141002_23 (sequence is synthesized)
ccccagctaggtactggtccgtggacccacctcccagaaagcccatcactgtgtaatcgtctaacctggggctcgccgaggcctatgccttgagtccacccaaataggggatgtgatgtt

SEQ ID NO: 364762 - DNA, 120 bp, Artificial Sequence
  ENSG00000141002_24 (sequence is synthesized)
tggagctgcagcagccgccctacggttgggagtcagagaagagccggtgttccagggacaatgcagcagaggctgagcccaggcctgctgtcctgagaggtggctggatcactgacactt

SEQ ID NO: 364763 - DNA, 120 bp, Artificial Sequence
  ENSG00000141002_25 (sequence is synthesized)
tggcagtggtgctggggtttatgtcatgacctgcagctgagcctacttccaatgaccgtgagatctgaaagactgttttgagggcgtagcctctgccatgattgtggggaatgctgtcct

SEQ ID NO: 364764 - DNA, 120 bp, Artificial Sequence
  ENSG00000141002_26 (sequence is synthesized)
gtttcctcccttggccctgctcagcccagcgagaggctgaggcgcacgtggctccccgggtgcccacaggcagcgtggctcaccagccgggcccttttccactgagccagaaccccccaa

SEQ ID NO: 364765 - DNA, 120 bp, Artificial Sequence
  ENSG00000141002_27 (sequence is synthesized)
tgagcgctgtgtctcgcctggggtaggggtgtgtcctgtcagccgtgggggctgctcttcctggtggtggaggccaggtcccagtccttccccacacttgtagaaacatgcattctctgg

SEQ ID NO: 364766 - DNA, 120 bp, Artificial Sequence
  ENSG00000141002_28 (sequence is synthesized)
tagggcctgcaaacctgccctaccaaacctgaaagagggtcggctcatctcggaacccgctgcgtgccaagccaggcacgaggaggtggcaggcatcccgacccccgtggggcctgtgtt

SEQ ID NO: 364767 - DNA, 120 bp, Artificial Sequence
  ENSG00000141002_29 (sequence is synthesized)
tgctgtgattttccttggaggtgtaattttccgagttccattttggttacctgctagttgcccccaaatttacttgggaaccttgatgagatttgcatgaaatgagtgaaggtcgcaggc

SEQ ID NO: 364768 - DNA, 120 bp, Artificial Sequence
  ENSG00000141002_30 (sequence is synthesized)
ctttctcctgcatctcaggagagtctgcgcctgcccagcagtgtatgtaaccgcacacgtgtgtccctcctagccaaccgcgcacgtgtgtccctcctagccgaccgcgcacgtgtgtgc

SEQ ID NO: 364769 - DNA, 120 bp, Artificial Sequence
  ENSG00000141002_31 (sequence is synthesized)
ctcctagccgaccgcgcacgtgtgtccttcctaactgtgccccgaacgtttgcttggctgggttgtggatctgggtgctggtgtaagtgaactttgaagaaacatgcaggtcaggttaac

SEQ ID NO: 364770 - DNA, 120 bp, Artificial Sequence
  ENSG00000141002_32 (sequence is synthesized)
gtgggatgggcagagatgcagacagcctgctgctgtgctccacagcacagaagaggggccctaaaaggagagcttgtgttcatttatccaacaagtgttcttgggagcttgctgggtgct

SEQ ID NO: 364771 - DNA, 70 bp, Artificial Sequence
  ENSG00000141002_33 (sequence is synthesized)
agtggagatcgtgccactgcactccatccgggcgtggtgggttgtgcctgtagtcccagctactcaggag

SEQ ID NO: 364772 - DNA, 62 bp, Artificial Sequence
  ENSG00000141002_34 (sequence is synthesized)
tcaaaaaaaaaaaaaaaaaaaaaaattgggcgtggtgggaaggagggggttgccgtgagctg

SEQ ID NO: 364773 - DNA, 120 bp, Artificial Sequence
  ENSG00000141002_35 (sequence is synthesized)
tctcaaaaaaaaaaaaaaaaaaaatcctccagtaaggtgtttggaggaaggatggtggctgtgctgagacggagaggatgaatgtgccctcaccaggctcaggggagagggtccttgtgt

SEQ ID NO: 364774 - DNA, 120 bp, Artificial Sequence
  ENSG00000141002_36 (sequence is synthesized)
gtgttccccagcagagtcacgatgtgccgaggccctgtgccaggagcagagcacacggcacattgagagaacaaaagccccatggccagaccgggagagcagggctgcggcgcaagaggg

SEQ ID NO: 364775 - DNA, 120 bp, Artificial Sequence
  ENSG00000141002_37 (sequence is synthesized)
ccaactgccaggcggccggtgtgtctggctttcagaatccgggtcattgaaaggctttttaccttttccttctgggctggaaagtacttgccttacccaggccccgtcacccgcacagcg

SEQ ID NO: 364776 - DNA, 120 bp, Artificial Sequence
  ENSG00000141002_38 (sequence is synthesized)
gtcgtcgtgattatccctgccggcagggtgttgcagcattgaggaatcgcggttctttgctgcctccctccgctgtggagcccaggctttcgccctccctagagctcctgaggcctggcc

SEQ ID NO: 364777 - DNA, 120 bp, Artificial Sequence
  ENSG00000141002_39 (sequence is synthesized)
tgggtgctgaaggagacgttgaaactgcagcttttctgaaaagcaaggcacctgtgcagtggccgaggatggctgtgggagcctcgctccggacgccacgcctgcctcagctgagttggt

SEQ ID NO: 364778 - DNA, 120 bp, Artificial Sequence
  ENSG00000141002_40 (sequence is synthesized)
ctccctcatcctgttcccgctgtccacagccccaccctaagctgatgaggaagcctcacgggccacccggggaatccagggcctgtgctcagctgctgctgctctgccccctggcggccc

SEQ ID NO: 364779 - DNA, 120 bp, Artificial Sequence
  ENSG00000141002_41 (sequence is synthesized)
ctccgtgtccctgcgagggaggcagctggcaggcagccccgtgagccgggttgggtcccacgagtctcagttcagtgtcgtttctgacttttcttgactttctttcaggctaagtcctat

SEQ ID NO: 364780 - DNA, 120 bp, Artificial Sequence
  ENSG00000141002_42 (sequence is synthesized)
aagcgcttgcgtgtcggcctctgtggcaggtgcgagtgacacagtggaagcaggtgtgcagtgaagtggggaaaacatattaattttagaatgtagaaataaacataaaatcaaaactgc

SEQ ID NO: 364781 - DNA, 120 bp, Artificial Sequence
  ENSG00000141002_43 (sequence is synthesized)
agctgggactaccggcacatgccaccgctaatttattttattttattttttatagaaacaaggtcttactttgttgcccagggtgatgtcaaactcctggcttcaagcgattctcctccc

SEQ ID NO: 364782 - DNA, 120 bp, Artificial Sequence
  ENSG00000141002_44 (sequence is synthesized)
acaggcatgagccaccacgcccagccagacacatcctgttttattggaccatggagagtattgctggtctataacatgccctgggtttgcacgtctgagttcttttttttttttttcgag

SEQ ID NO: 364783 - DNA, 88 bp, Artificial Sequence
  ENSG00000141002_45 (sequence is synthesized)
ttacaggtgtgagccaccgtgcctggtctgcacgtctgagttctaagcattgttttcaggctctggagctcagtggtgcgatctcagc

SEQ ID NO: 364784 - DNA, 120 bp, Artificial Sequence
  ENSG00000141002_46 (sequence is synthesized)
aggcgtgagccaccacacccagcctaagtgttgtttctgcaccatggtatacccaggtcatttcctcaccccaatggtagcatgtgtccagatgttggctacagtccccggtgtctgcag

SEQ ID NO: 364785 - DNA, 120 bp, Artificial Sequence
  ENSG00000141002_47 (sequence is synthesized)
tgtccagatgttggctacagtccccggtgtctgcaggcatttctgtgaaactgcccaagaatgagtatatatcctgcatgctgccagtgccttcagtagagttacgtggctcacactgag

SEQ ID NO: 364786 - DNA, 120 bp, Artificial Sequence
  ENSG00000141002_48 (sequence is synthesized)
tgtctgcccaggtccttcaccttcttactcgtagtcgacggtagtggtttggaaacctgccgtcgtgtgtgggcagaagtgttggggttttgattgtgggtagatcaaggatgttttcat

SEQ ID NO: 364787 - DNA, 120 bp, Artificial Sequence
  ENSG00000141002_49 (sequence is synthesized)
atgctgttgttcacgccttccctggatttctaacaggttttgctttatattttactttacatttttggtgttgatgggtttcttcgggaatattaattaaaaatagactttaaaatgtca

SEQ ID NO: 364788 - DNA, 120 bp, Artificial Sequence
  ENSG00000141002_50 (sequence is synthesized)
gccccgctacagcaaaccaggttctgctccagacgagcccttaccacgttgactcactcctgcagctcagcgatgcctgccgctttcaagaggatcaggagatggctcgagacctcgtag

SEQ ID NO: 364789 - DNA, 120 bp, Artificial Sequence
  ENSG00000141002_51 (sequence is synthesized)
attttcactcatcctgagaggccctgagggacctgcttccagcagcaggaggggctgtggtggcggcctcggggactgtcatttgacatgggacggctctggagccctcatctgtgtgga

SEQ ID NO: 364790 - DNA, 120 bp, Artificial Sequence
  ENSG00000141002_52 (sequence is synthesized)
aaagtccaggtgggacagctgagcagcctccagcttaaaaacgaggctcatataaagagggtgccaggcgtggcggcacatgcctgtaatctcagctttttgggaggccggcttgtgcct

SEQ ID NO: 364791 - DNA, 120 bp, Artificial Sequence
  ENSG00000141002_53 (sequence is synthesized)
gggaggtcaaaggtacagtgagctgtgtttgtgctgctgcactccagcctgggtgatggtgagaccccgtctcaaaaaacaaaataaacaaagagggagcaaacacaggagaaagtgcac

SEQ ID NO: 364792 - DNA, 120 bp, Artificial Sequence
  ENSG00000141002_54 (sequence is synthesized)
cctaacccagcggattagtcttactctttgctgcatctccggcagctcgtttctggcacagggaagtaacagtttgactgtatggtttgctcatgcggtcctgtgacgttttctcctaag

SEQ ID NO: 364793 - DNA, 120 bp, Artificial Sequence
  ENSG00000141002_55 (sequence is synthesized)
taaatgtctgaaaaaaaggcatgcctgggagctggggccttgctgagtgcctttcctccagggctgtcctcccttctggtaggttctgctccagacgagcccttaccacgttgactcact

SEQ ID NO: 364794 - DNA, 120 bp, Artificial Sequence
  ENSG00000141012_0 (sequence is synthesized)
agccggaagggccggcggacgctcgctaggtcggctcgctggccggggctccgcggctcccgtggttgccatggcggcggttgtcgcggcgacgaggtggtggcagctgttgctggtgct

SEQ ID NO: 364795 - DNA, 120 bp, Artificial Sequence
  ENSG00000141012_1 (sequence is synthesized)
cagcgccgcggggatgggggcctcgggcgccccgcagccccccaacatcctgctcctgctcatggacgacatgggatggggtgacctcggggtgtatggagagccctccagagagacccc

SEQ ID NO: 364796 - DNA, 120 bp, Artificial Sequence
  ENSG00000141012_2 (sequence is synthesized)
gaatttggaccggatggctgcagaagggctgcttttcccaaacttctattctgccaaccctctgtgctcgccatcgagggcggcactgctcacaggacggctacccatccgcaatggctt

SEQ ID NO: 364797 - DNA, 120 bp, Artificial Sequence
  ENSG00000141012_3 (sequence is synthesized)
ctacaccaccaacgcccatgccagaaacgcctacacaccgcaggagattgtgggcggcatcccagactcggagcagctcctgccggagcttctgaagaaggccggctacgtcagcaagat

SEQ ID NO: 364798 - DNA, 120 bp, Artificial Sequence
  ENSG00000141012_4 (sequence is synthesized)
tgtcggcaagtggcatctgggtcacaggccccagttccaccccctgaagcacggatttgatgagtggtttggatcccccaactgccactttggaccttatgacaacaaggccaggcccaa

SEQ ID NO: 364799 - DNA, 120 bp, Artificial Sequence
  ENSG00000141012_5 (sequence is synthesized)
catccctgtgtacagggactgggagatggttggcagatattatgaagaatttcctattaatctgaagacgggggaagccaacctcacccagatctacctgcaggaagccctggacttcat

SEQ ID NO: 364800 - DNA, 120 bp, Artificial Sequence
  ENSG00000141012_6 (sequence is synthesized)
taagagacaggcacggcaccacccctttttcctctactgggctgtcgacgccacgcacgcacccgtctatgcctccaaacccttcttgggcaccagtcagcgagggcggtatggagacgc

SEQ ID NO: 364801 - DNA, 120 bp, Artificial Sequence
  ENSG00000141012_7 (sequence is synthesized)
cgtccgggagattgatgacagcattgggaagatactggagctcctccaagacctgcacgtcgcggacaacaccttcgtcttcttcacgtcggacaacggcgctgccctcatttccgcccc

SEQ ID NO: 364802 - DNA, 120 bp, Artificial Sequence
  ENSG00000141012_8 (sequence is synthesized)
cgaacaaggtggcagcaacggcccctttctgtgtgggaagcagaccacgtttgaaggagggatgagggagcctgccctcgcatggtggccagggcacgtcactgcaggccaggtgagcca

SEQ ID NO: 364803 - DNA, 120 bp, Artificial Sequence
  ENSG00000141012_9 (sequence is synthesized)
agcgacagggccattgatggcctcaacctcctccccaccctcctgcagggccggctgatggacaggcctatcttctattaccgtggcgacacgctgatggcggccaccctcgggcagcac

SEQ ID NO: 364804 - DNA, 120 bp, Artificial Sequence
  ENSG00000141012_10 (sequence is synthesized)
aaggctcacttctggacctggaccaactcctgggagaacttcagacagggcattgatttctgccctgggcagaacgtttcaggggtcacaactcacaatctggaagaccacacgaagctg

SEQ ID NO: 364805 - DNA, 120 bp, Artificial Sequence
  ENSG00000141012_11 (sequence is synthesized)
cccctgatcttccacctgggacgggacccaggggagaggttccccctcagctttgccagcgccgagtaccaggaggccctcagcaggatcacctcggtcgtccagcagcaccaggaggcc

SEQ ID NO: 364806 - DNA, 120 bp, Artificial Sequence
  ENSG00000141012_12 (sequence is synthesized)
ttggtccccgcgcagccccagctcaacgtgtgcaactgggcggtcatgaactgggcacctccgggctgtgaaaagttagggaagtgtctgacacctccagaatccattcccaagaagtgc

SEQ ID NO: 364807 - DNA, 120 bp, Artificial Sequence
  ENSG00000141012_13 (sequence is synthesized)
ctctggtcccactagcacctgcgcagactcaggccaggcctagaatctccggttggccctgcaagtgcctggaggaaggatggctctggcctcggtcctcccccaaccctgcccaagcca

SEQ ID NO: 364808 - DNA, 120 bp, Artificial Sequence
  ENSG00000141012_14 (sequence is synthesized)
gacagacagcacctgcagacgcagggggactgcacaattccacctgcccaggacctgaccctggcgtgtgcttggccctcctcctcgcccacggcgcctcagatttcaggaccctcctcc

SEQ ID NO: 364809 - DNA, 120 bp, Artificial Sequence
  ENSG00000141012_15 (sequence is synthesized)
tcgcccacggcgcctcagacctcaggaccctgccgtctcacgcctttgtgaaccccaaatatctgagaccagtctcagtttattttgccaaggttaaggatgcacctgtgacagcctcag

SEQ ID NO: 364810 - DNA, 120 bp, Artificial Sequence
  ENSG00000141012_16 (sequence is synthesized)
gaggtcctgacaacaggtgcctgaggtggctggggatacagtttgcctttatacatcttagggagacacaagatcagtatgtgtatggcgtacattggttcagtcagccttccactgaat

SEQ ID NO: 364811 - DNA, 120 bp, Artificial Sequence
  ENSG00000141012_17 (sequence is synthesized)
acacgattgagtctggcccagtgaatccgcatttttatgtaaacagtaagggaacggggcaatcatataagcgtttgtctcaggggagccccagagggatgacttccagttccgtctgtc

SEQ ID NO: 364812 - DNA, 120 bp, Artificial Sequence
  ENSG00000141012_18 (sequence is synthesized)
ctttgtccacaaggaatttccctggacgctaattatgagggaggcgtgtagcttcttatcattgtaactatgttatttagaaataaaacgggaggcaggtttgcctaattcccagcttga

SEQ ID NO: 364813 - DNA, 120 bp, Artificial Sequence
  ENSG00000141012_19 (sequence is synthesized)
agctcgggaggtccagggtacagaggccatgtccagggaggcagcagaaatctgctgtggtgaaatctgcctcggggaaatctgcgtcggggatgctgctttcaaagccgtagctgcaga

SEQ ID NO: 364814 - DNA, 120 bp, Artificial Sequence
  ENSG00000141012_20 (sequence is synthesized)
agaactttcctcagacgacacgcaactgacgtgagacccgcccacggccgtgcctagaagccatctcataccacctctcctgcagcccgttctgaagagcagccgcaagctggattcgtt

SEQ ID NO: 364815 - DNA, 120 bp, Artificial Sequence
  ENSG00000141012_21 (sequence is synthesized)
catactcagtgctggagggtgctcgtcttaccaagaattttgtgaaggtggtatctgttgctgctcagaacttccgagtgtccccacgtggggtccctgaagtgtcctgggttcctgttt

SEQ ID NO: 364816 - DNA, 69 bp, Artificial Sequence
  ENSG00000141012_22 (sequence is synthesized)
caggtgcccgccaccatgcccagctaattcttgtgtttttagtagagactgcctacctcggcctcccaa

SEQ ID NO: 364817 - DNA, 120 bp, Artificial Sequence
  ENSG00000141012_23 (sequence is synthesized)
acaggcgtgagccaccgcacccagccccatgattgccttttaagatagggtagctgcactttcactaagacagaggttggccaactccagcccatgggtcaaatgtgaaccacctgctgg

SEQ ID NO: 364818 - DNA, 75 bp, Artificial Sequence
  ENSG00000141012_24 (sequence is synthesized)
gacagaggttggccaactccagcccatgggtcaaatgtgaaccacctgctgggttttgttgttgttgtggttttg

SEQ ID NO: 364819 - DNA, 80 bp, Artificial Sequence
  ENSG00000141012_25 (sequence is synthesized)
cccacctgccgttttttaaacccataagccaggcatgggttttataattttaaattgttcaaaaaaccaaaagagtaata

SEQ ID NO: 364820 - DNA, 120 bp, Artificial Sequence
  ENSG00000141012_26 (sequence is synthesized)
tttataattttaaattgttcaaaaaaccaaaagagtaatattttgtgacatgaaaaattatatgaaattcagatgttgatgaataaagttttattggcacagagcgtgcacatctgctcg

SEQ ID NO: 364821 - DNA, 120 bp, Artificial Sequence
  ENSG00000141012_27 (sequence is synthesized)
catgctggcttgtggcagggctgaggggctgtgacagccccatatggcccacaaagctgaaaggatttgctgtgaggccctttacataatgcatttgctgatgccagctctaaatatcca

SEQ ID NO: 364822 - DNA, 120 bp, Artificial Sequence
  ENSG00000141012_28 (sequence is synthesized)
tatttgcattcagattggtttcagaaataaatatgcgttgaatgcagctgggcctgtgaacgtggtggttgaattcagctgggcctgtgaacttggtcgttgtgtttagaatgtgttgtc

SEQ ID NO: 364823 - DNA, 120 bp, Artificial Sequence
  ENSG00000141012_29 (sequence is synthesized)
tttcccaggtgttgtgtgtttgtgctgccgaagctgctgaaggcggcctgtagagggcaggggcccaggcaggcacagtcacttcactggtgtcttggttggtgcttggagcacctcagg

SEQ ID NO: 364824 - DNA, 120 bp, Artificial Sequence
  ENSG00000141012_30 (sequence is synthesized)
agggaatatgtccttaaggaaggaagacaggccagacagaggggcctcggagtgttggcttctaccaggctcctgctgaggtgggcgctcagggagacggctggaggatccgaggagagc

SEQ ID NO: 364825 - DNA, 120 bp, Artificial Sequence
  ENSG00000141012_31 (sequence is synthesized)
caaagccccaggcggtgccctccccttctccttctagagcaaagtcctggcccactgcctgtttaaaagcacttttttccaacaatacacactgtaaaatttgaagaagttttcagtgaa

SEQ ID NO: 364826 - DNA, 120 bp, Artificial Sequence
  ENSG00000141012_32 (sequence is synthesized)
caccgccgctgccactcacctccggagtttgccgtgggcatttgctgtgctggtgccatcacacctggcatcaccccggcctcctggcatcaccccagcctccgtgcttcctgccctgtg

SEQ ID NO: 364827 - DNA, 120 bp, Artificial Sequence
  ENSG00000141012_33 (sequence is synthesized)
ctcacccgtcctcctgcttggggtttttattgtaaaatacacagaacgtaaaattgaccatgacagccaccttaacgtgcaccactcgggcacagtccattcacagcgtggtgcctccat

SEQ ID NO: 364828 - DNA, 120 bp, Artificial Sequence
  ENSG00000141012_34 (sequence is synthesized)
cccttctacctgcttccaaacagtccatcccaagaagaaaccggtactcatcagcaggccctccccagcacccacccccagccccggcagccactcagccgcctcctgcctctgcggacc

SEQ ID NO: 364829 - DNA, 120 bp, Artificial Sequence
  ENSG00000141012_35 (sequence is synthesized)
ggcctgttccggaggcttaatgagcaaatcacagcctgtgtggcccttgtgtctgcttccttccctcacatgaagctttccagggccgtgcgcggtgtggggtgcccttcctttcgatgg

SEQ ID NO: 364830 - DNA, 120 bp, Artificial Sequence
  ENSG00000141012_36 (sequence is synthesized)
ttgggtagtgtgccgcggtacgtgcgtgagtttcctgagacataacacgttaccacaggccaggtggccttagcggaaatggattcttgccggattctggaggccagaagtgcaaaatca

SEQ ID NO: 364831 - DNA, 120 bp, Artificial Sequence
  ENSG00000141012_37 (sequence is synthesized)
aggtgtcagccgggcccctccccctcaggctctccaggaaggtccttgctgtcccctggctggtggctgcgtcactccagtctcggcctcggccttcacccggcatctctactgcatgtc

SEQ ID NO: 364832 - DNA, 120 bp, Artificial Sequence
  ENSG00000141012_38 (sequence is synthesized)
tgcgtctctaagggcccagtcataggattgagggcccaccctggcccagcgtgacctcatcttagctcactacatctgcagagaccctacttccaaatgtggccacacccacgtagtaca

SEQ ID NO: 364833 - DNA, 120 bp, Artificial Sequence
  ENSG00000141012_39 (sequence is synthesized)
cgccggccgcactttgtcgtctgccgatgggcgctcagggtgctcctgccttttggccactgagtcgtgctgccctggacgctcgtatgcaggcctgcgtgtggacgtaagtttcagtct

SEQ ID NO: 364834 - DNA, 120 bp, Artificial Sequence
  ENSG00000141012_40 (sequence is synthesized)
cttgggtgtacagctaggagtggagttgcagcgtggaactgcagggtcacacgataactgggcttctgggggacagttaccagttgactttgaaatctagacgtgtacagacatacgagg

SEQ ID NO: 364835 - DNA, 120 bp, Artificial Sequence
  ENSG00000141012_41 (sequence is synthesized)
gcctgtgtatttatgttgaaaatagatgcacgtgtttagaggccagctcctgcgagcatgcagatgctggtgtcaggctgggaggaggcagacggacacattccccacctgaagaccaag

SEQ ID NO: 364836 - DNA, 120 bp, Artificial Sequence
  ENSG00000141012_42 (sequence is synthesized)
cagaagtggaggcgaaagacagcgtgggctgaccgtggagcggccccatcgtgcacgcacgcaggcgatgctgaggtttgggctggcgtggagcggccccatcgtgcacgcacgcaggcg

SEQ ID NO: 364837 - DNA, 120 bp, Artificial Sequence
  ENSG00000141012_43 (sequence is synthesized)
atgctggggtttggccgagctctgccgctggctgggacacagggtggtgctggcttccacggtccccgacacgctcttggcaccatgggcagctccccaggccagaagcacctgcagaag

SEQ ID NO: 364838 - DNA, 120 bp, Artificial Sequence
  ENSG00000141012_44 (sequence is synthesized)
agtcagcggggccctcgcccccaggaaggggtgagcccaacaggccgaggcctcccgggtccttccagccctgactctgggcggctgcatcaaccttgtctattcctactactgcaggga

SEQ ID NO: 364839 - DNA, 120 bp, Artificial Sequence
  ENSG00000141012_45 (sequence is synthesized)
gggtggcaggtgggctcaggcctttctcatcaaatcccagcccggctccgtgccatgtggggtgcggcacctgctgggttttcagggtcgaagttgcggtattgttggtggctgctgttc

SEQ ID NO: 364840 - DNA, 120 bp, Artificial Sequence
  ENSG00000141012_46 (sequence is synthesized)
tgtttcccagagtcgagtgctgtggccgcctggggagaggtgctgcagtgtggctccgtctcagggtacctgggaagcaggagtcccactccctccctccctggggagagtctctcctgc

SEQ ID NO: 364841 - DNA, 120 bp, Artificial Sequence
  ENSG00000141012_47 (sequence is synthesized)
tggagacagaaacatgtggtgttgatcgtgaggaagaggagaaggcagggcacggggctggtgctcgaggatgggggcgtgtggacctgcacgcccagtgggtgtcccaggagcctgcga

SEQ ID NO: 364842 - DNA, 120 bp, Artificial Sequence
  ENSG00000141012_48 (sequence is synthesized)
aaggaggcggggtcttggggacaacgctgagctgcagggcccaagggccacgcgtctttcagtggaatgggtgccgtgccccacccaggtggtggagacgctaacggggattgacaggcg

SEQ ID NO: 364843 - DNA, 120 bp, Artificial Sequence
  ENSG00000141012_49 (sequence is synthesized)
tggcagccccttgtaaacctgcgcgtgcctcgtctgtcacgcgtctgtctactcgttggggctcttgttgacgcccggggtctgagccacacccttcttatccagtttctgtttctgtca

SEQ ID NO: 364844 - DNA, 120 bp, Artificial Sequence
  ENSG00000141012_50 (sequence is synthesized)
cgtgcggggagggggaggcccctcggggagtggccgcggggtccaggcgtggggtctcggcggtcaccgatcaccacacgcgctgccactgtgctgcatgaccgggacagcgtcctccct

SEQ ID NO: 364845 - DNA, 120 bp, Artificial Sequence
  ENSG00000141012_51 (sequence is synthesized)
agggctgtgattctcctttcatctgatccacagaggcagagaagggtgccagggagtgagggcgtggcctggctctggggtctttgggcctggtttgaggctcctctgtctctcacaggc

SEQ ID NO: 364846 - DNA, 120 bp, Artificial Sequence
  ENSG00000141012_52 (sequence is synthesized)
cttgtgaccccgctcagtccctgctgtgggcgtgtgagcatgtatgcatatctgtagacccagctgggcagcggggctcacgcccccccagggattggcccccagccccatcgggtcggt

SEQ ID NO: 364847 - DNA, 120 bp, Artificial Sequence
  ENSG00000141012_53 (sequence is synthesized)
ccagcaggatctcaggtcaccaggctggtcccacggccgcgagtatcctgcggcatcagactccgcaggcctgtcaccgtcatccctcgagtcacagcccctagcacccgccaccactgc

SEQ ID NO: 364848 - DNA, 120 bp, Artificial Sequence
  ENSG00000141012_54 (sequence is synthesized)
cccccggctgcctcctgccacgtcgtccttggaggggccacgtcattacacacaggagctgtggcggaggagctgcctgtccaccctaggggcctgttggatggtgaaagctctggtcta

SEQ ID NO: 364849 - DNA, 120 bp, Artificial Sequence
  ENSG00000141012_55 (sequence is synthesized)
aaccacaaagaagccaccaggaaggagagtaacagcctagcagttgatgaaatcctgagctgatgagagcttgggtgctacacagcccccacgctgcggttttaggcgcacaggatgttt

SEQ ID NO: 364850 - DNA, 120 bp, Artificial Sequence
  ENSG00000141012_56 (sequence is synthesized)
catttcttttactccctgggacgcctgagtgagcctagagggttgggtaggagtcacctgtcccgaatttctctccacttgttggagcgttccccgcctgtcaggtccgcatgccgcctc

SEQ ID NO: 364851 - DNA, 120 bp, Artificial Sequence
  ENSG00000141012_57 (sequence is synthesized)
gggtccgtgtcctgacagcagtagccgggcctttctctgcactgagtggcatctccctcctaaagatactttgcttcagaatttcatcctttcacttttgaagttcctctgggccagtgt

SEQ ID NO: 364852 - DNA, 120 bp, Artificial Sequence
  ENSG00000141012_58 (sequence is synthesized)
agatactttgtttcagaatttcttcttttcattgtgtaactccttctgggccagcatagcttcgctggatgagctgggctctgcaggtgaagcctccctgttaagtttctgcttttcctg

SEQ ID NO: 364853 - DNA, 120 bp, Artificial Sequence
  ENSG00000141012_59 (sequence is synthesized)
actttctcagaggacagaggggtgaggcggggcagctcatgaataattttttatgttgaagacttgtcgaaataatattttggttatgttgggttaaataaaatataaagttagtctgta

SEQ ID NO: 364854 - DNA, 120 bp, Artificial Sequence
  ENSG00000141012_60 (sequence is synthesized)
ttggttccaagggacatggccacaagtttccaaatgaggagggtgtcttgggtgggaaacggcagctgattctgggtgtgttcaggtgtctccagcgtccctgtgcaggccagcgtgacc

SEQ ID NO: 364855 - DNA, 120 bp, Artificial Sequence
  ENSG00000141012_61 (sequence is synthesized)
ctctgtcctctggagaatgctgagcgaaggtcaggtgtccctaaggtctgaagaactgaaaggctggaatgtctcctggtgggcaagtgcggggtcaggggtcacagccagcctggaggc

SEQ ID NO: 364856 - DNA, 120 bp, Artificial Sequence
  ENSG00000141012_62 (sequence is synthesized)
cttccctaactccttgtgggagccacctggagactcaggaatgagcctgcctggggcatgggtcaccgtgcaggaccccagacacacctgggttgaaaccctactgtctccaagcttggg

SEQ ID NO: 364857 - DNA, 120 bp, Artificial Sequence
  ENSG00000141012_63 (sequence is synthesized)
ggtcacttccattcttgaacctcagctgccacacctggggggttacacctgtcccgccgtgctcacgttgtgtgtgaggactgggacgacaccgagtaccagacagttttgggccgtcgg

SEQ ID NO: 364858 - DNA, 120 bp, Artificial Sequence
  ENSG00000141012_64 (sequence is synthesized)
tgtcgctcagcccctgtgtgctggctccgaccagcagagaccctgacaggtgccttcagacccacctgtgctgaccagtgggggccacgggccacacccaagggctgggcagtcgtggct

SEQ ID NO: 364859 - DNA, 120 bp, Artificial Sequence
  ENSG00000141013_0 (sequence is synthesized)
gccctggtcccggagtcgccgctgggcctgtccgctggcgtcatggcaccgaaaaagaaagggaagaaaggcaaagccaaaggcaccccgattgtcgatgggctcgctccagaggacatg

SEQ ID NO: 364860 - DNA, 120 bp, Artificial Sequence
  ENSG00000141013_1 (sequence is synthesized)
agcaaggagcaggtggaggagcatgtcagccgcatccgggaggagctggaccgcgagcgggaggaacgaaactacttccagctggagcgggacaagatccacaccttctgggagatcaca

SEQ ID NO: 364861 - DNA, 120 bp, Artificial Sequence
  ENSG00000141013_2 (sequence is synthesized)
cggaggcagctggaggagaagaaggctgagctgcggaacaaagaccgggagatggaagaagccgaggagaggcaccaggtggagatcaaggtgtacaagcagaaagtgaagcacctgcta

SEQ ID NO: 364862 - DNA, 120 bp, Artificial Sequence
  ENSG00000141013_3 (sequence is synthesized)
tatgagcaccagaacaacctgacagagatgaaggctgagggcactgtagtcatgaagctggcacagaaagagcaccgcatacaggagagtgtgctgcgcaaggacatgcgggcactgaag

SEQ ID NO: 364863 - DNA, 120 bp, Artificial Sequence
  ENSG00000141013_4 (sequence is synthesized)
gtggagctcaaggagcaggagctggccagtgaggtggtggtgaagaacctgcggctgaaacacaccgaggagatcaccaggatgcggaatgattttgagaggcaagttcgagaaattgag

SEQ ID NO: 364864 - DNA, 120 bp, Artificial Sequence
  ENSG00000141013_5 (sequence is synthesized)
gccaagtatgataagaagatgaagatgctgagggacgaactcgacttgcggagaaagactgagctccacgaagtggaggagaggaagaatggccagatccacacgctgatgcagcgccac

SEQ ID NO: 364865 - DNA, 120 bp, Artificial Sequence
  ENSG00000141013_6 (sequence is synthesized)
gaggaggccttcaccgacattaagaactactacaacgacatcaccctcaacaacctggccctcatcaactccctcaaggagcagatggaggacatgcggaagaaggaggaccacctggag

SEQ ID NO: 364866 - DNA, 120 bp, Artificial Sequence
  ENSG00000141013_7 (sequence is synthesized)
agggagatggcagaggtgtctgggcagaacaagcgcctggcagaccctctccagaaggctcgggaggagatgagcgagatgcagaaacagctcgcaaactacgagagggacaagcagatc

SEQ ID NO: 364867 - DNA, 120 bp, Artificial Sequence
  ENSG00000141013_8 (sequence is synthesized)
ctgctttgcacaaaagcccgtttgaaagtcagggagaaagagctgaaagacctgcagtgggagcatgaagtgttagagcagcgattcaccaaggtgcagcaggagcgggacgagctctat

SEQ ID NO: 364868 - DNA, 120 bp, Artificial Sequence
  ENSG00000141013_9 (sequence is synthesized)
cggaagttcaccgcagccatccaggaggtgcagcagaagacagggttcaagaacctcgtgctagaacgcaagctgcaggctctgagcgccgctgtggagaagaaggaggtgcagttcaac

SEQ ID NO: 364869 - DNA, 120 bp, Artificial Sequence
  ENSG00000141013_10 (sequence is synthesized)
gaggtcctggctgcctctaacctggaccctgcagccctgacgctggtgtcccgcaagctggaggatgttcttgagtcgaagaacagcaccatcaaggacctgcagtatgagctggcccag

SEQ ID NO: 364870 - DNA, 120 bp, Artificial Sequence
  ENSG00000141013_11 (sequence is synthesized)
gtctgtaaggcccataacgacctgctgcgcacgtatgaggcaaagctgctggccttcgggatccctctggacaacgtgggcttcaagcccttggaaacagctgtgatcggacagacactg

SEQ ID NO: 364871 - DNA, 120 bp, Artificial Sequence
  ENSG00000141013_12 (sequence is synthesized)
caccccttatcacaccaaggacagcaagttttttagattttatcatcagcaaatgaaagcttttcacatgttcttgccatcctctttcctggctctgtggaggagaaccacctgcaggac

SEQ ID NO: 364872 - DNA, 120 bp, Artificial Sequence
  ENSG00000141013_13 (sequence is synthesized)
cctcacccatggtgtccctgtcgctcccttccctgggtgccgcacgtccagcctgtgtccaggcctactccctggtctcacctccgaccacagtcggcggcaccttctcagagtgccccg

SEQ ID NO: 364873 - DNA, 120 bp, Artificial Sequence
  ENSG00000141013_14 (sequence is synthesized)
cactcacctgggggttggggcagtgccgcgctgtgctgcctgtcttcgcgccactgttgtcccaccgaatggacagctttgcaggtgctggcactaacttcattgacacctgagtcacag

SEQ ID NO: 364874 - DNA, 120 bp, Artificial Sequence
  ENSG00000141013_15 (sequence is synthesized)
ctgcccagtgggattctccagggggccgggacttccctaggaagtggtgagccaatgctccctgatgagcacaaagcccgctctgttgagggctgggtgggtgcagccagcgtgcgggaa

SEQ ID NO: 364875 - DNA, 120 bp, Artificial Sequence
  ENSG00000141013_16 (sequence is synthesized)
cgggcaggcagcctcccgctgccagtcttcgctctaactccctcggtaggtgatgtaggaccaggggcacgtggaacttctgggccttgctggtgatggttaaaacaacctgagatggag

SEQ ID NO: 364876 - DNA, 120 bp, Artificial Sequence
  ENSG00000141013_17 (sequence is synthesized)
aggccaggagagagtataaggggatagcagcaaaccacctatctggccccaacacacctgagagaattcagcagcccagactgagggtctgggatggggtgaaccttccgcaccagaggg

SEQ ID NO: 364877 - DNA, 120 bp, Artificial Sequence
  ENSG00000141013_18 (sequence is synthesized)
acactccacagaagccacagcccagtaagtcaggcgcttctgcggcggctccagtgtggggtgaggcagtgaggttaggcccagagagctggagttggctcagatgaaaacctctgtcaa

SEQ ID NO: 364878 - DNA, 120 bp, Artificial Sequence
  ENSG00000141013_19 (sequence is synthesized)
caaagaggggatgaatcacccttggcccagcctccccacaaagcctgaccctgggcaggtgagtgacgggtgtgtcctcgtagagtctattgctgcctggacacctttcttttgggagct

SEQ ID NO: 364879 - DNA, 120 bp, Artificial Sequence
  ENSG00000141013_20 (sequence is synthesized)
caaagcaagtgagctcacctacctgccaccgcccaggaccagtctgcccactgcctaaatgatgcccggccagcaggacctggcctgcagatcccagtgagtcatgagcctcagccccct

SEQ ID NO: 364880 - DNA, 120 bp, Artificial Sequence
  ENSG00000141013_21 (sequence is synthesized)
ccagcccactggggctctcacctccacatgtgggtagaagctttcctgccccctcttcctccagtagccctcagtgtcgaaggtgagcttgtaggtgcctgccttcatctggtccaggac

SEQ ID NO: 364881 - DNA, 120 bp, Artificial Sequence
  ENSG00000141013_22 (sequence is synthesized)
agtgaccatctgggtctgtgtagctggggagaggatgaggctgcagagatggggaccagaagccccccaccccagctttcctgggtctgcatcccagtgggcctcagacactgccctgcc

SEQ ID NO: 364882 - DNA, 120 bp, Artificial Sequence
  ENSG00000141013_23 (sequence is synthesized)
acctgtcagacttgggtgagcagacacagtgaggctgttaggtcctgcagttccagagcagtctagggacaccactgccctgtctttaggaaatcacaacacagagaagcaaaaagggaa

SEQ ID NO: 364883 - DNA, 120 bp, Artificial Sequence
  ENSG00000141013_24 (sequence is synthesized)
aaagtctcccacaatttatcccatgagcaagaaccactttatagctggcatatatttttccagattttctctatgcataagtatatttgtttaaaaacttataaagtggattatactatt

SEQ ID NO: 364884 - DNA, 120 bp, Artificial Sequence
  ENSG00000141013_25 (sequence is synthesized)
ggagacctttttctgctgacaaccctgtgtggatggatgcatccatcaaaccaggctgctattcgctggatctctcagaacgcccactggagtccccaggccgctcccgttgcctcggcc

SEQ ID NO: 364885 - DNA, 120 bp, Artificial Sequence
  ENSG00000141013_26 (sequence is synthesized)
ccctcatcaactccctcaaggtgctgtgcgtgggctgggctggggaggcacactctgcctgtcctagaatgtgggctgcagagtcctggggatccagaccccagctctccaccccaacac

SEQ ID NO: 364886 - DNA, 120 bp, Artificial Sequence
  ENSG00000141013_27 (sequence is synthesized)
acccagtactttttataagattgtttgacaatgcccctctcatatccttaactgaaattcctaaataacgtaacctatctctacctattgttaaaagcagtcaggatattgccctcaccg

SEQ ID NO: 364887 - DNA, 120 bp, Artificial Sequence
  ENSG00000141013_28 (sequence is synthesized)
tagtgcagagggggaagtaatgaagtgtgttctggtttgtaaaagctcagatggaaccgcagtgagggccgtgatgtggctggagtggataggtgtcatagtcactgcctgcgacaggtg

SEQ ID NO: 364888 - DNA, 120 bp, Artificial Sequence
  ENSG00000141013_29 (sequence is synthesized)
gggcgtgggcgggcaccacgcagggtgcctacgccgagtgtccatcttgccatgtggatccacccttctgtccaagccagaacacgccccccgcgtggcccataattcccatcagcggca

SEQ ID NO: 364889 - DNA, 120 bp, Artificial Sequence
  ENSG00000141013_30 (sequence is synthesized)
aagctttcggctgcaccatgtcttttcagaaaggtagtgcagcctgtgaaagagctttgtaacagggtggtaggagtgtggaaggacatgcttttctgatctaaaagctgtttttaattt

SEQ ID NO: 364890 - DNA, 120 bp, Artificial Sequence
  ENSG00000141013_31 (sequence is synthesized)
cgccccatcagagaggaatttacctccagagcttgttaactcagggagcaaaaactggattaaaacagccaaggcatgcaagagaaagaacatggaagtttccaaggccagtggacccac

SEQ ID NO: 364891 - DNA, 120 bp, Artificial Sequence
  ENSG00000141013_32 (sequence is synthesized)
ttatggcttccagagacaccttcctgagagaagggcttatgctgatgtgttcctcctgccttccactgcgtggatggctctacaaagggccagggcgcaggcagtgtggacaacacactg

SEQ ID NO: 364892 - DNA, 120 bp, Artificial Sequence
  ENSG00000141013_33 (sequence is synthesized)
accccggtgctgtgggagtgggcactgttgggaggcagcgtgttccaggcaggtgcagaggtgggaggcagcatcttcccagcgagatgtccccaggtgaggggcctcatcgcccacccc

SEQ ID NO: 364893 - DNA, 120 bp, Artificial Sequence
  ENSG00000141013_34 (sequence is synthesized)
cgtgaagacatttgtcgttgtgccgaggcactggttggattcgggggtgcgtgtctccctcatgtctgcccggcatcctcggctcagaacccctcctgctgctccttcttgtttgctcgt

SEQ ID NO: 364894 - DNA, 120 bp, Artificial Sequence
  ENSG00000141013_35 (sequence is synthesized)
tgtcttgtcttcttttgaggtgaagttgagtcctccctctttcttccttgcctttcgccggccacacgccccgttgccgtgcatgggcccctgctcagtgcctcacctgacccactgcac

SEQ ID NO: 364895 - DNA, 120 bp, Artificial Sequence
  ENSG00000141013_36 (sequence is synthesized)
tggaatcttgaacaaagtatagtccttcagtctgcatggaagctgcattcccagaaaactcagaataagttgaagctgcagaaatactgtttatacatagaagacgtctaggtgccagca

SEQ ID NO: 364896 - DNA, 120 bp, Artificial Sequence
  ENSG00000141013_37 (sequence is synthesized)
tgcctgaggctggcagcagctggtgatgggcaggagagcacccagctctcaccatgcaggccacagcccctttggttctgcctgctgagcccctgccgggcctgtgcttgtgcctgcagg

SEQ ID NO: 364897 - DNA, 120 bp, Artificial Sequence
  ENSG00000141013_38 (sequence is synthesized)
ccccgccgcggacaccaccgggacctggctgcgccctcccgaccccggccgggcgtccggggctcctgcgcactcacttggcggccgcgcccgctggcgtcctcttgttctcttccaggc

SEQ ID NO: 364898 - DNA, 120 bp, Artificial Sequence
  ENSG00000141013_39 (sequence is synthesized)
gagtggggaggaggcctcttcaggaagagcagtttatttttgtgaaaggaatacttactgatttcaaacatttggaactaaactggaacgtatttttctttccgatttctgcgtttttga

SEQ ID NO: 364899 - DNA, 120 bp, Artificial Sequence
  ENSG00000141013_40 (sequence is synthesized)
ctgagtgtgagcatcagcagaaaaactcagtctaaacccctttgttcttctcttgcagagcttttgcctgcaaggctgttctgaccacagtgggcgttttgggcccgtttacaggctcca

SEQ ID NO: 364900 - DNA, 120 bp, Artificial Sequence
  ENSG00000141013_41 (sequence is synthesized)
gatctctcagaacgcccactggagtccccaggccgctcccgttgcctcggccaaaagatgagtctcaaactcccatcacctctctctcctcaggatgttcttgagtcgaagaacagcacc

SEQ ID NO: 364901 - DNA, 120 bp, Artificial Sequence
  ENSG00000141026_0 (sequence is synthesized)
gcttttggcgacccgacctctggctaacctacccccggagccatggcctctgctggggtggcagccgggcgacaggcggaggatgtattgccgccaacgtccgaccagccgctgcctgac

SEQ ID NO: 364902 - DNA, 120 bp, Artificial Sequence
  ENSG00000141026_1 (sequence is synthesized)
accaagccgctgccgcctcctcagccgccgccggtccctgcgcctcaaccgcagcagtcgccggcgccacggcctcagtcacctgcccgcgcgagggaggaagagaactactccttttta

SEQ ID NO: 364903 - DNA, 120 bp, Artificial Sequence
  ENSG00000141026_2 (sequence is synthesized)
cctttggttcacaacatcatcaaatgcatggacaaggacagcccggaggtccaccaggacctgaacgccctcaaaagcaagttccaggagatgcgcaagctcatcagcaccatgcccggc

SEQ ID NO: 364904 - DNA, 120 bp, Artificial Sequence
  ENSG00000141026_3 (sequence is synthesized)
atccacctgagccccgaacagcagcagcagcagctgcagagcctccgggagcaagtcaggaccaagaatgagcttctgcaaaagtacaagagcctctgcatgttcgaaatccccaaggag

SEQ ID NO: 364905 - DNA, 120 bp, Artificial Sequence
  ENSG00000141026_4 (sequence is synthesized)
tagagtgaggctgacttccttagaaagagggggaagccaatggcctgtctccccactaccatccccaaacgctccttggggcgtggttcctgtggaccccagctcagctcgtcaagctgc

SEQ ID NO: 364906 - DNA, 120 bp, Artificial Sequence
  ENSG00000141026_5 (sequence is synthesized)
aggggcggggctcctgtgctgctgcgcgcgcttcgcctgtgcgggagccagcgcagagcttggctgcgccgggggttcctcgtgtagatccatatgtctagatgcataataactggagtg

SEQ ID NO: 364907 - DNA, 120 bp, Artificial Sequence
  ENSG00000141026_6 (sequence is synthesized)
cctgctggtggaagtcagaatgctcctggaggctgcagagggggtggaggactctcccctgcctctggggagggggccatctgctgcgcccggccccactgacagatctgaagagcacag

SEQ ID NO: 364908 - DNA, 120 bp, Artificial Sequence
  ENSG00000141026_7 (sequence is synthesized)
taggaagggaggcggctcctctttgcttccttccctctctctcctcccacccccataggatcagtgtgtaccaggtacacattgttcctgttaacagcagcttcttgaaacatttgcata

SEQ ID NO: 364909 - DNA, 120 bp, Artificial Sequence
  ENSG00000141026_8 (sequence is synthesized)
gaattcactggacgaattaagcctgcactcatatggcatagaattgtgagagaatgttttgaaaggccagagggtggcctttttccccaaacagtttggttccttttatgtttgagccag

SEQ ID NO: 364910 - DNA, 120 bp, Artificial Sequence
  ENSG00000141026_9 (sequence is synthesized)
cccctggctccaggttccctgcctcctagcgctctcctcgccttcagctcttgctcccttcctcgttcatcaccctcagtcagtgcccaagagtggccaaaccgcttcacatctgcagtg

SEQ ID NO: 364911 - DNA, 120 bp, Artificial Sequence
  ENSG00000141026_10 (sequence is synthesized)
cttccccagggttgacaaggggccgtcctttccacacaggccagaagaggtcttcaggcgaaccgaccttcccccttctggcatttcagattccccttgctctggttaaaaggtctttcc

SEQ ID NO: 364912 - DNA, 120 bp, Artificial Sequence
  ENSG00000141026_11 (sequence is synthesized)
ctcgtggcctttgcacttgcggcagcaacgtgtactacactgcagaagggttcagtatgcaccttgtgttgagagagaggcaaccctgggggccagttcaggtggtccccaaccataagc

SEQ ID NO: 364913 - DNA, 120 bp, Artificial Sequence
  ENSG00000141026_12 (sequence is synthesized)
taggtctgaaagttacacagccaagtttgagctcttaaaagttgatgaacagcctcatttccccagcttccctgatttcttccagatgggacgttttatttgtgtgctctcccttgactg

SEQ ID NO: 364914 - DNA, 120 bp, Artificial Sequence
  ENSG00000141026_13 (sequence is synthesized)
tcagattgaagtaagagcagttctctccgttgcctctcgaggaggaggtgcgaagtcctggagtattgtttgggtctcggaatgggcgcataacctgcgctgaccagtttaggggcttag

SEQ ID NO: 364915 - DNA, 120 bp, Artificial Sequence
  ENSG00000141026_14 (sequence is synthesized)
cagatgcctgccagctgacctcgttggcaggagggttgggtggagatgtttttagcagagcttccattagtgtagacctgtagccacctgtcagaaggtgggtggcatattggggacctg

SEQ ID NO: 364916 - DNA, 120 bp, Artificial Sequence
  ENSG00000141026_15 (sequence is synthesized)
ggaatgtgtgaaggaggagatcaaatttcagtggctttggacagaaaagaaggctctggatttaagcgggtggtcacctgtgagaccaggtctaccttgggactgttatttaactgaatc

SEQ ID NO: 364917 - DNA, 120 bp, Artificial Sequence
  ENSG00000141026_16 (sequence is synthesized)
agttatttccttgaaatttcacagtagtgggtgggcctgttttaaggctctgacagataccacgaaacatgaagcacgtggaactacaagacccccggggtctttctgagtgcaaggctg

SEQ ID NO: 364918 - DNA, 120 bp, Artificial Sequence
  ENSG00000141026_17 (sequence is synthesized)
aaatggacaagggctcctcacgggggtggagggagccggagcctgccttgtgttccttttttgacttgtgacatttttcaaacacataattaaaaggacttatgctctgctgtctcagga

SEQ ID NO: 364919 - DNA, 80 bp, Artificial Sequence
  ENSG00000141026_18 (sequence is synthesized)
tcttggctcactgcaatctctggctcccaggttcacttgaatcacttgatttccgtgcctcagcctcccaagtagctggg

SEQ ID NO: 364920 - DNA, 88 bp, Artificial Sequence
  ENSG00000141026_19 (sequence is synthesized)
aaacaaaacaaaaaaatctgtctacaggcacacgccaccacgcctttgtaaaaatacaaaaaaaaattttttttttgtatttttagta

SEQ ID NO: 364921 - DNA, 85 bp, Artificial Sequence
  ENSG00000141026_20 (sequence is synthesized)
gtttcgtctctgtctacaggcacacgccaccacgcctttgtaaaaatacaaaaaaaggcctcaagtgatctgctgacttcagcct

SEQ ID NO: 364922 - DNA, 120 bp, Artificial Sequence
  ENSG00000141026_21 (sequence is synthesized)
atctgggatttttaagcagcatagtgacctgctcagacttgggtttctaaaggtaggtggggcagaagtgtttcagaagaggggaggacctgggtccacaggaaggcagtggcaatggga

SEQ ID NO: 364923 - DNA, 120 bp, Artificial Sequence
  ENSG00000141026_22 (sequence is synthesized)
ggtggctggtctagaggagatggagctggcaggatggtggctggaagaagggggcacacaggtgcaagcctgggggtcctagcgtggccagtagagtgtgtaggtgggactgcaccctcc

SEQ ID NO: 364924 - DNA, 120 bp, Artificial Sequence
  ENSG00000141026_23 (sequence is synthesized)
ccccgtcccctgctgacagcaagtctatgctggatatttgccatctgccagactccaggcaggaatgacttggtaactgtggagggaggaaactcaagtacaggaaggaaggctgactgg

SEQ ID NO: 364925 - DNA, 120 bp, Artificial Sequence
  ENSG00000141026_24 (sequence is synthesized)
ggaggtggtccccgtgtcgagggttcgggagtggatgaacacgttctgggcattttgtagtgcagtgattttcatactccgtttagcagcagcaccttttgtcactctttgctaaaaaga

SEQ ID NO: 364926 - DNA, 120 bp, Artificial Sequence
  ENSG00000141026_25 (sequence is synthesized)
atattttttacatgtaatgctgttagcagatgaaagcaagggtgtgagttcaaggcctccctctccggaaggcctcataggtcttggcagaactggagcagagaaacacagttgataggt

SEQ ID NO: 364927 - DNA, 120 bp, Artificial Sequence
  ENSG00000141026_26 (sequence is synthesized)
aagtagtagccagtatcatccagggcgggatggagaagtgtgtcctccgtggctacagataatctacatcagtacagttttttttttggagggcattttggtaatatctgtcaaaaattt

SEQ ID NO: 364928 - DNA, 120 bp, Artificial Sequence
  ENSG00000141026_27 (sequence is synthesized)
gcattttggtaatatctgtcaaaaatttaaatatatataacctttgacccagaatccctacttttagaaaatgatcttaccaaaatacttgcacaagtgagaggtgacagcgtgctggca

SEQ ID NO: 364929 - DNA, 87 bp, Artificial Sequence
  ENSG00000141026_28 (sequence is synthesized)
tgggcgtgggcttggcaagccccgcactcggagcagccggccagctctgctggccccgtgcaatgagggacttagcacccgggccag

SEQ ID NO: 364930 - DNA, 88 bp, Artificial Sequence
  ENSG00000141026_29 (sequence is synthesized)
gcctccctgacgagcaagccacccaagggctgaggaaagcaagcgtacgtgcaggactggtaggcagctccacctgcagccccggtgc

SEQ ID NO: 364931 - DNA, 75 bp, Artificial Sequence
  ENSG00000141026_30 (sequence is synthesized)
atgctgccttaagagctgtaacgcacaccgcgaaggtctgcagcttccctcctgagccagcgagaccacgaaccc

SEQ ID NO: 364932 - DNA, 120 bp, Artificial Sequence
  ENSG00000141026_31 (sequence is synthesized)
aagaacccaccaattccggacacacaagtacataagggtataagtacaagatgttcactgtcattctagtacagtacaaccacccatgaatagccagggtaatttcgctgtctaattgta

SEQ ID NO: 364933 - DNA, 120 bp, Artificial Sequence
  ENSG00000141026_32 (sequence is synthesized)
cacccatgaatagccagggtaatttcgctgtctaattgtatatgtgttaacatggaaggacatctgaggtgccttgttaagtagaaaaagcaagaatgagaactatggatggtcacattt

SEQ ID NO: 364934 - DNA, 120 bp, Artificial Sequence
  ENSG00000141026_33 (sequence is synthesized)
ctgtcagaacaaataagaaaagtttgtgtgttttgtatgctgttgtacatttcaaagccatctgaaacagtggacaccacatgttagcagaggttatctctggaacaaggggttaatgag

SEQ ID NO: 364935 - DNA, 120 bp, Artificial Sequence
  ENSG00000141026_34 (sequence is synthesized)
atttcccttttctaagccttggttgtctcatttttgaattttttccctcaagtacctattactgtcattttttaaaaaagtgatcttagaaaaatgaaagccactggagttagtaccgtg

SEQ ID NO: 364936 - DNA, 120 bp, Artificial Sequence
  ENSG00000141026_35 (sequence is synthesized)
cgaggagagcctgtgggcagaggaatggactggtaagggctggtctgagggcaaggcagctgggacagagtggagtgtgaggcacagtgcatggaagttgtgaggaagaagaaatgggaa

SEQ ID NO: 364937 - DNA, 120 bp, Artificial Sequence
  ENSG00000141026_36 (sequence is synthesized)
actgagtcagatgccaccaaaaggtcaaaagaaatgactgtcagatttgggaggaagtctgtgtcagtggttctagcagagttattggccagtttgcatctgtactaaagcatccatgct

SEQ ID NO: 364938 - DNA, 120 bp, Artificial Sequence
  ENSG00000141026_37 (sequence is synthesized)
tcagagctgcaagaggccttggcgctctggggcacgcccccgtttcacagatggggaaactcagacccagagcgggaagaggcctttcccaagaccacagagacattccatgagttaagc

SEQ ID NO: 364939 - DNA, 120 bp, Artificial Sequence
  ENSG00000141026_38 (sequence is synthesized)
aaacgatttgagcctcgagaggtgcgatatccttaagaatgaagccagcttagagactaaatgcagactcttgtccagcggctcaaatgttcatcccagcgatcttgagcaaattaaatc

SEQ ID NO: 364940 - DNA, 120 bp, Artificial Sequence
  ENSG00000141026_39 (sequence is synthesized)
tctttaagcctcagttttctcacctttaatgttggtaatactcactttagttccttagttcagcaaactcaacagataagcatcatcttccctgtgccaagtgctacgggatggacgcag

SEQ ID NO: 364941 - DNA, 120 bp, Artificial Sequence
  ENSG00000141027_0 (sequence is synthesized)
gagtcaagatggcggccaaggtggcgaagcagcagccgcggcggcggcggcggctggagtgagcgtccgactcgccgcgccgaacgaggtcccggtgtagggccgcgcgccgtggccgcg

SEQ ID NO: 364942 - DNA, 120 bp, Artificial Sequence
  ENSG00000141027_1 (sequence is synthesized)
tcccactcctcaggccggggcgcacgtcggctcccacgcttagccagctcccggtggtttcctagaaacatgattgtttattggcattgatctcacagtctggtgaggacttctttactg

SEQ ID NO: 364943 - DNA, 120 bp, Artificial Sequence
  ENSG00000141027_2 (sequence is synthesized)
ataatgtcaagttcaggttatcctcccaaccaaggagcattcagcacagaacaaagtcgttatcctcctcactctgtccagtatacatttcccaacacccgccaccagcaggagttcgca

SEQ ID NO: 364944 - DNA, 120 bp, Artificial Sequence
  ENSG00000141027_3 (sequence is synthesized)
gtccctgattatcgttcctctcatcttgaagtgagtcaggcatcacagcttttgcagcaacagcagcagcaacagcttcgaaggcgaccttccttgctttcagaatttcacccaggttct

SEQ ID NO: 364945 - DNA, 120 bp, Artificial Sequence
  ENSG00000141027_4 (sequence is synthesized)
gacaggcctcaagaaaggagaactagttatgaaccgtttcatccaggcccatccccagtggatcatgattcactggaatcgaagcgaccacgtctggaacaggtttctgattctcatttt

SEQ ID NO: 364946 - DNA, 120 bp, Artificial Sequence
  ENSG00000141027_5 (sequence is synthesized)
cagcgtgtcagtgctgcggttttgcctttagtgcacccgctgccagaagggctgagggcttctgcagatgctaagaaggatccagcattcggaggcaaacatgaagctccatcctctcca

SEQ ID NO: 364947 - DNA, 120 bp, Artificial Sequence
  ENSG00000141027_6 (sequence is synthesized)
atttcggggcaaccatgtggagatgatcaaaatgcttcaccttcaaaactctcaaaggaagagttaatacagagtatggatcgtgtagatcgagaaattgcaaaagtagaacagcagatc

SEQ ID NO: 364948 - DNA, 120 bp, Artificial Sequence
  ENSG00000141027_7 (sequence is synthesized)
cttaaactgaaaaagaaacaacaacagcttgaagaagaggcagctaaacctcctgagcctgagaagcccgtgtcccctcctcctgtggagcagaaacaccgcagtattgtccaaattatt

SEQ ID NO: 364949 - DNA, 120 bp, Artificial Sequence
  ENSG00000141027_8 (sequence is synthesized)
tatgatgagaatcggaaaaaagcagaagaagctcataaaatttttgaaggtcttggcccaaaagttgaactgccactgtataaccagccatcagataccaaggtgtaccatgagaacatc

SEQ ID NO: 364950 - DNA, 120 bp, Artificial Sequence
  ENSG00000141027_9 (sequence is synthesized)
aagacaaaccaggtgatgaggaaaaaactcattttattttttaaaagaagaaatcatgcaagaaaacaaagggaacaaaaaatctgccagcgttatgatcagctcatggaggcatgggag

SEQ ID NO: 364951 - DNA, 120 bp, Artificial Sequence
  ENSG00000141027_10 (sequence is synthesized)
aaaaaagtggacagaatagaaaataatcctcggaggaaagctaaagaaagcaaaacaagggaatactatgaaaagcagtttccagaaattcgaaaacaaagagaacagcaagaaagattt

SEQ ID NO: 364952 - DNA, 120 bp, Artificial Sequence
  ENSG00000141027_11 (sequence is synthesized)
cagcgagttgggcagaggggagctggtctttcagccaccattgctaggagtgagcatgagatttctgaaattattgatgggctctctgagcaggagaataatgagaaacaaatgcggcag

SEQ ID NO: 364953 - DNA, 120 bp, Artificial Sequence
  ENSG00000141027_12 (sequence is synthesized)
ctctctgtgattccacctatgatgtttgatgcagaacaaagacgagtcaagttcattaacatgaatgggcttatggaggaccctatgaaagtgtataaagataggcagtttatgaatgtt

SEQ ID NO: 364954 - DNA, 120 bp, Artificial Sequence
  ENSG00000141027_13 (sequence is synthesized)
tggactgaccatgaaaaggagatctttaaggacaagtttatccagcatccaaaaaactttggactaattgcatcatacttggagaggaagagtgttcctgattgtgttttgtattactat

SEQ ID NO: 364955 - DNA, 120 bp, Artificial Sequence
  ENSG00000141027_14 (sequence is synthesized)
ttaaccaagaaaaatgagaattataaagccctcgtcagaaggaattatgggaaacgcagaggcagaaaccagcaaattgctcgaccctcgcaagaagaaaaagtagaagaaaaagaagag

SEQ ID NO: 364956 - DNA, 120 bp, Artificial Sequence
  ENSG00000141027_15 (sequence is synthesized)
gataaagcagaaaaaacagaaaaaaaagaagaagaaaagaaagatgaagaggaaaaagatgaaaaagaagactccaaagaaaataccaaggaaaaggacaagatagatggtacagcagaa

SEQ ID NO: 364957 - DNA, 120 bp, Artificial Sequence
  ENSG00000141027_16 (sequence is synthesized)
gaaactgaggaaagagagcaagccacaccccgggggcgaaagactgccaacagtcagggccgccgtaagggccggatcaccaggtccatgacaaacgaagctgcagctgccagtgctgca

SEQ ID NO: 364958 - DNA, 120 bp, Artificial Sequence
  ENSG00000141027_17 (sequence is synthesized)
gccgcagcggctactgaagagcccccaccacctctgccaccgccaccagaacccatttctacagagcctgtggagacctctcgatggacagaagaagaaatggaagttgctaaaaaaggt

SEQ ID NO: 364959 - DNA, 120 bp, Artificial Sequence
  ENSG00000141027_18 (sequence is synthesized)
ctagtagaacatggtcgtaactgggcagcaattgctaaaatggtgggaacgaaaagtgaagctcaatgtaaaaacttctattttaactataaaaggcgacacaatcttgacaacctctta

SEQ ID NO: 364960 - DNA, 120 bp, Artificial Sequence
  ENSG00000141027_19 (sequence is synthesized)
cagcagcataaacagaaaacttcacgaaaacctcgtgaagagcgagatgtgtctcaatgtgaaagtgtcgcttccactgtttctgctcaggaggatgaagatattgaagcctccaatgaa

SEQ ID NO: 364961 - DNA, 120 bp, Artificial Sequence
  ENSG00000141027_20 (sequence is synthesized)
gaagaaaatccagaagacagcgaagttgaagctgtcaagcccagcgaggacagtcctgaaaatgctacttctcgaggaaacacagaacctgcggttgagcttgagcccaccacggaaact

SEQ ID NO: 364962 - DNA, 120 bp, Artificial Sequence
  ENSG00000141027_21 (sequence is synthesized)
gcacccagtacatctccctccttagcagttccaagtacaaaaccagctgaagatgaaagtgtggagacccaggtgaatgacagcatcagtgctgagacagcagagcagatggatgtagat

SEQ ID NO: 364963 - DNA, 120 bp, Artificial Sequence
  ENSG00000141027_22 (sequence is synthesized)
cagcaggagcacagtgctgaagagggttctgtttgtgatcccccacccgctaccaaagctgactctgtggacgttgaagtgagggtgccagaaaaccatgcatctaaagttgaaggtgat

SEQ ID NO: 364964 - DNA, 120 bp, Artificial Sequence
  ENSG00000141027_23 (sequence is synthesized)
aataccaaagaaagagacttggatagagccagtgagaaggtggaacctagagatgaagatttggtggtagctcagcaaataaatgcccaaaggcccgagccccagtcagacaatgattcc

SEQ ID NO: 364965 - DNA, 120 bp, Artificial Sequence
  ENSG00000141027_24 (sequence is synthesized)
agtgccacgtgcagcgctgatgaggatgtggatggagagccagagaggcagagaatgtttcctatggactcaaagccttcactgttaaaccccactggatctatactcgtctcatctccg

SEQ ID NO: 364966 - DNA, 120 bp, Artificial Sequence
  ENSG00000141027_25 (sequence is synthesized)
ttaaaaccaaatccactggatctgccacagcttcagcatcgagctgctgttatcccaccaatggtatcctgcaccccatgtaacataccaattggaaccccagtgagcggctatgctctc

SEQ ID NO: 364967 - DNA, 120 bp, Artificial Sequence
  ENSG00000141027_26 (sequence is synthesized)
taccagcgacacattaaagcaatgcatgagtcagcactcctggaggagcagcggcagagacaagaacagatagatttggaatgtagaagttctacaagtccatgtggcacatccaagagt

SEQ ID NO: 364968 - DNA, 120 bp, Artificial Sequence
  ENSG00000141027_27 (sequence is synthesized)
ccaaacagagagtgggaagtccttcagcctgctccacatcaagtgataactaatctccctgaaggcgttcggcttccgacaactcgaccaaccaggccaccgccccctctcatcccgtca

SEQ ID NO: 364969 - DNA, 120 bp, Artificial Sequence
  ENSG00000141027_28 (sequence is synthesized)
tccaaaaccacagtggcttcagaaaaaccatcttttataatgggaggctccatctcacagggaacaccaggcacttatttgacttctcataatcaggcttcctacactcaagaaacaccc

SEQ ID NO: 364970 - DNA, 120 bp, Artificial Sequence
  ENSG00000141027_29 (sequence is synthesized)
aagccgtcagtgggatctatctctcttggactgccacggcaacaggaatctgccaaatcagctactttgccctacatcaagcaggaagaattttctccccgaagccaaaactcacaacct

SEQ ID NO: 364971 - DNA, 120 bp, Artificial Sequence
  ENSG00000141027_30 (sequence is synthesized)
gagggtctgttggtcagggcccaacatgaaggtgtagtcagaggtaccgcaggagccatacaagaaggaagtataactcggggaactccaaccagcaaaatttcagtggagagcattcca

SEQ ID NO: 364972 - DNA, 120 bp, Artificial Sequence
  ENSG00000141027_31 (sequence is synthesized)
tccctacggggctctatcactcagggcaccccggctctgccccagactggcataccaacagaggctttggtgaaggggtccatttcgagaatgcccattgaagacagcagtcctgagaaa

SEQ ID NO: 364973 - DNA, 120 bp, Artificial Sequence
  ENSG00000141027_32 (sequence is synthesized)
ggcagagaggaagctgcatccaaaggccatgttatttatgaaggcaaaagtggacatatcttgtcatatgataatattaagaatgcccgagaagggactaggagtccaagaacagctcat

SEQ ID NO: 364974 - DNA, 120 bp, Artificial Sequence
  ENSG00000141027_33 (sequence is synthesized)
gaaatcagtttaaagagaagctatgaatcagtggaaggaaatataaagcaagggatgtcaatgagggagtctcctgtatcagcaccgttagaggggctgatatgccgagcattacccagg

SEQ ID NO: 364975 - DNA, 120 bp, Artificial Sequence
  ENSG00000141027_34 (sequence is synthesized)
gggagtcctcattctgacctcaaagaaaggactgtattgtctggctccataatgcaggggacaccaagagcaacaactgaaagctttgaagatggccttaaatatcccaaacaaattaaa

SEQ ID NO: 364976 - DNA, 120 bp, Artificial Sequence
  ENSG00000141027_35 (sequence is synthesized)
agggaaagtcctcccatacgagcatttgaaggtgccattaccaaaggaaaaccatatgatggcatcaccaccatcaaagaaatggggcgttccattcatgagattccaaggcaagatatt

SEQ ID NO: 364977 - DNA, 120 bp, Artificial Sequence
  ENSG00000141027_36 (sequence is synthesized)
ttaactcaggaaagtcggaaaactccagaagtggtccagagcacacggccgataattgagggttccatttcccagggcacaccaataaagtttgacaacaactcaggtcaatctgccatc

SEQ ID NO: 364978 - DNA, 120 bp, Artificial Sequence
  ENSG00000141027_37 (sequence is synthesized)
aaacacaatgtcaaatccttaatcacggggcctagcaaactatcccgtggaatgcctccgctggaaattgtgccagagaacataaaagtggtagaacggggaaaatatgaggatgtgaaa

SEQ ID NO: 364979 - DNA, 120 bp, Artificial Sequence
  ENSG00000141027_38 (sequence is synthesized)
gcaggcgagaccgtgcgttcccggcacacgtcagtggtaagctctggcccctccgttcttaggtccacactgcatgaagctcccaaagcacaactgagccctgggatttatgatgacacc

SEQ ID NO: 364980 - DNA, 120 bp, Artificial Sequence
  ENSG00000141027_39 (sequence is synthesized)
agtgcacggaggacccctgtgagttatcaaaacaccatgtccagaggctcacccatgatgaacagaacttctgatgttacaatttcttctaacaagtctaccaatcatgaaaggaaatcg

SEQ ID NO: 364981 - DNA, 120 bp, Artificial Sequence
  ENSG00000141027_40 (sequence is synthesized)
acactgacccctacccagagggaaagtatcccagcgaagtctccagtgcctggggtggaccctgtcgtgagccacagtccgtttgatccccatcacagaggcagcactgcaggcgaggtt

SEQ ID NO: 364982 - DNA, 120 bp, Artificial Sequence
  ENSG00000141027_41 (sequence is synthesized)
tatcggagccacctgcccacgcacttggatccagccatgccttttcacagggctttggatcctgcagcggctgcttacctgtttcagagacagctttcaccaactccaggttacccaagt

SEQ ID NO: 364983 - DNA, 120 bp, Artificial Sequence
  ENSG00000141027_42 (sequence is synthesized)
cagtatcagctttacgcaatggagaacacaagacagacaatcttaaatgattacattacctcacaacagatgcaagtgaacttgcgtccagatgtggccagaggactctccccaagagag

SEQ ID NO: 364984 - DNA, 120 bp, Artificial Sequence
  ENSG00000141027_43 (sequence is synthesized)
cagccactgggtctcccatacccagcaacgagaggaatcattgacctgaccaatatgcctccaacaattttagtgcctcatccagggggaacaagcactcctcccatggacagaatcact

SEQ ID NO: 364985 - DNA, 120 bp, Artificial Sequence
  ENSG00000141027_44 (sequence is synthesized)
tccctcccaggccgtacaactctgcttccatgtctccaggacacccaacacaccttgcagctgctgcaagtgctgagagggaacgggaacgggagcgggagaaggagcgggagcgggaac

SEQ ID NO: 364986 - DNA, 120 bp, Artificial Sequence
  ENSG00000141027_45 (sequence is synthesized)
ggattgctgcagcttcctccgacctctacctgcggccaggctcagaacagcctggccgacctggcagtcatggatatgttcgctccccttccccttcagtaagaactcaggagaccatgt

SEQ ID NO: 364987 - DNA, 120 bp, Artificial Sequence
  ENSG00000141027_46 (sequence is synthesized)
tgcaacagagacccagtgttttccaaggaaccaatggaaccagtgtaatcacacctttggatccaactgctcagctacgaatcatgccactgcctgctgggggcccttcaataagccaag

SEQ ID NO: 364988 - DNA, 120 bp, Artificial Sequence
  ENSG00000141027_47 (sequence is synthesized)
gcctgccagcctcccgttacaacactgctgcggatgccctggctgctcttgtggatgctgcagcttctgcaccccagatggatgtgtccaaaacaaaagagagtaagcatgaagctgcca

SEQ ID NO: 364989 - DNA, 120 bp, Artificial Sequence
  ENSG00000141027_48 (sequence is synthesized)
ggttagaagaaaatttgagaagcaggtcagcagcagttagtgaacagcagcagctagagcagaaaaccctggaggtggagaagagatctgttcagtgtttatacacttcttcagcctttc

SEQ ID NO: 364990 - DNA, 120 bp, Artificial Sequence
  ENSG00000141027_49 (sequence is synthesized)
caagtggcaagccccagcctcattcttcagtagtttattctgaggctgggaaagataaagggcctcctccaaaatccagatatgaggaagagctaaggaccagagggaagactaccatta

SEQ ID NO: 364991 - DNA, 120 bp, Artificial Sequence
  ENSG00000141027_50 (sequence is synthesized)
ctgcagctaacttcatagacgtgatcatcacccggcaaattgcctcggacaaggatgcgagggaacgtggctctcaaagttcagactcttctagtagcttatcttctcacaggtatgaaa

SEQ ID NO: 364992 - DNA, 120 bp, Artificial Sequence
  ENSG00000141027_51 (sequence is synthesized)
cacctagcgatgctattgaggtgataagtcctgccagctcacctgcgccaccccaggagaaactgcagacctatcagccagaggttgttaaggcaaatcaagcggaaaatgatcctacca

SEQ ID NO: 364993 - DNA, 120 bp, Artificial Sequence
  ENSG00000141027_52 (sequence is synthesized)
gacaatatgaaggaccattacatcactatcgaccacagcaggaatcaccatctccccaacaacagctgcccccttcttcacaggcagagggaatggggcaagtgcccaggacccatcggc

SEQ ID NO: 364994 - DNA, 120 bp, Artificial Sequence
  ENSG00000141027_53 (sequence is synthesized)
tgatcacacttgctgatcacatctgtcaaattatcacacaagattttgctagaaatcaagtttcctcgcagactccccagcagcctcctacttctacattccagaactcaccttctgctt

SEQ ID NO: 364995 - DNA, 120 bp, Artificial Sequence
  ENSG00000141027_54 (sequence is synthesized)
tggtatctacacctgtgaggactaaaacatcaaaccgttacagcccagaatcccaggctcagtctgtccatcatcaaagaccaggttcaagggtctctccagaaaatcttgtggacaaat

SEQ ID NO: 364996 - DNA, 120 bp, Artificial Sequence
  ENSG00000141027_55 (sequence is synthesized)
ccaggggaagtaggcctggaaaatccccagagaggagtcacgtctcttcggagccctacgagcccatctccccaccccaggttccggttgtgcatgagaaacaggacagcttgctgctct

SEQ ID NO: 364997 - DNA, 120 bp, Artificial Sequence
  ENSG00000141027_56 (sequence is synthesized)
tgtctcagaggggcgcagagcctgcagagcagaggaatgatgcccgctcaccagggagtataagctacttgccttcattcttcaccaagcttgaaaatacatcacccatggttaaatcaa

SEQ ID NO: 364998 - DNA, 120 bp, Artificial Sequence
  ENSG00000141027_57 (sequence is synthesized)
agaagcaggagatttttcgtaagttgaactcctctggtggaggtgactctgatatggcagctgctcagccaggaactgagatctttaatctgccagcagttactacgtcaggctcagtta

SEQ ID NO: 364999 - DNA, 120 bp, Artificial Sequence
  ENSG00000141027_58 (sequence is synthesized)
gctctagaggccattcttttgctgatcctgccagtaatcttgggctggaagacattatcaggaaggctctcatgggaagctttgatgacaaagttgaggatcatggagttgtcatgtccc

SEQ ID NO: 365000 - DNA, 120 bp, Artificial Sequence
  ENSG00000141027_59 (sequence is synthesized)
agcctatgggagtagtgcctggtactgccaacacctcagttgtgaccagtggtgagacacgaagagaggaaggggacccatcacctcattcaggaggagtttgcaaaccaaagctgatca

SEQ ID NO: 365001 - DNA, 120 bp, Artificial Sequence
  ENSG00000141027_60 (sequence is synthesized)
gcaagtcaaacagcaggaaatctaagtctcctatacctgggcaaggctacttaggaacggaacggccctcttcagtctcctctgtacattcagaaggggattaccataggcagacgccag

SEQ ID NO: 365002 - DNA, 120 bp, Artificial Sequence
  ENSG00000141027_61 (sequence is synthesized)
ggtgggcctgggaagacaggccctcttcaacaggctcaactcagtttccttataaccctctgactatgcggatgctcagcagtactccaccaacaccgattgcatgtgctccctctgcgg

SEQ ID NO: 365003 - DNA, 120 bp, Artificial Sequence
  ENSG00000141027_62 (sequence is synthesized)
tgaaccaagcagctcctcaccaacagaacaggatctgggagcgagagcctgccccactgctctcagcacagtacgagaccctgtcggatagtgatgactgaactgcacaaagtgagggga

SEQ ID NO: 365004 - DNA, 120 bp, Artificial Sequence
  ENSG00000141027_63 (sequence is synthesized)
acagggtgcaggagagggatctctagtttttgtggtttaatttttagtagcaggtcaaaaacctgccctcctgtgacttattccctgagacttttcaggagagccagcccacagatgatg

SEQ ID NO: 365005 - DNA, 120 bp, Artificial Sequence
  ENSG00000141027_64 (sequence is synthesized)
aagaaatgatggaagttcatttggagagtcaaatgggaaaaaaacaaacaaaaaactgcctttgatacaggcaattcagtggactataataatagtggagggttgagatgtagagttttt

SEQ ID NO: 365006 - DNA, 120 bp, Artificial Sequence
  ENSG00000141027_65 (sequence is synthesized)
aaaaagtgaacagttgctgttcttacatctgtaaagaaaaccataatgtctttaaatcactcttctgtaaatagatgacctttttgcagtgtatatccccttgctgtagtatctggtgta

SEQ ID NO: 365007 - DNA, 120 bp, Artificial Sequence
  ENSG00000141027_66 (sequence is synthesized)
cttatgttcaaatcagcgcatcaactttgggggtgatttttaaaaatctttttgtctatctatctttttaaccctagccttctaaacaacctcatacagcccagttacataatgttggct

SEQ ID NO: 365008 - DNA, 120 bp, Artificial Sequence
  ENSG00000141027_67 (sequence is synthesized)
gtcacgggcattgtacttttatctgatattgtttcctctaaattcagctttccagtgatgtttaaaatcttgtgaaaatgtttagatttttaacacagaccctgtcataaaatctgtaca

SEQ ID NO: 365009 - DNA, 120 bp, Artificial Sequence
  ENSG00000141027_68 (sequence is synthesized)
ttagggtcaaaaggtaaaagtaacaaattctgccatattgtaaatttccagtgcaggctttaatttttttttttcattagtagcactgaaaaaatattactgcatgggtatgttctagtt

SEQ ID NO: 365010 - DNA, 120 bp, Artificial Sequence
  ENSG00000141027_69 (sequence is synthesized)
cagtttataaagttttaaaggcttatttgaggcatacctcactgttacgcacactggtaatttaaccatgcccctaagtattccttttctcctgcatttgatgcagcccaacaaagcttt

SEQ ID NO: 365011 - DNA, 120 bp, Artificial Sequence
  ENSG00000141027_70 (sequence is synthesized)
tgttttgaaataaatttgactaccctgtccatagctacagtagattatttgtggtttaaggctcctggtgtctcaggttccaaaggaaaagcttacatatttttcccttagtttgaatat

SEQ ID NO: 365012 - DNA, 120 bp, Artificial Sequence
  ENSG00000141027_71 (sequence is synthesized)
atgattggttgggttaaaagataatgatctgtgtagtatttagataagctttatgctgcatcctgaaaaactcatggtgaacacagtcctttttccccatcactatggaccagcatttac

SEQ ID NO: 365013 - DNA, 120 bp, Artificial Sequence
  ENSG00000141027_72 (sequence is synthesized)
tctcactttgctcccttgggacaagagtttactgttaaatgttttcatttcacagagtctcaaggtgcaaataatttaaaagactgaattctaaactaattatggtactagagggccagt

SEQ ID NO: 365014 - DNA, 120 bp, Artificial Sequence
  ENSG00000141027_73 (sequence is synthesized)
tttatctttcattaagaattgcttgctgaattttaaagtttttttcatacaatttatcatagcatttaagtatctttctataacatagatactaacagttttgggagaatgccactggta

SEQ ID NO: 365015 - DNA, 120 bp, Artificial Sequence
  ENSG00000141027_74 (sequence is synthesized)
actggaaaggggagaaacagatctctcaggatgataaaaattagcactttacagactttcaagtagacctaaacttttaaacaaaagtactcaaggcttttaaggaagcagctctgtgat

SEQ ID NO: 365016 - DNA, 120 bp, Artificial Sequence
  ENSG00000141027_75 (sequence is synthesized)
tagctactgaccaagaccctcctatcactggtgtctaatccctatgttacagatgaagacacaggtttagtactttgcccatatagttaaattagtgacagagataggccataagcccac

SEQ ID NO: 365017 - DNA, 120 bp, Artificial Sequence
  ENSG00000141027_76 (sequence is synthesized)
atttgtcttcagtcaaagctttcactcctgtccctgttccactcctgtatacctgaggtccccaacataaactttagatcaggcttagtggtcagcattcctagtacttggaaagttggt

SEQ ID NO: 365018 - DNA, 120 bp, Artificial Sequence
  ENSG00000141027_77 (sequence is synthesized)
attttttacaacagatatatgtaaacatataaaaatttcaaaatgaatgaaaaacagtgactaaatgttccacttcacagttttctgctgaatttttttttttcaggtactggtaatatt

SEQ ID NO: 365019 - DNA, 120 bp, Artificial Sequence
  ENSG00000141027_78 (sequence is synthesized)
ttagagtttgttaataatttatattgccaacctaccataaaagagattatgatggtatttttctatgaccctgagggtcttaagctattctgagtcagaatacagttgacccttgaacaa

SEQ ID NO: 365020 - DNA, 120 bp, Artificial Sequence
  ENSG00000141027_79 (sequence is synthesized)
cacgggtttgaactgtgtgggtccacttatacatggattttcttccacctctgccacccaagatagcaagaccaaccccttctcatcctcagcctattcaacatgaagatgacaaggatg

SEQ ID NO: 365021 - DNA, 67 bp, Artificial Sequence
  ENSG00000141027_80 (sequence is synthesized)
tctcatcctcagcctattcaacatgaagatgacaaggatgaagaccttaatcttaacaaacattttc

SEQ ID NO: 365022 - DNA, 120 bp, Artificial Sequence
  ENSG00000141027_81 (sequence is synthesized)
tacatatacaaaatatgtgtcaatcgactatgttatccgtaagacttctggtcagcagtaggccatgagtagttaagttttggaggagtcaaagttagatgtggatttttgactacttag

SEQ ID NO: 365023 - DNA, 120 bp, Artificial Sequence
  ENSG00000141027_82 (sequence is synthesized)
ggggtctatgcccctaactcctgcattatttgaaggtcaaccgtatagtttctgagaacatgtcagatcagagcctaacttcttactcttgcagttctacctgaggacccgaaggtgagg

SEQ ID NO: 365024 - DNA, 120 bp, Artificial Sequence
  ENSG00000141027_83 (sequence is synthesized)
tgctgtgaaccactccctccatcctcatcataatgcatgtgcgtattactttatttaccatcacctggagaagaaatctcagaatgagagttaaaatccaataatagttcttggttcaaa

SEQ ID NO: 365025 - DNA, 120 bp, Artificial Sequence
  ENSG00000141027_84 (sequence is synthesized)
ataaatgaaaggacagaattctcacatggtttacctatggaggttcaccttatcatgatttaagtggtaagcacagagcagcactgacaacttactgtggttcactgcaaaccaaaacat

SEQ ID NO: 365026 - DNA, 120 bp, Artificial Sequence
  ENSG00000141027_85 (sequence is synthesized)
gatattctttgtagacttagatttcagtgttctgacactatatccttacacgtgatttttttagcacccagaactaaattaaggtcttcctaatactcttcataaaagtattctgacagc

SEQ ID NO: 365027 - DNA, 120 bp, Artificial Sequence
  ENSG00000141027_86 (sequence is synthesized)
cagttttccactgcatgtttatgactgcaaatttcataatgcttttaattttggtacactgagtgattctattttaaaaatatttatgcccagaaaactccagtgaccattggacagtta

SEQ ID NO: 365028 - DNA, 120 bp, Artificial Sequence
  ENSG00000141027_87 (sequence is synthesized)
aaaaattttaatgacacgattttaaccaattcacttttgaatttagaccaatcagtaaaggagatcagtcctccttttgcttcagtaccttattttacaacagtgtaaatgaactgtaat

SEQ ID NO: 365029 - DNA, 120 bp, Artificial Sequence
  ENSG00000141027_88 (sequence is synthesized)
gaaaacacccacatgaagagactgtcctgaaaactcctagtgtttccaacaacgagaccatgagctgagtcactgtggatgatttaaaattaataaataaataaaacttggaatgaaaaa

SEQ ID NO: 365030 - DNA, 120 bp, Artificial Sequence
  ENSG00000141027_89 (sequence is synthesized)
aaagcagtgtccattgtgctttgtaagttgtcagcctcccaactgattattatatttgtcctaacagacacagttccttaaattgaccttaaactatgaagaaatgttagtattattaac

SEQ ID NO: 365031 - DNA, 120 bp, Artificial Sequence
  ENSG00000141027_90 (sequence is synthesized)
tactaaaggatgccagtaacatttttaatagcattctagttaatgtgaattttctgatattcatctttgtgctggaagacattataaataaagttatgctttatgttccgttcatctgaa

SEQ ID NO: 365032 - DNA, 120 bp, Artificial Sequence
  ENSG00000141027_91 (sequence is synthesized)
tagacattagaattgctattgctaatacatcaaggtctaaaataaatccaccttaatccttgtagctaagtaaaagttccatgtgcactagctcagcatgtgatttttctctactctttt

SEQ ID NO: 365033 - DNA, 120 bp, Artificial Sequence
  ENSG00000141027_92 (sequence is synthesized)
gtacgtggtgtttagcaaatgtatttcagccaggacaaaactcagtgcctttctttcattctctcaatcagcagcggctgcttacctgtttcagagacagctttcaccaactccaggtta

SEQ ID NO: 365034 - DNA, 120 bp, Artificial Sequence
  ENSG00000141027_93 (sequence is synthesized)
tatactttgacatgccataaaattcacccattgtatgtgtacaattcaattacttcatttatacaactgttcaattatcaccatattccagcttaatggtcaatatttgctttgtcattt

SEQ ID NO: 365035 - DNA, 120 bp, Artificial Sequence
  ENSG00000141027_94 (sequence is synthesized)
gatcttttctctatggtaagcaaaaatctattatttgaaaggttccttcactgaaagctgggtggagttgaactctaaaattacctacaaaattactttctatctagtcatctatgtcta

SEQ ID NO: 365036 - DNA, 120 bp, Artificial Sequence
  ENSG00000141027_95 (sequence is synthesized)
attcttcaatttgacacatgcatgttactagcacaagctgcattttaaaggcagcaggaaggtcttttactatcattagaagttaaggagcaacatcgtggacaaatcggcctcgcccag

SEQ ID NO: 365037 - DNA, 120 bp, Artificial Sequence
  ENSG00000141027_96 (sequence is synthesized)
catttcagtgagggcttggtgcgaattccagccagagccctagaaagtatcttgggcaggtcgaaatgcacccctccagctcccagccacgaggggaccggcttccctgtacgcagctcc

SEQ ID NO: 365038 - DNA, 120 bp, Artificial Sequence
  ENSG00000141027_97 (sequence is synthesized)
ggccagaggaggccgccgccgccccaccacgccgcggaggggtttgcagggtcccttccacggcctggagtttttccttttcccacgcctgaggaaggcctcgggcgcgcggaacagacg

SEQ ID NO: 365039 - DNA, 120 bp, Artificial Sequence
  ENSG00000141027_98 (sequence is synthesized)
ggcggggggcgcacaagcccagggcacgatggcagcagcgctggatccggctgggcgctgctcggccccgtatccgtccgagaggaccgccgctgccaggcctagaggagacatgaagag

SEQ ID NO: 365040 - DNA, 120 bp, Artificial Sequence
  ENSG00000141027_99 (sequence is synthesized)
aaaaagaaacaagtaaatgtctttgcttaatatattctaagaatgtatgtttgtctccctacagtagatatttttgagttttccatattttgaaactttacataaaaggaatcatgcctt

SEQ ID NO: 365041 - DNA, 120 bp, Artificial Sequence
  ENSG00000141027_100 (sequence is synthesized)
gacgatgaaagaactggtcagtcgactcaaaataggtaggaaaacccttgaggtttcacctggactaaggagccaagggtgagatggtgtctgatgttgaaggacatgcggagcctcaag

SEQ ID NO: 365042 - DNA, 120 bp, Artificial Sequence
  ENSG00000141027_101 (sequence is synthesized)
gacgcagcttctgccactgctgctgcccgggcagcactgtctgatgacgtgactcctggatccacggggcgcgcatgggtcaagtggcagtaacacagtggttttttttgttgttgtttg

SEQ ID NO: 365043 - DNA, 120 bp, Artificial Sequence
  ENSG00000141027_102 (sequence is synthesized)
tttgttttaactatgtatatagtgaatacctgaggcaactttttttctgatagaaattggcagcttttgctccttctcctgaatgaagtcatgagttaacaagtttctgtttaggtaagt

SEQ ID NO: 365044 - DNA, 120 bp, Artificial Sequence
  ENSG00000141027_103 (sequence is synthesized)
aaaaaaaaaaatacttccattttatcttcacttaatgggtgagaaataaaggttgagatcatgaaaaataaaaagattaattttattataggaattttttgagactttagtttggtatat

SEQ ID NO: 365045 - DNA, 120 bp, Artificial Sequence
  ENSG00000141027_104 (sequence is synthesized)
gaaacagcaatcgattcttttttattttttaatgatacagaaaattgtttatattaattttgtttgcttacttctgcatttatattttgttccactagtcctcagacttcttcagtgaat

SEQ ID NO: 365046 - DNA, 120 bp, Artificial Sequence
  ENSG00000141027_105 (sequence is synthesized)
aattttttttttctccaaaattaagataagttctttgtttggagctatgtaccacatcctttcaggtgttcttctgaattatatttaatctttgataatgagtgaaaagcacagacattc

SEQ ID NO: 365047 - DNA, 70 bp, Artificial Sequence
  ENSG00000141027_106 (sequence is synthesized)
cccggcccatatagagaaatactgtttagcaatagaaagaaccataaattgatgagaataattgccaaga

SEQ ID NO: 365048 - DNA, 120 bp, Artificial Sequence
  ENSG00000141027_107 (sequence is synthesized)
cgaagagaggaaggggacccatcacctcattcaggtacagctttcattttagtgcttttctgctgcttttccccaaaaaagccagtttatttcccaaattctgatgcatcactaagacat

SEQ ID NO: 365049 - DNA, 120 bp, Artificial Sequence
  ENSG00000141027_108 (sequence is synthesized)
atgtctttatgtgctcagagtcacctcttagggtttccgttacttaaaaaaggtttttgaaaacctacccagacattataatatgaacagaaataaaatggaagaaaatttttacccaaa

SEQ ID NO: 365050 - DNA, 120 bp, Artificial Sequence
  ENSG00000141027_109 (sequence is synthesized)
acagctactttgccctacatcaagcaggaagaattttctccccgaagccaaaactcacaacctgagggtctgttggtcagggcccaacatgaaggtgtagtcagaggtaaaatatgctgg

SEQ ID NO: 365051 - DNA, 120 bp, Artificial Sequence
  ENSG00000141027_110 (sequence is synthesized)
tggtactatgactttttaatgtatattcaaaagatgattatattctatttgttggtttgtaaagacagttaagaagaatgtgtagtttggtagtggtttggggacacttcagtggtgctt

SEQ ID NO: 365052 - DNA, 120 bp, Artificial Sequence
  ENSG00000141027_111 (sequence is synthesized)
ccgaataatacctctcatatttatctgtctcaatggtttctactgggtcagcatcagtagaagtttaagaaggtgatattggccagacatagtggcttatacctgtaatgctagcacttt

SEQ ID NO: 365053 - DNA, 84 bp, Artificial Sequence
  ENSG00000141027_112 (sequence is synthesized)
cgaggtcccggtgtagggccgcgcgccgtggccgcgtcccactcctcaggccggggcgcacgtcggctcccacgcttagccagc

SEQ ID NO: 365054 - DNA, 120 bp, Artificial Sequence
  ENSG00000141027_113 (sequence is synthesized)
atcgcgccactgcactccagcctgggtgcgacagagagagactctgtctccaaaaaaaaaggtctctgtgtggtgggtcctggtattgttctaggtcacttgccaagtgctgtgtgtatt

SEQ ID NO: 365055 - DNA, 120 bp, Artificial Sequence
  ENSG00000141027_114 (sequence is synthesized)
tagaagttctacaagtccatgtggcacatccaagagtccaaacagagagtgggaaggaaaatcagtcgcctatatgccttatgctgaggtcaaacgtgctctagaacaggaagcacagat

SEQ ID NO: 365056 - DNA, 120 bp, Artificial Sequence
  ENSG00000141027_115 (sequence is synthesized)
aggctttctccaagagaagtcagtaaagccgctccacagcctgatatgagtgcagcccgctatagtgtcccgccagtccttcagcctgctccacatcaagtgataactaatctccctgaa

SEQ ID NO: 365057 - DNA, 120 bp, Artificial Sequence
  ENSG00000141027_116 (sequence is synthesized)
gaaaatacatcacccatggttaaatcaaagaagcaggagatttttcgtaagttgaactcctctggtggaggtgactctgatatggctgctcagccaggaactgagatctttaatctgcca

SEQ ID NO: 365058 - DNA, 120 bp, Artificial Sequence
  ENSG00000141027_117 (sequence is synthesized)
tttaaagaagagtattgaattttatttttaatgttacataaggtggtaaaatactggtgctatgatccaaaaggtgacagtactctccaaatctcagtttctactagttgtttacatttt

SEQ ID NO: 365059 - DNA, 120 bp, Artificial Sequence
  ENSG00000141027_118 (sequence is synthesized)
catatgttgtttacattttcatattttgcaatattgaatgttaaatgttgagtggaaagagaagatccaaatacatgaatatagtctttatttgaatggttgagaaatggacaaatatta

SEQ ID NO: 365060 - DNA, 120 bp, Artificial Sequence
  ENSG00000141030_0 (sequence is synthesized)
agagcggcagccttttcccgcgcgtgctgccttcgccgctcgggccgcccgggggaaaacatggcgtctgccctggagcagttcgtgaacagtgtccgacagctctcagctcaagggcaa

SEQ ID NO: 365061 - DNA, 120 bp, Artificial Sequence
  ENSG00000141030_1 (sequence is synthesized)
atgacacagctttgtgaactgatcaacaagagtggggaactccttgcgaagaacttatcccatctggacactgtgctcggggctctggatgtacaagaacactccttgggcgtccttgct

SEQ ID NO: 365062 - DNA, 120 bp, Artificial Sequence
  ENSG00000141030_2 (sequence is synthesized)
gttttgtttgtgaagttttctatgcccagtgttcctgacttcgaaacgctattctcacaggttcagctcttcatcagcacttgtaatggggagcacattcgatatgcaacagacactttt

SEQ ID NO: 365063 - DNA, 120 bp, Artificial Sequence
  ENSG00000141030_3 (sequence is synthesized)
gctgggctttgccatcagctaacaaatgcacttgtggaaagaaaacagcccctgcgaggaattggcatccttaagcaagccatagacaagatgcagatgaatacaaaccagctgacctca

SEQ ID NO: 365064 - DNA, 120 bp, Artificial Sequence
  ENSG00000141030_4 (sequence is synthesized)
atacatgctgatctctgccagctttgtttgctagcaaaatgctttaagcctgcccttccatatcttgacgtggatatgatggatatctgtaaagagaatggagcctatgatgcaaaacac

SEQ ID NO: 365065 - DNA, 120 bp, Artificial Sequence
  ENSG00000141030_5 (sequence is synthesized)
tttttatgttactattattatggagggatgatctatactgggctgaagaactttgaaagagctctctacttttatgaacaggctataactactcctgccatggcggtcagtcatatcatg

SEQ ID NO: 365066 - DNA, 120 bp, Artificial Sequence
  ENSG00000141030_6 (sequence is synthesized)
ttggaatcatataaaaagtatattttagtgtctttgatattacttggcaaagtacaacagctaccaaaatatacatctcaaattgtgggtagattcattaagcctcttagcaatgcatac

SEQ ID NO: 365067 - DNA, 120 bp, Artificial Sequence
  ENSG00000141030_7 (sequence is synthesized)
agtgtattcaaccaacaacccctcagaactccgaaacctggtgaataagcacagtgaaaccttcactcgcgataacaacatggggctggtgaagcaatgcttgtcatctctttataagaa

SEQ ID NO: 365068 - DNA, 120 bp, Artificial Sequence
  ENSG00000141030_8 (sequence is synthesized)
gaatattcagaggctaacaaagacctttttaactctatcattacaagatatggcaagtcgtgtgcagttgtctggacctcaggaggcagagaaatacgttctgcacatgatagaagatgg

SEQ ID NO: 365069 - DNA, 120 bp, Artificial Sequence
  ENSG00000141030_9 (sequence is synthesized)
tgagatttttgcaagtattaaccagaaggacggtatggtcagtttccatgataaccctgaaaaatataataacccagccatgcttcataacattgatcaggagatgctgaagtgcattga

SEQ ID NO: 365070 - DNA, 120 bp, Artificial Sequence
  ENSG00000141030_10 (sequence is synthesized)
gctggatgagcggctgaaagccatggaccaggagatcacagtgaaccctcagtttgtacaaaagagtatgggctcacaagaagatgattcaggaaacaaaccatccagttattcttgaaa

SEQ ID NO: 365071 - DNA, 120 bp, Artificial Sequence
  ENSG00000141030_11 (sequence is synthesized)
ctaacatccatcctgagctaaacaagagaaactaccatcttggccagtgacaagtgttcggagggcagcagagaggaccaagcctgtgtcacctggagactaagaaattaagttttgttt

SEQ ID NO: 365072 - DNA, 120 bp, Artificial Sequence
  ENSG00000141030_12 (sequence is synthesized)
tgacatcttcagtcctgtgtgctttcagaaaaccattttctctgcaaagaaaggaaacagatttgcaaactttaaagtctgtcgtggatttatttatcctcagattattgttactgcatt

SEQ ID NO: 365073 - DNA, 120 bp, Artificial Sequence
  ENSG00000141030_13 (sequence is synthesized)
aaatctacctttttgttttaagttgcttgaacattaatgtgtcttctgtatcacttttttctcctctgaagtttttaataagcacattcattgtgaacagaaatagctggattttaggaa

SEQ ID NO: 365074 - DNA, 120 bp, Artificial Sequence
  ENSG00000141030_14 (sequence is synthesized)
tttttggaagatttggatctgaaaggtttttatttattgacaaatttgtatctacaaaaaaatctaaaagttgtaatcattgtcttcagaaaataaaagaaaagaaaggccagacagaca

SEQ ID NO: 365075 - DNA, 67 bp, Artificial Sequence
  ENSG00000141030_15 (sequence is synthesized)
atcacgctcaggtttaacccctgaccccaggtgatttgtccgcctcggcctcccaaagtgttgagat

SEQ ID NO: 365076 - DNA, 120 bp, Artificial Sequence
  ENSG00000141030_16 (sequence is synthesized)
gggattacagacatgagccaccacgcctggccgctctgtacacatttaataaaatgtccttccttcgttgttcctacctgtgactaattctgcttctgactttcagacctttttaactct

SEQ ID NO: 365077 - DNA, 120 bp, Artificial Sequence
  ENSG00000141030_17 (sequence is synthesized)
ggtgattggcgcaccgccatgtcatctttgccgccgatccgcagcttgctgactaggccgccgggagcgggcgggaggcgagtccgttctgggtgtcttggctctatggctcgcctctgc

SEQ ID NO: 365078 - DNA, 120 bp, Artificial Sequence
  ENSG00000141030_18 (sequence is synthesized)
gtaattaatttaatggcaaaatgtcacctgaaatggtgtctagtcttcatttatctcagcatgaatatactcgtttcactgcaaaagatactatgtgtttgattatgaggtttgcctaga

SEQ ID NO: 365079 - DNA, 120 bp, Artificial Sequence
  ENSG00000141030_19 (sequence is synthesized)
tcctgctgggtgggatatttggtattatatgatagatgtattagctttctgagtccaaaatactctggctccaaaacccatgtggccccaggggtttcacatcaagagattgtgaaccta

SEQ ID NO: 365080 - DNA, 120 bp, Artificial Sequence
  ENSG00000141030_20 (sequence is synthesized)
gagatttttgcaagtattaaccagaaggacggtatggtcagtttccatgataaccctgaaaaatataataacccagccatgcttcataacattgatcaggagagtatgggctcacaagaa

SEQ ID NO: 365081 - DNA, 120 bp, Artificial Sequence
  ENSG00000141030_21 (sequence is synthesized)
gctttgccatcagctaacaaatgcacttgtggaaagaaaacagtgacaacataagatccaatgtgctgccatctttgagaacttatctgaaagagatgtcatttctgacagcccctgcga

SEQ ID NO: 365082 - DNA, 120 bp, Artificial Sequence
  ENSG00000141030_22 (sequence is synthesized)
agagcggcagccttttcccgcgcgtgctgccttcgccgctcgggccgcccgggggaaaacatggcgtctgccctggagcagttcgtgaacagtgtccgacagctctcagctcaagtgttg

SEQ ID NO: 365083 - DNA, 120 bp, Artificial Sequence
  ENSG00000141030_23 (sequence is synthesized)
cagagtgctgggattacagcctcttagcaatgcataccacgagttagcacaagtgtattcaaccaacaacccctcagaactccgaaacctggtgaataagcacagtgaaaccttcactcg

SEQ ID NO: 365084 - DNA, 120 bp, Artificial Sequence
  ENSG00000141034_0 (sequence is synthesized)
gtgtgtgtgtctgtgtgtgtttgtgtgttgtgtgtctgtgagtgtctgtgtgtgtgtatgtgtgcgcgagggcaagtcgggagggggacccagctcaggactgggaggccctgctcgcag

SEQ ID NO: 365085 - DNA, 80 bp, Artificial Sequence
  ENSG00000141034_1 (sequence is synthesized)
gcaggtccctgggtcccggtggcggccggagcgcttgctccgcaggcagcgggcgggtggtcgcccctcccgcccccacc

SEQ ID NO: 365086 - DNA, 120 bp, Artificial Sequence
  ENSG00000141034_2 (sequence is synthesized)
gcggcggcggttcctctcccactccccccagccctggctccgggggaccccgcgatgccggtccgcaccgagtgtcccccgccggccggtgcctccgctgcctccgcggcctcactcatc

SEQ ID NO: 365087 - DNA, 120 bp, Artificial Sequence
  ENSG00000141034_3 (sequence is synthesized)
gcctcactcatcccgccgccgcccatcaacacccagcagcccggcgtggccaccagcctgctctacagcggctccaagttccgcggccaccagaagagcaaggggaactcgtacgacgta

SEQ ID NO: 365088 - DNA, 120 bp, Artificial Sequence
  ENSG00000141034_4 (sequence is synthesized)
gaggtggtgctgcagcacgtggacacggggaactcttacctttgtgggtacttgaagattaaaggccttactgaggagtatccaacccttacaaccttcttcgaaggagaaataatcagc

SEQ ID NO: 365089 - DNA, 120 bp, Artificial Sequence
  ENSG00000141034_5 (sequence is synthesized)
aaaaaacaccctttcttaactcgcaagtgggatgcagatgaagatgttgatcggaaacactggggcaagtttctggctttttatcagtatgcaaaatcatttaactcagatgactttgat

SEQ ID NO: 365090 - DNA, 120 bp, Artificial Sequence
  ENSG00000141034_6 (sequence is synthesized)
tatgaagagctgaagaatggagactacgtcttcatgaggtggaaggaacagtttctggtcccagatcacacgatcaaagacatcagtggtgcttcttttgccgggttctactacatctgc

SEQ ID NO: 365091 - DNA, 120 bp, Artificial Sequence
  ENSG00000141034_7 (sequence is synthesized)
tttcagaagtcagcagcctccatagagggctactactaccataggagttcagaatggtatcagtccctcaatctaacccatgttcctgaacacagtgcacccatctatgaattccggtga

SEQ ID NO: 365092 - DNA, 120 bp, Artificial Sequence
  ENSG00000141034_8 (sequence is synthesized)
caacggttcagaacagcaaccaaataaaactgaacttggcaaaaaagaactttgccgagaaaattgtgtacctgccagaaccaggagaagtgtgttcctgtttcttcacgagcagactcg

SEQ ID NO: 365093 - DNA, 120 bp, Artificial Sequence
  ENSG00000141034_9 (sequence is synthesized)
catcacaaagcatgaatgttaacccacagaatccaaggagcatggctggcccgtggggcaggtggagggagcagtcttcgttcttcctcccctcagtggcagtttggtcttcacctgttt

SEQ ID NO: 365094 - DNA, 120 bp, Artificial Sequence
  ENSG00000141034_10 (sequence is synthesized)
ttaagctaccttaaacgcacttttccttcctgcacagctaacttctacatcactgaaatgcccattccttcctccgtcccacctccagccgaatagaaggtctgctcccggatcaccctc

SEQ ID NO: 365095 - DNA, 120 bp, Artificial Sequence
  ENSG00000141034_11 (sequence is synthesized)
agccttggtgctcagtggtcccgaggccctagacccccaccccccgccagttgctttgtctggtagctcaagagaaggcagagccccagcacctctgtgccccccagagctctgtgcagg

SEQ ID NO: 365096 - DNA, 120 bp, Artificial Sequence
  ENSG00000141034_12 (sequence is synthesized)
gagttggccagctgccgcatcatcggccaccaagggcacaagaggcggaggctccagtccctgctgggctgcctcagtcttcagtgctgattgtgtcacgggtcagcgtgcgctgctgag

SEQ ID NO: 365097 - DNA, 120 bp, Artificial Sequence
  ENSG00000141034_13 (sequence is synthesized)
ccctgtactgttaacagtgcaaagctagtgagtagctgtcaggttccctgggcctgccatcagggatcactaaatttaaggcttccagatccctggcaggaacagattccagtcctgctt

SEQ ID NO: 365098 - DNA, 120 bp, Artificial Sequence
  ENSG00000141034_14 (sequence is synthesized)
actcagtacatttgctccaaacttttcaacttgagggcaatactaaacttaaaaataagagtttttttattacaaaattatttttatggtccctttaacgaggaccctatggcaaatgca

SEQ ID NO: 365099 - DNA, 120 bp, Artificial Sequence
  ENSG00000141034_15 (sequence is synthesized)
caattattcagaattacattttatcgttttcacattgaaaacagcaaatgttgacttagtaatttttatatcgatatctatatgtatatgtatatttaatcaaccagcagttttgaaact

SEQ ID NO: 365100 - DNA, 120 bp, Artificial Sequence
  ENSG00000141034_16 (sequence is synthesized)
agtcatcctggtacaaaagttttgcagcattgcctaaattatagtgctcaacacaagaactgtttttggggccagtttagcatttgtgccgcctccttttgctactcaaaacagcaatgc

SEQ ID NO: 365101 - DNA, 120 bp, Artificial Sequence
  ENSG00000141034_17 (sequence is synthesized)
gtcgtcgttctctgaaaacagtgactctgaaatgttgggacaggggaaggggtgggaaacatgaacatgctcaaataactcgaggctcacgtgccaaagtgtgtgtgtgtgtgtgtgtgt

SEQ ID NO: 365102 - DNA, 120 bp, Artificial Sequence
  ENSG00000141034_18 (sequence is synthesized)
atgatgttttgtttttttaaatgttttaaaagcttaataggttggcatcagttgtagcccacaaacatggctagggctttggggatttggcatttttctggtggtttacaagacttactc

SEQ ID NO: 365103 - DNA, 120 bp, Artificial Sequence
  ENSG00000141034_19 (sequence is synthesized)
cgaatacaagaggaaaagctttaaaaacaagattgcatcataacccccaggagcaaagcaacctggaggctgcatatccatgggcgggcagcataagagaatgtgaagcccttcagtgag

SEQ ID NO: 365104 - DNA, 120 bp, Artificial Sequence
  ENSG00000141034_20 (sequence is synthesized)
acgagacgagcaatgggaaaccttttctgttcttaagaagtgactttaattttattgacatatgtactgtatgttactgagattgaatgttaggggaagccttaaggtagaggtatttgg

SEQ ID NO: 365105 - DNA, 120 bp, Artificial Sequence
  ENSG00000141034_21 (sequence is synthesized)
gaaagtagccagtgggcacttgtgatatctaaaatctgttatcccaggactgtgtacagaggggcaacctacccattcaggaaggtcagggctttggaaccctaaaaagttggcccgatg

SEQ ID NO: 365106 - DNA, 120 bp, Artificial Sequence
  ENSG00000141034_22 (sequence is synthesized)
acttaaagggaaaaataattcattcccagagatgagtcagaacagtctcctcaatcctgaaattcaacaaggcatcagaagggctggctgtggtcaagcccagctgctgtcatgtgagga

SEQ ID NO: 365107 - DNA, 120 bp, Artificial Sequence
  ENSG00000141034_23 (sequence is synthesized)
gatgctcactgtggtcttgttgagctgatggccttggttgagctgatggacaagtgaaggaggccatggggctgtgctgtccttcctgccgtacgtgccattccactctcttcagctctc

SEQ ID NO: 365108 - DNA, 120 bp, Artificial Sequence
  ENSG00000141034_24 (sequence is synthesized)
ccctcaacagcatgcgagcccataccttctgcatttttccaggcctgtgagggatataggcctccccttggagcactgagtccggaggtcatccctgagctcatccacggctcatgctgt

SEQ ID NO: 365109 - DNA, 120 bp, Artificial Sequence
  ENSG00000141034_25 (sequence is synthesized)
ggctccgagtagtggtttgagtgggcaggaagggccatttgcaaacactgctgtgttctagacaaacaacccaagtcctatggcaggatttcttccttccttccttttttacccaggtga

SEQ ID NO: 365110 - DNA, 120 bp, Artificial Sequence
  ENSG00000141034_26 (sequence is synthesized)
tgaagtgcacccattgtactgggaagaatgaagaggtgatacctttactagatccttcagacacatctatgagaagatttgttcatttaaaagtctgcccactgaggatagggaaaggat

SEQ ID NO: 365111 - DNA, 120 bp, Artificial Sequence
  ENSG00000141034_27 (sequence is synthesized)
taaggatttttccacctcctcttagtaactcctgaattaccaacatcaacttctttctctccgttcctgaaggaactttggggaatcatcttcatccgtagttacgctttcctgaacctt

SEQ ID NO: 365112 - DNA, 120 bp, Artificial Sequence
  ENSG00000141034_28 (sequence is synthesized)
ctcagtggtttacatgcctctgaaactatgtgcaatatttttggttgacacttgtatccatccttaagaaattagtgcagattgcagatgttctgtcttccatcccaaacaagcctgcca

SEQ ID NO: 365113 - DNA, 120 bp, Artificial Sequence
  ENSG00000141034_29 (sequence is synthesized)
tgaggtaggatcctaggggtttggctgttcttactccactgctcagaaagcttccattctgctgtcctcagcctcgaccctcttctgtgctggacttccacccacccacccttttcaagt

SEQ ID NO: 365114 - DNA, 120 bp, Artificial Sequence
  ENSG00000141034_30 (sequence is synthesized)
ttagatagtgtttcagctgctgtcccaaagtaacaaaacaatacctactgttaagtaggaagtcaatctgtgtgctggttttgttggttatgtggaaatcacaaactccagaggagcaaa

SEQ ID NO: 365115 - DNA, 120 bp, Artificial Sequence
  ENSG00000141034_31 (sequence is synthesized)
ggggtttttcaatgtcttttgctttcagaaacagagaatataatattctcactaaggccttgaattgatttttttctcataaaatagtctgataagctaatttttaaaaagaaatgccat

SEQ ID NO: 365116 - DNA, 120 bp, Artificial Sequence
  ENSG00000141034_32 (sequence is synthesized)
taactgtgttgtatcgtggtttaaaattactaacaagttgtgggaaagaaaaataatatttgattttgaatcttaaatgtttttaaaaattagacttgaatgggcacaaagtataaatat

SEQ ID NO: 365117 - DNA, 120 bp, Artificial Sequence
  ENSG00000141034_33 (sequence is synthesized)
tttgtttctttatggaggacatgtggaaggagtttgagggtttgggatgggagaagtattttgcagagctatcaatgtccaaataatttaaaaaaaaaaataaaggtatttaagcagtga

SEQ ID NO: 365118 - DNA, 120 bp, Artificial Sequence
  ENSG00000141034_34 (sequence is synthesized)
ctcacaaagcttccattctgctgtcctcagcctcgaccctcttctgtgctggacttccacccacccacccttttcaagtttagatagtgtttcagctgctgtcccaaagtaacaaaacaa

SEQ ID NO: 365119 - DNA, 120 bp, Artificial Sequence
  ENSG00000141034_35 (sequence is synthesized)
gagggctactactaccataggagttcagaatggtgaggacctctgaggacagaggccacggggagggcttgctgcccagctggctctcccttggctcatcaaacccaaaagcaacatctt

SEQ ID NO: 365120 - DNA, 120 bp, Artificial Sequence
  ENSG00000141034_36 (sequence is synthesized)
agcctgtctctgtatagattctgtgctttatttggatgctgagagcttatttcagtgatctcagttgctcacaataaggccttatccctatgcacagagcagagtaaatgagatgaaaat

SEQ ID NO: 365121 - DNA, 120 bp, Artificial Sequence
  ENSG00000141034_37 (sequence is synthesized)
gaaacattttgggtgagagaggaactaagaaggccacccttggtactggcatgtgaggtgtggttgagccagggagctgaacctatggagtgcttcctcctccaacagtttgtggctgct

SEQ ID NO: 365122 - DNA, 120 bp, Artificial Sequence
  ENSG00000141034_38 (sequence is synthesized)
tttgtagtactcagcatttcccctaactttcaccactcatggaggactcccaggttcccacgtgggactcctggagctctgtactgcacctgggtttgtctgagatttacaatgtctaat

SEQ ID NO: 365123 - DNA, 120 bp, Artificial Sequence
  ENSG00000141034_39 (sequence is synthesized)
acacttcacctaggctgtcattttttcattataaactagaatcagagatattgtattgcatcctcagattttcctgagtggtatttaagttgctattatagtggtactataaagtcagga

SEQ ID NO: 365124 - DNA, 84 bp, Artificial Sequence
  ENSG00000141034_40 (sequence is synthesized)
gtatttaagttgctattatagtggtactataaagtcaggattccatatattcagtctacataggataaaaatgtctatgtgaca

SEQ ID NO: 365125 - DNA, 120 bp, Artificial Sequence
  ENSG00000141040_0 (sequence is synthesized)
cgccggggtttctgggccgggcttctcaggaccgggctggaacgtgcagctcctggccgggacactctgtgctttgcggggaagggaagtggcggagcccgaggatccgctgccgctcgg

SEQ ID NO: 365126 - DNA, 120 bp, Artificial Sequence
  ENSG00000141040_1 (sequence is synthesized)
gactgagcccgccacgcaggcgcctgtgccagcgtcgccattgttgcctgtggccttagggccgctccggctgcccgtcggccgggtcccagcgacaggtattgatgtccgggcgcagcg

SEQ ID NO: 365127 - DNA, 120 bp, Artificial Sequence
  ENSG00000141040_2 (sequence is synthesized)
cgcgagtgtccgcgcgatcagtgacagcccgagcccgtccacgcgcgggctcccgtgctcgtggcttgcgggagggcaaagacggggtggaggctgctgtgggcccagtcccagcgttgc

SEQ ID NO: 365128 - DNA, 120 bp, Artificial Sequence
  ENSG00000141040_3 (sequence is synthesized)
gcgtcgcacggtccccgactcccccgctgccctcgacctcgaccctgcggctgaagaggaggtctcttatccatccctgcaagttctgggctcagaatttgtcactaaggctgctaactc

SEQ ID NO: 365129 - DNA, 120 bp, Artificial Sequence
  ENSG00000141040_4 (sequence is synthesized)
taccttgattctgttctgccctcggctgcagcagcctttgatatagtgtccttgtgactctagcatgagacttcaagcagttggctcactactggagaaataaaggatattgccagattg

SEQ ID NO: 365130 - DNA, 120 bp, Artificial Sequence
  ENSG00000141040_5 (sequence is synthesized)
actctcctgtctgtagcaatgttagcctcaagcaagaggatgaacagttcttcacgttctcaaatccttctaaggtggaagtcagacaaggctcagagtggaccctacaatgttgagaag

SEQ ID NO: 365131 - DNA, 120 bp, Artificial Sequence
  ENSG00000141040_6 (sequence is synthesized)
gaaatccttacttcaagattcttgcgtgacactgagacctgtcgacagaattttaggaattttccatacccagacctggctggtcctcgaaaggcattgagtcaactccgagagctctgc

SEQ ID NO: 365132 - DNA, 120 bp, Artificial Sequence
  ENSG00000141040_7 (sequence is synthesized)
cttaagtggctgagacctgagattcactcaaaggaacaaattttggagctgctggtgctggagcaattcctgaccatcctgcctggtgaggttaggacttgggtaaagtcccagtatcca

SEQ ID NO: 365133 - DNA, 120 bp, Artificial Sequence
  ENSG00000141040_8 (sequence is synthesized)
gagagcagcgaggaagcagtgactctggtggaggatttgactcagattctagaagaggaagctcctcaaaactctaccctttcccaagataccccagaggaagaccccagaggaaaacat

SEQ ID NO: 365134 - DNA, 120 bp, Artificial Sequence
  ENSG00000141040_9 (sequence is synthesized)
gctttccagacaggatggctaaatgacttggtgaccaaagaatcgatgacattcaaagatgtggctgtagacatcacccaggaggactgggagttaatgcgtcctgtgcagaaggaatta

SEQ ID NO: 365135 - DNA, 120 bp, Artificial Sequence
  ENSG00000141040_10 (sequence is synthesized)
tacaagactgtgacgttacagaactattggaacatggtttctctgggacttacagtgtacagaccaactgtgattcccatattggaagaaccatggatggtgataaaagaaattttagaa

SEQ ID NO: 365136 - DNA, 120 bp, Artificial Sequence
  ENSG00000141040_11 (sequence is synthesized)
ggccctagtccagaatgggaaactaaagcccaagcatgtactccagtggaggatatgtctaaactcacaaaggaagaaacccataccatcaaattagaagactcatatgactacgatgat

SEQ ID NO: 365137 - DNA, 120 bp, Artificial Sequence
  ENSG00000141040_12 (sequence is synthesized)
agactagagaggcgaggaaaaggtggcttctggaaaattcacactgatgaaagaggtttcagtttgaagtcagtcctttcacaagaatatgatcctacagaagaatgtcttagtaaatat

SEQ ID NO: 365138 - DNA, 120 bp, Artificial Sequence
  ENSG00000141040_13 (sequence is synthesized)
gatatatatagaaataattttgaaaagcattcaaacctaattgtacagtttgatacccaattagataataaaacttctgtgtataatgaaggcagggcaaccttcaatcatgtctcatat

SEQ ID NO: 365139 - DNA, 120 bp, Artificial Sequence
  ENSG00000141040_14 (sequence is synthesized)
ggaaaatacttcctggagagaagccttacaagtgtaatgtgtgtgggaaaaaatttaggaaatacccatccctcctgaaacaccaaagtacccatgccaaagagaaatcgtatgaatgtg

SEQ ID NO: 365140 - DNA, 120 bp, Artificial Sequence
  ENSG00000141040_15 (sequence is synthesized)
aagaatgtgggaaagagtttaggcatatctcatcccttattgcacatcagagaatgcacactggagaaaaaccatatgaatgccaccagtgtggtaaagccttcagccagcgtgcacacc

SEQ ID NO: 365141 - DNA, 120 bp, Artificial Sequence
  ENSG00000141040_16 (sequence is synthesized)
ttactatacatcagagaattcatactggagagaaaccctataagtgtgatgactgtgggaaagacttcagtcagcgtgcacaccttaccatccatcaaaggacacatactggagagaaac

SEQ ID NO: 365142 - DNA, 120 bp, Artificial Sequence
  ENSG00000141040_17 (sequence is synthesized)
catataaatgcttggaatgtggtaaaaccttcagtcatagttcatcactgattaatcatcagagagttcatactggagaaaaaccttatatatgcaatgaatgtgggaagactttcagtc

SEQ ID NO: 365143 - DNA, 120 bp, Artificial Sequence
  ENSG00000141040_18 (sequence is synthesized)
agagtacacaccttcttcagcatcaaaaaatacatactgggaagaaaccatataaatgcaatgaatgttggaaagtgtttagtcagagtacttaccttattcgacatcagagaattcatt

SEQ ID NO: 365144 - DNA, 120 bp, Artificial Sequence
  ENSG00000141040_19 (sequence is synthesized)
ctggagagaagtgttataaatgtaatgaatgtggaaaagcctttgctcattcctcaacccttattcaacatcaaaccactcacactggagagaaatcctatatatgtaatatatgtggga

SEQ ID NO: 365145 - DNA, 120 bp, Artificial Sequence
  ENSG00000141040_20 (sequence is synthesized)
aagccttcagccagagtgcaaatcttactcaacatcatagaacacatactggagagaaaccatataaatgcagtgtgtgtgggaaagcattcagccagagtgtgcaccttactcaacatc

SEQ ID NO: 365146 - DNA, 120 bp, Artificial Sequence
  ENSG00000141040_21 (sequence is synthesized)
agaggattcataatggagaaaaaccctttaaatgcaatatatgtgggaaagcatatagacaaggcgcaaatcttactcagcatcaaaggattcatactggagaaaaaccctataaatgta

SEQ ID NO: 365147 - DNA, 120 bp, Artificial Sequence
  ENSG00000141040_22 (sequence is synthesized)
atgaatgtgggaaagctttcatttattcctcatcacttaatcaacatcagagaactcatactggagagagaccctataaatgtaatgaatgtgataaggattttagccagagaacatgcc

SEQ ID NO: 365148 - DNA, 120 bp, Artificial Sequence
  ENSG00000141040_23 (sequence is synthesized)
ttattcaacaccagagaattcacacaggagagaaaccctatgcatgtcgtatatgtggtaaaaccttcacccagagtacaaaccttattcagcatcaacgtgttcatacaggtgccaaac

SEQ ID NO: 365149 - DNA, 120 bp, Artificial Sequence
  ENSG00000141040_24 (sequence is synthesized)
atcgtaattaatggataagggaaacttcaattcggttttacaactttgtttcaattttgttttgtgcattctatgtgtcagaacattcagaagaagtctgaagaagtgcaatatgttaga

SEQ ID NO: 365150 - DNA, 120 bp, Artificial Sequence
  ENSG00000141040_25 (sequence is synthesized)
tactcagcagaagtatcagaagtagtggtatggatataacctatttagatttaatgtgaaatttaagaaggaaacttgacttcttaaccttaatttgatatgattttaattcattacaga

SEQ ID NO: 365151 - DNA, 120 bp, Artificial Sequence
  ENSG00000141040_26 (sequence is synthesized)
aagaaaccctgtgaagggtattcaaaaacataactcatcaactctctatttcaagtacacttatcctttggtatactcgggggattggttccaggaccacccatgtatacgaaaatctac

SEQ ID NO: 365152 - DNA, 120 bp, Artificial Sequence
  ENSG00000141040_27 (sequence is synthesized)
ccatactcaagttgcacggtcagcctggtggaacctgtgtatatgaaaagccctacatctatgcaggtttcccatccctgaataatgtgctttcaaactctgttcagttgaaaaaaaaaa

SEQ ID NO: 365153 - DNA, 120 bp, Artificial Sequence
  ENSG00000141040_28 (sequence is synthesized)
gttgttcaagggtcaactgtacatcctaatgaggccttatgagtgtaacttaggaaggtgtccatcaaatagagatttcacactagagagtgatcttaaaattacagaaaagagtaagct

SEQ ID NO: 365154 - DNA, 120 bp, Artificial Sequence
  ENSG00000141040_29 (sequence is synthesized)
gctttcaggccttttattcccagctttgaagccttaaaatatgtaaaggactcccttccctgttttacttccccttctcctgttatgccataactgccatatggagccagtaggtttgaa

SEQ ID NO: 365155 - DNA, 120 bp, Artificial Sequence
  ENSG00000141040_30 (sequence is synthesized)
aaaaaaacagttggaagtatcttaaagatttctatgtgaccactggttacaccttccctcagatatggaaatattaaagagaagcttaatgaaagatatgttatgatagaaactaatgtg

SEQ ID NO: 365156 - DNA, 120 bp, Artificial Sequence
  ENSG00000141040_31 (sequence is synthesized)
tatataacattagatgtgtagagatttagttaaacaggcaaaaattaaatgcctcaagcttaaatgaattttcaatacacattagccttgatttcactaggttttgacattcaaggtcat

SEQ ID NO: 365157 - DNA, 120 bp, Artificial Sequence
  ENSG00000141040_32 (sequence is synthesized)
ctgtgactgttttactatggaaagttcatttcttccactgaaacacgtttcttgagtgtctactatgctcaggtcccaaacttcctaattggatcctctcaagcttgttacagtgctgaa

SEQ ID NO: 365158 - DNA, 120 bp, Artificial Sequence
  ENSG00000141040_33 (sequence is synthesized)
aatcacaggtggtttacacaacagaaagatttctagagtgatgagaaagtgaggatgtgatattttgtcatgggttgagcataagcaacctgctaaaatgggttgccaaatgctacctat

SEQ ID NO: 365159 - DNA, 120 bp, Artificial Sequence
  ENSG00000141040_34 (sequence is synthesized)
atcccaagagaaggaagtggaagtgatagtgtagctatataaataatgtgagaaaaaaatggaaaatagatctgaattcactgcagaatgtgggtcggggaaaaggtgaaattttagtgg

SEQ ID NO: 365160 - DNA, 120 bp, Artificial Sequence
  ENSG00000141040_35 (sequence is synthesized)
agtgaggaaaacatacatagataattgctataacatgaaatgtaattggacttgctttgcctatgaaatgagagtggctaaataaaaaagaattcagcctggttattagaagaaactaaa

SEQ ID NO: 365161 - DNA, 120 bp, Artificial Sequence
  ENSG00000141040_36 (sequence is synthesized)
aacaaaatgaccgatttttaaagaataattggaagcctgacactccttcatacatacaagtaaaacagagattactcttaacatgtcaggaaaaaatttaattggaaaaagcattgatgc

SEQ ID NO: 365162 - DNA, 120 bp, Artificial Sequence
  ENSG00000141040_37 (sequence is synthesized)
agtaatcattaaacaatgataactgggtttgtgggtctcaaaaggaaaactggcagaaatgcaaatagaaatagataaaaatactattgtatttcatatttacagcattccactaccaga

SEQ ID NO: 365163 - DNA, 120 bp, Artificial Sequence
  ENSG00000141040_38 (sequence is synthesized)
atataaggccatattctgagaactgagatttcattgtgctcttacttgtttctccagtcccttgcataatagtgcatggtcaatacatggttgaattaatgaataaattatataaattag

SEQ ID NO: 365164 - DNA, 120 bp, Artificial Sequence
  ENSG00000141040_39 (sequence is synthesized)
atttcagtaataaagtagaattgactggcatggagtgaaaattggtataacgaaaaatatttttgtgcatatatcaaagaaatgttcaacaaataacatttacttgggaactgcttaaaa

SEQ ID NO: 365165 - DNA, 120 bp, Artificial Sequence
  ENSG00000141040_40 (sequence is synthesized)
atcgtgaatcaggtttcctgggacatctttgtacaggaagttttcctgagctaaatgaggggaaattggtatcaattctggtgctataaatatcaatttaagcatgtattaaccatgcaa

SEQ ID NO: 365166 - DNA, 120 bp, Artificial Sequence
  ENSG00000141040_41 (sequence is synthesized)
cttcctttggacattactgtttataaaaccatcctacaaacaggtactgaaggaaagacccaggatgctagtatcctaaaggctatattattgagtgttttctttaaaaaacttgatttc

SEQ ID NO: 365167 - DNA, 120 bp, Artificial Sequence
  ENSG00000141040_42 (sequence is synthesized)
catttcccttacattagttaaccttgatttcatagtatcatcctgcacaaagtacaggttgcagaatactcaaactgtgcttatatagctgttttttaaaataacagttgtttgaaaatc

SEQ ID NO: 365168 - DNA, 120 bp, Artificial Sequence
  ENSG00000141040_43 (sequence is synthesized)
ttatttttttgatgctgcttcatccctcacacagcacttatttcccttggttgagcatgtggcatgtgacagtccatagcgccttcctttgcattactctgttatttcctgcctttgtat

SEQ ID NO: 365169 - DNA, 120 bp, Artificial Sequence
  ENSG00000141040_44 (sequence is synthesized)
gttttatgtaaataatgcatttataaagtcttccactgataaacagaggcaattgatgcccttataaaataacagactagtaatagtggagaaccctagatctttgtgtatttttcccac

SEQ ID NO: 365170 - DNA, 120 bp, Artificial Sequence
  ENSG00000141040_45 (sequence is synthesized)
ttttacagttgtctgacccgcaaattattcaacagtttttagcaaatagccttattttccagaactttttattatgagttttcaaatatatagaaagttttaaaaatcataaaattaact

SEQ ID NO: 365171 - DNA, 120 bp, Artificial Sequence
  ENSG00000141040_46 (sequence is synthesized)
atatacccacctaaatttaaaaactaacattctgccgtattttttttaaccaaacattggaaagtaacttacagacatgacatttcatctctaaatacttcagcatgcatcttacaaaaa

SEQ ID NO: 365172 - DNA, 120 bp, Artificial Sequence
  ENSG00000141040_47 (sequence is synthesized)
taaggatggtcttttacataaccacaatacatttacatacctttaaaaaaaaaacaaatagtaattccctaatatctgaagacttagtctgtgtttaaatttcctctgttgatccagtca

SEQ ID NO: 365173 - DNA, 120 bp, Artificial Sequence
  ENSG00000141040_48 (sequence is synthesized)
gtttaaatttcctctgttgatccagtcagttttcacacatagtatttgattatctgtttcatctatctagaacagtccccactttggtttttccttttttttgagacggagtctcactct

SEQ ID NO: 365174 - DNA, 72 bp, Artificial Sequence
  ENSG00000141040_49 (sequence is synthesized)
cattacaggcgtgaaccaccgcgcccggacagtttttcctctttaagagagcaggtcagttgtcttgaaaaa

SEQ ID NO: 365175 - DNA, 120 bp, Artificial Sequence
  ENSG00000141040_50 (sequence is synthesized)
tttttcctctttaagagagcaggtcagttgtcttgaaaaatgtctcatgttcaggattcaactgattatttacatgtgggttgttccggtaccccctgtagtttccataaattagaagtt

SEQ ID NO: 365176 - DNA, 120 bp, Artificial Sequence
  ENSG00000141040_51 (sequence is synthesized)
agggcaaaaggcttgattgggttgtttaaacatttttaatgataacacctcacagatgtatttcatagtgcatcatatcaaaagtctcattaatatcaggttgactcattatcaatggat

SEQ ID NO: 365177 - DNA, 120 bp, Artificial Sequence
  ENSG00000141040_52 (sequence is synthesized)
cactcatttgaggtcaccagatcttcccaatataaaggtagtttttcctattgcaattaatctgtggactgacactggcagcacatggatattttgattgccaacaactttttacctggt

SEQ ID NO: 365178 - DNA, 120 bp, Artificial Sequence
  ENSG00000141040_53 (sequence is synthesized)
aaaaagtaaccaacggtgatcgttgcctgaatccattgtctcatcaatgtttgcaaaatgacaattttctaattctatcactctacacttgttgagtggcattcttgtataatgttccct

SEQ ID NO: 365179 - DNA, 120 bp, Artificial Sequence
  ENSG00000141040_54 (sequence is synthesized)
catcaactaggaatgcactagaggcacagtcagcaattattttaccttaattaccagtgtaggagtttaattaccagtaaagagtttgatgctttcatctgcagtgataacacatgattc

SEQ ID NO: 365180 - DNA, 120 bp, Artificial Sequence
  ENSG00000141040_55 (sequence is synthesized)
aatgtgttaagtcatttatgatcattgtttctgatgttcagattgtcccaaatttggccaggtggagcccttcaagtatctcttatgtccttttgacattcactctctagtctttggaca

SEQ ID NO: 365181 - DNA, 120 bp, Artificial Sequence
  ENSG00000141040_56 (sequence is synthesized)
cttgattgccttctaacacaagatatctcaagttggccttgcattttcaatgccccaggcctggaatgaaacctttttccaagaatccctggctccttttaataggtagctatttagaaa

SEQ ID NO: 365182 - DNA, 120 bp, Artificial Sequence
  ENSG00000141040_57 (sequence is synthesized)
ccaagatctgggcactagggattctcactgctcccggagtgtcactggcaattctttccaaccattcaagttggttttcataaagacaactcttcactcatgccatcagttacctaatat

SEQ ID NO: 365183 - DNA, 120 bp, Artificial Sequence
  ENSG00000141040_58 (sequence is synthesized)
ctgtgtaatgagggatataattacataactgggataaactttcgggtgcaaacaactaaatcttgttaagcatgcacctaaattggagagaacacttccatgttatgtatgctagaaagc

SEQ ID NO: 365184 - DNA, 120 bp, Artificial Sequence
  ENSG00000141040_59 (sequence is synthesized)
agcaaattagctgcaaaaggcctgtgacaatgccatcaggaaatttacaagggaatagaacttgtcagttaatctgccaagtgggttaagtagagggcaattaagaaagcaactagatgt

SEQ ID NO: 365185 - DNA, 120 bp, Artificial Sequence
  ENSG00000141040_60 (sequence is synthesized)
atacctaatacgttgtgttttaactattatatgtctataacttacggtgtttataagctaatagccctcctttcccatcacatctcttaaggcagatttctggtaagatctaaatattaa

SEQ ID NO: 365186 - DNA, 120 bp, Artificial Sequence
  ENSG00000141040_61 (sequence is synthesized)
tcctaaggatctgtttcatgcaaatctaagtactagtttttcttactaaacctttatttggtctctaaaactttaaggctgttatgtttcattctttgtcttctggtgtcagttcacttg

SEQ ID NO: 365187 - DNA, 120 bp, Artificial Sequence
  ENSG00000141040_62 (sequence is synthesized)
catgtgcccgaaaatgtattcttactcctctgtttctgttctccccatggctctatctttcataattattagccccttagaacactataaccattaaaaatggcaagcatgtgcactaca

SEQ ID NO: 365188 - DNA, 120 bp, Artificial Sequence
  ENSG00000141040_63 (sequence is synthesized)
cgacaggaggcaagggtctcttatccatccctgcaagttctgggctcagaatttgtcactaaggctgctaactctaccttgattctgttctgccctcggctgcagcagcctttgatatag

SEQ ID NO: 365189 - DNA, 120 bp, Artificial Sequence
  ENSG00000141052_0 (sequence is synthesized)
atgacactcctggggtctgagcattccttgctgattaggagcaagttcagatcagttttacagttaagacttcaacaaagaaggacccaggaacaactggctaaccaaggcataatacca

SEQ ID NO: 365190 - DNA, 120 bp, Artificial Sequence
  ENSG00000141052_1 (sequence is synthesized)
ccactgaaacgtccagctgaattccatgagcaaagaaaacatttggatagtgacaaggctaaaaattccctgaagcgcaaagccagaaacaggtgcaacagtgccgacttggttaatatg

SEQ ID NO: 365191 - DNA, 120 bp, Artificial Sequence
  ENSG00000141052_2 (sequence is synthesized)
cacatactccaagcttccactgcagagaggtccattccaactgctcagatgaagctgaaaagagcccgactcgccgatgatctcaatgaaaaaattgctctacgaccagggccactggag

SEQ ID NO: 365192 - DNA, 120 bp, Artificial Sequence
  ENSG00000141052_3 (sequence is synthesized)
ctggtggaaaaaaacattcttcctgtggattctgctgtgaaagaggccataaaaggtaaccaggtgagtttctccaaatccacggatgcttttgcctttgaagaggacagcagcagcgat

SEQ ID NO: 365193 - DNA, 120 bp, Artificial Sequence
  ENSG00000141052_4 (sequence is synthesized)
gggctttctccggatcagactcgaagtgaagacccccaaaactcagcgggatccccgccagacgctaaagcctcagataccccttcgacaggttctctggggacaaaccaggatcttgct

SEQ ID NO: 365194 - DNA, 120 bp, Artificial Sequence
  ENSG00000141052_5 (sequence is synthesized)
tctggctcagaaaatgacagaaatgactcagcctcacagcccagccaccagtcagatgcggggaagcaggggcttggcccccccagcacccccatagccgtgcatgctgctgtaaagtcc

SEQ ID NO: 365195 - DNA, 120 bp, Artificial Sequence
  ENSG00000141052_6 (sequence is synthesized)
aaatccttgggtgacagtaagaaccgccacaaaaagcccaaggaccccaagccaaaggtgaagaagcttaaatatcaccagtacattcccccagaccagaaggcagagaagtcccctcca

SEQ ID NO: 365196 - DNA, 120 bp, Artificial Sequence
  ENSG00000141052_7 (sequence is synthesized)
cctatggactcagcctacgctcggctgctccagcaacagcagctgttcctgcagctccaaatcctcagccagcagcagcagcagcagcaacaccgattcagctacctagggatgcaccaa

SEQ ID NO: 365197 - DNA, 120 bp, Artificial Sequence
  ENSG00000141052_8 (sequence is synthesized)
gctcagcttaaggaaccaaatgaacagatggtcagaaatccaaactcttcttcaacgccactgagcaatacccccttgtctcctgtcaaaaacagtttttctggacaaactggtgtctct

SEQ ID NO: 365198 - DNA, 120 bp, Artificial Sequence
  ENSG00000141052_9 (sequence is synthesized)
tctttcaaaccaggcccactcccacctaacctggatgatctgaaggtctctgaattaagacaacagcttcgaattcggggcttgcctgtgtcaggcaccaaaacggctctcatggaccgg

SEQ ID NO: 365199 - DNA, 120 bp, Artificial Sequence
  ENSG00000141052_10 (sequence is synthesized)
cttcgacccttccaggactgctctggcaacccagtgccgaactttggggatataacgactgtcacttttcctgtcacacccaacacgctgcccaattaccagtcttcctcttctaccagt

SEQ ID NO: 365200 - DNA, 120 bp, Artificial Sequence
  ENSG00000141052_11 (sequence is synthesized)
ccagcctcctctgacctgtcagtcgctgggtccctgccggacaccttcaatgatgcctccccctccttcggcctgcacccgtccccagtccacgtgtgcacggaggaaagtctcatgagc

SEQ ID NO: 365201 - DNA, 120 bp, Artificial Sequence
  ENSG00000141052_12 (sequence is synthesized)
agcctgaatgggggctctgttccttctgagctggatgggctggactccgagaaggacaagatgctggtggagaagcagaaggtgatcaatgaactcacctggaaactccagcaagagcag

SEQ ID NO: 365202 - DNA, 120 bp, Artificial Sequence
  ENSG00000141052_13 (sequence is synthesized)
aggcaggtggaggagctgaggatgcagcttcagaagcagaaaaggaataactgttcagagaagaagccgctgcctttcctggctgcctccatcaagcaggaagaggctgtctccagctgt

SEQ ID NO: 365203 - DNA, 120 bp, Artificial Sequence
  ENSG00000141052_14 (sequence is synthesized)
ccttttgcatcccaagtacctgtgaaaagacaaagcagcagctcagagtgtcacccaccggcttgtgaagctgctcaactccagcctcttggaaatgctcattgtgtggagtcctcagat

SEQ ID NO: 365204 - DNA, 120 bp, Artificial Sequence
  ENSG00000141052_15 (sequence is synthesized)
caaaccaatgtactttcttccacatttctcagcccccagtgttcccctcagcattcaccgctgggggctgtgaaaagcccacagcacatcagtttgcccccatcacccaacaaccctcac

SEQ ID NO: 365205 - DNA, 120 bp, Artificial Sequence
  ENSG00000141052_16 (sequence is synthesized)
tttctgccctcatcctccggggcccagggagaagggcacagggtctcctcgcccatcagcagccaggtgtgcactgcacagatggctggtttacactcttctgataaggtggggccaaag

SEQ ID NO: 365206 - DNA, 120 bp, Artificial Sequence
  ENSG00000141052_17 (sequence is synthesized)
ttttcaattccatccccaactttttctaagtcaagttcagcaatttcagaggtaacacagcctccatcctatgaagatgccgtaaagcagcaaatgacccggagtcagcagatggatgaa

SEQ ID NO: 365207 - DNA, 120 bp, Artificial Sequence
  ENSG00000141052_18 (sequence is synthesized)
ctcctggacgtgcttattgaaagcggagaaatgccagcagacgctagagaggatcactcatgtcttcaaaaagtcccaaagatacccagatcttcccgaagtccaactgctgtcctcacc

SEQ ID NO: 365208 - DNA, 120 bp, Artificial Sequence
  ENSG00000141052_19 (sequence is synthesized)
aagccctcggcttcctttgaacaagcctcttcaggcagccagatcccctttgatccctatgccaccgacagtgatgagcatcttgaagtcttattaaattcccagagccccctaggaaag

SEQ ID NO: 365209 - DNA, 120 bp, Artificial Sequence
  ENSG00000141052_20 (sequence is synthesized)
atgagtgatgtcacccttctaaaaattgggagcgaagagcctcactttgatgggataatggatggattctctgggaaggctgcagaagacctcttcaatgcacatgagatcttgccaggc

SEQ ID NO: 365210 - DNA, 120 bp, Artificial Sequence
  ENSG00000141052_21 (sequence is synthesized)
cccctctctccaatgcagacacagttttcaccctcttctgtggacagcaatgggctgcagttaagcttcactgaatctccctgggaaaccatggagtggctggacctcactccgccaaat

SEQ ID NO: 365211 - DNA, 120 bp, Artificial Sequence
  ENSG00000141052_22 (sequence is synthesized)
tccacaccaggctttagcgccctcaccaccagcagccccagcatcttcaacatcgatttcctggatgtcactgatctcaatttgaattcttccatggaccttcacttgcagcagtggtag

SEQ ID NO: 365212 - DNA, 120 bp, Artificial Sequence
  ENSG00000141052_23 (sequence is synthesized)
aattagccccgcacggcgaggggggaggcgccagttttctggggacactggctgccactgtactcctacccaggggagctcacggagagttggatgaattctgggttgttagctgcggtc

SEQ ID NO: 365213 - DNA, 120 bp, Artificial Sequence
  ENSG00000141052_24 (sequence is synthesized)
atcctccaagcttctctccccattcttccagcctccacccgcccttctctggagcccaagcagacagcagtcatggtgccgggggaaacccttgtcccaaaagcccatgtgtacagcaaa

SEQ ID NO: 365214 - DNA, 120 bp, Artificial Sequence
  ENSG00000141052_25 (sequence is synthesized)
caaaaacagaagaagaagaagagaattaaaaagaagcaatgatttctgtgccaatgaacaagaacaaaagtcatttttagaaatacatatactgtaatatttaccaacagtcagtaactg

SEQ ID NO: 365215 - DNA, 120 bp, Artificial Sequence
  ENSG00000141052_26 (sequence is synthesized)
ttaatgatttcaacaatgcattaaaagaatgtgctttctcagattaaggatgccaaaaaagatatttcactgccttttcaaagaccagtatattttctagcccataatttttctcaggca

SEQ ID NO: 365216 - DNA, 120 bp, Artificial Sequence
  ENSG00000141052_27 (sequence is synthesized)
ttgttggggcataagctcacactgtaagcttttctcatgaattcactagacataacgtggaaggaaaacgtagtcttttgggagtacagggaagccagcccctcaaagcttatggaagac

SEQ ID NO: 365217 - DNA, 120 bp, Artificial Sequence
  ENSG00000141052_28 (sequence is synthesized)
atacctgcaatggaagctgttgcccaatgtctccattactatctttcaaaagagaagccagacccagcttcagatcaaaagttcttgagacagaggaacaaaaccaatcgatttccaggg

SEQ ID NO: 365218 - DNA, 120 bp, Artificial Sequence
  ENSG00000141052_29 (sequence is synthesized)
aagctaatcaactctcttttccctctaccacaaaactgccctgctggagtggttctgaacctgtacccaggactcgatgtggtcactaataacaattaacctgaactgagtccacagaac

SEQ ID NO: 365219 - DNA, 120 bp, Artificial Sequence
  ENSG00000141052_30 (sequence is synthesized)
tccactcggaactttcttcttttttaactagtggcccaatcattcccaccatctctgtgctgataagtacgtgtcctagatgagaaccctgaagaatgcagaccttcttcccccgaagga

SEQ ID NO: 365220 - DNA, 120 bp, Artificial Sequence
  ENSG00000141052_31 (sequence is synthesized)
gatgccacaagctctccaacacagccccctttagttccaaagactagagatgaccacattggtagaagtatatctcgaggcacaggaagggagccccaccagggataattcagacaggac

SEQ ID NO: 365221 - DNA, 120 bp, Artificial Sequence
  ENSG00000141052_32 (sequence is synthesized)
tagagaataacatcatttcacataccctgggataaacaccctgggttcctatagaaggactattacttatgggagtccaacttctccttttgttttgttattatcagtttatctttctcc

SEQ ID NO: 365222 - DNA, 120 bp, Artificial Sequence
  ENSG00000141052_33 (sequence is synthesized)
cctccacattgggaggggaggacttctcagttctaacaagctgccatactcctaagaaagccatttttgaaaaatttaacaatccaggttcttctggagaactcattctccacacgcaca

SEQ ID NO: 365223 - DNA, 120 bp, Artificial Sequence
  ENSG00000141052_34 (sequence is synthesized)
gtttgctgcaaaaggaagttgcaagaatttcttgaggaagaaactggtgacttggtccatcagtcacgaagttctttctattctcgtttagttttcaagaaattattggtttgtgttgct

SEQ ID NO: 365224 - DNA, 120 bp, Artificial Sequence
  ENSG00000141052_35 (sequence is synthesized)
ctggggaaattggaaatcattacattgtaaagacaaatatggatgatatttacaagagagaatttcagatctgggtttttgaaagaaaacagaattgcgcattgaaaacgatggaaggaa

SEQ ID NO: 365225 - DNA, 120 bp, Artificial Sequence
  ENSG00000141052_36 (sequence is synthesized)
aaagacaatggtctaatgtgcattcctcattacctctcgtggctttggctgggagttggaaaaagctaaaatttcagaacagtctctgtaaggctctctgtggctccagttcaccatttt

SEQ ID NO: 365226 - DNA, 120 bp, Artificial Sequence
  ENSG00000141052_37 (sequence is synthesized)
atattgttgcatgctgtagaaaggagctattgctgttgttttgtttttttatttaaatcactaaggcactgtttttatcttttgtaaaaaaaaaaaaaaagttgttcactgtgcacttat

SEQ ID NO: 365227 - DNA, 120 bp, Artificial Sequence
  ENSG00000141052_38 (sequence is synthesized)
agaaaaaataatcaaaaatgttgggattttagaagctctctttttgataaaccaaagatttagaagtcattccattgttaacttgtaaaaatgtgtgaacacagagagtttttggtgatt

SEQ ID NO: 365228 - DNA, 120 bp, Artificial Sequence
  ENSG00000141052_39 (sequence is synthesized)
gctactctgaaagctgccagatcttattctgggggtgggatgtggaggaatacacatacacacacaaacatacatgtatgtataatagatatatacatatgtgtatattatatctgtgtg

SEQ ID NO: 365229 - DNA, 120 bp, Artificial Sequence
  ENSG00000141052_40 (sequence is synthesized)
tgcatgtatctccaaaagcggcgttacagagttctacaccaaaagcctttaacccttaatctgctgtgaatgatacctggcctttctcactatgaatttctgattaaccaaccagactac

SEQ ID NO: 365230 - DNA, 120 bp, Artificial Sequence
  ENSG00000141052_41 (sequence is synthesized)
acgttgcctctctgtgtatgactaacggctccaacccgatgactcacagctacttgcttatcgtgaacaagctcatcttggcaatgaatatggatgtgaaaagacagaacagcttcacca

SEQ ID NO: 365231 - DNA, 120 bp, Artificial Sequence
  ENSG00000141052_42 (sequence is synthesized)
ttagtagctggaaatggtatcacagtctcttatagaggaatatgaaaggaacaagaaaatcattttacattccttttatctgtattgtgctttaaaagatccacatggtaaattttttat

SEQ ID NO: 365232 - DNA, 120 bp, Artificial Sequence
  ENSG00000141052_43 (sequence is synthesized)
tttgcttttatgtcagtcatcagaaccaaaaaaatccagaagaaaaaattgccagtgtttcctttgaagatgaagctactggggaagaaaaccttattaatacactccacacatttgttc

SEQ ID NO: 365233 - DNA, 120 bp, Artificial Sequence
  ENSG00000141052_44 (sequence is synthesized)
attcctcagctgttggtgttttcttggggtcttgacaaagcttgctggtcagtgcacttttcaggtgtcacgttttgctgtttgtatgttttttcttccccttacttcctttggaaaaca

SEQ ID NO: 365234 - DNA, 120 bp, Artificial Sequence
  ENSG00000141052_45 (sequence is synthesized)
aactcacacagtgcccctactctgagacctgggactgagtgttaattattttttccttgggtatttctatctgagagactagacctagttaggaggcctctgtacttctccagattgtac

SEQ ID NO: 365235 - DNA, 120 bp, Artificial Sequence
  ENSG00000141052_46 (sequence is synthesized)
ctttttatggggatctttgaggctatgacccaggactgatagatatgccttacggaagacaaaagataaaatggttcctatatcctaatgcaaaccaacacagttaaaagagcagatctc

SEQ ID NO: 365236 - DNA, 120 bp, Artificial Sequence
  ENSG00000141052_47 (sequence is synthesized)
tggataactgctctcaacctgcttctacagtctccacaaaccgcattcaccctctctcttcatagctcagacatgaaatttgagggagaaaactggagataattgggagaaaattgatga

SEQ ID NO: 365237 - DNA, 120 bp, Artificial Sequence
  ENSG00000141052_48 (sequence is synthesized)
agttggctgcttccagtagatcagataatccatgaatttgtctcccattgagaattttattttaaattcttttaaactcttcgttgtgtcttttgtgatgacaaatcaggcatgactaaa

SEQ ID NO: 365238 - DNA, 120 bp, Artificial Sequence
  ENSG00000141052_49 (sequence is synthesized)
agatgtacagagacttacgaagatggtcacattcaagttccctaatgctcttagaacctgaagatgaccatgtgtagttttcttaagacctctgaacccccatggtgatgaagacttgaa

SEQ ID NO: 365239 - DNA, 120 bp, Artificial Sequence
  ENSG00000141052_50 (sequence is synthesized)
gacatttgcagctatctgctgcagtctggtagattcatacttatctaaagaagtcaaaaaatttattcgtgcaagtgcttgcaggaagccagtgcttattagtagtgaccctgcttctat

SEQ ID NO: 365240 - DNA, 120 bp, Artificial Sequence
  ENSG00000141052_51 (sequence is synthesized)
caacgttattgagacaacacatattctattctaagggagaaagagggaggaagagagggagggagggaggaagaagagggagggagcgaggaaggaagataggagatgggtaggggggta

SEQ ID NO: 365241 - DNA, 120 bp, Artificial Sequence
  ENSG00000141052_52 (sequence is synthesized)
aagagaaaaggagggagaagggaaggaaggaaagaagagaggaaagaaaggagggaaggaaaaaagggccaaactttctgatctatgaacttctcagttcagctgtcacattatgagaag

SEQ ID NO: 365242 - DNA, 120 bp, Artificial Sequence
  ENSG00000141052_53 (sequence is synthesized)
taaatcagaatttttttaaggagaagtcattcttagcactacaataattgtaccagtaattgaggaaaccaagacaatcttcacctgaataatagagggtctgagaactgtcagcctttt

SEQ ID NO: 365243 - DNA, 120 bp, Artificial Sequence
  ENSG00000141052_54 (sequence is synthesized)
gccattcaaaaacatttatgtccaacctgaaaaaaaagcatcaataaaacctatcccaagcattcaaaatagtcctttccaaatgttatttattttaaagtcaatcagctcttttagaaa

SEQ ID NO: 365244 - DNA, 120 bp, Artificial Sequence
  ENSG00000141052_55 (sequence is synthesized)
cagattctggtctggctgaaaactcccacaacaaatttactcatccagtggctaatatttaatgcccaccatgggcagagcacacaaatcttcagataaacaatactgaattgattcagc

SEQ ID NO: 365245 - DNA, 120 bp, Artificial Sequence
  ENSG00000141052_56 (sequence is synthesized)
acagattgttcagatttgaatgaccagggagttgtatttgcacatgcaagaacactaagaatctcccagtcctcaaactagaaacctttcagctacgatgaaaaaaaaaaaggggtcttc

SEQ ID NO: 365246 - DNA, 120 bp, Artificial Sequence
  ENSG00000141052_57 (sequence is synthesized)
atttttccaagagggggtggaggtggggatcactttttagctaaaagctatctctcacttcaaaattcttgtctttttctttgtggacaaacaccagtagtctatcacttggagatcttt

SEQ ID NO: 365247 - DNA, 120 bp, Artificial Sequence
  ENSG00000141052_58 (sequence is synthesized)
taatatctcccatcatttaaaacatccacgagagtttgaagatttgtgttgattgccagatacagaagccccttgaaaataaggaaagggtggaggaagcatttttgtgtcctatcccta

SEQ ID NO: 365248 - DNA, 120 bp, Artificial Sequence
  ENSG00000141052_59 (sequence is synthesized)
cttatcgtagcagctctatagacaaaagggacacttactggtgagcctctggcccttaaaagaaaatcatctaagaatatgaaggcaatttgatttccccccacagccctcagctgcctt

SEQ ID NO: 365249 - DNA, 120 bp, Artificial Sequence
  ENSG00000141052_60 (sequence is synthesized)
cctcacagaaggaagttcccaaaattgctggtacacagtttgcaatcaaatatcagatatgagaaaacctgtagtgaagagtctgggttcttggttttctcataaatccaatataaattt

SEQ ID NO: 365250 - DNA, 120 bp, Artificial Sequence
  ENSG00000141052_61 (sequence is synthesized)
gtaggttggttcagggtcaaaattgccagtgctttattagacagatgatactgatagacacacagagcccaggtcctggaacaagacaatcctgtagtgccaagatctggtcagttgcgt

SEQ ID NO: 365251 - DNA, 120 bp, Artificial Sequence
  ENSG00000141052_62 (sequence is synthesized)
taaggagctgggtttgattctagagtccaggtttatagagaaaccctggctagattgagcctacccatggggagacgatttcaagacaggatgagatctgggaagaattttgttgtcatc

SEQ ID NO: 365252 - DNA, 120 bp, Artificial Sequence
  ENSG00000141052_63 (sequence is synthesized)
tgccagggaaattatcacaggactcattgaatgcaataacatgtgagtaagttcccttttgattctgggaatcagcgattttccctgtggattaagacaaaccaacgccagaaggtctcc

SEQ ID NO: 365253 - DNA, 120 bp, Artificial Sequence
  ENSG00000141052_64 (sequence is synthesized)
tgtgcttattttaaccatctgctcccatcgtgaaccctggagcatgcatttcctagaagtggtttcatagctcctgtgtgttcatggaaaaggggagtataatgatggggatgctggaag

SEQ ID NO: 365254 - DNA, 120 bp, Artificial Sequence
  ENSG00000141052_65 (sequence is synthesized)
cttttttaatgttttccaaaggaaaggaacccacactgctccccagagttcctttccaatggccctgcagtaagaacggaggacaatgtattgctgggtgcttaaaatcctccctcagtg

SEQ ID NO: 365255 - DNA, 120 bp, Artificial Sequence
  ENSG00000141052_66 (sequence is synthesized)
aagcacaaagagacactttgtaaagaaaaaaagagcaagcataggttctctgtgggaccttgtggagtggtgttttcacgttggtctctttggctcaattgagcataatcagaaagaaat

SEQ ID NO: 365256 - DNA, 120 bp, Artificial Sequence
  ENSG00000141052_67 (sequence is synthesized)
gtgggttattgggaagagacaaaaagcagtggctaaaataccaaagttggcatgtgttcttttttaaaaaaaaaaaaaaatgcatatatttttaaataaaatgtttattttaaaaagaaa

SEQ ID NO: 365257 - DNA, 120 bp, Artificial Sequence
  ENSG00000141052_68 (sequence is synthesized)
tacttactgcaaaaccttgcactgaaacgtccagctgaattccatgagcaaagaaaacatttggatagtgacaaggctaaaaattccctgaagcgcaaagccagaaacaggtgcaacagt

SEQ ID NO: 365258 - DNA, 120 bp, Artificial Sequence
  ENSG00000141052_69 (sequence is synthesized)
aaaatcgattgctctctgccacaaaccggagacccttcttgggcgatccgctttctcagcatgtggaaggtttttctctctctcttctttttctactaaaccttccgctcctaaacccat

SEQ ID NO: 365259 - DNA, 120 bp, Artificial Sequence
  ENSG00000141052_70 (sequence is synthesized)
ccatcctatgaagatgccgtaaagcaggtaaccatgtgatttgttctttatggaagaatagactgactcaatgaacagacattgtttgatatgattaaacttcacgcagtttgtaaattc

SEQ ID NO: 365260 - DNA, 120 bp, Artificial Sequence
  ENSG00000141068_0 (sequence is synthesized)
tgccgcggctgggagggtggaagcggcagactcagcggccggctctaccggcgtcccggctcgggcagcgccgaggggcgctcctggtccagctctcctggctcgggggttccttgccga

SEQ ID NO: 365261 - DNA, 120 bp, Artificial Sequence
  ENSG00000141068_1 (sequence is synthesized)
cttgccgaggcgcccgcgccccgggctcccagcctcggccgccgcggccccgatgccgaggcatggatagagcagcgctgcgcgcggcggcgatgggagagaagaaggagggcggtggcg

SEQ ID NO: 365262 - DNA, 80 bp, Artificial Sequence
  ENSG00000141068_2 (sequence is synthesized)
catctccatcggcagcctgcgcgggctgcgcaccaagtgcgctgtgtccaacgacctcacccagcaggagatacggaccc

SEQ ID NO: 365263 - DNA, 120 bp, Artificial Sequence
  ENSG00000141068_3 (sequence is synthesized)
gctgtgtccaacgacctcacccagcaggagatacggaccctggaggcgaagctggtccgttacatttgtaagcagaggcagtgcaagctgagcgtggctcccggtgagaggaccccagag

SEQ ID NO: 365264 - DNA, 120 bp, Artificial Sequence
  ENSG00000141068_4 (sequence is synthesized)
ctcaacagctacccccgcttcagcgactggctgtacactttcaacgtgaggccggaggtggtgcaggagatcccccgagacctcacgctggatgccctgctggagatgaatgaggccaag

SEQ ID NO: 365265 - DNA, 120 bp, Artificial Sequence
  ENSG00000141068_5 (sequence is synthesized)
gtgaaggagacgctgcggcgctgtggggccagcggggatgagtgtggccgtctgcagtatgccctcacctgcctgcggaaggtgacaggcctgggaggggagcacaaggaggactccagt

SEQ ID NO: 365266 - DNA, 120 bp, Artificial Sequence
  ENSG00000141068_6 (sequence is synthesized)
tggagttcattggatgcgcggcgggaaagtggctcagggccttccacggacaccctctcagcagccagcctgccctggcccccagggagctcccagctgggcagagcaggcaacagcgcc

SEQ ID NO: 365267 - DNA, 120 bp, Artificial Sequence
  ENSG00000141068_7 (sequence is synthesized)
cagggcccacgctccatctccgtgtcagctctgcccgcctcagactcccccacccccagcttcagtgagggcctctcagacacctgtattcccctgcacgccagcggccggctgaccccc

SEQ ID NO: 365268 - DNA, 120 bp, Artificial Sequence
  ENSG00000141068_8 (sequence is synthesized)
cgtgccctgcacagcttcatcaccccgcccaccacaccccagctgcgacggcacaccaagctgaagccaccacggacgccccccccacccagccgcaaggtcttccagctgctgcccagc

SEQ ID NO: 365269 - DNA, 120 bp, Artificial Sequence
  ENSG00000141068_9 (sequence is synthesized)
ttccccacactcacccggagcaagtcccatgagtctcagctggggaaccgcattgatgacgtctcctcgatgaggtttgatctctcgcatggatccccacagatggtacggagggatatc

SEQ ID NO: 365270 - DNA, 120 bp, Artificial Sequence
  ENSG00000141068_10 (sequence is synthesized)
gggctgtcggtgacgcacaggttctccaccaagtcctggctgtcgcaggtctgccacgtgtgccagaagagcatgatatttggagtgaagtgcaagcattgcaggttgaagtgtcacaac

SEQ ID NO: 365271 - DNA, 120 bp, Artificial Sequence
  ENSG00000141068_11 (sequence is synthesized)
aaatgtaccaaagaagcccctgcctgtagaatatccttcctgccactaactcggcttcggaggacagaatctgtcccctcggacatcaacaacccggtggacagagcagccgaaccccat

SEQ ID NO: 365272 - DNA, 120 bp, Artificial Sequence
  ENSG00000141068_12 (sequence is synthesized)
tttggaaccctccccaaagcactgacaaagaaggagcaccctccggccatgaatcacctggactccagcagcaacccttcctccaccacctcctccacaccctcctcaccggcgcccttc

SEQ ID NO: 365273 - DNA, 120 bp, Artificial Sequence
  ENSG00000141068_13 (sequence is synthesized)
ccgacatcatccaacccatccagcgccaccacgccccccaacccctcacctggccagcgggacagcaggttcaacttcccagctgcctacttcattcatcatagacagcagtttatcttt

SEQ ID NO: 365274 - DNA, 120 bp, Artificial Sequence
  ENSG00000141068_14 (sequence is synthesized)
ccagacatttcagcctttgcacacgcagccccgctccctgaagctgccgacggtacccggctcgatgaccagccgaaagcagatgtgttggaagctcacgaagcggaggctgaggagcca

SEQ ID NO: 365275 - DNA, 120 bp, Artificial Sequence
  ENSG00000141068_15 (sequence is synthesized)
gaggctggcaagtcagaggcagaagacgatgaggacgaggtggacgacttgccgagctctcgccggccctggcggggccccatctctcgcaaggccagccagaccagcgtgtacctgcag

SEQ ID NO: 365276 - DNA, 120 bp, Artificial Sequence
  ENSG00000141068_16 (sequence is synthesized)
gagtgggacatccccttcgagcaggtagagctgggcgagcccatcgggcagggccgctggggccgggtgcaccgcggccgctggcatggcgaggtggccattcgcctgctggagatggac

SEQ ID NO: 365277 - DNA, 120 bp, Artificial Sequence
  ENSG00000141068_17 (sequence is synthesized)
ggccacaaccaggaccacctgaagctcttcaagaaagaggtgatgaactaccggcagacgcggcatgagaacgtggtgctcttcatgggggcctgcatgaacccgccccacctggccatt

SEQ ID NO: 365278 - DNA, 120 bp, Artificial Sequence
  ENSG00000141068_18 (sequence is synthesized)
atcaccagcttctgcaaggggcggacgttgcactcgtttgtgagggaccccaagacgtctctggacatcaacaagacgaggcaaatcgctcaggagatcatcaagggcatgggatatctt

SEQ ID NO: 365279 - DNA, 120 bp, Artificial Sequence
  ENSG00000141068_19 (sequence is synthesized)
catgccaagggcatcgtacacaaagatctcaaatctaagaacgtcttctatgacaacggcaaggtggtcatcacagacttcgggctgtttgggatctcaggcgtggtccgagagggacgg

SEQ ID NO: 365280 - DNA, 120 bp, Artificial Sequence
  ENSG00000141068_20 (sequence is synthesized)
cgtgagaaccagctaaagctgtcccacgactggctgtgctatctggcccctgagattgtacgcgagatgacccccgggaaggacgaggatcagctgccattctccaaagctgctgatgtc

SEQ ID NO: 365281 - DNA, 120 bp, Artificial Sequence
  ENSG00000141068_21 (sequence is synthesized)
tatgcatttgggactgtttggtatgagctgcaagcaagagactggcccttgaagaaccaggctgcagaggcatccatctggcagattggaagcggggaaggaatgaagcgtgtcctgact

SEQ ID NO: 365282 - DNA, 120 bp, Artificial Sequence
  ENSG00000141068_22 (sequence is synthesized)
tctgtcagcttggggaaggaagtcagtgagatcctgtcggcctgctgggctttcgacctgcaggagagacccagcttcagcctgctgatggacatgctggagaaacttcccaagctgaac

SEQ ID NO: 365283 - DNA, 120 bp, Artificial Sequence
  ENSG00000141068_23 (sequence is synthesized)
cggcggctctcccaccctggacacttctggaagtcagctgatcgctggaggagccgctactatggaaaaggacgctacggccaccctgactttaagagctcctgtccgattctggaggaa

SEQ ID NO: 365284 - DNA, 120 bp, Artificial Sequence
  ENSG00000141068_24 (sequence is synthesized)
tacattaacagcagcaaagttgtaccccggtttgaaaggtttggcttgggcgtcctggagtccagtaatccaaagatgtagccagccatatggtttttcgctgctgatctctttcttttt

SEQ ID NO: 365285 - DNA, 120 bp, Artificial Sequence
  ENSG00000141068_25 (sequence is synthesized)
tgtgtttctgaaacatcccaacaaccaccacgacaaaaaaacactgcctgcccagcgctgcaaaccaggagcacacgtcctagattcagactgttggccataaaccccactcgggagatg

SEQ ID NO: 365286 - DNA, 120 bp, Artificial Sequence
  ENSG00000141068_26 (sequence is synthesized)
gagctgcacctgctatttcttaaaatgacaccaccaacaaccaaacctgtcatgacagacagcaaatgtttacacgtatatttctcctgagtgaacctgatgttttacaataggtaataa

SEQ ID NO: 365287 - DNA, 120 bp, Artificial Sequence
  ENSG00000141068_27 (sequence is synthesized)
taaaaacagtctgtgcagatgcactggcactgacggccaggatggcggaaatggccatcccctctgaggaccttgtaggcggtgagggacccatgctgggccagaaggaagacaaacatg

SEQ ID NO: 365288 - DNA, 120 bp, Artificial Sequence
  ENSG00000141068_28 (sequence is synthesized)
gtaattgcagctgttcttggggtagggcggggagcccagaaggtctgatctggcctctgctttttggcccaagactccatcagggaaatctatctagggctctccccttgtcctttcaaa

SEQ ID NO: 365289 - DNA, 120 bp, Artificial Sequence
  ENSG00000141068_29 (sequence is synthesized)
gggatactgccccttcctcgtcttgcagaggaaaccctggctaggaactgagctagtttatggagtctggaattcctggagagcttgggttcaccttctcacccctgtaatccaggctgc

SEQ ID NO: 365290 - DNA, 120 bp, Artificial Sequence
  ENSG00000141068_30 (sequence is synthesized)
tcctgctggaaaagtagaaacagaatccaaaaaaggtctggactcacccggtggttcccagccagggtttctgctgcaaggtgaggaaacatccatggcttgtacagatgtgagtctttg

SEQ ID NO: 365291 - DNA, 120 bp, Artificial Sequence
  ENSG00000141068_31 (sequence is synthesized)
atgaagcccccaggcaggcaccaaggtgatgggactcagggccttggcttttagatacatcccagtccctgactgacatctgaccatgagggctggatgggtgggaacaaggaggagtag

SEQ ID NO: 365292 - DNA, 120 bp, Artificial Sequence
  ENSG00000141068_32 (sequence is synthesized)
atggcaaaagtacctgagcccacttcccagccacagggtgaccctggcactgtaaaaaccctttgtcagtcatgccagaaggttctagaactgcccacctcttccatttcagtcctgctg

SEQ ID NO: 365293 - DNA, 120 bp, Artificial Sequence
  ENSG00000141068_33 (sequence is synthesized)
aaaccccttagcctatttccgactcctctgtccatgctctgagttcagctgggcagtgtgtgggctatcacccctttcatttagacctacctagctggcccccatctgcagagccttcct

SEQ ID NO: 365294 - DNA, 120 bp, Artificial Sequence
  ENSG00000141068_34 (sequence is synthesized)
tagcaccattaggccttctacttgtgtccatttgaagcaggaggggctggatttggaaaagtctttgaagtgagagcaccacgcttgtcttcgttagaaactcttaactgcagaaaaaag

SEQ ID NO: 365295 - DNA, 120 bp, Artificial Sequence
  ENSG00000141068_35 (sequence is synthesized)
ttccagatggcaagggagcccttaagtggagattaggttgcattagactccaaaaccagaaaggaaaaagggtgatgggagtggagacgtgattggattcaggcccagaacctgtgacca

SEQ ID NO: 365296 - DNA, 120 bp, Artificial Sequence
  ENSG00000141068_36 (sequence is synthesized)
tgctctgagctcagacttggggagggaggggtgtggctcccaccccttccagttaagacctgcctagcagagccccagtctccagccccttccctagcaccagagtctggtcaaaatgcc

SEQ ID NO: 365297 - DNA, 120 bp, Artificial Sequence
  ENSG00000141068_37 (sequence is synthesized)
acagaaaatgagctgctctgccagcaagctgtggagctgcctcctctccaggcctggcatcccttggtcagcccctcctgggagggcacagccgtattacagtgccagtgtgcctggcca

SEQ ID NO: 365298 - DNA, 120 bp, Artificial Sequence
  ENSG00000141068_38 (sequence is synthesized)
tcagcatcttcacccttcccagtctgtgtggggaggctgtaaaccccgtggattcagctccgtgtggagtttctgtgctatggtgggactgctcattttgccccatcatccctttggcct

SEQ ID NO: 365299 - DNA, 120 bp, Artificial Sequence
  ENSG00000141068_39 (sequence is synthesized)
cccacacacctgccccttcccagggatcacgtgtgtctccagcctttcacctttctattgcaatggtggcctttgtccaggcaagagcaggcctgatggatgtactggtgagccccacag

SEQ ID NO: 365300 - DNA, 120 bp, Artificial Sequence
  ENSG00000141068_40 (sequence is synthesized)
ttggatgtcagctcagccgtccaactgggaggaacagtaggctcagttcctccctgacccctgacaccaggccgcagtgggcatgcacaggcccacagaaagtcagtctgggttttgctt

SEQ ID NO: 365301 - DNA, 120 bp, Artificial Sequence
  ENSG00000141068_41 (sequence is synthesized)
ttctcgtgagcatcacagttaaagaagcgctcattgagcaactacagtgcacttggtcttctgcaagtgctgggcacctagagataggaacagtcatggtccctgctcttaaggaactga

SEQ ID NO: 365302 - DNA, 120 bp, Artificial Sequence
  ENSG00000141068_42 (sequence is synthesized)
tgacctggtggggccctgttgtcttcaaggaacccagaagccactgggccccaaaggtggaactgaaggactgggggcagctggctctcagcctgccacctctgcactgcctgcctttaa

SEQ ID NO: 365303 - DNA, 120 bp, Artificial Sequence
  ENSG00000141068_43 (sequence is synthesized)
agaaccccaccccaccccatgatggccccctctgttccccttgtatttcagtgactgtgaattgaggttaggaaggcacacctgcccttctgtgtgctctctccacacgaaggatgacag

SEQ ID NO: 365304 - DNA, 120 bp, Artificial Sequence
  ENSG00000141068_44 (sequence is synthesized)
atactgtgaattcagccctcacggccaactgtgaaggggatggagaaggctgggagggctcggggagagctcttaggggctgcggaagtccccacgggggtctgagagtggagcccaagc

SEQ ID NO: 365305 - DNA, 120 bp, Artificial Sequence
  ENSG00000141068_45 (sequence is synthesized)
tttggccctccaggcatccccagtttccagcctcacctctgaagccctgctgcctttaaccaccagagccgcagccccctgggtttctgtctaactcgaagtcttgaatcctagctagtt

SEQ ID NO: 365306 - DNA, 120 bp, Artificial Sequence
  ENSG00000141068_46 (sequence is synthesized)
tggggttgtgagcagtgtgtagcaaagttgatctctccatgtcaccaaatcaaaacaccctctgtcatcctacggcatttcctcttgaggtcacagagaggaatggcaagccctggaaac

SEQ ID NO: 365307 - DNA, 120 bp, Artificial Sequence
  ENSG00000141068_47 (sequence is synthesized)
ctgtgttattctgtgttgatttggtgtggggggagggtggagacgtaaatgtgaagccagttggagtttgtgctatgcagcagtgttagccaggatctcatcagcgtgcaaacctagcat

SEQ ID NO: 365308 - DNA, 120 bp, Artificial Sequence
  ENSG00000141068_48 (sequence is synthesized)
cttctgtggccacaagccacacacttgctttttttgaatgtgatgtaaaatttgtacagtaaagtttttatattttctatcaactacatttgtcttccagacatgctattaatttaaatt

SEQ ID NO: 365309 - DNA, 120 bp, Artificial Sequence
  ENSG00000141068_49 (sequence is synthesized)
aaaatggttagtattaacaaacatgctgtatcgggtttttttgccactggcaagaacatgccctctgtgctaagccaggcctgggtgtctggagtttgtgaataaagttataccaaggtg

SEQ ID NO: 365310 - DNA, 120 bp, Artificial Sequence
  ENSG00000141068_50 (sequence is synthesized)
tggacacttctggaagtcagctgagttgtaggcctggctgccttgcatgcaccaggggctttcttcctcctaatcaacaactcagcaccgtgacttctgctaaaatgcaaaatgagatgc

SEQ ID NO: 365311 - DNA, 120 bp, Artificial Sequence
  ENSG00000141068_51 (sequence is synthesized)
gggcactaacccaggggatgccacctctgctgctccagtcgtctctctcgaggctacttcttttgctttgttttaaaaactggccctctgccctctccacgtggcctgcatatgcccaag

SEQ ID NO: 365312 - DNA, 120 bp, Artificial Sequence
  ENSG00000141068_52 (sequence is synthesized)
ctggacccctgccagggaaggggtcctcagacttgaggttgccagctcagatgtggggctgctgatactaggtgactggactgatgttctgttctagatgaaactccttgaggggaccat

SEQ ID NO: 365313 - DNA, 120 bp, Artificial Sequence
  ENSG00000141068_53 (sequence is synthesized)
ttgaaaaggcttgatgtgctgcccaaagcccccttcagagctgacttctccacccccagctgccgtgagccttggctgctgacagctcatagctgagtccctcccgtgaagtcaccttct

SEQ ID NO: 365314 - DNA, 120 bp, Artificial Sequence
  ENSG00000141068_54 (sequence is synthesized)
agtggcaagcgctgcctgagcagttctagctgggagaggtgggtgctgcagagtctgggattccagggtgaaagccacaggttcccctgaataagctcttactgctggtggttcctgaac

SEQ ID NO: 365315 - DNA, 120 bp, Artificial Sequence
  ENSG00000141068_55 (sequence is synthesized)
tgatggagcggggcaagcgtggcccagggtttctggggcagcctggaaaggccagggttggatgttcacagcctcctgagaagctctcccagggtcctcagggctctggatcctggtggg

SEQ ID NO: 365316 - DNA, 120 bp, Artificial Sequence
  ENSG00000141068_56 (sequence is synthesized)
tctggccaggccgaatctgaggggtttcagccatggttagaaatcccaggcctgtctgctgggctgggctggcctggcatggtttcctctctgttgagggctctgtgtaccctctgccag

SEQ ID NO: 365317 - DNA, 120 bp, Artificial Sequence
  ENSG00000141068_57 (sequence is synthesized)
cttcccacattccagcccccagccctctccccgtcttctcctgtccccattgctggctgggttctgtgctcagaaggcacatgctgatgtgggcctgagccaagggtgattagggaaact

SEQ ID NO: 365318 - DNA, 120 bp, Artificial Sequence
  ENSG00000141068_58 (sequence is synthesized)
ctatggctctttagctgggagtgtgtacgtggctgtcccaggcaaagtgtgtaatcctggccttgccacgaggtccttgggaattattcacaggctttctaaatcttgcgtcggaaacag

SEQ ID NO: 365319 - DNA, 120 bp, Artificial Sequence
  ENSG00000141068_59 (sequence is synthesized)
cttcaaatgcctgacttaatggtcccactaccacatagataaggcattaaaataagcctcatgaatggaatcaggcctggtttttaattatctgaggcccctgtcttatctccgtctgcc

SEQ ID NO: 365320 - DNA, 120 bp, Artificial Sequence
  ENSG00000141068_60 (sequence is synthesized)
tgaggcttaaggaaggcaccaaggtttatattctgcctggttttttcttcccagagaggatcgggcttaatttcctctctgccctcattgtatcaagtcctctgaacacggcacagtgta

SEQ ID NO: 365321 - DNA, 120 bp, Artificial Sequence
  ENSG00000141068_61 (sequence is synthesized)
gaaagttgcactcaattcagaaaatcttgacctgccaggtctcccggcagatgctgaaaataaacacaacagaagtgtggctggtgttcttgttctcacatattacaggagactgagctc

SEQ ID NO: 365322 - DNA, 120 bp, Artificial Sequence
  ENSG00000141068_62 (sequence is synthesized)
gaaagggcttgggtaagggcacacagcagttggtggctgagccagaatttgaaccttgggccctgatggcgattggtttgtccccatgcttgccacccaagctgagatctttggggtaat

SEQ ID NO: 365323 - DNA, 120 bp, Artificial Sequence
  ENSG00000141068_63 (sequence is synthesized)
ttgtcagcccttctttgcttcctccttatgcctggattttaaagaattgtggaagagtcagcttttaagtggtagtgacctatttgtgtcatgcaggctgctgtctacctgtcctagatg

SEQ ID NO: 365324 - DNA, 120 bp, Artificial Sequence
  ENSG00000141068_64 (sequence is synthesized)
ccaagagagggagatcactaatttatgcacctactgtgtgccaggcgtgtgacacacatattgtggccacatcgttgtaagaggtagtgttgagctcgctttgtagctgaggcctctctg

SEQ ID NO: 365325 - DNA, 120 bp, Artificial Sequence
  ENSG00000141068_65 (sequence is synthesized)
accactggaggcgttggatgagtcatctggggccccacacctggcatggagcagagctgggctttgaactcaggtttcttgttcagagggtgctttttccagcaggccttagaggaggcc

SEQ ID NO: 365326 - DNA, 120 bp, Artificial Sequence
  ENSG00000141068_66 (sequence is synthesized)
cctgaagaagaagcattttctgggtttcttctctctcatttagtctcagcttgtggtgcctctgcatccccagcagagtcctagccccatcacagtccaggacaccggcctttcgtctgc

SEQ ID NO: 365327 - DNA, 120 bp, Artificial Sequence
  ENSG00000141068_67 (sequence is synthesized)
ccagtgctggctgcacttcacgggcacctgctgggatccgctgggtaccagtgatcccattagattgtgcatcacagcatcttcattgcatccccatggggcttggtgagagcagtctag

SEQ ID NO: 365328 - DNA, 120 bp, Artificial Sequence
  ENSG00000141068_68 (sequence is synthesized)
tcagagtacaggtgggctatggaatgaaaccacctgggccctgcctgggcccagcactctgctcggccacttagaacctgtgggaccttggtgagttacttcacctcactctgcctcagt

SEQ ID NO: 365329 - DNA, 120 bp, Artificial Sequence
  ENSG00000141068_69 (sequence is synthesized)
ttcctcatctgtaaaatggcagtgataacgacacctctctcagggttgttgtgaaaaggaaatgagttaacgtaaagtccttagatcagagcctggcatgtattagatgttcttttcagt

SEQ ID NO: 365330 - DNA, 120 bp, Artificial Sequence
  ENSG00000141068_70 (sequence is synthesized)
gtgaggcctatgaggtgatagaaagtgttgaagtcatttcctttgcaatctctggtctaaagaaaggtgagtgaacagctgggcatggtggcccaggcctgtaatcccagcatttgggag

SEQ ID NO: 365331 - DNA, 82 bp, Artificial Sequence
  ENSG00000141068_71 (sequence is synthesized)
gggcatggtggcccaggcctgtaatcccagcatttgggaggctgaggcaggctgattgcttgagttcaggagttcaagcccc

SEQ ID NO: 365332 - DNA, 80 bp, Artificial Sequence
  ENSG00000141068_72 (sequence is synthesized)
ccagctactcaggaagctgaggtgggagcatggcttgaacctgggagataggtggtaacagagccagatgctgtctcacc

SEQ ID NO: 365333 - DNA, 120 bp, Artificial Sequence
  ENSG00000141068_73 (sequence is synthesized)
cttcttccctgggacactgcactgggggccagggctgccggggaccctgggctcaggcccccttgtcatgaatcgcctgtggagctgggtgacagccaaggtgtccaggggcacagggcc

SEQ ID NO: 365334 - DNA, 120 bp, Artificial Sequence
  ENSG00000141068_74 (sequence is synthesized)
tctaactaccttcctggacatgactgattgctcccgtgttcttctgagggctggtcttgtttttgtttgggtggctctgtctcactgctaacaccttagtgagatgccttccaccctcct

SEQ ID NO: 365335 - DNA, 120 bp, Artificial Sequence
  ENSG00000141068_75 (sequence is synthesized)
gagcacaccagcctcccactgggtgtgtgcctagtgcggggcgggcggaggttgggagggtgttggcttggcttttaacctgtggggattttgtccaacaaggagtggaatgatttcaga

SEQ ID NO: 365336 - DNA, 120 bp, Artificial Sequence
  ENSG00000141068_76 (sequence is synthesized)
gctgccctgaggctggcaccctggtcacaggaaccctctgcgctggctcctgtctcagtcccctctgtagagttagatcagaagacacagaaagttctgtggccatgaaagataccagct

SEQ ID NO: 365337 - DNA, 120 bp, Artificial Sequence
  ENSG00000141068_77 (sequence is synthesized)
tggaagggttgtgtcttcagtggcaccctcagaaaaattgtcttaaagcaaagaggtacctggctccagacaatttttctgatgaaaacaaagtctctgccccgtccccaccctgccacc

SEQ ID NO: 365338 - DNA, 120 bp, Artificial Sequence
  ENSG00000141068_78 (sequence is synthesized)
ctggcaaagttacttcctttacagctgcccagtgtaccatagaccagaccccaggtcagcatttgtcaagagcatggctgctgagtcccctgtggcagtcaatgcactgtttaccaaatg

SEQ ID NO: 365339 - DNA, 120 bp, Artificial Sequence
  ENSG00000141068_79 (sequence is synthesized)
acccagatctctggaatggggccctaggaatttgcatttcaacctgcttcccaggtggccctgatgcaccccagtattagagtttattgctaaaaggaacatgccctgtcactcctggta

SEQ ID NO: 365340 - DNA, 120 bp, Artificial Sequence
  ENSG00000141068_80 (sequence is synthesized)
tcctgggagtcatgtttctcttctctctcagttctacttggagcaagagctttcctgggctgcaaatgagaaaacaattcctaggaacccacagcagtactgagcatgctgggagcttgg

SEQ ID NO: 365341 - DNA, 120 bp, Artificial Sequence
  ENSG00000141068_81 (sequence is synthesized)
gacttggagatgaatgagccaccgttgctgctccaagtaggactacttggagtgtagctgaggccttggacgcagtatgaccaggggcagctctgccagggctgttggccaatcagtcat

SEQ ID NO: 365342 - DNA, 120 bp, Artificial Sequence
  ENSG00000141068_82 (sequence is synthesized)
tttttattttcggggggtggcggatgtgctgttctgtcatctcccactttcccatcacctgattcctccacctgtccacacgtgcctgactccatcacatgccggggccggactgcgctc

SEQ ID NO: 365343 - DNA, 120 bp, Artificial Sequence
  ENSG00000141068_83 (sequence is synthesized)
attcttgccctgcttttctagaaacaaccggtcatgactcctttgtagaattcctcaaaagcaccggtgcctttcccaagtgcagggtcagtgttctgggtctgggtgtgttttctaagc

SEQ ID NO: 365344 - DNA, 120 bp, Artificial Sequence
  ENSG00000141068_84 (sequence is synthesized)
ggcttcagcccagctggtggctgctctctgagaatcagagaccttgagcacatctcagcccacaggcagccccatgaagagccctgtctccaccttgcccttccccaccgagactctcca

SEQ ID NO: 365345 - DNA, 120 bp, Artificial Sequence
  ENSG00000141068_85 (sequence is synthesized)
cccatcgggggtggacctctttgacccacctcttagcccgttcagcctctccatagtccagaagcagaggtgctggtgaccacctcaggaaatagccctaagacaggtggccttaaagtg

SEQ ID NO: 365346 - DNA, 120 bp, Artificial Sequence
  ENSG00000141068_86 (sequence is synthesized)
actggctggcttcagcccagctggtggctgctctctgagaatcagagaccttgagcacatctcagcccacaggcagccccatgaagagccctgtctccaccttgcccttccccaccgaga

SEQ ID NO: 365347 - DNA, 120 bp, Artificial Sequence
  ENSG00000141068_87 (sequence is synthesized)
gtacactttcaacgtgaggccggaggtggtgcagcccacacaagatgtgatcagctatccattgttactgagagatgggagttttaaatttttcaacaccaagcaagtacagaagtgtta

SEQ ID NO: 365348 - DNA, 120 bp, Artificial Sequence
  ENSG00000141068_88 (sequence is synthesized)
attacaggtgtgagccactgcgcccagtcatgcccatgtgttttggtggtcttggctgctgatgggtggggtgagccccaggaggaagttgggacaagtcaacctcatggcagatgtgcc

SEQ ID NO: 365349 - DNA, 120 bp, Artificial Sequence
  ENSG00000141068_89 (sequence is synthesized)
ttgggacaagtcaacctcatggcagatgtgccagggagagctgcgggtgagatagattgttcctatccccctctccttgatgtgggaggactcagtacctccagcacacccttctcatgg

SEQ ID NO: 365350 - DNA, 120 bp, Artificial Sequence
  ENSG00000141068_90 (sequence is synthesized)
cacttgggattgaggggggcagtggccaccctcgggggaccttctgactcagaggacatgagatggccacactcgagcactgtgttcctgacctttctgggtcacaggtcaccttgatga

SEQ ID NO: 365351 - DNA, 120 bp, Artificial Sequence
  ENSG00000141068_91 (sequence is synthesized)
ttggatgaaagtcttagatcttctttccagagaaaagtctacaacattctactgaaccagtccagagggttcccggacccccgaagcccacccatgggctggctctgggaggcaatggcg

SEQ ID NO: 365352 - DNA, 120 bp, Artificial Sequence
  ENSG00000141068_92 (sequence is synthesized)
ctgagtatgggggcatctctcgcatggatccccacagatggtacggagggatatcgggctgtcggtgacgcacaggttctccaccaagtcctggctgtcgcaggtctgccacgtgtgcca

SEQ ID NO: 365353 - DNA, 120 bp, Artificial Sequence
  ENSG00000141068_93 (sequence is synthesized)
aggtcttccagctgctgcccagcttccccacactcacccggagcaagtcccatgagtctcagctggggaaccgcattgatgacgtctcctcgatgaggtttgcctgccttcttcctcatc

SEQ ID NO: 365354 - DNA, 120 bp, Artificial Sequence
  ENSG00000141068_94 (sequence is synthesized)
tggaaacatcacaggggcagctgactgagccatcctcagaggccaggagcaagctagaggaccaagcgaggcgaggggaaccacaccatgccactgggctagcctggcctgctcctgtgt

SEQ ID NO: 365355 - DNA, 120 bp, Artificial Sequence
  ENSG00000141076_0 (sequence is synthesized)
ggagagaggcgagcaccgggaaggggagcgtggggccgctggaatgggtgaatttaaggtccatcgagtacgtttctttaattatgttccatcaggaatccgctgtgtggcttacaataa

SEQ ID NO: 365356 - DNA, 120 bp, Artificial Sequence
  ENSG00000141076_1 (sequence is synthesized)
ccagtcaaacagattggctgtttcacgaacagatggcactgtggaaatttataacttgtcagcaaactactttcaggagaaatttttcccaggtcatgagtctcgggctacagaagcttt

SEQ ID NO: 365357 - DNA, 120 bp, Artificial Sequence
  ENSG00000141076_2 (sequence is synthesized)
gtgctgggcagaaggacagcgactctttagtgctgggctcaatggcgagattatggagtatgatttacaggcgttaaacatcaagtatgctatggatgcctttggaggacctatttggag

SEQ ID NO: 365358 - DNA, 120 bp, Artificial Sequence
  ENSG00000141076_3 (sequence is synthesized)
catggctgccagccccagtggctctcaacttttggttggttgtgaagatggatctgtgaaactatttcaaattaccccagacaaaatccagtttgaaagaaattttgatcggcagaaaag

SEQ ID NO: 365359 - DNA, 120 bp, Artificial Sequence
  ENSG00000141076_4 (sequence is synthesized)
tcgcatcctgagtctcagctggcatccctctggtacccacattgcagctggttccatagactacattagtgtgtttgatgtcaaatcaggcagcgctgttcataagatgattgtggacag

SEQ ID NO: 365360 - DNA, 120 bp, Artificial Sequence
  ENSG00000141076_5 (sequence is synthesized)
gcagtatatgggcgtgtctaagcggaagtgcatcgtgtggggtgtcgccttcttgtccgatggcactatcataagtgtggactctgctgggaaggtgcagttctgggactcagccactgg

SEQ ID NO: 365361 - DNA, 120 bp, Artificial Sequence
  ENSG00000141076_6 (sequence is synthesized)
gacgcttgtgaagagccatctcatcgctaatgctgacgtgcagtccattgctgtagctgaccaagaagacagtttcgtggtgggcacagccgagggaacagtcttccattttcagctggt

SEQ ID NO: 365362 - DNA, 120 bp, Artificial Sequence
  ENSG00000141076_7 (sequence is synthesized)
ccctgtgacatctaacagcagtgagaagcagtgggtgcggacaaaaccgttccagcatcacactcatgacgtgcgcactgtggcccacagcccaacagcgctgatatctggaggcactga

SEQ ID NO: 365363 - DNA, 120 bp, Artificial Sequence
  ENSG00000141076_8 (sequence is synthesized)
cacccacttagtctttcgtcctctcatggagaaggtggaagtaaagaattacgatgccgctctccgaaaaatcacctttccccaccgatgtctcatctcctgttctaaaaagaggcagct

SEQ ID NO: 365364 - DNA, 120 bp, Artificial Sequence
  ENSG00000141076_9 (sequence is synthesized)
gaactttggcgactgggatccacagttgcaacaggcaagaatggggatactcttccactctctaaaaatgcagatcatttactgcacctaaagacaaagggtcctgagaacattatctgt

SEQ ID NO: 365365 - DNA, 120 bp, Artificial Sequence
  ENSG00000141076_10 (sequence is synthesized)
agctgtatctccccatgtggaagttggatagcctattctacagtttctcggttttttctctatcggctgaattatgaacatgacaacataagcctcaaaagggtttccaaaatgccagca

SEQ ID NO: 365366 - DNA, 120 bp, Artificial Sequence
  ENSG00000141076_11 (sequence is synthesized)
ttccttcgctctgcccttcagattttgttttctgaagattcaacaaagctctttgtagcatcaaatcaaggagctctgcatattgttcagctgtcaggaggaagcttcaagcacctgcat

SEQ ID NO: 365367 - DNA, 120 bp, Artificial Sequence
  ENSG00000141076_12 (sequence is synthesized)
gctttccagcctcagtcaggaacagtggaggccatgtgtcttttggcagtcagtccagatgggaattggctagctgcatcaggtaccagtgctggagtccatgtctacaacgtaaaacag

SEQ ID NO: 365368 - DNA, 120 bp, Artificial Sequence
  ENSG00000141076_13 (sequence is synthesized)
ctaaagcttcactgcacggtgcctgcttacaatttcccagtgactgctatggctattgcccccaataccaacaaccttgtcatcgctcattcggaccagcaggtatttgagtacagcatc

SEQ ID NO: 365369 - DNA, 120 bp, Artificial Sequence
  ENSG00000141076_14 (sequence is synthesized)
ccagacaaacagtatacagattggagccggactgtccagaagcagggctttcaccacctttggctccaaagggatactcctatcacacacatcagttttcatcccaagagaccgatgcac

SEQ ID NO: 365370 - DNA, 120 bp, Artificial Sequence
  ENSG00000141076_15 (sequence is synthesized)
atccttctccatgatgcctacatgttctgcatcattgacaagtcattgccccttccaaatgacaaaaccttactctacaatccatttcctcccacgaatgaatcagatgtcatccggagg

SEQ ID NO: 365371 - DNA, 120 bp, Artificial Sequence
  ENSG00000141076_16 (sequence is synthesized)
cgcacagctcatgcttttaaaatttctaagatatataagcctctactcttcatggatcttttggatgaaagaacactcgtggcagtagaacggcctctggatgacatcattgctcagctc

SEQ ID NO: 365372 - DNA, 120 bp, Artificial Sequence
  ENSG00000141076_17 (sequence is synthesized)
ccaccacccattaaaaagaagaaatttggaacctaaaacagggcactgtctgtgtccttccttgaactgtctaccctgttgcttttcacaaatcatggtaataaaacaagttattcttga

SEQ ID NO: 365373 - DNA, 120 bp, Artificial Sequence
  ENSG00000141076_18 (sequence is synthesized)
aattactggtatttgtagcaatgggtggaaaagatggcttcagtcgatctgagttactgcagttttctccatcttctgctactctgcagccccatcttagcctgtcctcctcttaatgga

SEQ ID NO: 365374 - DNA, 120 bp, Artificial Sequence
  ENSG00000141076_19 (sequence is synthesized)
caatccatttcctcccacgaatgaatcagatgtcatccggaggcgcacagctcatgcttttaaaatttctaagatatataagacggagtttcgctgtgtctcccaggctggagtgcaacg

SEQ ID NO: 365375 - DNA, 88 bp, Artificial Sequence
  ENSG00000141076_20 (sequence is synthesized)
ccaacccgtttcttatgcaaactgcctttctcattgcggctggcttagtgaaaatgaaattaaataaagtcttatcttttctaatcct

SEQ ID NO: 365376 - DNA, 120 bp, Artificial Sequence
  ENSG00000141076_21 (sequence is synthesized)
aaaggctttcctcatgtctggtgatcatctcatcactgcatcatgtggcttactgagcttgggtttcactgaagaatgatctggctggactgcttatttggggtagccctgaagccagaa

SEQ ID NO: 365377 - DNA, 120 bp, Artificial Sequence
  ENSG00000141076_22 (sequence is synthesized)
cccgaccgaacgcgcttgctctgtctgcgggttcctaaccttgaagctaggccagtgaggggcgaacaagacctggtctctactctcggccagtatatatgttggcgggcgtcgggggga

SEQ ID NO: 365378 - DNA, 120 bp, Artificial Sequence
  ENSG00000141076_23 (sequence is synthesized)
aagcaacaagtacaataaggtaagaggacagagactcagaataaaggtagctagtaaatcagaatacaggtagctagtacatttcttggaggagaggggcttttgttttacagattccct

SEQ ID NO: 365379 - DNA, 120 bp, Artificial Sequence
  ENSG00000141076_24 (sequence is synthesized)
cataaatcttacacagaaaagtgattaggccagtattcggaaggtgaccctcatccggaagtatcattgatttggctaacttgctttcaactttgaactctggggtatctgaataacctg

SEQ ID NO: 365380 - DNA, 120 bp, Artificial Sequence
  ENSG00000141076_25 (sequence is synthesized)
gtttcattaaaggaggtacaggctgaggttttgacctctgtgccccttcgctaaagctactaaaacgctgtctgcaggcttgaggaactggtcttaacatcttcgaaaaacccagctagg

SEQ ID NO: 365381 - DNA, 120 bp, Artificial Sequence
  ENSG00000141076_26 (sequence is synthesized)
aaaattcttcatggctgtgatttacatgggatacgagcattttcttcagttttagattctgtcctctttgccagctgctgttttgattcaccctgaatttgtatggcttttctgggcagg

SEQ ID NO: 365382 - DNA, 120 bp, Artificial Sequence
  ENSG00000141076_27 (sequence is synthesized)
tgctttgtttcctaggagcattgtggccatgcctgtcctgcactttgggcttagattacaaccatcacacggtgttttggtgtgtttgtgaaggtgggggtggaaggaacatgggggaaa

SEQ ID NO: 365383 - DNA, 120 bp, Artificial Sequence
  ENSG00000141076_28 (sequence is synthesized)
gcagcagatggctctaaaggaggtgtgcacggggatgtgtcactggaatcatctcgtgggccctgcgacctctgggtgtgggaagcagagctggctgacaagtgccttctgcaagatgag

SEQ ID NO: 365384 - DNA, 120 bp, Artificial Sequence
  ENSG00000141076_29 (sequence is synthesized)
tgatacaggaagggcccctcccactctcttgcctctttgtaattgagcccagatcattttttccaaagcattggctttaagttcatcgcttccttacagtaggcatagctatttcccagg

SEQ ID NO: 365385 - DNA, 120 bp, Artificial Sequence
  ENSG00000141076_30 (sequence is synthesized)
aagtcagagacaaaatatcatttctttggccagaggccacctcgaggtgtcagtgacatcagcacaggtggtttgtgttgaggtttcgcctggggagaactccagtcacttgtccagtct

SEQ ID NO: 365386 - DNA, 120 bp, Artificial Sequence
  ENSG00000141076_31 (sequence is synthesized)
gtgatctggttgggggagagtctagaaagcacagaccctgtgtgggctgagctcctgcacttgccagtttgttccattctgacaaagtgatactgatgagacaggccagaagccgcagaa

SEQ ID NO: 365387 - DNA, 120 bp, Artificial Sequence
  ENSG00000141076_32 (sequence is synthesized)
gggccctttgatcttgctgcatggagttaacaagctctctttgcctcatacacccaccctctacagtgtggctgcaagagtagcttcagctctttctccctctctctccttttcttcttt

SEQ ID NO: 365388 - DNA, 120 bp, Artificial Sequence
  ENSG00000141076_33 (sequence is synthesized)
ttttcccccctagtttttctgaatagaggtattatggctacagctgttttcccgaattaacgaatgtcagggaggtactgaatatatatgatggttagaagatgatgttgggctcaaaat

SEQ ID NO: 365389 - DNA, 120 bp, Artificial Sequence
  ENSG00000141076_34 (sequence is synthesized)
gcactacagatctttggtctgcagaagcccaataaaagtaaccatttaaacaatgtgtctttgtttttttagccccttccaaatgacaaaaccttactctacaatccatttcctcccacg

SEQ ID NO: 365390 - DNA, 120 bp, Artificial Sequence
  ENSG00000141076_35 (sequence is synthesized)
aatgaatcagatgtcatccggaggcgcacagctcatgcttttaaaatttctaagatatataaggtaaaacatcttgtgttgttattctggatagttggttcctttgtgataccaaaatgt

SEQ ID NO: 365391 - DNA, 120 bp, Artificial Sequence
  ENSG00000141076_36 (sequence is synthesized)
aataaactccacaatcggaagataagagcaccttcagtttccatgcagagaacctggcttgtgggagacaagtcacctttttgaggctggctgtcccttgtatatgttttattgttcttg

SEQ ID NO: 365392 - DNA, 120 bp, Artificial Sequence
  ENSG00000141076_37 (sequence is synthesized)
ccttagtaggttagaggcaggcacatcatacttaaccaaaatgaaatgcgtaagtagtgagaaatgttggcgctgagggtagagtctttgttgtcatgagagctggctttaaattttact

SEQ ID NO: 365393 - DNA, 81 bp, Artificial Sequence
  ENSG00000141076_38 (sequence is synthesized)
agagtctttgttgtcatgagagctggctttaaattttacttgttggagtgttccataggataaatgtcaagcaggctgggc

SEQ ID NO: 365394 - DNA, 120 bp, Artificial Sequence
  ENSG00000141076_39 (sequence is synthesized)
gcctgggcaccatggtgaaaccccatcactattaacaaaaaaaaaaaaaggagagttctgtaaattactgattactcaaatgactcaaatgtgattagcttcttgatgcatttgtagctt

SEQ ID NO: 365395 - DNA, 120 bp, Artificial Sequence
  ENSG00000141076_40 (sequence is synthesized)
tcttgatgcatttgtagcttgccagttgtcagttgccttaggctgggtatggtgattcacgcctgtaatctcagtactttaggaggttgaggctggagttcaagaccagtctgggcaaca

SEQ ID NO: 365396 - DNA, 120 bp, Artificial Sequence
  ENSG00000141076_41 (sequence is synthesized)
gcggtaaatagccttaacaagaaattaagtttctgtgccactggggatgggatattttcccatgaatccaggtaatattttatctctactgggtacagggagggtatgtgctagaagcca

SEQ ID NO: 365397 - DNA, 120 bp, Artificial Sequence
  ENSG00000141076_42 (sequence is synthesized)
aaataaataaataaaatggtgcttcaaggagtactatagatgagagagctaagattgtagaacactctagagatagttgtgggaagagagctcagttactcttcgtatatttatgtgtat

SEQ ID NO: 365398 - DNA, 120 bp, Artificial Sequence
  ENSG00000141084_0 (sequence is synthesized)
gacacaatagtagctccctccaagatggcggcagcgacggcagacccgggagctgggaacccgcagcctggggactcctccggcgggggcgctgggggcgggctgccgtcccctggggag

SEQ ID NO: 365399 - DNA, 120 bp, Artificial Sequence
  ENSG00000141084_1 (sequence is synthesized)
caggagctgagccggcgcttgcagcgcctgtatcccgcggtcaaccagcaagagactccgctgccgcgctcctggagccccaaggacaaatacaactacattggtctctcccagggcaac

SEQ ID NO: 365400 - DNA, 120 bp, Artificial Sequence
  ENSG00000141084_2 (sequence is synthesized)
ctccgcgtccactacaaaggtcatggcaaaaatcacaaagatgcggcctcagtgcgtgccacccaccccatacctgctgcctgtggcatttattactttgaagtgaagattgtcagcaaa

SEQ ID NO: 365401 - DNA, 120 bp, Artificial Sequence
  ENSG00000141084_3 (sequence is synthesized)
ggaagagatggttacatgggaataggactctcggctcaaggcgtcaacatgaacagacttcctggttgggacaaacattcctatggttaccatggtgatgatgggcattcgttctgctcc

SEQ ID NO: 365402 - DNA, 120 bp, Artificial Sequence
  ENSG00000141084_4 (sequence is synthesized)
tcggggactggccagccctatggtcccacattcaccacaggagacgtgatcggctgctgtgtcaacctcatcaatggcacctgcttctacaccaagaatggccacagccttggtatagcc

SEQ ID NO: 365403 - DNA, 120 bp, Artificial Sequence
  ENSG00000141084_5 (sequence is synthesized)
ttcacagacctcccggccaacctctaccccaccgtaggcctgcagacacctggggagattgtggacgccaactttgggcagcagcccttcctgtttgacattgaggactacatgcgggag

SEQ ID NO: 365404 - DNA, 120 bp, Artificial Sequence
  ENSG00000141084_6 (sequence is synthesized)
tggcgtgccaaggtccagggcacggtccactgcttccccatcagtgcccggcttggcgagtggcaggcagtgctgcagaacatggtttcatcttacctcgtgcatcatgggtattgtgcc

SEQ ID NO: 365405 - DNA, 120 bp, Artificial Sequence
  ENSG00000141084_7 (sequence is synthesized)
acagccacggcttttgctcgaatgactgaaaccccgattcaggaagaacaggcgtccataaagaacagacaaaagatccagaagctggtgctggagggccgtgtgggcgaggccatcgag

SEQ ID NO: 365406 - DNA, 120 bp, Artificial Sequence
  ENSG00000141084_8 (sequence is synthesized)
accacccagcgcttctacccagggctgctggagcacaaccccaacctcctcttcatgctcaagtgccggcagtttgtggagatggtgaatgggacggacagtgaggtccgaagtttgagc

SEQ ID NO: 365407 - DNA, 120 bp, Artificial Sequence
  ENSG00000141084_9 (sequence is synthesized)
tcccgaagccccaagtcccaggacagctaccctggctcccccagcctcagtccccgacatggccccagtagttcccacatgcacaacacaggagcagacagtcccagctgtagcaatggc

SEQ ID NO: 365408 - DNA, 120 bp, Artificial Sequence
  ENSG00000141084_10 (sequence is synthesized)
gtcgcgtccaccaagagcaaacagaaccacagtaaataccctgcacccagctcctcatcctcgtcctcctcctcctcctcgtcctcttccccatcctccgtcaattactccgagtccaac

SEQ ID NO: 365409 - DNA, 120 bp, Artificial Sequence
  ENSG00000141084_11 (sequence is synthesized)
tcaacagactccaccaagtcccagcaccacagcagtaccagtaaccaggagaccagcgacagtgagatggagatggaggcagagcactaccccaacggtgtgctaggaagcatgtccaca

SEQ ID NO: 365410 - DNA, 120 bp, Artificial Sequence
  ENSG00000141084_12 (sequence is synthesized)
cgcattgttaatggtgcctacaagcatgaggacctgcagacggatgagtccagcatggatgacaggcatcctcggcggcagctctgcgggggcaaccaggctgccacagaaaggatcatt

SEQ ID NO: 365411 - DNA, 120 bp, Artificial Sequence
  ENSG00000141084_13 (sequence is synthesized)
ctgtttggccgcgagttgcaggcattgagtgagcagttgggccgggagtacggcaagaatttggcccacacagagatgctgcaggatgccttcagcctgctggcatactcagacccctgg

SEQ ID NO: 365412 - DNA, 120 bp, Artificial Sequence
  ENSG00000141084_14 (sequence is synthesized)
agctgcccagttggccagcagcttgaccccatccagagggaacctgtgtgtgctgccctcaacagcgccattttagagtcccagaacctgccaaagcagccccctctgatgctcgccctg

SEQ ID NO: 365413 - DNA, 120 bp, Artificial Sequence
  ENSG00000141084_15 (sequence is synthesized)
ggccaggcatctgagtgtctccggctcatggcccgagcaggcctgggttcttgctcctttgccagagttgatgactacttgcactagctgactgtgctggctggctctggctggccctcc

SEQ ID NO: 365414 - DNA, 120 bp, Artificial Sequence
  ENSG00000141084_16 (sequence is synthesized)
actggccccagggctggagctgccctgccctccataggcaactggtgcagggactgggaaaccatagacagagtccactcctcctgcctggcctttccccctctccctttccttccttcc

SEQ ID NO: 365415 - DNA, 120 bp, Artificial Sequence
  ENSG00000141084_17 (sequence is synthesized)
ttcctttctctgcccaccaccccgctcagtctctctctctctccccttcacgtgcagcggcctgtaacacagtattggctggttactctcatgtagcgccttctattttgaaaggggggt

SEQ ID NO: 365416 - DNA, 120 bp, Artificial Sequence
  ENSG00000141084_18 (sequence is synthesized)
tttgttttgaggaggggttggggtttttaaatttttttctcctgactgagccaccagtatttatctctggagagtttgtgctgagctggtttctgctaatttagtgatgaagcctatcca

SEQ ID NO: 365417 - DNA, 120 bp, Artificial Sequence
  ENSG00000141084_19 (sequence is synthesized)
cttattattttcataagtaaaaaacaaatgagattatatatatatatataaaaatatatatattaaaaaaaaagacagtatttatcgtagcattagtggtccagcacctcttgggtgagg

SEQ ID NO: 365418 - DNA, 120 bp, Artificial Sequence
  ENSG00000141084_20 (sequence is synthesized)
tcttgggtgaggctgtccaggcaccatgttttctttgagtccaactcattaaaaaagaagaatctctgtcacctcagccaagtgatttattttttgctcccccttttttgagtcacaggc

SEQ ID NO: 365419 - DNA, 120 bp, Artificial Sequence
  ENSG00000141084_21 (sequence is synthesized)
gtagatccctaggcccctgagagctggacagagcagagaactacagggccaagggtccagagaagtgataacttggcccagggccacacagcagaggtagagggtccttggccagcacac

SEQ ID NO: 365420 - DNA, 120 bp, Artificial Sequence
  ENSG00000141084_22 (sequence is synthesized)
tatctaccactctaccccacctcccactgcctgccttgctcccctttcctcccttttcaataccctatcttcccttgttgttaagatggccaaataatacatttactctaaattgattgc

SEQ ID NO: 365421 - DNA, 120 bp, Artificial Sequence
  ENSG00000141084_23 (sequence is synthesized)
ctggaaactacctgccttcgtcctgagagcttctgtgtgtcaggctgctggaaagaagactccattcccaggacagaggcccttgagtacaggggctgctttcttcctgcctagatcttc

SEQ ID NO: 365422 - DNA, 120 bp, Artificial Sequence
  ENSG00000141084_24 (sequence is synthesized)
accatctctgcacagctctgagagaatggatgctttctgttgagaaaccagtaccttgtggaggcaggttcttgggctgctactccagggagtggatggaatccttggtcccctaggcca

SEQ ID NO: 365423 - DNA, 120 bp, Artificial Sequence
  ENSG00000141084_25 (sequence is synthesized)
gacttcactgccactgtgccagacagctccctgcagctgggccctagccactcttaggaaagactattgggagtatttgctggccagagaatgggactctatcagctttacacatgtccc

SEQ ID NO: 365424 - DNA, 120 bp, Artificial Sequence
  ENSG00000141084_26 (sequence is synthesized)
accagctgtttcagatagatccttacagctggcagagtaaaagtggtcccgctaccattggggaatcaggaaaggaaagactgagatggttgccaggacttggggtggcccacctgtgga

SEQ ID NO: 365425 - DNA, 120 bp, Artificial Sequence
  ENSG00000141084_27 (sequence is synthesized)
gaggactggctgccctggaggaggaaagggaggaagtctacacagaggagcaccaggacggctggaatttccatatgtgcttcacattgtgaggggagtgcacaagccgcccatgcaaag

SEQ ID NO: 365426 - DNA, 120 bp, Artificial Sequence
  ENSG00000141084_28 (sequence is synthesized)
agtagggtcagccatggcaaggccggaagttgaactttcagtccctgcctgaatctgggctttgcaagctcctgctccatattggtggacatgggaatggttggtgtggcctgagatacc

SEQ ID NO: 365427 - DNA, 120 bp, Artificial Sequence
  ENSG00000141084_29 (sequence is synthesized)
cattgctcaccaggcctcactgggcccacagctgggcaacaagaaaaatgtttgaattggaccaactgctggtgatggggccagggccctgggccctgtgctgtcagaattctgccttgg

SEQ ID NO: 365428 - DNA, 120 bp, Artificial Sequence
  ENSG00000141084_30 (sequence is synthesized)
gaaatgatcctatagctgctgctttttcttggtccttggggctggcagacccatagaccatggcctgttaggaggcgtcctgtctgtaaaggaaattcatctcttgtgacagcctggggc

SEQ ID NO: 365429 - DNA, 120 bp, Artificial Sequence
  ENSG00000141084_31 (sequence is synthesized)
tacctagctcccaaacccagaagttggagacatcaggctgtttaaatgatcatagcctagcaggattggattaaaaccacaggcttttgcagctggaatggggttcagtgaacatctccc

SEQ ID NO: 365430 - DNA, 120 bp, Artificial Sequence
  ENSG00000141084_32 (sequence is synthesized)
ccattcctctcttgctacaaataaggaaacaggcccaggagattaagtgacttggctaaagtcacatagcaaattagtagcagagccgggactatcccttatccctgtgggttgggcaac

SEQ ID NO: 365431 - DNA, 120 bp, Artificial Sequence
  ENSG00000141084_33 (sequence is synthesized)
actatttagtcctgaaaccgaatggcagataaaccccatgaggggtcaggctgatgtgccctccagcagtatctgagaagctgctaccttcaggggtgtgtcagggatgaggacgggtgc

SEQ ID NO: 365432 - DNA, 120 bp, Artificial Sequence
  ENSG00000141084_34 (sequence is synthesized)
ctgagcttaggttgtggagtggctgagagggcccaggagggctcgggacagctgtgtgctgcatggggttgggtgtctgcctggctcgcacttggtacccatggccacctccccattttc

SEQ ID NO: 365433 - DNA, 120 bp, Artificial Sequence
  ENSG00000141084_35 (sequence is synthesized)
tgtgccttatctcactgtttcagctgagtccaagttgtttactctgttcctctccagaggggctctctgtcccagttgggcagctcacctttgggacataagcctttgccccacaagctg

SEQ ID NO: 365434 - DNA, 120 bp, Artificial Sequence
  ENSG00000141084_36 (sequence is synthesized)
tggagagggccaaaaccaagctgcttgagcccactctcttgctgagagtccaggcctgcctgcctgccagccagaggtgccccttatgcacatccagtcctaccagcctgcttccaggag

SEQ ID NO: 365435 - DNA, 120 bp, Artificial Sequence
  ENSG00000141084_37 (sequence is synthesized)
cctagagtgggaaaggcacctgggggagccctggtgaagggctggacctgacccatggaggcaggaggaagacctggctttcttggtttgtccggccctggggagcagccttccctactc

SEQ ID NO: 365436 - DNA, 120 bp, Artificial Sequence
  ENSG00000141084_38 (sequence is synthesized)
actttccccttgcggcaccaaatggtcactccttccagagcaaaaactggcactcatagcaagccagaacccccatccccatcctcatgggtctgtggctgggtgcaggccatcaaaatg

SEQ ID NO: 365437 - DNA, 120 bp, Artificial Sequence
  ENSG00000141084_39 (sequence is synthesized)
gacaccacgagacagaagtggggactgcctggccacctagcgccttcccactccttaagcaagcacaaagaagatgaggcagagaattgtcagagctgaaagttcctttggttgctcaca

SEQ ID NO: 365438 - DNA, 120 bp, Artificial Sequence
  ENSG00000141084_40 (sequence is synthesized)
actcaggtatgcacccatgtggcagccaggcagcggagccctactagactgccagtctcatgcacccagacctgtggccagattgtggcctctggctgcctcaggcattttcctctttgc

SEQ ID NO: 365439 - DNA, 120 bp, Artificial Sequence
  ENSG00000141084_41 (sequence is synthesized)
attgggttttcctgcattagtaactacagctgcaacagacatcctccacattgtgcacactggttttgcctttgtcctcaagagttgatacttggcattagcatgaaacttgtgggtgtg

SEQ ID NO: 365440 - DNA, 120 bp, Artificial Sequence
  ENSG00000141084_42 (sequence is synthesized)
ggaggatggagagagaactctaacacaaaacatcttattaaaattgtacttgagagacaaaaaaaaaactctgttgtattttgacagaattatttttattaaaatacacatccatgagca

SEQ ID NO: 365441 - DNA, 120 bp, Artificial Sequence
  ENSG00000141084_43 (sequence is synthesized)
ccccagactggggttattttcctgcaaaaaccggatcctcgtgtgttccccatctctgctgacagccactgtccaccttggcccccaggactaagtgtcattgaatccactcctgactca

SEQ ID NO: 365442 - DNA, 120 bp, Artificial Sequence
  ENSG00000141084_44 (sequence is synthesized)
catttggtcatatggggaaatagacatcaagggctgtggtcagctggtggagcagagcatggattctggagctataccacctgcatttgcatcctggcggctgtgttacctggacctggg

SEQ ID NO: 365443 - DNA, 120 bp, Artificial Sequence
  ENSG00000141084_45 (sequence is synthesized)
acccatgttacagctgacagtccctgcagtgtccaccattaacaccacctctctctggagcatctttcaccttgggatctacagtacttcacaggggtctgctgtggggcagccaggtcc

SEQ ID NO: 365444 - DNA, 120 bp, Artificial Sequence
  ENSG00000141084_46 (sequence is synthesized)
tcaacagactccaccaagtcccagcaccacagcagtaccagtaaccaggagaccagcaacccatggctacagcttgaaaggaggcccaaccaggctgctccaaccacaccccctgggcca

SEQ ID NO: 365445 - DNA, 120 bp, Artificial Sequence
  ENSG00000141084_47 (sequence is synthesized)
attcaggaagaacaggcgtccataaagaacagacaaagtaaggtttattctactttcccctttcccttcctcacctgtccctaactctgctctctggctcatgtcaaccctggttaacct

SEQ ID NO: 365446 - DNA, 120 bp, Artificial Sequence
  ENSG00000141084_48 (sequence is synthesized)
gtcaggagtccattcagctctggtcctcatgaccagcttgcagctcgaggccatgttcctgtcccaccttcaagatggcactgcccagatggacagttggcaggatggagacgtctcagg

SEQ ID NO: 365447 - DNA, 120 bp, Artificial Sequence
  ENSG00000141084_49 (sequence is synthesized)
gcagcctccctaatgcacattctgaaggctgggcgcaggccaggccctggcatggctggttccattcctccatttcctccctgcttgtttccttccccctgaatcctggattcctctcaa

SEQ ID NO: 365448 - DNA, 120 bp, Artificial Sequence
  ENSG00000141084_50 (sequence is synthesized)
cctcctgttcatggtcttccaggaaggctgtttgcctgccttagtagttctgcttattcctagccagagaggggactgaagtggtcagatagggcaaagccagtgctcaatggctgctgt

SEQ ID NO: 365449 - DNA, 120 bp, Artificial Sequence
  ENSG00000141084_51 (sequence is synthesized)
tcacagacctcccgggactcactcttgtcaccaaggctgggttgcagtggcagaatcacagcttactgcagcctcaatttcctggactcaagccatcttcccacctcagcctcccgagta

SEQ ID NO: 365450 - DNA, 120 bp, Artificial Sequence
  ENSG00000141086_0 (sequence is synthesized)
atctgccacgatgttgctgctcagcctgaccctaagcctggttctcctcggctcctcctggggctgcggcattcctgccatcaaaccggcactgagcttcagccagaggattgtcaacgg

SEQ ID NO: 365451 - DNA, 120 bp, Artificial Sequence
  ENSG00000141086_1 (sequence is synthesized)
ggagaatgcagtgttgggctcctggccctggcaggtgtccctgcaggacagcagcggcttccacttctgcggtggttctctcatcagccagtcctgggtggtcactgctgcccactgcaa

SEQ ID NO: 365452 - DNA, 120 bp, Artificial Sequence
  ENSG00000141086_2 (sequence is synthesized)
tgtcagccctggccgccattttgttgtcctgggcgagtatgaccgatcatcaaacgcagagcccttgcaggttctgtccgtctctcgggccattacacaccctagctggaactctaccac

SEQ ID NO: 365453 - DNA, 120 bp, Artificial Sequence
  ENSG00000141086_3 (sequence is synthesized)
catgaacaatgacgtgacgctgctgaagctcgcctcgccagcccagtacacaacacgcatctcgccagtttgcctggcatcctcaaacgaggctctgactgaaggcctcacgtgtgtcac

SEQ ID NO: 365454 - DNA, 120 bp, Artificial Sequence
  ENSG00000141086_4 (sequence is synthesized)
cagtgccggcagtactggggctcaagtatcactgactccatgatctgtgcaggtggcgcaggtgcctcctcgtgccagggtgactccggaggccctcttgtctgccagaagggaaacaca

SEQ ID NO: 365455 - DNA, 120 bp, Artificial Sequence
  ENSG00000141086_5 (sequence is synthesized)
tgggtgcttattggtattgtctcctggggcaccaaaaactgcaatgtgcgcgcacctgctgtgtatactcgagttagcaagttcagcacctggatcaaccaggtcatagcctacaactga

SEQ ID NO: 365456 - DNA, 120 bp, Artificial Sequence
  ENSG00000141086_6 (sequence is synthesized)
gctcaccacaggccctccccagctcaacccattaaagacccaggccctgtcccatcatgcattcatgtctgtcttcctggctcaggagaaagaagaggctgttgagggtccgactcccta

SEQ ID NO: 365457 - DNA, 120 bp, Artificial Sequence
  ENSG00000141086_7 (sequence is synthesized)
cttggacttctggcacagaaggggctgagtgactccttgagtagcagtggctcttcctagagtagccatgccgaggccggggcccccacccctcctccagggcaaccccttggtcctaca

SEQ ID NO: 365458 - DNA, 120 bp, Artificial Sequence
  ENSG00000141086_8 (sequence is synthesized)
gcaagaagccagaactgttggaatgaatggcagccctccctggagaggcagcctgtttactgaatacagaggatacgtttacaaactgaatacgcataataaataactgcacattctcca

SEQ ID NO: 365459 - DNA, 120 bp, Artificial Sequence
  ENSG00000141086_9 (sequence is synthesized)
atgccagggcagtggagcagggaacaggcctgcagggctgggagggggcaagaggtggggtggtctcacaaataggaccagagattgagccaggccctggagcccgggagggtttaggaa

SEQ ID NO: 365460 - DNA, 120 bp, Artificial Sequence
  ENSG00000141086_10 (sequence is synthesized)
gctgagacaggaagacctgtccatgtcttttagaaagaaccttctggctgcatgaagggtatgaactgttcaggtcgggagggggcagagagaccaggggtagagatggggaacagcggg

SEQ ID NO: 365461 - DNA, 120 bp, Artificial Sequence
  ENSG00000141086_11 (sequence is synthesized)
ctaggctggagacagatgtaggagaacagcagggctgggggactgggtggatagggataaccaagatagctgtggggcccgaaggtgcttgcatgtaccctgttggggaaggggtagtgc

SEQ ID NO: 365462 - DNA, 120 bp, Artificial Sequence
  ENSG00000141086_12 (sequence is synthesized)
tgtaccctctcgacagacctctctggggtgcacagcctggggcacccaaaaggaggtggggaaagatgggctgaggcatgggaagcaggtcctcattagcccaatggccaggctgcggca

SEQ ID NO: 365463 - DNA, 120 bp, Artificial Sequence
  ENSG00000141086_13 (sequence is synthesized)
ttccaaatggacgaggaaccactgcgatgatgtgttaggactcccagcctgccagaacctcacagcccctggcccttcacagcaaagttgaccgcagtgagcattccatccaccagtcag

SEQ ID NO: 365464 - DNA, 120 bp, Artificial Sequence
  ENSG00000141086_14 (sequence is synthesized)
aacaccctggacgctgagcggccttctctgaaagcctggtgcctttgttagccctgggtgactcctgtgatcccagccaccaggttgtcactatagacctaatttaaccatctgtcctca

SEQ ID NO: 365465 - DNA, 120 bp, Artificial Sequence
  ENSG00000141086_15 (sequence is synthesized)
gtaccgagggctcaacatttggaatgggaggtggttctgggagccaattagaggccaggctttgggaggtggcagaggtgagtctcacacctgggctctgtctgataagtctaggtctcg

SEQ ID NO: 365466 - DNA, 120 bp, Artificial Sequence
  ENSG00000141086_16 (sequence is synthesized)
gtcaggggaccttggcctaaagggcctgtcttgcctggagcgtgggagggggctgagtctacacagctggcctggcctcaggcctggagctttagctcaaggacgagaagacccataaag

SEQ ID NO: 365467 - DNA, 120 bp, Artificial Sequence
  ENSG00000141086_17 (sequence is synthesized)
ccagacccagctcccaacctcacatctgccacgatgttgctgctcagcctgaccctaagcctggttctcctcggctcctcctggggtgagtgggccaggaccagccctgattcagccctg

SEQ ID NO: 365468 - DNA, 120 bp, Artificial Sequence
  ENSG00000141086_18 (sequence is synthesized)
aggggtgggcagggtcctgggtacgtcatgcctaggggcagcctcagcagcccacccccactctgacctctgagccctgaccacaggacagcagcggcttccacttctgcggtggttctc

SEQ ID NO: 365469 - DNA, 120 bp, Artificial Sequence
  ENSG00000141086_19 (sequence is synthesized)
ggaatgaatggcagccctccctggagaggcagcctgtttactgaatacagaggatacgtttacaaactgaatacgcataataaataactgcacattctccatccacaggccatggcatga

SEQ ID NO: 365470 - DNA, 120 bp, Artificial Sequence
  ENSG00000141086_20 (sequence is synthesized)
cattcttcacctactgtgggccacataggcctatctccagagagggcatcggacccagatggcaccacagtgtgtggccaggctgggtcgtgctgcatgtgtgcacagccaggcggctca

SEQ ID NO: 365471 - DNA, 120 bp, Artificial Sequence
  ENSG00000141096_0 (sequence is synthesized)
agagtcgcgtgacttcaaccccctcttcgggaggctgggtcgtcatgatccggaccccattgtcggcctctgcccatcgcctgctcctcccaggctcccgcggccgacccccgcgcaaca

SEQ ID NO: 365472 - DNA, 120 bp, Artificial Sequence
  ENSG00000141096_1 (sequence is synthesized)
tgcagcccacgggccgcgagggttcccgcgcgctcagccggcggtatctgcggcgtctgctgctcctgctactgctgctgctgctgcggcagcccgtaacccgcgcggagaccacgccgg

SEQ ID NO: 365473 - DNA, 120 bp, Artificial Sequence
  ENSG00000141096_2 (sequence is synthesized)
gcgcccccagagccctctccacgctgggctcccccagcctcttcaccacgccgggtgtccccagcgccctcactaccccaggcctcactacgccaggcacccccaaaaccctggaccttc

SEQ ID NO: 365474 - DNA, 120 bp, Artificial Sequence
  ENSG00000141096_3 (sequence is synthesized)
ggggtcgcgcgcaggccctgatgcggagtttcccactcgtggacggccacaatgacctgccccaggtcctgagacagcgttacaagaatgtgcttcaggatgttaacctgcgaaatttca

SEQ ID NO: 365475 - DNA, 120 bp, Artificial Sequence
  ENSG00000141096_4 (sequence is synthesized)
gccatggtcagaccagcctggacaggcttagagacggcctcgtgggtgcccagttctggtcagcctccgtctcatgccagtcccaggaccagactgccgtgcgcctcgccctggagcaga

SEQ ID NO: 365476 - DNA, 120 bp, Artificial Sequence
  ENSG00000141096_5 (sequence is synthesized)
ttgacctcattcaccgcatgtgtgcctcctactctgaactcgagcttgtgacctcagctgaaggtctgaacagctctcaaaagctggcctgcctcattggcgtggagggtggtcactcac

SEQ ID NO: 365477 - DNA, 120 bp, Artificial Sequence
  ENSG00000141096_6 (sequence is synthesized)
tggacagcagcctctctgtgctgcgcagtttctatgtgctgggggtgcgctacctgacacttaccttcacctgcagtacaccatgggcagagagttccaccaagttcagacaccacatgt

SEQ ID NO: 365478 - DNA, 120 bp, Artificial Sequence
  ENSG00000141096_7 (sequence is synthesized)
gtcagcggattgacaagctttggtgagaaagtagtagaggagttgaaccgcctgggcatgatgatagatttgtcctatgcatcggacaccttgataagaagggtcctggaagtgtctcag

SEQ ID NO: 365479 - DNA, 120 bp, Artificial Sequence
  ENSG00000141096_8 (sequence is synthesized)
gctcctgtgatcttctcccactcagctgccagagctgtgtgtgacaatttgttgaatgttcccgatgatatcctgcagcttctgaagaagaacggtggcatcgtgatggtgacactgtcc

SEQ ID NO: 365480 - DNA, 120 bp, Artificial Sequence
  ENSG00000141096_9 (sequence is synthesized)
atgggggtgctgcagtgcaacctgcttgctaacgtgtccactgtggcagatcactttgaccacatcagggcagtcattggatctgagttcatcgggattggtggaaattatgacgggact

SEQ ID NO: 365481 - DNA, 120 bp, Artificial Sequence
  ENSG00000141096_10 (sequence is synthesized)
ggccggttccctcaggggctggaggatgtgtccacatacccagtcctgatagaggagttgctgagtcgtagctggagcgaggaagagcttcaaggtgtccttcgtggaaacctgctgcgg

SEQ ID NO: 365482 - DNA, 120 bp, Artificial Sequence
  ENSG00000141096_11 (sequence is synthesized)
gtcttcagacaagtggaaaaggtgagagaggagagcagggcgcagagccccgtggaggctgagtttccatatgggcaactgagcacatcctgccactcccacctcgtgcctcagaatgga

SEQ ID NO: 365483 - DNA, 120 bp, Artificial Sequence
  ENSG00000141096_12 (sequence is synthesized)
caccaggctactcatctggaggtgaccaagcagccaaccaatcgggtcccctggaggtcctcaaatgcctccccataccttgttccaggccttgtggctgctgccaccatcccaaccttc

SEQ ID NO: 365484 - DNA, 120 bp, Artificial Sequence
  ENSG00000141096_13 (sequence is synthesized)
acccagtggctctgctgacacagtcggtccccgcagaggtcactgtggcaaagcctcacaaagccccctctcctagttcattcacaagcatatgctgagaataaacatgttacacatgga

SEQ ID NO: 365485 - DNA, 120 bp, Artificial Sequence
  ENSG00000141098_0 (sequence is synthesized)
agaaaccaggcggcgcgttcccggtggcggcgccctggactcccgggcccgcgcatccccgccagccttccttaaggcggatgggtggcccccgagaccccgtcggacccatggtttcca

SEQ ID NO: 365486 - DNA, 120 bp, Artificial Sequence
  ENSG00000141098_1 (sequence is synthesized)
gtgcagcgcggagtgggcgatgccagcgtgccaggagccatgtctgaccaggacgtttggaagatcatatccatgccagaggctcttgtgaggagatgagttggtaaagagagaggctgg

SEQ ID NO: 365487 - DNA, 120 bp, Artificial Sequence
  ENSG00000141098_2 (sequence is synthesized)
gatgaagatgctgccaggagtgggcgtgtttgggactggcagctccgcccgagttctggtcccactgctgagggcagaagggttcactgttgaggccctgtgggggaagactgaggagga

SEQ ID NO: 365488 - DNA, 120 bp, Artificial Sequence
  ENSG00000141098_3 (sequence is synthesized)
ggcgaagcagcttgctgaggagatgaacatcgccttctacaccagccggactgatgacatcttgctgcatcaagatgtggatctggtgtgcatcagcatcccccctccactcacccggca

SEQ ID NO: 365489 - DNA, 120 bp, Artificial Sequence
  ENSG00000141098_4 (sequence is synthesized)
gatatccgtgaaggctctaggtattgggaagaatgtggtttgcgagaaggcagcaacatcggtggatgccttccggatggtgacagcctcgcgctactacccgcagctcatgagcctggt

SEQ ID NO: 365490 - DNA, 120 bp, Artificial Sequence
  ENSG00000141098_5 (sequence is synthesized)
agggaacgtgctgcgcttcctgcctgccttcgtgcgcatgaaacagctgatttcggaacactatgtgggagcggtgatgatctgtgatgcccgcatctactcaggcagcctgctgagccc

SEQ ID NO: 365491 - DNA, 120 bp, Artificial Sequence
  ENSG00000141098_6 (sequence is synthesized)
cagctatggctggatctgtgatgagctcatgggcggcgggggcttgcacaccatggggacctacattgtggacctgctgacccacctgaccggccggagagccgagaaggtgcacgggct

SEQ ID NO: 365492 - DNA, 120 bp, Artificial Sequence
  ENSG00000141098_7 (sequence is synthesized)
gctcaagacattcgtgaggcagaacgctgccatccgtggcatccggcacgtcactagcgatgacttctgtttcttccagatgctcatgggtgggggtgtgtgtagcacagtgacactcaa

SEQ ID NO: 365493 - DNA, 120 bp, Artificial Sequence
  ENSG00000141098_8 (sequence is synthesized)
ctgccacgcaagaggagctgctcttgagggactcgctggcagtgggcgcaggactgcctgagcaggggccccaggatgtcccgctgctgtacctgaagggcatggtctacatggtgcagg

SEQ ID NO: 365494 - DNA, 120 bp, Artificial Sequence
  ENSG00000141098_9 (sequence is synthesized)
ccttgcgccagtccttccaggggcagggcgaccgccgcacctgggaccgcacccctgtctccatggccgcctccttcgaggatgggctgtacatgcagagcgtggtggatgccatcaaga

SEQ ID NO: 365495 - DNA, 120 bp, Artificial Sequence
  ENSG00000141098_10 (sequence is synthesized)
ggtcgagccgatccggggagtgggaggctgtggaggtgctgacggaggagcccgacaccaaccagaacctgtgtgaggcacttcagcggaacaacctatgagcctgcacctgggctcctt

SEQ ID NO: 365496 - DNA, 120 bp, Artificial Sequence
  ENSG00000141098_11 (sequence is synthesized)
gccacagggcagagggaccagggaggggaacaggagccagacatgacagggacttggccctagcagagacagtgtctttcatttaatgagtctgggtgaagccagaggtggctctgggac

SEQ ID NO: 365497 - DNA, 120 bp, Artificial Sequence
  ENSG00000141098_12 (sequence is synthesized)
ttcgccccctccagtggctcatctgctcctcagacttgcagggtggcaaatgttcctgttgccaggttaccacggtgtgcacagggcagagctgccgccaggcctcctcatggtgatgcc

SEQ ID NO: 365498 - DNA, 120 bp, Artificial Sequence
  ENSG00000141098_13 (sequence is synthesized)
agtgagtcggaccaggaaaggctcaccctggggagcccttcagcctgatccgcagtcctaacagggtgagaaagcacaagaggggccagctcggctgaggcctgaggagaaatgatgaga

SEQ ID NO: 365499 - DNA, 120 bp, Artificial Sequence
  ENSG00000141098_14 (sequence is synthesized)
agttttgtttcgttcttgggctggggcatctcaggaacagtgagggcaacaagctgtccctcagggaccctcacctgccctcccatgtgaccaggcccttcccaggtggggactggggct

SEQ ID NO: 365500 - DNA, 120 bp, Artificial Sequence
  ENSG00000141098_15 (sequence is synthesized)
tgctttattaagtgagctcttgggcttttgaagtaggacagagggccctggtttggcagagaggaggcaagggagggctttagaacatctgagaaatgttaataaataattcagaaaata

SEQ ID NO: 365501 - DNA, 120 bp, Artificial Sequence
  ENSG00000141098_16 (sequence is synthesized)
ctaggtacgcccggcaggccacagcaggggcagatcatgtctctccctctgggcagtcctctgagggtcactcctctcctctgagctctccttcctgggctcgcatctgcagggaggaga

SEQ ID NO: 365502 - DNA, 120 bp, Artificial Sequence
  ENSG00000141098_17 (sequence is synthesized)
actctgggacatcacttgtccctgaagcagtgcttggggagggcatgaaaaaagacatagcctaacctacctcccatctgtaaatccctgaacagaaattaaggaaatactctaagagac

SEQ ID NO: 365503 - DNA, 120 bp, Artificial Sequence
  ENSG00000141098_18 (sequence is synthesized)
agccatcaaggggctggagatggttgcatctcagtcaacataaagtttgcctctgtgaagttagaggtcagagccctgggtggcggggaattggttgtgactagtgtgtttgttctccca

SEQ ID NO: 365504 - DNA, 120 bp, Artificial Sequence
  ENSG00000141098_19 (sequence is synthesized)
tttctggggcacacagcaccacaggaaggagaggctgtgtagcaaggctaccatttcccatgttttgtcagcgtttgactatagtgagcacacacccttcctgccaaactgcagtcttgt

SEQ ID NO: 365505 - DNA, 120 bp, Artificial Sequence
  ENSG00000141098_20 (sequence is synthesized)
attgccggaggacaggaaggctctgccagcattgggcttccctgacaggatccgtcgacagcctgcttacatgacatctccactcccttgggaagttttgggcttggtaacctcttgccc

SEQ ID NO: 365506 - DNA, 120 bp, Artificial Sequence
  ENSG00000141098_21 (sequence is synthesized)
ctgactgggcatggcctgctgagctgttctcctacagttcccgttggtcttctatttccagtcaactggagtcaacttcttctctttatctaatataaatcagaacctagtttactaagt

SEQ ID NO: 365507 - DNA, 79 bp, Artificial Sequence
  ENSG00000141098_22 (sequence is synthesized)
tctctttatctaatataaatcagaacctagtttactaagtaaacaaaccagtaaacattcagccagcaatttttatttt

SEQ ID NO: 365508 - DNA, 71 bp, Artificial Sequence
  ENSG00000141098_23 (sequence is synthesized)
ggctggagtgtgcatactcctgcctcggctttgcaagtagccaggactacaggcatgtgccaccacgccca

SEQ ID NO: 365509 - DNA, 86 bp, Artificial Sequence
  ENSG00000141098_24 (sequence is synthesized)
tgtgccaccacgcccagctaatttttgtctttttagtacagatggggttttgttatgttggccaggctggtctcgggcctcccaaa

SEQ ID NO: 365510 - DNA, 120 bp, Artificial Sequence
  ENSG00000141098_25 (sequence is synthesized)
attacaggcaggagccaccacacccagcctcaattatttttttaatgcctcctgtgtgccagtcactgtcctgatgtcattttggacattcaaagctgtgttagattggacccctccctg

SEQ ID NO: 365511 - DNA, 120 bp, Artificial Sequence
  ENSG00000141098_26 (sequence is synthesized)
tgtgttagattggacccctccctgtcttcagattttatagtccaattgaggcaactagaaataacacacattacaaggtagatgacagaagacatagtcacaattcaactagcacatact

SEQ ID NO: 365512 - DNA, 120 bp, Artificial Sequence
  ENSG00000141098_27 (sequence is synthesized)
tacttgactgagtaactgttttatgtgaggtaataggagccaagtgtctccttgatgcagccgaagatctctaggtcgaggaaccggtgccatgaggttgtcctccactcttcctgacca

SEQ ID NO: 365513 - DNA, 120 bp, Artificial Sequence
  ENSG00000141098_28 (sequence is synthesized)
ctgccatggtggcaaacctcagggtctgctacttatctcctccctcattctgaggaatgtcataggaaggtgtctgtcacctctggctcagtgggtagggaaggataaatgttctttgaa

SEQ ID NO: 365514 - DNA, 120 bp, Artificial Sequence
  ENSG00000141098_29 (sequence is synthesized)
gtgagaaagaacttcagtctgtccggttgtcaatttggagcaagtaagttttggccttattgtttgtttcttccagagagctctctctgaggatgtgtgacattggagttattcattcat

SEQ ID NO: 365515 - DNA, 120 bp, Artificial Sequence
  ENSG00000141098_30 (sequence is synthesized)
tggtcaccaaatgcttgggaggtcagatggtggctcccagattgaattcagaaatagacctaagtcaacactttagcagcaagttggttcaaggggaagcaagccgctattggtcacttg

SEQ ID NO: 365516 - DNA, 120 bp, Artificial Sequence
  ENSG00000141098_31 (sequence is synthesized)
actccttgccatcccttgtggcttgaatgcaggctggaaaggtgaggtgtgtccggagccagaactctggaggctctcagtcttcttcctgaattttagggttccccacagagaccattt

SEQ ID NO: 365517 - DNA, 120 bp, Artificial Sequence
  ENSG00000141098_32 (sequence is synthesized)
agcttgttagaaactgaattctcagctgggcaacatagtgggatcccgtctctacaaaaaagtttaaaaattagccaggcatggtggcacgcgactgtggtcccagctacttgggaggct

SEQ ID NO: 365518 - DNA, 120 bp, Artificial Sequence
  ENSG00000141098_33 (sequence is synthesized)
gcccaggagatagaggctgcagtgagcagtgatcatgcactccagcttgagtgacagagtaagactgtctcaaaagcaaacaaacaaaaagaaatctaaattctcaggccccactccaaa

SEQ ID NO: 365519 - DNA, 120 bp, Artificial Sequence
  ENSG00000141098_34 (sequence is synthesized)
caggccccactccaaacctactgaatctctgggatccagctatctgtgtctgaacaagccttgcaggtgactctggtggacatgaaggattgagagccactgatccaatcattttgaatt

SEQ ID NO: 365520 - DNA, 120 bp, Artificial Sequence
  ENSG00000141098_35 (sequence is synthesized)
aaactgaggcccaggagcattaaggaatgacatcttggttacatttcaccaagtcttcgtgctgtgatttttctctccttgctagagctttatatttttaccttacttctaaggccacga

SEQ ID NO: 365521 - DNA, 120 bp, Artificial Sequence
  ENSG00000141098_36 (sequence is synthesized)
gatcatttcttgccctcattattagtttttcctaaaattaatgattggacttaaccttccagagataatacttttcatatcacagctctttttatggcatcttgttttctgctttggtct

SEQ ID NO: 365522 - DNA, 120 bp, Artificial Sequence
  ENSG00000141098_37 (sequence is synthesized)
gacctatgttcttcatcttctacctccgatttcatccttaaagctttcccatgaatttcttaaaggggagaggggaagggccctaatatattttattcttcagttcagaagtggttcagg

SEQ ID NO: 365523 - DNA, 120 bp, Artificial Sequence
  ENSG00000141098_38 (sequence is synthesized)
aaattatattttaagtgcaaggtgcccctagcatctttgccacagttgaatgttttcttaagtctgtcactaaaaggtgggcttctgtgcccaattcttggcacttctgtggttcattag

SEQ ID NO: 365524 - DNA, 66 bp, Artificial Sequence
  ENSG00000141098_39 (sequence is synthesized)
gcttctgtgcccaattcttggcacttctgtggttcattagaaaaacactaagtttgcaggccaggc

SEQ ID NO: 365525 - DNA, 70 bp, Artificial Sequence
  ENSG00000141098_40 (sequence is synthesized)
catttttgtagagacaggatcttgctgtgttgttcaagctggtttcgaactcctaacctcaggcaatcat

SEQ ID NO: 365526 - DNA, 120 bp, Artificial Sequence
  ENSG00000141098_41 (sequence is synthesized)
tgttcaagctggtttcgaactcctaacctcaggcaatcatcctactttggccccccaaagtgctggaattataggtgggagccactgtgcccagcagatttcagcttctccaatctctcc

SEQ ID NO: 365527 - DNA, 120 bp, Artificial Sequence
  ENSG00000141098_42 (sequence is synthesized)
cttgacttcctggcaggagagctagataaactcaggtagacatgtctttcatggctacccaaagactctgtacagctagccctcaggagcctgtttaagtcaagatgtccttgcagtccc

SEQ ID NO: 365528 - DNA, 120 bp, Artificial Sequence
  ENSG00000141098_43 (sequence is synthesized)
aagtcaagatgtccttgcagtcccacactgatactactgagccctaagtttaagagtgctgttattcagggttgggctcagtgcctcacacctctaatccagcactttgggaggccaagg

SEQ ID NO: 365529 - DNA, 77 bp, Artificial Sequence
  ENSG00000141098_44 (sequence is synthesized)
gggaggccaaggtgggcagatcgcttgaactcaggagttaaataccagcctgagcaacatgacagtggcgtgcacct

SEQ ID NO: 365530 - DNA, 120 bp, Artificial Sequence
  ENSG00000141098_45 (sequence is synthesized)
tagcttgagcccaggaagcggaggttgcaatgagccaagattataccactgggtaacaaagcgagtccccatctaaaaaaacaaaaacagactatttttcagattcaagaagagaggtct

SEQ ID NO: 365531 - DNA, 120 bp, Artificial Sequence
  ENSG00000141098_46 (sequence is synthesized)
ttccctctttcctcacctcttgaggcatgaaacaggaattccttatcctagttttatcaccaccaaactcctagcagtcataaaagtcctttttcctctaaacccacctcctctctgcct

SEQ ID NO: 365532 - DNA, 120 bp, Artificial Sequence
  ENSG00000141098_47 (sequence is synthesized)
cacactgcagtatccactctgtcgccagcagcgaggcattatagcaggaggcttctgaattggccagaacagcagctctcaggtggggtgtctgagaacctcatttcctcattacatccc

SEQ ID NO: 365533 - DNA, 120 bp, Artificial Sequence
  ENSG00000141098_48 (sequence is synthesized)
tccctggtcagccatatgtgttcagcagccaaatggcaaaattcacccccagaactgtgattgtcttccctaatctggaaggcccacaagtgtggagaagcactggagaccctccagaag

SEQ ID NO: 365534 - DNA, 120 bp, Artificial Sequence
  ENSG00000141098_49 (sequence is synthesized)
cagtagtgctagcagtcaggggctactctccctgccgggccccgtgcaagggcctggccaccctatcccaggtatgtgacacttggctggctgttctttattgtcctgctagtacctgtt

SEQ ID NO: 365535 - DNA, 120 bp, Artificial Sequence
  ENSG00000141098_50 (sequence is synthesized)
ggctggctgttctttattgtcctgctagtacctgttgtaaagcttcttttattaaagaagagcaggagattgaagtgtcataaattgaagagattcacaccaacacggcacatgtataca

SEQ ID NO: 365536 - DNA, 120 bp, Artificial Sequence
  ENSG00000141098_51 (sequence is synthesized)
agaacttaaagtataataacaaaatatgtattaaaaaaataaataaataaattgaagagattgaatgatgtcatagactaccaatccacatgccttgttccttgctgcagcactgaggtt

SEQ ID NO: 365537 - DNA, 120 bp, Artificial Sequence
  ENSG00000141098_52 (sequence is synthesized)
tgtaatcctgggagtttagacctacgtaagatgcccataagtacaaatgacagatgctctgtggggttcttcagggtcaaggtggcagaggtgggggtaggaagtgagaggagggggaag

SEQ ID NO: 365538 - DNA, 120 bp, Artificial Sequence
  ENSG00000141098_53 (sequence is synthesized)
ggttgaccagaggcaccaatttgtctcctgtgggcttggtcagtatgtgagctaccagggggccaggctgggcctgactctcggagaggcctaataaacagtacgtatgataaaacaact

SEQ ID NO: 365539 - DNA, 120 bp, Artificial Sequence
  ENSG00000141098_54 (sequence is synthesized)
tgagactctatctcaatatttttttaaaaagaaaattttggaggagtgcacagatcatgtatcaagaccttatgggtggggcctttgtaaggactttggcttttattccgagaagctatt

SEQ ID NO: 365540 - DNA, 120 bp, Artificial Sequence
  ENSG00000141098_55 (sequence is synthesized)
gcacattggagagctttttcgtgggtttttgccagggtgtctttaccctttctggcttactatgacttgtaaacttctgtatgtgtctagtccatactgctttttgggctttctaagttt

SEQ ID NO: 365541 - DNA, 120 bp, Artificial Sequence
  ENSG00000141098_56 (sequence is synthesized)
tctatttaaagtattagcacaggatttccttcgacttgaaccacacaaagctcgcaggaacactgcaggtgttagtgtctcatggctgctcatatcctcacaagctttcatcttgaaaca

SEQ ID NO: 365542 - DNA, 120 bp, Artificial Sequence
  ENSG00000141098_57 (sequence is synthesized)
tggagcagcattcatcccttcagttcccagctgcttatcctctagcactctcctcagggctttgtccagctttgtttacctctgggtgcgtgttggctgcagcgtacccagaatgggtgt

SEQ ID NO: 365543 - DNA, 120 bp, Artificial Sequence
  ENSG00000141098_58 (sequence is synthesized)
gagggcaaaaagggtattctcacttccttcccttcctgccggagccaaacatgttctagccttgggccactctaacttgttggaccagtgttttcagagaacaatctgcagggaatctta

SEQ ID NO: 365544 - DNA, 120 bp, Artificial Sequence
  ENSG00000141098_59 (sequence is synthesized)
gggccctctctggagttatgactaagagtagaagttatgaatagtccatcccctagaaaataggttagatttccttgccccaagctgatgacctaataaatgcatgacaacatagagaca

SEQ ID NO: 365545 - DNA, 88 bp, Artificial Sequence
  ENSG00000141098_60 (sequence is synthesized)
caagctgatgacctaataaatgcatgacaacatagagacacgtccatgaagtgtgcccacctctctagcccacctgtgttatgtgttt

SEQ ID NO: 365546 - DNA, 120 bp, Artificial Sequence
  ENSG00000141098_61 (sequence is synthesized)
gggaggccaaggcaggaggatcacttgggccctgcctaggcaacagaggaggaccccatctctacaaaaaaaaaattttaaattagccaggcgtggtggtacacacctgtggtcccactt

SEQ ID NO: 365547 - DNA, 120 bp, Artificial Sequence
  ENSG00000141098_62 (sequence is synthesized)
gtggtggtacacacctgtggtcccacttaggaggccaagatggaggatcgcttgaggccaggagattgagactagcctgggcagcatagcaagaccccacctctacaaaaaagaaaaaaa

SEQ ID NO: 365548 - DNA, 120 bp, Artificial Sequence
  ENSG00000141098_63 (sequence is synthesized)
aattagttcgtgcagttgtaaggcagagaagtccaaaatcctcagggcaggcggacatgctggagattcccccttgaaactttgagatttcctgttgtgtcctgttgttaggtattggga

SEQ ID NO: 365549 - DNA, 120 bp, Artificial Sequence
  ENSG00000141101_0 (sequence is synthesized)
ctctcacgcagccaacatggctccagtggagcacgttgtggcggatgctggggctttcctgcggcatgcggctctgcaggacatcgggaagaacatttacaccatccgggaggtggtcac

SEQ ID NO: 365550 - DNA, 120 bp, Artificial Sequence
  ENSG00000141101_1 (sequence is synthesized)
tgagattcgggacaaggccacacgcaggcggctcgctgtcctgccctacgagctgcggttcaaggagcccttaccggaatacgtgcggctggtgactgagttttcaaagaaaacaggaga

SEQ ID NO: 365551 - DNA, 120 bp, Artificial Sequence
  ENSG00000141101_2 (sequence is synthesized)
ctaccccagcctctctgccacggacatccaagtgcttgcactcacataccagttggaagcagagtttgttggggtgtctcacctaaaacaagaaccacagaaggttaaggtgagctcatc

SEQ ID NO: 365552 - DNA, 120 bp, Artificial Sequence
  ENSG00000141101_3 (sequence is synthesized)
gattcagcacccagaaacacctctgcacatttctggtttccatctgccctacaagcctaaacccccacaagaaacagaaaaaggacactcagcttgtgagcctgagaacctggaatttag

SEQ ID NO: 365553 - DNA, 120 bp, Artificial Sequence
  ENSG00000141101_4 (sequence is synthesized)
ttccttcatgttctggagaaaccctttgcccaacatcgatcatgaactgcaggagctgctgattgacagaggtgaggacgttccaagtgaggaggaggaggaggaagaaaacgggtttga

SEQ ID NO: 365554 - DNA, 120 bp, Artificial Sequence
  ENSG00000141101_5 (sequence is synthesized)
agacagaaaagatgacagcgatgacgacgggggtggctggataacccccagtaacatcaagcagatccagcaggagctggagcagtgtgacgtccccgaggacgtgcgggttggctgcct

SEQ ID NO: 365555 - DNA, 120 bp, Artificial Sequence
  ENSG00000141101_6 (sequence is synthesized)
gaccacagacttcgccatgcagaatgttctgctgcagatggggctgcacgtgctggcggtgaacggcatgctgattcgtgaggcccggagctacatcttgcgctgccatggctgtttcaa

SEQ ID NO: 365556 - DNA, 120 bp, Artificial Sequence
  ENSG00000141101_7 (sequence is synthesized)
ctgtgggaacaagaccctgaagaaagtgtccgtgaccgtcagcgacgacggcaccctgcacatgcacttctcccgcaaccccaaggtgctgaacccccgcggcctccggtactcgcttcc

SEQ ID NO: 365557 - DNA, 120 bp, Artificial Sequence
  ENSG00000141101_8 (sequence is synthesized)
cactcccaaagggggcaaatacgccatcaacccccatctcaccgaggatcagcgcttccctcagctgcgactctcccaaaaggccaggcagaaaaccaacgtgttcgcccctgactacat

SEQ ID NO: 365558 - DNA, 120 bp, Artificial Sequence
  ENSG00000141101_9 (sequence is synthesized)
cgccggggtgtcaccctttgtcgagaatgacatctccagccgctcagctaccctgcaggtccgggacagcaccttgggagctgggcggagacgcttaaatcccaacgcttccagaaagaa

SEQ ID NO: 365559 - DNA, 120 bp, Artificial Sequence
  ENSG00000141101_10 (sequence is synthesized)
gtttgtgaagaaaaggtgaagagcgagttcccgcaggcaaattggatgggcgtctggccgccgtggagttccggtgacccatttccccagccgtgtcgtctccaggaccacccgatggaa

SEQ ID NO: 365560 - DNA, 120 bp, Artificial Sequence
  ENSG00000141101_11 (sequence is synthesized)
ataacaggcgggcttcacggtgcggctctgtccgcccatgccccgctgggtctgcagggaactggactgtcccatggcctgtgagcaccggagcgcctggctgcctgccaaggaagtgca

SEQ ID NO: 365561 - DNA, 120 bp, Artificial Sequence
  ENSG00000141101_12 (sequence is synthesized)
attgcataaaaacagaaagaacaacgccctggagccaatcttcaagaaaggaatttccaaaggataatatttttctaataaatgcggctgcaacctcctgtgcatttaattaaataggcc

SEQ ID NO: 365562 - DNA, 120 bp, Artificial Sequence
  ENSG00000141101_13 (sequence is synthesized)
aaatttttgctgcttaggtcatctcaaggctgatacttgagctgtgtgcccagagatcatgcatttagatttatatttttgccagaaaatacaaggttataataaaactaagaactacca

SEQ ID NO: 365563 - DNA, 120 bp, Artificial Sequence
  ENSG00000141101_14 (sequence is synthesized)
tctcctccactgctcctgtgggttgggagtttgaaaggtctgttgatgtttcagattgacagaggtgaggacgttccaagtgaggaggaggaggaggaagaaaacgggtttgaagacaga

SEQ ID NO: 365564 - DNA, 120 bp, Artificial Sequence
  ENSG00000141101_15 (sequence is synthesized)
agccaacatggctccagtggagcacgttgtggcggatgctggggctttcctgcggcatgcggctctgcaggtacggggagctccctccgggacgagagagatctgggctggccgcccctc

SEQ ID NO: 365565 - DNA, 120 bp, Artificial Sequence
  ENSG00000141101_16 (sequence is synthesized)
cctaccgaggtgtacagatgtacacggaactggtgctgtgcagcgcttcttttcctggttctggaaaccacctgtgccatttggtgatttttaattttgcttagaggctagacaatcgtc

SEQ ID NO: 365566 - DNA, 120 bp, Artificial Sequence
  ENSG00000141127_0 (sequence is synthesized)
gcagtcaccgcggacgccaatcttgtgcatggagtcgccattttgctcctagagaggccgccaggagacccggcgctttcttccttctgcagctgaggctgcggcggggccggggctggg

SEQ ID NO: 365567 - DNA, 120 bp, Artificial Sequence
  ENSG00000141127_1 (sequence is synthesized)
gtcggggccaggaggaattttgttgtcagagaataaaaggaggttgtccataattgactttaagcagcaatcagtaaaacattgagctcttcagctccgcctttcttgctctgaaaattg

SEQ ID NO: 365568 - DNA, 120 bp, Artificial Sequence
  ENSG00000141127_2 (sequence is synthesized)
gaaaaccaagaaggttttgatgttttgtgtgacgccacctgaattagaaaccaagatgaacataaccaaaggtggtctggtgttgttttcagcaaactcgaattcatcatgtatggagct

SEQ ID NO: 365569 - DNA, 120 bp, Artificial Sequence
  ENSG00000141127_3 (sequence is synthesized)
atcaaagaaaattgcagagcggctaggggtggagatgggcaaagtgcaggtttaccaggaacctaacagagaaacaagagtacaaattcaagagtctgtgaggggaaaagatgttttcat

SEQ ID NO: 365570 - DNA, 120 bp, Artificial Sequence
  ENSG00000141127_4 (sequence is synthesized)
catccaaactgtttcgaaggacgtgaacaccaccatcatggagctcctgatcatggtgtatgcatgtaagacctcttgtgccaagagcatcattggcgtgataccctactttccttacag

SEQ ID NO: 365571 - DNA, 120 bp, Artificial Sequence
  ENSG00000141127_5 (sequence is synthesized)
caagcagtgcaagatgagaaaaagaggctccattgtctctaaattgctggcttccatgatgtgcaaagctggtctaactcatcttattactatggatttacaccagaaggaaattcaggg

SEQ ID NO: 365572 - DNA, 120 bp, Artificial Sequence
  ENSG00000141127_6 (sequence is synthesized)
cttcttcaatattcctgttgacaatttaagagcatctcccttcttattacagtatattcaagaagagatcccagattacaggaatgcagtaatcgtggccaagtctccagcctcggcgaa

SEQ ID NO: 365573 - DNA, 120 bp, Artificial Sequence
  ENSG00000141127_7 (sequence is synthesized)
gagggcacagtcttttgctgagcgcctgcgcctgggaattgcagtgattcatggagaggcgcaggatgccgagtcggacttggtggatggacggcattccccacccatggtcagaagtgt

SEQ ID NO: 365574 - DNA, 120 bp, Artificial Sequence
  ENSG00000141127_8 (sequence is synthesized)
ttcctaaagaaaagcccccaatcacggttgtgggtgatgttggaggaaggattgccatcatcgtggatgacatcattgatgatgttgacagctttcttgctgcagcagagaccctgaagg

SEQ ID NO: 365575 - DNA, 120 bp, Artificial Sequence
  ENSG00000141127_9 (sequence is synthesized)
aaagaggtgcatataagatctttgtgatggcaactcatggcttgttgtcttctgacgccccccggcggattgaagagtctgccattgatgaggtggtggtcaccaatacaattccacatg

SEQ ID NO: 365576 - DNA, 120 bp, Artificial Sequence
  ENSG00000141127_10 (sequence is synthesized)
aagtccagaagctccagtgccccaagattaaaactgtggatatcagcatgatcctttcagaggcgatccgtcggatccacaatggggagtccatgtcctaccttttcagaaacataggct

SEQ ID NO: 365577 - DNA, 120 bp, Artificial Sequence
  ENSG00000141127_11 (sequence is synthesized)
tagatgactgagttttcctttaggaaaactcccgagggccaaactggaaacataagagtgactgctcggtgggatggatttcacaggaaccgtcatgcttgttcctccctctcccctgta

SEQ ID NO: 365578 - DNA, 120 bp, Artificial Sequence
  ENSG00000141127_12 (sequence is synthesized)
acctcacttcttattgattcctaagaagatagaccaactttttatgtcggtttgggtgtttgtgagtttggggagcaatttttataaaagaaaaactttattctcctcttttgaaaaggt

SEQ ID NO: 365579 - DNA, 120 bp, Artificial Sequence
  ENSG00000141127_13 (sequence is synthesized)
aagacctcgttttagttgtaactgtttaaaaaataacacttggaataagatttgtaagctcacaaagccttcttccaaagttgcttgagccaagtgcttaaaaagttaataaaataaaat

SEQ ID NO: 365580 - DNA, 120 bp, Artificial Sequence
  ENSG00000141127_14 (sequence is synthesized)
gatctgtatgatacctgcaattgaaaagccgaaaagattatactgtcaagtccagtaaatgacatttttagagatgcttttgtagacaagcatatggaatatgtgattgtatttattttc

SEQ ID NO: 365581 - DNA, 120 bp, Artificial Sequence
  ENSG00000141127_15 (sequence is synthesized)
tgcaactaaaaaaggaataaaaacttgtgtttgtgtgtttttctaaaactttgtgttttggcaatcgttttataactaaaataaaatgaaagctaaatctacacgctgtgaatgttgaaa

SEQ ID NO: 365582 - DNA, 120 bp, Artificial Sequence
  ENSG00000141127_16 (sequence is synthesized)
acatgccaacatgtgacgcgtggaatctacgccagccacagcagagaggtgggggttgtgaccggagttagatgccagcgcagaagggacgtgagcccagccgaggtaccgctgaagagg

SEQ ID NO: 365583 - DNA, 120 bp, Artificial Sequence
  ENSG00000141127_17 (sequence is synthesized)
ttattattaaaaacaataatcattattattttttccattgtaataacatgtaaaaaaacatatttcccatatgctcagtggagaaaatttggaaataaggaaagtagcaagaagaagtgg

SEQ ID NO: 365584 - DNA, 120 bp, Artificial Sequence
  ENSG00000141127_18 (sequence is synthesized)
ggggaaagaggcacccataattctattacccagagtcaaaaacatcttttaacactttttctgtgcattaaaaacaaaaaaagaaaattatacctccatcatttctggtgtgacctgcat

SEQ ID NO: 365585 - DNA, 120 bp, Artificial Sequence
  ENSG00000141127_19 (sequence is synthesized)
tgtgacagcacaatgttggccagttatggtgcagaaaacagtgctacccctgggagcctggagtgtggtgggagatagctccaatagtggcaggtgctgtgcaggaagaggctcgtgtga

SEQ ID NO: 365586 - DNA, 120 bp, Artificial Sequence
  ENSG00000141127_20 (sequence is synthesized)
aagtactggagggctgccatggggcacggtgatggggacatggggccatgccgtctgcacaaggccaagtggaagagcagatttttcacggtaaatgtaggcagaccctttttttttcct

SEQ ID NO: 365587 - DNA, 120 bp, Artificial Sequence
  ENSG00000141127_21 (sequence is synthesized)
gctctttacaaagagaattcagcggggtgccaagtcgttttctgtgtgggttgagagacaggctgtgcagcccactgttgcataggactaactactacaaatcatgctgagaccgagcta

SEQ ID NO: 365588 - DNA, 120 bp, Artificial Sequence
  ENSG00000141127_22 (sequence is synthesized)
agagaggtgggggttgtgaccggagttagatgccagcgcagaagggacgtgagcccagccgaggtaccgctgaagaggaatcaattttgatgaggaaacaagctcagagggttgaaatga

SEQ ID NO: 365589 - DNA, 120 bp, Artificial Sequence
  ENSG00000141127_23 (sequence is synthesized)
agtctctgctgcctggaccttaaattctgatggggaaatctttttaccaaggttatatctcttgtctggaaggtaaaggctgaggcccagcaaggacaagtgatgtccacatggcctagt

SEQ ID NO: 365590 - DNA, 120 bp, Artificial Sequence
  ENSG00000141127_24 (sequence is synthesized)
gacatttcatataaatgagattatacaatgtgtggtcttttgtgtctggctgtcttcactcaacataatattttcaaggttcatccatgttggagcatgaatcaatacttcattttatga

SEQ ID NO: 365591 - DNA, 120 bp, Artificial Sequence
  ENSG00000141127_25 (sequence is synthesized)
tcaaataatgctgtgttacatggatagtccacattttgtctctctcttcgtatttcatgttgatagaaaaaattttttttctactttttaacttatgaatggtgctgcagtaaacatttg

SEQ ID NO: 365592 - DNA, 67 bp, Artificial Sequence
  ENSG00000141127_26 (sequence is synthesized)
agagatcccagattacaggaatgcagtaatcgtggccaagtctccagcctcggcgaagagggtctcc

SEQ ID NO: 365593 - DNA, 70 bp, Artificial Sequence
  ENSG00000141127_27 (sequence is synthesized)
tcctaagtagctgggcatggggtttcaccatgctggtaaggctcttctcgaactcctgacctcaagtgat

SEQ ID NO: 365594 - DNA, 89 bp, Artificial Sequence
  ENSG00000141127_28 (sequence is synthesized)
ctacgtgagccactgttgggataacaggcgtgagccactgtgtttagtggttagtgcctttagaatcctgaagttattgatgaataggt

SEQ ID NO: 365595 - DNA, 120 bp, Artificial Sequence
  ENSG00000141127_29 (sequence is synthesized)
cagagaaagtgttgcttttgtaaggaacagaacttgcttgaatgagttgtttgaaattgttttctctgaataactgagtgaataggaaacaaaaggatagctgaggccctgtgtcttgtt

SEQ ID NO: 365596 - DNA, 120 bp, Artificial Sequence
  ENSG00000141127_30 (sequence is synthesized)
ctttctcacccatgatgtaaattaactcattatcgtacaatcaggatcaagttgctttagaattcctctctgtcagtgcatgaaacaaaatgacacagagaaaccatcctgattgatttt

SEQ ID NO: 365597 - DNA, 120 bp, Artificial Sequence
  ENSG00000141127_31 (sequence is synthesized)
ggaattagatgggaatgcaaagtatctgattaagttatatggagtatccagaaactcccattgctgtgcaggtaataattttatttatttattattttacttatttatttttttgagaca

SEQ ID NO: 365598 - DNA, 120 bp, Artificial Sequence
  ENSG00000141127_32 (sequence is synthesized)
ccctcccttcttcctctcccgccaggggtcggcgggggcgggggacgggcgtccggtgcctgggctctctcctctccctgaggcgccgctggggagtcgaaccctgatgatgggacctgt

SEQ ID NO: 365599 - DNA, 120 bp, Artificial Sequence
  ENSG00000141127_33 (sequence is synthesized)
atctacatgaagaattacagcaagacatgcaaaagtttaagaatgaggtcaacacattagaagaagagttcctggctttgaagaaagaaaatgttcaacttcataaagaggttgaagaag

SEQ ID NO: 365600 - DNA, 120 bp, Artificial Sequence
  ENSG00000141127_34 (sequence is synthesized)
aaatggagaagcacagaagtaatagcacagaattatcaggaaccctaactgatggtactactgttggcaatgatgatgatggactaaatcagcagattcctaggaaggaaaatgaagagc

SEQ ID NO: 365601 - DNA, 120 bp, Artificial Sequence
  ENSG00000141161_0 (sequence is synthesized)
agactgaggctggctggctggaggttgacacaggagtgctcaggggagcagcatcacaagagggcagatcgaaagcatcgtccttgctgaaaaacagatggcagaggtggaagcggtaca

SEQ ID NO: 365602 - DNA, 120 bp, Artificial Sequence
  ENSG00000141161_1 (sequence is synthesized)
gctgaaggaggaaggaaaccggcatttccagctccaggactacaaggccgccacaaatagctacagccaggccctgaagctgaccaaggacaaggccctgctggccacgctttatcggaa

SEQ ID NO: 365603 - DNA, 120 bp, Artificial Sequence
  ENSG00000141161_2 (sequence is synthesized)
ccgggcagcctgtggcctgaaaacggagagctacgtccaggcagcttcagatgcctccagagccatcgacatcaactcctcggacatcaaggctctgtatcggcgatgccaggcactgga

SEQ ID NO: 365604 - DNA, 120 bp, Artificial Sequence
  ENSG00000141161_3 (sequence is synthesized)
gcacctggggaagctggaccaggccttcaaagacgtgcagcgttgtgccaccctcgagccacggaaccagaacttccaggagatgctgaggagactcaacaccagcattcaggagaagct

SEQ ID NO: 365605 - DNA, 120 bp, Artificial Sequence
  ENSG00000141161_4 (sequence is synthesized)
ccgagtgcagttctccacagactcgagggtacagaagatgtttgagatcctcttggatgaaaacagtgaggctgataagcgggaaaaggctgccaacaatctcattgtcctaggccgtga

SEQ ID NO: 365606 - DNA, 120 bp, Artificial Sequence
  ENSG00000141161_5 (sequence is synthesized)
ggaagcaggggctgagaagatcttccagaacaatggagtagccttgctactgcagcttctggacactaagaagcctgagctggtgctggctgcagtgcggaccctgtcgggcatgtgcag

SEQ ID NO: 365607 - DNA, 120 bp, Artificial Sequence
  ENSG00000141161_6 (sequence is synthesized)
cggccaccaagccagagccacagtgattctgcatgcagtgcggatagaccgaatctgtagcctcatggccgtggagaatgaggagatgtctctggctgtctgcaacctgctccaagccat

SEQ ID NO: 365608 - DNA, 120 bp, Artificial Sequence
  ENSG00000141161_7 (sequence is synthesized)
cattgactccttgtctggggaggacaagcgggagcatcgagggaaggaggaggccctggttctagacaccaagaaggacctgaagcagatcaccagccacctgctggacatgctagtcag

SEQ ID NO: 365609 - DNA, 120 bp, Artificial Sequence
  ENSG00000141161_8 (sequence is synthesized)
caagaaggtgtctggccagggcagggatcaggcgctgaacctgctcaataagaatgttcccaggaaggaccttgccattcatgacaactcacgtaccatctatgtggtggataatggtct

SEQ ID NO: 365610 - DNA, 120 bp, Artificial Sequence
  ENSG00000141161_9 (sequence is synthesized)
gaggaagatcctgaaggttgtggggcaggttccagatctgccatcctgcctgcccctgactgacaacacccgcatgctggcctctatcctcatcaacaagctctatgatgacctgcgctg

SEQ ID NO: 365611 - DNA, 120 bp, Artificial Sequence
  ENSG00000141161_10 (sequence is synthesized)
tgacccggagcgcgatcacttccgcaagatctgtgaggaatatatcacgggcaagtttgacccccaggacatggacaagaacttgaatgccatccagacagtgtcagggatcctgcaggg

SEQ ID NO: 365612 - DNA, 120 bp, Artificial Sequence
  ENSG00000141161_11 (sequence is synthesized)
cccctttgacctgggcaaccagctgctgggactgaaaggtgtgatggagatgatggtggcactatgtggctcagagcgcgagacggaccagctggtggccgtggaggccctcatccatgc

SEQ ID NO: 365613 - DNA, 120 bp, Artificial Sequence
  ENSG00000141161_12 (sequence is synthesized)
ctccacgaagctcagccgcgccaccttcatcatcaccaatggagtgtcactgctcaaacagatctacaagaccaccaaaaatgagaagatcaagatccgcacactggtgggactctgtaa

SEQ ID NO: 365614 - DNA, 120 bp, Artificial Sequence
  ENSG00000141161_13 (sequence is synthesized)
gctcggctctgcaggtggcacagactacggtctcaggcagtttgcggaagggtcgacagaaaaactggccaaacagtgtcgcaagtggctgtgcaatatgtccatagacactcggacccg

SEQ ID NO: 365615 - DNA, 120 bp, Artificial Sequence
  ENSG00000141161_14 (sequence is synthesized)
acgctgggcagtggagggcctggcctacctcacgctggacgctgatgtgaaggacgactttgtccaggacgtccctgccctgcaggccatgtttgagctggccaaggcaggtaccagtga

SEQ ID NO: 365616 - DNA, 120 bp, Artificial Sequence
  ENSG00000141161_15 (sequence is synthesized)
caagaccatcctgtactcggtggccaccaccctggtgaactgcaccaacagctacgatgtcaaggaggtcatcccagagcttgtccagctcgccaagttctccaagcagcatgtgcccga

SEQ ID NO: 365617 - DNA, 120 bp, Artificial Sequence
  ENSG00000141161_16 (sequence is synthesized)
ggaacaccccaaggacaagaaggactttatagacatgcgggtgaagcggcttctgaaggcgggtgtcatctctgccctggcttgcatggtgaaagcagatagtgccatcctcactgacca

SEQ ID NO: 365618 - DNA, 120 bp, Artificial Sequence
  ENSG00000141161_17 (sequence is synthesized)
gaccaaggagctgctggccagggtattcctggcactgtgtgacaacccaaaggaccgaggcaccattgtggctcaaggtggtggcaaggccctgattcccctggctttggagggcacaga

SEQ ID NO: 365619 - DNA, 120 bp, Artificial Sequence
  ENSG00000141161_18 (sequence is synthesized)
tgtgggcaaggtgaaggcagcccacgctctagcaaagatcgctgctgtctccaatccggacattgcttttcctggggagcgggtgtatgaggtggtgcggccccttgtaagactcttgga

SEQ ID NO: 365620 - DNA, 120 bp, Artificial Sequence
  ENSG00000141161_19 (sequence is synthesized)
cacacagagggatgggcttcagaactatgaggctctcctaggcctcaccaacctgtctgggcggagtgacaaactccggcagaagatctttaaggagagggccttgccagacatcgagaa

SEQ ID NO: 365621 - DNA, 120 bp, Artificial Sequence
  ENSG00000141161_20 (sequence is synthesized)
ctacatgtttgagaatcatgatcagctgcggcaggcggccaccgagtgcatgtgcaacatggtgctccacaaggaggtacaggaaaggttcttggctgacgggaatgaccggctgaagct

SEQ ID NO: 365622 - DNA, 120 bp, Artificial Sequence
  ENSG00000141161_21 (sequence is synthesized)
ggtggtgctgctctgcggggaggatgatgataaggtgcagaatgcggctgcaggggctctggccatgctgacagcagcacacaagaaactgtgcctcaagatgactcaagtgacaaccca

SEQ ID NO: 365623 - DNA, 120 bp, Artificial Sequence
  ENSG00000141161_22 (sequence is synthesized)
gtggttggagatcctccagcggctttgcctgcacgaccagctgtctgtccaacaccggggcctggtcattgcctacaacctactggcagccgatgctgagctggccaagaagctggtgga

SEQ ID NO: 365624 - DNA, 120 bp, Artificial Sequence
  ENSG00000141161_23 (sequence is synthesized)
ggagccagatgagaagaaggcagaagtggttcagacagcccgagaatgtctcatcaagtgcatggattatggtttcattaaaccagtgtcttagacagcgaccctcagggatgctgggag

SEQ ID NO: 365625 - DNA, 120 bp, Artificial Sequence
  ENSG00000141161_24 (sequence is synthesized)
tggtcctgtactgtgcagagtcctgggttggttgggttctcctgaagagtcaggtcatctagggatcatagcagtgacaatgaagtctcaatataaaggaaagacttgattgttctctga

SEQ ID NO: 365626 - DNA, 120 bp, Artificial Sequence
  ENSG00000141161_25 (sequence is synthesized)
gttgtgagtcttctcctttgtcctgacagagtttggatgtttcactctctctcttgcttcctgtctccttatatttgtcatgtttcagaaattcccagaataattttcacccatgattag

SEQ ID NO: 365627 - DNA, 120 bp, Artificial Sequence
  ENSG00000141161_26 (sequence is synthesized)
aaataggttggatcattctttctgtacccattctgaaggccaggataataggttgaagttctttatattttggaaaatggattttgtggtaaggtaggaactaacgggtgtgtgcatata

SEQ ID NO: 365628 - DNA, 120 bp, Artificial Sequence
  ENSG00000141161_27 (sequence is synthesized)
aaggttaatgctgttgtatttggatgctgatctgtgctgttttcatgacctctctcccacactatttgaatcagtctgttcagaactgtgtgtttcacctgcagtgctctgtcccagtcc

SEQ ID NO: 365629 - DNA, 120 bp, Artificial Sequence
  ENSG00000141161_28 (sequence is synthesized)
catgcccattcccatcacttcactgtgatggaaatagagtttatgttcaacagtggggcatgacctctgcaatttgcttgggaaagtcttccaagcaagatggacatgatgaatacaaat

SEQ ID NO: 365630 - DNA, 120 bp, Artificial Sequence
  ENSG00000141161_29 (sequence is synthesized)
aagatctactcaaagtacttcaaacaaaaaataaataattcattggctcatgtatcttggccacccagggaaggtctgacattgttagttagatccagagtttcaaatgtcatcaccatg

SEQ ID NO: 365631 - DNA, 120 bp, Artificial Sequence
  ENSG00000141161_30 (sequence is synthesized)
gatgtgtctttttctctctctcatttcccctccccatatcttgtcttttatttattataggtttgtctcattccctggcaggctctctccctgtgataggaaagagagtccccagcagcc

SEQ ID NO: 365632 - DNA, 120 bp, Artificial Sequence
  ENSG00000141161_31 (sequence is synthesized)
ccagggtgacatagttgttatagttcattatggaatagaagagagaagagcattctcaataacccggcaaagttcccagggatgactctgatatgtctatgtctcaggtcacatttccat

SEQ ID NO: 365633 - DNA, 120 bp, Artificial Sequence
  ENSG00000141161_32 (sequence is synthesized)
ctatgaaccaatcatattcagaggtggaatgctaattggccaggcctgggtcatatatacaagtctagggaagaaatgagcttcatccctgtccaattgacatggactgattaggggtat

SEQ ID NO: 365634 - DNA, 120 bp, Artificial Sequence
  ENSG00000141161_33 (sequence is synthesized)
taatggaagaggtgtgccaccacaaaagaatgtaccctgggcagatcaaagaacatattctgtatgtcaggcttggccacaaaagaatgacacaagtaatatgctgtagatcagaacctc

SEQ ID NO: 365635 - DNA, 120 bp, Artificial Sequence
  ENSG00000141161_34 (sequence is synthesized)
tctgctaatattgcctttttagcatggttaagatagctaagatctagtactgtcactccagtatgtcccaattctacctacgtttattgaagggtcaacagttctgatctcagcattggg

SEQ ID NO: 365636 - DNA, 120 bp, Artificial Sequence
  ENSG00000141161_35 (sequence is synthesized)
taaagggtgggacattcagatttacggtccttgataaaaacaatttacaacgttccgttgtgtaataaatgtaagtgtacatatgcctgggacatcagctggaaaagggacagactatca

SEQ ID NO: 365637 - DNA, 120 bp, Artificial Sequence
  ENSG00000141161_36 (sequence is synthesized)
gagagttgcactgttgcggtatgggccaaatccaacataatacccgctgtacctctagagaactaaaaccttaatttctcagatcttttctgcactaatggtctttacatacagcctaca

SEQ ID NO: 365638 - DNA, 120 bp, Artificial Sequence
  ENSG00000141161_37 (sequence is synthesized)
ttttaactaactcttgcatgggcttgtttcacagcaggaaactatattcatcatatccttattatgatagagaatgacaacattcaaaagggtgtggtgcttctgaaaatatacacaata

SEQ ID NO: 365639 - DNA, 120 bp, Artificial Sequence
  ENSG00000141161_38 (sequence is synthesized)
aatggcatgatttgacctctgtcaaattcttctttcctgctttcctcatatgtgggcttgagtgggtgtatttagctcctttaaaggaaactctttcacaggcagggccacactcttact

SEQ ID NO: 365640 - DNA, 120 bp, Artificial Sequence
  ENSG00000141161_39 (sequence is synthesized)
cacactcttactcgttttgatctcatgaggttacatctgccagtggcgttcagggccagttagataaagttcatcttgtttggattggagagactttttttttttttttttttgagacag

SEQ ID NO: 365641 - DNA, 120 bp, Artificial Sequence
  ENSG00000141161_40 (sequence is synthesized)
taacctaggctcaagtgcagtgcagtggtgcagtcatggctcaccgcagccttggtctcctgggctcaagtgatctttctacttcagcctcctcaatagctgggactacaggcacacacc

SEQ ID NO: 365642 - DNA, 120 bp, Artificial Sequence
  ENSG00000141161_41 (sequence is synthesized)
agacagggtctcactatgttgcccagtctgggagaccacattctttaacatgaatattttgtaaatagtccaagaagatctagaggaaagctgaattccttcatctgatttttgccactg

SEQ ID NO: 365643 - DNA, 120 bp, Artificial Sequence
  ENSG00000141161_42 (sequence is synthesized)
ggaaagctgaattccttcatctgatttttgccactgggctgcctcccattgtctggctaagtcttcatgggaggcctttaagaaaagctgtgacaaatacctttgtttcccactgcctag

SEQ ID NO: 365644 - DNA, 120 bp, Artificial Sequence
  ENSG00000141161_43 (sequence is synthesized)
gttacataagtagttggcttttccagcctagactcttatattgttgcttgtaagagggcccttctttgcagatttcttttttttttcatctatgctttcaaataggcagatgctagcctg

SEQ ID NO: 365645 - DNA, 120 bp, Artificial Sequence
  ENSG00000141161_44 (sequence is synthesized)
agatcatctctttattgaggtagtttgcccaaaaacagcaaggaacagccaatacctgccaactttctaggtttttccaaccaattctcttacagaaaatctataaatatcttagaggta

SEQ ID NO: 365646 - DNA, 120 bp, Artificial Sequence
  ENSG00000141161_45 (sequence is synthesized)
tgtttcttagtttcccaacatataatgggaaaattcatcatttatattattacttttaactgaagtatgttgttatcagagaacttggtctgtgtcatattaatcctttgccatttgaga

SEQ ID NO: 365647 - DNA, 120 bp, Artificial Sequence
  ENSG00000141161_46 (sequence is synthesized)
agcatacagttttaaagtttatatctccaaaaggatattttgtaaaaatttaacccctttgactcttagtcttctcatttgtgaaaggtaaataataaagaatttctgttcctagtaaga

SEQ ID NO: 365648 - DNA, 120 bp, Artificial Sequence
  ENSG00000141179_0 (sequence is synthesized)
ctaagggtgtccgcggcctgccctccaggcggaggagcccggactgcggaaggatggagctggccgccggaagcttctcggaggagcagttctgggaggcctgcgccgagctccagcagc

SEQ ID NO: 365649 - DNA, 120 bp, Artificial Sequence
  ENSG00000141179_1 (sequence is synthesized)
ccgctctggccggggccgactggcagctcctagtggagacctcgggcatcagcatctaccggctgctggacaagaagactggactttatgagtataaagtctttggtgttctggaggact

SEQ ID NO: 365650 - DNA, 120 bp, Artificial Sequence
  ENSG00000141179_2 (sequence is synthesized)
gctcaccaactctactggcagacatctatatggactcagattacagaaaacaatgggaccagtatgttaaagaactctatgaacaagaatgcaacggagagactgtggtctactgggaag

SEQ ID NO: 365651 - DNA, 120 bp, Artificial Sequence
  ENSG00000141179_3 (sequence is synthesized)
tgaagtacccttttcccatgtccaacagagactatgtctaccttcggcagcggcgagacctggacatggaagggaggaagatccatgtgatcctggcccggagcacctccatgcctcagc

SEQ ID NO: 365652 - DNA, 120 bp, Artificial Sequence
  ENSG00000141179_4 (sequence is synthesized)
ttggcgagaggtctggggtgatccgggtgaagcaatacaagcagagcctggcgatcgagagtgacggcaagaaggggagcaaagttttcatgtattacttcgataacccgggtggccaaa

SEQ ID NO: 365653 - DNA, 120 bp, Artificial Sequence
  ENSG00000141179_5 (sequence is synthesized)
ttccgtcctggctcattaactgggccgccaagaatggagttcctaacttcttgaaagacatggcaagagcctgtcagaactacctcaagaaaacctaagaaagagaactgggaacattgc

SEQ ID NO: 365654 - DNA, 120 bp, Artificial Sequence
  ENSG00000141179_6 (sequence is synthesized)
atccatgggttgatgtctctggaagtgcaaccacccaatgtctctggaagtgccacctggaagtgccacctggaagtgtctctggaagagcacccaccactgttcagccttcccctgctg

SEQ ID NO: 365655 - DNA, 120 bp, Artificial Sequence
  ENSG00000141179_7 (sequence is synthesized)
tttctgtcttcagaggcctacacactaccacatcctttctaagcatgtttgcctgacatccagctcactcgtctgcttcctttctcgctccccccatcctgggctgggctgccttcttct

SEQ ID NO: 365656 - DNA, 120 bp, Artificial Sequence
  ENSG00000141179_8 (sequence is synthesized)
ggggaagtcttcagtagggaacacgatcattccattgtgcaattttacggggatgggtgggcggagggacacaacaaaatttaagaatgactatttgggcgggctggctcttttgcagct

SEQ ID NO: 365657 - DNA, 120 bp, Artificial Sequence
  ENSG00000141179_9 (sequence is synthesized)
tgtgatttcttccagcttgggaggggctgctggaagtggcatttcgttcagagctgactttcagtgcacccaaactggatgacgtgccaatgtccatttgccttatgctttgtggagctg

SEQ ID NO: 365658 - DNA, 120 bp, Artificial Sequence
  ENSG00000141179_10 (sequence is synthesized)
attaggctgggatttgaggtgataatccagtaagtctttcctcgttcctacttgtggaggatcagtagctgttatgatgccagaccatttggagaagtatcagaggcctgaccggacaca

SEQ ID NO: 365659 - DNA, 120 bp, Artificial Sequence
  ENSG00000141179_11 (sequence is synthesized)
taatatgacaaccacatttttcctcatcatccatgaggaaatggatgatttctcttttccatatgtcactgggggaaaggctgcctgtacctctcaagctttgcattttactggaaactg

SEQ ID NO: 365660 - DNA, 120 bp, Artificial Sequence
  ENSG00000141179_12 (sequence is synthesized)
aggcgtcaagatggctgtggcagctagcaaaagcaaagatgctttgtgcatagccttgtgaaaaagtatctttctatgcaataagatgaattttcctcccagaatatttagaaatgtaga

SEQ ID NO: 365661 - DNA, 120 bp, Artificial Sequence
  ENSG00000141179_13 (sequence is synthesized)
agggataacagttcacagccaggtaaaatttaactggtggcttaatgactctgcacctttttctcaggaattctgcctaagttgtctgccttttctaccaccaaaaagacttttagtttt

SEQ ID NO: 365662 - DNA, 120 bp, Artificial Sequence
  ENSG00000141179_14 (sequence is synthesized)
ctatgctttctcctgaattttggtagggtaaggtatttctatgtcaaaggcacagccttgatgatctcagggaaaaattttaatcactgtgtataatgatactgaaccttgattaataac

SEQ ID NO: 365663 - DNA, 120 bp, Artificial Sequence
  ENSG00000141179_15 (sequence is synthesized)
agaaattcaggatgtaaagccacagaatgggatttattaatgtgggatacctcagactgtttgttttctttctgggaagaaaagtgtgttctataatgaataaatatagagtggttttta

SEQ ID NO: 365664 - DNA, 120 bp, Artificial Sequence
  ENSG00000141179_16 (sequence is synthesized)
gctcattaactgggccgccaagggagggaactgcagtggtagtttgtatcactagagactgcccaggagcctggcattatggggaccatcagcctgctttgcacaagatctactactaga

SEQ ID NO: 365665 - DNA, 120 bp, Artificial Sequence
  ENSG00000141179_17 (sequence is synthesized)
gagctcaacagattccttggaagagtgaaaaagcacatcaactttggagtcaaacagacgcaatttcaaatcctggctctgctactgactgtcttgttttatttaaggaagccatgcatt

SEQ ID NO: 365666 - DNA, 120 bp, Artificial Sequence
  ENSG00000141179_18 (sequence is synthesized)
tcttcctttttaaaaatgaagatagatgtcttctactgcatagagggggagtaaataagacaatatttaggaaaagtcttgcccagtgctcaacattaactaaataataatatatcctgc

SEQ ID NO: 365667 - DNA, 120 bp, Artificial Sequence
  ENSG00000141179_19 (sequence is synthesized)
tccttgatccccaatccttaccattttctaattcagtaaagcaagtgctttcatttctttggaagaatgtaacaatccagcccaagcccatttcttgtgttttcttttttccagaaacac

SEQ ID NO: 365668 - DNA, 120 bp, Artificial Sequence
  ENSG00000141179_20 (sequence is synthesized)
tgtttcagaaacatcttcgctttttcctagaaaaagctaacatataaggcctttttgcaacagaagttcctgttgactggtcttacttttgtcctcagtcctactttttgtcatcatctg

SEQ ID NO: 365669 - DNA, 120 bp, Artificial Sequence
  ENSG00000141179_21 (sequence is synthesized)
caacaacattctgttgaaatccagttagggagcctattcatttttgttcgtcctaaagccaacattgtttaccttctgccacatcccaaagaatcaagagtgaccactgtgaagacatag

SEQ ID NO: 365670 - DNA, 120 bp, Artificial Sequence
  ENSG00000141179_22 (sequence is synthesized)
tctaccggctgctggacaaggtagcggccaacccgctggaggaccgcggggcctagaatgcgccggggtcgacctccccgcagggagtgcggggcggcagtcgcggaagggacaggggcg

SEQ ID NO: 365671 - DNA, 120 bp, Artificial Sequence
  ENSG00000141179_23 (sequence is synthesized)
cgtcttctccggctcaggaaggagctccgcccggaccctgtctcaagctctggagctagcgcaggggcggtgcctccaagtgactgccgtgcagatccaggggagttggaaggtcacagg

SEQ ID NO: 365672 - DNA, 120 bp, Artificial Sequence
  ENSG00000141179_24 (sequence is synthesized)
acaggcatgagccaccacacccggccaatcagagcagaaccaagcgggaagctcagaatcagagagacctcatcaagtttttggcaaacccaaacattctgcaatagattgagtggaagg

SEQ ID NO: 365673 - DNA, 120 bp, Artificial Sequence
  ENSG00000141179_25 (sequence is synthesized)
aaggaagaggaaggacataaagataaagacatgagaaaagaagctgagtctttgttgaaacactgaaatgggtgcaggtatcatttcttatctcattgttttttctcataagccctgaat

SEQ ID NO: 365674 - DNA, 120 bp, Artificial Sequence
  ENSG00000141179_26 (sequence is synthesized)
taattcatttattcacagtattttcgcagatgtgaaattcacatattattcacagatgtgttcactatcatctatgtactggaaagatagcagtgaataaaatggacaaaattacctgcc

SEQ ID NO: 365675 - DNA, 120 bp, Artificial Sequence
  ENSG00000141179_27 (sequence is synthesized)
caacccagtcatagtggaatggaactatgaaactagccaaaggcacataaagcctttagtcaagactcttggttgcaagtaacagaaagccaactaaagacagtgtaagaagagaaaaag

SEQ ID NO: 365676 - DNA, 120 bp, Artificial Sequence
  ENSG00000141179_28 (sequence is synthesized)
gagtttattagttcatggcattgaaaaaagtccaggggtttctaactttgaggacagctgcaacagggaacttaaataatttcatcaggattgtttctttctccatctgtagactctgtt

SEQ ID NO: 365677 - DNA, 120 bp, Artificial Sequence
  ENSG00000141179_29 (sequence is synthesized)
ttcttctgtgttgacctaattcctaggcagattcttatgtcatggccaagatgtctgccagaagatccagatttatattctaaccatatgaataaccccagaggaaggagaattctactt

SEQ ID NO: 365678 - DNA, 120 bp, Artificial Sequence
  ENSG00000141179_30 (sequence is synthesized)
ttctagggatgacagccagatgccaggattggctcttgtcagctcagcttggagtttgtgcttattttctgtggacattcatcatggttttgggcaacttagtgttctcaaatactcttc

SEQ ID NO: 365679 - DNA, 120 bp, Artificial Sequence
  ENSG00000141179_31 (sequence is synthesized)
ctatttagggggcagtgggatgcttacctatccaagggaacagccagacactgtctgtccaggcctcccttgcagccaagatacagtcatgtgacatagactctgccaataagacccaca

SEQ ID NO: 365680 - DNA, 120 bp, Artificial Sequence
  ENSG00000141179_32 (sequence is synthesized)
tgtggcttcaatttggaaaagagccatgtgaggaagcaggcagcatggaagatccatttttcagtgaccagtgatggcatctgactttagggaaaacaactgctgagtctctgatgtttg

SEQ ID NO: 365681 - DNA, 120 bp, Artificial Sequence
  ENSG00000141179_33 (sequence is synthesized)
ctccccaacatcaacagctttcactctgggttctcatccagtggaagcagcagttaggctttgctggaacaatcttgaggttggaaatctcactctggtccatccgagagctttactaaa

SEQ ID NO: 365682 - DNA, 120 bp, Artificial Sequence
  ENSG00000141179_34 (sequence is synthesized)
tcactttttgctctcaacttgctagagtgactaactacgactctggacagatctgccatccctgaattcgtcaccatggccgtgtcttgctcattttcccagccctgaaattactgcaga

SEQ ID NO: 365683 - DNA, 120 bp, Artificial Sequence
  ENSG00000141179_35 (sequence is synthesized)
gtcagtcttgcgaaaccatgcagctgagaagtaggggaagggtgatgccctgaaggaaaattgagatgctcaaggggcgatcaatgctgagcatgtaaaagcaacagatgtccacctctc

SEQ ID NO: 365684 - DNA, 120 bp, Artificial Sequence
  ENSG00000141179_36 (sequence is synthesized)
cctttcttttaaggactctcatcagcctcctgtgaccttaatgggctggcacactccttaatctacagtgtgcttctaatagattttctttcaaaacctaaattatccctccttaccatc

SEQ ID NO: 365685 - DNA, 120 bp, Artificial Sequence
  ENSG00000141179_37 (sequence is synthesized)
tcctccagggactttgggctcctttaactggaggtagaaagaagtttactgcacagcacagtctggggacagagggtgtgcatgccattaaatttctttgctatctccctccaagagttg

SEQ ID NO: 365686 - DNA, 120 bp, Artificial Sequence
  ENSG00000141179_38 (sequence is synthesized)
gctgctgtttgcacataatagtaagacggaaggattattagggaaatttggtcaccctagctgtggcatagtgcaaagaaacatgggagagaagaaagaaacttggggtaagccatagtt

SEQ ID NO: 365687 - DNA, 120 bp, Artificial Sequence
  ENSG00000141179_39 (sequence is synthesized)
ctgctgatctctaactattcaagaaggacgttgctcattctggaaccttcatatccgacctatgaatgtgctagactgggtgactccgttccaggttagctgtaatggatcaaggaatcc

SEQ ID NO: 365688 - DNA, 120 bp, Artificial Sequence
  ENSG00000141179_40 (sequence is synthesized)
taaaggggaattaaagggctcagaagcaaaactattggtactctagtgacatctggtggttatcctgaatttaaaacctctgactatttttttgatgtctgattttgtttcattgcattc

SEQ ID NO: 365689 - DNA, 120 bp, Artificial Sequence
  ENSG00000141179_41 (sequence is synthesized)
tatcaagaatattgattatgctatagaatggccaagatttgttggcttcttttatttgtgctgtgtttttctatccactagactctgtccctgggcaataagctttcagtggaaattaat

SEQ ID NO: 365690 - DNA, 120 bp, Artificial Sequence
  ENSG00000141179_42 (sequence is synthesized)
cggtttgacttttttctagaattttataccttatgagttagtggtttatcataacctaagaggtcatctttttttttttttttcttgagacatggtgtcattctgtcacccaggctggag

SEQ ID NO: 365691 - DNA, 90 bp, Artificial Sequence
  ENSG00000141179_43 (sequence is synthesized)
ctgggactacagacatgcaccaccatacctggctgatttttttgcttttttttttttttatatatagagatggggtttcaccatatgagc

SEQ ID NO: 365692 - DNA, 120 bp, Artificial Sequence
  ENSG00000141179_44 (sequence is synthesized)
acaggcatgagccaccatgcttggcctaagaggtcatacccttattagttgtagctaaaaaggcttccagatgcattaacttcttttgctttcctttagaactctatgaacaagaatgca

SEQ ID NO: 365693 - DNA, 120 bp, Artificial Sequence
  ENSG00000141179_45 (sequence is synthesized)
actgaaatgggtgcagactcttcaaaatactcttcagtggctttgtttccaaatgaaaaccagaaaaatgatgctggaatttcatagaggcagcggcggatggaagagggctcctcctgt

SEQ ID NO: 365694 - DNA, 120 bp, Artificial Sequence
  ENSG00000141194_0 (sequence is synthesized)
aggaacgtgggggaagatcctatggaaccacagaacaccacacaggtatcaatgtttgtcctcttagggttttcacagacccaagagctccagaaattcctgttccttctgttcctgtta

SEQ ID NO: 365695 - DNA, 120 bp, Artificial Sequence
  ENSG00000141194_1 (sequence is synthesized)
gtctatgttaccaccattgtgggaaacctccttatcatggtcacagtgacttttgactgccggctccacacacccatgtattttctgctccgaaatctagctctcatagacctctgctat

SEQ ID NO: 365696 - DNA, 120 bp, Artificial Sequence
  ENSG00000141194_2 (sequence is synthesized)
tccacagtcacctctccaaagatgctggtggacttcctccatgagaccaagacgatctcctaccagggctgcatggcccagatcttcttcttccaccttttgggaggtgggactgtcttt

SEQ ID NO: 365697 - DNA, 120 bp, Artificial Sequence
  ENSG00000141194_3 (sequence is synthesized)
tttctctcagtcatggcctatgaccgctacatagccatctcccagcccctccggtatgtcaccatcatgaacactcaattgtgtgtgggcctggtagtagccgcctgggtggggggcttt

SEQ ID NO: 365698 - DNA, 120 bp, Artificial Sequence
  ENSG00000141194_4 (sequence is synthesized)
ataacttctactgtgatgttccccaagtactgagacttgcctgcactgatacctccctcctggagttcctcatgatctccaacagtgggctgctagttatcatctggttcctcctccttc

SEQ ID NO: 365699 - DNA, 120 bp, Artificial Sequence
  ENSG00000141194_5 (sequence is synthesized)
tgatctcttatactgtcatcctggtgatgctgaggtcccactcgggaaaggcaaggaggaaggcagcttccacctgcaccacccacatcatcgtggtgtccatgatcttcattccctgta

SEQ ID NO: 365700 - DNA, 120 bp, Artificial Sequence
  ENSG00000141194_6 (sequence is synthesized)
tctatatctatacctggcccttcaccccattcctcatggacaaggctgtgtccatcagctacacagtcatgacccccatgctcaaccccatgatctacaccctgagaaaccaggacatga

SEQ ID NO: 365701 - DNA, 120 bp, Artificial Sequence
  ENSG00000141194_7 (sequence is synthesized)
aagcagccatgaggagattaggcaagtgcctagtaatttgcagggagtaaactttaagtaagttgactttaaatgacaaatttctctggatttttattttcccacatgaaaaatggagga

SEQ ID NO: 365702 - DNA, 120 bp, Artificial Sequence
  ENSG00000141194_8 (sequence is synthesized)
aggagaagaatggagctacaggagaagagtgacctgggagatgggaggctctaagtcctcttggccactgtgggctggaggaaggtgatggcctcattgtccttcccatggacaaatcag

SEQ ID NO: 365703 - DNA, 120 bp, Artificial Sequence
  ENSG00000141194_9 (sequence is synthesized)
cacgacaaagcctatcctctcacggcagtctggcccatcccagcaccctgtcctccattaagcaatcacacattcttttgggaaccaactatgagaaagggtctgtgtgtaccacgtact

SEQ ID NO: 365704 - DNA, 120 bp, Artificial Sequence
  ENSG00000141194_10 (sequence is synthesized)
gtgtaatacttaacatattggatttgcactgaaattacaacacatgtgaggaacagagccatcctcatgaaaaaataccaaggcatagcaacattatggaagagctaattactcttgaac

SEQ ID NO: 365705 - DNA, 120 bp, Artificial Sequence
  ENSG00000141194_11 (sequence is synthesized)
cttgaaggaagggtagaattcagacaggtgaacaggacagaaaagcaattcagatgcggcactgactggatgaaggcactgagacctgagggaccgaagaagagataagtttggctgaag

SEQ ID NO: 365706 - DNA, 120 bp, Artificial Sequence
  ENSG00000141194_12 (sequence is synthesized)
acaaatcagattacacttatatttcttgaggacctagtgctgtgtcaagtactgtgttaagcacttccacgctttttttctttttttttttttttagatggagccttgctctgtcaccca

SEQ ID NO: 365707 - DNA, 120 bp, Artificial Sequence
  ENSG00000141194_13 (sequence is synthesized)
acacttccacagttttatctcattacttttcatgaaaccgacagtagatatattattattgttgttaaacagttttacaaatgagaaaacgcagagagaagtgacttgctcaaaggtgaa

SEQ ID NO: 365708 - DNA, 120 bp, Artificial Sequence
  ENSG00000141194_14 (sequence is synthesized)
cagtaagtgagtggcagagcttgccctggaacctggttcttcttgactccaagtttagaggcaagaaataggaatgggatttgaaactcaagagtttcctgcgaccacaagagaaaacct

SEQ ID NO: 365709 - DNA, 120 bp, Artificial Sequence
  ENSG00000141194_15 (sequence is synthesized)
agagaggtcttcgtctatagagaagtatctctgatgaatggtcaactgcttcatcttaactctgggacagttacattcttttctgctccccacctccctgcctcattccccactgtggaa

SEQ ID NO: 365710 - DNA, 120 bp, Artificial Sequence
  ENSG00000141194_16 (sequence is synthesized)
tttagaaagttatctcgccctccctcctcccccacaaaaaaagtttgagtcgccgctgcgggttgctagcggagtcgcgcgtcgggagctacgtagggcagggaaggcatggcttctgtt

SEQ ID NO: 365711 - DNA, 120 bp, Artificial Sequence
  ENSG00000141194_17 (sequence is synthesized)
ccaatgagaaggggccagcggtggcggtcgggccaggtccggggcctggggacgccgaggcggccgcggaggagcgccgcgtcaaggtctccagcctgccctacagtgtggatgcgctcg

SEQ ID NO: 365712 - DNA, 120 bp, Artificial Sequence
  ENSG00000141194_18 (sequence is synthesized)
tgtcggacaagaagccgcccaaggaggcatccccagtgccggccaaaagcgcctcttccggggccaccctgcggctactgctgctgccggggcacggcgctcgggaagcgcacagccccg

SEQ ID NO: 365713 - DNA, 120 bp, Artificial Sequence
  ENSG00000141194_19 (sequence is synthesized)
ggccgctgatcaagcccttcgagaccgcctcggtcaagtgggaaaactccctaagacggagcggcgtggatgcaggaaccctgctgataattcgccgccgccaagacacgtgagccctac

SEQ ID NO: 365714 - DNA, 120 bp, Artificial Sequence
  ENSG00000141194_20 (sequence is synthesized)
cacctgcaccctgagaaaacacaagaccaatccgaagccgcgcacagcctttaccacgtcccagctcctcgctctggagggcaagttgctccagaaacagtacctctccattgcagaggg

SEQ ID NO: 365715 - DNA, 120 bp, Artificial Sequence
  ENSG00000141194_21 (sequence is synthesized)
tgcggacttctccagctctccgaacctcacggagactcaggtcaaaatcttgttccagaaccgaagggccaagacgaaaagactgcaggagtcagaactggaaaagctgaaaatggctgc

SEQ ID NO: 365716 - DNA, 120 bp, Artificial Sequence
  ENSG00000141194_22 (sequence is synthesized)
aaaacctatgctaccctccagcttcagtctccctttccccatcagctcgcccctgcaggcagcgtccatatacgcagcatcctacccgttccatagacctgtgcttcccatcccgcccgt

SEQ ID NO: 365717 - DNA, 120 bp, Artificial Sequence
  ENSG00000141194_23 (sequence is synthesized)
gggactctatgccacgccagtgggatatggcatgtaccacctgtcctaaggaagaccagatcaatagactccatgatggatgtttgtttcaaagggtttcctctccctctccaagaaggc

SEQ ID NO: 365718 - DNA, 120 bp, Artificial Sequence
  ENSG00000141194_24 (sequence is synthesized)
aggaccagccaatactcctgttctgcaaaccctgagtgcaccaccctaagcggctaggccggcagggccacacgacacagctgaagtttgttctttaggcggaggcaccaagccttgttt

SEQ ID NO: 365719 - DNA, 120 bp, Artificial Sequence
  ENSG00000141194_25 (sequence is synthesized)
tcttggtgtaatcttccaggtgcccccttctcctttcacaaagattggctctgatggtttttatgtataaatatatatataataaaatataatacatttgtatacagtagatgtaaaaat

SEQ ID NO: 365720 - DNA, 120 bp, Artificial Sequence
  ENSG00000141194_26 (sequence is synthesized)
tcaaattattttaaaaggcaaaatttatatacatatgtgcttttttcctatatgtcaccttcttaaagagactgtgtaagtccatttgttgtgttttcttaaagagggagacaaattatt

SEQ ID NO: 365721 - DNA, 120 bp, Artificial Sequence
  ENSG00000141194_27 (sequence is synthesized)
tgcaaaacttgctaaagtcaatgattttgatgggatgattgacttctgcttatggaaaacaaatattagaattggacataatgcacatagaaagtattagatatggagaggtttttcaaa

SEQ ID NO: 365722 - DNA, 120 bp, Artificial Sequence
  ENSG00000141194_28 (sequence is synthesized)
gtgaaggggacacatcacatttctgcattttacttgcattaaaagaaacctttttatatactaccatatttgttcctatctctccccacgcccaccccccccccacacacacatttttac

SEQ ID NO: 365723 - DNA, 120 bp, Artificial Sequence
  ENSG00000141194_29 (sequence is synthesized)
agttttacctttttgaagaattttttttttgtaagaccaataaccgggatgagaagaatcctgagaatgcctggaggtgaggtagaaaattagaaatacttcctaattcttctcaaggct

SEQ ID NO: 365724 - DNA, 120 bp, Artificial Sequence
  ENSG00000141194_30 (sequence is synthesized)
gttgctttacttcatttcagataattggagagtaaaaagttaaagcctgttgggaggagttgatggtttctgagaaatactaggtactttcatcctcacagattgcaaagattatttggg

SEQ ID NO: 365725 - DNA, 120 bp, Artificial Sequence
  ENSG00000141194_31 (sequence is synthesized)
tgggggggtacagtaattttctgcttaaaaaatgagtaccttgtaaccattacctgtatgctaaatattcttgaacaattggtagatccagaaagaaaaaaaattatgctttctctgtgt

SEQ ID NO: 365726 - DNA, 120 bp, Artificial Sequence
  ENSG00000141194_32 (sequence is synthesized)
gtgtacctgctgtatatgctaaacttattagaaaattttatatactttttaacatgtccagggcagaagataaagccatgttttgacttggtgaaaatggagttgccaaacagcccatta

SEQ ID NO: 365727 - DNA, 120 bp, Artificial Sequence
  ENSG00000141194_33 (sequence is synthesized)
agctccctggtatttcaccttcctctccatctctcccatccctccagtatgcctttacccctttgaaagggtgccttgtacaattgtatatattttattgaagagttattatatcttatt

SEQ ID NO: 365728 - DNA, 120 bp, Artificial Sequence
  ENSG00000141194_34 (sequence is synthesized)
ctgaattaaattaaacatgttttattgcaaaaaaaagaagagaaagttatctcacttttagcattgtctaaatagttccccaaaaggcatttgccctttgtttttgttccatctttacta

SEQ ID NO: 365729 - DNA, 120 bp, Artificial Sequence
  ENSG00000141194_35 (sequence is synthesized)
aatactctttggataatcttcacattgtgctacttagctgaaatggcttaaatatggccccttcaaaattcaggtattgaaatttaatgttcagtgtgatggtgttaagaggcgaagcct

SEQ ID NO: 365730 - DNA, 120 bp, Artificial Sequence
  ENSG00000141194_36 (sequence is synthesized)
ttaagaggtgattaggccatgaggattcctcccttattaatgggattaaggcctttataaaagagacttcatgcagcattaggctcgctagccctttggtcttctgccatatgaggacac

SEQ ID NO: 365731 - DNA, 120 bp, Artificial Sequence
  ENSG00000141194_37 (sequence is synthesized)
agcattcctcccctctggaggatgcagcaacaaggtgccatcttggaagcagagaatagccctcaccagacaaccaaacctgttggaaccttaatcttggactgtccagcctccagaact

SEQ ID NO: 365732 - DNA, 120 bp, Artificial Sequence
  ENSG00000141198_0 (sequence is synthesized)
cctctggcgctaccatggcgtttggcaagagtcaccgggatccctacgcgacctccgtgggccacctcatagaaaaggctacatttgctggagttcagactgaagattggggccagttca

SEQ ID NO: 365733 - DNA, 120 bp, Artificial Sequence
  ENSG00000141198_1 (sequence is synthesized)
tgcacatctgtgacataattaacactacccaggatgggccaaaagatgcagtgaaagctttgaagaaaaggatttccaaaaactacaatcataaagaaatccaacttaccttgtcactta

SEQ ID NO: 365734 - DNA, 120 bp, Artificial Sequence
  ENSG00000141198_2 (sequence is synthesized)
ttgacatgtgtgtgcagaactgtggtccaagtttccagtctctgattgtgaagaaggaatttgttaaagagaatttagttaagctactgaatcccagatacaacttgccattagacattc

SEQ ID NO: 365735 - DNA, 120 bp, Artificial Sequence
  ENSG00000141198_3 (sequence is synthesized)
agaatagaatcttgaatttcattaagacttggtcacagggcttcccaggaggtgtggatgtaagcgaagtcaaagaagtatacctcgacctggttaagaaaggcgttcagtttcctccct

SEQ ID NO: 365736 - DNA, 120 bp, Artificial Sequence
  ENSG00000141198_4 (sequence is synthesized)
cagaagcagaggctgaaacagcaagacaagagactgctcaaatctcatcaaatcctccaacatctgtccctactgcaccagctctttcttctgtaattgctccaaagaactcgactgtta

SEQ ID NO: 365737 - DNA, 120 bp, Artificial Sequence
  ENSG00000141198_5 (sequence is synthesized)
cattggtcccagaacagattggaaaactgcacagtgaattggatatggtgaaaatgaatgtgcgagtgatgtccgccatattgatggagaatactcctgggtctgaaaaccatgaagaca

SEQ ID NO: 365738 - DNA, 120 bp, Artificial Sequence
  ENSG00000141198_6 (sequence is synthesized)
tagagcttctgcagaaactctataaaacaggtcgggagatgcaggagaggatcatggacctgcttgtggtggtggagaacgaagatgtaactgttgagctaattcaggtgaatgaggatt

SEQ ID NO: 365739 - DNA, 120 bp, Artificial Sequence
  ENSG00000141198_7 (sequence is synthesized)
tgaataatgctatccttggatatgagaggtttactagaaaccaacaaaggattttggagcaaaataagaaccagaaggaagccaccaatactaccagtgagccttctgccccatctcaag

SEQ ID NO: 365740 - DNA, 120 bp, Artificial Sequence
  ENSG00000141198_8 (sequence is synthesized)
atctcctcgacctaagtcccagtccccggatgcctagggccactctgggagaactcaacaccatgaataatcaactttcaggcttaaatttcagccttccaagttctgatgtaacaaaca

SEQ ID NO: 365741 - DNA, 120 bp, Artificial Sequence
  ENSG00000141198_9 (sequence is synthesized)
cccagtcttcatccacagatgaacttgctagccttggagaatacagagatacccccgtttgcccaaaggaccagccaaaacctcacctcaagccacgcatatgataattttctggaacat

SEQ ID NO: 365742 - DNA, 120 bp, Artificial Sequence
  ENSG00000141198_10 (sequence is synthesized)
tcaaattcagtgtttctacagccagttagtctacaaaccattgcagcagcaccatcaaaccagagtctgccacctttgcccagcaatcatccagcgatgacaaaaagtgatctccagcca

SEQ ID NO: 365743 - DNA, 120 bp, Artificial Sequence
  ENSG00000141198_11 (sequence is synthesized)
cctaattactacgaggtaatggagtttgatcccttagctcctgctgtcactacagaagctatttatgaagaaattgatgctcaccagcacaaaggagctcaaaatgatggtgactgagaa

SEQ ID NO: 365744 - DNA, 120 bp, Artificial Sequence
  ENSG00000141198_12 (sequence is synthesized)
gaaagtggatgatcagctcactaccacatcaaaggtgccaactctctaaaacgtagactctgtgcagctttgaagcctggaagacaatacctaccaacatgtcaaagccatggtggcaca

SEQ ID NO: 365745 - DNA, 120 bp, Artificial Sequence
  ENSG00000141198_13 (sequence is synthesized)
tttctgctataatgaagattaaatagaataacagttccaggataacactgattcctgacaacagcgtgagatttcaacagaacttgtttggaacaaatactcacttaaaacttcagcaga

SEQ ID NO: 365746 - DNA, 120 bp, Artificial Sequence
  ENSG00000141198_14 (sequence is synthesized)
agaaaaattacttagtccttaggccaaccaatttaactgcagtgtcatgtttcacaggccttcctacatttagaaatcgtcacacagctgtgataagagtagattattttactatgaaat

SEQ ID NO: 365747 - DNA, 120 bp, Artificial Sequence
  ENSG00000141198_15 (sequence is synthesized)
aattctgaatagatgaaagcataaaatgtgagaaactgaatgtattattcaggaagaatactgagtgccttcatttaactaaagttgaatgtaaaagtcaatttgcacttctttataatc

SEQ ID NO: 365748 - DNA, 120 bp, Artificial Sequence
  ENSG00000141198_16 (sequence is synthesized)
ctctggtttagaattataaattgttaaaaccttgataattgtcatttaattatatttcaggtgtcctgaacaggtcactagactctacattgggcagcctttaaatatgattctttgtaa

SEQ ID NO: 365749 - DNA, 120 bp, Artificial Sequence
  ENSG00000141198_17 (sequence is synthesized)
tgctaaatagcctttttttctctttttactgcaacttaatatttctatttagaacacagaaaatgaaaatatttagaataagttgtacatttgatgacaaataaatcactattaaaacaa

SEQ ID NO: 365750 - DNA, 120 bp, Artificial Sequence
  ENSG00000141198_18 (sequence is synthesized)
tgagtaaggaagttgataaacggcaacatctgaaatagctactcgccctgaataggcaggtggagaatattagttacacgtgggacaaatcccattatgagacatatcatcacaacaaga

SEQ ID NO: 365751 - DNA, 120 bp, Artificial Sequence
  ENSG00000141198_19 (sequence is synthesized)
atatttcattctagattttagaatcccaggttttggctcactttggtcaagaaaaattataaataattgagttacagataattaaatgttagcctcctggagtgcatggcaattggtttt

SEQ ID NO: 365752 - DNA, 120 bp, Artificial Sequence
  ENSG00000141198_20 (sequence is synthesized)
gacctctatattaaaattcacaagaccacggacataagtcaaaacaggtccccttcgtctccctagtcaccatctccagggctaaaaaacagacttgaaatgggtggcagttagactaca

SEQ ID NO: 365753 - DNA, 120 bp, Artificial Sequence
  ENSG00000141198_21 (sequence is synthesized)
ggaaacaggatctacaagcaccaggagctcatctatggctatctgacatcgcctggggacacctcactctctggcaggctcctgctggctggagattgttaacatcgccaatcagatgtt

SEQ ID NO: 365754 - DNA, 120 bp, Artificial Sequence
  ENSG00000141198_22 (sequence is synthesized)
aattgaatgcaaaggaataggaaataaattctggttctgaaggggcagctggaaaggtgttgggcttctcagattccaacctacattacaaagcaggcctaaagccaagcatactccttg

SEQ ID NO: 365755 - DNA, 120 bp, Artificial Sequence
  ENSG00000141198_23 (sequence is synthesized)
ccagaagaaacggaaagcccctctcccgtttttagaatcaggctggaaaacacggctcccagaaggtggggttagaaaacaagagcttgcgaggcggcgccctgtggtccctcgaggaaa

SEQ ID NO: 365756 - DNA, 120 bp, Artificial Sequence
  ENSG00000141198_24 (sequence is synthesized)
tagtagagagacaaagagggcctgctcctgggaagccctaaattcgaagccaatccttcctcctagacatgaccacaactttaaagggcagggcgcacacctcccctcccggatctctag

SEQ ID NO: 365757 - DNA, 120 bp, Artificial Sequence
  ENSG00000141198_25 (sequence is synthesized)
gacaaagggcagccaaagaggcgcagagaagaatgacaaggtgcccagcaagcggcaggatcaaagcctgggtctctaattcccaggctggagattctgggctgcctgctcctcctgcac

SEQ ID NO: 365758 - DNA, 120 bp, Artificial Sequence
  ENSG00000141198_26 (sequence is synthesized)
ggggcgaaaagcccacctgggatccgagcgggcggccgcgccactctcgcaggctccatacacccgccactacccgcctgtaccacctgcagccggcagcgcagcctcctcgcgggtccc

SEQ ID NO: 365759 - DNA, 120 bp, Artificial Sequence
  ENSG00000141198_27 (sequence is synthesized)
gaagccccgccctcgcgtccctgccccgcgcccagctcctcacgctcggtgcccgcgccccgcagcggcagcgcagaacgcaccgcctctgccagagcccgggaagcgctcgggcgaaga

SEQ ID NO: 365760 - DNA, 120 bp, Artificial Sequence
  ENSG00000141198_28 (sequence is synthesized)
acaccatgaataatcaactttcaggcttaagtaaataaacactcaggtcttttcagaccagcagaagagcttgatgttaaacagttctccttaattacgtgattaaataccacctaagaa

SEQ ID NO: 365761 - DNA, 120 bp, Artificial Sequence
  ENSG00000141198_29 (sequence is synthesized)
aaactcatcctactcacttagaatctcatggaattcacctggcctgctttgtagaagttgttcagcccaatggccaatacttaaagtctactgtgaacctacacactattatcattgggt

SEQ ID NO: 365762 - DNA, 120 bp, Artificial Sequence
  ENSG00000141198_30 (sequence is synthesized)
ttttctgctatacctcagcatcaggtaagggagtatctctgatgcaagcggagaaattcagggattacaaggtatgaactgagtggttgtgaaatgtagaaggaaaaacacaggctttaa

SEQ ID NO: 365763 - DNA, 120 bp, Artificial Sequence
  ENSG00000141198_31 (sequence is synthesized)
agtcagagaagtccaagttgaaatgccagttctgccacctctcagccacctaacttttgagagtctcactttataaaatgggaacaatgattgccttaaagggtggttgtcaaggttaac

SEQ ID NO: 365764 - DNA, 120 bp, Artificial Sequence
  ENSG00000141198_32 (sequence is synthesized)
aaactaatgtttataaaatgcattgtagcaaagcttacaatgcattttataaacatttataaaagagttacctatcttacctgttatcttctgctgtccttattcccagcaagggtttgg

SEQ ID NO: 365765 - DNA, 120 bp, Artificial Sequence
  ENSG00000141198_33 (sequence is synthesized)
caaattacaaaataaggatgatgaaaaatgctgaaatccagttttgtcaaattaaaagcagtttgtttttctcatatgtcatctgctgtttccggagtaaaaatattcagtatcactgaa

SEQ ID NO: 365766 - DNA, 120 bp, Artificial Sequence
  ENSG00000141198_34 (sequence is synthesized)
ggatttcctgggcccggccctctggcgctaccatggcgtttggcaagagtcaccgggatccctacgcgacctccgtgggccacctcataggctacatttgctggagttcagactgaagat

SEQ ID NO: 365767 - DNA, 120 bp, Artificial Sequence
  ENSG00000141198_35 (sequence is synthesized)
ctagtacatcctcctacatcctgatttcagttgatttctaaacttaacaaaaatatccaagaatgactttgtcagaaatgcagtagtaacttagacatggtttttagcctcttgcaacaa

SEQ ID NO: 365768 - DNA, 120 bp, Artificial Sequence
  ENSG00000141198_36 (sequence is synthesized)
ataatttattataagttataaccttggtcatgtacaatcaattctctagttgttttaagtatgtaaaaattgcctctattttcatccactcaacaaacattgagtaactgtgatatagga

SEQ ID NO: 365769 - DNA, 120 bp, Artificial Sequence
  ENSG00000141198_37 (sequence is synthesized)
gcaagattggtttgtaaacaacaaacataatgaagtattatagatactgtagtataaatttgttcagtatatggtgggatcatgggtggggagaaggagagatgtgaggtttttaagaat

SEQ ID NO: 365770 - DNA, 120 bp, Artificial Sequence
  ENSG00000141198_38 (sequence is synthesized)
ggtctagatggaggcaatgctcgagctatagaggaacaagtagacagggcatttagacctgcatgagtagttctacagccctcctatgccttctgctatgtctgtgtatacatatacttt

SEQ ID NO: 365771 - DNA, 120 bp, Artificial Sequence
  ENSG00000141198_39 (sequence is synthesized)
atttttccctctaccagtttgctcttctaattattttaaattttaaaacttattaattttagaagcagttagaaaaaaaaatcagtttctagtttctaagtccctttgttgccaagttaa

SEQ ID NO: 365772 - DNA, 120 bp, Artificial Sequence
  ENSG00000141198_40 (sequence is synthesized)
gaagcttaagatatttttacttttctcagattcccactcgccacctctcatgttatttttcctttaacttcttagattgttagtaaataactttttccttgctcatttcttatttgggaa

SEQ ID NO: 365773 - DNA, 120 bp, Artificial Sequence
  ENSG00000141198_41 (sequence is synthesized)
acaaaaaaattgtaaaaattttcccaacaatgtttcttagatatcactgctgtcgtgaatagtttgttttttccttgctgcagtacacccatgttggtaaactttggtgcaaactttgag

SEQ ID NO: 365774 - DNA, 120 bp, Artificial Sequence
  ENSG00000141198_42 (sequence is synthesized)
tgcttgcatatccaaaaatgtcctctgattgtcatgttaaatgcaggttagtttagctagatataaaattctaggcacaaaattctaggcctttgaagatactgcttcactgttctctta

SEQ ID NO: 365775 - DNA, 120 bp, Artificial Sequence
  ENSG00000141198_43 (sequence is synthesized)
cacccactaatgctgatagaagtattatattattctgcttcttaatcctttgattaataatatttttttctagttgcatttgttatttttctacgttaatatttcagaaattgtactgtt

SEQ ID NO: 365776 - DNA, 120 bp, Artificial Sequence
  ENSG00000141198_44 (sequence is synthesized)
ccctctgaagagatatatgtacatgtgtgcagatgtttgtttaacttacttatcttccttagtagatgataggcttttttgccttatcaacttatgtgtatttttaattctaggaattct

SEQ ID NO: 365777 - DNA, 120 bp, Artificial Sequence
  ENSG00000141198_45 (sequence is synthesized)
cagctcctactttaaatattgactttctaccattctttctattctcttcttatggaactttaagacgatgaaacttccagttggattcatttgtctcttaacatttcttttatacttttc

SEQ ID NO: 365778 - DNA, 120 bp, Artificial Sequence
  ENSG00000141198_46 (sequence is synthesized)
atttcttcattctaagttctgggataatttctctgtttaatgtatttctctaaaacttgtaattgagttgcttattcagtccttctaataaatgtttcaacaatttctttctattaaaaa

SEQ ID NO: 365779 - DNA, 120 bp, Artificial Sequence
  ENSG00000141198_47 (sequence is synthesized)
gaggggcagccaaagaggcgcagagaagaatgacaaggtgcccagcaagcggcaggatcaaagcctgggtctctaattcccaggctggagattctgggctgcctgctcctcctgcacggg

SEQ ID NO: 365780 - DNA, 120 bp, Artificial Sequence
  ENSG00000141198_48 (sequence is synthesized)
gagtcgggagccggagagcggtggaggcggatttcctgggcccggccctctggcgctaccatggcgtttggcaagagtcaccgggatccctacgcgacctccgtgggccacctcataggc

SEQ ID NO: 365781 - DNA, 120 bp, Artificial Sequence
  ENSG00000141198_49 (sequence is synthesized)
tgtgctaggcagaacaagatgtaaaatcctttgcattctggatcagcttgggattttagaaaatccaatacaataatatttgttacccttacaacaacttcttctcatggcagggaaatt

SEQ ID NO: 365782 - DNA, 120 bp, Artificial Sequence
  ENSG00000141198_50 (sequence is synthesized)
ctttctctctctacctaccataaatgatgctttttaatttctcttagagctaggaaatctcatgattttagggtgacagaaatatctaaattaatctcttttatttggtgggtttttctt

SEQ ID NO: 365783 - DNA, 120 bp, Artificial Sequence
  ENSG00000141198_51 (sequence is synthesized)
gaatacagagataccccctagagacctggttttaccatgttggccaggctgtggtctcaaactcctgacctacggtgatctgcccacctcggcttcctgaagtgctgggattacaggcat

SEQ ID NO: 365784 - DNA, 120 bp, Artificial Sequence
  ENSG00000141198_52 (sequence is synthesized)
atgacccatttactaacaggcaacaagctaagaagtatagaaatgcttactaattacttaacctatgaggtttgcccaaaggaccagccaaaacctcacctcaagccacgcatatgataa

SEQ ID NO: 365785 - DNA, 120 bp, Artificial Sequence
  ENSG00000141198_53 (sequence is synthesized)
caatttctgggtgatgagttttttttaaatacttttctattttctcacagttttctctgagggtatgaatactctgtaagctggaaaaaggttattaaaagtattttactgataattgtg

SEQ ID NO: 365786 - DNA, 120 bp, Artificial Sequence
  ENSG00000141198_54 (sequence is synthesized)
tgaggatgaggctgattgtcttcattcctaaatatttgtgtattaataattgttagatttttatagcattttcatatatttttttaaaaacacatgcattttgatcatttaaacaggttt

SEQ ID NO: 365787 - DNA, 120 bp, Artificial Sequence
  ENSG00000141198_55 (sequence is synthesized)
aattactcagcattcttatcagagtgcctacaagtgacccctctttctagattctccattctcaataggaaaggtattggcatgtggggtgggacagttttcccttgtacagctcctact

SEQ ID NO: 365788 - DNA, 120 bp, Artificial Sequence
  ENSG00000141198_56 (sequence is synthesized)
ttggccaactcactgtagaacctcagtcctcaaaaatgtaccttcctttcgatgccgcctggggagtggaaccaaacaggtgaaccgcgggagtcaggcatggagtgtttgggcctccac

SEQ ID NO: 365789 - DNA, 120 bp, Artificial Sequence
  ENSG00000141198_57 (sequence is synthesized)
ccttagctcctgctgtcactacagagtatattttccagctacagacatatgtaagacgcatataaagaattgaatgggcctggcatggtggcttatgcctctaatcccaacattttgaga

SEQ ID NO: 365790 - DNA, 86 bp, Artificial Sequence
  ENSG00000141198_58 (sequence is synthesized)
tggcatggtggcttatgcctctaatcccaacattttgagaggctgaagtggaaggatcacttgaacctgggaggtcgaagctgcaa

SEQ ID NO: 365791 - DNA, 120 bp, Artificial Sequence
  ENSG00000141200_0 (sequence is synthesized)
acagactgcaaccctgctcagtgctccgggcgcttcaggctggcttgggtcctgctgctccaaccccaagggccctggagcgctccctgatacctccatcactcaccatggccagccagt

SEQ ID NO: 365792 - DNA, 120 bp, Artificial Sequence
  ENSG00000141200_1 (sequence is synthesized)
tctgcctccctgaatccccatgtctctcgcccctgaaacccttgaagccacatttcggagacatccaagagggcatctacgtggcgatccagcgcagtgacaagcggatccacctcgctg

SEQ ID NO: 365793 - DNA, 120 bp, Artificial Sequence
  ENSG00000141200_2 (sequence is synthesized)
tggtcacggagatcaacagagaaaactattgggtcacggtagagtgggtggagaaagcagtcaaaaaaggcaagaagattgacctggagaccatactcctgctgaatccagctctggact

SEQ ID NO: 365794 - DNA, 120 bp, Artificial Sequence
  ENSG00000141200_3 (sequence is synthesized)
ctgctgaacaccccatgccgcccccgcccttatcccccttggctctggcgccctcttcggccatcagggaccagcgtaccgccacgaaatgggttgcgatgatcccccagaaaaaccaaa

SEQ ID NO: 365795 - DNA, 120 bp, Artificial Sequence
  ENSG00000141200_4 (sequence is synthesized)
cagcctcaggggacagcctggatgtgagggtccccagcaaaccttgtctgatgaagcagaaaaagtctccctgcctctgggaaatccagaaactgcaggagcagcgggaaaagcgcaggc

SEQ ID NO: 365796 - DNA, 120 bp, Artificial Sequence
  ENSG00000141200_5 (sequence is synthesized)
ggctgcagcaggagatccgagctagacgcgccctcgatgtcaataccagaaaccccaactacgaaatcatgcacatgatcgaagagtatcgcaggcacctggacagcagcaagatctcag

SEQ ID NO: 365797 - DNA, 120 bp, Artificial Sequence
  ENSG00000141200_6 (sequence is synthesized)
tcctggagcccccgcaagaacatcgcatctgcgtctgcgtgaggaagcggcctctcaaccagcgagagacaaccttaaaggacctggatatcatcaccgtcccctcggacaatgtggtta

SEQ ID NO: 365798 - DNA, 120 bp, Artificial Sequence
  ENSG00000141200_7 (sequence is synthesized)
tggtgcatgagtccaagcaaaaggtggacctcactcgctacctgcagaaccagaccttctgcttcgaccatgccttcgatgacaaagcctccaacgagttggtgtaccagttcaccgccc

SEQ ID NO: 365799 - DNA, 120 bp, Artificial Sequence
  ENSG00000141200_8 (sequence is synthesized)
agccactggtggagtccatcttccgcaagggcatggccacctgctttgcctatgggcagacgggaagtgggaagacgtacaccatgggtggagacttttcaggaacggcccaagattgtt

SEQ ID NO: 365800 - DNA, 120 bp, Artificial Sequence
  ENSG00000141200_9 (sequence is synthesized)
gggggcaaggtgtatgatttgttgaactggaagaagaagctgcaagtccttgaggatggcaatcagcaaatccaagtggtcgggctgcaggagaaagaggtgtgttgtgtggaggaagtg

SEQ ID NO: 365801 - DNA, 120 bp, Artificial Sequence
  ENSG00000141200_10 (sequence is synthesized)
ctgaacctggtggaaatagggaatagctgtcggacttccaggcaaacacctgtcaacgctcactcatccaggagccatgcagtgttccagatcatcctgaagtcaggacggataatgcat

SEQ ID NO: 365802 - DNA, 120 bp, Artificial Sequence
  ENSG00000141200_11 (sequence is synthesized)
ggcaagttttccctcgttgatttagctgggaatgaaagaggagcagatacaaccaaggccagccggaaaaggcagctggaaggggcagagattaacaagagtcttctagccctcaaagaa

SEQ ID NO: 365803 - DNA, 120 bp, Artificial Sequence
  ENSG00000141200_12 (sequence is synthesized)
tgtattctggctttgggtcagaacaagcctcacaccccattcagagccagcaaactcacactggtgctccgggactcctttataggccagaactcctccacttgcatgattgctaccatc

SEQ ID NO: 365804 - DNA, 120 bp, Artificial Sequence
  ENSG00000141200_13 (sequence is synthesized)
tctccggggatgacctcttgtgaaaacactctcaacactttaagatatgcaaacagagtaaaaaaattaaatgtagatgtaaggccctaccatcgtggccactatccgattggacatgag

SEQ ID NO: 365805 - DNA, 120 bp, Artificial Sequence
  ENSG00000141200_14 (sequence is synthesized)
gcaccaaggatgttaaaaagtcacatcggaaattcagaaatgtcccttcagagggatgaatttattaaaataccttatgtacagagtgaggagcagaaagagattgaagaggttgaaaca

SEQ ID NO: 365806 - DNA, 120 bp, Artificial Sequence
  ENSG00000141200_15 (sequence is synthesized)
ttacccactctgttagggaaggataccacaatttcagggaagggatctagccaatggctggaaaacatccaggagagagctggtggagtacaccatgatattgatttttgcattgcccgg

SEQ ID NO: 365807 - DNA, 120 bp, Artificial Sequence
  ENSG00000141200_16 (sequence is synthesized)
tctttgtccattttggagcagaaaattgatgctctgaccgagatccaaaagaaactgaaattattactagctgacctccacgtgaagagcaaggtagagtgaagccaatggcgagagatc

SEQ ID NO: 365808 - DNA, 120 bp, Artificial Sequence
  ENSG00000141200_17 (sequence is synthesized)
aggtccgaaatgctgcattgctgcagtttccaccactcttatacaggaaaactgtccaaattatctaaagatcctcctgagaagcttaaaacatcttaaaatacactgatgggaaacatg

SEQ ID NO: 365809 - DNA, 120 bp, Artificial Sequence
  ENSG00000141219_0 (sequence is synthesized)
ctgacgaggttccttggccgggggttgggcaggggcctggggggcttccctggggggcttgtcgccggggccgcctgggctttcaggtcttccgaggctgacattcacgtttcattctgc

SEQ ID NO: 365810 - DNA, 120 bp, Artificial Sequence
  ENSG00000141219_1 (sequence is synthesized)
cacactcgggaacggtgatcggggaagcatggggatccgggagaagcacccacaaaactagcatcctcctggaggagctcgggaataggatgagtgataatccacccagaatggaagtgt

SEQ ID NO: 365811 - DNA, 120 bp, Artificial Sequence
  ENSG00000141219_2 (sequence is synthesized)
gtccttactgtaagaagccatttaaacgattaaaatcccacttgccatactgtaagatgataggaccaaccatacctactgatcaaaaagtttatcagtccaagccagctacactcccac

SEQ ID NO: 365812 - DNA, 120 bp, Artificial Sequence
  ENSG00000141219_3 (sequence is synthesized)
gtgctaaaaagatgaaaggaccaatcaaagatttaattaaagctaaagggaaagagttagagacagagaatgaagaaagaaattctaagttggtggtggacaaaccagaacagacagtga

SEQ ID NO: 365813 - DNA, 120 bp, Artificial Sequence
  ENSG00000141219_4 (sequence is synthesized)
agacctttccactgccagctgttggtttggaaagagcagctactacaaaggcagataaagacatcaagaatccaatccaaccatccttcaaaatgttaaaaaatactaaaccaatgacta

SEQ ID NO: 365814 - DNA, 120 bp, Artificial Sequence
  ENSG00000141219_5 (sequence is synthesized)
ctttccaagaagaaaccaaggctcagttttacgcatcagagaaaacctctcctaaaagagaacttgccaaagatttgcctaaatcaggagaaagtcgatgtaatccttcagaagctggag

SEQ ID NO: 365815 - DNA, 120 bp, Artificial Sequence
  ENSG00000141219_6 (sequence is synthesized)
cgtctttactggttggctcaatagaaccttctttgtcaaatcaagatagaaaatattcctcaactctacctaatgatgtacaaactacctctggtgatctcaaattggacaaaattgatc

SEQ ID NO: 365816 - DNA, 120 bp, Artificial Sequence
  ENSG00000141219_7 (sequence is synthesized)
cccaaagacaggaacttctagtaaaattactagatgtgcctactggtgattgtcatatttctccaaagaatgtcagtgatggggttaaaagggtaagaacattattaagcaatgagagag

SEQ ID NO: 365817 - DNA, 120 bp, Artificial Sequence
  ENSG00000141219_8 (sequence is synthesized)
attccaaaggcagggatcacctctcaggagtccctactgatgttacagttactgagactccagaaaagaacacagaatccctcattttaagccttaaaatgagctcattaggtaaaatcc

SEQ ID NO: 365818 - DNA, 120 bp, Artificial Sequence
  ENSG00000141219_9 (sequence is synthesized)
aagtcatggagaaacaagagaaaggacttaccctgggagtagagacgtgtgggagcaaaggaaatgcagagaaaagtatgtctgcaacagaaaagcaggaacggactgtcatgagccatg

SEQ ID NO: 365819 - DNA, 120 bp, Artificial Sequence
  ENSG00000141219_10 (sequence is synthesized)
gctgtgagaacttcaacaccagggattcagtcacaggaaaggagtctcaaggggaaagaccacatttaagtttgttcattccgagggagacgacttaccagtttcattctgtatcgcagt

SEQ ID NO: 365820 - DNA, 120 bp, Artificial Sequence
  ENSG00000141219_11 (sequence is synthesized)
caagtagtcaaagtcttgcctctctagctacaacatttcttcaagaaaagaaagcagaagcccagaatcatcattgtgtccctgatgtaaaggcattaatggagagtcccgagggacagt

SEQ ID NO: 365821 - DNA, 120 bp, Artificial Sequence
  ENSG00000141219_12 (sequence is synthesized)
tatctctggagcccaaatctgatagtcagttccaagcatcacacactgggtgccagagccctttatgttcagcccagcgtcacactcctcagagccccttcaccaatcatgctgcagctg

SEQ ID NO: 365822 - DNA, 120 bp, Artificial Sequence
  ENSG00000141219_13 (sequence is synthesized)
ctggcaggaagactcttcgcagctgcatggggctggagtggtttccagagctctatcctggttaccttggactaggggtgttgccagggaagcctcagtgttggaatgcaatgacccaga

SEQ ID NO: 365823 - DNA, 120 bp, Artificial Sequence
  ENSG00000141219_14 (sequence is synthesized)
agccacaacttatcagtccccagggggaaagactctcacaagtttctttgttggaacgaagctcaactcatataaggagtttggaaccccctgccggacttacaacctccaacttctctc

SEQ ID NO: 365824 - DNA, 120 bp, Artificial Sequence
  ENSG00000141219_15 (sequence is synthesized)
acaccaccataaggaagagtggattcggtggcatcacgatgctcttcacaggatacttcgtcctgtgttgtagctggagtttcagacgtctgaaaaaattgtgccgacccctgccctgga

SEQ ID NO: 365825 - DNA, 120 bp, Artificial Sequence
  ENSG00000141219_16 (sequence is synthesized)
agagcacagtacctccatgcattggtgtggcgaagacgactggggattgccgctctaaaacatgtttggattaggaagcacgtttaagtaggagaagccttcgtgacttctctctagtgc

SEQ ID NO: 365826 - DNA, 120 bp, Artificial Sequence
  ENSG00000141219_17 (sequence is synthesized)
cttcgtgccctgtgttgcccactgaattgccctgtaacacctaagtgtagtggtagcattaagggatagcttttcagccctcaaggttatcaggagcatttgtatcactgctataaataa

SEQ ID NO: 365827 - DNA, 120 bp, Artificial Sequence
  ENSG00000141219_18 (sequence is synthesized)
agtagtatcacttgtcataatcagggtgctgaaacataatgaaaaggtttaacttagtcacagtaaatattttatatccctgaaaataagttatttaatgagaatagaactatttaatga

SEQ ID NO: 365828 - DNA, 120 bp, Artificial Sequence
  ENSG00000141219_19 (sequence is synthesized)
tccatgagtcctaaaaggatatctgccttgtattgccaagtttaaggcaaaggtgagatcctgtattaataagaagacagcttttttgtttgacattggtaagtaccaagaattctaact

SEQ ID NO: 365829 - DNA, 120 bp, Artificial Sequence
  ENSG00000141219_20 (sequence is synthesized)
cacatatagtaggaaacaacaaaaagtctccactgacttctttgaattagatactgagaatccacaatacagtagtgtggataactttcaagaagccattggaaacatctccacattctg

SEQ ID NO: 365830 - DNA, 120 bp, Artificial Sequence
  ENSG00000141219_21 (sequence is synthesized)
ggatgacttgtaaatgtctacagagtaatggaaggaaaggcttccttgtctgctcattgctgccacctgggttgggaaaataattgaagatgttttctcaagtccttcaagaatctcttc

SEQ ID NO: 365831 - DNA, 120 bp, Artificial Sequence
  ENSG00000141219_22 (sequence is synthesized)
ttaatgttcagaatagtttaagagcgttgttgaggtaaactgatagctgattattttctgagatttagatctaaacaaactcagcatgacgaggaagcacacttcacagctccagggtgc

SEQ ID NO: 365832 - DNA, 120 bp, Artificial Sequence
  ENSG00000141219_23 (sequence is synthesized)
aatactgatgtaaagttgcctcgtgaggatacatttttcgctcatgtatgcaaaattcctatcagttcatttgcacagccagttccaatcatgtatgtgatcaccagattaaaagcttca

SEQ ID NO: 365833 - DNA, 120 bp, Artificial Sequence
  ENSG00000141219_24 (sequence is synthesized)
tccagaaagacaagactcctcagaacgaatagtagacaagtaagactgctacccacagaagccagtacgcttcaggtgtgaggcggggtaactactcatctcttcacagagccaaggaaa

SEQ ID NO: 365834 - DNA, 120 bp, Artificial Sequence
  ENSG00000141219_25 (sequence is synthesized)
gaaaaagaacgtctctaacatgatttaccattttaaacagccttataagttttgtctcttaaaatcatgctgcagaaggagggggtaaaagtcgtgttctgccctgtctgtggcattgga

SEQ ID NO: 365835 - DNA, 120 bp, Artificial Sequence
  ENSG00000141219_26 (sequence is synthesized)
gtgccccgctaggtaagaagcaacgcttagatcttgcttccaggcagcagcttgaattcccgaatcttcctgcaaggtgcatacaaatgcagcgtgagaatccatacacgtaatccatat

SEQ ID NO: 365836 - DNA, 120 bp, Artificial Sequence
  ENSG00000141219_27 (sequence is synthesized)
tcaccttcccatccatcccgcagaagaggcatggtgacacccaggctactgtccatgcttgagaggacgtatttgaaggttctgttactacaagttgggaatattcacggacatgcctga

SEQ ID NO: 365837 - DNA, 120 bp, Artificial Sequence
  ENSG00000141219_28 (sequence is synthesized)
ataccccggctgtaactcacacgtggtctgtgtaagtggattaacctcggggcggccttgtttaatcctgaataatatctgaaagactgagtttacttgggaatgtgtagtttttctaat

SEQ ID NO: 365838 - DNA, 120 bp, Artificial Sequence
  ENSG00000141219_29 (sequence is synthesized)
gcacattaaaatttattttagctgttaaaaataaaatcattttattatcagcagactcttttatactttatggggcatctacatactacttccgccactcttcataataaaattatttgt

SEQ ID NO: 365839 - DNA, 120 bp, Artificial Sequence
  ENSG00000141219_30 (sequence is synthesized)
gcagccggtggcgagtacccctcagtcggacccgtaccaccactacttccggcgtctgctccgcgcccccccatgtcgctgccgccgtggtaccgccctctcgcggctgcgcagtggcac

SEQ ID NO: 365840 - DNA, 120 bp, Artificial Sequence
  ENSG00000141219_31 (sequence is synthesized)
catcccaaccgcaccgactggtaaccccgcccacgggaagaggcgggctcggagcgggaggagcgactaggagcttctgggagaaaggacctcccctggggtggcagaagcgctcgcctg

SEQ ID NO: 365841 - DNA, 120 bp, Artificial Sequence
  ENSG00000141219_32 (sequence is synthesized)
gaacagcaaagggcgtacagtggagacgactgcaatacatacttaacagtttaaaaatgtataatatttgggacagggagaggggagtgaaaaaaataaagaataaaattattggaatct

SEQ ID NO: 365842 - DNA, 120 bp, Artificial Sequence
  ENSG00000141219_33 (sequence is synthesized)
attatgtcataataatatcatacaagtatttgagttgaatccgtgtaacatattttaaaacaggcggacctatccggcagtggtgcagacggcctgacgaggctgacattcacgtttcat

SEQ ID NO: 365843 - DNA, 120 bp, Artificial Sequence
  ENSG00000141219_34 (sequence is synthesized)
attcacgtttcattctgccacactcgggaacggtgatcggggaagcatggggatccgggagaagcacccacaaaactagcatcctcctggaggagctcggtttctttgttggaacgaagc

SEQ ID NO: 365844 - DNA, 120 bp, Artificial Sequence
  ENSG00000141219_35 (sequence is synthesized)
gctctgtggggagcttgcaagggcgggtttgttttccgcggcccacgttctaagtctgggggagactctcctgagcggagagggtagggaatcgggtgccggggccggcggagggtcttc

SEQ ID NO: 365845 - DNA, 120 bp, Artificial Sequence
  ENSG00000141219_36 (sequence is synthesized)
ctggaaccgcaggaggaaatcctcggtggggctgcgggaacggctgtccctgacccaggagctgccgggccgaccccatccactccgcagaatcagaacagctggcagaatcagaacagc

SEQ ID NO: 365846 - DNA, 120 bp, Artificial Sequence
  ENSG00000141219_37 (sequence is synthesized)
tttcagggaaaggaagggtgcggggaggtgggcaggctggtaacgcagcgggaggagggaaaggcggctggagagcgccggaggtgagggtgaggattagtggaactattgaggtcctcc

SEQ ID NO: 365847 - DNA, 120 bp, Artificial Sequence
  ENSG00000141219_38 (sequence is synthesized)
ttgagcccggaggctggggaggtcttaactctctgctttccggaacctgtgtttctatttggttcagtatcgtgccgcgtttactcactgtgcatgctgccaagtcacctgtctgatcgt

SEQ ID NO: 365848 - DNA, 120 bp, Artificial Sequence
  ENSG00000141232_0 (sequence is synthesized)
agtgcggttccttctaaaaaggagaggcgggagagtcagggtggagaaggcggctccaaccagattttgcgtccacaaagccaaaagcttctaggcctggcatgtacggcgggtttgtgc

SEQ ID NO: 365849 - DNA, 120 bp, Artificial Sequence
  ENSG00000141232_1 (sequence is synthesized)
ccgaggagcacagctggtctacacgggcccgccccgtagacaccctactcctcgactttccccttttcccagtccgagtttgacgtcggtctcctggataccaggcagccaatcgcctcg

SEQ ID NO: 365850 - DNA, 120 bp, Artificial Sequence
  ENSG00000141232_2 (sequence is synthesized)
ttgcgaagggaccagcgcagccaatcaggcgtcgttgctacctgaacaagatcactcaaggtgaaggataatctactaataccagcactttgaatgaaaatttgtttctctgccacaaac

SEQ ID NO: 365851 - DNA, 120 bp, Artificial Sequence
  ENSG00000141232_3 (sequence is synthesized)
tgaacatcttttttttttttttttttttttggtgggggagttgaaacctaattttgtggcgtagcagctatgcagcttgaaatccaagtagcactaaattttattatttcgtatttgtac

SEQ ID NO: 365852 - DNA, 120 bp, Artificial Sequence
  ENSG00000141232_4 (sequence is synthesized)
aataagcttcccaggagacgtgtcaacatttttggtgaagaacttgaaagacttcttaagaagaaatatgaagggcactggtatcctgaaaagccatacaaaggatcggggtttagatgt

SEQ ID NO: 365853 - DNA, 120 bp, Artificial Sequence
  ENSG00000141232_5 (sequence is synthesized)
atacacataggggagaaagtggacccagtgattgaacaagcatccaaagagagtggtttggacattgatgatgttcgtggcaatctgccacaggatcttagtgtttggatcgacccattt

SEQ ID NO: 365854 - DNA, 120 bp, Artificial Sequence
  ENSG00000141232_6 (sequence is synthesized)
ggaccagtgaaggtgctttacgtggatgataataatgaaaatggatgtgagttggataaggagatcaaaaacagctttaacccagaggcccaggtttttatgcccataagtgacccagcc

SEQ ID NO: 365855 - DNA, 120 bp, Artificial Sequence
  ENSG00000141232_7 (sequence is synthesized)
tcatcagtgtccagctctccatcgcctccttttggtcactctgctgctgtaagccctaccttcatgccccggtccactcagcctttaacctttaccactgccacttttgctgccaccaag

SEQ ID NO: 365856 - DNA, 120 bp, Artificial Sequence
  ENSG00000141232_8 (sequence is synthesized)
ttcggctctaccaaaatgaagaatagtggccgtagcaacaaggttgcacgtacttctcccatcaacctcggcttgaatgtgaatgacctcttgaagcagaaagccatctcttcctcaatg

SEQ ID NO: 365857 - DNA, 120 bp, Artificial Sequence
  ENSG00000141232_9 (sequence is synthesized)
cactctctgtatgggcttggcttgggtagccagcagcagccacagcaacagcagcagccagcccagccgccaccgccaccaccaccaccacagcagcaacaacagcagaaaacctctgct

SEQ ID NO: 365858 - DNA, 120 bp, Artificial Sequence
  ENSG00000141232_10 (sequence is synthesized)
ctttctcctaatgccaaggaatttatttttcctaatatgcagggtcaaggtagtagtaccaatggaatgttcccaggtgacagcccccttaacctcagtcctctccagtacagtaatgcc

SEQ ID NO: 365859 - DNA, 120 bp, Artificial Sequence
  ENSG00000141232_11 (sequence is synthesized)
tttgatgtgtttgcagcctatggaggcctcaatgagaaatcttttgtagatggcttgaattttagcttaaataacatgcagtattctaaccagcaattccagcctgttatggctaactaa

SEQ ID NO: 365860 - DNA, 120 bp, Artificial Sequence
  ENSG00000141232_12 (sequence is synthesized)
agaaggagcgaagctctggcccggcgtgtagcgggcgcactacggggacgctgggccgggcaccgggctgtgtggagaagtgagcgcgctcgtctgacccccgtgcccgccaccccgagc

SEQ ID NO: 365861 - DNA, 120 bp, Artificial Sequence
  ENSG00000141232_13 (sequence is synthesized)
cactaacggcgatctcccaaggcctgcccgaggcctctgtcctctgtcctcagccccgcagcggcaacgtcttgcactcggcgagctcgccgctcccgaccctcccgcgcccccgccctg

SEQ ID NO: 365862 - DNA, 120 bp, Artificial Sequence
  ENSG00000141232_14 (sequence is synthesized)
gcccaagggggattttttttttcacctccttgagaatttttttttttaagcttatagtaaggatacattcaagcttggttaaaaaaataataataaaacatgcatcatttttcatttgcc

SEQ ID NO: 365863 - DNA, 120 bp, Artificial Sequence
  ENSG00000141232_15 (sequence is synthesized)
aaccaagcacaaagttattttatactgactgtatattttaaagtatactctcagatatggcctcttacagtatttaagatatagcaaggacatggctgatttttttttataaaaattggc

SEQ ID NO: 365864 - DNA, 120 bp, Artificial Sequence
  ENSG00000141232_16 (sequence is synthesized)
actaataagtgggtttattggtcttttctaattgtataatttaatttagtacaaagtttgtaaaatatcagaggatatatatatattgtttctacgacatggtattgcatttatatcttt

SEQ ID NO: 365865 - DNA, 120 bp, Artificial Sequence
  ENSG00000141232_17 (sequence is synthesized)
ttactacagtgatctgtgacagcagcagcttcatgttgtattttttttactgaaattgtaaaatatccatcttaaagacatcaactattctaaaaattgtgtacaggatattcctttagt

SEQ ID NO: 365866 - DNA, 120 bp, Artificial Sequence
  ENSG00000141232_18 (sequence is synthesized)
ggtggaattaaaatgtacgaatacttgctttttcaaaaaaatgtattttctgttaaaagtttaaagatttttgctatatattatggaagaaaaatgtaatcgtaaatattaattttgtac

SEQ ID NO: 365867 - DNA, 120 bp, Artificial Sequence
  ENSG00000141232_19 (sequence is synthesized)
ctatattgtgcaatacttgaaaaaaacggtataaaagtattttgagtcagtgtcttacatgttaagagggactgaaatagtttatattaagtttgtattaaaattctttaaaattaaaaa

SEQ ID NO: 365868 - DNA, 120 bp, Artificial Sequence
  ENSG00000141252_0 (sequence is synthesized)
ggctgacagagcggctgacggagccgggctcaccaggtcgctgccgcgagggagttgctgtgctggggcctgggtggcggctggaggcctgagttgggctcgcggcgggggtcggcaggg

SEQ ID NO: 365869 - DNA, 120 bp, Artificial Sequence
  ENSG00000141252_1 (sequence is synthesized)
ggccgggtggcggaatgatggaggaggaggaactggagttcgtggaggagctggaagccgtgctgcagctcacgcccgaggtgcagctggccatcgagcaggtgtttccaagccaggacc

SEQ ID NO: 365870 - DNA, 120 bp, Artificial Sequence
  ENSG00000141252_2 (sequence is synthesized)
ctctagatcgagcagatttcaatgctgttgagtatatcaataccctgttcccaaccgagcaatctctggcgaacatagacgaagtcgtgaacaaaattaggctgaaaataaggagactgg

SEQ ID NO: 365871 - DNA, 120 bp, Artificial Sequence
  ENSG00000141252_3 (sequence is synthesized)
atgacaatattcgaactgttgtaagaggtcagacgaacgtggggcaggatggacggcaagtgaaagaaatcacccgtgatattaagcaattagatcacgccaaacgccacctgaccacct

SEQ ID NO: 365872 - DNA, 120 bp, Artificial Sequence
  ENSG00000141252_4 (sequence is synthesized)
caatcaccacactgaaccacctgcacatgctggcaggaggtgtcgactccctcgaagccatgaccaggcgaagacaatacggagaagttgctaatctccttcagggtgtgatgaatgtcc

SEQ ID NO: 365873 - DNA, 120 bp, Artificial Sequence
  ENSG00000141252_5 (sequence is synthesized)
tggagcacttccacaagtatatggggattccgcagatccggcagctttccgaaagagtgaaggctgcacagactgagttaggacagcaaatcctggcagattttgaagaagcgtttcctt

SEQ ID NO: 365874 - DNA, 120 bp, Artificial Sequence
  ENSG00000141252_6 (sequence is synthesized)
cccagggcaccaagagaccaggaggacccagcaatgttctacgagatgcatgtctggttgctaatattctagatcccaggatcaaacaggaaatcatcaaaaagtttattaaacagcatc

SEQ ID NO: 365875 - DNA, 120 bp, Artificial Sequence
  ENSG00000141252_7 (sequence is synthesized)
tgtcagagtatctggtactttttcaagaaaaccaagatgttgcctggctggacaaaatcgacagacgctatgcctggataaaacgccagcttgtggactatgaggagaaatacggccgca

SEQ ID NO: 365876 - DNA, 120 bp, Artificial Sequence
  ENSG00000141252_8 (sequence is synthesized)
tgtttccacgtgagtggtgcatggctgagaggattgcggtggaattttgccatgtgacaagggcagaacttgccaagattatgcgtaccagagcgaaggaaattgaagtgaaattgcttc

SEQ ID NO: 365877 - DNA, 120 bp, Artificial Sequence
  ENSG00000141252_9 (sequence is synthesized)
tttttgctattcaaagaacaactaactttgaggggtttcttgcaaaacgcttctccggctgcaccctgaccgatgggaccctgaaaaagcttgagtctccacccccatctaccaatccct

SEQ ID NO: 365878 - DNA, 120 bp, Artificial Sequence
  ENSG00000141252_10 (sequence is synthesized)
tcctggaagatgagccaacaccagagatggaggaactggcaacggagaaaggagatttagatcaaccaaagaagcctaaagccccagacaatccatttcatggcattgtttccaagtgtt

SEQ ID NO: 365879 - DNA, 120 bp, Artificial Sequence
  ENSG00000141252_11 (sequence is synthesized)
cgtgtatatcgaatcccaagacaagaacctcggagagctgatagatcggtttgtggctgatttcaaagcccaggggccacctaagcccaacactgatgaagggggtgccgtgctccccag

SEQ ID NO: 365880 - DNA, 120 bp, Artificial Sequence
  ENSG00000141252_12 (sequence is synthesized)
ctgcgccgacctctttgtctactacaagaagtgcatggtgcaatgctctcagctcagtactggggagcccatgatcgccctgaccaccattttccagaagtacctccgagaatacgcctg

SEQ ID NO: 365881 - DNA, 120 bp, Artificial Sequence
  ENSG00000141252_13 (sequence is synthesized)
gaaaatcctctctggcaacctgcccaaaaccacaaccagcagtggaggactgactatcagcagcctcctcaaggaaaaggagggctcagaagtagccaagttcactctggaggagctctg

SEQ ID NO: 365882 - DNA, 120 bp, Artificial Sequence
  ENSG00000141252_14 (sequence is synthesized)
cctcatctgtaacatcctgagcacggcagagtactgtctggccaccacccagcagctagaagaaaaactcaaagaaaaagtggatgtaagtctgattgaacgaatcaatctgactggaga

SEQ ID NO: 365883 - DNA, 120 bp, Artificial Sequence
  ENSG00000141252_15 (sequence is synthesized)
gatggacacgttcagcaccgtcatctccagcagtattcagctgctggttcaggatctggatgctgcctgtgatcctgccctgactgccatgagcaagatgcagtggcagaacgtggagca

SEQ ID NO: 365884 - DNA, 120 bp, Artificial Sequence
  ENSG00000141252_16 (sequence is synthesized)
cgttggtgaccagagcccctacgtcacctctgtcattctgcacatcaagcagaacgtccccatcatccgtgacaacctggcttccacacgcaagtacttcactcagttctgcgttaaatt

SEQ ID NO: 365885 - DNA, 120 bp, Artificial Sequence
  ENSG00000141252_17 (sequence is synthesized)
tgcaaactccttcattcccaaattcatcacccacctcttcaagtgcaagccaattagcatggtgggagcagaacaggtgagatggacgtagtatcaggcatttgcctggcagcttttgtt

SEQ ID NO: 365886 - DNA, 120 bp, Artificial Sequence
  ENSG00000141252_18 (sequence is synthesized)
gtagatcaagcacatattcttctagtccagatctacttggcaggaataaaattgatgatgtcccctgtttggggacagtataatgactcacccggaaggtttcttaattcgttcttccat

SEQ ID NO: 365887 - DNA, 120 bp, Artificial Sequence
  ENSG00000141252_19 (sequence is synthesized)
ttatttttaaaaattttgtttgaacgcctactaagttctgggtgcagggtataacacagcaagcaccatggaaaggtccctgctcctagtgctcacactccaataagaagaagtggctgg

SEQ ID NO: 365888 - DNA, 120 bp, Artificial Sequence
  ENSG00000141252_20 (sequence is synthesized)
aagaagaagtggctgggccgggcacagcggctcacgctgtaaccccagcatttcgggaggcctgggcaggcagatcacctggggtaaggaatttgagagcagcctggccaacatggtgaa

SEQ ID NO: 365889 - DNA, 120 bp, Artificial Sequence
  ENSG00000141252_21 (sequence is synthesized)
caatattcgaactgttgtaagaggtcagacgaacgtggggcaggatggacggcaagcgcttgaagaggctcagaaagctatccaacaactctttggcaaaatcaaagatatcaaagacaa

SEQ ID NO: 365890 - DNA, 120 bp, Artificial Sequence
  ENSG00000141252_22 (sequence is synthesized)
ggtgaggaaggcacccgccagctacaccaagatcgttgtcaaaggcatgacccgggctgagatgatcctcaaggtagtgatggcccctcatgaaccgttggtggtgtttgttgacaacta

SEQ ID NO: 365891 - DNA, 120 bp, Artificial Sequence
  ENSG00000141252_23 (sequence is synthesized)
catcaaacttctcacagactgcaacacagaaacctttcagaagatactggacatgaaggggctgaagaggagtgagcagagcagcatgctggaactcctgcgccagcggctccccgcacc

SEQ ID NO: 365892 - DNA, 120 bp, Artificial Sequence
  ENSG00000141252_24 (sequence is synthesized)
gccctcgggggcagaaagctccggctcactgtccctgacggcgccaacaccagagcaagagtcgtcacgcatccgcaagctcgagaaactcattaaaaagagactgtagcagcagcaagg

SEQ ID NO: 365893 - DNA, 120 bp, Artificial Sequence
  ENSG00000141252_25 (sequence is synthesized)
ggccctttgctcctggctggagaccctcagcgcccgttccccagaagcccccaacctctcctgtgctccccggcactctcacatcgtcggtcttcaaacttcctgggacatgtgggttgt

SEQ ID NO: 365894 - DNA, 120 bp, Artificial Sequence
  ENSG00000141252_26 (sequence is synthesized)
tactgagtctctcccatgccctgtcttacttcctgccctaatcggagacgctgagtaagggctgggctctaagagggcgatttaggtgatctctggttcgtgaagcagaggcagcagtgg

SEQ ID NO: 365895 - DNA, 120 bp, Artificial Sequence
  ENSG00000141252_27 (sequence is synthesized)
gcagaggcagcagtggaggataggtccctgagctgcccttgactcatgtagcctccccatggcagtcacaccctcttgacacgtgggccccacccgtccttttttttttttttttttttt

SEQ ID NO: 365896 - DNA, 120 bp, Artificial Sequence
  ENSG00000141252_28 (sequence is synthesized)
ccaccgagcccagccccttcctccatttctttactcccaccctgctcctggtttctagggaagggaaaccaggaagttcacttggaagacgtttcctaggttttctcatcagatgaagcc

SEQ ID NO: 365897 - DNA, 120 bp, Artificial Sequence
  ENSG00000141252_29 (sequence is synthesized)
atgggaacgcccaggaagtccatactctcaaacccctttctgcccactcaccttcaggtccacagcactttccagcgtcatctgaaatagcaaaggtgatgtgcagcatcccagtgatgt

SEQ ID NO: 365898 - DNA, 120 bp, Artificial Sequence
  ENSG00000141252_30 (sequence is synthesized)
gttcctgtgttatgagaaggagtctggggttctggatgcctcaggaacagaatatggaccttaaagaccaggctgagagcctggcctggcacgcagcctgcccgccccccccgcccttcc

SEQ ID NO: 365899 - DNA, 120 bp, Artificial Sequence
  ENSG00000141252_31 (sequence is synthesized)
tgtccaccgcgggctctctgcagcagggcttgccgaagagactgctcccgacctctcatgtcatcctgcatccagagaatggcagcatatcaagccgttaaccctgattcactcggttcc

SEQ ID NO: 365900 - DNA, 120 bp, Artificial Sequence
  ENSG00000141252_32 (sequence is synthesized)
cttgaaaccaggcctcagttaaccatgaccacagctacaggcaaaccgctgctgttgctgcctgcttttgctgaagaatgatatcttgccaggcacggcggctcatgcctgtagtcgcaa

SEQ ID NO: 365901 - DNA, 90 bp, Artificial Sequence
  ENSG00000141252_33 (sequence is synthesized)
gagtttgagaccagcctgggcaacatacagatgtctacaaaaataaaaatttgcaaggtgtggtggcatgcacctgtagtcccaactgct

SEQ ID NO: 365902 - DNA, 61 bp, Artificial Sequence
  ENSG00000141252_34 (sequence is synthesized)
cccaactgctctggcaaaaccaaaaatacaaaaaattggctgggtgtggtggctcatgcct

SEQ ID NO: 365903 - DNA, 64 bp, Artificial Sequence
  ENSG00000141252_35 (sequence is synthesized)
aactaaaaataaaaaaaattagccgggtgtcatggcgagtgcctgtaatcccagctactgggga

SEQ ID NO: 365904 - DNA, 120 bp, Artificial Sequence
  ENSG00000141252_36 (sequence is synthesized)
cagagcaagaccccttctcaaaaagttttcaggatagaggaaatttccttaaaatccataaaacttgtaacagccgtacagtaggaataaggtttggaaatctgcctggaaacctgattt

SEQ ID NO: 365905 - DNA, 120 bp, Artificial Sequence
  ENSG00000141252_37 (sequence is synthesized)
cctcatccccaccttgtttcccaacataaccactgctctgtgcccctgccctctctgccaggctttctccccgatgccgtccagctctgatcctgagtgtcatttcttcatcggcttcca

SEQ ID NO: 365906 - DNA, 120 bp, Artificial Sequence
  ENSG00000141252_38 (sequence is synthesized)
ggctgtccttgctagctggtttgactctcacgcatcaagcgtctcaaatttgagaatgcggaggagaaaagaagtgttgcgagaaggagatgcggccttcagttgaggtctattaggaaa

SEQ ID NO: 365907 - DNA, 120 bp, Artificial Sequence
  ENSG00000141252_39 (sequence is synthesized)
agattccaaataagacaagggcggggggcggcagtcgggagagcccccaggaagccctgtagatgcccccaccccagcccatggagttgctatggttaagcagcctgagccgtacagttg

SEQ ID NO: 365908 - DNA, 120 bp, Artificial Sequence
  ENSG00000141252_40 (sequence is synthesized)
aaaaggggcggtggggcccatctccaaatagcacagccagttcagccgtctgtcctcaacccaggagagctgggaaagccagtggactcctgcacctggttcttgtcactcctggcgttt

SEQ ID NO: 365909 - DNA, 120 bp, Artificial Sequence
  ENSG00000141252_41 (sequence is synthesized)
gtgtacagatcaccacttctctttttggttcattgttgaggagtcgttttccggacggctccatcacagcattgagctatcaagctgctgttttccacagttggtggtcacagccaggga

SEQ ID NO: 365910 - DNA, 120 bp, Artificial Sequence
  ENSG00000141252_42 (sequence is synthesized)
agttgctgtcttgatttgttacattgtcagtaatccccaaggaaccaatggatgtcagtaggagtttctgttaaatgtctccttgatggggactcagtactgtgtagagacgctgtgttt

SEQ ID NO: 365911 - DNA, 120 bp, Artificial Sequence
  ENSG00000141252_43 (sequence is synthesized)
gacgctgtgtttctcttctgggggtgtgcatcagaaccactggggccttttaaaatctacagatgccggccgggcgccgtggctcacgcctggaatcccagcacttggggaggctgaggc

SEQ ID NO: 365912 - DNA, 75 bp, Artificial Sequence
  ENSG00000141252_44 (sequence is synthesized)
cccagcacttggggaggctgaggcgggcggatcacaagcgcaggaaattgagaccatcctccggggtgtggtggc

SEQ ID NO: 365913 - DNA, 74 bp, Artificial Sequence
  ENSG00000141252_45 (sequence is synthesized)
atctcaaaacaaacaaaaaaacagatgcccggagattttgagtcagtaagtttggatggggcctggcatacagg

SEQ ID NO: 365914 - DNA, 120 bp, Artificial Sequence
  ENSG00000141252_46 (sequence is synthesized)
attttgagtcagtaagtttggatggggcctggcatacaggtttaaaagttccataggtagttataacgtttacaccttgttaagaaccactgcaacagagagatttgctttatggaaggg

SEQ ID NO: 365915 - DNA, 120 bp, Artificial Sequence
  ENSG00000141252_47 (sequence is synthesized)
ctcctgccacgcattttcatacatgtctatttttctgactctaagctaaaagtgcgccgacactacacttgagctggtgccaacgtggtgaagattctctactgataacagctttcattt

SEQ ID NO: 365916 - DNA, 120 bp, Artificial Sequence
  ENSG00000141252_48 (sequence is synthesized)
ccagcctgggagacagagtgagactcagttaaaaaaaaaagacttttggtggtggtggggaccatgcccaggattgggctctctccatactgatgaggattcttcttgttttgatgacca

SEQ ID NO: 365917 - DNA, 120 bp, Artificial Sequence
  ENSG00000141252_49 (sequence is synthesized)
actgatgaggattcttcttgttttgatgaccaacccccaagcagaagctttatttattaacatcacttcaaaaataacgtatcaaaggggcaccctaggccgggtactgtggcatcacac

SEQ ID NO: 365918 - DNA, 86 bp, Artificial Sequence
  ENSG00000141252_50 (sequence is synthesized)
atcaaaggggcaccctaggccgggtactgtggcatcacacctgtaatgccagtgctttgacttcaagacaagcctgggcaacagag

SEQ ID NO: 365919 - DNA, 120 bp, Artificial Sequence
  ENSG00000141252_51 (sequence is synthesized)
ggagcaagactctctaaaaaataataaggtaaaaggagtacctgtggatgaaagcagcagctaacagctctgtgattcagctagacctagatattgtgcccattccttcccctcagtcca

SEQ ID NO: 365920 - DNA, 120 bp, Artificial Sequence
  ENSG00000141252_52 (sequence is synthesized)
ttttctgtagcccctttaaaaaccaaaaaacaactttgaagtcactttgggtttaaaataaatagtggtaatttgtataatcaataaagagttcactctgctcttactgaggggacttgt

SEQ ID NO: 365921 - DNA, 120 bp, Artificial Sequence
  ENSG00000141252_53 (sequence is synthesized)
ctgaaagctggcttagcggtgtccaggccagagaacatcctgtgtggactcttaacaatgaaacaggagccgcaatggacaaggtgttctgatctccaaacccagctcagggattgaagc

SEQ ID NO: 365922 - DNA, 120 bp, Artificial Sequence
  ENSG00000141252_54 (sequence is synthesized)
taactaccgccactccttcctctctcgaagaacaaagagccagtacccagggctctgcccacccccgagaaggggtgcctgatttcttatgtctagggtggctcctctgtgcagatcaga

SEQ ID NO: 365923 - DNA, 120 bp, Artificial Sequence
  ENSG00000141252_55 (sequence is synthesized)
caggactgagagcagacaagctgagaccagcatgaccagtacagggcacgcagagcgtgggggcaggtccgaggctgctgctcgatgcagggtatgacaccaacccttcctgaattgcca

SEQ ID NO: 365924 - DNA, 120 bp, Artificial Sequence
  ENSG00000141252_56 (sequence is synthesized)
aattgccatcggatgaggagacctggttccctgttgaaagaatgccaggggaaatgctgcatgtgcacagctggaaatggggttccttctctaggaagagcactcggaataacctgctgg

SEQ ID NO: 365925 - DNA, 120 bp, Artificial Sequence
  ENSG00000141252_57 (sequence is synthesized)
ttccttccctaggaagagcactcagaataacctgctggaaatgggattccttggctaggaagagcactcagaataacctgctggaaatgggattccttggctaggaagagcactcagaat

SEQ ID NO: 365926 - DNA, 77 bp, Artificial Sequence
  ENSG00000141252_58 (sequence is synthesized)
ctggaaatgggattccttggctaggaagagcactcagaataacctgctggaaatgggattccttacctcctaggaag

SEQ ID NO: 365927 - DNA, 64 bp, Artificial Sequence
  ENSG00000141252_59 (sequence is synthesized)
cgctctcagaacaacctgcctgcttgagggtgacagcaagtgtctcacacttctcgtctactcc

SEQ ID NO: 365928 - DNA, 120 bp, Artificial Sequence
  ENSG00000141252_60 (sequence is synthesized)
tgagggtgacagcaagtgtctcacacttctcgtctactccaagtcagattcctaaaaataaaatagagctccaatgggcaatttaagcaaaagccttagaaacatggacacctgaaatgc

SEQ ID NO: 365929 - DNA, 120 bp, Artificial Sequence
  ENSG00000141252_61 (sequence is synthesized)
tggcctacatgaagggtacgatgacattttatatattaaataaaaattcccagtcctgttttagtattcatcagaatagcctcttggaccctcgaagttctacacctttgggagatataa

SEQ ID NO: 365930 - DNA, 120 bp, Artificial Sequence
  ENSG00000141252_62 (sequence is synthesized)
atttccttaaaataaagggattgcttctttgtgtaaatagctttcattttctccatctggaagtgatttctgcctgcatgttggagcacaaaatactgcagttaattaaagcattactgg

SEQ ID NO: 365931 - DNA, 120 bp, Artificial Sequence
  ENSG00000141252_63 (sequence is synthesized)
atgtcatttgctagaatgtatttccttactgctgacagaaaacagaacagactctaggaaagaagtagcaagtccgtgaccctggccgctcctggtggctgcccttctcccttccctgac

SEQ ID NO: 365932 - DNA, 120 bp, Artificial Sequence
  ENSG00000141252_64 (sequence is synthesized)
agtctaaggaagcaacgcgtgggagcagaatgtggccgactgagcccagtcctgacctgcccagttgcagtggagcctgtctgtaatgttgtgtaaagtgttttgcttctgacttggaac

SEQ ID NO: 365933 - DNA, 120 bp, Artificial Sequence
  ENSG00000141252_65 (sequence is synthesized)
cctacttgccctgtgaatttctatcctgtgaaccttcccttctctgtccttaccgttcccatcacagcctgctcttccagtgacggccaagtgatttctctcctgcacgcatgagtccat

SEQ ID NO: 365934 - DNA, 120 bp, Artificial Sequence
  ENSG00000141252_66 (sequence is synthesized)
cctgtttccttagtagctggatggacgttttgccatgaaaactctttgggaagtcttgtgtcctttagtgatttctctcctgcacgcatgagtccatcctgtttccttagtagctggttg

SEQ ID NO: 365935 - DNA, 120 bp, Artificial Sequence
  ENSG00000141252_67 (sequence is synthesized)
gacgtttttgccatgaaaactcttcgggaagtcctgtgtcctttcaacaggggaaaactggctgcggcccttccattaggctccaggatcattacctcgtttccattctttcttttcaac

SEQ ID NO: 365936 - DNA, 120 bp, Artificial Sequence
  ENSG00000141252_68 (sequence is synthesized)
agctccccactttactagggaagccaagggatcaacctaatgagaaaagaaccttccctgtagcccacctggaagggcattgcctgccagctccttccttctcacctatgtgaacaggag

SEQ ID NO: 365937 - DNA, 120 bp, Artificial Sequence
  ENSG00000141252_69 (sequence is synthesized)
ggaagatgccggcgatccatggatctgtgggacatgaaggacgtgtccatcagaaatgaaagcagcctgggattggaagcatccacagaagacttgatctgcaggtcttgatttggacct

SEQ ID NO: 365938 - DNA, 120 bp, Artificial Sequence
  ENSG00000141252_70 (sequence is synthesized)
ggcactttgacaccaggcgagtcactgatcccctgagcatccattttcaatattggtgagaggggattataatgaatattggctgtgaaggtcacacaagaccgggctatatgcacttgc

SEQ ID NO: 365939 - DNA, 120 bp, Artificial Sequence
  ENSG00000141252_71 (sequence is synthesized)
tctgccataaggcagtgtgaagtgtgttcgtgatcacttgtgggcgggagcctgtggctgtcttgcctggactggcttttttaaacatggatgagtggtgacaaatcctgcggccgtgtg

SEQ ID NO: 365940 - DNA, 120 bp, Artificial Sequence
  ENSG00000141252_72 (sequence is synthesized)
caggctacatccgcagcgagctccgcatatctggtctttgcctttttaggtcatgactgtaatatcaagcttacacgagagttttaaaagactgagcagtatccccttcccctggcagct

SEQ ID NO: 365941 - DNA, 120 bp, Artificial Sequence
  ENSG00000141252_73 (sequence is synthesized)
gctgcttccgtagcatttagggataaacctgcagacactgagaagagagcttcctccctcctggggctggtggcgaggctgcctgttgtggaaaatagggcatgtctcctgtgaatgcga

SEQ ID NO: 365942 - DNA, 120 bp, Artificial Sequence
  ENSG00000141252_74 (sequence is synthesized)
attgcgagggttgccaaagcctcccttccaagaaacttgcttaggtgtctggtgtccacagaccagactcttctcccgacagggacaaaaattcttgcctgcctttctttttcttttttt

SEQ ID NO: 365943 - DNA, 120 bp, Artificial Sequence
  ENSG00000141252_75 (sequence is synthesized)
tccttttacttattcttgccttttttcttcttcttcttctttaggtatgatgccccccaaaaaactaagcaagattaacttgggacaggcagttctaactgggaagcctgagctcacagg

SEQ ID NO: 365944 - DNA, 120 bp, Artificial Sequence
  ENSG00000141252_76 (sequence is synthesized)
ctgtttggattactttccaattgtgtttcaaagatgtttagacttttcccaaggccagctgaatccttataatcagcccaaaagttcctttctgtttctgtctgtcccctttgagggtgt

SEQ ID NO: 365945 - DNA, 120 bp, Artificial Sequence
  ENSG00000141252_77 (sequence is synthesized)
tgactcagagaacctggggcaatatgagatgttaaaataaaaatagcgtccaacgtcccgcctcctgggaatgctgctcacttcatccgagggttctgggagcttctgctcagtcatcaa

SEQ ID NO: 365946 - DNA, 120 bp, Artificial Sequence
  ENSG00000141252_78 (sequence is synthesized)
atggaatttgcacaattgtcttgcctcctgttttgggtaatttttcaacaagtgagaaattaagaacagcttctcaacaaacttccctctacttccagggccaagaaaagtatttgcagt

SEQ ID NO: 365947 - DNA, 120 bp, Artificial Sequence
  ENSG00000141252_79 (sequence is synthesized)
gtgggctgcagctttcaggggtctcaggtgaaatggtggcaagaaaccccagctcccttcatgtgtttgccttgcgctgatggaaaaggaaggcacttctcagctgccagagaccacatt

SEQ ID NO: 365948 - DNA, 120 bp, Artificial Sequence
  ENSG00000141252_80 (sequence is synthesized)
ccacagggttcttcacaaaatcaagcactgcagtggaccaactggagcagccactggagggctttagaaggcaaatggaatacatatcaaatgctatataaagaaaacatctgtttacac

SEQ ID NO: 365949 - DNA, 120 bp, Artificial Sequence
  ENSG00000141252_81 (sequence is synthesized)
agagtcccccacagcctcatacctacacccaatatcaaatgctgtataaagaaacatcagtttacacacagagccccccacaacctcatacccacaccgaatatcaaatgctatacaaag

SEQ ID NO: 365950 - DNA, 120 bp, Artificial Sequence
  ENSG00000141252_82 (sequence is synthesized)
aaacatcagtttacacacagagtcccccacagcctcatacccatgcctgtcacatctttgcacagccctaaaggatccagagctttggatcagcagctggctagctcggaggccagagga

SEQ ID NO: 365951 - DNA, 120 bp, Artificial Sequence
  ENSG00000141252_83 (sequence is synthesized)
gggtgctgaggggagtggaggtcagttggggtagccctgggccctggctgcacagtccagctgctgtgtggcctgcatgtggtatcttaggtcatgagagggcctgggcaattcagtgct

SEQ ID NO: 365952 - DNA, 120 bp, Artificial Sequence
  ENSG00000141252_84 (sequence is synthesized)
atctgtacatgttggtggggtgggaaggaaaaggtaactgtgtatttactgtgtcctggatacattatctcatcggatgaaattcctgctaagttaagctccgtttagtggacgggactt

SEQ ID NO: 365953 - DNA, 120 bp, Artificial Sequence
  ENSG00000141252_85 (sequence is synthesized)
ggaggctcaaagagggtaagtgacaggcccaaggatatgtgcctagtgaggggtgagccaggattcgatgtgtgactagtaaggggtcagccaggattcaatatgtgactagtaaggggt

SEQ ID NO: 365954 - DNA, 120 bp, Artificial Sequence
  ENSG00000141252_86 (sequence is synthesized)
cagccaggatttcatatgggactagtaaggggtcggccaggatttgatacgtgactagcaaggggacaagccaggatttgatatgtgactagtgaggggcgagccaggattcgatatgtg

SEQ ID NO: 365955 - DNA, 120 bp, Artificial Sequence
  ENSG00000141252_87 (sequence is synthesized)
gggcgagccaggattcgatatgtgactagtaaggggtcagccaagatttgatatgtgactagtgaggggcgagacaggatttgatatgtgactagtgaggggcgagccaggatttgatat

SEQ ID NO: 365956 - DNA, 120 bp, Artificial Sequence
  ENSG00000141252_88 (sequence is synthesized)
ggatttgatatgtgactggtgaggggtggagccagtcaggatttgatatgtggttagtgaggggttagccagtcaggatttgatatgtggctagtgaggggcgagccaggatttgatatg

SEQ ID NO: 365957 - DNA, 120 bp, Artificial Sequence
  ENSG00000141252_89 (sequence is synthesized)
cgtgacaagtgaggggtgagccaggattcaatacgtgaccagtgaggggcgagccaggattcgatacgtgaccagtgaggggcgagccaggatgcgatacgtgaccagtgaggggcgagc

SEQ ID NO: 365958 - DNA, 120 bp, Artificial Sequence
  ENSG00000141252_90 (sequence is synthesized)
gagccaggattccatacgtgactagtgaggggtgagccaggattcgatatgtgagtagtgaggagtgagccaggatttgatatgtggctactgaggggcgagccaggatttgatatgtga

SEQ ID NO: 365959 - DNA, 120 bp, Artificial Sequence
  ENSG00000141252_91 (sequence is synthesized)
taaggggtcagccaggatttgatacgtgactagtcagggggtcagccaggattcgatacgtgactagtaaggggtcagccaggatttgatatgtgactagtgaggggtgagccaggattt

SEQ ID NO: 365960 - DNA, 120 bp, Artificial Sequence
  ENSG00000141252_92 (sequence is synthesized)
gacatgtgactagtgaggggtgagccaggattcaatatgtgactagtgaggggtgagccaggattcgatatgtacctagtgaggggtcagccaggatttgatatgtggctagtaaggggt

SEQ ID NO: 365961 - DNA, 120 bp, Artificial Sequence
  ENSG00000141252_93 (sequence is synthesized)
gagccagccaggatttgatatgtgactagtgacgagtgagccaggatttgatatgtgactagtaagggggtgaggcaggatttgatatgtgactagtaagggggtgaggcaggatttgat

SEQ ID NO: 365962 - DNA, 120 bp, Artificial Sequence
  ENSG00000141252_94 (sequence is synthesized)
atgtgactggtgaggggtgagacaggatttgatatgtgactagtgaggggtgagccaggatttgctatgtgactagtaagggggcgagccaggatttggctccagccttcattccaacat

SEQ ID NO: 365963 - DNA, 120 bp, Artificial Sequence
  ENSG00000141252_95 (sequence is synthesized)
ccatgccttttgtacttcaccagcagttttcaaatttatgggacaaaattttacattggattccctctatacaaaatagataaaagtattttatgaatacattttatgagttcaaatatt

SEQ ID NO: 365964 - DNA, 120 bp, Artificial Sequence
  ENSG00000141252_96 (sequence is synthesized)
tttcagaagaaatcagtaaaagcattgaaaactattccagcaaataggaagcactttaaaccaaggttatggatgaaaatgtgtgtgtatcaaccccagtttacttctgggttgcacaga

SEQ ID NO: 365965 - DNA, 120 bp, Artificial Sequence
  ENSG00000141252_97 (sequence is synthesized)
atagagaaatcttgatttaatccagctaagaattttcaaatagtatccattttgttttgttttaaacagctcttcttgcaatggtagaggctcttcaattaaacagagatggtaacaggc

SEQ ID NO: 365966 - DNA, 120 bp, Artificial Sequence
  ENSG00000141252_98 (sequence is synthesized)
gagatggaggaactggcaacggagaaaggagatttagatcaaacaccaccaaaagggaggctggctgggaggaccagctctgagaaacctgtaaccatgtactttgcagctagccctgca

SEQ ID NO: 365967 - DNA, 120 bp, Artificial Sequence
  ENSG00000141252_99 (sequence is synthesized)
ttcattctttcccagcaccacaagggcaggagccaagagagcagagcttccaggagcagttctgaaatgatgcaatcaaatgtgtctggtcccttgattaaatgattgtaatagaatgga

SEQ ID NO: 365968 - DNA, 120 bp, Artificial Sequence
  ENSG00000141252_100 (sequence is synthesized)
atggagggctgtcatgtttagattattgttgataaaccgttttgagattttgaaatatacaaagctgccagcttggaaagtaacagtcattgctatggacatgattggctttgggggcat

SEQ ID NO: 365969 - DNA, 120 bp, Artificial Sequence
  ENSG00000141252_101 (sequence is synthesized)
caagccctcccagttcgctgtgtctacccagaacattctgctccgagtcctgctgcagagcccaggaaatgctgacagcacctgtcaattttggcctcaccctatgagctcatttaaaat

SEQ ID NO: 365970 - DNA, 120 bp, Artificial Sequence
  ENSG00000141252_102 (sequence is synthesized)
cacccaggatgctcattgtttggatgggtcaaatcttcaaaatcaaatggaaaaagaagcctcttgcgtaagataaaagataatgaggaaaacatttcacataaccaaagcattagaatg

SEQ ID NO: 365971 - DNA, 120 bp, Artificial Sequence
  ENSG00000141252_103 (sequence is synthesized)
ttaagtcacttcatattagacctttctactgtttcttcattgtttgtttctgttttttcccagtaataaattagagttctttttcctgtgtggagcctggttatgaaaccttgcataaga

SEQ ID NO: 365972 - DNA, 120 bp, Artificial Sequence
  ENSG00000141252_104 (sequence is synthesized)
ctcttcatgtttctgggccttggctttcttatctgtgaaatgaagatggaggtcccttcctgcttttctgtggttctgtgtgtacacatccctaaagcttttagaatacaaatatccgct

SEQ ID NO: 365973 - DNA, 120 bp, Artificial Sequence
  ENSG00000141252_105 (sequence is synthesized)
gatttgaaaaaacattaggagtcatttgagcttcccacagctggagaatcatccacgtacgatgtgattcttttaaacaagctctctcagtattgattttttcctttccccaagagctct

SEQ ID NO: 365974 - DNA, 120 bp, Artificial Sequence
  ENSG00000141252_106 (sequence is synthesized)
gtaaaaatagtgttttcttgccagagacatcagggcctcagaactactgacttccttctatgaacatattatatggtttgtgtttggcttaggatctctttaacagaccatccagctcca

SEQ ID NO: 365975 - DNA, 120 bp, Artificial Sequence
  ENSG00000141252_107 (sequence is synthesized)
ttgtgagaggctgactcagcagagccctccagaccgtccagctccactgtgaaaggctgactcagcagaaccctccagaccattcccactcttcgggattagaatgcccttccctgccag

SEQ ID NO: 365976 - DNA, 120 bp, Artificial Sequence
  ENSG00000141252_108 (sequence is synthesized)
cccggggcaggctaggagctggtgctgcacccatctcctgcatgcacccttgggggatggcacactgcagcattgcctccttctgttcccaggactcaatgttgccaagtgccacgtagt

SEQ ID NO: 365977 - DNA, 120 bp, Artificial Sequence
  ENSG00000141252_109 (sequence is synthesized)
ccaagaatcccgccagtttgctataggtgtcttccagagcctgtcgttagggctcaggttgaagcaggtctgtcacttttgttcacagcttgttcagggaccacctcggtgctctcagca

SEQ ID NO: 365978 - DNA, 120 bp, Artificial Sequence
  ENSG00000141252_110 (sequence is synthesized)
atgttctctcccctgcgcctggctcctggcctgttccccacgtctccatcttaccctctggtccaccctagtgtttgccagagattctctttcccttccccttattgaaatcctgacata

SEQ ID NO: 365979 - DNA, 120 bp, Artificial Sequence
  ENSG00000141252_111 (sequence is synthesized)
taagattctacacgcatacctcttcaagtgttttattatggaaatttttgaatatattcaaaagtagaggaaacagtgtggtcagcctctatgtacctgtcactcagcttcacgatctta

SEQ ID NO: 365980 - DNA, 120 bp, Artificial Sequence
  ENSG00000141252_112 (sequence is synthesized)
tttcatctgcacctcttcccggtaacttcatattattttgaagcaacatccccacgtgtcatatcatttctagttttctgtgttaaagaatcccaaactcctcccagttgactggagaga

SEQ ID NO: 365981 - DNA, 120 bp, Artificial Sequence
  ENSG00000141252_113 (sequence is synthesized)
aaggtgtctgtgaattcccctccaggttgcatgtcacttagtccagccacctctctcatctcccaggctgccggtcagcttgggagtcggtgtccctccccgttctgctgcagtcccctg

SEQ ID NO: 365982 - DNA, 120 bp, Artificial Sequence
  ENSG00000141252_114 (sequence is synthesized)
ctgtggggcactcggcaggagaacaggatcctttacgagtgggtagcttagctgagaagggaaggctgtttcaggcaggtcggggacaaggcaggaaaaggaaagggtctgggtcacacc

SEQ ID NO: 365983 - DNA, 120 bp, Artificial Sequence
  ENSG00000141252_115 (sequence is synthesized)
tcactgtcgggtccgctgggcacactcgcatttgtcctgagtatcagtccctacagaacgaataagaaactccccaggacaaaagggcctgattcctgggataccaaagctgtgacctga

SEQ ID NO: 365984 - DNA, 120 bp, Artificial Sequence
  ENSG00000141252_116 (sequence is synthesized)
gtcctggggcgtgctcatctctgggttcttgttctttttaatagactttatgttttagaacagtttcaggttcacagccaaattaagcagcaagcacagagatttcccgtgtacctgacc

SEQ ID NO: 365985 - DNA, 120 bp, Artificial Sequence
  ENSG00000141252_117 (sequence is synthesized)
cccccaacatgcacagtcttcccattaccgacacctccccacacacaaagtggcacattcgttacagtggatgaacctgcatcaacacgtcattatcacccggactctgacgtcgcgctg

SEQ ID NO: 365986 - DNA, 120 bp, Artificial Sequence
  ENSG00000141252_118 (sequence is synthesized)
gacattccctcggtttggacaaatgtacagtgacgtgtggccgccatttcagtgtcatactcaactgggttgtttttaaaaccatacttcccaccagcatcctcacaatttgagtgtccc

SEQ ID NO: 365987 - DNA, 120 bp, Artificial Sequence
  ENSG00000141252_119 (sequence is synthesized)
caccatccagctgcggtttgttctggtgcctgcagtactgattttaatttgtacacaaaagaagcataatcataaaactaaatctgctacttaaagtcataggcaacagtaacagcagta

SEQ ID NO: 365988 - DNA, 120 bp, Artificial Sequence
  ENSG00000141252_120 (sequence is synthesized)
caattgccagccacgtcaaggcaaacaaaaatgaatggggcctactgttgttttgaactgtgcaggcataagctctccttgcccaggattggataattaaaattctttttcagggatttc

SEQ ID NO: 365989 - DNA, 120 bp, Artificial Sequence
  ENSG00000141252_121 (sequence is synthesized)
atacaagaagtcactgagatatgtttgtacaatggatgggaatttggctttctgtcttcatggaagaacttggcctcctttttcctcttccctctttcatccacggaaacagtatttaga

SEQ ID NO: 365990 - DNA, 120 bp, Artificial Sequence
  ENSG00000141252_122 (sequence is synthesized)
agagcacagattcagcgttgtggttgtgccgtcaccatttccatgtatgaagagatggcccgcatcagttctgtgacgtgcccaaaatcacacgaagcgagttaatcacagacccagatt

SEQ ID NO: 365991 - DNA, 120 bp, Artificial Sequence
  ENSG00000141252_123 (sequence is synthesized)
cacctgttttgctgtggagcctggaaggctgattcataaggaatttcaaataatggcagtgaccatggcctcattagccagcttggtccccctcagtatgacgaagaaactggactgaga

SEQ ID NO: 365992 - DNA, 120 bp, Artificial Sequence
  ENSG00000141252_124 (sequence is synthesized)
gaagaaccccaggttgaagagaactctctgtgttctgcacacctgtgctgccgaaaatacagacaccagtgaggccctaaagagagtaagcgaaccaggaagagaaaaaaatcacacaga

SEQ ID NO: 365993 - DNA, 120 bp, Artificial Sequence
  ENSG00000141252_125 (sequence is synthesized)
tgaatcctcgcagcctgaagggcatttggcacagaaggtgtctcaaaaagtcagctgagggaacatccagatgtcacgcaaaaggatgttttctcctgaatgaagacttacgatatagat

SEQ ID NO: 365994 - DNA, 120 bp, Artificial Sequence
  ENSG00000141252_126 (sequence is synthesized)
gcaaccggaaatgaattccagcttcccgtccaacttttgtctaaccccgtccgttgcatgagatgagtttgctgctgctggacacccactcgctgaagatggtcctgctcgatctcccct

SEQ ID NO: 365995 - DNA, 120 bp, Artificial Sequence
  ENSG00000141252_127 (sequence is synthesized)
gaaacagtccataaagaagcaccaagagaacattttgagctgatttcaaggggaaattataccctattcctccactacaagttggcctgggaccttgtgccacccagagtgacgatagga

SEQ ID NO: 365996 - DNA, 120 bp, Artificial Sequence
  ENSG00000141252_128 (sequence is synthesized)
tgaagttactgttgtaaggaccaagacctgctcattctaagaacacagaacactgacatctgaccagtacatggggtaaagcagagtcaggtgctgggaaaatgctggactcttgtcggc

SEQ ID NO: 365997 - DNA, 120 bp, Artificial Sequence
  ENSG00000141252_129 (sequence is synthesized)
aactgcagtcttcccttcctggctctcagactcaaagctgcccgctttctccactccagctgtttgtgttgagtacatctgtctttttgttttctctgtctctcattgcatctctaaagc

SEQ ID NO: 365998 - DNA, 120 bp, Artificial Sequence
  ENSG00000141252_130 (sequence is synthesized)
aggtaaggtcttgggaaatggcatcctacaaactaacgagagcagcccaaggtggcttctactggcccttgtctgtagcttctccaggctcatcggagcgtaaaggatcagctgaggaga

SEQ ID NO: 365999 - DNA, 120 bp, Artificial Sequence
  ENSG00000141252_131 (sequence is synthesized)
atggagaggccccggagttcctgaaagcactcagttagtgtcgcacctgcgtcagttcagttgcttgtccttttagaatgagacagagcatcacagtattggaggatggcaaaaaaaaaa

SEQ ID NO: 366000 - DNA, 120 bp, Artificial Sequence
  ENSG00000141252_132 (sequence is synthesized)
aggcgtgagccactgcacctggccccaagtaagtttgatgattcaaattctgtctttaaagcaggagaaaaggtgtatttgaggggtctttaccccatctcagaccgaattcttaactcc

SEQ ID NO: 366001 - DNA, 120 bp, Artificial Sequence
  ENSG00000141252_133 (sequence is synthesized)
tttaccccatctcagaccgaattcttaactcctgtctccttgttgtacttgagcttttcttgttcctagtcacaagggaacggtcgcgacagacagccctctcctacttccgtgataacc

SEQ ID NO: 366002 - DNA, 120 bp, Artificial Sequence
  ENSG00000141252_134 (sequence is synthesized)
gtagaattatcagctaggcaaagtgctacttctaataagtcagaaatttaaacttttttttcattgaagacttagagattctagtctttagagatttctggtaactagtgtcttgtgggc

SEQ ID NO: 366003 - DNA, 120 bp, Artificial Sequence
  ENSG00000141252_135 (sequence is synthesized)
aggttctaggaccgtttgtcagccctggaattttccagatctctgtaattaaggatgtactgttttaaggctgatctgttcttgattcattcactgtaagcaaagacacattttcagttg

SEQ ID NO: 366004 - DNA, 120 bp, Artificial Sequence
  ENSG00000141252_136 (sequence is synthesized)
cttttgcagaacataacattttgagtcatttgtcttgatctgtaatgctaatgttttattacactataaatgtttaccttgcaaaatattgttgcatatattactttacttgatttactc

SEQ ID NO: 366005 - DNA, 120 bp, Artificial Sequence
  ENSG00000141252_137 (sequence is synthesized)
gaacttggcaactggaagtcctggctatttgggaaaagtagtcctttgttaaacttggacaagttgttccttttaatgtgccccatttccaaaaatattgaatttctttacctttcattc

SEQ ID NO: 366006 - DNA, 120 bp, Artificial Sequence
  ENSG00000141252_138 (sequence is synthesized)
agcaaaagcagcagaaacttttgcttaaacgtttccttgtcttttgccacttggaggtgttgcttgaaatgctctcatcctccggggttacctttcgtcaaaggaagctgcatgaacgca

SEQ ID NO: 366007 - DNA, 120 bp, Artificial Sequence
  ENSG00000141252_139 (sequence is synthesized)
tccgtcactcgcagctatttcagggctagcttgttttaagttaggggtgataacagatataggcagaactttgcaatgtaaatgtttagtcttatttgggcactgctgaatttgtttccg

SEQ ID NO: 366008 - DNA, 120 bp, Artificial Sequence
  ENSG00000141252_140 (sequence is synthesized)
agcctcgtcttgtgattttaatttctggcttgtctcctgaaaacaacaaaaatgagctctttggttcacattttcagtggctttggtttgcagaaatcataaataaaagtaacttacatg

SEQ ID NO: 366009 - DNA, 120 bp, Artificial Sequence
  ENSG00000141252_141 (sequence is synthesized)
gaacagaacattttaacaaacaaggtgagaattactccgtttgctctttacagtcctttggtttttggttcacaaacttggaaagaaatctgtgctttaaataaagccttcttatactcc

SEQ ID NO: 366010 - DNA, 120 bp, Artificial Sequence
  ENSG00000141252_142 (sequence is synthesized)
agaagggaaagtggaggtggggaggtggtgcgggtgagaagcggtttctgaatcagaaggaaaggaaagagaaccctttctaggctttgattgtctttggcgagggctgggggttctggt

SEQ ID NO: 366011 - DNA, 120 bp, Artificial Sequence
  ENSG00000141252_143 (sequence is synthesized)
ggttttggggaaaggaattgtgcgcttagagaggacgacgctaggagaatgcaggccttgggtgccatcctcagattctggggactgtgggggcttcatgcatttaccagactcgtgcca

SEQ ID NO: 366012 - DNA, 120 bp, Artificial Sequence
  ENSG00000141252_144 (sequence is synthesized)
atggggattccgcagatccggcagctttccgaaaggaaacccaaaacactgcagctgcatggattgaactggacgtgatgtgaaatgaaataagccagacacgggaagacagattcctca

SEQ ID NO: 366013 - DNA, 120 bp, Artificial Sequence
  ENSG00000141252_145 (sequence is synthesized)
agatacgtggaaccttaaagtttttgcatttctttcctcaagagagaataagcctaatttgtcacttcttttttatccacagctccttcattcccaaattcatcacccacctcttcaagt

SEQ ID NO: 366014 - DNA, 120 bp, Artificial Sequence
  ENSG00000141252_146 (sequence is synthesized)
catggctcgtggtgccaagaagcatctgaagcgggtagcagctccaaagcattggatgctggataaattgaccggtgtgtttgctcctcgtccgtccaccagtccccacaagttgagaga

SEQ ID NO: 366015 - DNA, 120 bp, Artificial Sequence
  ENSG00000141252_147 (sequence is synthesized)
gagtatatcaataccctgttcccaaccgagcaaagtaagaatcacgaggcacggaaagataacactcggcttaaatgtgatagcgttgccatgaaggaagcatgccaaatacagtgacag

SEQ ID NO: 366016 - DNA, 120 bp, Artificial Sequence
  ENSG00000141252_148 (sequence is synthesized)
aagatggattgaaaaggcttactcccttgaggaaatggtgttttagctgaatactacaggccaagttaataatttttttttgagatggggtctcactctcttgcccgggctagagtgcag

SEQ ID NO: 366017 - DNA, 120 bp, Artificial Sequence
  ENSG00000141252_149 (sequence is synthesized)
tggcacaatcatagctcactgcaacctcaaattcctggactcaagcactcctcccacttcagcctcctcagtagctagcactacaggtgtgtgccaccacacccagctgagtattattat

SEQ ID NO: 366018 - DNA, 89 bp, Artificial Sequence
  ENSG00000141252_150 (sequence is synthesized)
ctacaggtgtgtgccaccacacccagctgagtattattattattttgagatggagtcttgctttgtcaccaggttggggtggcactccc

SEQ ID NO: 366019 - DNA, 120 bp, Artificial Sequence
  ENSG00000141255_0 (sequence is synthesized)
ggcgagggaaactgagggcgaaagttgtgtgtcgtgttggcaggagggcctagaagggaaagactgtgcgttgataccaaactgcccccactccgtgggcgggtcaggagaggcctttgg

SEQ ID NO: 366020 - DNA, 120 bp, Artificial Sequence
  ENSG00000141255_1 (sequence is synthesized)
aagagcgtctcaactcggactggagcctcttctctcccaccgcggtctagtgggacaatgtcatattataaatttggaatgctgaatagaaaattatagattttgatattgaaggaaatg

SEQ ID NO: 366021 - DNA, 120 bp, Artificial Sequence
  ENSG00000141255_2 (sequence is synthesized)
aagcgaagcctaaatgaaaattcagctcgaagtacagcaggctgtttgcctgttccgttgttcaatcagaaaaagaggaacagacagccattaacttctaatccacttaaagatgattca

SEQ ID NO: 366022 - DNA, 120 bp, Artificial Sequence
  ENSG00000141255_3 (sequence is synthesized)
ggtatcagtaccccttctgacaattatgattttcctcctctacctacagattgggcctgggaagctgtgaatccagagttggctcctgtaatgaaaacagtggacaccgggcaaatacca

SEQ ID NO: 366023 - DNA, 120 bp, Artificial Sequence
  ENSG00000141255_4 (sequence is synthesized)
cattcagtttctcgtcctctgagaagtcaagattctgtctttaactctattcaatcaaatactggaagaagccagggtggttggagctacagagatggtaacaaaaataccagcttgaaa

SEQ ID NO: 366024 - DNA, 120 bp, Artificial Sequence
  ENSG00000141255_5 (sequence is synthesized)
acttggaataaaaatgattttaagcctcaatgtaaacgaacaaacttagtggcaaatgatggaaaaaattcttgtccagtgagttcgggagctcaacaacaaaaacaattaagaatacct

SEQ ID NO: 366025 - DNA, 120 bp, Artificial Sequence
  ENSG00000141255_6 (sequence is synthesized)
tcgcaacaaagaaaccgagctactcagacaaacacattcatcaaaaatatctggctgcacaatgagagggctagacaaaaacagtgcactacagacacttaagcccaattttcaacaaaa

SEQ ID NO: 366026 - DNA, 120 bp, Artificial Sequence
  ENSG00000141255_7 (sequence is synthesized)
tcaatataagaaacaaatgttggatgatattccagaagacaacaccctgaaggaaacctcattgtatcagttacagtttaaggaaaaagctagttctttaagaattatttctgcagttat

SEQ ID NO: 366027 - DNA, 120 bp, Artificial Sequence
  ENSG00000141255_8 (sequence is synthesized)
tgaaagcatgaagtattggcgtgaacatgcacagaaaactgtacttctttttgaagtattagctgttcttgattcagctgttacacctggcccatattattcgaagacttttcttatgag

SEQ ID NO: 366028 - DNA, 120 bp, Artificial Sequence
  ENSG00000141255_9 (sequence is synthesized)
ggatgggaaaaatactctgccttgtgtcttttatgaaatcgatcgtgaacttccgagactgattagaggccgagttcatagatgtgttggcaactatgaccagaaaaagaacattttcca

SEQ ID NO: 366029 - DNA, 120 bp, Artificial Sequence
  ENSG00000141255_10 (sequence is synthesized)
atgtgtttctgtcagaccggcgtctgtttctgaacaaaaaactttccaggcatttgtcaaaattgcagatgttgagatgcagtattatattaatgtgatgaatgaaacttaagtagtgat

SEQ ID NO: 366030 - DNA, 120 bp, Artificial Sequence
  ENSG00000141255_11 (sequence is synthesized)
aaaaggaagtttagcataaattatagcagttttctgttattgcttaatttaccatctccatagttttatagctactattgtatttcacttgttgaattaaagtatttgaattcttttaaa

SEQ ID NO: 366031 - DNA, 120 bp, Artificial Sequence
  ENSG00000141255_12 (sequence is synthesized)
cggcggttgctgacggggccgcctggacgacggttgacggaggcgagggaaactgagggcgaaagttgtgtgtcgtgttggcaggagggcctagaagggaaagactgtctagtgggacaa

SEQ ID NO: 366032 - DNA, 120 bp, Artificial Sequence
  ENSG00000141255_13 (sequence is synthesized)
aacaaacggatgtctggaccctaagggccagggggtgaggggaagtggggcacactttttagacgatggtggggctgaggccggttgggcaggagatctgcctctgtctctccagtcaca

SEQ ID NO: 366033 - DNA, 120 bp, Artificial Sequence
  ENSG00000141255_14 (sequence is synthesized)
ggacagtctcctttcctctctgggcaaaactctaaggagctggagccatccctgggtccacagtgtgagaacgccaaggaagagcgttaacgtcatcgcgcccggccaagggcggccagg

SEQ ID NO: 366034 - DNA, 120 bp, Artificial Sequence
  ENSG00000141255_15 (sequence is synthesized)
caggcagcgaagatgccatcgcgccgaggtggcggccactgcgcctgcgcggtccacggcgcctgcgaacagcctgattcccgcgctttcttcgcgggcgggaagggcggcggttgctga

SEQ ID NO: 366035 - DNA, 120 bp, Artificial Sequence
  ENSG00000141255_16 (sequence is synthesized)
gtgcagagaggctttgagggatggtggagtccggctctgctggcctagaagcagagtgcaccctcgtgctcagtgctcagtgggtgtctgaactgaggggcagttgtcaatttgtctgag

SEQ ID NO: 366036 - DNA, 120 bp, Artificial Sequence
  ENSG00000141255_17 (sequence is synthesized)
tgggaaacatcctggattttgttacttggcaaacagctggtgtaaacctacagccagcagcagtctggagcctgggagcctcctgaagtcccgggtgaagcctctggttttaccaattgc

SEQ ID NO: 366037 - DNA, 120 bp, Artificial Sequence
  ENSG00000141255_18 (sequence is synthesized)
aggtcggcttggctgggagagatggatggcgggaaaggggcagcagtcttgaggagcagggagaggagtctttcctcctgccagcttcccccgtcagccccaaccccagcccacacattg

SEQ ID NO: 366038 - DNA, 120 bp, Artificial Sequence
  ENSG00000141255_19 (sequence is synthesized)
taccatctcttctgctgtgactgggttgcctgaatttgtgggagacccgtgatcccatcccagagtgtgcgggggacggaggtctagtgggacaatgtcatattataaatttggaatgct

SEQ ID NO: 366039 - DNA, 120 bp, Artificial Sequence
  ENSG00000141255_20 (sequence is synthesized)
ctcccgcaagctcccgcagccccggcgctgcctcgctgacggctctccgccttccatggccgccatctgaacctgggcttcagctctgtccccagcctcccggggactcagattccctga

SEQ ID NO: 366040 - DNA, 120 bp, Artificial Sequence
  ENSG00000141255_21 (sequence is synthesized)
agcctgattcccgcgctttcttcgcgggcgggaagggcggcggttgctgacggggccgcctggacgacggttgacggagattgggcctgggaagctgtgaatccagagttggctcctgta

SEQ ID NO: 366041 - DNA, 120 bp, Artificial Sequence
  ENSG00000141255_22 (sequence is synthesized)
tctcaactcggactggagcctcttctctcccaccgcggtcaggagccaaaacaggccgccatttgaggccgtggtttttgtgggtggtgtgtgtgtgtgtgcgtgcagattgagcacact

SEQ ID NO: 366042 - DNA, 120 bp, Artificial Sequence
  ENSG00000141255_23 (sequence is synthesized)
ctgtacttctttttgaagtattaggatcgtgaacttccgagactgattagaggccgagttcatagatgtgttggcaactatgaccagaaaaagaacattttccaatgtgtttctgtcaga

SEQ ID NO: 366043 - DNA, 120 bp, Artificial Sequence
  ENSG00000141255_24 (sequence is synthesized)
gtgtcctatctagattcttccactgacttgctctatagcaatgcacaagctttttgaacttcttttcccttcgagttccctaagtttcaaagtttatattttgtgacttttgacctgaat

SEQ ID NO: 366044 - DNA, 120 bp, Artificial Sequence
  ENSG00000141255_25 (sequence is synthesized)
gcctaaatgaaaattcagctcgaagtacagcagtataaagacagatggcaaggatgatgagaaccaggggaatgatgatgcataatgaagataatagctgtttgcctgttccgttgttca

SEQ ID NO: 366045 - DNA, 120 bp, Artificial Sequence
  ENSG00000141258_0 (sequence is synthesized)
cgagaggcgcggaggcggcgagggcgcgggggctctgaggaccgctcggcgccgcctcctgccacaccatgggcagcgcagaggacgcagtcaaagagaaactgctgtggaacgtgaaga

SEQ ID NO: 366046 - DNA, 120 bp, Artificial Sequence
  ENSG00000141258_1 (sequence is synthesized)
aggaggtgaagcaaatcatggaggaggctgtcaccaggaagtttgtgcatgaagacagcagccacatcattgctttatgtggtgcagtggaggcttgcctcttgcatcagctgagacgcc

SEQ ID NO: 366047 - DNA, 120 bp, Artificial Sequence
  ENSG00000141258_2 (sequence is synthesized)
gtgccgctggcttcctgcgcagtgacaagatggcagccctgttcaccaaggtggggaagacgtgcccagtggcgggggagatttgccacaaggtacaggagctgcagcaacaagcagagg

SEQ ID NO: 366048 - DNA, 120 bp, Artificial Sequence
  ENSG00000141258_3 (sequence is synthesized)
gcaggaaaccctcaggggtcagccaggaggccctgcggagacagggctcagccagcgggaaggccccggccctcagccctcaggccttgaaacacgtatgggtacgcacggcgctcatcg

SEQ ID NO: 366049 - DNA, 120 bp, Artificial Sequence
  ENSG00000141258_4 (sequence is synthesized)
agaaagttctggacaaggtcgtgcaatacctggcggaaaactgcagcaagtactacgagaaggaggcactgctggcagaccctgtgttcggcccgatcctggcctctcttctagtgggac

SEQ ID NO: 366050 - DNA, 120 bp, Artificial Sequence
  ENSG00000141258_5 (sequence is synthesized)
cctgtgccttggaatacactaagctcaagacagccgatcactactggactgacccctctgctgatgagctggtccagcggcaccgcatccggggtccacctactcgccaggactcccctg

SEQ ID NO: 366051 - DNA, 120 bp, Artificial Sequence
  ENSG00000141258_6 (sequence is synthesized)
caaagcgcccagccctggggatccggaaacggcactcaagcggcagcgcgtcggaggacaggctggctgcctgtgcccgcgagtgtgtggagtccctgcaccagaactcacggacgcggc

SEQ ID NO: 366052 - DNA, 120 bp, Artificial Sequence
  ENSG00000141258_7 (sequence is synthesized)
tgctctatggcaagaaccacgtgctggtgcagccgaaggaggatatggaggcggtccctggctacctctccctgcaccagtctgcagagagcctgactctgaagtggacccccaaccagc

SEQ ID NO: 366053 - DNA, 120 bp, Artificial Sequence
  ENSG00000141258_8 (sequence is synthesized)
tcatgaatgggactctgggggactccgagctggaaaagagcgtttactgggactatgccctcgtggtgcccttcagccaggtcgtgtgcatccactgccaccagcaaaagagcggtggca

SEQ ID NO: 366054 - DNA, 120 bp, Artificial Sequence
  ENSG00000141258_9 (sequence is synthesized)
cgcttgtgctggtgagccaggatggcatccagaggccgccgctgcatttcccacagggaggacacctgctgtcctttctgtcctgtctggagaatgggctgctgcctcggggacagctag

SEQ ID NO: 366055 - DNA, 120 bp, Artificial Sequence
  ENSG00000141258_10 (sequence is synthesized)
agcccccgctgtggacccagcaagggaaggggaaagtgttccccaagctacggaaacgaagcagcattcgctccgtggatatggaggagatgggcacggggcgggccaccgactatgtgt

SEQ ID NO: 366056 - DNA, 120 bp, Artificial Sequence
  ENSG00000141258_11 (sequence is synthesized)
tccggatcatctaccccggccacaggcacgagcacatcactattaactaccaccacctagcggccagccgcgcggcctcggtggacgatgatgaggaagaggaggataaactgcacgcga

SEQ ID NO: 366057 - DNA, 120 bp, Artificial Sequence
  ENSG00000141258_12 (sequence is synthesized)
tgctctcaatgatctgctcgcggaacctcacagctcccaatccgatgaaagacgctggtgacatgatcgagatgcagggctttgggcccagcctgccagcctggcacctggagcccctgt

SEQ ID NO: 366058 - DNA, 120 bp, Artificial Sequence
  ENSG00000141258_13 (sequence is synthesized)
gcagtcagggctcctcctgcctctcctgctcctccagcagctccccacatgcaacccccagccactgtagctgcatccccgaccggttgccgctcaggctactgtgtgagagtatgaaga

SEQ ID NO: 366059 - DNA, 120 bp, Artificial Sequence
  ENSG00000141258_14 (sequence is synthesized)
ggcagatcgtgtcccgggccttctacggctggctggcacactgccgccacctgtccacggtgcggacccacctgtcggcgctggtgcaccatagcgttatcccacctgaccggcccccgg

SEQ ID NO: 366060 - DNA, 120 bp, Artificial Sequence
  ENSG00000141258_15 (sequence is synthesized)
gggcctccgcgggcctcaccaaggacgtgtggagcaagtatcagaaggacaaaaagaactacaaagagctggagctgctgcggcaagtttactacggaggcatagagcacgagatccgca

SEQ ID NO: 366061 - DNA, 120 bp, Artificial Sequence
  ENSG00000141258_16 (sequence is synthesized)
aggacgtctggccctttctgcttggccactacaagttcggcatgagcaagaaggagatggagcaggtggacgcagtggtggcagcaaggtaccagcaggtgttggcagagtggaaggcct

SEQ ID NO: 366062 - DNA, 120 bp, Artificial Sequence
  ENSG00000141258_17 (sequence is synthesized)
gcgaggtggtggtgaggcagcgggagcgggaggcccacccagccacacgcaccaagttctcctcaggcagcagcatcgacagccacgtgcagcgcctcatccaccgagactccaccatca

SEQ ID NO: 366063 - DNA, 120 bp, Artificial Sequence
  ENSG00000141258_18 (sequence is synthesized)
gcaacgatgtgtttatctcagtggatgatctggaacccccggagccccaggaccctgaagattccagaccaaaacctgagcaggaagcaggacccgggactccgggcaccgccgtggtgg

SEQ ID NO: 366064 - DNA, 120 bp, Artificial Sequence
  ENSG00000141258_19 (sequence is synthesized)
tccagtcaagcctagatgaggggcagagcgtgggcttcgaagaggaggacggcggtggggaggaaggctccagtgggcccggccctgcagctcacactttgagggagccccaggatccca

SEQ ID NO: 366065 - DNA, 120 bp, Artificial Sequence
  ENSG00000141258_20 (sequence is synthesized)
gccaggagaagcctcaggccggagaactggaggccggagaggagcttgcggctgtgtgtgcggctgcctacactatagaattactggacactgtggccttaaacctgcaccgcatagaca

SEQ ID NO: 366066 - DNA, 120 bp, Artificial Sequence
  ENSG00000141258_21 (sequence is synthesized)
aggatgtgcagaggtgtgaccgcaactactggtacttcacgccccccaacctcgagaggctcagagacgtcatgtgcagctacgtgtgggagcacctggacgtgggctatgtgcagggca

SEQ ID NO: 366067 - DNA, 120 bp, Artificial Sequence
  ENSG00000141258_22 (sequence is synthesized)
tgtgcgatctgctggcgcctctcctggtcaccctcgacaatgatcagctggcctacagctgcttcagccacctcatgaagaggatgagccagaacttccccaacgggggtgccatggaca

SEQ ID NO: 366068 - DNA, 120 bp, Artificial Sequence
  ENSG00000141258_23 (sequence is synthesized)
cccactttgccaacatgcgctccctcatccagatcctggactcagagctgtttgagctgatgcatcagaatggagactacacccacttctacttctgttatcgctggttcctgctggatt

SEQ ID NO: 366069 - DNA, 120 bp, Artificial Sequence
  ENSG00000141258_24 (sequence is synthesized)
ttaagagagaactgctgtatgaggatgtgtttgctgtgtgggaggtgatctgggcagccaggcacatctcatcggagcactttgtcctgttcatcgccctcgccctggtggaggcctacc

SEQ ID NO: 366070 - DNA, 120 bp, Artificial Sequence
  ENSG00000141258_25 (sequence is synthesized)
gagagatcatccgtgacaacaacatggacttcactgacatcatcaagtttttcaatgaacgtgctgagcatcacgatgcccaggagatcctgcggattgcccgggacctcgtccacaagg

SEQ ID NO: 366071 - DNA, 120 bp, Artificial Sequence
  ENSG00000141258_26 (sequence is synthesized)
tgcagatgctcatagagaacaagtgagctggggccaggaggcagcagccgtgcagagcctgggctccggcagggagaggtgcaggggagtcaccgcccagacctccccagccaccaaccg

SEQ ID NO: 366072 - DNA, 120 bp, Artificial Sequence
  ENSG00000141258_27 (sequence is synthesized)
accccacctctgttcctaacaaagcggttgtgagcctggatccgactcccggcagtgctgaccctgcagggcaagtcaggggccaggatgccctcggatcagggccgggatgggaggggt

SEQ ID NO: 366073 - DNA, 120 bp, Artificial Sequence
  ENSG00000141258_28 (sequence is synthesized)
cagcctcagggagcagctgccttgggggacacacctactctgctcccctctcacacatctgggagtagccccactgccacctgcagccgcagcctggactgctgcccacgagtgaacctg

SEQ ID NO: 366074 - DNA, 120 bp, Artificial Sequence
  ENSG00000141258_29 (sequence is synthesized)
gggccccacaggattaacaggggctatagcggcctgggccctactcagctggggtggcagagggcgagaggctctgtgctgtgtcccttctgagggtccctttgcagtcccagtatattg

SEQ ID NO: 366075 - DNA, 120 bp, Artificial Sequence
  ENSG00000141258_30 (sequence is synthesized)
tgcgtgcaccagccccagctggagcaaccaaaactgcttctggtttaggcacacgtcacgggtgcgggagacccgggcacgggagacccgggccgccttcaggccgctcccccgagattc

SEQ ID NO: 366076 - DNA, 120 bp, Artificial Sequence
  ENSG00000141258_31 (sequence is synthesized)
tggggcagtcggaagatgtgggccctgggtgggagcagcccacttcagcagcactgccactgcctttggccacctgaggtgacccccaggcctccccggccttgtacagtgtacctctgt

SEQ ID NO: 366077 - DNA, 120 bp, Artificial Sequence
  ENSG00000141258_32 (sequence is synthesized)
gtatctgtacagcctcgctcctgccaccccacccttgcgttctgcattaggtacttccctgaaaaccacgtgtaagaagtgatgcttttgccagtggatgatctggaatgcgaccggagc

SEQ ID NO: 366078 - DNA, 120 bp, Artificial Sequence
  ENSG00000141258_33 (sequence is synthesized)
acttgctctgaggaatcccagggtgactctgtcggggaagaatccggtcacagcctcccctcagagacaggcctcagttcgagggcagcccattatctgtcgcagacatctgccatgtcc

SEQ ID NO: 366079 - DNA, 120 bp, Artificial Sequence
  ENSG00000141258_34 (sequence is synthesized)
ctgagactgcgggaggcaggggatgcatgggtgtccccatctgtccctggtgagaagcaaggctagctctgccttccacatgcttctcaggatgccaagaggcctaggaacccagaaacc

SEQ ID NO: 366080 - DNA, 120 bp, Artificial Sequence
  ENSG00000141258_35 (sequence is synthesized)
cccttggaggagctgtgtatgcgggggtgccaggaagggcatagctcctgcccccaggcctaggcatgctgcttgctcggccatccccacttcctcctctaccccaacacatgcaggcta

SEQ ID NO: 366081 - DNA, 120 bp, Artificial Sequence
  ENSG00000141258_36 (sequence is synthesized)
ggccttgccctggaacatggaggccctgcccggggctggggcctagtccagcagccaccaaagtctggcagactttctgcatttgagaaacatgacaaagggccccgcagcccttctgca

SEQ ID NO: 366082 - DNA, 120 bp, Artificial Sequence
  ENSG00000141258_37 (sequence is synthesized)
cccagcacagcctgcccagcccagccctgcccccgggcactgcacagcctgtctgggggccagaccaccccattgtccatccttgttgtccgtgagtccttggcctccaccaagcacgtg

SEQ ID NO: 366083 - DNA, 120 bp, Artificial Sequence
  ENSG00000141258_38 (sequence is synthesized)
tggccattgtgtgcctgccttagtgactccgtggttttgtgaggagcagagtgtgtatgatttttgcctcagaaactatactcttctgtgtaacagaccaataaacaacatttgtcaaca

SEQ ID NO: 366084 - DNA, 120 bp, Artificial Sequence
  ENSG00000141258_39 (sequence is synthesized)
tcaagaatctagcagagcagatggaaacagagcagggtagtcagccacctcctagcctgctgccctttctctgggcctctctacagctcttcacgtttccccccagaacgtgctgagcat

SEQ ID NO: 366085 - DNA, 120 bp, Artificial Sequence
  ENSG00000141258_40 (sequence is synthesized)
acctttacttcgtcttccgtttattaatcctgatgatcctccgctgcctctctccatttttcacatgaggaaacgaagattcatgtaggtgaagttcgttgaccaagatccctgggtggt

SEQ ID NO: 366086 - DNA, 120 bp, Artificial Sequence
  ENSG00000141258_41 (sequence is synthesized)
tgggggccaggcgggggccccacagcactctgtccaggtggcaggcagggacagggcacccactgacggctgctgggctgcggctcctcctcctcgcaccctccccagtgccttacctgc

SEQ ID NO: 366087 - DNA, 120 bp, Artificial Sequence
  ENSG00000141258_42 (sequence is synthesized)
cccccaggacagagcctcctcccttctctctctcctcccaccagaggggccgcagcccctccctgctgagcccggttgttgccacaggttgccgctcaggctactgtgtgagagtatgaa

SEQ ID NO: 366088 - DNA, 120 bp, Artificial Sequence
  ENSG00000141258_43 (sequence is synthesized)
ggagcaagtatcagaaggacaaaaaggtgccaaccctggggttccagggccacaggtcgaggggctggggcgggcaggagtgagggcttcagggtaaaatgtgccagtgggtgcggttga

SEQ ID NO: 366089 - DNA, 120 bp, Artificial Sequence
  ENSG00000141258_44 (sequence is synthesized)
caggccagggccgatgccacggagtgaccagggtcccggcagaatctcttgcagctgggcctggggctgacacgggaagggggctggactgggaagccgtcctgcctccacatcgccctg

SEQ ID NO: 366090 - DNA, 120 bp, Artificial Sequence
  ENSG00000141258_45 (sequence is synthesized)
tgaccctggacaaagctttgcctctctccgggcgccatttcctgccccttaaggaaggagagcagaacgagatctcatcccactgtgagctggggcacgggaggacgtggccaccccaaa

SEQ ID NO: 366091 - DNA, 120 bp, Artificial Sequence
  ENSG00000141258_46 (sequence is synthesized)
gcaggccttgcctgggcttcagcagtcactacaggccccgccccagcccattctccgtgggatggggctcacccagctgggccacggtgactgtggaggctgcacagtcttgactccccg

SEQ ID NO: 366092 - DNA, 120 bp, Artificial Sequence
  ENSG00000141258_47 (sequence is synthesized)
gtgaggggagcctgttcccatggggctgatgagatggggagctgggccaggggacgccagggaggggaccttggaagcctcagccccttcccagccggaaagaagcatggcagggcagct

SEQ ID NO: 366093 - DNA, 120 bp, Artificial Sequence
  ENSG00000141258_48 (sequence is synthesized)
ccaccgtccttaccctgaggcccgtcttgagtctgagactcaggacccaaggtccagtgcaggcccagctcctgaaggggagggcctggtgcacgcttcccccatggtcgtggtgtggtc

SEQ ID NO: 366094 - DNA, 120 bp, Artificial Sequence
  ENSG00000141258_49 (sequence is synthesized)
gttttatgcacagtggtcctgagcaccagcctgacctctgggaactggtggggccctgcgagaaaggcctaaggtgcctgtgtctcattttctccaactggaaatggctaactgtgcctc

SEQ ID NO: 366095 - DNA, 120 bp, Artificial Sequence
  ENSG00000141258_50 (sequence is synthesized)
tgctgcctacttctctgggtattgtaggaataaagtgagagagtgcattgtgctcagttttagccaactatagggaaagatggacttactgggatttagggaagccctcctccttgtaga

SEQ ID NO: 366096 - DNA, 120 bp, Artificial Sequence
  ENSG00000141258_51 (sequence is synthesized)
aagacctcaaagctagcaacaggcagcgctgggttctagtcccagatccactactgacaagctgaatgtctctgggcaagcacttcccgtctctgggtctcagtttcccctctccaccca

SEQ ID NO: 366097 - DNA, 120 bp, Artificial Sequence
  ENSG00000141258_52 (sequence is synthesized)
tatcctctgactgcagaggcttcctgagatctgtgggcctgagaataggggagcccgtagagcagccccattggtgtcgactggcgagatccttcctccccgcgatgttgcctgtcactg

SEQ ID NO: 366098 - DNA, 120 bp, Artificial Sequence
  ENSG00000141258_53 (sequence is synthesized)
tacagaactgactatggcaggcttgttcggagcacgggagggtagctctttctggcatcactcctgccttttgaacagcaagttctaaactgtgactgcctggcccaaccaacactgata

SEQ ID NO: 366099 - DNA, 120 bp, Artificial Sequence
  ENSG00000141258_54 (sequence is synthesized)
agtttcaattttaaggacgctttattaatttttctttaaaattgcctctttagataatgtgtattcttgttactttactaaatccttaccaacattaacagaaaatgtaagttgaagtaa

SEQ ID NO: 366100 - DNA, 120 bp, Artificial Sequence
  ENSG00000141258_55 (sequence is synthesized)
catccaggaggctggcaggagagagtcagtggcaccaggctgaccagggaaactgagtcctgttttcctgtgcttctgccccgtccctagtccaggaccccgtgactagcctagcttggc

SEQ ID NO: 366101 - DNA, 120 bp, Artificial Sequence
  ENSG00000141258_56 (sequence is synthesized)
ctcccctcctcccagcgggagctcatttctcataggccatccctgagagcctctcagcccttcatcgtcggtcttccggtgtctcccgctgtagaaggaggatatggaggcggtccctgg

SEQ ID NO: 366102 - DNA, 120 bp, Artificial Sequence
  ENSG00000141258_57 (sequence is synthesized)
cccaggagccagggcagggagtgggtttgacctcaggcagagggatggagaaaccccgcttgctccaggaggccaacctcactctttatttggacgccaagaatagcagggagcggctgc

SEQ ID NO: 366103 - DNA, 120 bp, Artificial Sequence
  ENSG00000141258_58 (sequence is synthesized)
ctggagtgattcccaagctctctaggacggagccaagcctggccgtgaagaggtttgtctgagccaagctctcagcggctgagacggacagctgtccatgtgccgagcgggcagcacaga

SEQ ID NO: 366104 - DNA, 120 bp, Artificial Sequence
  ENSG00000141258_59 (sequence is synthesized)
tctcaggggtcatggctggctgtgtgcacctcttggctatggtcatcctatcttcaggggagtttcgtggggtggtaggaccaggagacaaggaaggaaggaaggatggcaggtctttgg

SEQ ID NO: 366105 - DNA, 120 bp, Artificial Sequence
  ENSG00000141258_60 (sequence is synthesized)
acacagtgacagcagtctggttcctttctagcgtttactgggactatgccctcgtggtgcccttcagccaggtcgtgtgcatccactgccaccagcaaagtaagcctgccttgtcctcgg

SEQ ID NO: 366106 - DNA, 120 bp, Artificial Sequence
  ENSG00000141258_61 (sequence is synthesized)
ctcgggtgggaagggagaggctgccttctgccagctgtgcactgtgcgtggggcctgtaagactcctcgtcctcctcccatccttgttaatggggctcccaggccatgctgtagcccagc

SEQ ID NO: 366107 - DNA, 120 bp, Artificial Sequence
  ENSG00000141258_62 (sequence is synthesized)
cagaggtgggaggattgcttcagttcaagagtttgagaccagcctgggtaacatggcgaaaccctgtctttacaaaaaatgcaaacctttgccgcatgtgttggggtgcgcctgtagtcc

SEQ ID NO: 366108 - DNA, 120 bp, Artificial Sequence
  ENSG00000141258_63 (sequence is synthesized)
cagcttctcgggaggctgaggtggggggaccacctgagccatggaggttgaggctgcagtgagccgtgataccaccactgtactctagcctgggccatagagtgagacaccctgcctcag

SEQ ID NO: 366109 - DNA, 120 bp, Artificial Sequence
  ENSG00000141258_64 (sequence is synthesized)
agagggcacacggcacagggatgtccccccttcccagatgtacctgacaaagagacgcatctttggccagaatgtatttacacacttggcacttagtctcaggctgttgcttggtttagc

SEQ ID NO: 366110 - DNA, 120 bp, Artificial Sequence
  ENSG00000141258_65 (sequence is synthesized)
ttctccagtctctgcctcccctcttcgatctttgccatttcccagtcctggtcacttcacttccaggaccacctcgccaagggcaagccagggcacccagaggctgaaactccaccaagc

SEQ ID NO: 366111 - DNA, 120 bp, Artificial Sequence
  ENSG00000141258_66 (sequence is synthesized)
gactccagctccttgaggacagctctgggaaaaccctttccttttcctgggagggaagaaggtggaatttatagtctgaaaaaggggatttggagtaatcttcagatttggtccagcctg

SEQ ID NO: 366112 - DNA, 120 bp, Artificial Sequence
  ENSG00000141258_67 (sequence is synthesized)
agaggagctagagaacgatcaggacccatctgccagctgtcatgcgcagcctctgtgagggccgatgacctcctgggctgccagcccatcccagacagtcccggtctttcacatcctccc

SEQ ID NO: 366113 - DNA, 120 bp, Artificial Sequence
  ENSG00000141258_68 (sequence is synthesized)
acctctgttctctctcttctgttcttcctagagaggctgcctccgaagagtgaggttctgcagctgccccagcccctcgcctccttccacactctcccaggaaaatcatccaaagagctt

SEQ ID NO: 366114 - DNA, 120 bp, Artificial Sequence
  ENSG00000141258_69 (sequence is synthesized)
ccacgtgtgtgtccgtctgtccttaaaggccgtgtcacctgcacgacagggtggcctctagagtgggacagatctgggttcaaatttcacttttgctacccacgtgacttacaagttatg

SEQ ID NO: 366115 - DNA, 120 bp, Artificial Sequence
  ENSG00000141258_70 (sequence is synthesized)
gaattaccatgagcctctacgtttctgaacctcagtttcctcatctgtaaaatggggatgatgccacttgctgcctgcagtacttatgaggacagaatgagagagaacccaagtgaaggt

SEQ ID NO: 366116 - DNA, 120 bp, Artificial Sequence
  ENSG00000141258_71 (sequence is synthesized)
ccggagttgtgccggcacatcatgggctcagtgcccgtgagctccccttcccgatgtgcacacagaccctgctgacaggccgtccacctgaggacactcagcagccacctgccgtgtgcc

SEQ ID NO: 366117 - DNA, 120 bp, Artificial Sequence
  ENSG00000141258_72 (sequence is synthesized)
tcctgaatcacacttggctccccctgcctggaacgcttttttcctgcacacccctcccccgcgcctcttcattcttaggggcctaccagacctccacttcagccacacctcttcaggaag

SEQ ID NO: 366118 - DNA, 120 bp, Artificial Sequence
  ENSG00000141258_73 (sequence is synthesized)
ctttccctcatccccgcacccccgccccacataccaagcgtgacggccttggctctccctaagtcggagtgccttgggggggacccgtgggttgttccccgttgtctccctgtggggggt

SEQ ID NO: 366119 - DNA, 120 bp, Artificial Sequence
  ENSG00000141258_74 (sequence is synthesized)
gcacagtacatgccttagggtcgtggaaaggctgacttctgggcggcaggtggctctggaggacgtcttcccagggatcccgagggagggaagaatggggcacagccacagtgactctcc

SEQ ID NO: 366120 - DNA, 120 bp, Artificial Sequence
  ENSG00000141258_75 (sequence is synthesized)
acatggacttcactgacatcatcaagtttttcaatgaacgtgctgagcatcacgatgcccaggagatcctgcggattgcccgggacctcgtccacaaggtacttccctgaaaaccacgtg

SEQ ID NO: 366121 - DNA, 120 bp, Artificial Sequence
  ENSG00000141279_0 (sequence is synthesized)
acttccccctctccctccctccttgcgggccctcctccccttccctcccctccgcccccttccccgtaggcagcccgcccgccagtccgcccgcaccgcctccttcccagcccctagcgc

SEQ ID NO: 366122 - DNA, 120 bp, Artificial Sequence
  ENSG00000141279_1 (sequence is synthesized)
gctgggtctctcccccgccccccaggctcccccggtcgctctcctccggcggtcgcccgcgctcggtggatgtggctggcagctgccgccccctccctcgctcgccgcctgctcttcctc

SEQ ID NO: 366123 - DNA, 120 bp, Artificial Sequence
  ENSG00000141279_2 (sequence is synthesized)
cctcggccctccgcctcctcccctcctccttctcgtcttcagccgctcctctcgccgccgcctccacagcctgggcctcgccgcgatgccggagaagaggcccttcgagcggctgcctgc

SEQ ID NO: 366124 - DNA, 120 bp, Artificial Sequence
  ENSG00000141279_3 (sequence is synthesized)
cgatgtctcccccatcaactacagcctttgcctcaagcccgacttgctggacttcaccttcgagggcaagctggaggccgccgcccaggtgaggcaggcgactaatcagattgtgatgaa

SEQ ID NO: 366125 - DNA, 120 bp, Artificial Sequence
  ENSG00000141279_4 (sequence is synthesized)
ttgtgctgatattgatattattacagcttcatatgcaccagaaggagatgaagaaatacatgctacaggatttaactatcagaatgaagatgaaaaagtcaccttgtctttccctagtac

SEQ ID NO: 366126 - DNA, 120 bp, Artificial Sequence
  ENSG00000141279_5 (sequence is synthesized)
tctgcaaacaggtacgggaaccttaaagatagattttgttggagagctgaatgacaaaatgaaaggtttctatagaagtaaatatactaccccttctggagaggtgcgctatgctgctgt

SEQ ID NO: 366127 - DNA, 120 bp, Artificial Sequence
  ENSG00000141279_6 (sequence is synthesized)
aacacagtttgaggctactgatgcccgaagggcttttccttgctgggatgagcctgctatcaaagcaacttttgatatctcattggttgttcctaaagacagagtagctttatcaaacat

SEQ ID NO: 366128 - DNA, 120 bp, Artificial Sequence
  ENSG00000141279_7 (sequence is synthesized)
gaatgtaattgaccggaaaccataccctgatgatgaaaatttagtggaagtgaagtttgcccgcacacctgttatgtctacatatctggtggcatttgttgtgggtgaatatgactttgt

SEQ ID NO: 366129 - DNA, 120 bp, Artificial Sequence
  ENSG00000141279_8 (sequence is synthesized)
agaaacaaggtcaaaagatggtgtgtgtgtccgtgtttacactcctgttggcaaagcagagcaaggaaaatttgcgttagaggttgctgctaaaaccttgcctttttataaggactactt

SEQ ID NO: 366130 - DNA, 120 bp, Artificial Sequence
  ENSG00000141279_9 (sequence is synthesized)
caatgttccttatcctctacctaaaattgatctcattgctattgcagactttgcagctggtgccatggagaactggggccttgttacttatagggagactgcattgcttattgatccaaa

SEQ ID NO: 366131 - DNA, 120 bp, Artificial Sequence
  ENSG00000141279_10 (sequence is synthesized)
aaattcctgttcttcatcccgccagtgggttgctctggttgtgggacatgaactcgcccatcaatggtttggaaatcttgttactatggaatggtggactcatctttggttaaatgaagg

SEQ ID NO: 366132 - DNA, 120 bp, Artificial Sequence
  ENSG00000141279_11 (sequence is synthesized)
ttttgcatcctggattgaatatctgtgtgtagaccactgcttcccagagtatgatatttggactcagtttgtttctgctgattacacccgtgcccaggagcttgacgccttagataacag

SEQ ID NO: 366133 - DNA, 120 bp, Artificial Sequence
  ENSG00000141279_12 (sequence is synthesized)
ccatcctattgaagtcagtgtgggccatccatctgaggttgatgagatatttgatgctatatcatatagcaaaggtgcatctgtcatccgaatgctgcatgactacattggggataagga

SEQ ID NO: 366134 - DNA, 120 bp, Artificial Sequence
  ENSG00000141279_13 (sequence is synthesized)
ctttaagaaaggaatgaacatgtatttaaccaagttccaacaaaagaatgctgccacagaggatctctgggaaagtttagaaaatgctagtggtaaacctatagcagctgtgatgaatac

SEQ ID NO: 366135 - DNA, 120 bp, Artificial Sequence
  ENSG00000141279_14 (sequence is synthesized)
ctggaccaaacaaatgggatttcccctcatttatgtggaagctgaacaggtagaagatgacagattattgaggttgtcccaaaagaagttctgtgctggtgggtcatatgttggtgaaga

SEQ ID NO: 366136 - DNA, 120 bp, Artificial Sequence
  ENSG00000141279_15 (sequence is synthesized)
ttgtccccagtggatggtccctatcacaatctctactagtgaagaccccaaccaggccaaactaaaaattctaatggacaagccagagatgaatgtggttttgaaaaatgtcaaaccaga

SEQ ID NO: 366137 - DNA, 120 bp, Artificial Sequence
  ENSG00000141279_16 (sequence is synthesized)
ccaatgggtgaagttaaacttaggaacagttgggttttatcggacccagtacagctctgccatgctggaaagtttattaccaggcattcgtgacctttctctgccccctgtggatcgact

SEQ ID NO: 366138 - DNA, 120 bp, Artificial Sequence
  ENSG00000141279_17 (sequence is synthesized)
agcgacctgagctgtaacctggggattctctcaactctcttgtcccacacagacttctatgaggaaatccaggagtttgtgaaagatgtcttttcacctataggggagagactgggctgg

SEQ ID NO: 366139 - DNA, 120 bp, Artificial Sequence
  ENSG00000141279_18 (sequence is synthesized)
gaccccaaacctggagaaggtcatctcgatgcactcctgaggggcttggttctgggaaaactaggaaaagcaggacataaggcaacgttagaagaagcccgtcgtcggtttaaggaccac

SEQ ID NO: 366140 - DNA, 120 bp, Artificial Sequence
  ENSG00000141279_19 (sequence is synthesized)
gtggaaggaaaacagattctctccgctgatctgaggagtcctgtctatctgactgttttgaagcatggtgatggcactactttagatattatgttaaaacttcataaacaagcagatatg

SEQ ID NO: 366141 - DNA, 120 bp, Artificial Sequence
  ENSG00000141279_20 (sequence is synthesized)
caagaagagaaaaaccgaatcgaaagagtccttggcgctactcttttgcctgacctgattcaaaaagtcctcacgtttgcactttcagaagaggtacgtccacaggacactgtatcggta

SEQ ID NO: 366142 - DNA, 120 bp, Artificial Sequence
  ENSG00000141279_21 (sequence is synthesized)
attggtggagtagctggaggcagcaagcatggtaggaaagctgcttggaaattcataaaggacaactgggaagaactttataaccgataccagggaggattcttaatatccagactaata

SEQ ID NO: 366143 - DNA, 120 bp, Artificial Sequence
  ENSG00000141279_22 (sequence is synthesized)
aagctatcagttgagggatttgcagttgataaaatggctggagaggttaaggctttcttcgagagtcacccagctccttcagctgagcgtaccatccagcagtgttgtgaaaatattctg

SEQ ID NO: 366144 - DNA, 120 bp, Artificial Sequence
  ENSG00000141279_23 (sequence is synthesized)
ctgaatgctgcctggctaaagcgagatgctgagagcatccaccagtacctccttcagcggaaggcctcaccacccacagtgtgaatcctgaggtgccgccattggcggttctgctgcttc

SEQ ID NO: 366145 - DNA, 120 bp, Artificial Sequence
  ENSG00000141279_24 (sequence is synthesized)
gctgcagggataaggtggagctaccgaacagctgattcatatgccaagaatttggagtcttctttcaaaccagtgggggttggacaatgaatgtagttaactggttcctgctcacactcc

SEQ ID NO: 366146 - DNA, 120 bp, Artificial Sequence
  ENSG00000141279_25 (sequence is synthesized)
agaattaaattctattgaaaaaggaaaatcagcaattcagcaaaaaataaataaaaaataaaaatgtaaatatgatagtaataaaatagagcataacgaaactgtgaaactttctgaagc

SEQ ID NO: 366147 - DNA, 120 bp, Artificial Sequence
  ENSG00000141279_26 (sequence is synthesized)
cttgtcagtggttaaaagtatttaacactctactgttaatgacagatgttctgtttttataacctaccaaaaggaaactagaggcttcttggtgaagagcatttttgtgaagtgggttct

SEQ ID NO: 366148 - DNA, 120 bp, Artificial Sequence
  ENSG00000141279_27 (sequence is synthesized)
gcaaggagcctataaagccaagggtggtgtccatttctgggaatggttaaacacaaaaggctgatagctggtatcacatagttggagtcagtgcataattccaagtggcttttttttttt

SEQ ID NO: 366149 - DNA, 120 bp, Artificial Sequence
  ENSG00000141279_28 (sequence is synthesized)
ttggcacggggactgatcaggaagatatattcctgcataactcaatctgaaccaaggattgtagtttagttttcctccttgccttcccttctgtgtgaccgaccccttggccaaaaaaaa

SEQ ID NO: 366150 - DNA, 120 bp, Artificial Sequence
  ENSG00000141279_29 (sequence is synthesized)
acaaaaagcaaaaaacaaaaacctaccctgttctggtttttttcctccctttagttccacccccaacccccattccctggtgtccttcttagagatgaagaaataataaggaaacatctt

SEQ ID NO: 366151 - DNA, 120 bp, Artificial Sequence
  ENSG00000141279_30 (sequence is synthesized)
tcatagccacattaaataagagaaactgatatacattatttttttctttttaaagatgacttataagaaccctgaaatttatataggtgagacaatagaaataaaaagatcttcagccag

SEQ ID NO: 366152 - DNA, 120 bp, Artificial Sequence
  ENSG00000141279_31 (sequence is synthesized)
gcctttctgaaggagttattctgctaaaaatggtcttagttgtctgaaaagccagctcttgaacctcttcacaacagtatcaacactggcttctcccggttcattttatgcgtgcgagaa

SEQ ID NO: 366153 - DNA, 120 bp, Artificial Sequence
  ENSG00000141279_32 (sequence is synthesized)
gtcagtggtaactgctgcagggcttaatacattagtggtaactggtttaaaaaacaaagactgtaagcctgtgtgtgccactgtttgcttcaacagtatatcctaataagcctcacctat

SEQ ID NO: 366154 - DNA, 120 bp, Artificial Sequence
  ENSG00000141279_33 (sequence is synthesized)
ttaatccaatgagttttaaatctaaatctcattcccttcttctttccctaccttttttttctttttttcttaaaaaaatattttgtgttattaacagaaattcatatttggtgtggctta

SEQ ID NO: 366155 - DNA, 120 bp, Artificial Sequence
  ENSG00000141279_34 (sequence is synthesized)
acggtatttcagaaggtcatcagattgtgagactgcttccttgaaacatttttgtgctattgttttaaaaaaataattaaaaaacagttggcgttaataaaaatgtcaatgtgaaactga

SEQ ID NO: 366156 - DNA, 120 bp, Artificial Sequence
  ENSG00000141279_35 (sequence is synthesized)
aagttacggaagagtcaaggctgggacctcatggcatcattttccatggattgctctccaagtttttgtgttcctggcctttggaaccccttcatcatattccgcagccgctcctctcgc

SEQ ID NO: 366157 - DNA, 120 bp, Artificial Sequence
  ENSG00000141279_36 (sequence is synthesized)
attttgtgacttttgatgcaagagtatatatatatatatatatatcaataaatgtttatatttattttgtgaaggtgccatggagaactggggccttgttacttatagggagactgcatt

SEQ ID NO: 366158 - DNA, 120 bp, Artificial Sequence
  ENSG00000141279_37 (sequence is synthesized)
ctctaaagcctaacttgtccatctgacttactgtctgaatcttcccaacttatgcatgcccacttttattgtttaaatttgtttcttttttttttttttaaacacagggagactgcattg

SEQ ID NO: 366159 - DNA, 120 bp, Artificial Sequence
  ENSG00000141279_38 (sequence is synthesized)
atagcttgagatagaaatggagagaaagtattgtcactctatccaggctgggacattttatttttgttctgaatacttaaggtcaggatccatgtaataaataaattagccttatttgaa

SEQ ID NO: 366160 - DNA, 120 bp, Artificial Sequence
  ENSG00000141279_39 (sequence is synthesized)
cacttccgtgcacatttcaagaatgcagatggacacccctccctttggtgctactgtctgagggtgtaagattttaaagtgagcatctggcggtagtagcatttttagatatattcttgg

SEQ ID NO: 366161 - DNA, 120 bp, Artificial Sequence
  ENSG00000141279_40 (sequence is synthesized)
ctaagtttctcattgcagtagtttcatagctatttatccagcttggagaaccttccctaatttcatatcttctagccaagtttttacatgtctgtcaccacaacataaacatgtgagttg

SEQ ID NO: 366162 - DNA, 120 bp, Artificial Sequence
  ENSG00000141279_41 (sequence is synthesized)
aataacttttaaaagcagagtctgtctgtaaacaagtttttgccttctactttcaattgcctttttagatgagctaagtgttggacagccggctcagtgctgtttttgggactatggaat

SEQ ID NO: 366163 - DNA, 120 bp, Artificial Sequence
  ENSG00000141279_42 (sequence is synthesized)
gcatcttcctccaccactcccctcatttaatggaaggactttcttctctctccatctagcacagtaatcgctaatcccttagacaatgttttcccaaaatttcaggcagctattctatca

SEQ ID NO: 366164 - DNA, 120 bp, Artificial Sequence
  ENSG00000141279_43 (sequence is synthesized)
acaaactgataattaaacttgtgtcacatctttgatattctgttgtattaattctgttggggtagtctttaatcttcgtgaaactttttctttccatattaggaaatattttcctaatat

SEQ ID NO: 366165 - DNA, 120 bp, Artificial Sequence
  ENSG00000141279_44 (sequence is synthesized)
aaagccaggactggaacccaggctctaagggatgacaggaatcatgttctattcaactttattattattagttactacatttttttgaggaccatcgttatacattatgagtgagttaaa

SEQ ID NO: 366166 - DNA, 120 bp, Artificial Sequence
  ENSG00000141279_45 (sequence is synthesized)
ggcagaaaaatgtaagttagaagggttttcctagaaagcgttttatgtaattcagtattacaggctatctgcttcctgtcataaccctgaatcacactgtctgccaggtcagtgtgggcc

SEQ ID NO: 366167 - DNA, 120 bp, Artificial Sequence
  ENSG00000141279_46 (sequence is synthesized)
ccaacagtccataactccaggttggggaatttacatttctggtcaattattagtacagttatttataatttaatctgaaagttgtgctacttggtttatttttagtagaatttaggaaat

SEQ ID NO: 366168 - DNA, 120 bp, Artificial Sequence
  ENSG00000141279_47 (sequence is synthesized)
gccaaccttggtgtttcattattttacaaaataataattaagagaatataagagtggaatttctctagggaatgggttggaaaatatgtagttatatttttcatatcaagttataaatgg

SEQ ID NO: 366169 - DNA, 120 bp, Artificial Sequence
  ENSG00000141279_48 (sequence is synthesized)
ctttaaaattggaatctgaaaattgttattccgttcagtctctgtgcttataagatcaatgtttgtaaaggcctaagctttcttagagattccactgtccaggtgttttcatatatatta

SEQ ID NO: 366170 - DNA, 120 bp, Artificial Sequence
  ENSG00000141279_49 (sequence is synthesized)
agtattttctgtaaacctaaaattgaggttagaaatagaaacccacattattttgtcccttccttgttctttctactgtccctcactttggccctcacaatttcaagtttcccttttctt

SEQ ID NO: 366171 - DNA, 120 bp, Artificial Sequence
  ENSG00000141279_50 (sequence is synthesized)
ttgtctgtgcattcattctgtcttgatgtgttgtcttgttttaatccattagttggcatagatggtcttaattgtttttcatccagatatatctaaaaccagaactccttttaaacatac

SEQ ID NO: 366172 - DNA, 74 bp, Artificial Sequence
  ENSG00000141279_51 (sequence is synthesized)
catccatgattcactacacccatacattgtggtctttgctctttaaatgtttcctcgccgaggtgggcagatca

SEQ ID NO: 366173 - DNA, 120 bp, Artificial Sequence
  ENSG00000141279_52 (sequence is synthesized)
cagcctgggcaacaagtgtgaaactccgtctcaaaaaaaaaaaagtttccttaaatagttactggctttatttaaggacttctccatctcccatcacacatcctttataacagactgaag

SEQ ID NO: 366174 - DNA, 120 bp, Artificial Sequence
  ENSG00000141279_53 (sequence is synthesized)
atcacacatcctttataacagactgaagttggcagagaacagaatgatttatttttagggtaaatggaagtttgttctcagcctcttggtttcacttactgtttaaaaccattgttttgc

SEQ ID NO: 366175 - DNA, 120 bp, Artificial Sequence
  ENSG00000141279_54 (sequence is synthesized)
agctatcagttgagggatttgcagttgataaaatggctggagaggttaaggtaaggaaaatactgtttactcttcacttttcagtctagtaagtaaaaacaataacctggttgtaattat

SEQ ID NO: 366176 - DNA, 120 bp, Artificial Sequence
  ENSG00000141279_55 (sequence is synthesized)
agtgttgggataatgtactgtagcatctctgtgtttttgtttagagaaagacatcatgcagggctgtataggccatattaagaatttcctaaaaatggccaggcatggtagctcacatct

SEQ ID NO: 366177 - DNA, 120 bp, Artificial Sequence
  ENSG00000141279_56 (sequence is synthesized)
agcttcatatgcaccagaaggagatgaagtgtctgggcttcagatgttcagaagtttaatcacattccacttgtggactgcttttcttcttgttcatctttcctgaaatacatgctacag

SEQ ID NO: 366178 - DNA, 120 bp, Artificial Sequence
  ENSG00000141279_57 (sequence is synthesized)
agaaagtaaatatttgaacaagggaatgaatgaatgacagagggaaatggtgactgctttatgaaataacttgttaggttaattctaagacagagtagctttatcaaacatgaatgtaat

SEQ ID NO: 366179 - DNA, 120 bp, Artificial Sequence
  ENSG00000141279_58 (sequence is synthesized)
ggaggtcgaggctgcagtgagctgtgattatgccactgcactctagcctgggtgatgaagtaagaccgtatctcaaaaaataccagtttttatgatagaatttacttagttgcagaagag

SEQ ID NO: 366180 - DNA, 120 bp, Artificial Sequence
  ENSG00000141279_59 (sequence is synthesized)
gttgcagaagaggggtggcaaggggaatgttaatttggctcactgtttcctgaacctgaaagaaccaaagaattagcagtgtagtgtcaaaagttaaataaaatttcttttttgtttagg

SEQ ID NO: 366181 - DNA, 120 bp, Artificial Sequence
  ENSG00000141279_60 (sequence is synthesized)
aggtgagttcagaatcttacctaaacagatttctctcacttatacattttatggccggttttaaattctgcttcagtttagtagtttcaaagaaaaaaaaaaacctaaacttttctttgt

SEQ ID NO: 366182 - DNA, 120 bp, Artificial Sequence
  ENSG00000141279_61 (sequence is synthesized)
gaaacttaggacgaattttcatatagtattgtccagacatttgtccttatgttagggaaggtagtggtagagaagcagatccaaaggcataggactaaggaggagaagaaaaaaaaaaaa

SEQ ID NO: 366183 - DNA, 120 bp, Artificial Sequence
  ENSG00000141279_62 (sequence is synthesized)
aacagccattttaagttacggaagagtcaaggctgggacctcatggcatcattttccatggattgctctccaagtttttgtgttcctggcctttggaaccccttcatcatattccgcagg

SEQ ID NO: 366184 - DNA, 120 bp, Artificial Sequence
  ENSG00000141279_63 (sequence is synthesized)
aagtcaaagtagtagcagttgaacatactattcccaagaagtacttaagttcaattgattgtaaattagatcaaactgctggaagaacagattcttcaaatggacttgagtgagtgccag

SEQ ID NO: 366185 - DNA, 120 bp, Artificial Sequence
  ENSG00000141279_64 (sequence is synthesized)
tattattcttaaattaggcattctgacaaagctgtgttttattatgtggggtgattatttgaggctaggtgcccttggccatgattgtattcacaattttagaatttttattttatattt

SEQ ID NO: 366186 - DNA, 120 bp, Artificial Sequence
  ENSG00000141279_65 (sequence is synthesized)
agccattatctctatagaaaggagggaattaagggtatgggttggggaatgattatatacagttatacacacagacgctcaaacacacgacacattttgatacctgaattgcctatatac

SEQ ID NO: 366187 - DNA, 120 bp, Artificial Sequence
  ENSG00000141279_66 (sequence is synthesized)
tgtgtacctttcttaaaatcattctcttagtatttgacacctatggcttttcctacagtattattagctgttttctggaattcctttccttctttgacatcttttgtttatcttactgta

SEQ ID NO: 366188 - DNA, 79 bp, Artificial Sequence
  ENSG00000141279_67 (sequence is synthesized)
acacacacatatatatatttgctgtcctatgtaggccaggatgatttttatttgtcaagtatttgcaaattatataaat

SEQ ID NO: 366189 - DNA, 120 bp, Artificial Sequence
  ENSG00000141279_68 (sequence is synthesized)
ccaggatgatttttatttgtcaagtatttgcaaattatataaattgttttgaatctgctagtcgtatttttaagtgttaaatctaaatttatttctgtaaatttcaatatggataaagaa

SEQ ID NO: 366190 - DNA, 120 bp, Artificial Sequence
  ENSG00000141279_69 (sequence is synthesized)
ttcatgatatccgttcttatgtttctgcccatatccctatattgtttgcttgtttgggataacctaaaattttttatccagtttactactaatttgttttacctgatgtatcttctcttt

SEQ ID NO: 366191 - DNA, 120 bp, Artificial Sequence
  ENSG00000141279_70 (sequence is synthesized)
caataattttatgttactttctgtttagaataatatttgccacagatatttaggtttaattctgtgtttgaatgattctaatgcctttctctacccactttgaacacttcatcctggaat

SEQ ID NO: 366192 - DNA, 120 bp, Artificial Sequence
  ENSG00000141279_71 (sequence is synthesized)
ggttggctgatgtatgtctctaaacaatttttttttaggagaaggtatgtgggtaatgtaattcctgagcctttgcttttctgaaaagtctttcatttgcctttatacatgaccagattt

SEQ ID NO: 366193 - DNA, 120 bp, Artificial Sequence
  ENSG00000141279_72 (sequence is synthesized)
actgggtatatagatttgttgatgaaaaaaggtaaaaagagcaacttttgacatccagaggttgtctggcactcacagctagcccatgttattctccctattagacataatattacagaa

SEQ ID NO: 366194 - DNA, 120 bp, Artificial Sequence
  ENSG00000141279_73 (sequence is synthesized)
taccaactttagacaaggctacttgagaccataataaagtgagacaaaacaagggatccataattttgcctaggtacagtacatacaggatcactatgctacccgcaaaatatcaaacat

SEQ ID NO: 366195 - DNA, 120 bp, Artificial Sequence
  ENSG00000141279_74 (sequence is synthesized)
ctccatctctcagttaaaatgagtgactactgcttctttaccaattacggttttagatttgctctagtctggcctccgtatagataagatttattgagatacatacccatagaattgcct

SEQ ID NO: 366196 - DNA, 120 bp, Artificial Sequence
  ENSG00000141279_75 (sequence is synthesized)
cataggacttcttgcagcactcaatctagagtgaatccctgtttacttagaccctcttccaaatcatgtaaaccaaatcccaaatcgtatagtgggttctttcttacattcttatggaga

SEQ ID NO: 366197 - DNA, 120 bp, Artificial Sequence
  ENSG00000141279_76 (sequence is synthesized)
caccagtggttccctatggtgtgagttctctcttgccatgagtaataggcccagctcattcaactgtaagagtagtacaatcagcttacaatttttcactttcaaaagtctgtgaatatt

SEQ ID NO: 366198 - DNA, 120 bp, Artificial Sequence
  ENSG00000141279_77 (sequence is synthesized)
gtttccaaagtcttctacatctcactttttcaagaggaggggtcacagactaaaatgtttcttcttcctttgtaggtaagatgttgtttcgttttgctttattttcttcctgcttgcttg

SEQ ID NO: 366199 - DNA, 120 bp, Artificial Sequence
  ENSG00000141279_78 (sequence is synthesized)
ttaaattatatcttgatatcgaaaattaaactgttttttaaaccaggtgttcacttttcattgatttttgcttagtacttggtgaaccctattgatttttagattccgataatttttcag

SEQ ID NO: 366200 - DNA, 120 bp, Artificial Sequence
  ENSG00000141279_79 (sequence is synthesized)
ttatatcttcactgtgatatccattccattcccttctcagttaatacccagtttagctctagtatctgtctctcaaattatgtttaattgcttttatcactttgtcctttagatattttc

SEQ ID NO: 366201 - DNA, 120 bp, Artificial Sequence
  ENSG00000141279_80 (sequence is synthesized)
aaacttaaatcttgttatctatgtcattaatttcctttagtataaattcatttctctgctgctgcttctaatttaaatgcttctgtgctgccatttctttccttatactctcccttcttt

SEQ ID NO: 366202 - DNA, 120 bp, Artificial Sequence
  ENSG00000141279_81 (sequence is synthesized)
ccttcttttcagatgtcttttttattcattgatagaattcattatttatttaatgtttttgagaatatagtcagccaagtttcttctacctctttggtttgtttgtttgtttgtttgttt

SEQ ID NO: 366203 - DNA, 120 bp, Artificial Sequence
  ENSG00000141279_82 (sequence is synthesized)
gaattacaagcatgagccactgcacccagcctgttgtttctttttataatacagaatcttgtcattggttccattttatttactaaataaatggaaaattctgtttactaaagtttcttt

SEQ ID NO: 366204 - DNA, 120 bp, Artificial Sequence
  ENSG00000141279_83 (sequence is synthesized)
gtttctttcctttataactgataccctgcagaacccctaagttttattttgctttcataagtttgctcttttttaaatttttaatgaaagagtaaggactcaagtaggtcaagtggcgac

SEQ ID NO: 366205 - DNA, 120 bp, Artificial Sequence
  ENSG00000141279_84 (sequence is synthesized)
agttttatgtgtagcatatggaagtgccattaaatgaatgacctgtcttgaattgatagagcatctgtctttattcccattgctgccattccagataaagaacaaagcacgtcaaagatt

SEQ ID NO: 366206 - DNA, 120 bp, Artificial Sequence
  ENSG00000141279_85 (sequence is synthesized)
gagaatatttttatttttaattcaaaaataaaagccagagaggcaacttaccatgttttcccaactttgaattcttatagcatactctttactgttctgtgctgtgttgtgttaacatta

SEQ ID NO: 366207 - DNA, 120 bp, Artificial Sequence
  ENSG00000141279_86 (sequence is synthesized)
ttgatttgaaggcatttgcattaaatttgaaatgttaaaatgtaaacaaaaatttagttgtaaataattataatatattgttaaaatccatagcagacactgttcctggatatttgctgg

SEQ ID NO: 366208 - DNA, 120 bp, Artificial Sequence
  ENSG00000141279_87 (sequence is synthesized)
tattttgtgaaggtgccatggagaactggggccttgttacttatagtagtttcatagctatttatccagcttggagaaccttccctaatttcatatcttctagccaagtttttacatgtc

SEQ ID NO: 366209 - DNA, 120 bp, Artificial Sequence
  ENSG00000141279_88 (sequence is synthesized)
ttcaacagccattttaagttacggaagagtcaaggctgggacctcatggcatcattttccatggattgctctccaagtttttgtgttcctggcctttggaaccccttcatcatattccgc

SEQ ID NO: 366210 - DNA, 120 bp, Artificial Sequence
  ENSG00000141293_0 (sequence is synthesized)
gtgcctcgcggtgcagccgggtcgccttccagcccgtccgcctcccgaccagggcccgcgccccgtcccgcctctctcccgcccagccaaatgcaggccgccgccctccctgaggagatc

SEQ ID NO: 366211 - DNA, 120 bp, Artificial Sequence
  ENSG00000141293_1 (sequence is synthesized)
gatccgttggctcctggaagatgctgaagagtttctggcagaaggtttgcggaatgagaacctcagcgctgttgcaagggatcacagagaccatattctacggggctttcagcaaatcaa

SEQ ID NO: 366212 - DNA, 120 bp, Artificial Sequence
  ENSG00000141293_2 (sequence is synthesized)
agccaggtactattgggattttcagccccaagggggagacattggacaggacagctctgatgataatcacagcgggactcttggcctgtccctcacatccgatgcaccctttttgtcaga

SEQ ID NO: 366213 - DNA, 120 bp, Artificial Sequence
  ENSG00000141293_3 (sequence is synthesized)
ttatcaggatgagggaatggaagacatcgtaaaaggagctcaagaacttgataacgtaatcaagcaaggatacttggagaagaaaagcaaagatcatagtttctttggatcggagtggca

SEQ ID NO: 366214 - DNA, 120 bp, Artificial Sequence
  ENSG00000141293_4 (sequence is synthesized)
gaagcgatggtgtgttgtcagcagaggtctcttctactactatgctaatgagaagagcaagcagcccaaagggaccttcctcattaagggctacggtgtacggatggccccccacctgcg

SEQ ID NO: 366215 - DNA, 120 bp, Artificial Sequence
  ENSG00000141293_5 (sequence is synthesized)
aagagattccaagaaagaatcctgctttgaactgacctcccaggataggcgcagctatgagtttacagctactagtccagcagaagccagagactgggtggatcaaataagtttcttgtt

SEQ ID NO: 366216 - DNA, 120 bp, Artificial Sequence
  ENSG00000141293_6 (sequence is synthesized)
gacccactatcttgcctgggagtgtggggataaaagagcctacagaggagaaagaagaagaagatatttatgaagtcttgccagatgaagagcatgatctagaagaggatgagagtggca

SEQ ID NO: 366217 - DNA, 120 bp, Artificial Sequence
  ENSG00000141293_7 (sequence is synthesized)
ctcgacgaaaaggagtagactatgccagttactaccagggcctatgggattgccatggtgaccagccagatgaactgtccttccaacggggtgacctcatccgtattctgagcaaggagt

SEQ ID NO: 366218 - DNA, 120 bp, Artificial Sequence
  ENSG00000141293_8 (sequence is synthesized)
ataacatgtatggctggtgggtgggagaactgaacagcctcgttgggattgttccaaaggagtatctcaccactgcctttgaagtggaagaaagatgaaacccaggaaatatattcttcc

SEQ ID NO: 366219 - DNA, 120 bp, Artificial Sequence
  ENSG00000141293_9 (sequence is synthesized)
ctctctcctgcctttatgaggaaactgatcatcaaaagttcccactccctacttctgccaccccaccaacgccttggactcctctctttgctgaagagacccaagtctcttgacacctca

SEQ ID NO: 366220 - DNA, 120 bp, Artificial Sequence
  ENSG00000141293_10 (sequence is synthesized)
gagtgactgtaagctaccagtaagacaagtgggaagaggcacgttcatcaaacctgttactaaaccagcctagtcatagctcatccccatctctaaatgtgtccacacaaccacatctgc

SEQ ID NO: 366221 - DNA, 120 bp, Artificial Sequence
  ENSG00000141293_11 (sequence is synthesized)
cttttccacaagcttttcacaaagaaggtgagagagaaggaaaccttgggaggaggacattactggttgttctggctggtttgaaaagcacaaataaacttgggatgtggttccttgcca

SEQ ID NO: 366222 - DNA, 120 bp, Artificial Sequence
  ENSG00000141293_12 (sequence is synthesized)
gccactactttgtttctctgaaagatgagagttgccagtgaagtagcttttcttcatttctcatactaatgctagtgattcaccactgatggaaagaaaatgcctctggaattgtttttt

SEQ ID NO: 366223 - DNA, 120 bp, Artificial Sequence
  ENSG00000141293_13 (sequence is synthesized)
tttttcttaaatttggggacagtgtcacttaggataaggttcaactaatagcaacataaaatctaaactaaaaatgacttaattaacacagaaagccaggcacagtggctcacacctgta

SEQ ID NO: 366224 - DNA, 120 bp, Artificial Sequence
  ENSG00000141293_14 (sequence is synthesized)
gagcctcacatttacagccacactctctctgctgtaataattccttctttctgttgttatagatctcttaacattctaataaattctctgtctctgttgtactcttttggcaaaataacc

SEQ ID NO: 366225 - DNA, 120 bp, Artificial Sequence
  ENSG00000141293_15 (sequence is synthesized)
tttcacgttgcatttccctagcttggcagtgatatctgccttactgtcgcagtagcctcttcttaagcttctctaataacctttccttgactattgtggttcctcagggatgtaacagct

SEQ ID NO: 366226 - DNA, 120 bp, Artificial Sequence
  ENSG00000141293_16 (sequence is synthesized)
tataacatgtatggctggtgggtgggagaactgaacagcctcgttgggattgttccaaaggagtatctcaccactgcctttgaagtggaagaaagatgaaacccaggttacctcaaggcc

SEQ ID NO: 366227 - DNA, 120 bp, Artificial Sequence
  ENSG00000141294_0 (sequence is synthesized)
actcggcgtccagtctcttagcaacgactccggcttcctaggaactgctcctttctcaaccattcctgcccacaacaccccagcttgctgccagcaaagcccctccacacccctcaaact

SEQ ID NO: 366228 - DNA, 120 bp, Artificial Sequence
  ENSG00000141294_1 (sequence is synthesized)
ccagacccttcacatcaatttactgttttcttcgacctcaccccagcaattttctctgaatcaaccccctttcctcctctcctaagtctctgagtttctctctcctcctgccatcctgag

SEQ ID NO: 366229 - DNA, 120 bp, Artificial Sequence
  ENSG00000141294_2 (sequence is synthesized)
ttctgccatccttaggggccgccaagacctctcttttcgttcctctcccgcctcagaccagcagccttttattttagatcatgtctggagggaagtcagcccagggtccagaggaagggg

SEQ ID NO: 366230 - DNA, 120 bp, Artificial Sequence
  ENSG00000141294_3 (sequence is synthesized)
gcgtctgcatcactgaagcccttatcactaagcggaacttgactttccctgaagatggggaactgtcagagaagatgtttcacactcttgatgaactgcagactgtccgcctggaccggg

SEQ ID NO: 366231 - DNA, 120 bp, Artificial Sequence
  ENSG00000141294_4 (sequence is synthesized)
aggggattactactatcaggaacttagaaggcctccagaatcttcacagtctctatctgcaagggaataagatccagcaaattgagaacctggcttgcatcccctccttgcgcttcctgt

SEQ ID NO: 366232 - DNA, 120 bp, Artificial Sequence
  ENSG00000141294_5 (sequence is synthesized)
ctctggcaggaaaccaaatcaggcaggtggaaaacctcctcgacctcccatgcctccagtttctggacctttctgagaacctgatagaaacattgaagctggatgagttcccccagagcc

SEQ ID NO: 366233 - DNA, 120 bp, Artificial Sequence
  ENSG00000141294_6 (sequence is synthesized)
ttctcatcctcaacctgtctggaaacagctgcaccaaccaggatggctaccgcgagctggtgacagaagccctgccacttctcctggacctggacgggcagcctgtggtggagcgctgga

SEQ ID NO: 366234 - DNA, 120 bp, Artificial Sequence
  ENSG00000141294_7 (sequence is synthesized)
ggagctggagcaggagctgagcaggcacagggagcaccggcaacagacggccctgacagagcacctgctgaggatggagatgcagcccaccctcaccgacctgcccctgctacctggggt

SEQ ID NO: 366235 - DNA, 120 bp, Artificial Sequence
  ENSG00000141294_8 (sequence is synthesized)
gcccatggctggggacagcagcccttctgccactcctgcgcaaggggaggagacagtccctgaggccgtctcctcaccccaggcctcctctcccaccaagaaaccatgcagtctgattcc

SEQ ID NO: 366236 - DNA, 120 bp, Artificial Sequence
  ENSG00000141294_9 (sequence is synthesized)
caggggccaccaaagctctttctggggaaggaagggggcacgagcagccacagcccccaaggcctctgtggctgaggcccccagcacaaccaaaactacggccaagagaagcaagaaatg

SEQ ID NO: 366237 - DNA, 120 bp, Artificial Sequence
  ENSG00000141294_10 (sequence is synthesized)
attctctgtcaacctttctctactagtggagaggagtggggcctgcccctcttctcagacctctgacctgtgacagaagcccatccccagtaaagtgtctctaggccctgagtatgcttt

SEQ ID NO: 366238 - DNA, 120 bp, Artificial Sequence
  ENSG00000141294_11 (sequence is synthesized)
tcatgtcacttggggtatctcaggggaagaaaccagtgaaagctccaggaaacaaaatacagagctcagtgagccacctgattctaaagagcgagtctggaatctttcgggagctaccca

SEQ ID NO: 366239 - DNA, 120 bp, Artificial Sequence
  ENSG00000141294_12 (sequence is synthesized)
cagggcaggcatgcctcaggcccccgctggcttcctggctcccacttgggcaggaagcgggcaccacctcatggaagaggcatgccatctcactgccacccctagcgagtgcccttcccc

SEQ ID NO: 366240 - DNA, 120 bp, Artificial Sequence
  ENSG00000141294_13 (sequence is synthesized)
ggtccaagccaaggaccaaggagctgtggtcctagtcatccccaacagcagccagctcctgtcccctccctgtcctcctgcccagtccccatcactcacccactcataggaatgagtaca

SEQ ID NO: 366241 - DNA, 120 bp, Artificial Sequence
  ENSG00000141294_14 (sequence is synthesized)
caaccacaggccccgcagccagcccacagctgcctttgggcctcacttggctctcccacccccactggtcctgggataaagttcactgaagagaaaataaagcacatttattaaggcaaa

SEQ ID NO: 366242 - DNA, 120 bp, Artificial Sequence
  ENSG00000141294_15 (sequence is synthesized)
cttcacagtctctatctgcaaggggtaacttctttctccacccttcccctccccttgacccctgtggacctaatctgtctcatctgaaaggagccaaccaggtcatcctgcccattccct

SEQ ID NO: 366243 - DNA, 120 bp, Artificial Sequence
  ENSG00000141294_16 (sequence is synthesized)
ggtgttcaggcaggcagaccttcatttaaaccattcccagacgaatgacatagggtcctgaattgaaaaactaattccctcaaaatagatcctgaacatgacctgtgctccttccactgt

SEQ ID NO: 366244 - DNA, 120 bp, Artificial Sequence
  ENSG00000141294_17 (sequence is synthesized)
atctagaagttctttttggcatctactctaaatctttcacgttaaatagctccagcccatttcctgttttgaagaagaggaaactatgaagattcctgtacatcattcagatcctacttg

SEQ ID NO: 366245 - DNA, 120 bp, Artificial Sequence
  ENSG00000141294_18 (sequence is synthesized)
aaggctgtttggtggtggtggtggtggttggttgatcttcagccttcccctggttgagtattcccagctcgcttcaactttccccatagaaactttaaccgtcaagttcctgtatgctca

SEQ ID NO: 366246 - DNA, 120 bp, Artificial Sequence
  ENSG00000141294_19 (sequence is synthesized)
ttgttctctctgtgtatgcaagccaccaccaaggccctttccgttttcctggtggcttcttagtttccttttctgattcccaggtcactctttggttgtggaatcagaagagtatacgta

SEQ ID NO: 366247 - DNA, 120 bp, Artificial Sequence
  ENSG00000141294_20 (sequence is synthesized)
gtcaggtttagataccccaggtttacacccttaaccatccacatggggaaagaaaatcatctttcttaaggtagtggcaacctgttcaaggagtggggtgatcattcccaaagtgccaga

SEQ ID NO: 366248 - DNA, 120 bp, Artificial Sequence
  ENSG00000141294_21 (sequence is synthesized)
gtggaatgaatgaatgggtggatggaacaagtgcttttttctccatgaacgactcaaaaggaaggtttcacactcttgatgaactgcagactgtccgcctggaccgggaggggattacta

SEQ ID NO: 366249 - DNA, 120 bp, Artificial Sequence
  ENSG00000141295_0 (sequence is synthesized)
gcggccctggccagaagcggaggaggtggcacccgggaccgagctggggtcttggaggaagagaggatggcgtcgtcgagccctgactccccatgttcctgcgactgctttgtctccgtg

SEQ ID NO: 366250 - DNA, 120 bp, Artificial Sequence
  ENSG00000141295_1 (sequence is synthesized)
cccccggcctcagccatcccggctgtgatctttgccaagaactcggaccgaccccgggacgaggtgcaggaggtggtgtttgtccccgcaggcactcacactcctgggagccggctccag

SEQ ID NO: 366251 - DNA, 120 bp, Artificial Sequence
  ENSG00000141295_2 (sequence is synthesized)
tgcacctacattgaagtggaacaggtgtcgaagacgcacgctgtgattctgagccgtccttcttggctatggggggctgagatgggcgccaacgagcatggtgtctgcattggcaacgag

SEQ ID NO: 366252 - DNA, 120 bp, Artificial Sequence
  ENSG00000141295_3 (sequence is synthesized)
gctgtgtggacgaaggagccagttggggagggggaagccctgctgggcatggacctactcaggctggctttggaacggagcagctctgcccaggaggccttgcatgtgatcacagggtta

SEQ ID NO: 366253 - DNA, 120 bp, Artificial Sequence
  ENSG00000141295_4 (sequence is synthesized)
ctggagcactatgggcaggggggcaactgcctggaggatgctgcgccattctcctaccatagcaccttcctgctggctgaccgcactgaggcgtgggtgctggagacagctgggaggctc

SEQ ID NO: 366254 - DNA, 120 bp, Artificial Sequence
  ENSG00000141295_5 (sequence is synthesized)
tgggctgcacagaggatccaggagggggcccgcaacatctccaaccagctgagcattggcacggacatctcggcccaacacccggagctgcggactcatgcccaggccaagggctggtgg

SEQ ID NO: 366255 - DNA, 120 bp, Artificial Sequence
  ENSG00000141295_6 (sequence is synthesized)
gcgcatggaggctgccaaggcccgcttccaggcagggcgggagctgctgcggcaacggcaagggggcatcacggcagaggtgatgatgggcatcctcagagacaaggagagtggtatctg

SEQ ID NO: 366256 - DNA, 120 bp, Artificial Sequence
  ENSG00000141295_7 (sequence is synthesized)
tatggactcgggaggctttcgcaccacggccagcatggtgtctgtcctgccccaggatcccacgcagccctgcgtgcactttcttaccgccacgccagacccatccaggtctgtgttcaa

SEQ ID NO: 366257 - DNA, 120 bp, Artificial Sequence
  ENSG00000141295_8 (sequence is synthesized)
acctttcatcttcgggatgggggtggcccaggccccccaggtgctgtcccccacttttggagcacaagaccctgttcggaccctgccccgattccagactcaggtagatcgtcggcatac

SEQ ID NO: 366258 - DNA, 120 bp, Artificial Sequence
  ENSG00000141295_9 (sequence is synthesized)
cctctaccgtggacaccaggcagccctggggctgatggagagagatcaggatcgggggcagcagctccagcagaaacagcaggatctggagcaggaaggcctcgaggccacacaggggct

SEQ ID NO: 366259 - DNA, 120 bp, Artificial Sequence
  ENSG00000141295_10 (sequence is synthesized)
gctggccggcgagtgggccccacccctctgggagctgggcagcctcttccaggccttcgtgaagagggagagccaggcttatgcgtaagcttcatagcttctgctggcctggggtggacc

SEQ ID NO: 366260 - DNA, 120 bp, Artificial Sequence
  ENSG00000141295_11 (sequence is synthesized)
caggacccctggggcctgggtgccctgagtggtggtaaagtggagcaatcccttcacgctccttggccatgttctgagcggccagcttggcctttgccttaataaatgtgctttattttc

SEQ ID NO: 366261 - DNA, 120 bp, Artificial Sequence
  ENSG00000141295_12 (sequence is synthesized)
caggccttttcatggaaccctcaaagcatagcacatggaaccagagcattgaaagccactggcataattgcatttgatacgatcagtgccagcagatttgctgtgtgacttgggcctatc

SEQ ID NO: 366262 - DNA, 120 bp, Artificial Sequence
  ENSG00000141295_13 (sequence is synthesized)
accaaacctctccgggcctcttctgtcccctggagcttctgccaccagccattgatccctctgtcacccttctgtcccttggccctctcttttgccaggctggctttggaacggagcagc

SEQ ID NO: 366263 - DNA, 120 bp, Artificial Sequence
  ENSG00000141295_14 (sequence is synthesized)
gttggacagaagagggtcgggtatctgggcatgcgcagggccgcaggactcttggtggggtagcgagggggacggtcccacgactgctccgaagggccgggactcccagtgggggcggga

SEQ ID NO: 366264 - DNA, 120 bp, Artificial Sequence
  ENSG00000141295_15 (sequence is synthesized)
cccccggagtgcccgcctgcggactcccaagcctggagcctggggagagggtgggcacctccgttcccgcacacccgtccatggtgtgtgcgccgagcgtccaggagccacggcggtgtc

SEQ ID NO: 366265 - DNA, 120 bp, Artificial Sequence
  ENSG00000141295_16 (sequence is synthesized)
ttccttgcgcgtcttttacacgtgtgggggtaggctgctcctcggggctgagccgtggccagggttatggagaggcccgcctctccccagatggcgtcgtcgagccctgactccccatgt

SEQ ID NO: 366266 - DNA, 120 bp, Artificial Sequence
  ENSG00000141295_17 (sequence is synthesized)
agaaatctaggggctgagttttgacctgggcccatccatccctcccccagcctggttcacaggggcctcctcctctctgcagactttgcccttgtgccttcgtgaagaaggctgcagcag

SEQ ID NO: 366267 - DNA, 120 bp, Artificial Sequence
  ENSG00000141295_18 (sequence is synthesized)
cagccacctttgggcctctcctggcccagaaatagagcagtggttatttatttattttcagttgaaatcttacatagagtcccaatttataaaaccagtaatagtggatggagcagctct

SEQ ID NO: 366268 - DNA, 120 bp, Artificial Sequence
  ENSG00000141295_19 (sequence is synthesized)
gaggctgccaaggcccgcttccaggcagggcgggagctgctgcggcaacggcaagcttccccctctactccttggcagggggcatcacggcagaggtgatgatgggcatcctcagagaca

SEQ ID NO: 366269 - DNA, 120 bp, Artificial Sequence
  ENSG00000141295_20 (sequence is synthesized)
ctggccagaagcggaggaggtggcacccgggaccgagctggggtcttggaggaagagagggtgaggggaatacagtactggggatggcgtcgtcgagccctgactccccatgttcctgcg

SEQ ID NO: 366270 - DNA, 120 bp, Artificial Sequence
  ENSG00000141295_21 (sequence is synthesized)
ggggctgatggagagagatcaggtatcccccagggagtaggggctaccttgaggggatgatagacctcccccactcccagtgggactctggaaatatgaaggaactagggagtggaagag

SEQ ID NO: 366271 - DNA, 120 bp, Artificial Sequence
  ENSG00000141295_22 (sequence is synthesized)
atttcagagctggggagaggagttcctcccttcaaagccagcaactgcctttggggaatgtcggggggtatctcctttctcctgcttgtgtgaggtggtacacagtccccccttcacctg

SEQ ID NO: 366272 - DNA, 120 bp, Artificial Sequence
  ENSG00000141295_23 (sequence is synthesized)
ttatggggtgctgggaggtgtggcagatctctgcattcttttaagaccttcttccctgctccccacacctgggaggctgccagaagtagtggaagagcatgagctttaggtctaccaacc

SEQ ID NO: 366273 - DNA, 120 bp, Artificial Sequence
  ENSG00000141295_24 (sequence is synthesized)
tggacctgagctcattatgtagcctcagtctacctcagtttcctcttctgtaaaatgggaatgagaccttcctcaaagggatctataaggtaattggcagagtgccacactcgaggggcc

SEQ ID NO: 366274 - DNA, 120 bp, Artificial Sequence
  ENSG00000141298_0 (sequence is synthesized)
gcggagtctgcggccgttcccgcggcctcctcctcctccccgttcccttcacccccaccccgcacccctttccccatcccggctccgtcaccctcccgtcccccacactcaggacaagaa

SEQ ID NO: 366275 - DNA, 120 bp, Artificial Sequence
  ENSG00000141298_1 (sequence is synthesized)
tgccctgcccggaacaacccagcagcgcctagatggctttggtcacggtccagcggtcacctacccccagcaccacctccagcccctgcgcctcggaggcagacagtggggaggaagaat

SEQ ID NO: 366276 - DNA, 120 bp, Artificial Sequence
  ENSG00000141298_2 (sequence is synthesized)
gccggtcacagcccaggagcatcagcgagagctttctaactgtcaaaggtgctgccctttttctaccacggggaaatggctcatccacaccaagaatcagccacagacggaacaagcatg

SEQ ID NO: 366277 - DNA, 120 bp, Artificial Sequence
  ENSG00000141298_3 (sequence is synthesized)
caggcgatctccaacagcatctccaagcaatgttcattttactccgcccagaagacaacatcaggctggctgtaagactggaaagtacttaccagaatcgaacacgctatatggtagtgg

SEQ ID NO: 366278 - DNA, 120 bp, Artificial Sequence
  ENSG00000141298_4 (sequence is synthesized)
tttcaactaatggtagacaagacactgaagaaagcatcgtcctaggaatggatttctcctctaatgacagtagcacttgtaccatgggcttagttttgcctctctggagcgacacgctaa

SEQ ID NO: 366279 - DNA, 120 bp, Artificial Sequence
  ENSG00000141298_5 (sequence is synthesized)
ttcatttggatggtgatggtgggttcagtgtatcgacggataacagagttcacatattcaaacctgtatctgtgcaggcaatgtggtctgcactacagagcttacacaaggcttgtgaag

SEQ ID NO: 366280 - DNA, 120 bp, Artificial Sequence
  ENSG00000141298_6 (sequence is synthesized)
tcgccagagcgcataactactacccaggcagcctatttctcacttgggtgagttattatgagagccatatcaactcagatcaatcctcagtcaatgaatggaatgcaatgcaagatgtac

SEQ ID NO: 366281 - DNA, 120 bp, Artificial Sequence
  ENSG00000141298_7 (sequence is synthesized)
agtcccaccggcccgactctccagctctcttcaccgacatacctactgaacgtgaacgaacagaaaggctaattaaaaccaaattaagggagatcatgatgcagaaggatttggagaata

SEQ ID NO: 366282 - DNA, 120 bp, Artificial Sequence
  ENSG00000141298_8 (sequence is synthesized)
ttacatccaaagagataagaacagagttggaaatgcaaatggtgtgcaacttgcgggaattcaaggaatttatagacaatgaaatgatagtgatccttggtcaaatggatagccctacac

SEQ ID NO: 366283 - DNA, 120 bp, Artificial Sequence
  ENSG00000141298_9 (sequence is synthesized)
agatatttgagcatgtgttcctgggctcagaatggaatgcctccaacttagaggacttacagaaccgaggggtacggtatatcttgaatgtcactcgagagatagataacttcttcccag

SEQ ID NO: 366284 - DNA, 120 bp, Artificial Sequence
  ENSG00000141298_10 (sequence is synthesized)
gagtctttgagtatcataacattcgggtatatgatgaagaggcaacggatctcctggcgtactggaatgacacttacaaattcatctctaaagcaaagaaacatggatctaaatgccttg

SEQ ID NO: 366285 - DNA, 120 bp, Artificial Sequence
  ENSG00000141298_11 (sequence is synthesized)
tgcactgcaaaatgggggtgagtcgctcagcctccaccgtgattgcctatgcaatgaaggaatatggctggaatctggaccgagcctatgactatgtgaaagaaagacgaacggtaacca

SEQ ID NO: 366286 - DNA, 120 bp, Artificial Sequence
  ENSG00000141298_12 (sequence is synthesized)
agcccaacccaagcttcatgagacaactggaagagtatcaggggatcttgctggcaagcaaacagcggcataacaaactatggagatctcattcagatagtgacctctcagaccaccacg

SEQ ID NO: 366287 - DNA, 120 bp, Artificial Sequence
  ENSG00000141298_13 (sequence is synthesized)
aacccatctgcaaacctgggctagaactcaacaagaaggatatcaccacctcagcagaccagattgctgaggtgaagaccatggagagtcacccacccatacctcctgtctttgtggaac

SEQ ID NO: 366288 - DNA, 120 bp, Artificial Sequence
  ENSG00000141298_14 (sequence is synthesized)
atatggtcccacaagatgcaaatcagaaaggcctgtgtaccaaagaaagaatgatctgcttggagtttacttctagggaatttcatgctggacagattgaggatgaattaaacttaaatg

SEQ ID NO: 366289 - DNA, 120 bp, Artificial Sequence
  ENSG00000141298_15 (sequence is synthesized)
acatcaatggatgctcatcagggtgttgtctgaatgaatcaaaatttcctcttgacaattgccatgcatccaaagccttaattcagcctggacatgtcccagaaatggccaacaagtttc

SEQ ID NO: 366290 - DNA, 120 bp, Artificial Sequence
  ENSG00000141298_16 (sequence is synthesized)
cagacttaacagtggaagatttggagacagatgcactgaaagcagacatgaatgtccacctactgcctatggaagaattgacatctccactgaaagacccccccatgtcccctgatcctg

SEQ ID NO: 366291 - DNA, 120 bp, Artificial Sequence
  ENSG00000141298_17 (sequence is synthesized)
agtcaccaagcccccaacccagttgccagactgaaatctcagatttcagtacagatcgcattgacttttttagtgccctagagaagtttgtggagctctcccaagaaacccggtcacgat

SEQ ID NO: 366292 - DNA, 120 bp, Artificial Sequence
  ENSG00000141298_18 (sequence is synthesized)
ctttttcccattcaaggatggaggaactgggtggaggaaggaatgagagctgtcgactgtcagtggtagaagtagccccttccaaagtgacagctgatgaccagagaagcagctctttga

SEQ ID NO: 366293 - DNA, 120 bp, Artificial Sequence
  ENSG00000141298_19 (sequence is synthesized)
gtaatactccccatgcatcagaagaatcttcaatggatgaggaacagtcaaaggcaatttcagaactggtcagcccagacatcttcatgcagtctcactcggaaaatgcaatttcagtca

SEQ ID NO: 366294 - DNA, 120 bp, Artificial Sequence
  ENSG00000141298_20 (sequence is synthesized)
aagaaattgtcactgaaattgagtccatcagtcaaggagttgggcagattcaactgaaaggagacatcttacccaacccatgccatacaccaaagaagaacagcatccatgagctgctcc

SEQ ID NO: 366295 - DNA, 120 bp, Artificial Sequence
  ENSG00000141298_21 (sequence is synthesized)
ttgagagggcccagactccagagaacaaacctggacatatggagcaagatgaggactcctgcacagcccagcctgaactagccaaagactcagggatgtgcaacccagaaggctgcctaa

SEQ ID NO: 366296 - DNA, 120 bp, Artificial Sequence
  ENSG00000141298_22 (sequence is synthesized)
ccacacactcatctatagcagacttggaagaaggggaaccagctgagggggaacaagagctccagggctcagggatgcacccaggtgccaagtggtaccctgggtctgtgaggcgagcca

SEQ ID NO: 366297 - DNA, 120 bp, Artificial Sequence
  ENSG00000141298_23 (sequence is synthesized)
ccttggagttcgaagagcgcttacggcaggagcaagagcatcatggtgctgccccaacatgtacctcattgtccactcgtaagaattcaaagaatgattcttctgtggcagacctagcac

SEQ ID NO: 366298 - DNA, 120 bp, Artificial Sequence
  ENSG00000141298_24 (sequence is synthesized)
caaaagggaaaagtgatgaagcccccccagaacattcatttgtcctcaaggaaccagaaatgagcaaaggcaaagggaaatacagtgggtctgaggctggctcactgtcccattctgagc

SEQ ID NO: 366299 - DNA, 120 bp, Artificial Sequence
  ENSG00000141298_25 (sequence is synthesized)
agaatgccactgttccagctcccagggtgctggagtttgaccacttgccagatcctcaggagggcccagggtcagatactggaacacagcaggaaggagtcctgaaggatctgaggactg

SEQ ID NO: 366300 - DNA, 120 bp, Artificial Sequence
  ENSG00000141298_26 (sequence is synthesized)
tgattccataccaggagtctgaaacacaagcagtccctcttccccttcccaagagggtagaaatcattgaatatacccacatagttacatcacccaatcacactgggccagggagtgaaa

SEQ ID NO: 366301 - DNA, 120 bp, Artificial Sequence
  ENSG00000141298_27 (sequence is synthesized)
tagccaccagtgagaagagcggagagcaagggctgaggaaagtgaacatggaaaaatctgtcactgtgctctgcacactggatgaaaatctaaacaggactctggaccccaaccaggttt

SEQ ID NO: 366302 - DNA, 120 bp, Artificial Sequence
  ENSG00000141298_28 (sequence is synthesized)
ctctgcacccccaagtgctacctctgcctcattcttcctcccctgagcacaacagacccactgaccatccaacctccatcctgagtagccctgaagacagaggcagcagcctgtccacag

SEQ ID NO: 366303 - DNA, 120 bp, Artificial Sequence
  ENSG00000141298_29 (sequence is synthesized)
ccctggagacagcagcaccttttgtcagtcatacaacccatttactgtctgccagtttggattacctgcatccccagactatggttcacctggagggcttcacagagcagagcagcacta

SEQ ID NO: 366304 - DNA, 120 bp, Artificial Sequence
  ENSG00000141298_30 (sequence is synthesized)
cagatgagccctctgcagaacaggttagctgggaagaaagtcaggagagccctctctccagtggcagtgaggtgccatataaggactcccagctaagtagcgcagacctaagtttaatta

SEQ ID NO: 366305 - DNA, 120 bp, Artificial Sequence
  ENSG00000141298_31 (sequence is synthesized)
gcaaacttggtgacaacactggggagttacaggagaaaatggacccattgcctgtagcctgtcgactcccacatagctctagtagtgaaaacataaagagtctcagccacagccccggtg

SEQ ID NO: 366306 - DNA, 120 bp, Artificial Sequence
  ENSG00000141298_32 (sequence is synthesized)
tggtgaaggagcgtgctaaagaaatcgagtctcgagtggttttccaggcagggctcaccaaaccatcccaaatgaggcgctcagcttctctcgccaaattaggttacttggacctctgta

SEQ ID NO: 366307 - DNA, 120 bp, Artificial Sequence
  ENSG00000141298_33 (sequence is synthesized)
aagactgcttaccagagagggagcctgcctcctgtgaatcccctcatctcaaactgcttcagcctttcctcagaacagactcaggcatgcacgcgatggaggaccaagagtccctagaaa

SEQ ID NO: 366308 - DNA, 120 bp, Artificial Sequence
  ENSG00000141298_34 (sequence is synthesized)
acccaggtgccccccacaacccagagcccaccaagtcttttgtagaacaactcacaacaacagagtgtattgtgcagagcaagccagtggagaggccccttgtgcagtatgccaaagaat

SEQ ID NO: 366309 - DNA, 120 bp, Artificial Sequence
  ENSG00000141298_35 (sequence is synthesized)
ttggttctagtcagcagtatttgctccccagggcaggacttgaattgactagttctgaaggaggccttcccgtgctacagacccagggactgcagtgtgcatgcccagctccagggctgg

SEQ ID NO: 366310 - DNA, 120 bp, Artificial Sequence
  ENSG00000141298_36 (sequence is synthesized)
ccgtggcaccccgtcagcaacacggcagaactcacccccttaggagactgaaaaaggcaaatgacaaaaaacggacaaccaaccccttctataataccatgtgattctgagcctacacat

SEQ ID NO: 366311 - DNA, 120 bp, Artificial Sequence
  ENSG00000141298_37 (sequence is synthesized)
gtgactttctagaagaaatgtttgtaaaaggggcaggtgtaatatgtaaggaacatgcactttattggttaattttataatattttggtcattttactgtttctggtgcatgcagggttt

SEQ ID NO: 366312 - DNA, 120 bp, Artificial Sequence
  ENSG00000141298_38 (sequence is synthesized)
aaaaaaatcaaacctcaaaaaagtcattttcagagaacacctttatcaaaggcaaattgctgtttttcagtcagctgccacctgcttctcattttgccctctgagaaaaggcatggtttc

SEQ ID NO: 366313 - DNA, 120 bp, Artificial Sequence
  ENSG00000141298_39 (sequence is synthesized)
ttaattgagggaaggaagcagattcggaggggtggagataaagctggggattggagatgttcccctgcctttgtgatgatggtttggtttccagacctgaggcatcgaatgggctaaagg

SEQ ID NO: 366314 - DNA, 120 bp, Artificial Sequence
  ENSG00000141298_40 (sequence is synthesized)
tcagccagaagtcagagggctctcagccttcatccagccgcagccctttagagttcctgaaggaggcaggttccgctttgctttaaaagagggtcttccggtgttccagagtgtatcgtt

SEQ ID NO: 366315 - DNA, 120 bp, Artificial Sequence
  ENSG00000141298_41 (sequence is synthesized)
acagtaagacatgataatggccggctctgcaaatttatcatatagtttttttcccaagaaaattatttttgaaattaaaacaggaccccaaatgaaatccaagtggtcttctgtagagga

SEQ ID NO: 366316 - DNA, 120 bp, Artificial Sequence
  ENSG00000141298_42 (sequence is synthesized)
aagcatgataagaggaggaagacataaagttgggggtggagaggctgctgcccagaaactgctgggttggtgggatccacacagatgggcatcttggctctccctgccagaaaaatgtgc

SEQ ID NO: 366317 - DNA, 120 bp, Artificial Sequence
  ENSG00000141298_43 (sequence is synthesized)
tctgcagtgtcctcccaactgaaaacaacagtgacatgtttgaaaagcagcaatcgaaagtcagtgtgttcttgtaaaatgaatatgtatgtagggttttaacccttccattacttgaat

SEQ ID NO: 366318 - DNA, 120 bp, Artificial Sequence
  ENSG00000141298_44 (sequence is synthesized)
aattctttgggccttctgagtttaatggccatattttcttccagtttattttccttccccatgctgttgtccccatgctgcctatttttttaaatttcatagattatatttgaattgtta

SEQ ID NO: 366319 - DNA, 120 bp, Artificial Sequence
  ENSG00000141298_45 (sequence is synthesized)
catatgtttaacatccattgaatgcaacgttttatttttggtattatcactgttaacacttttttttccttttcctggaaggtttgtcatttctctaaagtttgtacacagtatttatgt

SEQ ID NO: 366320 - DNA, 120 bp, Artificial Sequence
  ENSG00000141298_46 (sequence is synthesized)
acataatattgtcactgtcttagtgtcttgttcatgttgtagggtaattttgatttattctttttaagaaggagtagagttgcaactggaaaacacagacaccagaaatgaaagtgttgg

SEQ ID NO: 366321 - DNA, 120 bp, Artificial Sequence
  ENSG00000141298_47 (sequence is synthesized)
gtgttgataggaatctgtacaatatgttgatggtggctgtagttgtttaaatggagacttccaatcaccagctcctgccaaattatgcattagtaactttttcctcagagacacccctaa

SEQ ID NO: 366322 - DNA, 120 bp, Artificial Sequence
  ENSG00000141298_48 (sequence is synthesized)
aggctcccattaggtcacagcgtgactgaaagctgatttctctgtgagactgaaatcccagaacattgtttgccagtatctcaaccacagccaggaagtatatgtgagttgcccagagtg

SEQ ID NO: 366323 - DNA, 120 bp, Artificial Sequence
  ENSG00000141298_49 (sequence is synthesized)
gaagctcctagtagaggctgaaggccacaggggaggcctcagccaggggcaagtgcccacagtgactccatttaggatgctgtcgttttgctactgttgtggagatccttaacgcagcag

SEQ ID NO: 366324 - DNA, 120 bp, Artificial Sequence
  ENSG00000141298_50 (sequence is synthesized)
cgcctgtcataaacaagcctcttgtagcttcttacagaaaacagatttagtctagcatgaaacacctctgcatctcattgaaactgaagaggcttgcagatttgctttcgttgatgtcca

SEQ ID NO: 366325 - DNA, 120 bp, Artificial Sequence
  ENSG00000141298_51 (sequence is synthesized)
cgttactgaggattgactgagtatagactggagacaggtttttggcttatcacagcactgaggaaaatacaaatgcacagactgtcagcatgatgtcagaggccagagtttggtgggggc

SEQ ID NO: 366326 - DNA, 120 bp, Artificial Sequence
  ENSG00000141298_52 (sequence is synthesized)
agatggcagggcgacccaaaagatgcagaaaaggtagactggggccactgggtcttaagaggagctgtgaagttgtgtggaagccaaggctgggtctgacatccctgccaggaagcaggt

SEQ ID NO: 366327 - DNA, 120 bp, Artificial Sequence
  ENSG00000141298_53 (sequence is synthesized)
tggacagaaaccacttgctaaaagcgtctctatggtgcagtgattatgtgtaccctgtgctgttgctcagtagtctccttgaatgttcaagtatctcatccactcagttttgtgattcct

SEQ ID NO: 366328 - DNA, 120 bp, Artificial Sequence
  ENSG00000141298_54 (sequence is synthesized)
ggatatttgtgtgttgtaaagtgttttgttaggtggtatgaaccaatgtgaggaggcttgagacagggttatggatttccagagctcttccatgtagaataccctgccttcttgaagcag

SEQ ID NO: 366329 - DNA, 120 bp, Artificial Sequence
  ENSG00000141298_55 (sequence is synthesized)
ttccaccaccaatatgatggggaagggcaggaacttatggcagggtggggagagggtttgcctggaagttaagagagtggcatccacttgtggtaaccccttacgatgatgacatcccac

SEQ ID NO: 366330 - DNA, 120 bp, Artificial Sequence
  ENSG00000141298_56 (sequence is synthesized)
acactaagaggtacaagcaggaccaaagttttggactgttccctcttctcccctccactgtgtttaatgttcactcactgcattaaataacaacaaagatgggacaaaacccactaatac

SEQ ID NO: 366331 - DNA, 120 bp, Artificial Sequence
  ENSG00000141298_57 (sequence is synthesized)
tgtggggaaaaaaaattttcaagagcagaggaaagtctttctgcctttttataattactttttttatcatttaatttacctgcctaaataaacatcttctacagaatatctgtcattcaa

SEQ ID NO: 366332 - DNA, 120 bp, Artificial Sequence
  ENSG00000141298_58 (sequence is synthesized)
ccatgccaaggagtttgtgccagccttttcagactcccagaattgggtgttcctgggttatttacatagctgagcagtgtccaggggaggtgcgcagtgaactgtcaaggactttccaga

SEQ ID NO: 366333 - DNA, 120 bp, Artificial Sequence
  ENSG00000141298_59 (sequence is synthesized)
ctgtcttctcttcagacttttataatctccagtggcatctttcccttttcttttgttcatgacctgacctgaagcagcagatttgatagactggcaaagatgaataggaaaaactttgac

SEQ ID NO: 366334 - DNA, 120 bp, Artificial Sequence
  ENSG00000141298_60 (sequence is synthesized)
tcttgcccagtgcctgcctgcctctctctctctcctctctctctctctctttttaaaccaccatagactctcacttattttggaggagtgtatgtgcatgtgtacacatatgtacatata

SEQ ID NO: 366335 - DNA, 120 bp, Artificial Sequence
  ENSG00000141298_61 (sequence is synthesized)
taaaaacagttgatgttttggtgtatggggtaaaagccccaggagcatacagaacttgagctgaacctggtcagtagaaagggaaaccccaaccctttcttgatttttggagacacccag

SEQ ID NO: 366336 - DNA, 120 bp, Artificial Sequence
  ENSG00000141298_62 (sequence is synthesized)
gactaatggatactgtagtagacatgtagtactatagtaccgtaatattcatctctcctcattttagttgcctttcagattctaaatgtttgggatcattcctatcatcttagtctcttc

SEQ ID NO: 366337 - DNA, 120 bp, Artificial Sequence
  ENSG00000141298_63 (sequence is synthesized)
aggatctttagtattttcctggttctgaggaggcttgagacagggttatggatttccttgttctgtgtctttatccctactgatagttcctctttctcattttgcaaactacccagagct

SEQ ID NO: 366338 - DNA, 120 bp, Artificial Sequence
  ENSG00000141298_64 (sequence is synthesized)
ccaaggacagcctgaagatctcagtgcctcaggctctgaggtactctgctcacaggccccagacagatgctgttgggtaaactcaaagcttcctatgagaagcttctgagatgtagcagg

SEQ ID NO: 366339 - DNA, 120 bp, Artificial Sequence
  ENSG00000141298_65 (sequence is synthesized)
tcacagaagtgttcacctgtttcatctgaggatttcagttctgaagtgatctaggcatgtttggtaaaaatgtttttgtgagagttctttttttaagaaagcattatgcaaaaagtcact

SEQ ID NO: 366340 - DNA, 120 bp, Artificial Sequence
  ENSG00000141298_66 (sequence is synthesized)
tttaagggcatttaaaaatttttaagtaaagccattctttggcttttttggactatttgtggatactttgtttacattttgaatattaaaatgtgcatcatcttgtcggccatgcagtcc

SEQ ID NO: 366341 - DNA, 120 bp, Artificial Sequence
  ENSG00000141298_67 (sequence is synthesized)
tgcaggcatcagtgccctggctgtcctgtgagtcctcatgcagagcagggccatcatggtcagcccttgtgagtaagtgggtatacgctgaagctgacttccgtctgtgtcctgccctcc

SEQ ID NO: 366342 - DNA, 120 bp, Artificial Sequence
  ENSG00000141298_68 (sequence is synthesized)
catccagcactctctatggaaatagttgtcatttcctcagtgatggtgtgtcttatagtgatggttgtaatggtgaatggctagtgtcattttgtttaattttgttttgctttttgatgg

SEQ ID NO: 366343 - DNA, 120 bp, Artificial Sequence
  ENSG00000141298_69 (sequence is synthesized)
tggataagatgaaattttagctgtttcagcatcaatccaacttaaaagcatcttggactttgttttcccttccaaactaaaagatcaaggcatgtattagacacaagcatatttgctgcc

SEQ ID NO: 366344 - DNA, 120 bp, Artificial Sequence
  ENSG00000141298_70 (sequence is synthesized)
tcaactcctctgacacccatattaggaaaaggcctgccaccaaagcaggaagctgcacactcctaacccttctcccagggtgtggggtcccttgacgtcatgaagagctattgcaaggtg

SEQ ID NO: 366345 - DNA, 120 bp, Artificial Sequence
  ENSG00000141298_71 (sequence is synthesized)
cttctgtacttttccagcctggaaatggagggtgactggccctggctcctgctatgagaagataaccagcctcattttctcagtgccccagaggtctaggataggatttctaaactggaa

SEQ ID NO: 366346 - DNA, 120 bp, Artificial Sequence
  ENSG00000141298_72 (sequence is synthesized)
tcatccttaatcaccttgaagatcccttaagaggcatttgactggtgctgccgtctgtgtcctcaaagcaatgctggtggcagcgtcctgtgtacacatgcagagctaatacccaaacta

SEQ ID NO: 366347 - DNA, 120 bp, Artificial Sequence
  ENSG00000141298_73 (sequence is synthesized)
aaaactgggtaactggccctgaagtgcttcccaatcagtaagcccacagggaaatgtttgatttttatgttctgttggattttggtttgcttggcatatctaaaggtgcctttacttttc

SEQ ID NO: 366348 - DNA, 120 bp, Artificial Sequence
  ENSG00000141298_74 (sequence is synthesized)
tttttttttttctttctgctttgttttgtaggacttgttctaacatggaaaacaagtccagaagactctcctctgactgttacctttgccccaagccaccccaaacttttatgctcatgt

SEQ ID NO: 366349 - DNA, 120 bp, Artificial Sequence
  ENSG00000141298_75 (sequence is synthesized)
atgttttattaaagcaggtgctccctggaatctctgggacatttttgaggcatttgaagcagaatatagagtggtctcatctccttccttaatcttcctggtggttgggatgttccactt

SEQ ID NO: 366350 - DNA, 120 bp, Artificial Sequence
  ENSG00000141298_76 (sequence is synthesized)
gtatcatagatttttttattacagatatgctccactgtttttaaatgtgaacttgtgcgcaaatgtgcagattcaatgttcttgttacagattgaataaatttttattttgaagatgaaa

SEQ ID NO: 366351 - DNA, 120 bp, Artificial Sequence
  ENSG00000141298_77 (sequence is synthesized)
ctggggcttcggcggctgcctccgcgcgacccggcgggcccgcctccgccgccgggtgcacgcgcagcctgcgcctcgtgccggagcagagcagaggccaggatgcggagttgtgcactt

SEQ ID NO: 366352 - DNA, 120 bp, Artificial Sequence
  ENSG00000141298_78 (sequence is synthesized)
gtgcactttgagccggccccatgaccctgagcacgttggcccgcaagaggaaggcgcccctcgcttgcacctgcagcctcggtggccccgacatgattccttacttctccgccaacgcgg

SEQ ID NO: 366353 - DNA, 120 bp, Artificial Sequence
  ENSG00000141298_79 (sequence is synthesized)
cttgaactcgtggcgtcaagggatcctcctgtctcagcctcctaaagaattgggattatagtcatgagccactgtgaccggctacaattttcaagtctacaatatattattattgactgt

SEQ ID NO: 366354 - DNA, 120 bp, Artificial Sequence
  ENSG00000141298_80 (sequence is synthesized)
agaaaccatattgtacaatagctcttcataacttactcctcctgtctaatggaaactttgtaccctttgaccatcatctcctccccattctcccaccaatccccaatctggtgtgaattt

SEQ ID NO: 366355 - DNA, 120 bp, Artificial Sequence
  ENSG00000141298_81 (sequence is synthesized)
atttgccaatatgccttatcattttgcatgatctttgtcctagtaactctatttctatggatttactctaagtttgtaaacatggatgtgtgcaaagattttagctctaagaatgtttgt

SEQ ID NO: 366356 - DNA, 120 bp, Artificial Sequence
  ENSG00000141298_82 (sequence is synthesized)
ttgtcagtgttctaataatagcaaaaaataaaaaacaaatgattgaaaaatagaattagtaaattatggtacatctatatcattaaatattatgcaaccattaaaaatgatccagttgaa

SEQ ID NO: 366357 - DNA, 120 bp, Artificial Sequence
  ENSG00000141298_83 (sequence is synthesized)
ggggagaggcggtagctgacaggtggcgcctgcgcactgggagcgctcattgtgccccgcagctgcggaaccgcccgcccgccgcccgttcggagcgtcagtcggcgacagtctggtgga

SEQ ID NO: 366358 - DNA, 120 bp, Artificial Sequence
  ENSG00000141298_84 (sequence is synthesized)
atattcaaattgttgcaattggaaggccttgagtattggtgaacaagtgaaattcagaggaattcagaggtgttattcttaggctctggcagagacttaacggtttagataagccagttg

SEQ ID NO: 366359 - DNA, 120 bp, Artificial Sequence
  ENSG00000141298_85 (sequence is synthesized)
gccagttgataccgagttttattagggacatattgactaagttagttagtggactaagagccaaatctagaacatcacattgctatgcattagctatttcttttttttcttttttttttt

SEQ ID NO: 366360 - DNA, 81 bp, Artificial Sequence
  ENSG00000141298_86 (sequence is synthesized)
gtagagacagggtttcaccatattggctgggctggtcttgaactcctgacgccactgcgcctggcctgcattagctatttc

SEQ ID NO: 366361 - DNA, 120 bp, Artificial Sequence
  ENSG00000141298_87 (sequence is synthesized)
acaggcgtagccactgcgcctggcctgcattagctatttcctaaggtaaccagggatagcattcgttactttatggataaataaatttccatttaaactgctggtggctatttgcataat

SEQ ID NO: 366362 - DNA, 120 bp, Artificial Sequence
  ENSG00000141298_88 (sequence is synthesized)
gcaaataaagcctagagaaaacattatacttgctaataaccatcagctggcatatggacatttcagggctatttactacatgccagatgctttgcatggattatatttaatcatcatacc

SEQ ID NO: 366363 - DNA, 120 bp, Artificial Sequence
  ENSG00000141298_89 (sequence is synthesized)
aagcccccaaaataatattattagccccttattatgggtgagaaaacatgctttggatgggttacataactgccctgagagtatttcttacatttagacaggatagatctctctctctct

SEQ ID NO: 366364 - DNA, 120 bp, Artificial Sequence
  ENSG00000141298_90 (sequence is synthesized)
ggaagagtatcaggggatcttgctggcaaggtgagtcagtgactttctccaattctccctccttttaagttccctaaagcaagatgaagtgtccttctctgtagctacttctcaagctga

SEQ ID NO: 366365 - DNA, 120 bp, Artificial Sequence
  ENSG00000141298_91 (sequence is synthesized)
ctgatttggatgtgatattttttcaaaaaagacttatttctctatcaatccagttttcaaaacataagtgtaagcatttaagatttgcatgggctggccgggcacagtggctcacgcctg

SEQ ID NO: 366366 - DNA, 120 bp, Artificial Sequence
  ENSG00000141298_92 (sequence is synthesized)
gtgaatgtgaagaatcagaaatctttactgattccaatgaggcagacagtggggaggaagaatgccggtcacagcccaggaggtatgtttgttcattatatcctacggcatttttgttgt

SEQ ID NO: 366367 - DNA, 120 bp, Artificial Sequence
  ENSG00000141298_93 (sequence is synthesized)
aggatatttttgtagtagttattgttttttctctaattctttttcagtcttatcagattagcttatccttgtttttcaacgtgcttccttggtctctcaagaaaccagattgcacctggg

SEQ ID NO: 366368 - DNA, 120 bp, Artificial Sequence
  ENSG00000141298_94 (sequence is synthesized)
catggtattttgtgcctgtaattccagctacttgggattgcttaaggccaggagtttgagacaacgtatcaggaccttcctccgttttttaaaaaaaaaaagagtaagagcgaatgcttt

SEQ ID NO: 366369 - DNA, 120 bp, Artificial Sequence
  ENSG00000141298_95 (sequence is synthesized)
atggtgatggaagcctggcataccataagcagccagcttccacggctgacactggggaacgtgatggctcctggaagcttagagatgccaggaaccacagatccctaaagagggtgtcac

SEQ ID NO: 366370 - DNA, 120 bp, Artificial Sequence
  ENSG00000141298_96 (sequence is synthesized)
aaccctggctcattgagctcctaggtctgggttccccaaagggccacagctcttctctccttattgtcttctttccctattgtcgcctgcaacatggaggcagacagtggggaggaagaa

SEQ ID NO: 366371 - DNA, 120 bp, Artificial Sequence
  ENSG00000141298_97 (sequence is synthesized)
taacagtggagtgcactgccttgcaaaatagtgagtgcacattgctggaaatattcaagcaaaggctggagaacattttgcctgggaggtggtataaagaattcctgcagtgggggactt

SEQ ID NO: 366372 - DNA, 120 bp, Artificial Sequence
  ENSG00000141298_98 (sequence is synthesized)
ctaagactatttctaatctaagattttgtgatttgagaatacttgtacttcaaagctggtaaaacattttagggtcatctgaagacaagtatcataggaataaatctttaatataattta

SEQ ID NO: 366373 - DNA, 80 bp, Artificial Sequence
  ENSG00000141314_0 (sequence is synthesized)
agggcgccctcgcctcggagccgggcgcgagggccggggcggaggcggaggccggcggggcagctagcgcagtgaagttt

SEQ ID NO: 366374 - DNA, 80 bp, Artificial Sequence
  ENSG00000141314_1 (sequence is synthesized)
ggggcagctagcgcagtgaagtttggcggcggaggggccgggcgtcccggggtcgcgaggaggcggcggcggcgcgggga

SEQ ID NO: 366375 - DNA, 80 bp, Artificial Sequence
  ENSG00000141314_2 (sequence is synthesized)
ggcgcaaagttagcccggcgccccgggacgagccccgcagccgccgccgcccccggaccccgtctcggccatgggcgagc

SEQ ID NO: 366376 - DNA, 120 bp, Artificial Sequence
  ENSG00000141314_3 (sequence is synthesized)
gagcaccccagcccgggccccgcggtggccgcctgcgccgaggcggagcgcatcgaggagctggaacccgaggccgaggagcggctgcccgcggcgccggaggaccactggaaagtcctg

SEQ ID NO: 366377 - DNA, 120 bp, Artificial Sequence
  ENSG00000141314_4 (sequence is synthesized)
cctgtttgatcagtttgaccctgggaacacaggctacattagcacaggcaagttccggagtcttctggagagccacagctccaagctggacccgcacaaaagggaggtcctcctggctct

SEQ ID NO: 366378 - DNA, 120 bp, Artificial Sequence
  ENSG00000141314_5 (sequence is synthesized)
tgccgacagccacgcggatgggcagatcggctaccaggattttgtcagcctaatgagcaacaagcgttccaacagcttccgccaagccatcctgcagggcaaccgcaggctaagcagcaa

SEQ ID NO: 366379 - DNA, 120 bp, Artificial Sequence
  ENSG00000141314_6 (sequence is synthesized)
ggccctgctggaggagaaggggctgagcctctcgcagcgacttatccgccatgtggcctatgagaccctgccccgggaaattgaccgcaagtggtactatgacagctacacctgctgccc

SEQ ID NO: 366380 - DNA, 120 bp, Artificial Sequence
  ENSG00000141314_7 (sequence is synthesized)
cccaccctggttcatgatcacagtcacgctgctggaggttgcctttttcctctacaatggggtgtcactaggtcaatttgtactgcaggtaactcatccacgttacttgaagaactccct

SEQ ID NO: 366381 - DNA, 120 bp, Artificial Sequence
  ENSG00000141314_8 (sequence is synthesized)
ggtttaccacccacagctgcgagcacaggtttggcgctacctgacatacatcttcatgcatgcagggatagaacacctgggactcaatgtggtgctgcagctgctggtgggggtgcccct

SEQ ID NO: 366382 - DNA, 120 bp, Artificial Sequence
  ENSG00000141314_9 (sequence is synthesized)
ggagatggtgcatggagccacccgaattgggcttgtctacgtggccggtgttgtggcagggtccttggcagtgtctgtggctgacatgaccgctccagtcgtgggctcttctggaggggt

SEQ ID NO: 366383 - DNA, 120 bp, Artificial Sequence
  ENSG00000141314_10 (sequence is synthesized)
gtatgctctcgtctctgcccatctggccaacattgtcatgaactggtcaggcatgaagtgccagttcaagctgctgcggatggctgtggcccttatctgtatgagcatggagtttgggcg

SEQ ID NO: 366384 - DNA, 120 bp, Artificial Sequence
  ENSG00000141314_11 (sequence is synthesized)
ggccgtgtggctccgcttccacccgtcggcctatcccccgtgccctcacccaagctttgtggcgcacttgggtggcgtggccgtgggcatcaccctgggcgtggtggtcctgaggaacta

SEQ ID NO: 366385 - DNA, 120 bp, Artificial Sequence
  ENSG00000141314_12 (sequence is synthesized)
cgagcagaggctccaggaccagtcactgtggtggatttttgtggccatgtacaccgtcttcgtgctgttcgctgtcttctggaacatctttgcctacaccctgctggacttaaagctgcc

SEQ ID NO: 366386 - DNA, 120 bp, Artificial Sequence
  ENSG00000141314_13 (sequence is synthesized)
gcctcccccctgagggctggaggcccaaggtcggggaggggagggaaaagcagcacccacagggagcgcctgcgaggtttcttctcatcaccagctcagctaggccgggcagacaaggac

SEQ ID NO: 366387 - DNA, 120 bp, Artificial Sequence
  ENSG00000141314_14 (sequence is synthesized)
agaagactctgggccactgtaatgtttgtgtttagatttggacacacagtggagacccttttctgaaaggcatctggcggaggagttgatgtggctgctgtcgtttttctcggctgctct

SEQ ID NO: 366388 - DNA, 120 bp, Artificial Sequence
  ENSG00000141314_15 (sequence is synthesized)
gatgacatcgggccagggtgaaggtctggggtggggtgtgagagtggccctccctcacctgggctgggcttcttccatggggccagggggtgccccctcactgctgcggattgagcagca

SEQ ID NO: 366389 - DNA, 120 bp, Artificial Sequence
  ENSG00000141314_16 (sequence is synthesized)
gcttcttcctcctcctctaccctcagagaccctaagagacatgggaaggctcgaaggttgttgcgtccaggcatggcccctctctagctcagaaataattgcaggccatgtggtgtctcc

SEQ ID NO: 366390 - DNA, 120 bp, Artificial Sequence
  ENSG00000141314_17 (sequence is synthesized)
ttgacacctgctgtgtctggggctccagtaagaagagggcctactggacatgtcagctgtgacctggctgaaaccagggtgccctcctgggctggttggtgtgcaccggggcatgatctg

SEQ ID NO: 366391 - DNA, 120 bp, Artificial Sequence
  ENSG00000141314_18 (sequence is synthesized)
ttgtgcctgggttgggcagagcagggagcctgtaggctctaggacccctcttgtgctgggggtacccagtgagagggacccatgcagggggaataaacttcattccaagttccaccctgg

SEQ ID NO: 366392 - DNA, 120 bp, Artificial Sequence
  ENSG00000141314_19 (sequence is synthesized)
agaagacagacccaggaccagcttcagacttctccctccctttcttccaggatattggcatctcacacgggtgccccagcctccatgcccagccttgttttagggtctttttctttcctt

SEQ ID NO: 366393 - DNA, 120 bp, Artificial Sequence
  ENSG00000141314_20 (sequence is synthesized)
cgtatatgtgtgtatgtgatgggaaaggtaactgaggcacgacagcgcctgcagagaaggcatggaggatgcagggggcccatgtgggcatccgtgagaggtggcagaccgtggtgtgct

SEQ ID NO: 366394 - DNA, 120 bp, Artificial Sequence
  ENSG00000141314_21 (sequence is synthesized)
gtggttgctgaatgtccttgctttgacaaagcctgcccccttccttcccatctcctgtcccttccacacctgcccctgagcatcactgaccggtggcagaatggccctgctggagggaga

SEQ ID NO: 366395 - DNA, 120 bp, Artificial Sequence
  ENSG00000141314_22 (sequence is synthesized)
gctcaagccctccaaggatccctggatgctgaggtttgccaggttcagctcttgtttccgtctgagatggccttcatatccaaaaaggttccatcctatctcccttaggagagaaagagc

SEQ ID NO: 366396 - DNA, 120 bp, Artificial Sequence
  ENSG00000141314_23 (sequence is synthesized)
tttgggggcgcaagagaggctggggtaggaatgttgaggccatgtgtccatttaagttagggggacaggaggctacaggaagaggaattccagtttagttggaaaactttgcctcaggag

SEQ ID NO: 366397 - DNA, 120 bp, Artificial Sequence
  ENSG00000141314_24 (sequence is synthesized)
aattgttgggtgcatggatgaacctcagagggagggcagccagtagcctcggaggcttggatgcgggagagaacatggtggttatcaaatccaccccaccccattacacaggtgagaaaa

SEQ ID NO: 366398 - DNA, 120 bp, Artificial Sequence
  ENSG00000141314_25 (sequence is synthesized)
caagatggagggaatgaccctcctaacaggagctggtgcaggccccgaatggagggcatgaggatgacctttgacaaaagatgacactccctttatcgtgctcttggaattctcaaccac

SEQ ID NO: 366399 - DNA, 120 bp, Artificial Sequence
  ENSG00000141314_26 (sequence is synthesized)
tgacagcccagaagaacaaagaacgccaggcctgggaggaggcaggggggctgggcgtgtccagaaacaggggcaggagtgtgggaacggtcttcctccagcctggtgcccatcctggcc

SEQ ID NO: 366400 - DNA, 120 bp, Artificial Sequence
  ENSG00000141314_27 (sequence is synthesized)
cttgagtgtagcagggtccagggtcagtcaggccaggcatttggggtcttgggccacagtggcttcccatcctggtgactacatgtaaatgggctcactcactcactggcaggcgaggcc

SEQ ID NO: 366401 - DNA, 120 bp, Artificial Sequence
  ENSG00000141314_28 (sequence is synthesized)
cagccataccgcatcttggcccactgctaaatagattgccctggcctcatccacatatgtagttccctaggtcctgctcccctgcaccagtgccatgctgagggccgcagcctgtggcac

SEQ ID NO: 366402 - DNA, 120 bp, Artificial Sequence
  ENSG00000141314_29 (sequence is synthesized)
tgtgggcccacgcctttggcggtgttgcgtcagcctggggcgtcttgtgtgtgccctgcccaccgttctctgccctagtgatagaaagatgtagatggaagtcagtgcctcagaggagga

SEQ ID NO: 366403 - DNA, 120 bp, Artificial Sequence
  ENSG00000141314_30 (sequence is synthesized)
ggctctgaggctgtggagctgggctcagggaagaccaggggaggatgcagaaggagtcaggacattgctgcctctgcctgggctgcagccgcactaagctgagcgatgaggtcctttcct

SEQ ID NO: 366404 - DNA, 120 bp, Artificial Sequence
  ENSG00000141314_31 (sequence is synthesized)
ggagggatggagaatcccctccagattcctgtcctggcccctggggattctgtggtgtgggtggaatgagcagagtgccacctctgtctggtatgacctggagagggggcttcctctctt

SEQ ID NO: 366405 - DNA, 120 bp, Artificial Sequence
  ENSG00000141314_32 (sequence is synthesized)
aggggtgagaaagcattgaactagaagattctagaaatccctcatagaagcactcagctccctcggggactcccagggaagcttgttactgagaaggacagtggaggcggaatcgtgtct

SEQ ID NO: 366406 - DNA, 120 bp, Artificial Sequence
  ENSG00000141314_33 (sequence is synthesized)
cccaccatgttaagtgtgtcctctgctgccaaggaccctcgtctacaccttagaccaccagccccagctgttctctgtcagcacacccacctccatcccctctcccaaccatgacttcca

SEQ ID NO: 366407 - DNA, 120 bp, Artificial Sequence
  ENSG00000141314_34 (sequence is synthesized)
agcggggccacagggtggggtcatagggtcacttcacctgacccaggcctctccccaggtcaggaggcagctgtctggtcagaggggttctctttgtggcatctggctttctcctcagca

SEQ ID NO: 366408 - DNA, 120 bp, Artificial Sequence
  ENSG00000141314_35 (sequence is synthesized)
ggtcccaccaccctctcagcagcacttccccatggccaaggctggccgtgtcctctgtgcctctttccttgtctgaggtggctgccagcccagggggtggtgtgtaaatcttcaggctgg

SEQ ID NO: 366409 - DNA, 120 bp, Artificial Sequence
  ENSG00000141314_36 (sequence is synthesized)
tggaggtaggttggccttttatccacaggatacagaaactgaaagctggggaatccccaaacagcagccatagactcactggctctcattaaacgggagaggaatcacagaaactgggga

SEQ ID NO: 366410 - DNA, 120 bp, Artificial Sequence
  ENSG00000141314_37 (sequence is synthesized)
agggaaaacaaaccttcaaaggagaaatttcgctttaatgacaccattcatcattcgttttttaattaggaaaagctccctaatgaggctcttttgccagctaataggactctcgatttc

SEQ ID NO: 366411 - DNA, 120 bp, Artificial Sequence
  ENSG00000141314_38 (sequence is synthesized)
catgagaaccattcttgcccagaggattaggggagctgttgctcaccacaccaggatcttcccccagcgtccaatttaatttgcaaatacgtaatgcagattccctgggtgccgtgaaag

SEQ ID NO: 366412 - DNA, 120 bp, Artificial Sequence
  ENSG00000141314_39 (sequence is synthesized)
cctttcctggcatcattcatgttgctccccgtgctggctggaaagcacggttctcctctgccttaaaaacagtgcccaacagtgaactgcccctccgaggacttgagtaagtggaaaaaa

SEQ ID NO: 366413 - DNA, 120 bp, Artificial Sequence
  ENSG00000141314_40 (sequence is synthesized)
caaaacacagactgcaatgtttgtttctaagtatttttgtattgtgtacattctgtatatttttgttgtaacatattatttgagcacagattccattaaatattttttttctttttccaa

SEQ ID NO: 366414 - DNA, 120 bp, Artificial Sequence
  ENSG00000141314_41 (sequence is synthesized)
gtgtgtgggaggggccatgggagggcggccaggggcagaaggacttgcaaggcagtgcttcttgctccccagggccctctggcatcccccctggggtccctctggcccagtcccctttcc

SEQ ID NO: 366415 - DNA, 120 bp, Artificial Sequence
  ENSG00000141314_42 (sequence is synthesized)
ctttgccagtcgcagctgaaatgtccttctcctgctgtcctctcacccgtcccaggccccagaagtttctcatcttcctgcactcattgccttttcattcgcacttccctctccatggtg

SEQ ID NO: 366416 - DNA, 120 bp, Artificial Sequence
  ENSG00000141314_43 (sequence is synthesized)
agaggaggcggtttaacctctctgagcctcagtttccttatccacgtgagatggttggattgggtgatcctgaaggtctgcaggtcctccaggacattcctatttagatgtttcccaggg

SEQ ID NO: 366417 - DNA, 120 bp, Artificial Sequence
  ENSG00000141314_44 (sequence is synthesized)
gggtccttggaaatctcccagacactgagcctctgccaggggctggggactaaagccagtgaatagtggtggagatcagggcacccacatcagtgtgaagaggaggtggtgccctgctga

SEQ ID NO: 366418 - DNA, 120 bp, Artificial Sequence
  ENSG00000141314_45 (sequence is synthesized)
atgtcagaaacatccgaggactacagagaccttggtgataagtgtgtctttctttctctcctcttcttcctctcctgcatggcctccctctctgccagcactggaaagtcctgtttgatc

SEQ ID NO: 366419 - DNA, 120 bp, Artificial Sequence
  ENSG00000141316_0 (sequence is synthesized)
aacactgggtgcctggggccctggcaaggttgtgggggacatcttgagctgaagcagggttttgagccactgctgctgctgccattgtcaccatggtctcagctctgcggggagcacccc

SEQ ID NO: 366420 - DNA, 120 bp, Artificial Sequence
  ENSG00000141316_1 (sequence is synthesized)
tgatcagggtgcactcaagccctgtttcttctccttctgtgagtggaccacggaggctggtgagctgcctgtcatcccaaagctcagctctgagccagagtggtggtggctccacctctg

SEQ ID NO: 366421 - DNA, 120 bp, Artificial Sequence
  ENSG00000141316_2 (sequence is synthesized)
ccgccggcatagaagccaggagcagggctctcagaaggcggtggtgcccagctgggatcatgttgttggccctggtctgtctgctcagctgcctgctaccctccagtgaggccaagctct

SEQ ID NO: 366422 - DNA, 120 bp, Artificial Sequence
  ENSG00000141316_3 (sequence is synthesized)
ttggactacgaggctgatgggagcaccaacaacgggatcttccagatcaacagccggaggtggtgcagcaacctcaccccgaacgtccccaacgtgtgccggatgtactgctcagatttg

SEQ ID NO: 366423 - DNA, 120 bp, Artificial Sequence
  ENSG00000141316_4 (sequence is synthesized)
ttgaatcctaatctcaaggataccgttatctgtgccatgaagataacccaagagcctcagggtctgggttactgggaggcctggaggcatcactgccagggaaaagacctcactgaatgg

SEQ ID NO: 366424 - DNA, 120 bp, Artificial Sequence
  ENSG00000141316_5 (sequence is synthesized)
gtggatggctgtgacttctaggatggacggaaccatgcacagcaggctgggaaatgtggtttggttcctgacctaggcttgggaagacaagccagcgaataaaggatggttgaacgtgaa

SEQ ID NO: 366425 - DNA, 120 bp, Artificial Sequence
  ENSG00000141316_6 (sequence is synthesized)
ttgtgactaaaagctggcctagcaggccagggagtgcagctgcaggcgtgggggtggcaggagccgcagagccagagcagacagccgagaaaaaggtggacagtgtgaaagaaccagtgg

SEQ ID NO: 366426 - DNA, 120 bp, Artificial Sequence
  ENSG00000141316_7 (sequence is synthesized)
tctcgctctgttgcccaggctagagtgtactggcgtgatcatagctcactgcagcctcagactcctggacttgagaaatcctcctgccttagcctcctgcatatctgggactccaggggt

SEQ ID NO: 366427 - DNA, 120 bp, Artificial Sequence
  ENSG00000141316_8 (sequence is synthesized)
ggacctcgaaggggcagttatggtgggagccatccaaggtgtcacagggctgggcttttcatttaacaaatttgttctgatggatgtgtatagaatagcttggaagagtggttgagacat

SEQ ID NO: 366428 - DNA, 120 bp, Artificial Sequence
  ENSG00000141316_9 (sequence is synthesized)
gagtgctacatgacttcgggctggacggataccggggatacagcctggctgactgcctatgctctgccctatgcaggggtctgccttgcttatttcacaagcggtttcaacgcagctgct

SEQ ID NO: 366429 - DNA, 120 bp, Artificial Sequence
  ENSG00000141316_10 (sequence is synthesized)
ggcaaggttgtgggggacatcttgagctgaagcagggttttgagccactgctgctgctgccattgtcaccatggtctcagctctgcggggagcacccctgatcagggtctgccttgctta

SEQ ID NO: 366430 - DNA, 120 bp, Artificial Sequence
  ENSG00000141316_11 (sequence is synthesized)
cttgagctgaagcagggttttgagccactgctgctgctgccattgtcaccatggtctcagctctgcggggagcacccctgatcatggaccacggaggctggtgagctgcctgtcatccca

SEQ ID NO: 366431 - DNA, 120 bp, Artificial Sequence
  ENSG00000141337_0 (sequence is synthesized)
ggctgcgcccaggccggcgggcccagcagctgcgaaccgccggcgcaccacctgtttccgcgcccggggacttccccggcggggctcagaagtgtgggatcggtcgcttggcttcccctg

SEQ ID NO: 366432 - DNA, 120 bp, Artificial Sequence
  ENSG00000141337_1 (sequence is synthesized)
gcgtcagcgacccagggtaacctcctccactgctgcgtgccgtgcaggcctgcctgtgtgagagccacgtgtgccgcgctctgggcacagccttggaaagtcaggaccgcgacggcagca

SEQ ID NO: 366433 - DNA, 120 bp, Artificial Sequence
  ENSG00000141337_2 (sequence is synthesized)
gagcagaaaccttacagaaacatgaagccctcaaccatctgctactcagttattcggggctgacggcggcttctagaacatccaggtgttctgcagatgcgagaactcatcctgtagtca

SEQ ID NO: 366434 - DNA, 120 bp, Artificial Sequence
  ENSG00000141337_3 (sequence is synthesized)
ccagatggagtcccaaacagccaagcagatgtaaggcctgtgctgtggctctgaggccctgaatacagaagggtcactttcttagtggccaaagagcagttgttgacattgatgtctaat

SEQ ID NO: 366435 - DNA, 120 bp, Artificial Sequence
  ENSG00000141337_4 (sequence is synthesized)
tattgaacacgaccagtcattttactgagctgcggtgaggaaacactgaccatagaagatcaagccaaatgagggattgcaaatttcctgattcttttgaattaggattccagatggggg

SEQ ID NO: 366436 - DNA, 120 bp, Artificial Sequence
  ENSG00000141337_5 (sequence is synthesized)
cctcatttctacagcccccaacattcctatagccgttatcactgccatcaccactgccaccagcatcttcttgcagattccacccctgctccccagagacttcctgctttgaaagtgagc

SEQ ID NO: 366437 - DNA, 120 bp, Artificial Sequence
  ENSG00000141337_6 (sequence is synthesized)
agaaaggaagctctcagaaaaatctctagtggtggctgccgtcgctccagacaatcggaatcctgccttcaccaccatgggctggctttttctaaaggttttgttggcgggagtgagttt

SEQ ID NO: 366438 - DNA, 120 bp, Artificial Sequence
  ENSG00000141337_7 (sequence is synthesized)
ctcaggatttctttatcctcttgtggatttttgcatcagtgggaaaacaagaggacagaagccaaactttgtgattattttggccgatgacatggggtggggtgacctgggagcaaactg

SEQ ID NO: 366439 - DNA, 120 bp, Artificial Sequence
  ENSG00000141337_8 (sequence is synthesized)
ggcagaaacaaaggacactgccaaccttgataagatggcttcggagggaatgaggtttgtggatttccatgcagctgcctccacctgctcaccctcccgggcttccttgctcaccggccg

SEQ ID NO: 366440 - DNA, 120 bp, Artificial Sequence
  ENSG00000141337_9 (sequence is synthesized)
gcttggccttcgcaatggagtcacacgcaactttgcagtcacttctgtgggaggccttccgctcaacgagaccaccttggcagaggtgctgcagcaggcgggttacgtcactgggataat

SEQ ID NO: 366441 - DNA, 120 bp, Artificial Sequence
  ENSG00000141337_10 (sequence is synthesized)
aggcaaatggcatcttggacaccacggctcttatcaccccaacttccgtggttttgattactactttggaatcccatatagccatgatatgggctgtactgatactccaggctacaacca

SEQ ID NO: 366442 - DNA, 120 bp, Artificial Sequence
  ENSG00000141337_11 (sequence is synthesized)
ccctccttgtccagcgtgtccacagggtgatggaccatcaaggaaccttcaaagagactgttacactgacgtggccctccctctttatgaaaacctcaacattgtggagcagccggtgaa

SEQ ID NO: 366443 - DNA, 120 bp, Artificial Sequence
  ENSG00000141337_12 (sequence is synthesized)
cttgagcagccttgcccagaagtatgctgagaaagcaacccagttcatccagcgtgcaagcaccagcgggaggcccttcctgctctatgtggctctggcccacatgcacgtgcccttacc

SEQ ID NO: 366444 - DNA, 120 bp, Artificial Sequence
  ENSG00000141337_13 (sequence is synthesized)
tgtgactcagctaccagcagcgccacggggcagaagcctgtatggtgcagggctctgggagatggacagtctggtgggccagatcaaggacaaagttgaccacacagtgaaggaaaacac

SEQ ID NO: 366445 - DNA, 120 bp, Artificial Sequence
  ENSG00000141337_14 (sequence is synthesized)
attcctctggtttacaggagacaatggcccgtgggctcagaagtgtgagctagcgggcagtgtgggtcccttcactggattttggcaaactcgtcaagggggaagtccagccaagcagac

SEQ ID NO: 366446 - DNA, 120 bp, Artificial Sequence
  ENSG00000141337_15 (sequence is synthesized)
gacctgggaaggagggcaccgggtcccagcactggcttactggcctggcagagttccagttaatgtcaccagcactgccttgttaagcgtgctggacatttttccaactgtggtagccct

SEQ ID NO: 366447 - DNA, 120 bp, Artificial Sequence
  ENSG00000141337_16 (sequence is synthesized)
ggcccaggccagcttacctcaaggacggcgctttgatggtgtggacgtctccgaggtgctctttggccggtcacagcctgggcacagggtgctgttccaccccaacagcggggcagctgg

SEQ ID NO: 366448 - DNA, 120 bp, Artificial Sequence
  ENSG00000141337_17 (sequence is synthesized)
agagtttggagccctgcagactgtccgcctggagcgttacaaggccttctacattaccggtggagccagggcgtgtgatgggagcacggggcctgagctgcagcataagtttcctctgat

SEQ ID NO: 366449 - DNA, 120 bp, Artificial Sequence
  ENSG00000141337_18 (sequence is synthesized)
tttcaacctggaagacgataccgcagaagctgtgcccctagaaagaggtggtgcggagtaccaggctgtgctgcccgaggtcagaaaggttcttgcagacgtcctccaagacattgccaa

SEQ ID NO: 366450 - DNA, 120 bp, Artificial Sequence
  ENSG00000141337_19 (sequence is synthesized)
caagccgcataacagaccaatttttattccacgaggaggagtacctggaaattaggcaagtttgcttccaaatttcatttttaccctctttacaaacacacgctttagtttagtcttgga

SEQ ID NO: 366451 - DNA, 120 bp, Artificial Sequence
  ENSG00000141337_20 (sequence is synthesized)
gtttagttttggagttagccttgcatatcccttctgtatcctgtccctcctccacgccgacccgagagcagctgagctgcgctggctctgggcagggagtgtgccttaatgggaagcaca

SEQ ID NO: 366452 - DNA, 120 bp, Artificial Sequence
  ENSG00000141337_21 (sequence is synthesized)
cgggctttggagtcaggcacaggtgccagctccagcttttgaacttgggcaattgtttaacctaacctgcaagttgattttgagggttaaataaaggcatacatgaaaatgcctggcaaa

SEQ ID NO: 366453 - DNA, 120 bp, Artificial Sequence
  ENSG00000141337_22 (sequence is synthesized)
ttacctgacacagagcagacattcaatacattttagtttccttgtttctctggttcccagtttctctggtcattttggtgtaaatccattctaattagtatttagggcagagcttctctc

SEQ ID NO: 366454 - DNA, 120 bp, Artificial Sequence
  ENSG00000141337_23 (sequence is synthesized)
tcttttctctttttttccttccacaaaccagtgtactcactggtctccatctttaatatgcaaacaaatcacctgggatcttgtgagaatccggattccgtctcagtagggctcgagtag

SEQ ID NO: 366455 - DNA, 120 bp, Artificial Sequence
  ENSG00000141337_24 (sequence is synthesized)
atcctgaaatcctacatttctatcaaacaatgccttgaggagcacagatttagaccaaagttaggtcgttttccagatctcagagcagacgagtccatggataagtctgtggcccaatcc

SEQ ID NO: 366456 - DNA, 120 bp, Artificial Sequence
  ENSG00000141337_25 (sequence is synthesized)
ccttcctctccttttaagggtgaaatgactgcatttaaaagaagttaaagagttcctcctgtcccctataaccacaaggaaacaaaaaaatatataaaaacctcaaaaatgcattgccat

SEQ ID NO: 366457 - DNA, 120 bp, Artificial Sequence
  ENSG00000141337_26 (sequence is synthesized)
gattttattattagtgtccaaaatgggactcccaagtaataaatgatttattccagccacagccaaaaaagactttgcctggctaaaagagtctctctctaagtatgtaatatacaagaa

SEQ ID NO: 366458 - DNA, 120 bp, Artificial Sequence
  ENSG00000141337_27 (sequence is synthesized)
atacaattcaaagagatgttcctataagtacattttttacacggcatatatttaaaaaggaggccccttttaatataaaattccggttatataccaatatggttaattagcatttacact

SEQ ID NO: 366459 - DNA, 120 bp, Artificial Sequence
  ENSG00000141337_28 (sequence is synthesized)
atagtttgaacgtattttaaatagcatgatgtgtatacaatgtctcccgcgcccattggcaaccagggtcgtgggaagcttggtgaggagttaaccaggtcctgtggtttaagcagtgga

SEQ ID NO: 366460 - DNA, 120 bp, Artificial Sequence
  ENSG00000141337_29 (sequence is synthesized)
gcacccgggattcctgcccccctttctgctcacacaattgcactccattcttccgccttccttgttttctccaaaaccacctgataggggggatgtcctgatttctgaggtgtgcttctc

SEQ ID NO: 366461 - DNA, 120 bp, Artificial Sequence
  ENSG00000141337_30 (sequence is synthesized)
atcatgactgcttcgttttgcccttctgatttccacggcacaagattatctaccaaaatcaaaacagaatggccttactcttctcaggaagaggctggtaggcaggtgcattatcaacag

SEQ ID NO: 366462 - DNA, 120 bp, Artificial Sequence
  ENSG00000141337_31 (sequence is synthesized)
gtctgtgcccatgcagagtgagcagggagaggctgggcactgtggaatttttctgtctgaactcgctcatggccacagaatggtcacccagcttatttaggtgtagacaagtatgacaca

SEQ ID NO: 366463 - DNA, 120 bp, Artificial Sequence
  ENSG00000141337_32 (sequence is synthesized)
gttctagaaaatactgactataaaaatgtctctgtgtgtgtgtgtatgtatttatatgtatatgtatatatttttaaaaggctcatcttacttgtaaacatggactgctcaatcactatt

SEQ ID NO: 366464 - DNA, 120 bp, Artificial Sequence
  ENSG00000141337_33 (sequence is synthesized)
atgtaagtgcctttccagccctatatacggttgtgattcataccaaggcagtctcatgcttttagcccagacccaccaacctaccaaggacactggccttttgttttctttcacatcctt

SEQ ID NO: 366465 - DNA, 120 bp, Artificial Sequence
  ENSG00000141337_34 (sequence is synthesized)
ccctcgagaaccctgatttaggtgtttccattctgtacggtaattcttttatttgtgacctgatgaggaaagatttcctcagtccaaatatagtcggattgagtcatagctgtgggcgtc

SEQ ID NO: 366466 - DNA, 120 bp, Artificial Sequence
  ENSG00000141337_35 (sequence is synthesized)
tgtgaccagagtctgggctgtgcccgattctgcggaaatcaaggatgccttcttttgtaccatccttgctcaagggagagttggaacattgacttgatgctgaagaagcctttcttcaaa

SEQ ID NO: 366467 - DNA, 120 bp, Artificial Sequence
  ENSG00000141337_36 (sequence is synthesized)
cagtggtatgatcatagctcactgcagcgttgacctcccaggctcaaacaatcctctcacctcagcttccaagtagctaggaccacaggtgtgcaccaccatgcctggttaacttttgta

SEQ ID NO: 366468 - DNA, 120 bp, Artificial Sequence
  ENSG00000141337_37 (sequence is synthesized)
caatcctctcacctcagcttccaagtagctaggaccacaggtgtgcaccaccatgcctggttaacttttgtatttttttgtagggaggggtcttgctgtgttgcccaggctggtttcaaa

SEQ ID NO: 366469 - DNA, 120 bp, Artificial Sequence
  ENSG00000141337_38 (sequence is synthesized)
accctgggcctcctggtgcctttgcagggccccagcgcgggagggcaaagtgaaggagcccatgtggggttgctgtgtctgtggagccctctttgaggggcagaggctcaggcttctccg

SEQ ID NO: 366470 - DNA, 120 bp, Artificial Sequence
  ENSG00000141337_39 (sequence is synthesized)
gtcaggaccgcgacggcagcagagcatgtctagacaacttctgagccaaagaggaacacttaccagagatgatgccgatggcgacgtacatatgagaaacctcttgtgagaaggaggcgg

SEQ ID NO: 366471 - DNA, 120 bp, Artificial Sequence
  ENSG00000141337_40 (sequence is synthesized)
ccaccatcccggtgctgacaagtagcccccccaacatcactaccagacggtgtccgaaacgattgctcaggactgtggcgaggggagctgccgggaaagaacaaaacgatattttaactc

SEQ ID NO: 366472 - DNA, 86 bp, Artificial Sequence
  ENSG00000141337_41 (sequence is synthesized)
gtgtgcacctgtagtcccagctacttggcaggcagagatgggaggattgtttgagcctgggaggcagacgaactgggtgacagagt

SEQ ID NO: 366473 - DNA, 120 bp, Artificial Sequence
  ENSG00000141337_42 (sequence is synthesized)
gacagagtgagaccctgtctcaagaaaaaacaaaaccaaaccataacacatttcatgcaaagtcagtgcaggaattattttactatttgttcaaattcaacacgatttgtcagactcctg

SEQ ID NO: 366474 - DNA, 120 bp, Artificial Sequence
  ENSG00000141337_43 (sequence is synthesized)
gcctaagtggtcaagaaagcacgtgctgcacggctgtccacttgggcagaattaaaaagggactctacctgtggctaagtgatcacagcagccccttgaatatgcaggaatcccccaccc

SEQ ID NO: 366475 - DNA, 120 bp, Artificial Sequence
  ENSG00000141337_44 (sequence is synthesized)
ctcgctcagccacattggacgtttttagaagctcagcagggagggttgaggcagcaatgcaggagatccaggcatcctgttttcttggtaataaaacctatttaaggattgaatctcaaa

SEQ ID NO: 366476 - DNA, 120 bp, Artificial Sequence
  ENSG00000141338_0 (sequence is synthesized)
ataacctccactctgaaagcagtcttcacagaaacttttcacagaagtcaaatagttaaagcaaattctagatacatggtagagaccaggagaaaatatgaataactttcttctaaacaa

SEQ ID NO: 366477 - DNA, 120 bp, Artificial Sequence
  ENSG00000141338_1 (sequence is synthesized)
ggagctcagtggataaaccatacctctagattccttgcttccattttcccagaagttttggtagcaggatgatgttggcctcataatgtgagttagagaggagtccctctttttcgactg

SEQ ID NO: 366478 - DNA, 84 bp, Artificial Sequence
  ENSG00000141338_2 (sequence is synthesized)
tcataatgtgagttagagaggagtccctctttttcgactgtttggaattgtttcagaaggaatgctaccagctcctcttgtacc

SEQ ID NO: 366479 - DNA, 120 bp, Artificial Sequence
  ENSG00000141338_3 (sequence is synthesized)
tgtgtgtcaacaaacttgggccttattatgcaagaactttcttaaaaaatggagaatgaaaagagagtccttaatggaatggctgaattcattgctcctactactttgtttgtatatata

SEQ ID NO: 366480 - DNA, 120 bp, Artificial Sequence
  ENSG00000141338_4 (sequence is synthesized)
tcctcatagtcatcaagtaaatgatttttcttcactgcttaccatggacctgggacgggtagatacatttaatgaatccagattttctgttgtatacacacctgtcaccaacacgaccca

SEQ ID NO: 366481 - DNA, 120 bp, Artificial Sequence
  ENSG00000141338_5 (sequence is synthesized)
acagataatgaataaagtagcctctactcccttcctggcaggtaaagaggtcttgggactgccagatgaggaaagtattaaagaattcacagcaaattatcctgaagaaatagtaagagt

SEQ ID NO: 366482 - DNA, 120 bp, Artificial Sequence
  ENSG00000141338_6 (sequence is synthesized)
cacctttactaatacatactcatatcatttgaagttcttgctaggacatggaatgccagcaaagaaggagcacaaggaccatacagctcattgttatgaaacaaatgaagatgtttactg

SEQ ID NO: 366483 - DNA, 120 bp, Artificial Sequence
  ENSG00000141338_7 (sequence is synthesized)
tgaagtttcagtattttggaaggaaggttttgtggctcttcaagctgccattaatgctgctattatagaaatcacaacaaatcactcagtgatggaggagctgatgtcagttactggaaa

SEQ ID NO: 366484 - DNA, 120 bp, Artificial Sequence
  ENSG00000141338_8 (sequence is synthesized)
aaatatgaagatgcattccttcattggtcaatcaggagttataactgatttgtaccttttttcctgcattatttcattttcctcattcatttactatgcatctgttaatgtcacaagaga

SEQ ID NO: 366485 - DNA, 120 bp, Artificial Sequence
  ENSG00000141338_9 (sequence is synthesized)
gaggaaaaggatgaaggccttgatgacaatgatgggtcttcgggattcagcgttctggctctcctggggtttgctctatgctggtttcatcttcattatggcccttttcttggcacttgt

SEQ ID NO: 366486 - DNA, 120 bp, Artificial Sequence
  ENSG00000141338_10 (sequence is synthesized)
tataagatctacccagtttatcattttgtctggcttcatggtagtcttcagcctctttctcctgtatggattatctttggtagctttggctttcttaatgagcatcttggtaaagaaatc

SEQ ID NO: 366487 - DNA, 120 bp, Artificial Sequence
  ENSG00000141338_11 (sequence is synthesized)
tttcctcaccggcctggtcgtgttcctcctcactgtcttttgggggtgtctggggttcacatcactgtacagacaccttcctgcatccttggagtggattttaagcttgcttagtccctt

SEQ ID NO: 366488 - DNA, 120 bp, Artificial Sequence
  ENSG00000141338_12 (sequence is synthesized)
tgccttcatgcttggaatggcccagcttttacacttggactatgatttgaattctaatgcatttcctcatccatcggacggctcaaatctcattgtagcaacaaatttcatgttggcatt

SEQ ID NO: 366489 - DNA, 120 bp, Artificial Sequence
  ENSG00000141338_13 (sequence is synthesized)
tgacacttgcctctatctggcattggcgatttactttgaaaaaattttgccaaatgaatatggacatcgacgtccacctttgtttttcctgaagtcctcattttggtctcaaacacaaaa

SEQ ID NO: 366490 - DNA, 120 bp, Artificial Sequence
  ENSG00000141338_14 (sequence is synthesized)
gactgatcacgtggcccttgaagatgaaatggatgccgatccttcatttcatgactcttttgaacaagcgcctccagaattccaagggaaagaagccatcagaatcagaaatgttacaaa

SEQ ID NO: 366491 - DNA, 120 bp, Artificial Sequence
  ENSG00000141338_15 (sequence is synthesized)
agaatataaaggaaagcctgataaaatagaagccttgaaagatctggtatttgacatttacgaaggccaaatcactgcaatacttggtcacagtggagctggaaagtcaacactgctaaa

SEQ ID NO: 366492 - DNA, 120 bp, Artificial Sequence
  ENSG00000141338_16 (sequence is synthesized)
cattcttagtgggttgtctgttcccaccaaaggttcagtcaccatctataacaataagctttcagaaatggctgacctagaaaatctcagcaagctgaccggagtttgtccacaatccaa

SEQ ID NO: 366493 - DNA, 120 bp, Artificial Sequence
  ENSG00000141338_17 (sequence is synthesized)
tgtgcaatttgacttcctcactgtaagagaaaacctcagactctttgctaaaataaaagggattctgccacaagaagtggataaagagatacaaagggttctgctggaattggaaatgaa

SEQ ID NO: 366494 - DNA, 120 bp, Artificial Sequence
  ENSG00000141338_18 (sequence is synthesized)
aaatattcaggatgttcttgctcaaaacttaagtggtggacagaaaagaaagctaacctttgggattgccattttaggagatcctcagattttcctgttggatgaaccaactgctggatt

SEQ ID NO: 366495 - DNA, 120 bp, Artificial Sequence
  ENSG00000141338_19 (sequence is synthesized)
ggatcccttttcaagacaccaagtatggaaccttctgaaagaacgcaaaacagaccgcgtgatcctcttcagtacccagttcatggatgaggccgacatcctggcggacaggaaagtatt

SEQ ID NO: 366496 - DNA, 120 bp, Artificial Sequence
  ENSG00000141338_20 (sequence is synthesized)
tctctcccaagggaagctaaagtgcgcgggctcttctttgtttctaaagaagaaatgggggattggatatcacttaagcttgcagttaaatgaaatatgtgttgaggaaaacataacatc

SEQ ID NO: 366497 - DNA, 120 bp, Artificial Sequence
  ENSG00000141338_21 (sequence is synthesized)
acttgttaaacagcacatccctgatgccaaattatcagccaaaagcgaaggaaaacttatttatacattacccttagaaagaacaaataaatttccagaactttacaaggatcttgatag

SEQ ID NO: 366498 - DNA, 120 bp, Artificial Sequence
  ENSG00000141338_22 (sequence is synthesized)
ctatcctgacctaggaattgagaattatggtgtttccatgacaactttgaatgaagtattcctgaagctagaaggaaaatctacaattaatgaatcggacattgctattttgggagaagt

SEQ ID NO: 366499 - DNA, 120 bp, Artificial Sequence
  ENSG00000141338_23 (sequence is synthesized)
acaagcggaaaaagctgacgacactgaaaggcttgttgagatggaacaagtcctctcttcacttaacaagatgagaaagacaataggtggtgtggctctctggcgacagcaaatctgcgc

SEQ ID NO: 366500 - DNA, 120 bp, Artificial Sequence
  ENSG00000141338_24 (sequence is synthesized)
aattgcaagggttcgcttgttaaagttaaagcatgaaagaaaagctcttttagcactgctattaattctaatggctggattttgccctcttcttgtggagtataccatggtgaaaatata

SEQ ID NO: 366501 - DNA, 120 bp, Artificial Sequence
  ENSG00000141338_25 (sequence is synthesized)
aaaacagttacacctgggaactttctcctcatttgtatttccttgctcctggacaacaaccacatgaccctctcactcaactactgatcatcaataaaacaggggcaagcattgatgact

SEQ ID NO: 366502 - DNA, 120 bp, Artificial Sequence
  ENSG00000141338_26 (sequence is synthesized)
ttatacagtctgtggagcaccagaacatagctttagaagtggatgcatttggaactagaaatggcacagatgacccatcttataatggagccatcacagtgtgttgtaatgaaaagaatt

SEQ ID NO: 366503 - DNA, 120 bp, Artificial Sequence
  ENSG00000141338_27 (sequence is synthesized)
acagcttttcgttagcatgcaatgccaaaagattgaattgcttcccagttcttatggacattgttagtaatgggctacttggaatggttaaaccatcagtacatatccgaactgaaagaa

SEQ ID NO: 366504 - DNA, 120 bp, Artificial Sequence
  ENSG00000141338_28 (sequence is synthesized)
gtacatttttggagaatggacaggacaatccaatcggattcctggcatatatcatgttctggctggttttaacatcgagttgcccaccttacattgccatgagcagcatcgatgattata

SEQ ID NO: 366505 - DNA, 120 bp, Artificial Sequence
  ENSG00000141338_29 (sequence is synthesized)
agaacagagctcggtcccagctacggatttccggactctccccttctgcttactggtttgggcaggcgctggtggatgtttccctgtacttcttggtcttcgtttttatatatttaatga

SEQ ID NO: 366506 - DNA, 120 bp, Artificial Sequence
  ENSG00000141338_30 (sequence is synthesized)
gctacatttcaaacttcgaagacatgctacttacaataattcatattattcaaatcccatgtgctgttggttattccttttccctcatcttcatgacatacgtgatttccttcatctttc

SEQ ID NO: 366507 - DNA, 120 bp, Artificial Sequence
  ENSG00000141338_31 (sequence is synthesized)
gcaaggggagaaaaaatagtggcatttggtcattttgtttctatgttgtcactgtattctctgtggctggatttgcgttcagtatcttcgaaagtgatattccatttatcttcacttttt

SEQ ID NO: 366508 - DNA, 120 bp, Artificial Sequence
  ENSG00000141338_32 (sequence is synthesized)
taataccacctgccacaatgattggctgtttgttcttatcttctcatcttctcttttcttctctcttttctgaagaacgaatggatgtacagccatttctggtattcctaattcctttcc

SEQ ID NO: 366509 - DNA, 120 bp, Artificial Sequence
  ENSG00000141338_33 (sequence is synthesized)
ttcattttatcatttttctttttactcttcgatgtctggaatggaagtttggaaagaaatcaatgagaaaggatcctttctttagaatttctccaagaagtagtgatgtgtgtcaaaatc

SEQ ID NO: 366510 - DNA, 120 bp, Artificial Sequence
  ENSG00000141338_34 (sequence is synthesized)
cagaagaaccagaaggagaggatgaagatgttcagatggaaagagtgagaacagcaaatgccttgaattctactaattttgatgagaagccagtcatcattgccagctgtctacgcaagg

SEQ ID NO: 366511 - DNA, 120 bp, Artificial Sequence
  ENSG00000141338_35 (sequence is synthesized)
agtatgcagggaagaggaaaggctgtttttccaagaggaagaataagatagccacgagaaatgtctccttctgtgttagaaaaggtgaagttttaggattattaggacacaatggagctg

SEQ ID NO: 366512 - DNA, 120 bp, Artificial Sequence
  ENSG00000141338_36 (sequence is synthesized)
gtaaaagcacatccattaaggtgataactggagacacaaaaccaactgctggacaagtgctactgaaagggagcggtggaggggatgccctggagttcctggggtactgccctcaggaga

SEQ ID NO: 366513 - DNA, 120 bp, Artificial Sequence
  ENSG00000141338_37 (sequence is synthesized)
acgcgctgtggcccaacctgacagtgaggcagcacctggaggtgtacgccgccgtgaaagggctgaggaaaggggatgctgaggttgccatcacacggttagtggatgcgctcaagctgc

SEQ ID NO: 366514 - DNA, 120 bp, Artificial Sequence
  ENSG00000141338_38 (sequence is synthesized)
aggaccagctgaagtctcccgtgaagaccttgtcagagggaataaagagaaagctgtgctttgtcctgagcatactggggaacccgtcagtggtgcttctggatgagccgtcgaccggga

SEQ ID NO: 366515 - DNA, 120 bp, Artificial Sequence
  ENSG00000141338_39 (sequence is synthesized)
tggaccccgaggggcagcagcaaatgtggcaggccatccgggccacctttagaaacacggaaaggggtgccctcctaaccacccactacatggcagaggctgaggccgtgtgtgaccgag

SEQ ID NO: 366516 - DNA, 120 bp, Artificial Sequence
  ENSG00000141338_40 (sequence is synthesized)
tggccatcatggtatctgggaggttgagatgtatcggttccatccaacacctgaaaagcaaatttggcaaagattacctgctggagatgaaggtgaagaacctggcacaagtggagcccc

SEQ ID NO: 366517 - DNA, 120 bp, Artificial Sequence
  ENSG00000141338_41 (sequence is synthesized)
tccatgcagagatcctgaggcttttcccccaggctgctcggcaggaaaggtactcctctctgatggtttataagttgccagtggaagatgtgcaacctttagcccaagctttcttcaaat

SEQ ID NO: 366518 - DNA, 120 bp, Artificial Sequence
  ENSG00000141338_42 (sequence is synthesized)
tagagaaggttaaacagagctttgacctagaggagtacagcctctcacagtctaccctggagcaggttttcctggagctctccaaggagcaggagctgggtgattttgaggaggattttg

SEQ ID NO: 366519 - DNA, 120 bp, Artificial Sequence
  ENSG00000141338_43 (sequence is synthesized)
atccctcagtgaagtggaagctcctcccccaggaagagccttaaaaccccaaattctgtgttcctgtttaaacccgtggttttttttaaatacatttatttttatagcagcaatgttcta

SEQ ID NO: 366520 - DNA, 120 bp, Artificial Sequence
  ENSG00000141338_44 (sequence is synthesized)
tttttagaaactatattataagtacagaaatggttctccgtgtggtgggaggaggaggttcgggtgctgggtaagtgccatgtcagtgtggacagaggcatttgactaagccaacctcct

SEQ ID NO: 366521 - DNA, 120 bp, Artificial Sequence
  ENSG00000141338_45 (sequence is synthesized)
ctcacagcctctgtatctctgcaggccatactggttccattgttctgtataatactgaataaataaatttacttttacatgatcgtataagtttctagataagataaacaaattttgttt

SEQ ID NO: 366522 - DNA, 120 bp, Artificial Sequence
  ENSG00000141338_46 (sequence is synthesized)
aaatttttttaataaaaatcttaaaacactttttttctaacctagactgagaaattcatgtttacttttctaggtgtatgatactttgtaaagttgatactttcctaagaatttaacatg

SEQ ID NO: 366523 - DNA, 120 bp, Artificial Sequence
  ENSG00000141338_47 (sequence is synthesized)
tcatatttttgaaatagatttaagtgtgcttcttattgctaaaaatactaaatgtcatgggtcatagtatctgatatcaatatcgttgataacatatccacaggtaacaccatgatgtag

SEQ ID NO: 366524 - DNA, 120 bp, Artificial Sequence
  ENSG00000141338_48 (sequence is synthesized)
gcataaatggaaaacaaaaaccctactatttcaaatatattgtacttttttatttctgtaagccaactgtgtgccattttcactggacttttaaatctagactttagtgatgtctacatt

SEQ ID NO: 366525 - DNA, 120 bp, Artificial Sequence
  ENSG00000141338_49 (sequence is synthesized)
gtaaatgatcttttgtggatatttgtcacttggtttcagaaagttcacaaatgtagcaacagctcacatgactgagtaggtagaaaatgtgaaataaatctcatatatatagttttgaaa

SEQ ID NO: 366526 - DNA, 120 bp, Artificial Sequence
  ENSG00000141338_50 (sequence is synthesized)
atataatcttacaattcctgactctcctctatcaggaatctcccagatcacccttttaagtgctggaatcttgtttttattgagtaaaccactgcataataaattaacatttggactcat

SEQ ID NO: 366527 - DNA, 60 bp, Artificial Sequence
  ENSG00000141338_51 (sequence is synthesized)
caaacgcagcacaaataaataaacggaggaactcaggaaaactgggaatcttcaatgcat

SEQ ID NO: 366528 - DNA, 87 bp, Artificial Sequence
  ENSG00000141338_52 (sequence is synthesized)
tcttcaatgcgtctttattaaaacctgtttctccacaaccaaggggtacaaatgagagatacctacacagaataatttcagatcatg

SEQ ID NO: 366529 - DNA, 120 bp, Artificial Sequence
  ENSG00000141338_53 (sequence is synthesized)
gggtacaaatgagagatacctacacagaataatttcagatcatgaacaaatttccacttagttaatttcagtggggagaaatgctctgcagtgatggacaaaaaaaaaaaaaaaaaaaaa

SEQ ID NO: 366530 - DNA, 120 bp, Artificial Sequence
  ENSG00000141338_54 (sequence is synthesized)
attgatttcatgtcttattgctcctcatgattctgtgggttgactgggcagtttttctattctggaccaaagtgacaggggctggatgatttaacatggcctcactcacatatctggggc

SEQ ID NO: 366531 - DNA, 120 bp, Artificial Sequence
  ENSG00000141338_55 (sequence is synthesized)
ttcagttaggacagctgcgtgtcttttcccacatggaaatatatctttcagaaggcctgctgggattcttcacccaatgatccccatgatcccagcagcaagcaaagacaaatcactagg

SEQ ID NO: 366532 - DNA, 120 bp, Artificial Sequence
  ENSG00000141338_56 (sequence is synthesized)
tggaagctcttcatcagactctgcttgtatcacatttgctaggatactacagggtatataggcaaagctaaatgtgaggggcagacaaagggactacaccttgatgggaaaagctgcaga

SEQ ID NO: 366533 - DNA, 120 bp, Artificial Sequence
  ENSG00000141338_57 (sequence is synthesized)
gaagtgattaatgaactacccaagagaataaattcacgaattatcacataaatgcacacaaaagctaagcactgaaaggttgtcacagaatccttagggtgtcgcttttccagtcaaaac

SEQ ID NO: 366534 - DNA, 120 bp, Artificial Sequence
  ENSG00000141338_58 (sequence is synthesized)
ctctggagctggtggcgcctttgcccaagtttggctcagacccgctgggctcattctgtccactcagctcagcaggctgcactctgttcatgccaccagcctggatcccaagcctgccaa

SEQ ID NO: 366535 - DNA, 120 bp, Artificial Sequence
  ENSG00000141338_59 (sequence is synthesized)
ctagatacatggtagagaccaggagaaaatatgaataactttcttctaaacaaggagctcagtggataaaccatacctctagattccttgcttccattttcccagaagaatggctgaatt

SEQ ID NO: 366536 - DNA, 120 bp, Artificial Sequence
  ENSG00000141338_60 (sequence is synthesized)
tttggtcattttgtttctatgttgtaagtatatttcttgtggatgtatactgtatatatttgatatacaattctgagctaatcctttaaattttgccctctgtaggatgataatattatg

SEQ ID NO: 366537 - DNA, 120 bp, Artificial Sequence
  ENSG00000141338_61 (sequence is synthesized)
gtctataataaacacaagattacaaattcagttactgacatggtcaaaactagaaattacttcaccaaagtccctaataagaattaattccataaagcctctcttcttttgtctaaatta

SEQ ID NO: 366538 - DNA, 120 bp, Artificial Sequence
  ENSG00000141338_62 (sequence is synthesized)
gtgtccagcccctaatggagaggagacccaaagtgggtagctcctttctgcagctggtagtccctaagtctgtgtgaatctggctgagtccaggatttttatgggctcagaaaggaggaa

SEQ ID NO: 366539 - DNA, 120 bp, Artificial Sequence
  ENSG00000141338_63 (sequence is synthesized)
gtgtgtgccatttggtccatgagtggccatgggcaggcctggaaaaagcatcataagttctcactctgggtcacagactccacctagaaccggcagcctggcacccaggcttcaggccat

SEQ ID NO: 366540 - DNA, 120 bp, Artificial Sequence
  ENSG00000141338_64 (sequence is synthesized)
ccctgaagcttgaaggtggcttgaaggtggggtttcaccagagaaccacccctttctatccaggaacctgtctgcctgctgccatcaacatgccatctatggcacccaggtggtttgtgc

SEQ ID NO: 366541 - DNA, 120 bp, Artificial Sequence
  ENSG00000141338_65 (sequence is synthesized)
tgaggtgcacctgcaagtccatgctgagctgccctcagcacccccccggactccctcccacacttgtcagggcccaaaatccagagcgagctgaggtggcaggaggctggcatggcagtt

SEQ ID NO: 366542 - DNA, 120 bp, Artificial Sequence
  ENSG00000141338_66 (sequence is synthesized)
ccaccctgggcacgtacacacccagcagggttgcaacagcacctgggcttggccacaactttgctccaaaattggagcatgcaactgcccctgagattcagtaaaggatgctccaattca

SEQ ID NO: 366543 - DNA, 120 bp, Artificial Sequence
  ENSG00000141338_67 (sequence is synthesized)
gcgaagggcagggctcttacctgtttctggcccctgccagtcccccggagtacacagccccagtcacacctcccctgctacagccagcatctttgctgtggtggctccagacaggctgcc

SEQ ID NO: 366544 - DNA, 120 bp, Artificial Sequence
  ENSG00000141338_68 (sequence is synthesized)
actgccatcaaggagtaactattaaaggtattaagacgtctcccttgctgcagccagcatctttgctgtgatggctgcagacgggctgcagccaccatcaaggggtaattattaaaggca

SEQ ID NO: 366545 - DNA, 120 bp, Artificial Sequence
  ENSG00000141338_69 (sequence is synthesized)
ttaagagagaatgtccagcatcagagctgaaattaatgccagaattcacacacatcctatttatactgccatcagtcacacggatttgcactttcagtgagcattgtctttccagtatgt

SEQ ID NO: 366546 - DNA, 120 bp, Artificial Sequence
  ENSG00000141338_70 (sequence is synthesized)
aatatttaatctttcataaaactgtttttaaaaaactgtattagacagttgtccttcacaaaatgcttagttattggaacatacatttttgtgcaaatgcaactatttttggggagtgtt

SEQ ID NO: 366547 - DNA, 120 bp, Artificial Sequence
  ENSG00000141338_71 (sequence is synthesized)
ttcaagaaatagatcaaaaattagatacaagggggtgaaattgactttaattgtacttctaatttagttgtataaggtggctaggcaaacagaaaaagagctcaggtttatctaagagag

SEQ ID NO: 366548 - DNA, 120 bp, Artificial Sequence
  ENSG00000141338_72 (sequence is synthesized)
acatcatggggtagagataaaacattttctcctaaattctatggcagaagatagaaaaccttaagaactcttttacaaagaatgtccaagggaagtacagaacagaatataaggcagatg

SEQ ID NO: 366549 - DNA, 120 bp, Artificial Sequence
  ENSG00000141338_73 (sequence is synthesized)
cctgtgaaactgtaccgtgggaaaggggctagtagtcaagccaagaaaggaaaagacagcttggaatgctattgacaaatactccactaatgaaagaagagaaaaccgatattcacaatc

SEQ ID NO: 366550 - DNA, 120 bp, Artificial Sequence
  ENSG00000141338_74 (sequence is synthesized)
tagtccttaacttcaatcatggacaccctccaactcagtcaccacctgggcccaaagtcagtattttatttctcattaagcatgggaggaaaggagataactgctcattaatacattgga

SEQ ID NO: 366551 - DNA, 120 bp, Artificial Sequence
  ENSG00000141338_75 (sequence is synthesized)
atgaaatcttgtaaaaggtaagtctgacctgaagtagaaagccagccatttgggtgtcacaaaataagcttaattggatcagccagcgtgagtttttttaatccatgcattctcctgatt

SEQ ID NO: 366552 - DNA, 120 bp, Artificial Sequence
  ENSG00000141338_76 (sequence is synthesized)
aaatactttcagtgaacgcttgctgctctatggctggaaggacacatccctgcttgtcttgcaagcagctgcaggaactggcttccctgtccctcttgccacatatttgtcctccccgtc

SEQ ID NO: 366553 - DNA, 120 bp, Artificial Sequence
  ENSG00000141338_77 (sequence is synthesized)
aagcttccacatcaagcttcatccccacacagggctttggtctcgctcttgctctgccccagattccttgctcttgcctttttttccatgactagcatcttctcctctttgttgaaatgg

SEQ ID NO: 366554 - DNA, 120 bp, Artificial Sequence
  ENSG00000141338_78 (sequence is synthesized)
ccctcagaagacaggctctttctaattaccctacctactgccacttccccagttattcttaccccagcctcctgaatttccataacagcaccacttttgatctgtctttattctgcatgt

SEQ ID NO: 366555 - DNA, 120 bp, Artificial Sequence
  ENSG00000141338_79 (sequence is synthesized)
tcatttctctacttgtttattgcctgattcattcagtagaatgaaaactccagataacgaagcactagttattccaccctccgctgtacccacaggcaacacagcacttgttacatagga

SEQ ID NO: 366556 - DNA, 120 bp, Artificial Sequence
  ENSG00000141338_80 (sequence is synthesized)
ggtactcaaaagatgttgatccatgagcgaagttaaatagtaattcaatcaatatgcttcattttgacagtgatttaaaaaaaatggatataaactgttggccaggatggacaggcacca

SEQ ID NO: 366557 - DNA, 120 bp, Artificial Sequence
  ENSG00000141338_81 (sequence is synthesized)
catttatgggatattggatttttcagctgagattggattgttggctgtggacacacttattttcctgtatttgctctctgacaacctttctccaatgcaaaatgattacagattattaaa

SEQ ID NO: 366558 - DNA, 120 bp, Artificial Sequence
  ENSG00000141338_82 (sequence is synthesized)
cccaatgaggtttagagtttctctagtttttctaggttcgtgaagagaatgatgtcatggaaatactcaaagaagcagtgcagaaggtaggttctgagagggaactttcatctgcaggtg

SEQ ID NO: 366559 - DNA, 120 bp, Artificial Sequence
  ENSG00000141338_83 (sequence is synthesized)
gatgggagactctaaatgctgacccaggtcacactgggtagatttacaactagaaactcctttcctggatatcaaagtattaagtttctttctcatattaaataagaaaatttaaaaagg

SEQ ID NO: 366560 - DNA, 75 bp, Artificial Sequence
  ENSG00000141338_84 (sequence is synthesized)
taagtttctttctcatattaaataagaaaatttaaaaaggctgggcgcagtggctcatgcctctcgtgagtttca

SEQ ID NO: 366561 - DNA, 120 bp, Artificial Sequence
  ENSG00000141338_85 (sequence is synthesized)
agcgtcctctcccccgccgtggtgagagcctgtctctgctttgtatccgtgctgggtccttgttgcaaatctcagctgcaaattatctttgcttgggaatgggaactggaagcttcctgc

SEQ ID NO: 366562 - DNA, 120 bp, Artificial Sequence
  ENSG00000141338_86 (sequence is synthesized)
ataaatcctattgcttcaaacaaaagctcatagaccttgggaggaaggaagacagccccttgctatacactttagaaaggacacttaggtgatattcatggtcaaatgttagcagggctg

SEQ ID NO: 366563 - DNA, 120 bp, Artificial Sequence
  ENSG00000141338_87 (sequence is synthesized)
tttagggccaattcacgtatatgtggacaaaattcaggaaacaaaaaactccctgtttagcaattgtcttttcttttgcagcttctcttttcttctctcttttctgaagaacgaatggat

SEQ ID NO: 366564 - DNA, 120 bp, Artificial Sequence
  ENSG00000141338_88 (sequence is synthesized)
cagcacggatgacttgcatggagcctgtgaaccatttttcttctgtaaaaattgtcccttaaactcttttgtggagaacaaaaaaactatcaatgtcacttgtaaaaccaatactttgca

SEQ ID NO: 366565 - DNA, 120 bp, Artificial Sequence
  ENSG00000141349_0 (sequence is synthesized)
agtagggaggaaaaccggaggagagcgcaggaggaaacagtaccggctggaggccggtcttgcaggagcgggggactgctgggggcggggcttggtggtgaccgctggcggggcggggcc

SEQ ID NO: 366566 - DNA, 120 bp, Artificial Sequence
  ENSG00000141349_1 (sequence is synthesized)
tggggctcagaggggtgggctttggagatcagagggtcgacgctgcttcgttgcctggactctggtttccgccctggagcaagccggggcctggtcggcagctgggccgccatggagtcc

SEQ ID NO: 366567 - DNA, 120 bp, Artificial Sequence
  ENSG00000141349_2 (sequence is synthesized)
acgctgggcgcgggcatcgtgatagccgaggcgctacagaaccagctagcctggctggagaacgtgtggctctggatcacctttctgggcgatcccaagatcctctttctgttctacttc

SEQ ID NO: 366568 - DNA, 120 bp, Artificial Sequence
  ENSG00000141349_3 (sequence is synthesized)
cccgcggcctactacgcctcccgccgtgtgggcatcgcggtgctctggatcagcctcatcaccgagtggctcaacctcatcttcaagtggtttctttttggagacaggcccttttggtgg

SEQ ID NO: 366569 - DNA, 120 bp, Artificial Sequence
  ENSG00000141349_4 (sequence is synthesized)
gtccatgagtctggttactacagccaggctccagcccaggttcaccagttcccctcttcttgtgagactggtccaggcagcccttctggacactgcatgatcacaggagcagccctctgg

SEQ ID NO: 366570 - DNA, 120 bp, Artificial Sequence
  ENSG00000141349_5 (sequence is synthesized)
cccataatgacggccctgtcttcgcaggtggccactcgggcccgcagccgctgggtaagggtgatgcctagcctggcttattgcaccttccttttggcggttggcttgtcgcgaatcttc

SEQ ID NO: 366571 - DNA, 120 bp, Artificial Sequence
  ENSG00000141349_6 (sequence is synthesized)
gagctaagcttctatgggttgactgcactggccctcatgctaggcaccagcctcatctattggaccctctttacactgggcctggatctttcttggtccatcagcctagccttcaagtgg

SEQ ID NO: 366572 - DNA, 120 bp, Artificial Sequence
  ENSG00000141349_7 (sequence is synthesized)
tgtgagcggcctgagtggatacacgtggatagccggccctttgcctccctgagccgtgactcaggggctgccctgggcctgggcattgccttgcactctccctgctatgcccaggtgcgt

SEQ ID NO: 366573 - DNA, 120 bp, Artificial Sequence
  ENSG00000141349_8 (sequence is synthesized)
cgggcacagctgggaaatggccagaagatagcctgccttgtgctggccatggggctgctgggccccctggactggctgggccacccccctcagatcagcctcttctacattttcaatttc

SEQ ID NO: 366574 - DNA, 120 bp, Artificial Sequence
  ENSG00000141349_9 (sequence is synthesized)
ctcaagtacaccctctggccatgcctagtcctggccctcgtgccctgggcagtgcacatgttcagtgcccaggaagcaccgcccatccactcttcctgacttcttgtgtgcctccctttc

SEQ ID NO: 366575 - DNA, 120 bp, Artificial Sequence
  ENSG00000141349_10 (sequence is synthesized)
ctttccctcccacaaagccaacactctgtgaccaccacactccaggaggcagccccatccccttccagcccctaagtaggccctcccctccctaaatctgcttccgcaccacctggtctt

SEQ ID NO: 366576 - DNA, 120 bp, Artificial Sequence
  ENSG00000141349_11 (sequence is synthesized)
agccccaaagatgggccttctctctcccagataagttggtcctccctctgcctttcctctcaagcccccaaagagcaaaggcaacagcaagaccagcgggttcttgcaacactgtgaggg

SEQ ID NO: 366577 - DNA, 120 bp, Artificial Sequence
  ENSG00000141349_12 (sequence is synthesized)
caagggccttcccacccctactctgtagtccctgattttttttccccttgagcatctttgtgcagcttggactcaaacctcagagtccaaccatcctactcattagaccagtgttcttca

SEQ ID NO: 366578 - DNA, 120 bp, Artificial Sequence
  ENSG00000141349_13 (sequence is synthesized)
aactggtctgatggaaaaatcacctaaggggcgtgtctaaaatgtaaatatcccatcctcatctcacacttactaatttagaaactccaaggggttgggaatttattttttattttttat

SEQ ID NO: 366579 - DNA, 120 bp, Artificial Sequence
  ENSG00000141349_14 (sequence is synthesized)
ttttggtttatgggaattcatattttaacaaatatggtgatttaagtagtggagagtcctacctctcaactcactttttcattcatgtattcattcatttgctataatttttcagaagca

SEQ ID NO: 366580 - DNA, 120 bp, Artificial Sequence
  ENSG00000141349_15 (sequence is synthesized)
tgctttgtgctgggcatcacggtagctgctaaggacagagacaccttgcagattaaggtgtggtccctggaccatgcccaacggcataggcagcacttgaaaactggctaaaaacgcaga

SEQ ID NO: 366581 - DNA, 120 bp, Artificial Sequence
  ENSG00000141349_16 (sequence is synthesized)
ctctcaggccccgggccagagctactgaatcaaaatctgcattttaacaaggttcccaggtgattccctgtgcgtatgcagtaaagtttgggctaaagcactgctttccagggaacactt

SEQ ID NO: 366582 - DNA, 120 bp, Artificial Sequence
  ENSG00000141349_17 (sequence is synthesized)
tctcttctttctctttcattcaccagtagactcttcacactgagacttagaagccaggaatcccagggacatgggtggaggccctgtggcccctggggctgggcatgcagccacacctcc

SEQ ID NO: 366583 - DNA, 120 bp, Artificial Sequence
  ENSG00000141349_18 (sequence is synthesized)
cttcacctcagcctctgttgccagatcctcagcctgggggaaggaagggaggctcataggaggtatttcaatgagctggaatgacttgctgaaaaacaacatagagttcccctcccttcc

SEQ ID NO: 366584 - DNA, 120 bp, Artificial Sequence
  ENSG00000141349_19 (sequence is synthesized)
actcttttccacgagggcctcatccttatgtaaagggaaccacagtgatctgttcacttctttcttgcctaattgccctttgctttgtgctctcctctctcaaagtctgtataagcctcc

SEQ ID NO: 366585 - DNA, 120 bp, Artificial Sequence
  ENSG00000141349_20 (sequence is synthesized)
gtataagcctccccctctattccttgtcccccaaagatcacaatctccttcagacactattaatgtcccccaagtggcaaagtccctattcattttcattttctcttttttttttttttt

SEQ ID NO: 366586 - DNA, 79 bp, Artificial Sequence
  ENSG00000141349_21 (sequence is synthesized)
tttttttttcgtgcaatggcatgatcttggctcactgaaacctctttgtctctcaggttcaagagattcttctgcctca

SEQ ID NO: 366587 - DNA, 82 bp, Artificial Sequence
  ENSG00000141349_22 (sequence is synthesized)
cgccgttcattttctgtgtgagcacttgttgtatatatactaggctcagttttcagaggggagaggcaagtgccttctgtat

SEQ ID NO: 366588 - DNA, 120 bp, Artificial Sequence
  ENSG00000141349_23 (sequence is synthesized)
ggctcagttttcagaggggagaggcaagtgccttctgtatatccctccccagcacgtggcttcctgccagcatctcttttgctatcccatcttttctctttctggccacagcagcctctt

SEQ ID NO: 366589 - DNA, 120 bp, Artificial Sequence
  ENSG00000141349_24 (sequence is synthesized)
cattgtgtggttcccagggcccagccaagcacttgctagaccagaggattttgacatttttttgtcctccttattctttctcagccttctctgtccatttcccacccccattttcagacc

SEQ ID NO: 366590 - DNA, 120 bp, Artificial Sequence
  ENSG00000141349_25 (sequence is synthesized)
tgagaggctcacctaaataatttaggtgtggataattcaggctgtaactggggacatggaggcaggggtagcaggagggttagtgagggcctggaggagagagctgggtcctggactctc

SEQ ID NO: 366591 - DNA, 120 bp, Artificial Sequence
  ENSG00000141349_26 (sequence is synthesized)
tgtggatgataagagctggccttgcagtgagagggggtagagtgggacggctgagtatctcagagcacacacacggcttaccacaatctcttgcctctgtatcagttttattttttattt

SEQ ID NO: 366592 - DNA, 120 bp, Artificial Sequence
  ENSG00000141349_27 (sequence is synthesized)
aatctcttgcctctgtatcagttttattttttattttattcactttttctttttttgagacaggatctcactccatcaccaggctggagtacaatggcacaatcacagctcactgcagcc

SEQ ID NO: 366593 - DNA, 72 bp, Artificial Sequence
  ENSG00000141349_28 (sequence is synthesized)
tcaacctcctgggctcaagtgatccttcccacttcagcctctggagtagcagggactacaggcacaccccaa

SEQ ID NO: 366594 - DNA, 120 bp, Artificial Sequence
  ENSG00000141349_29 (sequence is synthesized)
ctcccaagtagctgagactataggtgtgcaccaccacttccagctaattttttgtttttgttgaatctgggtcttgctatgttgcccaggctggtcatgaactcctggcttcaagtgatc

SEQ ID NO: 366595 - DNA, 120 bp, Artificial Sequence
  ENSG00000141349_30 (sequence is synthesized)
ctggcttcaagtgatcctccagctaaggcctcccaaagtactgggattacagtcatgagccactgtacctggccccagactagtttttaaaaatagtgtttccacaggctgagggttagg

SEQ ID NO: 366596 - DNA, 120 bp, Artificial Sequence
  ENSG00000141349_31 (sequence is synthesized)
cctttggcagtgggaggatcagtctaggatcttcccatcgctcccagcttctgtagagcccaccccagaggccccccgttatgtctcagtttattctcttgccaagctgcactgcagctg

SEQ ID NO: 366597 - DNA, 120 bp, Artificial Sequence
  ENSG00000141367_0 (sequence is synthesized)
agccgtttccggagtctgcgctgcgcccggttccgccattgcggctctcctggcccctggagcctccgcccccgacccgagctctttcgtctgcctgccagtttcctgcgtccccggaga

SEQ ID NO: 366598 - DNA, 120 bp, Artificial Sequence
  ENSG00000141367_1 (sequence is synthesized)
ggatcctgctgagcccagcctcccccctccccttctcctcctctcccttggagagcccgggcagccactgccccgcagccccagtgacaggaggagaccataacccccgacagcgccatg

SEQ ID NO: 366599 - DNA, 120 bp, Artificial Sequence
  ENSG00000141367_2 (sequence is synthesized)
gcccagattctgccaattcgttttcaggagcatctccagctccagaacctgggtatcaacccagcaaacattggcttcagtaccctgactatggagtctgacaaattcatctgcattaga

SEQ ID NO: 366600 - DNA, 120 bp, Artificial Sequence
  ENSG00000141367_3 (sequence is synthesized)
gaaaaagtaggagagcaggcccaggtggtaatcattgatatgaatgacccaagtaatccaattcgaagaccaatttcagcagacagcgccatcatgaatccagctagcaaagtaattgca

SEQ ID NO: 366601 - DNA, 120 bp, Artificial Sequence
  ENSG00000141367_4 (sequence is synthesized)
ctgaaagctgggaaaactcttcagatttttaacattgaaatgaaaagtaaaatgaaggctcataccatgactgatgatgtcaccttttggaaatggatctctttgaatacggttgctctt

SEQ ID NO: 366602 - DNA, 120 bp, Artificial Sequence
  ENSG00000141367_5 (sequence is synthesized)
gttacggataatgcagtttatcactggagtatggaaggagagtctcagccagtgaaaatgtttgatcgccattctagccttgcagggtgccagattatcaattaccgtacagatgcaaaa

SEQ ID NO: 366603 - DNA, 120 bp, Artificial Sequence
  ENSG00000141367_6 (sequence is synthesized)
caaaagtggttacttctgactggtatatctgcacagcaaaatcgtgtggtgggagctatgcagctatattctgtagataggaaagtgtctcagcccattgaaggacatgcagctagcttt

SEQ ID NO: 366604 - DNA, 120 bp, Artificial Sequence
  ENSG00000141367_7 (sequence is synthesized)
gcacagtttaagatggaaggaaatgcagaagaatcaacgttattttgttttgcagttcggggccaagctggagggaagttacatattattgaagttggcacaccacctacagggaaccag

SEQ ID NO: 366605 - DNA, 120 bp, Artificial Sequence
  ENSG00000141367_8 (sequence is synthesized)
ccctttccaaagaaggcagtggatgtcttctttcctccagaagcacaaaatgattttcctgttgcaatgcagatcagtgaaaagcatgatgtggtgttcttgataaccaagtatggttat

SEQ ID NO: 366606 - DNA, 120 bp, Artificial Sequence
  ENSG00000141367_9 (sequence is synthesized)
atccacctctatgatcttgagactggtacctgcatctacatgaatagaatcagtggagaaacaatttttgttactgcacctcatgaagccacagctggaataattggagtaaacagaaag

SEQ ID NO: 366607 - DNA, 120 bp, Artificial Sequence
  ENSG00000141367_10 (sequence is synthesized)
ggacaagttctgtcagtgtgtgtggaagaagaaaacataattccttacatcaccaatgttctacaaaatcctgatttggctctgagaatggctgtacgtaataacttagccggtgctgaa

SEQ ID NO: 366608 - DNA, 120 bp, Artificial Sequence
  ENSG00000141367_11 (sequence is synthesized)
gaactctttgcccggaaatttaatgctctttttgcccagggaaattactcggaggcagcaaaggtggctgctaatgcaccaaagggaattcttcgtactccagacactatccgtcggttc

SEQ ID NO: 366609 - DNA, 120 bp, Artificial Sequence
  ENSG00000141367_12 (sequence is synthesized)
cagagtgtcccagcccagccaggtcaaacttctcctctacttcagtactttggtatccttttggaccagggacagctcaacaaatacgaatccttagagctttgtaggcctgtacttcag

SEQ ID NO: 366610 - DNA, 120 bp, Artificial Sequence
  ENSG00000141367_13 (sequence is synthesized)
caagggcgaaaacagcttttggagaaatggttaaaagaagataagctggaatgttctgaagaactgggtgatcttgtgaaatctgtggaccctacattggcacttagtgtgtacctaagg

SEQ ID NO: 366611 - DNA, 120 bp, Artificial Sequence
  ENSG00000141367_14 (sequence is synthesized)
gctaacgtcccaaataaagtcattcagtgctttgcagaaacaggtcaagtccaaaagattgttttatatgctaaaaaagttggatacactccagattggatatttctgctgagaaatgta

SEQ ID NO: 366612 - DNA, 120 bp, Artificial Sequence
  ENSG00000141367_15 (sequence is synthesized)
atgcgaatcagtccagatcagggacagcagtttgcccaaatgttagttcaagatgaagagcctcttgctgacatcacacagattgtagatgtctttatggaatacaatctaattcagcag

SEQ ID NO: 366613 - DNA, 120 bp, Artificial Sequence
  ENSG00000141367_16 (sequence is synthesized)
tgtactgcattcttgcttgatgctctgaagaataatcgcccatctgaaggtcctttacagacgcggttacttgagatgaaccttatgcatgcgcctcaagttgcagatgctattctaggc

SEQ ID NO: 366614 - DNA, 120 bp, Artificial Sequence
  ENSG00000141367_17 (sequence is synthesized)
aatcagatgttcacacattatgaccgggctcatattgctcaactgtgtgaaaaggctggcctactgcagcgtgcattagaacatttcactgatttatatgatataaaacgtgcagtggtt

SEQ ID NO: 366615 - DNA, 120 bp, Artificial Sequence
  ENSG00000141367_18 (sequence is synthesized)
cacacccatcttcttaaccctgagtggttagtcaactactttggttccttatcagtagaagactccctagaatgtctcagagccatgctgtctgccaacatccgtcagaatctgcagatt

SEQ ID NO: 366616 - DNA, 120 bp, Artificial Sequence
  ENSG00000141367_19 (sequence is synthesized)
tgtgttcaggtggcttctaaatatcatgaacaactgtcaactcagtctctgattgaactttttgaatctttcaagagttttgaaggtctcttttattttctgggatccattgttaacttt

SEQ ID NO: 366617 - DNA, 120 bp, Artificial Sequence
  ENSG00000141367_20 (sequence is synthesized)
agccaggacccagatgtgcactttaaatatattcaggcagcttgcaagactgggcaaatcaaagaagtagaaagaatctgtagagaaagcaactgctacgatcctgagcgagtcaagaat

SEQ ID NO: 366618 - DNA, 120 bp, Artificial Sequence
  ENSG00000141367_21 (sequence is synthesized)
tttcttaaggaagcaaaactaacagatcagctaccacttatcattgtgtgtgatcgatttgactttgtccatgatttggtgctctatttatatagaaataatcttcaaaagtatatagag

SEQ ID NO: 366619 - DNA, 120 bp, Artificial Sequence
  ENSG00000141367_22 (sequence is synthesized)
atatatgtacagaaggtgaatccaagtcgacttcctgtagttattggaggattacttgatgttgactgttctgaagatgtcataaaaaacttgattcttgttgtaagaggtcaattctct

SEQ ID NO: 366620 - DNA, 120 bp, Artificial Sequence
  ENSG00000141367_23 (sequence is synthesized)
actgatgagcttgttgctgaggttgaaaaaagaaacagattgaaactgcttctgccttggctagaggccagaattcatgagggctgtgaggagcctgctactcacaatgccttagccaaa

SEQ ID NO: 366621 - DNA, 120 bp, Artificial Sequence
  ENSG00000141367_24 (sequence is synthesized)
atctacatagacagtaataacaacccggagagatttcttcgtgaaaatccctactatgacagtcgcgttgttggaaagtattgtgagaagagagatccacatctggcctgtgttgcttat

SEQ ID NO: 366622 - DNA, 120 bp, Artificial Sequence
  ENSG00000141367_25 (sequence is synthesized)
gaacgtggccaatgtgatctggaacttattaatgtttgcaatgagaattccctcttcaaaagtctttctcgctacctggtacgtcgaaaggatccagaattgtggggcagcgtgctgctg

SEQ ID NO: 366623 - DNA, 120 bp, Artificial Sequence
  ENSG00000141367_26 (sequence is synthesized)
gaaagcaatccttacaggagacccctaattgaccaggttgtacaaacagctttgtctgagactcaggaccctgaagaagtgtcagtaactgtaaaggctttcatgactgcagaccttcct

SEQ ID NO: 366624 - DNA, 120 bp, Artificial Sequence
  ENSG00000141367_27 (sequence is synthesized)
aatgaactcattgaactgctggagaaaattgtccttgataactctgtattcagtgaacacaggaatctgcaaaacctccttatcctcactgcaattaaggctgaccgtacacgtgttatg

SEQ ID NO: 366625 - DNA, 120 bp, Artificial Sequence
  ENSG00000141367_28 (sequence is synthesized)
gagtatattaaccgcctggataattatgatgccccagatattgccaatatcgccatcagcaatgagctgtttgaagaagcatttgccattttccggaaatttgatgtcaatacttcagca

SEQ ID NO: 366626 - DNA, 120 bp, Artificial Sequence
  ENSG00000141367_29 (sequence is synthesized)
gttcaggtcttaattgagcatattggaaacttggatcgggcatatgagtttgctgaacgttgcaatgaacctgcggtctggagtcaacttgcaaaagcccagttgcagaaaggaatggtg

SEQ ID NO: 366627 - DNA, 120 bp, Artificial Sequence
  ENSG00000141367_30 (sequence is synthesized)
aaagaagccattgattcttatatcaaagcagatgatccttcctcctacatggaagttgttcaggctgccaatactagtggaaactgggaagaactggtgaagtacttgcagatggcccgt

SEQ ID NO: 366628 - DNA, 120 bp, Artificial Sequence
  ENSG00000141367_31 (sequence is synthesized)
aagaaggctcgagagtcctatgtggagacagaactgatattcgcactggctaaaacaaaccgccttgcagagttagaagaatttatcaatggaccaaataatgctcatatccaacaagtt

SEQ ID NO: 366629 - DNA, 120 bp, Artificial Sequence
  ENSG00000141367_32 (sequence is synthesized)
ggtgaccgttgttatgatgaaaaaatgtatgatgctgctaagttgttgtacaataatgtttccaattttggacgtttggcatctaccctggttcacctgggtgaatatcaggcagctgtt

SEQ ID NO: 366630 - DNA, 120 bp, Artificial Sequence
  ENSG00000141367_33 (sequence is synthesized)
gatggggctaggaaagctaacagtactcgaacatggaaagaggtctgcttcgcctgtgtagatgggaaagaattccgtcttgctcagatgtgtggacttcatattgttgtacatgcagat

SEQ ID NO: 366631 - DNA, 120 bp, Artificial Sequence
  ENSG00000141367_34 (sequence is synthesized)
agctcacatgggaatgtttactgaattagctattctatactctaaatttaagcctcagaaaatgagggagcacctggagctgttctggtctagagtgaatattcccaaggtgctaagagc

SEQ ID NO: 366632 - DNA, 120 bp, Artificial Sequence
  ENSG00000141367_35 (sequence is synthesized)
tgcagaacaagctcatctttgggcagaactggtgtttttgtatgacaagtatgaagaatatgataatgccataattaccatgatgaatcatccaactgatgcctggaaagaagggcaatt

SEQ ID NO: 366633 - DNA, 120 bp, Artificial Sequence
  ENSG00000141367_36 (sequence is synthesized)
caaagatatcattaccaaggttgccaatgtggaactatactacagagcaatacagttctacttagaattcaagcctctgttgttaaatgatttgctgatggtgctgtctccacggttgga

SEQ ID NO: 366634 - DNA, 120 bp, Artificial Sequence
  ENSG00000141367_37 (sequence is synthesized)
tcacactcgtgcagtcaattatttcagcaaggttaaacagctaccactggtgaaaccgtatttgcgttcagttcagaaccataacaacaaatctgtgaatgaatcattgaacaatctttt

SEQ ID NO: 366635 - DNA, 120 bp, Artificial Sequence
  ENSG00000141367_38 (sequence is synthesized)
tattacagaagaagattatcaggctctgcgaacatcaatagatgcttatgacaactttgacaatatctcgcttgctcagcgtttggaaaaacatgaactcattgagttcaggagaattgc

SEQ ID NO: 366636 - DNA, 120 bp, Artificial Sequence
  ENSG00000141367_39 (sequence is synthesized)
tgcttatctcttcaaaggcaacaatcgctggaaacagagtgtagagctgtgcaagaaagacagcctttacaaggatgcaatgcagtatgcttctgaatctaaagatactgaattggctga

SEQ ID NO: 366637 - DNA, 120 bp, Artificial Sequence
  ENSG00000141367_40 (sequence is synthesized)
agaactcctgcagtggtttttgcaggaagaaaaaagagagtgctttggagcttgtctgtttacctgttacgatcttttaaggccagatgtcgtcctagaaactgcatggaggcacaatat

SEQ ID NO: 366638 - DNA, 120 bp, Artificial Sequence
  ENSG00000141367_41 (sequence is synthesized)
catggattttgccatgccctatttcatccaggtcatgaaggagtacttgacaaaggtggataaattagatgcttcagaatcactgagaaaagaagaagaacaagctacagagacacaacc

SEQ ID NO: 366639 - DNA, 120 bp, Artificial Sequence
  ENSG00000141367_42 (sequence is synthesized)
cattgtttatggtcagccccagttgatgctgacagcaggacccagtgttgccgtccctccccaggcaccttttggttatggttataccgcaccaccgtatggacagccacagcctggctt

SEQ ID NO: 366640 - DNA, 120 bp, Artificial Sequence
  ENSG00000141367_43 (sequence is synthesized)
tgggtacagcatgtgagatgaagcgctgatcctgtagtcacctattttcgtactgaaacatcgtctttacccacttctcagtttataatgggggaaaacaggcaacgtgttcttgtaacc

SEQ ID NO: 366641 - DNA, 120 bp, Artificial Sequence
  ENSG00000141367_44 (sequence is synthesized)
tttatttcatgaaggacttctttttgtttctaactataaacttggatcacctatgttaaaaccttatttcacattccacatcattttagaatttattttcgaaggggaatagtttcaatg

SEQ ID NO: 366642 - DNA, 120 bp, Artificial Sequence
  ENSG00000141367_45 (sequence is synthesized)
ttttattcacttgggctttttttcttccccctctttctttaaagaactgctcaatattcaatctgttgtgaagaacctgatttgcactctgtagtgtttaaagaaacaaagaaactctaa

SEQ ID NO: 366643 - DNA, 120 bp, Artificial Sequence
  ENSG00000141367_46 (sequence is synthesized)
tattgaatctcttaaatttagtgtatgtaaacagcttacaaatacgtattgtctaaatgcatttaaatctgttttattcaaagaaaagctaaagcaaaaacactggcatatgaccatgca

SEQ ID NO: 366644 - DNA, 120 bp, Artificial Sequence
  ENSG00000141367_47 (sequence is synthesized)
agactgtcagtgccaacaaagacaacactaatcagcacatcgtacactggattgcagtgcttcccagattattgaaaaatgttacagacaacttgcctgatttttaaatgagcgtaaaag

SEQ ID NO: 366645 - DNA, 120 bp, Artificial Sequence
  ENSG00000141367_48 (sequence is synthesized)
gccctctaacctatgcaggtttccccattatgcatatagaaaatgctagtatgttttgctcacttcatatgtaacaggtgcccttatgttgtgctgtatcctgtgctttttctgtgggac

SEQ ID NO: 366646 - DNA, 120 bp, Artificial Sequence
  ENSG00000141367_49 (sequence is synthesized)
cattccattcaggagcaaagagcaccatgattccaatcttgtgtgtgtttactaacccttccctgaggtttgtgtatgttggatattgtggtgttttagatcactgagtgtacagaagag

SEQ ID NO: 366647 - DNA, 120 bp, Artificial Sequence
  ENSG00000141367_50 (sequence is synthesized)
agaaattcaaacaaaatattgctgttcttcagttttgtttgtggaatttgaaattactcaaatttaaaataaattactggactgtggaaataacatagaattgaagttttaattaaatac

SEQ ID NO: 366648 - DNA, 120 bp, Artificial Sequence
  ENSG00000141367_51 (sequence is synthesized)
cactcaaacgaaaagaacagtagtttttgtagttttatattggatactgaggcattagggaggcatgaaaggaagaggaatgaggattgagacatgtgaagacattgtgcattatatcaa

SEQ ID NO: 366649 - DNA, 120 bp, Artificial Sequence
  ENSG00000141367_52 (sequence is synthesized)
tgtgcattcctgtagttcattaacaaggtacatgcaatagtctaaagaaccagagtcactactatagtggcttaacatttaatctgtctccaatattttaaccaagtgacaccgaggttt

SEQ ID NO: 366650 - DNA, 120 bp, Artificial Sequence
  ENSG00000141367_53 (sequence is synthesized)
ttatcgaagcatttcacttaaatgaacaaatcatggctgttatattaacttgaaataaaatatatttaaacatgtagttaacatgctctttctcatcatgaattataaaggtgcccaaat

SEQ ID NO: 366651 - DNA, 120 bp, Artificial Sequence
  ENSG00000141367_54 (sequence is synthesized)
tatgggtatcttgatttttttcaaaaattggttgtgtgaatccagctcttgcttatggctgagaatgttcctaaagttcatttcactatcccttaatcctcaatagctacacataccccc

SEQ ID NO: 366652 - DNA, 120 bp, Artificial Sequence
  ENSG00000141367_55 (sequence is synthesized)
ttgcctagttagtcttgcactgctttacaactctcttaggcaaattacctaacataagctccacagaagagttttttaaaacttaaaatccctgtcccaccaggtgtggtggctcatgcc

SEQ ID NO: 366653 - DNA, 89 bp, Artificial Sequence
  ENSG00000141367_56 (sequence is synthesized)
cttgaggctgactccatctctactaaaaataaaaaatcagccaggtgtgatggtggatgcctataagatcctagctgctactcaggagg

SEQ ID NO: 366654 - DNA, 86 bp, Artificial Sequence
  ENSG00000141367_57 (sequence is synthesized)
gactccatctctactaaaaataaaaaatcagccaggtgtgatggtggatgcctataagatcctagctgctactcaggaggtgaggc

SEQ ID NO: 366655 - DNA, 120 bp, Artificial Sequence
  ENSG00000141367_58 (sequence is synthesized)
cctgggtgacagaatgagactcttgtctcaaaaaacaaaaaaacctatttagtttcatccaggacattaagtgaaagtgtttaatgtgagtgcaggtcagtgaagaatacaatggtgccc

SEQ ID NO: 366656 - DNA, 120 bp, Artificial Sequence
  ENSG00000141367_59 (sequence is synthesized)
ctgctttgatttgtgggaggtgccatcagttttccccaccactgcttttgcaccctcagtgcaaatatcaacacagagaaaaaaaaaataataatagtattatgaaaacattgactctgt

SEQ ID NO: 366657 - DNA, 120 bp, Artificial Sequence
  ENSG00000141367_60 (sequence is synthesized)
ggagaccctgtgggttctgcagagtatactttgaaaactataagattatgagttctataaaataccaagtacagatgaactagaaaacaagcatatatccacaattaccagaattttcat

SEQ ID NO: 366658 - DNA, 120 bp, Artificial Sequence
  ENSG00000141367_61 (sequence is synthesized)
agtattccttttagtagatatgccatgacagttacttagccaccccatgccatcctgttgggaatgccactacctttgaatttggagccatcagtctatctgaggcaaacctcagaaatt

SEQ ID NO: 366659 - DNA, 120 bp, Artificial Sequence
  ENSG00000141367_62 (sequence is synthesized)
acctgagccagaatcatgcacttagcactgagttcaactcagtcttaacgttgcattttgttgcatcacttttgcagccagtaaacattctgtttagaaatagttgctattgtggcatca

SEQ ID NO: 366660 - DNA, 120 bp, Artificial Sequence
  ENSG00000141367_63 (sequence is synthesized)
ttcacagttgcaatttttctcctgtgctgtcatatgcctgtgcgaagtgtattaaatgaatcaaatattagaaatttcaaggctgtctttagtgttctgcccacaatactccaccaatga

SEQ ID NO: 366661 - DNA, 120 bp, Artificial Sequence
  ENSG00000141367_64 (sequence is synthesized)
ccttagaccttgagatggtgctataacgctgcttatattgcagttaaccatagagaggtggagccacttaaaatgggcctattaccaaaattctccctggcatcattacagttcttgggg

SEQ ID NO: 366662 - DNA, 120 bp, Artificial Sequence
  ENSG00000141367_65 (sequence is synthesized)
atacactgattttagaaattactgtcagtatcctcctaaaagaaggcttaaatagtttctaacaagatgactatcaggaagctatgtggcttggggagttgggaccctctgcctcatatt

SEQ ID NO: 366663 - DNA, 120 bp, Artificial Sequence
  ENSG00000141367_66 (sequence is synthesized)
ctgggtaactggtataacatagtaattattaggattgtatcaagtgtatctaaagatcaaaagggaaaaaaggcacccttaattgtcaaagttagttctaggaaaaaatactagcaggga

SEQ ID NO: 366664 - DNA, 120 bp, Artificial Sequence
  ENSG00000141367_67 (sequence is synthesized)
tgacaaactacgttcactttacagttaccataaattcttacttgggcccacccatttccatctgttaaggtccataaggttactcaagtttcagtggcttcattgttacaagaaaggggg

SEQ ID NO: 366665 - DNA, 120 bp, Artificial Sequence
  ENSG00000141367_68 (sequence is synthesized)
gaagtgagaaactttaataggctgtgatttagaaccactgctgattaacctttggccagtatgggtcagggaaggtgaacatgaaacactgcacagtaggttgtatcaatgctataaaac

SEQ ID NO: 366666 - DNA, 120 bp, Artificial Sequence
  ENSG00000141367_69 (sequence is synthesized)
gtagttctatattagtgagattttatagtagaaaaagtctttaaatgctataaaattgaaacttaggagcagcgtttaagtctttgtttgtttataggttggatacactccagattggat

SEQ ID NO: 366667 - DNA, 120 bp, Artificial Sequence
  ENSG00000141367_70 (sequence is synthesized)
gaactttttgaatctttcaagagttttgaaggtaattaggagtttttgagtttttaaaaaaagtacttaaggtagccaagaagaggtatgcttatgatcaggctgttggaaattttgttt

SEQ ID NO: 366668 - DNA, 120 bp, Artificial Sequence
  ENSG00000141367_71 (sequence is synthesized)
aatgaatatgcctcagcctcagtttcttcaaccataagctatgtttatttatcaagtaccttgtatactatagatgtttaggcagtaactattactgataagtgataagccttggaaaaa

SEQ ID NO: 366669 - DNA, 120 bp, Artificial Sequence
  ENSG00000141367_72 (sequence is synthesized)
ttatggtaatctctctctgtaacctcaaaaaattcattagacaaatatttaattacttagagactgtgcctcaaaatagaatacaacaagcttctaaagtgcaaaaggctttctaagaaa

SEQ ID NO: 366670 - DNA, 120 bp, Artificial Sequence
  ENSG00000141367_73 (sequence is synthesized)
aacaatttttgttactgcacctcatgaagccacagctggaataattggagtaaacagaaagggacaaaactgagtactttagaagacactggagccttttctgtttcctgtagcagatct

SEQ ID NO: 366671 - DNA, 120 bp, Artificial Sequence
  ENSG00000141367_74 (sequence is synthesized)
tccccaagattaaaaaatagaaaataaacatattactgttagtttttttccaaaaagtaaatagtaactttggatattagaaaataatatatatcaaagcacgatgtaagctgataaaaa

SEQ ID NO: 366672 - DNA, 120 bp, Artificial Sequence
  ENSG00000141367_75 (sequence is synthesized)
ctaggctagaaattaaaccacatttcatctgaaggagcctacttaggcttacttttctcaaactttcagttccctaacaaattaagatggattagactcatatttatggtatttaatatg

SEQ ID NO: 366673 - DNA, 120 bp, Artificial Sequence
  ENSG00000141367_76 (sequence is synthesized)
aaacaattaaatataaaacagtgccctaaccttaatggcctatgtgaagactgaaagatacttttttaatagtttcaaacagaaatgaggtgctgccttaatctttttaggacctggttt

SEQ ID NO: 366674 - DNA, 120 bp, Artificial Sequence
  ENSG00000141367_77 (sequence is synthesized)
ttagaaacttttccactgaagtctacaatttttttttttgagtgatttttcataatttgcctttttgaagaacatgcagtgagcattcataaagtgtttccccctgcaccttggcccccc

SEQ ID NO: 366675 - DNA, 120 bp, Artificial Sequence
  ENSG00000141367_78 (sequence is synthesized)
gtctcatgcagcacatttatgacattgaaaaccaccagtaatagataacattgagatttgaaatttagttttacttaggtataatgacagaccaagtataaggctttggttgagagacca

SEQ ID NO: 366676 - DNA, 120 bp, Artificial Sequence
  ENSG00000141367_79 (sequence is synthesized)
gcttttaaatattgaaagacaaatatagtgtaaaaggcgcaatggaatttgtatagtgaaggagattctctagtcccagggttgtaatgtcacttctgtctaattcattacagaattaca

SEQ ID NO: 366677 - DNA, 120 bp, Artificial Sequence
  ENSG00000141367_80 (sequence is synthesized)
gaatcaaatcatgttagccctagaagaaactgcagatcattttgttcaatcttctcattatataggaaaggaaatttgagggccagtgcaatggtttgccaaggtcacacaactagttag

SEQ ID NO: 366678 - DNA, 120 bp, Artificial Sequence
  ENSG00000141367_81 (sequence is synthesized)
tggaaggatccaggcattctaattcctttctttcactaatacatttggcctgctctacagaattacttctgtctgatactatccactttgaagagtagctagcatatagtagccatttac

SEQ ID NO: 366679 - DNA, 120 bp, Artificial Sequence
  ENSG00000141367_82 (sequence is synthesized)
ttttggctcaattaaaagcaaacatttttgggacaaaatcaggctttcctgattacttcttagataacagagcccacacagtattaaaacatgcagcctttctttatgcaaaaagattga

SEQ ID NO: 366680 - DNA, 120 bp, Artificial Sequence
  ENSG00000141367_83 (sequence is synthesized)
atatggagccacttgaatcttaaacttcagtctgcagctataaccaatatcatcagaagttatacacaattggcaaaagaatagcttattctgcccaaatacttgtccagtcactaggat

SEQ ID NO: 366681 - DNA, 120 bp, Artificial Sequence
  ENSG00000141367_84 (sequence is synthesized)
catttcacttttttgaataccatttgctttggggagggaagtattgccagaccatgaattcattattacctctgatcagttttaaacttcatttgaaaagtggttccttctcgttttctc

SEQ ID NO: 366682 - DNA, 120 bp, Artificial Sequence
  ENSG00000141367_85 (sequence is synthesized)
cctccctcaggctgcatcctagcatgcccagttttagtctggcatgagcttttatggcattttgaatccctccttcctgagggtttataatgacagtgctgaaaaccacctggactgaag

SEQ ID NO: 366683 - DNA, 120 bp, Artificial Sequence
  ENSG00000141367_86 (sequence is synthesized)
tatgaacattgccattgaatttgagggggactgagaatgttctttctagtctgttttattttgacagaatttaacatactaaggcttttccactttctgccataaacctaggtttataat

SEQ ID NO: 366684 - DNA, 120 bp, Artificial Sequence
  ENSG00000141367_87 (sequence is synthesized)
agactggcgaaagtgatgagtctaaaaaagtagtccctccggttcctctgtttccccccatgtggcgtcaggaagcgaggcaccgggcgcactgcgccccgaattcctgcgcccgccgcg

SEQ ID NO: 366685 - DNA, 120 bp, Artificial Sequence
  ENSG00000141367_88 (sequence is synthesized)
gttgattctttaacatctttaagtctggaggactaagtctaaggaatttgcatgatgtttttccttcctcttctacactgctgctgctgctttttccccccaataaattttcactaaagc

SEQ ID NO: 366686 - DNA, 120 bp, Artificial Sequence
  ENSG00000141367_89 (sequence is synthesized)
tatgaattagtcatctaatttcaaaatagccttctcccttcctaagtaattttagtattcacatttgtggtgacttaatttgttcaaattttgcatctagtgatacttgtctaaaatgaa

SEQ ID NO: 366687 - DNA, 120 bp, Artificial Sequence
  ENSG00000141367_90 (sequence is synthesized)
taatgttctttcacaactcgttctgttggctgtttatattctttgattgctaaagtgcacatttatatgctgtacatctagagagtttgatttagtaggtgttgcctataattttttttg

SEQ ID NO: 366688 - DNA, 120 bp, Artificial Sequence
  ENSG00000141367_91 (sequence is synthesized)
ccaagttttcagaattttgctcagatcttgtataagatactgcttttgaaaaaaatgatatgattactttatctctaacatctagattgtaggtagagtcaaaaatgtctttgaccactt

SEQ ID NO: 366689 - DNA, 120 bp, Artificial Sequence
  ENSG00000141367_92 (sequence is synthesized)
aactaattcataaaatttatttggtattaactatatttattcaccatttttcttgcctactgttttattagtgtttgtataaactttctcttatgaaggatttcacaagcaaaagtgaag

SEQ ID NO: 366690 - DNA, 120 bp, Artificial Sequence
  ENSG00000141367_93 (sequence is synthesized)
tagagttaagcttaagctacttgcctttttttctctctcttcattttctttgaggctcagcgcatgcagatctgtactgctgccatgctgagttttatcagaagtttctctagagcacag

SEQ ID NO: 366691 - DNA, 120 bp, Artificial Sequence
  ENSG00000141371_0 (sequence is synthesized)
aaaccgcccactccctgagacggctaggtcacagaagcagtgggtcagaagccagaggggacgtggggagtgccaccctggagcctaccggcacacctgctgagatggaggcctcagatg

SEQ ID NO: 366692 - DNA, 120 bp, Artificial Sequence
  ENSG00000141371_1 (sequence is synthesized)
ggcaagggggtgaaggggacaagccactagagcaggtgacaaatgtgtcatgcctggagacaagctccagcgccagccctgctagagactcgctcatgcgccatgccaagggcctggatc

SEQ ID NO: 366693 - DNA, 120 bp, Artificial Sequence
  ENSG00000141371_2 (sequence is synthesized)
aggacaccttcaaaacttgtaaagaatacctaagaccgctgaagaagttcctgcgaaagttgcacctgcccagggaccttccccagaagaagaagctgaagtacatgaagcagagccttg

SEQ ID NO: 366694 - DNA, 120 bp, Artificial Sequence
  ENSG00000141371_3 (sequence is synthesized)
tggtcctaggggaccacatcaacacctttctgcagcattactgccaagcctgggaaatcaaacactggagaaagatgctctggcggttcatctccctcttctcggagctggaagcaaagc

SEQ ID NO: 366695 - DNA, 120 bp, Artificial Sequence
  ENSG00000141371_4 (sequence is synthesized)
acaagtacaccaagagcagccagccggccaagttcctggtgacattctgcgcctcggatgcgccggagaggtccttgctggccgaccgggaagacagtctgcccaagctctgccatgcat

SEQ ID NO: 366696 - DNA, 120 bp, Artificial Sequence
  ENSG00000141371_5 (sequence is synthesized)
gggggctgcacagcaacatcagcggcatgaaggagcggctgtccaacatgcagaccccaggtcaagggagccccctgcctgggcagccaagatcccaggaccatgtcaagaaagattctt

SEQ ID NO: 366697 - DNA, 120 bp, Artificial Sequence
  ENSG00000141371_6 (sequence is synthesized)
taagggagctttctcaaaaaccaaaactcaagaggaagaggataaaggaagccccagaaactccagagactgaaccgtaagaagaccaactgggacaaagggcccgcttgtcctggctct

SEQ ID NO: 366698 - DNA, 120 bp, Artificial Sequence
  ENSG00000141371_7 (sequence is synthesized)
cagagcacggggaatggagaccaaaaagggaaaagaattgtccttatcaaaaagattctcaggtcttaattaggaataaatgaggtgggaaataaacattcttatgacagttctacctta

SEQ ID NO: 366699 - DNA, 120 bp, Artificial Sequence
  ENSG00000141371_8 (sequence is synthesized)
cgttcggcgggtggggtccgagcagctgacggtgacaaatgtgtcatgcctggagacaagctccagcgccagccctgctagagactcgctcatgcgccatgccaagggcctggatcagga

SEQ ID NO: 366700 - DNA, 120 bp, Artificial Sequence
  ENSG00000141376_0 (sequence is synthesized)
tgagcctagagctggagactagcgttaaccggcggggcggccggttttatgaatgaagctatggctacagattccccaagaagacccagtcgttgtactggtggagttgtggttcgcccc

SEQ ID NO: 366701 - DNA, 120 bp, Artificial Sequence
  ENSG00000141376_1 (sequence is synthesized)
caggctgtcacagagcagtcctacatggaaagtgttgtgacttttctgcaggatgttgtgccacaggcttacagtggaacacctctaacagaagaaaaggagaaaatagtctgggtcaga

SEQ ID NO: 366702 - DNA, 120 bp, Artificial Sequence
  ENSG00000141376_2 (sequence is synthesized)
tttgaaaatgcagatttaaatgatacatcaagaaatctggaatttcatgaaatacatagtactgggaatgaaccgcctttgttgattatgattggctacagtgatggaatgcaggtctgg

SEQ ID NO: 366703 - DNA, 120 bp, Artificial Sequence
  ENSG00000141376_3 (sequence is synthesized)
agcatccctatcagtggtgaagcacaagagctcttctctgttcgacatggcccaattcgagcggctagaatcttgcctgctccacagtttggtgctcaaaaatgtgataactttgctgaa

SEQ ID NO: 366704 - DNA, 120 bp, Artificial Sequence
  ENSG00000141376_4 (sequence is synthesized)
aaaagacccctccttggtgtttgtaagagcattggatcttctggcacaagcccaccgtactgttgtgtggatctgtattcacttcgtactggggagatggtcaagtccattcaatttaag

SEQ ID NO: 366705 - DNA, 120 bp, Artificial Sequence
  ENSG00000141376_5 (sequence is synthesized)
acacctatttatgatctccattgcaataaacggatccttgtcgtagtcttgcaggagaaaattgctgcctttgatagctgtactttcacgaagaaattctttgttacaagctgctatcca

SEQ ID NO: 366706 - DNA, 120 bp, Artificial Sequence
  ENSG00000141376_6 (sequence is synthesized)
tgtccagggccaaacatgaatcctattgctcttgggagccgctggcttgcttatgcagaaaacaagttgattcgatgtcatcagtcccgtggtggagcctgtggagacaacattcagtct

SEQ ID NO: 366707 - DNA, 120 bp, Artificial Sequence
  ENSG00000141376_7 (sequence is synthesized)
tatactgccacagtcattagtgctgctaaaacattgaaaagtggcctgacaatggtagggaaagtggtgactcagctgacaggcacactgccttcaggtgtgacagaagatgatgttgcc

SEQ ID NO: 366708 - DNA, 120 bp, Artificial Sequence
  ENSG00000141376_8 (sequence is synthesized)
atccacagtaattcacggcggagtcctttggtcccaggcatcatcacagttattgacaccgaaaccgttggagagggccaggtgcttgtgagtgaggattctgacagtgatggcattgtg

SEQ ID NO: 366709 - DNA, 120 bp, Artificial Sequence
  ENSG00000141376_9 (sequence is synthesized)
gcccacttccctgcccatgagaagccagtgtgctgcatggcttttaatacaagtggaatgcttctagtcacaacagacacccttggccatgactttcatgtcttccaaattctgactcat

SEQ ID NO: 366710 - DNA, 120 bp, Artificial Sequence
  ENSG00000141376_10 (sequence is synthesized)
ccttggtcctcatcacaatgtgctgtccaccatctgtatactcttcacaggggagaaactgaagccaaagtacaggacatctgcttcagccatgactgtcgctgggttgtggtcagtact

SEQ ID NO: 366711 - DNA, 120 bp, Artificial Sequence
  ENSG00000141376_11 (sequence is synthesized)
ctccggggtacttcccacgttttccccatcaacccttatggtggccagccttgtgttcgtacacatatgtcaccacgagtagtgaatcgcatgagccgtttccagaaaagtgctggactg

SEQ ID NO: 366712 - DNA, 120 bp, Artificial Sequence
  ENSG00000141376_12 (sequence is synthesized)
gaagagattgaacaagaactgacgtctaagcaaggaggtcgctgtagccctgttccaggtctatcaagcagcccttctgggtcacccttgcatgggaaactgaacagccaagactcctat

SEQ ID NO: 366713 - DNA, 120 bp, Artificial Sequence
  ENSG00000141376_13 (sequence is synthesized)
aacaattttaccaacaacaaccctggcaaccctcggctctctcctcttcccagcttgatggtagtgatgcctcttgcacaaatcaagcagccaatgacattggggaccatcaccaaacga

SEQ ID NO: 366714 - DNA, 120 bp, Artificial Sequence
  ENSG00000141376_14 (sequence is synthesized)
ctcctccacaaatttcacccagcaaatcgatgggcggagaattttgtgtggctgctatcttcggaacatccaggtcatggtttgcaaataatgcaggtctgaaaagagaaaaagatcagt

SEQ ID NO: 366715 - DNA, 120 bp, Artificial Sequence
  ENSG00000141376_15 (sequence is synthesized)
ccaaacaagttgtagttgagtccctgtacattatcagttgctatggcaccttagtggaacacatgatggagccgcgacccctcagcactgcacccaagattagtgacgacacaccactgg

SEQ ID NO: 366716 - DNA, 120 bp, Artificial Sequence
  ENSG00000141376_16 (sequence is synthesized)
aaatgatgacatcgcctcgagccagctggactctggttagaacccctcaatggaatgaattgcagccaccgtttaatgcaaaccaccctctgctcctcgctgcagatgcagtacagtatt

SEQ ID NO: 366717 - DNA, 120 bp, Artificial Sequence
  ENSG00000141376_17 (sequence is synthesized)
atcagttcctgcttgctggcctggttccccctggaagtcctgggcccattactcgacatgggtcttacgacagtttagcttctgaccatagtggacaggaagatgaagaatggctttccc

SEQ ID NO: 366718 - DNA, 120 bp, Artificial Sequence
  ENSG00000141376_18 (sequence is synthesized)
aggttgaaattgtaacacacactggaccccatagacgtctgtggatgggtccacagttccagttcaaaaccatccatccctcaggccaaaccacagttatctcatccagttcatctgtgt

SEQ ID NO: 366719 - DNA, 120 bp, Artificial Sequence
  ENSG00000141376_19 (sequence is synthesized)
tgcagtctcatggtccgagtgacacgccacagcctcttttggattttgatacagatgatcttgatctcaacagtctcaggatccagccagtccgctctgaccccgtcagcatgccagggt

SEQ ID NO: 366720 - DNA, 120 bp, Artificial Sequence
  ENSG00000141376_20 (sequence is synthesized)
catcccgtccagtctctgatcgaaggggagtttccacagtgattgatgctgcctcaggtacctttgacaggagcgtgaccctgctggaggtgtgcgggagctggcctgagggcttcgggc

SEQ ID NO: 366721 - DNA, 120 bp, Artificial Sequence
  ENSG00000141376_21 (sequence is synthesized)
tgcggcacatgtcctccatggagcacacggaggagggcctccgggagcgacttgccgacgccatggccgagtcacctagccgggacgtcgtgggatccggaacagaacttcagcgagagg

SEQ ID NO: 366722 - DNA, 120 bp, Artificial Sequence
  ENSG00000141376_22 (sequence is synthesized)
gaagcatcgagactctgagtaacagctcaggctccaccagcggcagcataccaagaaactttgatggctaccgatctccgctgcccaccaatgagagccagcccctcagcctcttcccga

SEQ ID NO: 366723 - DNA, 120 bp, Artificial Sequence
  ENSG00000141376_23 (sequence is synthesized)
ctggcttcccgtaggtaccagcaacctgcttctgactggccagccccctcccctgctggaggaggggagaagccccgctctggtcctacccttcagtctctgctcttccttcatcaacca

SEQ ID NO: 366724 - DNA, 120 bp, Artificial Sequence
  ENSG00000141376_24 (sequence is synthesized)
ccttccccaagcttagtgacagcagccgcccatcctacctggatggagaagagacccttctccaagcacctcagcgcacttgccctctgccacacctgtcggtggaggctgtggccagga

SEQ ID NO: 366725 - DNA, 120 bp, Artificial Sequence
  ENSG00000141376_25 (sequence is synthesized)
gagactgtagaagctcggtccctgtgtatgtttgcatatgacatcctgcattggatccgcttttgtattttttaaccatacccacggtggggcgggtggggggagcctggaacagtgacc

SEQ ID NO: 366726 - DNA, 120 bp, Artificial Sequence
  ENSG00000141376_26 (sequence is synthesized)
agatctgggggcctgagtggggacagagttgatcgtccacctggccattttgaccctgagtggacagtcacagcctcagctcatgtctggctgtgacacacactgcccccagcttccctt

SEQ ID NO: 366727 - DNA, 120 bp, Artificial Sequence
  ENSG00000141376_27 (sequence is synthesized)
ggtcagccccactccagcacggggtgaacggaggcccagagtactagggaaggaggaagggaggacatgcctcttcttcctcctttctttccccatctgttcatgggaagagtttgtctt

SEQ ID NO: 366728 - DNA, 120 bp, Artificial Sequence
  ENSG00000141376_28 (sequence is synthesized)
tcttatctttaagcccctttaccctggtcctgtactgatcagtgaaggaaaccgtggttactgaggccctgttgaaaagtgcacgtcttgtccaataaatcacgctgcagttggtgtcca

SEQ ID NO: 366729 - DNA, 120 bp, Artificial Sequence
  ENSG00000141376_29 (sequence is synthesized)
agtgaagtgttttgggaaaaaaaaaggaaaaaaaaaacaatgccaacagcccagcgtccgtgagcaacccaacagtaacaaagcatgcgttcgggatggaggaagaacttcagcgagagg

SEQ ID NO: 366730 - DNA, 120 bp, Artificial Sequence
  ENSG00000141376_30 (sequence is synthesized)
ggtcatcccgtccagtctctgatcgaaggggagtttccacagtgattgatgctgcctcagtgcacctctgattatgatccatgcattggagtcagctgcacatcaggaagttgcttatct

SEQ ID NO: 366731 - DNA, 120 bp, Artificial Sequence
  ENSG00000141376_31 (sequence is synthesized)
tgttggtcttcattgccctgtattaccttcaagcattttatatgacttcatggattatcttcttaattattcctatggcacatgttacacctaaccctctattttagtgacagctcttgc

SEQ ID NO: 366732 - DNA, 120 bp, Artificial Sequence
  ENSG00000141376_32 (sequence is synthesized)
tctgtctaaccttgtggcagtataattgtttttcatataattactttattcacagataatagaatttaatgtgatataattaaatcctttgacaattataacagtttttaaagtgaaaat

SEQ ID NO: 366733 - DNA, 120 bp, Artificial Sequence
  ENSG00000141376_33 (sequence is synthesized)
aagtagtgagtgaaatgaagaagaaacttgtgagatgatttcaggtgaacatctttctaaatccttttattcatgacttaaaaccatttgagacagggtctcgcgctgttgcccaggctg

SEQ ID NO: 366734 - DNA, 120 bp, Artificial Sequence
  ENSG00000141376_34 (sequence is synthesized)
gtctcaaagtcctggcctcaagcaatcttcccgcgttggcctctcaaagtgttgggattgcaggtgtaaggcaccactccccgccctaaatgaaattgtagatggaatcccattgtatca

SEQ ID NO: 366735 - DNA, 120 bp, Artificial Sequence
  ENSG00000141376_35 (sequence is synthesized)
aaaagaggaaagtagggatccgtttgggttgaacctgggaagggggttgccttccccgtcccacttcttaaggtggtccctgaagaccaggggaaccctgtagctcctcagaaacagttg

SEQ ID NO: 366736 - DNA, 120 bp, Artificial Sequence
  ENSG00000141376_36 (sequence is synthesized)
gaagagcagaacattaaacagggtgttgtgaggattcatggagcaaatggctgtgaaagcaccttgtaaagggtagagcagtgtgcggcgtgagggattattatcattgttaagacgtct

SEQ ID NO: 366737 - DNA, 120 bp, Artificial Sequence
  ENSG00000141376_37 (sequence is synthesized)
acgcctcgttgctcaccctgtgtgatcctgcagcttctcaacttttccctcctttctccctggtttccacgcctgggctgctgagtcaggcggaccggccaaggctggcgagggctgaac

SEQ ID NO: 366738 - DNA, 120 bp, Artificial Sequence
  ENSG00000141376_38 (sequence is synthesized)
agatgctctgacatgtcaaggcaggaaatgacagttcccaggcagccctctgtttcaggtgtggaacaggctccgaacacactttgtgtgataaattgtagtaacgccaggctgagctct

SEQ ID NO: 366739 - DNA, 120 bp, Artificial Sequence
  ENSG00000141376_39 (sequence is synthesized)
acctccacccccttaggctgcaagactaggacatgaggctgaaagtcagagaagtccctgtgagacgagggccctgagcaagcactggccagactgtagcaaggccactcaccaggccac

SEQ ID NO: 366740 - DNA, 120 bp, Artificial Sequence
  ENSG00000141376_40 (sequence is synthesized)
cccgctggttctacttccgcacccacctctggcagccatgatgcttctgcagcatgccagtttgttcactgagaccttcacagaaggtcgcacaaccaccctggacggtgagaaactaag

SEQ ID NO: 366741 - DNA, 120 bp, Artificial Sequence
  ENSG00000141376_41 (sequence is synthesized)
gtgactgaggcaagtcattgaaccaccctgagccttggcttcctcatctatgaaatggagttgacagcatctgtcctgcctgtggtaaaaattgctgtgatcccacaaccaaaaggaaag

SEQ ID NO: 366742 - DNA, 120 bp, Artificial Sequence
  ENSG00000141376_42 (sequence is synthesized)
agagaattatgagaaaaatatgtacttattctgtgaaaatatgtgagattttcatgagagacttcctgttccagtggactcttccaccgcccttgagtggggaacatccaggccttcaca

SEQ ID NO: 366743 - DNA, 120 bp, Artificial Sequence
  ENSG00000141376_43 (sequence is synthesized)
ctcacgctcagcccatcacccctctgtgcaaggtgcaaggtcctctgcccacctgaagcctcaaggcctgatggaaaccatccacagccactctagtacctttgacaggagcgtgaccct

SEQ ID NO: 366744 - DNA, 120 bp, Artificial Sequence
  ENSG00000141376_44 (sequence is synthesized)
gccagtgcgacctctgtgacccttcagagtcccctctccaggtgctgccccaacatgaaagcaggaattactgtggataggcacaggcttggactgaggggctgggggagggctgttgga

SEQ ID NO: 366745 - DNA, 120 bp, Artificial Sequence
  ENSG00000141376_45 (sequence is synthesized)
cccccagagccaggctctcctctggaagcatcaacatagacacagcccttgacgtagcagtaaaaaccttcccccctgagagacacgtggcagtgaagtgttttgaacttcagcgagagg

SEQ ID NO: 366746 - DNA, 120 bp, Artificial Sequence
  ENSG00000141376_46 (sequence is synthesized)
ctttttattatgttttctgtgatttattcttcaacgtcttcttagagaattcaactttggaaatatattactatcaattaatatcctttctgagtactacatgcagatccagttcctctg

SEQ ID NO: 366747 - DNA, 120 bp, Artificial Sequence
  ENSG00000141376_47 (sequence is synthesized)
agtgaataccattgaatgaatagaggcaaattttttagttatatcatttgactaatcaacaaatcaatactaaggaactgattggaagctttttgaatgtgggaagggcataccgcctta

SEQ ID NO: 366748 - DNA, 120 bp, Artificial Sequence
  ENSG00000141376_48 (sequence is synthesized)
gtatataaaaagatcctgttgctgcatgcagacataaaattgagtctgtggcatttgctgtgtttttcagcaaaacttcatcccaaatcagacatcttaaggcaccaataatttgcaaag

SEQ ID NO: 366749 - DNA, 120 bp, Artificial Sequence
  ENSG00000141376_49 (sequence is synthesized)
ttgctttggctgtctgtgcttgtagggtaatactcaagaaatctttgcccagtttcaatgttcaggagtttcccaaaatgttttcttgcagtagtttcatagttggagatcttagattta

SEQ ID NO: 366750 - DNA, 120 bp, Artificial Sequence
  ENSG00000141376_50 (sequence is synthesized)
agtttttaatccattttgattttatttatgtgtatggcgagagataggggtctatttttattcttctgcatatgtatatccagttttcccagcactaattattgaagagactatgtttcc

SEQ ID NO: 366751 - DNA, 120 bp, Artificial Sequence
  ENSG00000141376_51 (sequence is synthesized)
ggcttccaggaagcagctgataggttgggtctagaagcttgataagagactaaaaaagtacagtaatactcacaccagtataattgccacaaacacctagcacttaatagttaaaggctt

SEQ ID NO: 366752 - DNA, 120 bp, Artificial Sequence
  ENSG00000141376_52 (sequence is synthesized)
aaggaggaaacgaaagatttgaagtgagagtataactaaaagatgtgggattaaaataagaaatttgggaagaggttccagttattaagatcctgccggtctcccatggtctgaagggtt

SEQ ID NO: 366753 - DNA, 120 bp, Artificial Sequence
  ENSG00000141376_53 (sequence is synthesized)
ggagttttatcagttattctcaccttttattcagaataagtagggatccagcagaggaaggggactgtcactagcagggcctgccttgactgccgttgcacttccctgctcagaaagtgt

SEQ ID NO: 366754 - DNA, 120 bp, Artificial Sequence
  ENSG00000141376_54 (sequence is synthesized)
ccaggcctgcacattgcacccaggctccttgccatcatgtttctgtctcttacaggccttccccaccttcccttccagcctgacctcccaccccttctgcagtaacctctgcatatttca

SEQ ID NO: 366755 - DNA, 120 bp, Artificial Sequence
  ENSG00000141376_55 (sequence is synthesized)
cctcctccaccttcttgccaatataggatcccagcatccccagcatgcaccctgttacctggccctggtgcatgttggtcacccctcaggaccgctgccctcccatcctgcccagtcgtc

SEQ ID NO: 366756 - DNA, 120 bp, Artificial Sequence
  ENSG00000141376_56 (sequence is synthesized)
gtcttaggccaagctcaaatctcacctcctctgtgttgctttccctgaccatgaagccaaatgtgtgcaactctctctgtctctgaatttctgcaccaccgacttgctggatacttggcc

SEQ ID NO: 366757 - DNA, 120 bp, Artificial Sequence
  ENSG00000141376_57 (sequence is synthesized)
ctgggcaaagagtgtatgctgccttttccattaacttgctcaccaattcccttcgttttgccattggaaaagggccggccctggtggtcccttcagcccctccctcacccatactcccac

SEQ ID NO: 366758 - DNA, 120 bp, Artificial Sequence
  ENSG00000141376_58 (sequence is synthesized)
gagtgtcttgacccactactggttctttgaactgagtctgaaccatctttgttatccccaaccaccagccttctccctgcccagcaaccagcactggaaggagagccaggctgagcctca

SEQ ID NO: 366759 - DNA, 120 bp, Artificial Sequence
  ENSG00000141376_59 (sequence is synthesized)
gttaatgtttgttgagtgactggatgggtttctgtggcccctgagaggtaaatgaaagccagtcaaagcaatgggaatagttattgattaaaagtcacacttgttaatttctggccaggt

SEQ ID NO: 366760 - DNA, 120 bp, Artificial Sequence
  ENSG00000141376_60 (sequence is synthesized)
ctcaaatctgattctgggtagatcatttcccccaccccaccttcgtcactaaggctactggaagccccgccaggggcagagctgtaatgggagtttgggctgagactctcctctgcatat

SEQ ID NO: 366761 - DNA, 120 bp, Artificial Sequence
  ENSG00000141376_61 (sequence is synthesized)
gcggtcatggatggttaaattcccacctttcccttctgcccttgcctctgcccctctgccttctcgaaacatggcccgagatgtggaggccaccccctggatgtggtggctgctgagaga

SEQ ID NO: 366762 - DNA, 120 bp, Artificial Sequence
  ENSG00000141376_62 (sequence is synthesized)
gggagacacacttgctcacagaaaatgaaagttggcaatgaccctctgaccctttaggaatccagaatcttggctcctagaagccatagagcactgtaccaagaaggccaagccaagccc

SEQ ID NO: 366763 - DNA, 120 bp, Artificial Sequence
  ENSG00000141376_63 (sequence is synthesized)
atccgattgaacttaacggagaagtgaagttccctagtagaagaaggcattttggagcccatcccggaaacagctttccagccttggccttttacttatttcttcctgcccactcctcct

SEQ ID NO: 366764 - DNA, 120 bp, Artificial Sequence
  ENSG00000141376_64 (sequence is synthesized)
cccacgtcacccctgcccccggggacctgccggcccactgcataagacattttttaatttgctggcaaaatcccccagcaccaggcttcgcagccctcccctgttacccacatatgtttt

SEQ ID NO: 366765 - DNA, 120 bp, Artificial Sequence
  ENSG00000141376_65 (sequence is synthesized)
atggggtgtagcccgctagcttgcagttccacccctctgcacccttcattgagttttgggagaagcgccatccagtcgtgtcatttgttcaggatgacttttccattccacgcccgctgt

SEQ ID NO: 366766 - DNA, 120 bp, Artificial Sequence
  ENSG00000141376_66 (sequence is synthesized)
gttcgttttcctggaatgttcccatcatctcccagctccagttggccagggccagcgtgccatctccatgctggtgtgtgtgactgtttggtgctgacccgaggggtgggttggtggagt

SEQ ID NO: 366767 - DNA, 120 bp, Artificial Sequence
  ENSG00000141376_67 (sequence is synthesized)
acgagcctgggctggggccttataaggcctggagtttctcggtttcatgcgttatccatccccgaccactgagagctgagtaggatcctgtggttagtgcccttgagctggtctttgtga

SEQ ID NO: 366768 - DNA, 120 bp, Artificial Sequence
  ENSG00000141376_68 (sequence is synthesized)
cctttctctaagcagcccaaccacacactgccatgcagctttgaacttcagacctggtttctaaatccacggaagctgagaggaggaagaaaatctgaggggttacccaggatgccggct

SEQ ID NO: 366769 - DNA, 120 bp, Artificial Sequence
  ENSG00000141376_69 (sequence is synthesized)
ttctctctacatcattccctaccccagccctgtgcagcaggcaggagtgtaggaactcaggcagctggactggggaggagggagagagggaaggatgataccagtttaggctagtgagaa

SEQ ID NO: 366770 - DNA, 120 bp, Artificial Sequence
  ENSG00000141376_70 (sequence is synthesized)
atctgtaaaaccctagatgtgctgtgcctgggaacagaccatgaacacccccgcaaagctctcagtggtcaaaccagatttgggtatcgactcactttgatctcagctcttcctgctctc

SEQ ID NO: 366771 - DNA, 120 bp, Artificial Sequence
  ENSG00000141376_71 (sequence is synthesized)
ttaaaggtccagtttgtgatccgctttaaaggaatattttattttcaatacagacacagcccttgacgtagcagtaaaaaccttcccccctgagagacacgtggcagtgaagtgttttgg

SEQ ID NO: 366772 - DNA, 120 bp, Artificial Sequence
  ENSG00000141376_72 (sequence is synthesized)
cagtcctacatggaaagtgttgtgacttttctgcaggatgttgtgccacagaaatcaaatgtcgcaaaggaataagtctgctaagctgaagaagaatttgaaaatgttattgcttcacca

SEQ ID NO: 366773 - DNA, 120 bp, Artificial Sequence
  ENSG00000141376_73 (sequence is synthesized)
cgttaaaggaaaggaaagcctgatacaggaaaaaaggaagttgtcctaaatgcaggatagcatcctggtttggatcctggagcagagaaaggacattagtgagaaaggcttacagtggaa

SEQ ID NO: 366774 - DNA, 120 bp, Artificial Sequence
  ENSG00000141376_74 (sequence is synthesized)
gagaattcgatgtaaacagaccagtctccctgtcctccggctccaacctgaaacgctcacgtgagcgggacaggagtctggatcatgttgcttttcttttcaaagccacgaaggttctgt

SEQ ID NO: 366775 - DNA, 71 bp, Artificial Sequence
  ENSG00000141376_75 (sequence is synthesized)
tcctgggctcaagcgattccctcaactgatttttgtatatatatatttttttgtagagatggggttttgcc

SEQ ID NO: 366776 - DNA, 77 bp, Artificial Sequence
  ENSG00000141376_76 (sequence is synthesized)
ccaggacacatggggattatgggaactacaagtcaagatgagatttgggtggagacacagccaaacgatatcagggt

SEQ ID NO: 366777 - DNA, 120 bp, Artificial Sequence
  ENSG00000141376_77 (sequence is synthesized)
agcgttaaccggcggggcggccggttttatgaatgaagctatggctacagattccccaagaagacccagtcgttgtactggtggagttgtggttcgcccccaggctgtcacatacatcaa

SEQ ID NO: 366778 - DNA, 120 bp, Artificial Sequence
  ENSG00000141376_78 (sequence is synthesized)
ccatccacagccactctaggatgagtcaacattgcatgcagccagccatggccactgggagaagagtcagacatgggccatggagctgcaggctcacctgcccccggctgagtcaggacc

SEQ ID NO: 366779 - DNA, 120 bp, Artificial Sequence
  ENSG00000141376_79 (sequence is synthesized)
gagcacaggacttgacagaggaggcatcgcagcaaggtacctttgacaggagcgtgaccctgctggaggtgtgcgggagctggcctgagggcttcgggctgcggcacatgtcctccatgg

SEQ ID NO: 366780 - DNA, 120 bp, Artificial Sequence
  ENSG00000141376_80 (sequence is synthesized)
gattcaattatctccacctggtccctcccaggacacatggggattatgggaactacaagtcaagatgagatttgggtggagacacagccaaacgatatcatggactcttccaccgccctt

SEQ ID NO: 366781 - DNA, 120 bp, Artificial Sequence
  ENSG00000141376_81 (sequence is synthesized)
ggggtcccatctggcactgcatgggccgtaggtccccagccctcccacttcctaaaactgttcttcatgttgaacctgtgactcctctccccctcccccactctgaacggggtcttggcc

SEQ ID NO: 366782 - DNA, 120 bp, Artificial Sequence
  ENSG00000141376_82 (sequence is synthesized)
ccctctgtcacagcagatccatctctgggacccccaagacagattggtccccagcccctacacatgcatgtcactgtcctccttgactgcaaactccccctcctcacggtgtgcccctgc

SEQ ID NO: 366783 - DNA, 120 bp, Artificial Sequence
  ENSG00000141376_83 (sequence is synthesized)
gcctcctgacacctctccacctgcttgcagagatcagtgtacttctcaatcgttgtccatatcttttccaaaaagattcctcaatgcttttcttttcaaaagggaaaaaaaaaggaaaaa

SEQ ID NO: 366784 - DNA, 120 bp, Artificial Sequence
  ENSG00000141376_84 (sequence is synthesized)
aaaaacaatgccaacagcccagcgtccgtgagcaacccaacagtaacaaagcatgcgttcgggatggaggaaggtaaggccacacgtttccatttgccgcttgctcgtagggctgggcgg

SEQ ID NO: 366785 - DNA, 120 bp, Artificial Sequence
  ENSG00000141376_85 (sequence is synthesized)
ccgggatgacttggaggggggaatctgagcagccctcctcccctccacttcccacacacacccctgcctgcagggggaggagcagaaggggtctgagaggaggcgtggagaaaagcgccc

SEQ ID NO: 366786 - DNA, 120 bp, Artificial Sequence
  ENSG00000141376_86 (sequence is synthesized)
aagcgcccacaaagctgccccggggccagcaggcccccgattctttcagttagtctgtgttgaagaatgggcccccacctccccttaccacatcattcattcattcattcattcattcat

SEQ ID NO: 366787 - DNA, 120 bp, Artificial Sequence
  ENSG00000141376_87 (sequence is synthesized)
tcattcatgctagaaatgtttagggcacccatgattttccaggccactagggatacagagttaaggcacagaacccccccgagggggtctcccctagatgagacacatgggacgatgagg

SEQ ID NO: 366788 - DNA, 120 bp, Artificial Sequence
  ENSG00000141376_88 (sequence is synthesized)
gggcctgggctaggagtcagcacagcgcagggtagggtctggcaggctctgctcgggggacaggacgggctcacagaggagtggacactcgtgctaagctttggaagatgagtaggtgtt

SEQ ID NO: 366789 - DNA, 120 bp, Artificial Sequence
  ENSG00000141376_89 (sequence is synthesized)
ctggggctttgtagagcaagttacatgaacacaggcccagaggcctagaaccacctggatgggtccaaacaccacacagcttcatcacttttgtgtctcagacataataacgggtatcac

SEQ ID NO: 366790 - DNA, 120 bp, Artificial Sequence
  ENSG00000141376_90 (sequence is synthesized)
tagtgaggggttggcggcaggtcatggagggccatttcacagtgctggggagttcagaccttgccctgggaactgttaggagtggctgaaggcttttacgcagaggaaaagcaagatgag

SEQ ID NO: 366791 - DNA, 120 bp, Artificial Sequence
  ENSG00000141376_91 (sequence is synthesized)
ggctgtgctgtacatagcccactctggctttggcacagggtgggtgacctggagtcaggagactgaggcgcacagggcaggcttagccagggcagaggcagaggagggagaagttcagca

SEQ ID NO: 366792 - DNA, 120 bp, Artificial Sequence
  ENSG00000141376_92 (sequence is synthesized)
gagccttggttaccttaccctgggatgcgggggcgagggagaacgctgcccccatccttcttacccgggtctaactggcaaagggaaaatgcgagcaaggcgctcaggttgtccctggcc

SEQ ID NO: 366793 - DNA, 120 bp, Artificial Sequence
  ENSG00000141376_93 (sequence is synthesized)
cccaagaacaggacattcatcttgtaagcccctgggtggctttccctgcactgtggtgtgatgggctggggtgcatccacgaagactcattggtgggaccaccgaggctgctggggtatt

SEQ ID NO: 366794 - DNA, 120 bp, Artificial Sequence
  ENSG00000141376_94 (sequence is synthesized)
tgctgggggcctatgccaagggacggtgggggtgccatgcctgggcccgggctcccgtttcctggcttccttggcagtgtggatgtggaggcattttgcatcaaggccgttaaagctgcc

SEQ ID NO: 366795 - DNA, 120 bp, Artificial Sequence
  ENSG00000141376_95 (sequence is synthesized)
cctgagctgtaaaaaggggccagccttccccatcctggtggccctgcctgctccttcctcgggggctttcttccttaggcctggcggcccgatcctaaggaagcccctgcttttcttgcg

SEQ ID NO: 366796 - DNA, 120 bp, Artificial Sequence
  ENSG00000141376_96 (sequence is synthesized)
cctgccggtgctcttctcccgcccgcctggccctgctgtcagcgccccctagtgccgggccggccgcgcatgagggcggtgggacagatcgcccacaactcctcggcttgcttttgggga

SEQ ID NO: 366797 - DNA, 120 bp, Artificial Sequence
  ENSG00000141376_97 (sequence is synthesized)
aataaggcaacagaggggtctcttggagtctggagcttccatgtaaaatccccagggtctactcttggctttaccaccctctccatctcatggcacgatggcctgtccccccagattagg

SEQ ID NO: 366798 - DNA, 120 bp, Artificial Sequence
  ENSG00000141376_98 (sequence is synthesized)
gtgatactgaaggaggagcaggagaaaaagatcctatctgccttgttttctatccatatccagatagctcttgactttcccaggcagccaatgtcccctggaggtcagggaccatagtca

SEQ ID NO: 366799 - DNA, 120 bp, Artificial Sequence
  ENSG00000141376_99 (sequence is synthesized)
cccaagggcccctcccctccccaggcccaggtgcccgcctcctccccactccactctgtggctgctgcaggcctgcagggagtcggggtcagtggttcgttgctggctggctggtgttgg

SEQ ID NO: 366800 - DNA, 120 bp, Artificial Sequence
  ENSG00000141376_100 (sequence is synthesized)
ccagcccaggagtgaaggccatgaccccttcattccctaaccagagccggctgtactgcgcgtgtggtggcagggggcctgggagcggttgcaggatgaagaccaaggtctcaagccaga

SEQ ID NO: 366801 - DNA, 120 bp, Artificial Sequence
  ENSG00000141376_101 (sequence is synthesized)
ccagacgagtgcaacgtttttgcacatcttgctgtttcaagtgactgctttgaggtcctgcactcctgggtggacaggccagactccttcagtcacaggcaggcatcccttggagaagga

SEQ ID NO: 366802 - DNA, 120 bp, Artificial Sequence
  ENSG00000141376_102 (sequence is synthesized)
aaggttgcaggtctacatatcttggcttggggcaggctccagagactgcccggtgtgtgtgtgcccatatgtcagagcccccgggggagactgaaagggaatcggaactgaccaccttca

SEQ ID NO: 366803 - DNA, 120 bp, Artificial Sequence
  ENSG00000141376_103 (sequence is synthesized)
aaaagccaagaagtaattggttcttccttgcactcagcaagcagggaattccattcccaacccacctaccccaggacctgacttgggtcaagagatggtaggacaattgagcggcccaca

SEQ ID NO: 366804 - DNA, 120 bp, Artificial Sequence
  ENSG00000141376_104 (sequence is synthesized)
gctgaattagatggatcaagctgccatatctgaggtggcaacatggatgtgcagggccagggaggcagaggaggaggagggcgggactccctgcctgcccttcaggttgatgctgagggg

SEQ ID NO: 366805 - DNA, 120 bp, Artificial Sequence
  ENSG00000141376_105 (sequence is synthesized)
cctccaggagacttggggcctaagaggaaaggagaaaggaggcacttcaggcagacagggaccctctcttcattggagcaggcccctctcaaaccaggcatcccctcccagggaaacagg

SEQ ID NO: 366806 - DNA, 120 bp, Artificial Sequence
  ENSG00000141376_106 (sequence is synthesized)
acacttggcaggaggtgccaaagatgagccaagacctggccagcagatggactgtgtgggtgagcatgagtgaatgagtgagtggcaaagccaggcagaagctctaggcacaggcagggc

SEQ ID NO: 366807 - DNA, 120 bp, Artificial Sequence
  ENSG00000141376_107 (sequence is synthesized)
aggagagaggtggggacagatcaggcagggatgctgcaagccctcccgtgtcctagcttctccccgcctgcctcccctgtagagccgggacagaaggcactgtggagttgggggcatgct

SEQ ID NO: 366808 - DNA, 120 bp, Artificial Sequence
  ENSG00000141376_108 (sequence is synthesized)
ggctgagcatgagtgtgtgcaggcgtgggtacgggctcatgaagagctgtgtagtccacacacatcgtcagggtggccgtgcttcgggcctaaagggcttcccgcagcagggagacggtg

SEQ ID NO: 366809 - DNA, 120 bp, Artificial Sequence
  ENSG00000141376_109 (sequence is synthesized)
ctctcacaccagagtctgccagccagggggctttccctcccctggctgagccttcctgtgacctgagctgccccctgcccatccagggagcaggcggggatccccctgcggaaggacaca

SEQ ID NO: 366810 - DNA, 120 bp, Artificial Sequence
  ENSG00000141376_110 (sequence is synthesized)
agtgaacccagaatggtgcctcaaggcaggcagcctggcccagatggtgcccccactccccagacccaactctaaccaggcctggccctctcctgtgtcttgcagaacttcagcgagagg

SEQ ID NO: 366811 - DNA, 120 bp, Artificial Sequence
  ENSG00000141378_0 (sequence is synthesized)
atacgttcctccctcctttcggcgagctcggttgatcctcgcgggatttcagttaggctcttagtgcgggccctgtgggtgtggcaagaggaagaatgactgctcgctttgtgattcttg

SEQ ID NO: 366812 - DNA, 120 bp, Artificial Sequence
  ENSG00000141378_1 (sequence is synthesized)
atccggaacttgtcacccaggaaccccggaagaggtagctcacgcgatagaaacgtgttcgctgcccagaagaagggaaggcgcgagtgaggaaaggaggtactgtagatgccctccaaa

SEQ ID NO: 366813 - DNA, 120 bp, Artificial Sequence
  ENSG00000141378_2 (sequence is synthesized)
tccttggttatggaatatttggctcatcccagtacactcggcttggctgttggagttgcttgtggcatgtgcctgggctggagccttcgagtatgctttgggatgctccccaaaagcaag

SEQ ID NO: 366814 - DNA, 120 bp, Artificial Sequence
  ENSG00000141378_3 (sequence is synthesized)
acaagatgattcttgtggttcgaaatgacttaaagatgggaaaagggaaagtggctgcccagtgctctcatgctgctgtttcagcctacaagcagattcaaagaagaaatcctgaaatgc

SEQ ID NO: 366815 - DNA, 120 bp, Artificial Sequence
  ENSG00000141378_4 (sequence is synthesized)
tcaaacaatgggaatactgtggccagcccaaggtggtggtcaaagctcctgatgaagaaaccctgattgcattattggcccatgcaaaaatgctgggactgactgtaagtttaattcaag

SEQ ID NO: 366816 - DNA, 120 bp, Artificial Sequence
  ENSG00000141378_5 (sequence is synthesized)
atgctggacgtactcagattgcaccaggctctcaaactgtcctagggattgggccaggaccagcagacctaattgacaaagtcactggtcacctaaaactttactaggtggactttgata

SEQ ID NO: 366817 - DNA, 120 bp, Artificial Sequence
  ENSG00000141378_6 (sequence is synthesized)
tgacaacaacccctccatcacaagtgtttgaagcctgtcagattctaacaacaaaagctgaatttcttcacccaacttaaatgttcttgagatgaaaataaaacctattcccatgttcta

SEQ ID NO: 366818 - DNA, 120 bp, Artificial Sequence
  ENSG00000141378_7 (sequence is synthesized)
aaatcaaaaccctatgcatcgctctaagtctttccagtttactttcattacacctgttcttcaacagcatgtctagataaatagcatgcatcactttattgtccataaatcagtctttga

SEQ ID NO: 366819 - DNA, 120 bp, Artificial Sequence
  ENSG00000141378_8 (sequence is synthesized)
taatacaggttgctttttatcaggtaggccaaaagagaaaaatgtaataacacaggttgcatggtctatcatgtcaaacattcttacccttatcctaaattcccttgtaccactgtgtct

SEQ ID NO: 366820 - DNA, 120 bp, Artificial Sequence
  ENSG00000141378_9 (sequence is synthesized)
tggggcgtgctcctggcataatttaaacttggatacatccaactaccatttcagtaggaggggagagcaaaggatgagtgtggatggaggttagtttgtatgtctggaggaagtgattag

SEQ ID NO: 366821 - DNA, 120 bp, Artificial Sequence
  ENSG00000141378_10 (sequence is synthesized)
tagttttagtcttttggcttctaagtactactggagaaaatcacaaatagtatgttgccattaaaaagtcatcattaatcttaaccatgctttcaatattcctctgcaatcctgccatat

SEQ ID NO: 366822 - DNA, 120 bp, Artificial Sequence
  ENSG00000141378_11 (sequence is synthesized)
tttgccacaccttttatttccgcctttctcttctctactccattttaacttctgtctgagctccttccctcagggggaatactttcctgccttcaaatccgtggacctacttgatttaaa

SEQ ID NO: 366823 - DNA, 120 bp, Artificial Sequence
  ENSG00000141378_12 (sequence is synthesized)
actgaaattgggaaaggtgtcccttttcctttccaaaaccacatccctttataaagtctttctctatcttgagcatttacctgcctttcttctggcttcatcctattaacatttaaatat

SEQ ID NO: 366824 - DNA, 120 bp, Artificial Sequence
  ENSG00000141378_13 (sequence is synthesized)
gcttatcctttcttcttaggagaaaaaaaaaattgctttcctctgtgtcgccttatatccattgctttttctttttgctctatctcttgaccccacctcaaacgaatttctgccccacca

SEQ ID NO: 366825 - DNA, 120 bp, Artificial Sequence
  ENSG00000141378_14 (sequence is synthesized)
aagacagtaaccccttttatgttaaaattagtggaaagaatgttaatataatgccctaactttaaagaagaacataaaggaaatttataagtacttccagggctgtcatctatgccgtgc

SEQ ID NO: 366826 - DNA, 120 bp, Artificial Sequence
  ENSG00000141378_15 (sequence is synthesized)
caatcatgcagtgcacaattccaagggcaccactttacattacaaatacagtgcattacaaatatagtggccccatgtttataaatgcttagataatactccactagaaaaagaaactga

SEQ ID NO: 366827 - DNA, 120 bp, Artificial Sequence
  ENSG00000141378_16 (sequence is synthesized)
tagttgcttgccacatagaagcactgtgaatccagcagcctcatttgtagactgatataagtgtcttattggtgactcaaatattatgaacagctttgccgaagtagcaagattttctaa

SEQ ID NO: 366828 - DNA, 120 bp, Artificial Sequence
  ENSG00000141378_17 (sequence is synthesized)
aataataaaggatgacattcctttgttttatgatagctacacttctggaaaattcagtatggacagtctccgacttaggatttttcaactttaggatggtgtgaaagagacacccattca

SEQ ID NO: 366829 - DNA, 120 bp, Artificial Sequence
  ENSG00000141378_18 (sequence is synthesized)
gtagaaactgtacttcgagttttgcattttgatcttttcctggcctagtgataatgtggtacagtacactcttgtgatgctgggcagcggcagcgagccacagctcccagtcacccatgt

SEQ ID NO: 366830 - DNA, 120 bp, Artificial Sequence
  ENSG00000141378_19 (sequence is synthesized)
gatcacgggaatcaacaacccatcctctaccgtgtactgtgttgtcagcttttttggatattgtgttttgtgttttcacattccatcatgtctacaaaatgtccatcagtgtctcctgtt

SEQ ID NO: 366831 - DNA, 120 bp, Artificial Sequence
  ENSG00000141378_20 (sequence is synthesized)
tctggtgagatgaagaagaggaaggcaattactcttgaaatgaaactcaagataattgcccagcatgaaggtggcaagccagtaatggccattgcacgtgagttaggactttggcaatcc

SEQ ID NO: 366832 - DNA, 120 bp, Artificial Sequence
  ENSG00000141378_21 (sequence is synthesized)
acgatttcaaccatcttaagggataagaagcaaatcagtgatgcagcgaaatcgtcagcatcagttaaatccactgtcatcacaaagaaaagggctggaccaattgatgatatggaaaaa

SEQ ID NO: 366833 - DNA, 120 bp, Artificial Sequence
  ENSG00000141378_22 (sequence is synthesized)
ttacttgttatgtggatggaagaccagatacagaagcgtataccacttagcctactgatgatccaggctaaggcaagaagtctttttaatatgctaaaagaccgtgccagtgatcctaca

SEQ ID NO: 366834 - DNA, 120 bp, Artificial Sequence
  ENSG00000141378_23 (sequence is synthesized)
tatacacaaatgtttaaagcaagtcatggatggttccagcgcttcaaaaggcgtcataattttcacaatgtaaagatcactggtgaggcagcacgtgctggtaatgaaggtgccatagct

SEQ ID NO: 366835 - DNA, 120 bp, Artificial Sequence
  ENSG00000141378_24 (sequence is synthesized)
aagatctttgcaataaggagctgattgcactggaggaagaaagaggtaaaggcgttgaggcagtggaagaagttacacccacggcacctagaaagttcacagcaaagaaactggcagagg

SEQ ID NO: 366836 - DNA, 120 bp, Artificial Sequence
  ENSG00000141378_25 (sequence is synthesized)
catttgctgctatcagcagtggcctacacgttagaagaaatggacgtcaattacgagagattcgccacagttgacaggcgcagatacaggatgctcttgcttgctacagagaaatatata

SEQ ID NO: 366837 - DNA, 120 bp, Artificial Sequence
  ENSG00000141378_26 (sequence is synthesized)
gtgaaaagaagaaacaagctgtacggtcaaaacttggtatcttcctgaagaacaacactatgcttgctaaaccatcaactagtgttgatgtcccaatgccttctaccacctattctcgat

SEQ ID NO: 366838 - DNA, 120 bp, Artificial Sequence
  ENSG00000141378_27 (sequence is synthesized)
gttcatcagaagagagagaaattgaggaccctgttgcatccccatcatccagcaattaattctatttcagtgcttcaaacatttttcaggaccactgtgctttcagctgtgtaaattaat

SEQ ID NO: 366839 - DNA, 120 bp, Artificial Sequence
  ENSG00000141378_28 (sequence is synthesized)
ggtgagtacccatacaaccattgttttccacttacagtattcaataaattacaggagatattcaacactattataaaagagcctcgtgttagatgatttttgtccaactgtaggctaatg

SEQ ID NO: 366840 - DNA, 120 bp, Artificial Sequence
  ENSG00000141378_29 (sequence is synthesized)
gcacatttaaggtaggctaggctaagtcatgatattctgtaggtgtattaaatgcatttttggcttacagtattttcaattaattgggttaattgggatataaccccatggaaaattgag

SEQ ID NO: 366841 - DNA, 120 bp, Artificial Sequence
  ENSG00000141378_30 (sequence is synthesized)
tggaaaattgaggagcacctgtacatagtaaaactatgcaaaaaatattttgtgttcttaagtaaaatgatgttgagttctcatctcagttattaagtttttcagctgcactcacgtcca

SEQ ID NO: 366842 - DNA, 120 bp, Artificial Sequence
  ENSG00000141378_31 (sequence is synthesized)
atgggacaactcttcattttgtaaggtttttagcatccttgctcaggcttagtaaatttcagtagtgcacctcactccaggcccattaatgtgacagtgaggttcttctgagggtaactg

SEQ ID NO: 366843 - DNA, 120 bp, Artificial Sequence
  ENSG00000141378_32 (sequence is synthesized)
atttgataccatctccactgagaaccactgcattgtgaaaacaccgattagcactgtattccaggaaagggttatttttggtttctttaaatcttaggcatcttggtaaaacggaacatc

SEQ ID NO: 366844 - DNA, 120 bp, Artificial Sequence
  ENSG00000141378_33 (sequence is synthesized)
tccacaagactaagggaagactgaggaatagagtttttgaactttatgcaacttcgtttacatcaagattcaaaatgacctaaactgtttcatgtggatgcttgaatcttttctagtaca

SEQ ID NO: 366845 - DNA, 120 bp, Artificial Sequence
  ENSG00000141378_34 (sequence is synthesized)
ctggtggtgggcaagagggtgttggaaacagggtgcaggcataagatcaaaggtgtgttttgccttttttctggatgaccattaagtgtatagtcaaaatgtttctctgataagcctata

SEQ ID NO: 366846 - DNA, 120 bp, Artificial Sequence
  ENSG00000141378_35 (sequence is synthesized)
gcccagaagaagggaaggcgcgagtgaggaaaggaggtactgtagccataaacacatttgccaatgttacctggtcaattaggggtctcctgtaaggattgctttccagcagcacgctgc

SEQ ID NO: 366847 - DNA, 120 bp, Artificial Sequence
  ENSG00000141378_36 (sequence is synthesized)
gaagagggaattctcattgcaaacctaaagaagatatgatagattaatttcaagcaacaagctcatcagtagagaattgacctcttacaacaagaatcaagttttttatgacatcttcag

SEQ ID NO: 366848 - DNA, 120 bp, Artificial Sequence
  ENSG00000141378_37 (sequence is synthesized)
aacagtcaacatcaagtaatcctccaataactacaggaagtcgacttggattcacctgtggttaaaaagaagtagaagaatgttattatgttattaaaagcaaagaggaattttaaaaaa

SEQ ID NO: 366849 - DNA, 120 bp, Artificial Sequence
  ENSG00000141380_0 (sequence is synthesized)
acccggagcgctcgggacttgccgatagtggtgacggcggcaacatgtctgtggctttcgcggccccgaggcagcgaggcaagggggagatcactcccgctgcgattcagaagatgttgg

SEQ ID NO: 366850 - DNA, 120 bp, Artificial Sequence
  ENSG00000141380_1 (sequence is synthesized)
atgacaataaccatcttattcagtgtataatggactctcagaataaaggaaagacctcagagtgttctcagtatcagcagatgttgcacacaaacttggtataccttgctacaatagcag

SEQ ID NO: 366851 - DNA, 120 bp, Artificial Sequence
  ENSG00000141380_2 (sequence is synthesized)
attctaatcaaaatatgcagtctcttttaccagcaccacccacacagaatatgcctatgggtcctggagggatgaatcagagcggccctcccccacctccacgctctcacaacatgcctt

SEQ ID NO: 366852 - DNA, 120 bp, Artificial Sequence
  ENSG00000141380_3 (sequence is synthesized)
cagatggaatggtaggtgggggtcctcctgcaccgcacatgcagaaccagatgaacggccagatgcctgggcctaaccatatgcctatgcagggacctggacccaatcaactcaatatga

SEQ ID NO: 366853 - DNA, 120 bp, Artificial Sequence
  ENSG00000141380_4 (sequence is synthesized)
caaacagttccatgaatatgccttcaagtagccatggatccatgggaggttacaaccattctgtgccatcatcacagagcatgccagtacagaatcagatgacaatgagtcagggacaac

SEQ ID NO: 366854 - DNA, 120 bp, Artificial Sequence
  ENSG00000141380_5 (sequence is synthesized)
caatgggaaactatggtcccagaccaaatatgagtatgcagccaaaccaaggtccaatgatgcatcagcagcctccttctcagcaatacaatatgccacagggaggcggacagcattacc

SEQ ID NO: 366855 - DNA, 120 bp, Artificial Sequence
  ENSG00000141380_6 (sequence is synthesized)
aaggacagcagccacctatgggaatgatgggtcaagttaaccaaggcaatcatatgatgggtcagagacagattcctccctatagacctcctcaacagggcccaccacagcagtactcag

SEQ ID NO: 366856 - DNA, 120 bp, Artificial Sequence
  ENSG00000141380_7 (sequence is synthesized)
gccaggaagactattacggggaccaatacagtcatggtggacaaggtcctccagaaggcatgaaccagcaatattaccctgatggtcataatgattacggttatcagcaaccgtcgtatc

SEQ ID NO: 366857 - DNA, 120 bp, Artificial Sequence
  ENSG00000141380_8 (sequence is synthesized)
ctgaacaaggctacgataggccttatgaggattcctcacaacattactacgaaggaggaaattcacagtatggccaacagcaagatgcataccagggaccacctccacaacagggatatc

SEQ ID NO: 366858 - DNA, 120 bp, Artificial Sequence
  ENSG00000141380_9 (sequence is synthesized)
caccccagcagcagcagtacccagggcagcaaggttacccaggacagcagcagggctacggtccttcacagggtggtccaggtcctcagtatcctaactacccacagggacaaggtcagc

SEQ ID NO: 366859 - DNA, 120 bp, Artificial Sequence
  ENSG00000141380_10 (sequence is synthesized)
agtatggaggatatagaccaacacagcctggaccaccacagccaccccagcagaggccttatggatatgaccagggacagtatggaaattaccagcagtgaaaaagtacttacattccag

SEQ ID NO: 366860 - DNA, 120 bp, Artificial Sequence
  ENSG00000141380_11 (sequence is synthesized)
tagccagtatctattagcagccatattgtcacctcagcactgtggacacctccctgtgaagagatccttccattccatctagtttttggaaaaaccttgtggataagtggctgtttcatc

SEQ ID NO: 366861 - DNA, 120 bp, Artificial Sequence
  ENSG00000141380_12 (sequence is synthesized)
agtaagcagcctttgtggtttagttataaaaggctttagtagctcaaaaatactcttgatttcacatttctactctagatggcaacattggacagaaaatgcaatgacataaccaatttg

SEQ ID NO: 366862 - DNA, 120 bp, Artificial Sequence
  ENSG00000141380_13 (sequence is synthesized)
taatgattttggaactgtgtttcaaatggactgttacagactgaaaggtgtgaacagctttgtatgtttatgaagggtaagggaatttaatacttttccacagatttttttgtaagggga

SEQ ID NO: 366863 - DNA, 120 bp, Artificial Sequence
  ENSG00000141380_14 (sequence is synthesized)
ttatgtttatttcatgtggtgaatatgcaaggcggtacactacgcactggacagcatcagaaatcctctgttaatgtggactggaacatggtagatgcttgattgttttggtctcaaaat

SEQ ID NO: 366864 - DNA, 120 bp, Artificial Sequence
  ENSG00000141380_15 (sequence is synthesized)
ggtgtgctataaagataaaggtgaggggaagacaaagcacaccatatgtccactgttctgttctcatagaggaaattcaaatcccttttatctattagataatcaagggcactgtgatac

SEQ ID NO: 366865 - DNA, 120 bp, Artificial Sequence
  ENSG00000141380_16 (sequence is synthesized)
agttttgagtaaaaagacattttttaaaagccttccagttttgtggattaaacctttttataaagatcatttataatactgttttaaaatgtgaggcaataagaattactttgtgttgga

SEQ ID NO: 366866 - DNA, 120 bp, Artificial Sequence
  ENSG00000141380_17 (sequence is synthesized)
tctgaggaggctttggtaaaacagtttcatctaaatgaaagtggtaatcctcttctaaaatagcaataactgaaaatgaaagtgttaattttaccttgtttgagttatcagggaacttag

SEQ ID NO: 366867 - DNA, 120 bp, Artificial Sequence
  ENSG00000141380_18 (sequence is synthesized)
taagtaatatcaaagcattttataaatgatatcaaagaagagtcaacattgatccagtcattttattttgtaatattgagggataattggttattaaactgaatagttcaggagacttta

SEQ ID NO: 366868 - DNA, 120 bp, Artificial Sequence
  ENSG00000141380_19 (sequence is synthesized)
caaacctttgtttcaactttcttatctggaaataatatcatttataaagggacacttttatgtttttcccttttttatgttggttgatataacacaaagagatatttaggaaaatgctta

SEQ ID NO: 366869 - DNA, 120 bp, Artificial Sequence
  ENSG00000141380_20 (sequence is synthesized)
ttgatgaggtttattctatctgtttttaaagcaccgaggttgcattctagataaccttgtttattagcatggcatattttaatcattatttgagactgtcctgtgcctgattattttagc

SEQ ID NO: 366870 - DNA, 120 bp, Artificial Sequence
  ENSG00000141380_21 (sequence is synthesized)
taaattcagggagattgcgtggggcaggaaagcatgcattgaaaaatttctaaccacggttatttaagcataatctgaaaacatctagcccaaaggtaagttgctattttcatcacagtt

SEQ ID NO: 366871 - DNA, 120 bp, Artificial Sequence
  ENSG00000141380_22 (sequence is synthesized)
gcctatgcccagggaataagatgtattctttataattgaattggtttttcccacgtctaactggaaacaaaacagaaggggcgtcataaatttgaataagcagaacatactgttctcaac

SEQ ID NO: 366872 - DNA, 120 bp, Artificial Sequence
  ENSG00000141380_23 (sequence is synthesized)
caacatactgtaatcaaaaggaggaatttcagtgggtctctgtgtgtgtatgagagagagagtgtgtgtttgtgtgtttcaaggtcagaacaggtttttttgtttttgttttttgttctt

SEQ ID NO: 366873 - DNA, 120 bp, Artificial Sequence
  ENSG00000141380_24 (sequence is synthesized)
aggcgtgagccaccgtgcctggccagaataggttttttctttcaacttgatcagtagaaaatggacatcaagtttgaacagataaatcatggacagccttattgtgattgaaatgcttgt

SEQ ID NO: 366874 - DNA, 120 bp, Artificial Sequence
  ENSG00000141380_25 (sequence is synthesized)
acagccttattgtgattgaaatgcttgtaggttctgtgccaattttccaccactgtgtactttgttgctatttaaaactgtatcaactctaacggaagaataaattatttgtgattttaa

SEQ ID NO: 366875 - DNA, 120 bp, Artificial Sequence
  ENSG00000141380_26 (sequence is synthesized)
tttcctgaatcgctgaagcggagggaggactagggcgcgactctaccattagcgcaaagggccagggggtgcccataaggagagctcgggggatgcagggacggtcaagaaagttcggcc

SEQ ID NO: 366876 - DNA, 120 bp, Artificial Sequence
  ENSG00000141380_27 (sequence is synthesized)
agggctaggggtcccccagagtgcgcagaagcgagacatccctggccagagtgcctccttcaggcctgccccgccgcccgtccgcttggccccggagcatcccccctccccgcattcccg

SEQ ID NO: 366877 - DNA, 120 bp, Artificial Sequence
  ENSG00000141380_28 (sequence is synthesized)
gggagcccctcaagctggcttcttgatatgtcttcattattttttgaacatttacttattttcttataccacaaaatgttctaggctcatcctggtttttttttcctgtgcaggtatcag

SEQ ID NO: 366878 - DNA, 120 bp, Artificial Sequence
  ENSG00000141380_29 (sequence is synthesized)
actaaaacattaaagataattttttcctcagtggaaattttctatttgaacataaatccatcaaacttttttttctcgtgtgtgtttacatatgtataattttacatataagtatagtgc

SEQ ID NO: 366879 - DNA, 120 bp, Artificial Sequence
  ENSG00000141380_30 (sequence is synthesized)
ctttaggaaacagcttgctgatctcgtgtagctagtgtgtgctcttgtagctgtctttaattttgtcttttttattttatttagcatagtcatgatcttatgactgtgatgttccagtaa

SEQ ID NO: 366880 - DNA, 120 bp, Artificial Sequence
  ENSG00000141380_31 (sequence is synthesized)
atgtaatgctcgtatggcagagacgctgaaaatgctgcagttcaaccttgcaaaattggctttaactgcagtttgtttggccgaaatccttctgtttggtttgagttttttctttgtttt

SEQ ID NO: 366881 - DNA, 120 bp, Artificial Sequence
  ENSG00000141380_32 (sequence is synthesized)
gcatcttagagggaaaaaagttacttaagcagacttctcagttttttttcctcttctccaattatcctgtaggaaattcacagtatggccaacagcaagatgcataccagggaccacctc

SEQ ID NO: 366882 - DNA, 120 bp, Artificial Sequence
  ENSG00000141380_33 (sequence is synthesized)
gtgcggaccccaccgcgggtcgcggcaggcagaggggaagtcggtgcgctggtcgccgccctgcaaactcagccgagtttgggagctcgcaggaggacttggggaacgctggagggaacc

SEQ ID NO: 366883 - DNA, 120 bp, Artificial Sequence
  ENSG00000141380_34 (sequence is synthesized)
ttagtatagagtttgaggagcgggcaaggaaggtccccatggactctggggttgtccccagagcctcttcttcccttctgcatcgccgcctattcatttattctgcagcaaatatttatt

SEQ ID NO: 366884 - DNA, 120 bp, Artificial Sequence
  ENSG00000141380_35 (sequence is synthesized)
acccggagcgctcgggacttgccgatagtggtgacggcggcaacatgtctgtggctttcgcggccccgaggcagcgaggcaagggggagatcactcccgctgcgattcagaaggtatcag

SEQ ID NO: 366885 - DNA, 120 bp, Artificial Sequence
  ENSG00000141380_36 (sequence is synthesized)
ggaagataacttttattctataaagtgcattcccgttgtctaataaatattcatagcttctagggtcatgaataaaccacatctgttagtatggtttggtcagtggtcctcagaaaatct

SEQ ID NO: 366886 - DNA, 120 bp, Artificial Sequence
  ENSG00000141380_37 (sequence is synthesized)
ctctttttttctgtagttggagattgcctattcattgccttctctatatgctgtgtcctgatagatgggtagtataaacacagtgggcctaagttgttggtcattgctacagtagtgaaa

SEQ ID NO: 366887 - DNA, 120 bp, Artificial Sequence
  ENSG00000141380_38 (sequence is synthesized)
ataaaaaattataacactatttagcatacatggcaagatctctgagctcattatatttaaatatttattatttggaacttttgcagtgtaggaaaaattgaagtgctattgatgttcggg

SEQ ID NO: 366888 - DNA, 120 bp, Artificial Sequence
  ENSG00000141380_39 (sequence is synthesized)
taacaaatttttaatgaaactttagaaatgattatagtgctgtttgtacttaggcaggtaggaagaaaattattttttaatactgatacttgttttgttttaataggtatcagcagatgt

SEQ ID NO: 366889 - DNA, 120 bp, Artificial Sequence
  ENSG00000141380_40 (sequence is synthesized)
tagcaggttgtattacatttgtaacatttactaaatttttagcataggtaactttgttatggttagaacaccaaggactacaaaaagccatacaaaaacctactgtcacttctgtcttct

SEQ ID NO: 366890 - DNA, 120 bp, Artificial Sequence
  ENSG00000141380_41 (sequence is synthesized)
acctgctttttatgcaataaaagccaatataaatatataccttgctgttttctacacaagtagaacttgccgtgtaccctgttctgtaccttgttttttaattacagtaaaaaaaagaaa

SEQ ID NO: 366891 - DNA, 120 bp, Artificial Sequence
  ENSG00000141380_42 (sequence is synthesized)
cttccacctctgccctatctcggcagatgctccacggatttgcacgaactcccgagtcttgacctccctcccctctccgggctgccgggacaactcggggcggccactcttgccaggagg

SEQ ID NO: 366892 - DNA, 120 bp, Artificial Sequence
  ENSG00000141380_43 (sequence is synthesized)
agatgctccacggatttgcacgaactcccgagtcttgacctccctcccctctccgggctgccgggacaactcggggcggccactcttgccaggaggcgtaagtaaggatgaagttggaaa

SEQ ID NO: 366893 - DNA, 120 bp, Artificial Sequence
  ENSG00000141384_0 (sequence is synthesized)
aagattttaggcagtttaactctaaaatatgaaaataggcacatctcacagactataaaactatacgccattttaatttttacaatgtcaattctaactgcgaattttagcaacgcttca

SEQ ID NO: 366894 - DNA, 120 bp, Artificial Sequence
  ENSG00000141384_1 (sequence is synthesized)
gtgtgaagacagcagagaaaaacactgaaaatgcgtgattgaattcttattgagtcactcttctcggaaatcagtcctccccattttctccttaaaaaatagaatcctggagatagtcta

SEQ ID NO: 366895 - DNA, 120 bp, Artificial Sequence
  ENSG00000141384_2 (sequence is synthesized)
gtgctggcttttcgaggaacacactacaggggacacaaggagaggaacacggatgccgcagttttccaagtgcagcttgcccctcccacgtgataggtttctggcatcgcccctccttgc

SEQ ID NO: 366896 - DNA, 120 bp, Artificial Sequence
  ENSG00000141384_3 (sequence is synthesized)
tggcgattctggggaagattttaacgctccctggagccgtccccagtgacgtcacgggcgcggctccgctccttggccaatcacgcggccggatcccggggaaacccggggcggtggcgg

SEQ ID NO: 366897 - DNA, 120 bp, Artificial Sequence
  ENSG00000141384_4 (sequence is synthesized)
cggcctgggcgcgtgcgcgaggtctccgcgtggctatataaacatggctggcgtggccgcgcggcggggccgtgccaatcgcgcgtagggggctgtgggcactcggggttcgtagttttg

SEQ ID NO: 366898 - DNA, 120 bp, Artificial Sequence
  ENSG00000141384_5 (sequence is synthesized)
aaatttctggcgggggagcagctgcgcagttaggctcgaggtgtgagcgacgaccttccgggagccgcaagtccaggctcccccgcagcgggacccgagcctgaggcgcagggctgaggc

SEQ ID NO: 366899 - DNA, 120 bp, Artificial Sequence
  ENSG00000141384_6 (sequence is synthesized)
agcgcacgtgtgagcgccgctgaggaagctgcgagaggtcgggcgggtgtcgctccgggggcagcccaggctcgcgcggacgagaggaaggtccgggacgcgcgtgtcctgccgtgcagc

SEQ ID NO: 366900 - DNA, 120 bp, Artificial Sequence
  ENSG00000141384_7 (sequence is synthesized)
gggcgcccgtcactgacttcgctgctgcggcccccgcgcctctccccagcgatgctgtggaacccgaaccgcaccggagtcggctgccgcgcgccaagcctcccctcacctctgctcccg

SEQ ID NO: 366901 - DNA, 120 bp, Artificial Sequence
  ENSG00000141384_8 (sequence is synthesized)
tgctcccggaaccgcagcgccaaagctgccgctgagcccctgggggatgcccgccggcctcaccgaacccgccggcgccgctcccccggctgctgtgagcgcctcggggaccgtgaccat

SEQ ID NO: 366902 - DNA, 120 bp, Artificial Sequence
  ENSG00000141384_9 (sequence is synthesized)
ccggggcgctgccggtgcgggtggagagcactccggtggccctgggcgccgtgactaaggctcctgtcagcgtctgcgtggagcccacggcgtcccagcccctgcggtcccccgtgggga

SEQ ID NO: 366903 - DNA, 120 bp, Artificial Sequence
  ENSG00000141384_10 (sequence is synthesized)
ccctggtgaccaaagtggctccggtcagcgcccctcctaaagtcagcagcggccctaggctgcctgctcctcagatagtcgccgtgaaagcccccaacaccacgacaatccagtttcctg

SEQ ID NO: 366904 - DNA, 120 bp, Artificial Sequence
  ENSG00000141384_11 (sequence is synthesized)
ctaatttgcagcttcctccaggaaccgttttgattaaaagtaacagtggtccgttgatgttggtatctcctcagcaaactgtaacaagagccgagaccacaagtaacataacctcaaggc

SEQ ID NO: 366905 - DNA, 120 bp, Artificial Sequence
  ENSG00000141384_12 (sequence is synthesized)
cagcagtaccagcgaatcctcaaacagtcaaaatctgtacagtgccgaactctagctcacaattaatcaagaaagtggcagtgacacctgttaaaaaattggcacaaataggaactactg

SEQ ID NO: 366906 - DNA, 120 bp, Artificial Sequence
  ENSG00000141384_13 (sequence is synthesized)
tggtaaccactgttccgaagccttcctcagtacaatctgtggctgtgccaaccagtgtcgtcacagttactcctggaaagccattgaatactgtaactaccctgaagccttcaagtttgg

SEQ ID NO: 366907 - DNA, 120 bp, Artificial Sequence
  ENSG00000141384_14 (sequence is synthesized)
gagcatcatccactccttcaaatgagcccaatcttaaagcagagaactcagcagctgttcagattaatctttctccgacaatgctagaaaatgtgaagaaatgcaagaacttccttgcaa

SEQ ID NO: 366908 - DNA, 120 bp, Artificial Sequence
  ENSG00000141384_15 (sequence is synthesized)
tgttaataaaactagcatgtagtggatcacagtccccagaaatggggcaaaatgtgaagaagctggtggaacaacttttggatgcaaaaatcgaagcagaagaatttactaggaaactgt

SEQ ID NO: 366909 - DNA, 120 bp, Artificial Sequence
  ENSG00000141384_16 (sequence is synthesized)
atgttgaactcaagtcttcacctcagcctcacctggttccttttcttaagaaaagcgtggttgccttacgacaacttctgcctaactcccagagcttcatccagcaatgtgttcagcaga

SEQ ID NO: 366910 - DNA, 120 bp, Artificial Sequence
  ENSG00000141384_17 (sequence is synthesized)
cttctagtgacatggtcattgctacctgtactacaacagtaacaacttctcctgtggtgacaactacagtgtcctcaagccagtctgaaaagtcaattattgtttctggagcaacagcac

SEQ ID NO: 366911 - DNA, 120 bp, Artificial Sequence
  ENSG00000141384_18 (sequence is synthesized)
ccagaactgtgtcagtgcaaactttgaacccacttgctggtccagtgggagcaaaagctggagttgtgacacttcattctgtgggcccaactgctgcaacaggaggaacaacagctggaa

SEQ ID NO: 366912 - DNA, 120 bp, Artificial Sequence
  ENSG00000141384_19 (sequence is synthesized)
ctggtttgcttcagacttcaaaaccacttgtgacatctgtggcaaacacagtgaccacggtctcactgcaacctgaaaagccagttgtctctggaacagcagtaacactgtcccttccag

SEQ ID NO: 366913 - DNA, 120 bp, Artificial Sequence
  ENSG00000141384_20 (sequence is synthesized)
cagtaacttttggagaaacttcaggtgcagctatttgtcttccatctgtgaaacctgttgtttcttctgctgggaccacatctgacaagcctgttattgggactccagttcaaatcaaac

SEQ ID NO: 366914 - DNA, 120 bp, Artificial Sequence
  ENSG00000141384_21 (sequence is synthesized)
acaagtgaccacaatttcacattcctcaacattgaccattcagaaatgtggacagaagacgatgccagtgaacaccataatacctactagtcagtttcctccagcttccattctaaagca

SEQ ID NO: 366915 - DNA, 120 bp, Artificial Sequence
  ENSG00000141384_22 (sequence is synthesized)
aattactctgcctggaaataaaattctgtcacttcaagcatctcctactcagaaaaatagaataaaagagaatgtaacatcatgcttccgagatgaggatgacatcaatgatgtgacttc

SEQ ID NO: 366916 - DNA, 120 bp, Artificial Sequence
  ENSG00000141384_23 (sequence is synthesized)
tatggcaggggtcaaccttaatgaagaaaatgcctgcatcttagcaacaaactctgaattggttggcacactcattcagtcatgtaaagatgaaccatttctttttattggagctctaca

SEQ ID NO: 366917 - DNA, 120 bp, Artificial Sequence
  ENSG00000141384_24 (sequence is synthesized)
aaagagaattttagacattggtaaaaagcatgacattacagaacttaactctgatgctgtgaacttgatctcccaagcaacacaggaacgactacgaggccttctagaaaaactgactgc

SEQ ID NO: 366918 - DNA, 120 bp, Artificial Sequence
  ENSG00000141384_25 (sequence is synthesized)
aattgctcagcatcgaatgactacttacaaggcaagtgaaaattacatcctgtgtagtgataccaggtcacagctcaaatttcttgaaaagctggatcaattggagaagcagagaaagga

SEQ ID NO: 366919 - DNA, 120 bp, Artificial Sequence
  ENSG00000141384_26 (sequence is synthesized)
tttggaagaaagagaaatgttacttaaggcagccaagagtcgttctaataaagaagatccagaacagctgagattaaagcagaaagccaaagagttacagcaattggaacttgcacagat

SEQ ID NO: 366920 - DNA, 120 bp, Artificial Sequence
  ENSG00000141384_27 (sequence is synthesized)
acagcatagagacgctaatctcacagctcttgcagctattggaccaaggaagaagagaccactagaatctggaattgagggcttaaaagacaaccttcttgcttctgggacatccagcct

SEQ ID NO: 366921 - DNA, 120 bp, Artificial Sequence
  ENSG00000141384_28 (sequence is synthesized)
gacagccaccaaacagttgcatcgtccaagaatcacgagaatctgcctcagggacttgatattttgtatggaacaggaacgggagatgaagtattctcgagctctatacctggcccttct

SEQ ID NO: 366922 - DNA, 120 bp, Artificial Sequence
  ENSG00000141384_29 (sequence is synthesized)
gaagtgaccactccactcttccatccagatccttgctatttactgccaaagaagacacaaagcattgttgcactgtcctgaaatttcaatttctggaaaataatcaccaacatgaaagag

SEQ ID NO: 366923 - DNA, 120 bp, Artificial Sequence
  ENSG00000141384_30 (sequence is synthesized)
cattgtttacagttagaaactttattaactcttacctatccatctcatgggactcttacagactcagattcatctttgtcttctgaaaatcagttatgaaatacactttgcacagaatta

SEQ ID NO: 366924 - DNA, 120 bp, Artificial Sequence
  ENSG00000141384_31 (sequence is synthesized)
ggcatctgcctatctgtgcattaaattaaagcaagttaaggccctatttgttactacctgcctcatttgccaaattgtagcaggtgaggtgtccttccctaatacagcatgcattgagat

SEQ ID NO: 366925 - DNA, 120 bp, Artificial Sequence
  ENSG00000141384_32 (sequence is synthesized)
gcaggagaaaggaagaggcataagaaaatacaagaatgactatttcattctatattgaacctgtcccaaagtggtaggttttctgggctggaatcagaagttgcttagctaactatgaca

SEQ ID NO: 366926 - DNA, 120 bp, Artificial Sequence
  ENSG00000141384_33 (sequence is synthesized)
gtcaccctctgtacgtgacaggccactgtggtgactttggtcggctgagttccagtgttgtcaaaacaagacaaatggggatagattgtgcctggggttgctaattctctgcttcatatc

SEQ ID NO: 366927 - DNA, 120 bp, Artificial Sequence
  ENSG00000141384_34 (sequence is synthesized)
accatatgccgtttctggtaccaagtgaggggacatgcttgtcagggaaaccttaaaattgaatctactgatatatcttgttgaaaaaatggaaaaggtgcaaagtattagaaggaacgt

SEQ ID NO: 366928 - DNA, 120 bp, Artificial Sequence
  ENSG00000141384_35 (sequence is synthesized)
tagggcgttgctttcaaactgatgaggggaatgtgaaaatggtatcataaaacaggaaatgtgcttcatatgcccaagaggggaagaggtggaatcggaactccaaaacaactggtacat

SEQ ID NO: 366929 - DNA, 120 bp, Artificial Sequence
  ENSG00000141384_36 (sequence is synthesized)
gttttgttgatgggcaaaaaaaatcacagcacaaccagaaaggagaatgtaccagatgttttcaaattagagtatttcaaaaggaaaatgttattttttgttttgtattgttttaaatcc

SEQ ID NO: 366930 - DNA, 120 bp, Artificial Sequence
  ENSG00000141384_37 (sequence is synthesized)
caaggatagtttttatagttccttctgtcataatatattttagttatcctaatttttaagcatgttggcacatttaaaaaatcctaattgatgatgagaaatttttaacaataggacttt

SEQ ID NO: 366931 - DNA, 120 bp, Artificial Sequence
  ENSG00000141384_38 (sequence is synthesized)
atgttggattctgtacttaaaaggtactgtcaatatctcactcttggggatatgagctctaaatatgagaagcaagttatatgtgttcacctgaggaagaagctgacggacaaagcaaac

SEQ ID NO: 366932 - DNA, 120 bp, Artificial Sequence
  ENSG00000141384_39 (sequence is synthesized)
cctctttaaaaaaaaaaaaaagaaaattccacgtgtgtggaatacagccggtgaaaaataatcactgtagttagaatcacatacagaaaaaaaatgattgaatcctccaagaaggtattt

SEQ ID NO: 366933 - DNA, 120 bp, Artificial Sequence
  ENSG00000141384_40 (sequence is synthesized)
caaaaatgggaaatgctatacttataagaattgaaggaaaaaaaaaaaaacacctcacgtatgttattcttcatcctgttcttcccattgggactgttatggccatattctacagtatag

SEQ ID NO: 366934 - DNA, 120 bp, Artificial Sequence
  ENSG00000141384_41 (sequence is synthesized)
taaattttaaattggccacatttttttttgtttcagcaagttatgtaaaatgctataaattatgtgtatgttaaaggagtactttaagaagagatctttatccaaagttgtttttgtata

SEQ ID NO: 366935 - DNA, 120 bp, Artificial Sequence
  ENSG00000141384_42 (sequence is synthesized)
tttgtatatttaaatgcttacctttattttttgtaaagtgcagcatactcatttgtgtataatcttactgatcagatgtttaaaattattccaaatacttcattaaaataattattttat

SEQ ID NO: 366936 - DNA, 120 bp, Artificial Sequence
  ENSG00000141385_0 (sequence is synthesized)
gcactggcggaggtcgcggcgggcctcggagaggagacgccgacgtcagcgcgccggggcggggctggcggcaggagacgccgcgttgagagcttgggctcctccgtgagccgccggcgc

SEQ ID NO: 366937 - DNA, 120 bp, Artificial Sequence
  ENSG00000141385_1 (sequence is synthesized)
agagcttgggctcctccgtgagccgccggcgcgcttcgctgcctggcggcctttccccgagccgagcccgcttcccgaggccgccagtcgtcgcctgcccgcgcctgcgcagcgtcccgg

SEQ ID NO: 366938 - DNA, 120 bp, Artificial Sequence
  ENSG00000141385_2 (sequence is synthesized)
ccgctgtttgcggctgtggggccggggcggctgctggccccgcggcctacagcagctcctcgtgcctggcggcgtgggcccgggcgagcagccctgcctccggacgctttaccgatttgt

SEQ ID NO: 366939 - DNA, 120 bp, Artificial Sequence
  ENSG00000141385_3 (sequence is synthesized)
tacaactcaagcaagggccagcagaaattctcttttgacagatataattgctgcttatcaaagattctgttctcgacccccaaaaggatttgaaaaatactttcctaatggaaaaaatgg

SEQ ID NO: 366940 - DNA, 120 bp, Artificial Sequence
  ENSG00000141385_4 (sequence is synthesized)
aaaaaaagctagtgaacctaaagaagttatgggagagaaaaaagaatcaaagccagctgctaccacacgctcttctggaggaggaggtggtggcggtggaaaacgaggtggcaagaaaga

SEQ ID NO: 366941 - DNA, 120 bp, Artificial Sequence
  ENSG00000141385_5 (sequence is synthesized)
tgattctcactggtggtccaggtttcagaagggtgacattccatgggacgacaaggatttcaggatgttcttcctctggactgctctgttctggggtggagtcatgttttacttgctgct

SEQ ID NO: 366942 - DNA, 120 bp, Artificial Sequence
  ENSG00000141385_6 (sequence is synthesized)
caagagatccgggagagaaatcacttggaaggactttgtcaataactatctttcaaaaggagtagtagacagattggaagtcgtcaacaagcgttttgttcgagtgacctttacaccagg

SEQ ID NO: 366943 - DNA, 120 bp, Artificial Sequence
  ENSG00000141385_7 (sequence is synthesized)
aaaaactcctgttgatgggcaatacgtttggtttaatattggcagtgtggacacctttgaacggaatctggaaactttacagcaggaattgggcatagaaggagaaaatcgggtgcctgt

SEQ ID NO: 366944 - DNA, 120 bp, Artificial Sequence
  ENSG00000141385_8 (sequence is synthesized)
tgtctacattgctgaaagtgatggctcttttctgctgagcatgctgcctacggtgctcatcatcgccttcttgctctacaccatcagaagagggcctgctggcattggccggacaggccg

SEQ ID NO: 366945 - DNA, 120 bp, Artificial Sequence
  ENSG00000141385_9 (sequence is synthesized)
agggatgggcggactcttcagtgtcggagaaaccactgccaaggtcttaaaggatgaaattgatgtgaagttcaaagatgtggctggctgtgaggaggccaagctagagatcatggaatt

SEQ ID NO: 366946 - DNA, 120 bp, Artificial Sequence
  ENSG00000141385_10 (sequence is synthesized)
tgtgaatttcttgaaaaacccaaagcagtatcaagacctaggagcaaaaatcccaaagggtgccattctcactggtcctccaggcactgggaagacgctgctagctaaggccacagccgg

SEQ ID NO: 366947 - DNA, 120 bp, Artificial Sequence
  ENSG00000141385_11 (sequence is synthesized)
agaagccaatgtccccttcatcaccgttagtggatctgagtttttggagatgttcgttggtgtgggccctgctagagtccgagacttatttgcccttgctcggaagaatgccccttgcat

SEQ ID NO: 366948 - DNA, 120 bp, Artificial Sequence
  ENSG00000141385_12 (sequence is synthesized)
cctcttcatcgatgaaatcgatgcggtgggaaggaagagaggaagaggcaactttggagggcagagtgagcaggagaacacactcaaccagctgctggtggagatggatggttttaatac

SEQ ID NO: 366949 - DNA, 120 bp, Artificial Sequence
  ENSG00000141385_13 (sequence is synthesized)
aatgtcgtcattttggccggcaccaatcgaccagatatcctggaccccgcgctgcttaggccggggcgtttcgacaggcagatctttattggaccaccagacataaaaggaagagcttct

SEQ ID NO: 366950 - DNA, 120 bp, Artificial Sequence
  ENSG00000141385_14 (sequence is synthesized)
attttcaaagttcatctccgaccgctaaaactggacagtaccctggagaaggataaattggcaagaaaactggcatctttaactccagggttttcaggtgctgatgttgctaatgtctgt

SEQ ID NO: 366951 - DNA, 120 bp, Artificial Sequence
  ENSG00000141385_15 (sequence is synthesized)
aatgaagctgcgttgattgctgcaaggcatctgtcagattccataaatcagaaacactttgaacaggcaattgaacgagtgattggtggcttagagaagaaaacgcaggttctgcagcct

SEQ ID NO: 366952 - DNA, 120 bp, Artificial Sequence
  ENSG00000141385_16 (sequence is synthesized)
gaggagaagaagactgtggcataccacgaagcaggccatgcggttgccggctggtatctggagcacgcagacccgcttttaaaggtatccatcatcccacgtggcaaaggactaggttat

SEQ ID NO: 366953 - DNA, 120 bp, Artificial Sequence
  ENSG00000141385_17 (sequence is synthesized)
gctcagtatttaccaaaagaacaatacctctataccaaagagcagctcttggataggatgtgtatgactttaggtggtcgagtctctgaagaaatcttctttggaagaattacaactggt

SEQ ID NO: 366954 - DNA, 120 bp, Artificial Sequence
  ENSG00000141385_18 (sequence is synthesized)
gctcaagatgacttgagaaaagtaactcagagtgcatatgcccaaattgttcagtttggcatgaatgaaaaggttgggcaaatctcctttgacctcccacgtcagggggacatggtattg

SEQ ID NO: 366955 - DNA, 120 bp, Artificial Sequence
  ENSG00000141385_19 (sequence is synthesized)
gagaaaccttacagtgaagccactgcaagattgatagatgatgaagtacgaatacttattaatgatgcttataaaagaacagtagctcttctcacagaaaagaaagctgacgtggagaag

SEQ ID NO: 366956 - DNA, 120 bp, Artificial Sequence
  ENSG00000141385_20 (sequence is synthesized)
gttgctcttctgttgttagaaaaagaagtattagataagaatgatatggttgaacttttgggccccagaccatttgcggaaaaatctacctatgaagaatttgtggaaggcactggcagc

SEQ ID NO: 366957 - DNA, 120 bp, Artificial Sequence
  ENSG00000141385_21 (sequence is synthesized)
ttggatgaggacacctcacttccagaaggccttaaggactggaacaaggagcgggaaaaggagaaagaggagcccccgggtgagaaagttgccaactagaggcccagagggaggccatct

SEQ ID NO: 366958 - DNA, 120 bp, Artificial Sequence
  ENSG00000141385_22 (sequence is synthesized)
cagtctgtccactgtggtttcagctggtgcattatttcagctgtggctttcagaagaatgggaatgctgcgctgattttagccagccactggcccagctgaaatgatggggaaaggagtc

SEQ ID NO: 366959 - DNA, 120 bp, Artificial Sequence
  ENSG00000141385_23 (sequence is synthesized)
cttagtcctttcagcctcagaggtcacagtgggtggcaggtgactttccggaggccttgagggaaatgcacactgtcccatagcctcattgggctcccagacgtgctggaaaggttgagc

SEQ ID NO: 366960 - DNA, 120 bp, Artificial Sequence
  ENSG00000141385_24 (sequence is synthesized)
ccagagtggccgaggctggaccctgtggcaccaagtggggtcggctgaccgtgtggcagggatcgttgcactggactcttggcgtgtgggaagggatgctttctctttgtcgcccactct

SEQ ID NO: 366961 - DNA, 120 bp, Artificial Sequence
  ENSG00000141385_25 (sequence is synthesized)
tcattcctgtttctcctcagttcccctgtgcagatgggctgtgaaattaaattggagtcttgataagaacattttaatttgacttaatattttaaagattgaatccagatcacttgttgc

SEQ ID NO: 366962 - DNA, 120 bp, Artificial Sequence
  ENSG00000141385_26 (sequence is synthesized)
tgtcttaatggaatggttttctacaggagctgtaacatacttaaaaatatgaatgtattatgtaaatatggcttctttacataaaaaataaaatgtcaacactgtacttttctgaacaca

SEQ ID NO: 366963 - DNA, 120 bp, Artificial Sequence
  ENSG00000141385_27 (sequence is synthesized)
aagcaagctacactcctgcaaaggagaaagaaacaaggctttagccaaaacttctggtaacttctggtaaccatagttgcacaaaccgtcccatagataaatataaaatttggacagaaa

SEQ ID NO: 366964 - DNA, 120 bp, Artificial Sequence
  ENSG00000141385_28 (sequence is synthesized)
attatttaaagggaccacagagtgtccaaaagcaggcgagagctggagagtttgctcctataaagcagcagttgcagtgggtttgaactgggagcctgtggctttcttgccaaagggttt

SEQ ID NO: 366965 - DNA, 120 bp, Artificial Sequence
  ENSG00000141385_29 (sequence is synthesized)
ttcataatctccacactacagtggtatgagacatagtctttattatcctgaggtggtagaggagatagtccaggacttaaagaatactggaaatttaacaggaaaatcccagaagcaaga

SEQ ID NO: 366966 - DNA, 120 bp, Artificial Sequence
  ENSG00000141385_30 (sequence is synthesized)
aaactaccaagtggtgaggcccgaatctgagcaggaactgcccaaatctcaggccgacaactaaactacacatgcacagtggcaatcccagagaacctggcaaaagggtaagcagagacc

SEQ ID NO: 366967 - DNA, 120 bp, Artificial Sequence
  ENSG00000141385_31 (sequence is synthesized)
aaagagaaatctacccctgaaagacgggggaaccatgtgagatttttaagttttttgcttttcaactgaggcatttcccgaactgctgcagcacagatgacagaaagcagctgcctccct

SEQ ID NO: 366968 - DNA, 120 bp, Artificial Sequence
  ENSG00000141385_32 (sequence is synthesized)
gccttgcgatgggtatcagggctgctgggaattgaggcgggccaggggtgtgggggtcccctgaagcaagggaaccatagagaagacaacattagagtgtccataaaacatcctaaggaa

SEQ ID NO: 366969 - DNA, 120 bp, Artificial Sequence
  ENSG00000141385_33 (sequence is synthesized)
cccacagagaacccactagaactaataagtaaagttagcaaggttgaagaattcaaggtcagtatacaaagaccaattgtatttctgtgtattagcaataaacaattggaaaatgaaatt

SEQ ID NO: 366970 - DNA, 120 bp, Artificial Sequence
  ENSG00000141385_34 (sequence is synthesized)
ttaaaaattcaatttcattagcaatttcagtagcatctaaaaactcgaaatatggaggaataaatttaagaaaatatttgtaggacatgcacattgataacaagccctaaataaaaatag

SEQ ID NO: 366971 - DNA, 120 bp, Artificial Sequence
  ENSG00000141385_35 (sequence is synthesized)
aggtggactttgctcatggagtgttacatcagttctcccaaaactaattgataatttcagtgcaatctctggtaattatagcagattttttttttttgtggaaattgagaagctgaatct

SEQ ID NO: 366972 - DNA, 120 bp, Artificial Sequence
  ENSG00000141385_36 (sequence is synthesized)
aaaaccgatatggaaatacaaatgagtaagagtagccaaaacagtaagttactcatcccagtattaagactgtgcagctacagtgatgagagtgtagtgctggtaagaggactggcacgc

SEQ ID NO: 366973 - DNA, 120 bp, Artificial Sequence
  ENSG00000141385_37 (sequence is synthesized)
aggccagtggggtggaatggagcccggaaagtgaaccacaaacttttggttcacagaggtaccaggataattcaagggggaggaattgtcttatctacaggtggttctggcaacagagta

SEQ ID NO: 366974 - DNA, 120 bp, Artificial Sequence
  ENSG00000141385_38 (sequence is synthesized)
ttcacaggaaaaatggtgaacgttaacccttgcatcatatgcaaaaaattatttgaaacaggtcataagaactaaaaccatcaaacttctaggagaaaatacagggaaaaatctctgtgg

SEQ ID NO: 366975 - DNA, 120 bp, Artificial Sequence
  ENSG00000141385_39 (sequence is synthesized)
catgcaaaaatttcttgggacacaaaaagcatgagccacaaaagaaaacgttgataggtgggatctcatcaaaatttcaaactctctttctttgaaagacagttaagaaaataaaaaggc

SEQ ID NO: 366976 - DNA, 120 bp, Artificial Sequence
  ENSG00000141385_40 (sequence is synthesized)
aagccacgccctccaaaaatacatgcagtacatatacaggacaaaggacttatttctagaacctgtaaagaactcttagaactcaataataagaaaacaacccagtaaaacaatgggcga

SEQ ID NO: 366977 - DNA, 120 bp, Artificial Sequence
  ENSG00000141385_41 (sequence is synthesized)
aagatttaaacatgcatttcccagaaggtatatgagtgggcattaagcacacacagggtatcattatttatcagggacatgcaaattcacccatgagctacctgaacatacttgctagaa

SEQ ID NO: 366978 - DNA, 120 bp, Artificial Sequence
  ENSG00000141385_42 (sequence is synthesized)
agaatggttaaaatgaagaagagacagtcttcattgttgataaggatatggagcagttgaaacgctcacacgttattgataggaatgtaaaatggggccgggtacagtggctcatgcctg

SEQ ID NO: 366979 - DNA, 88 bp, Artificial Sequence
  ENSG00000141385_43 (sequence is synthesized)
caggagactgaggcaggagaatcactggagatggggaggatcacttgaacccaagaggcggaggctacagtaagcagcagatgaagct

SEQ ID NO: 366980 - DNA, 120 bp, Artificial Sequence
  ENSG00000141385_44 (sequence is synthesized)
cagcctgggggacagaatgaagctctgccaaaaacaaaaatagggaatgtaaaatggtaccattgttttggaaaacagtttggcagtttcttattaaggtagacgaacacttccatgtga

SEQ ID NO: 366981 - DNA, 120 bp, Artificial Sequence
  ENSG00000141385_45 (sequence is synthesized)
ccaaacaattcaacttttatttccccaagagaaataaaaacctatgtccatgcaaggactgttactactttatgtataatatcaataaactgaaaataaccctgacttccatcaagaatg

SEQ ID NO: 366982 - DNA, 120 bp, Artificial Sequence
  ENSG00000141385_46 (sequence is synthesized)
aaatggatatttggtatgtttgtagcagtggagtgccacacagcagtaaaaatgaatgattattaatacatacagcagtatctatggatctcaaaaacagggaaagaggccaaacaatga

SEQ ID NO: 366983 - DNA, 120 bp, Artificial Sequence
  ENSG00000141385_47 (sequence is synthesized)
agtatgtgccatacaatttcatttatttgcaattctagaagctaaactaatccatagggacagaaggcatgtctgtggttgcctggggttgggtgtggagggaaagactccctaccagtg

SEQ ID NO: 366984 - DNA, 120 bp, Artificial Sequence
  ENSG00000141385_48 (sequence is synthesized)
ggtacaagggaactttctgggcatgatgagaatattctgtatcttcattgtggcttgatgttatgtttgtcaaaactcattgaactctacacttcagatgggtgcattttaccatatatg

SEQ ID NO: 366985 - DNA, 120 bp, Artificial Sequence
  ENSG00000141385_49 (sequence is synthesized)
tcatctctcaataaactgaattttttaaaaattaaaggaatttacttaattgcaaaagaggactggaaaggaaaggctgccgagcatcttggcctgctgtacccctcttccttcaaagga

SEQ ID NO: 366986 - DNA, 120 bp, Artificial Sequence
  ENSG00000141385_50 (sequence is synthesized)
gggtgtggccacgtccgacagcagagttgaatgaagcctgcatgcttgcacaacatcagaactgtcagaatgtcaagatggaatactttcaattgagttttacaaaaagacaagaaattt

SEQ ID NO: 366987 - DNA, 65 bp, Artificial Sequence
  ENSG00000141385_51 (sequence is synthesized)
ggaattgcttgtagtcaggagtttaagaccatcccgagcagcaaagtgagaccctgtttttactt

SEQ ID NO: 366988 - DNA, 120 bp, Artificial Sequence
  ENSG00000141385_52 (sequence is synthesized)
gtgttctcaatgagtgacatttaatcaccaccattattaaagccagtcttttattattgtttattctttaatttataaattttcagtatttctggaaaattcttaaaaagttgaaccgtt

SEQ ID NO: 366989 - DNA, 120 bp, Artificial Sequence
  ENSG00000141391_0 (sequence is synthesized)
cccgcccacgccgcgcccggagccgcgcggcccgaagcacccggcccggatcgcagagcccgcgccctgcgccggcggcaatgaagatctggagctcggagcacgtgtttggccacccgt

SEQ ID NO: 366990 - DNA, 120 bp, Artificial Sequence
  ENSG00000141391_1 (sequence is synthesized)
gggacacggtcatccaggcggccatgcgcaagtacccgaacccgatgaacccgagcgtgctgggcgtggatgtgctacagcgccgcgtggacggccgcggccgcctgcacagcttgcgcc

SEQ ID NO: 366991 - DNA, 120 bp, Artificial Sequence
  ENSG00000141391_2 (sequence is synthesized)
tgctcagcaccgagtgggggctgcccagcctcgtgagagcgattttgggaaccagtaggacattgacatacatccgagaacattctgtggtggatccagtggaaaagaaaatggaacttt

SEQ ID NO: 366992 - DNA, 120 bp, Artificial Sequence
  ENSG00000141391_3 (sequence is synthesized)
gttctaccaatatcacactcacaaatttggtgtcagttaatgagaggttggtgtacacacctcatccagagaacccagaaatgaccgtgctcacacaagaagccatcatcactgtgaagg

SEQ ID NO: 366993 - DNA, 120 bp, Artificial Sequence
  ENSG00000141391_4 (sequence is synthesized)
ggattagccttggtagttatttggaaagtttaatggccaatacgatatcatccaatgcaaagaaggggtgggctgctatcgagtggataattgaacactctgaaagcgctgtgagctaag

SEQ ID NO: 366994 - DNA, 120 bp, Artificial Sequence
  ENSG00000141391_5 (sequence is synthesized)
gaggcctgtgcctgtgcttgtcataaatgatgcttcccagaagaaaggaaagaaggaggtgaggagaggacgagcaaggacgggacggaaaagcacgtctggctgcgagggcacacaggg

SEQ ID NO: 366995 - DNA, 120 bp, Artificial Sequence
  ENSG00000141391_6 (sequence is synthesized)
ccggggaggaggattaggctggactgatcgcgggtcgcaggtgaccccgggaccagatgtccctcccctcatgagcgtgcaacagggagcagccccagccagccccaccgccgccgtctg

SEQ ID NO: 366996 - DNA, 120 bp, Artificial Sequence
  ENSG00000141391_7 (sequence is synthesized)
cttaggggcggcgcccatcgtcctgcctgccgcagtggcccagccccttctctccctgcaggtgacccgcgccgcccccgcccgcccgcccacgctgtcctccacttaggctcctccaca

SEQ ID NO: 366997 - DNA, 120 bp, Artificial Sequence
  ENSG00000141391_8 (sequence is synthesized)
aacgctggcgggtgtgccgccctccagcctctccgcccccgtcccctcggtcctgcagatcaccaagcagctctcctgggcccgcggctgctccgggcctcacatctgctgctggcctcg

SEQ ID NO: 366998 - DNA, 120 bp, Artificial Sequence
  ENSG00000141391_9 (sequence is synthesized)
gtgggctctgactgcggggctcacggggcctggggccatggctttcttctcggcccccaaatgcctttcctggagtggctaagcctctcctgacgaggctcctcatgcggggagagggct

SEQ ID NO: 366999 - DNA, 120 bp, Artificial Sequence
  ENSG00000141391_10 (sequence is synthesized)
ggggtccaggggtttcccggccctttctgcaggctgtgccagccccctccagtctgccactgccgtgcccgggggacatcctgcgcccaggctggaggccctgcctcgctgcttgccagc

SEQ ID NO: 367000 - DNA, 120 bp, Artificial Sequence
  ENSG00000141391_11 (sequence is synthesized)
ctcacctgctggggctggaggccatggatccctcatagtatccaaggtttgagttcctgtttttcgccttatagttttgtgagtgtttgagggacaacgaccaaaggtcttttccccacc

SEQ ID NO: 367001 - DNA, 120 bp, Artificial Sequence
  ENSG00000141391_12 (sequence is synthesized)
atctttaaatcaaagttgtttaaaacaacattaattttaaaaaatacataaaagcaacccatgcttatggttaaaaaagagtacaggagtctggagtccgttgaagggtaaaggcctccc

SEQ ID NO: 367002 - DNA, 120 bp, Artificial Sequence
  ENSG00000141391_13 (sequence is synthesized)
gcaagctgccagtcggctctttttcgcaaagccttccagaagttttctgtgcttatgaaagcgtatgtgtggcctttctcttcccttcttttattaaacacagataggtttatgctggat

SEQ ID NO: 367003 - DNA, 120 bp, Artificial Sequence
  ENSG00000141391_14 (sequence is synthesized)
acttgagcctgggaggtttgagtctgcagtgaccctgatggcaccactgcattcctgcctgctgggcgacagagtgagaccctgtctcagacaaacaaaaaccaaggggctgccaggtgc

SEQ ID NO: 367004 - DNA, 120 bp, Artificial Sequence
  ENSG00000141391_15 (sequence is synthesized)
gctcgcgggactcctcagatttgtcggaccagcctttcattaaagtgaagagactagcgcgttgcccaggcctggcggcggcttttcctccccttcacccttgcggccccggccccggcg

SEQ ID NO: 367005 - DNA, 120 bp, Artificial Sequence
  ENSG00000141391_16 (sequence is synthesized)
atccagtggaaaagaaaatggaactttgttctaccaatgctggagtgcagtggatctcagcaccctgcaacctccacttcatgggttcaagcgattctcctgtctcaccctcccaagtag

SEQ ID NO: 367006 - DNA, 120 bp, Artificial Sequence
  ENSG00000141391_17 (sequence is synthesized)
cccgcccacgccgcgcccggagccgcgcggcccgaagcacccggcccggatcgcagagcccgcgccctgcgccggcggcaatgaagatctggagctcggagcacgtgtttggattttggg

SEQ ID NO: 367007 - DNA, 120 bp, Artificial Sequence
  ENSG00000141391_18 (sequence is synthesized)
cgcagcctgttttattttgccgggagcatagtgctgctgcacgctccactctgttggaattcatttctttgctcagtggctcacctgctggagcggaagcgccctggacacaggggtttt

SEQ ID NO: 367008 - DNA, 120 bp, Artificial Sequence
  ENSG00000141391_19 (sequence is synthesized)
gtctctgtcccttgctgcatcccatgatatcatttcttgaatagtgaactaattagtaaatgcaatggtattcggtggtgatatgaagtagaatttttaacgttccactatgctagtttt

SEQ ID NO: 367009 - DNA, 68 bp, Artificial Sequence
  ENSG00000141391_20 (sequence is synthesized)
atcgcagagcccgcgccctgcgccggcggcaatgaagatctggagctcggagcacgtgtttgggcaga

SEQ ID NO: 367010 - DNA, 120 bp, Artificial Sequence
  ENSG00000141401_0 (sequence is synthesized)
tgcccttcccgccagcgcaggtgtgggacgggcggcggactaggcacagagctgcgggagcaggcacagggagtgtggagcctggcggcgggacggcgggatccggtgggagccggagtc

SEQ ID NO: 367011 - DNA, 120 bp, Artificial Sequence
  ENSG00000141401_1 (sequence is synthesized)
ggggcccggcgaggccgcgatgaagccgagcggcgaggaccaggcggcgctggcggccggcccctgggaggagtgcttccaggcggccgtgcagctggcgctgcgggcaggacagatcat

SEQ ID NO: 367012 - DNA, 120 bp, Artificial Sequence
  ENSG00000141401_2 (sequence is synthesized)
ggcgctgcgggcaggacagatcatcagaaaagcccttactgaggaaaaacgtgtctcaacaaaaacatcagctgcagatcttgtgacagaaacagatcaccttgtggaagatttaattat

SEQ ID NO: 367013 - DNA, 120 bp, Artificial Sequence
  ENSG00000141401_3 (sequence is synthesized)
ttctgagttgcgagagaggtttccttcacacaggttcattgcagaagaggccgcggcttctggggccaagtgtgtgctcacccacagcccgacgtggatcatcgaccccatcgacggcac

SEQ ID NO: 367014 - DNA, 120 bp, Artificial Sequence
  ENSG00000141401_4 (sequence is synthesized)
ctgcaattttgtgcacagattcccgactgtggcggttagcattggatttgctgttcgacaagagcttgaattcggagtgatttaccactgcacagaggagcggctgtacacgggccggcg

SEQ ID NO: 367015 - DNA, 120 bp, Artificial Sequence
  ENSG00000141401_5 (sequence is synthesized)
gggtcggggcgccttctgcaatggccagcggctccgggtctccggggagacagatctctcaaaggccttggttctgacagaaattggccccaaacgtgaccctgcgaccctgaagctgtt

SEQ ID NO: 367016 - DNA, 120 bp, Artificial Sequence
  ENSG00000141401_6 (sequence is synthesized)
catggagcggctgctgcatgccaaggcgcatggggtccgagtgattggaagctccacattggcactctgccacctggcctcaggggccgcggatgcctattaccagtttggcctgcactg

SEQ ID NO: 367017 - DNA, 120 bp, Artificial Sequence
  ENSG00000141401_7 (sequence is synthesized)
ctgggatctggcggctgccacagtcatcatcagagaagcaggcggcatcgtgatagacacttcgggtggacccctcgacctcatggcttgcagagtggttgcggccagcacccgggagat

SEQ ID NO: 367018 - DNA, 120 bp, Artificial Sequence
  ENSG00000141401_8 (sequence is synthesized)
ggcgatgctcatagctcaggccttacagacgattaactatgggcgggatgatgagaagtgactgcggctgaggcaaagctgctcccaaggcctccctgggctgctgtgggctcctgggga

SEQ ID NO: 367019 - DNA, 120 bp, Artificial Sequence
  ENSG00000141401_9 (sequence is synthesized)
ggtggccctcgtggcccacgctccatgccagtggctcacgctctgctcctggctaccccagagggagttgtcacgctacagtgagtggctggccttttaaatcgacgtctctctcaccag

SEQ ID NO: 367020 - DNA, 120 bp, Artificial Sequence
  ENSG00000141401_10 (sequence is synthesized)
gatttggtgtttagctgtttctctctttaatctcacgtagcctttttcaggttagtacgtgttcttctgtcagggccaaaactcaaatctcctgtgaaatacgtattgataatccaatct

SEQ ID NO: 367021 - DNA, 120 bp, Artificial Sequence
  ENSG00000141401_11 (sequence is synthesized)
tgatttttccccccagaatataaatctcaggtaataaggctttagaactgctgataaagcggatcgttctcaggccctccccccggagtacttcagaatgcaataaatcaaaataatggc

SEQ ID NO: 367022 - DNA, 120 bp, Artificial Sequence
  ENSG00000141401_12 (sequence is synthesized)
acggacttgctaaaactcccctgggatttgaggaggaagcctgacgtggaaagagtgggaggggcacatgaacatcagactcagggaagccctgtgaggggcccgcctgcagtagatact

SEQ ID NO: 367023 - DNA, 120 bp, Artificial Sequence
  ENSG00000141401_13 (sequence is synthesized)
cctatagccaggcctctggagatgcgtgggcacctgtgttgcttctgatcagaatccatggaactgacctcatgctgctcaaccagcgaatggtgcaaatacttacagtccttcccgagg

SEQ ID NO: 367024 - DNA, 120 bp, Artificial Sequence
  ENSG00000141401_14 (sequence is synthesized)
gggcctggcgtcagacaggtttatcaaagcccagtgaatcctctttgtctcttgccttcccagtagggctgtgctgtgagccctagccatgtgagaccactgacacttaatgtcacgttc

SEQ ID NO: 367025 - DNA, 120 bp, Artificial Sequence
  ENSG00000141401_15 (sequence is synthesized)
agtagaggaggattcaattctctggttgctgcatctcaggtgctcagtagctaggtcagctgggagctgtcatggcacaaggcatttgcgtctggcggaggcctgttggttggtggctcc

SEQ ID NO: 367026 - DNA, 120 bp, Artificial Sequence
  ENSG00000141401_16 (sequence is synthesized)
gcacaggtgagctgagcagggatcgcctccattgcagggcttaacatgtcctcttctgtgaggttttgtcttttcaaaagcagcattttttaaggcaggaatatataaacaaacctatag

SEQ ID NO: 367027 - DNA, 120 bp, Artificial Sequence
  ENSG00000141401_17 (sequence is synthesized)
tacactcatagtctcatcagaaagatgatcagatcttgatatttttaaaataaggttttccgtttgtgagaggctcttggagtatgttaggaaatctgcacttgtttaaaaaccagtttg

SEQ ID NO: 367028 - DNA, 120 bp, Artificial Sequence
  ENSG00000141401_18 (sequence is synthesized)
caggtccccagggcccctccctgggctccctctggccatccttcctttctggcttcagcctctgtgcgcctggtttgctgtttgccctgtgccttaatcatgactggcaaatccaagcct

SEQ ID NO: 367029 - DNA, 120 bp, Artificial Sequence
  ENSG00000141401_19 (sequence is synthesized)
ggagttggagcccgctctgcgcgctgcgggacggggcacggcggagcagggttgggtccgcctcgagcggggagggtgatgctgcaccacaggggcggggctggaggtaaagcgcggagc

SEQ ID NO: 367030 - DNA, 120 bp, Artificial Sequence
  ENSG00000141401_20 (sequence is synthesized)
gcgagagaggtttccttcacacaggtctcctttttctctagtacacatgtgaacccggcacaggaactggatagaaaacctctcggcaaggccacatagtcatgcacagaacagatgttt

SEQ ID NO: 367031 - DNA, 120 bp, Artificial Sequence
  ENSG00000141401_21 (sequence is synthesized)
gcttagcgcctgcccaaggcctcacccttagtgaacttgggacagtccaagagtgtcaaaagcactgccctgaatgctttagatctagtcttttctttgatcctgagaatgcctttggaa

SEQ ID NO: 367032 - DNA, 81 bp, Artificial Sequence
  ENSG00000141401_22 (sequence is synthesized)
cactgcacagaggagcggctgtacacgggccggcggggtcggggcgccttctgcaatggccagcggctccgggtctccggg

SEQ ID NO: 367033 - DNA, 120 bp, Artificial Sequence
  ENSG00000141401_23 (sequence is synthesized)
ggtctcaaactgctgacctcaagtgagccttttgcctcggcctccgaaagtgctggggttacagttgtgagccactgcacctgaccatatttttaaaatatagagtcgataatgagttat

SEQ ID NO: 367034 - DNA, 68 bp, Artificial Sequence
  ENSG00000141401_24 (sequence is synthesized)
cctgacctcaggtgatccacccgcccaccccatctcttaaaaaaataaaaagataacctttgctctca

SEQ ID NO: 367035 - DNA, 120 bp, Artificial Sequence
  ENSG00000141401_25 (sequence is synthesized)
tcagtagctaggtcagctgggagctgtcatggcacaaggcatttgcgtctggcggaggcctgttggttggtggctccaggccctatattcagcctccagagctttggcagaagtgctgtg

SEQ ID NO: 367036 - DNA, 120 bp, Artificial Sequence
  ENSG00000141401_26 (sequence is synthesized)
cttcatttttcactagggaaaatgcccagccggggtacctggctgaagtcggcttgcacaccacagaaaaggctccactcccgcctgcatctgtcctcccttccctctccccagggtccg

SEQ ID NO: 367037 - DNA, 120 bp, Artificial Sequence
  ENSG00000141404_0 (sequence is synthesized)
ggtgagcctcggagggatcctcctccctgctagaatatgcatgatcctccgcgagtcttcgcccgccaggagcagggacgcgtccgagccaacacggggcgcgcgcccagacgcactttc

SEQ ID NO: 367038 - DNA, 120 bp, Artificial Sequence
  ENSG00000141404_1 (sequence is synthesized)
ccggctcggggtgcaagagagccaggcggccgcggcgcagcggaggggctgcgggcccggaacccaggccggtcagcgtcaggaaagagaggagccgtcgcaggagccgcacacgtctcc

SEQ ID NO: 367039 - DNA, 120 bp, Artificial Sequence
  ENSG00000141404_2 (sequence is synthesized)
aactctctattgctttttgcgcacattcctaacttcctgacgtccatcccagcgggcaggcatggggtgtttgggcggcaacagcaagacgacggaagaccagggcgtcgatgaaaaaga

SEQ ID NO: 367040 - DNA, 120 bp, Artificial Sequence
  ENSG00000141404_3 (sequence is synthesized)
acgacgcgaggccaacaaaaagatcgagaagcagttgcagaaagagcgcctggcttacaaggctacccaccgcctgctgctcctgggggctggtgagtctgggaaaagcactatcgtcaa

SEQ ID NO: 367041 - DNA, 120 bp, Artificial Sequence
  ENSG00000141404_4 (sequence is synthesized)
acagatgaggatcctgcacgtcaatgggtttaatcccgaggaaaagaaacagaaaattctggacatccggaaaaatgttaaagatgctatcgtgacaattgtttcagcaatgagtactat

SEQ ID NO: 367042 - DNA, 120 bp, Artificial Sequence
  ENSG00000141404_5 (sequence is synthesized)
aatacctccagttccgctggccaaccctgaaaaccaatttcgatcagactacatcaagagcatagcccctatcactgactttgaatattcccaggaattctttgaccatgtgaaaaaact

SEQ ID NO: 367043 - DNA, 120 bp, Artificial Sequence
  ENSG00000141404_6 (sequence is synthesized)
ttgggacgatgaaggcgtgaaggcatgctttgagagatccaacgaataccagctgattgactgtgcacaatacttcctggaaagaatcgacagcgtcagcttggttgactacacacccac

SEQ ID NO: 367044 - DNA, 120 bp, Artificial Sequence
  ENSG00000141404_7 (sequence is synthesized)
ttttgagacacgattccaagtggacaaagtaaacttccacatgtttgatgttggtggccagagggatgagaggagaaaatggatccagtgctttaacgatgtcacagctatcatttacgt

SEQ ID NO: 367045 - DNA, 120 bp, Artificial Sequence
  ENSG00000141404_8 (sequence is synthesized)
cgcagcctgcagtagctacaacatggtgattcgagaagataacaacaccaacaggctgagagagtccctggatctttttgaaagcatctggaacaacaggtggttacggaccatttctat

SEQ ID NO: 367046 - DNA, 120 bp, Artificial Sequence
  ENSG00000141404_9 (sequence is synthesized)
catcttgttcttgaacaaacaagatatgctggcagaaaaagtcttggcagggaaatcaaaaattgaagactatttcccagaatatgcaaattatactgttcctgaagacgcaacaccaga

SEQ ID NO: 367047 - DNA, 120 bp, Artificial Sequence
  ENSG00000141404_10 (sequence is synthesized)
tgcaggagaagatcccaaagttacaagagccaagttctttatccgggacctgtttttgaggatcagcacggccaccggtgacggcaaacattactgctacccgcacttcacctgcgccgt

SEQ ID NO: 367048 - DNA, 120 bp, Artificial Sequence
  ENSG00000141404_11 (sequence is synthesized)
ggacacagagaacatccgcagggtgttcaacgactgccgcgacatcatccagcggatgcacctcaagcagtatgagctcttgtgaggatgctgccgccaccctgcgacggagcggcgccc

SEQ ID NO: 367049 - DNA, 120 bp, Artificial Sequence
  ENSG00000141404_12 (sequence is synthesized)
cggactgcctgactgccagccccatgccatggtaggaggcagagtctctagttccatctcgctgccgtctgtcccgttctgtgtcgaccaccaagcctctggctacctctgtcccctcag

SEQ ID NO: 367050 - DNA, 120 bp, Artificial Sequence
  ENSG00000141404_13 (sequence is synthesized)
gtttggttgtgtagcttctgttgtcattgaatacggcctcccgcagcatcccacccccaaaccaccgactctcattgccgacactgcagcagaatctctccgggtgggagccccattatt

SEQ ID NO: 367051 - DNA, 120 bp, Artificial Sequence
  ENSG00000141404_14 (sequence is synthesized)
gtctccagcggagaccggcgccctcgccccccgtctccgttcattgtgctgtattcatccagcagattttgaaacaattctcgtgtaaaaaggcattttactccgcgcgtcttccttaca

SEQ ID NO: 367052 - DNA, 120 bp, Artificial Sequence
  ENSG00000141404_15 (sequence is synthesized)
gccatttagttgggagtttgcggtgggcagggggagggagaagaaacgcctgctctgaatcggaaaacaccgaagagaccagaccatctctttcagcagcaggaaagagaggagccgtcg

SEQ ID NO: 367053 - DNA, 120 bp, Artificial Sequence
  ENSG00000141404_16 (sequence is synthesized)
tggtagatggggagaaaacacagttggtttttttttccacgttatcaaccgtgactgcaagagcgttcgtgcagtgccctgagccacggccgtctctgattctccctttatgaagctgca

SEQ ID NO: 367054 - DNA, 120 bp, Artificial Sequence
  ENSG00000141404_17 (sequence is synthesized)
ggctgacgagagatggtcccttcccattggccttagcccaagacttggagtcgaccccaagcgacagagtgaccagaaacccttttacagtcacattcagagtcgctgctggcctcaggc

SEQ ID NO: 367055 - DNA, 120 bp, Artificial Sequence
  ENSG00000141404_18 (sequence is synthesized)
atttgaattagagctactttgagcctcttaggcagaaaacctaccacattcactactgcaaaatgtgtcctgtctaaaaatgattctctaaactttccctatacttaggcatagtcttct

SEQ ID NO: 367056 - DNA, 120 bp, Artificial Sequence
  ENSG00000141404_19 (sequence is synthesized)
ttcttagattctctttgttgttgtccctattgctggtttattacactgtacagaccacaaaatgtaatattcttttgtataactactaaagaaaaatccttgtagatctttgtgccttca

SEQ ID NO: 367057 - DNA, 120 bp, Artificial Sequence
  ENSG00000141404_20 (sequence is synthesized)
gtcggttcggtccgctctgggcgttagcaagtgatctccagccaaggcggccgccaccccttgcacacagcagaaaatgcaaaatgaccctctggggcagtgaggggctgtggccctcgg

SEQ ID NO: 367058 - DNA, 80 bp, Artificial Sequence
  ENSG00000141404_21 (sequence is synthesized)
cagcgccgaacagggtccgggtgcagccccctcccgcccctccgctgaggcgccggcctgaactgggcgcgggaaccagg

SEQ ID NO: 367059 - DNA, 120 bp, Artificial Sequence
  ENSG00000141404_22 (sequence is synthesized)
ccgccctcggcgcccagcctgccctagtcccgcgcgccgcccccgctgtgccgcgcccacatgggtctgtgctacagtctgcggccgctgcttttcgggggcccaggggacgacccctgc

SEQ ID NO: 367060 - DNA, 120 bp, Artificial Sequence
  ENSG00000141404_23 (sequence is synthesized)
cggccccggccctggccccagtccgggcggccgcaagggacacggcccggaccctgctccctcggggcggcgaagggagcccggcatgcgctcggcccaaagcagacaagccgaaggaga

SEQ ID NO: 367061 - DNA, 120 bp, Artificial Sequence
  ENSG00000141404_24 (sequence is synthesized)
ccggcatgcgctcggcccaaagcagacaagccgaaggagaagcggcagcgcaccgagcagctgagtgccgaggagcgcgaggcggccaaggagcgcgaggcggtcaaggaggcgaggaaa

SEQ ID NO: 367062 - DNA, 120 bp, Artificial Sequence
  ENSG00000141404_25 (sequence is synthesized)
atgtcaacattacctgctgcttactctgaaaaaaggaatgaatggtagctgtagaatttaggatattttatcaggttggcactttataaaatactccctgatttaaaaaattgtaagtta

SEQ ID NO: 367063 - DNA, 120 bp, Artificial Sequence
  ENSG00000141404_26 (sequence is synthesized)
tacacgttaatcatccacattctatcgacaatgtaccaacatcacaagctgttgcaaccacctgctgttacttctctgagctgtaaaaacctgaactcaattcaggggtacaaattgcaa

SEQ ID NO: 367064 - DNA, 120 bp, Artificial Sequence
  ENSG00000141404_27 (sequence is synthesized)
tctaatcttttcagggaaccagggatttttttctctctctctagacaatatgtttcctcattagtctgctaatgaaacacttcttcaagttccccaagtgggaacaggtccatcattccc

SEQ ID NO: 367065 - DNA, 120 bp, Artificial Sequence
  ENSG00000141404_28 (sequence is synthesized)
gttccccaagtgggaacaggtccatcattcccttagtcaaaactttggacacaggctacgtcatacaagtaagcaaacagtaagagaaaaacaaaatgtggccaggcgcggtggctcacg

SEQ ID NO: 367066 - DNA, 88 bp, Artificial Sequence
  ENSG00000141404_29 (sequence is synthesized)
gtcgtgccatcgcactccagcctggacatcaaagtgagactcaggccaaaaaaaaaaaaaaaaaaaaccttgacgtgtcaatgtttgt

SEQ ID NO: 367067 - DNA, 120 bp, Artificial Sequence
  ENSG00000141404_30 (sequence is synthesized)
aaaaaaaaaaaaaaaaaaaccttgacgtgtcaatgtttgtgtctggcctaggagaatgaggatgacagcttcacttgccttttgaagaagaaacattacaaaaccttaatctgaagtata

SEQ ID NO: 367068 - DNA, 120 bp, Artificial Sequence
  ENSG00000141404_31 (sequence is synthesized)
aagtcaaaagatacggctctttctcacacttgcaagacttacaaatacagcctcaaacattatgacacaccaacaatatctagaaagtaagaactggtgtagcaatgatgcttcatattc

SEQ ID NO: 367069 - DNA, 120 bp, Artificial Sequence
  ENSG00000141404_32 (sequence is synthesized)
tagctgtagccacagagttgagggtagtttttgtaggtctaaaataataatctataaagatgtccaaagttaaattttcaacaatacaaatctagagaagtgacagcctacattacttca

SEQ ID NO: 367070 - DNA, 120 bp, Artificial Sequence
  ENSG00000141404_33 (sequence is synthesized)
ttattactcttcttttagtctttagtctttaatattttaaagtttactctataaatcagcattttgtaatcctttataaactcatccagatttaaatgctactttttcatgaagaaagga

SEQ ID NO: 367071 - DNA, 120 bp, Artificial Sequence
  ENSG00000141404_34 (sequence is synthesized)
taactttatagacagtcagtgcaacacacacattttatctcatcaccgtcttactgcctccccatccactgtctcataaagccctcagctgaactaagataaataatacaatggaaatta

SEQ ID NO: 367072 - DNA, 120 bp, Artificial Sequence
  ENSG00000141404_35 (sequence is synthesized)
ttttcagttccccttgcactgtcaaagtaaaacaagaaaactgaaaagctgcacccccagcaagaaagggaagtatgctgttgtatgcatcattactcaacaattaccctctaactaaac

SEQ ID NO: 367073 - DNA, 120 bp, Artificial Sequence
  ENSG00000141404_36 (sequence is synthesized)
atcctgtttaagagtttaattcaaacaacagccagactgttaagaaaaaaaacaaaaagaataacttttatctggcttacaattattaaagcatttattttcaggtaccaaaagccatat

SEQ ID NO: 367074 - DNA, 120 bp, Artificial Sequence
  ENSG00000141404_37 (sequence is synthesized)
cccattccactttttaagtttcttttgatcactgacaggcattaacagatgtagcaacgtggtctcctatagagaaaattacacttatctaaaaatctgattccattaattgatcaagta

SEQ ID NO: 367075 - DNA, 120 bp, Artificial Sequence
  ENSG00000141404_38 (sequence is synthesized)
ctaaaaatctgattccattaattgatcaagtataaaaatctacgaaaacaatatgttctgcacatcacatctgtacttttttttttttaaatatattttttgagacggagtctcactctg

SEQ ID NO: 367076 - DNA, 120 bp, Artificial Sequence
  ENSG00000141404_39 (sequence is synthesized)
gcaacctccgcctcccgggctcaagggattctcctgcctcagcctcagctggtattataggcacttgctaccatgcttggctaatttttgtatttctagcggagacgaggtttcaccatg

SEQ ID NO: 367077 - DNA, 120 bp, Artificial Sequence
  ENSG00000141404_40 (sequence is synthesized)
agggtacagctttacagtacataggaatttgagaaccacttcacaggaagagggaaacagcccaatatttatttatgtatacacataatcccaagtgtgtgctggggccaccaggccctt

SEQ ID NO: 367078 - DNA, 120 bp, Artificial Sequence
  ENSG00000141404_41 (sequence is synthesized)
cctgggggaacaaggactgtcgtgcatgtgagtgacgacattaatagcatttacatactgtacagatgcaacctttgatgatacatatatttgataaaaatgagaaaacagatttgttgt

SEQ ID NO: 367079 - DNA, 120 bp, Artificial Sequence
  ENSG00000141404_42 (sequence is synthesized)
agagtacctgtccacttttatagcatgagaacagtacaatcaactatttattttgcagttactcatttcagtgattgagaatttctgtgctgtgcagagagacggcctgtaattggtctc

SEQ ID NO: 367080 - DNA, 120 bp, Artificial Sequence
  ENSG00000141404_43 (sequence is synthesized)
atcatccacttgattctaacatgatctctgcccaaagttccatttcttgggctttgatatttataatggcgcctgctcttcatcttgtcttacgctttccgagcaagttcaaaccagaaa

SEQ ID NO: 367081 - DNA, 120 bp, Artificial Sequence
  ENSG00000141404_44 (sequence is synthesized)
gaaaaggtgaggctagaagcccaaagtgagtgagtgtgaggaccacaaggaagcccaccactccacagtagatgatcaaaaccacatcctcacgtgggaggtagcacttggagagggtgt

SEQ ID NO: 367082 - DNA, 120 bp, Artificial Sequence
  ENSG00000141404_45 (sequence is synthesized)
agtctgtgggcgtgatgctaccctggaaaggagaagggaaagttatgctgagagcaccaggcacacgttgaacaccgcagtcttagaaacagcagagggaagactgccttctcaggtccc

SEQ ID NO: 367083 - DNA, 120 bp, Artificial Sequence
  ENSG00000141404_46 (sequence is synthesized)
cctcaggtgaggcagggaacgggccctcctcacctgagaccaagggggcccagccttctccctgcacagctcacccccgaccagcccaggctccagcaggagagacaagtaaggcccaag

SEQ ID NO: 367084 - DNA, 120 bp, Artificial Sequence
  ENSG00000141404_47 (sequence is synthesized)
tgtgcctgagtggaaaatgtctgggacactgacctgtcaaaactggcccctggctcactgggttcccatcaaatatagtgggggatccataacagagattcagagaggcaccgtggagtt

SEQ ID NO: 367085 - DNA, 120 bp, Artificial Sequence
  ENSG00000141404_48 (sequence is synthesized)
ccagggtcatcggtcagcgaggaacaaggagggaaaggtgtcttcctgccccttgatgctcaactaagcatctgttccctagaaatacatgtgtccaggtcgtctccatgggcttttctt

SEQ ID NO: 367086 - DNA, 120 bp, Artificial Sequence
  ENSG00000141404_49 (sequence is synthesized)
tgcagatacttttatgtggaacaacagtggcaaatgttttcatttactttgaatttgaaaatgttagggtttcctccacctttttatgaagtaaaagaacctgtcgtaccagcatcatga

SEQ ID NO: 367087 - DNA, 120 bp, Artificial Sequence
  ENSG00000141404_50 (sequence is synthesized)
gctggatgcaggagcccatggctgaaaggagttaaaacgcccagtggtcattaagtgaaacatcttttatcaacctgcaaaagctgcagcgttctctgccaggtcaaatgggcatgttta

SEQ ID NO: 367088 - DNA, 120 bp, Artificial Sequence
  ENSG00000141404_51 (sequence is synthesized)
gaaaataagagaagatggctgagtatagctaatgaataaatggttgtttctttagaaaattaaacacacacagagtgtaagaggagaggatacggccctccctgaaggataaagtccacc

SEQ ID NO: 367089 - DNA, 120 bp, Artificial Sequence
  ENSG00000141404_52 (sequence is synthesized)
tggacggtgccctgccctcgcttctcacattaactgcccaggaatgtcatgctgattggttcccggaagggtgtttggcaaggggcagtgtatggagctacgtgtagaaggagagaaatt

SEQ ID NO: 367090 - DNA, 120 bp, Artificial Sequence
  ENSG00000141404_53 (sequence is synthesized)
tgtgtgtggcttttgtaaattttgaccgattgcagcaattaaatagttgattactgtgttgatttaaatacttatgaaagctttcagacaaaaataaactttcacgttaccatgatgaaa

SEQ ID NO: 367091 - DNA, 120 bp, Artificial Sequence
  ENSG00000141404_54 (sequence is synthesized)
caccggctcctgctgctcggtacttcgggagcatctagagggcgtgatttggagtctgctagccaggaggccacaggagaaacacaggtcagccccagaatcatggagcacacatttgcc

SEQ ID NO: 367092 - DNA, 120 bp, Artificial Sequence
  ENSG00000141404_55 (sequence is synthesized)
tcgaccccagctgtattttcttttctgggaaaatatcagcccctggaattaggccagacacaggaatctgtagatacaaagctcgctagcagagcaagactcagaacgcaagagtggcac

SEQ ID NO: 367093 - DNA, 120 bp, Artificial Sequence
  ENSG00000141404_56 (sequence is synthesized)
attaccacaaatgtttttgtgtgtaaaacctgtttttaaaatatctcagaaaatctacttacttgggtggagaactgcagtggcttcccattccttatctaacgtaaccctcagacttcc

SEQ ID NO: 367094 - DNA, 120 bp, Artificial Sequence
  ENSG00000141404_57 (sequence is synthesized)
aaaagagactgaaggggagactggacagactgcaaagggctggaggccacattaaaagtgtggactttaccccatgggaaggaggaagcgcaggagtcatgagaaatgatggttcaggca

SEQ ID NO: 367095 - DNA, 120 bp, Artificial Sequence
  ENSG00000141404_58 (sequence is synthesized)
gagattagagcataaagcagggaggtggggaaagccaagaggaacacgctcttggatgacgagtcaccatgaatcactgatcacctgggacatggttcagctgcacatgctgacgcagtg

SEQ ID NO: 367096 - DNA, 120 bp, Artificial Sequence
  ENSG00000141404_59 (sequence is synthesized)
ggtctgccagtgacgccgatatgctgcgagtctgggaaccccttttaaggagcagggaatcttaactctggctgtgcattacaactgcctggtactttgtcaccaccttcctggaaagaa

SEQ ID NO: 367097 - DNA, 120 bp, Artificial Sequence
  ENSG00000141404_60 (sequence is synthesized)
gaacaaacaagatatgctggcagaaaaagtcttggcagggaaatcaaaaattgaagactatttcccagaatatgcaaattatactgttcctgaagacggagcaccaaggagaagcaccac

SEQ ID NO: 367098 - DNA, 120 bp, Artificial Sequence
  ENSG00000141404_61 (sequence is synthesized)
gccaggcccagtgactgctcttcacccagcagcatgcgtcatctccatctgtgccctgcctctcccaagagactcacccatccctgagcatctgcagcacctgctggaagcctgggacca

SEQ ID NO: 367099 - DNA, 120 bp, Artificial Sequence
  ENSG00000141404_62 (sequence is synthesized)
ccatcaactccaacgtcaactctcacttagcaattaaaaggaactaacagttggtccatgtgacggcatgggttaaactcacagtaattgtgctgacagaaagaatcaaagcaaaaacta

SEQ ID NO: 367100 - DNA, 120 bp, Artificial Sequence
  ENSG00000141424_0 (sequence is synthesized)
agtgattgtcttccagcttcgcgaaggctaggggcgcggctgccgggtggctgcgcggcgctgcccccggaccgaggggcagccaacccaatgaaaccaccgcgtgttcgcgcctggtag

SEQ ID NO: 367101 - DNA, 120 bp, Artificial Sequence
  ENSG00000141424_1 (sequence is synthesized)
agatttctcgaagacaccagtgggcccgttccgagccctctggaccgcccgtgtggaaccaaacctgcgcgcgtggccgggccgtgggacaacgaggccgcggagacgaaggcgcaatgg

SEQ ID NO: 367102 - DNA, 120 bp, Artificial Sequence
  ENSG00000141424_2 (sequence is synthesized)
cgaggaagttatctgtaatcttgatcctgacctttgccctctctgtcacaaatccccttcatgaactaaaagcagctgctttcccccagaccactgagaaaattagtccgaattgggaat

SEQ ID NO: 367103 - DNA, 120 bp, Artificial Sequence
  ENSG00000141424_3 (sequence is synthesized)
ctggcattaatgttgacttggcaatttccacacggcaatatcatctacaacagcttttctaccgctatggagaaaataattctttgtcagttgaagggttcagaaaattacttcaaaata

SEQ ID NO: 367104 - DNA, 120 bp, Artificial Sequence
  ENSG00000141424_4 (sequence is synthesized)
taggcatagataagattaaaagaatccatatacaccatgaccacgaccatcactcagaccacgagcatcactcagaccatgagcgtcactcagaccatgagcatcactcagagcacgagc

SEQ ID NO: 367105 - DNA, 120 bp, Artificial Sequence
  ENSG00000141424_5 (sequence is synthesized)
atcactctgaccatgatcatcactctcaccataatcatgctgcttctggtaaaaataagcgaaaagctctttgcccagaccatgactcagatagttcaggtaaagatcctagaaacagcc

SEQ ID NO: 367106 - DNA, 120 bp, Artificial Sequence
  ENSG00000141424_6 (sequence is synthesized)
aggggaaaggagctcaccgaccagaacatgccagtggtagaaggaatgtcaaggacagtgttagtgctagtgaagtgacctcaactgtgtacaacactgtctctgaaggaactcactttc

SEQ ID NO: 367107 - DNA, 120 bp, Artificial Sequence
  ENSG00000141424_7 (sequence is synthesized)
tagagacaatagagactccaagacctggaaaactcttccccaaagatgtaagcagctccactccacccagtgtcacatcaaagagccgggtgagccggctggctggtaggaaaacaaatg

SEQ ID NO: 367108 - DNA, 120 bp, Artificial Sequence
  ENSG00000141424_8 (sequence is synthesized)
aatctgtgagtgagccccgaaaaggctttatgtattccagaaacacaaatgaaaatcctcaggagtgtttcaatgcatcaaagctactgacatctcatggcatgggcatccaggttccgc

SEQ ID NO: 367109 - DNA, 120 bp, Artificial Sequence
  ENSG00000141424_9 (sequence is synthesized)
tgaatgcaacagagttcaactatctctgtccagccatcatcaaccaaattgatgctagatcttgtctgattcatacaagtgaaaagaaggctgaaatccctccaaagacctattcattac

SEQ ID NO: 367110 - DNA, 120 bp, Artificial Sequence
  ENSG00000141424_10 (sequence is synthesized)
aaatagcctgggttggtggttttatagccatttccatcatcagtttcctgtctctgctgggggttatcttagtgcctctcatgaatcgggtgtttttcaaatttctcctgagtttccttg

SEQ ID NO: 367111 - DNA, 120 bp, Artificial Sequence
  ENSG00000141424_11 (sequence is synthesized)
tggcactggccgttgggactttgagtggtgatgcttttttacaccttcttccacattctcatgcaagtcaccaccatagtcatagccatgaagaaccagcaatggaaatgaaaagaggac

SEQ ID NO: 367112 - DNA, 120 bp, Artificial Sequence
  ENSG00000141424_12 (sequence is synthesized)
cacttttcagtcatctgtcttctcaaaacatagaagaaagtgcctattttgattccacgtggaagggtctaacagctctaggaggcctgtatttcatgtttcttgttgaacatgtcctca

SEQ ID NO: 367113 - DNA, 120 bp, Artificial Sequence
  ENSG00000141424_13 (sequence is synthesized)
cattgatcaaacaatttaaagataagaagaaaaagaatcagaagaaacctgaaaatgatgatgatgtggagattaagaagcagttgtccaagtatgaatctcaactttcaacaaatgagg

SEQ ID NO: 367114 - DNA, 120 bp, Artificial Sequence
  ENSG00000141424_14 (sequence is synthesized)
gtcttggaagaagaagaggtcatgatagctcatgctcatccacaggaagtctacaatgaatatgtacccagagggtgcaagaataaatgccattcacatttccacgatacactcggccag

SEQ ID NO: 367115 - DNA, 120 bp, Artificial Sequence
  ENSG00000141424_15 (sequence is synthesized)
tcagacgatctcattcaccaccatcatgactaccatcatattctccatcatcaccaccaccaaaaccaccatcctcacagtcacagccagcgctactctcgggaggagctgaaagatgcc

SEQ ID NO: 367116 - DNA, 120 bp, Artificial Sequence
  ENSG00000141424_16 (sequence is synthesized)
ggcgtcgccactctggcctggatggtgataatgggtgatggcctgcacaatttcagcgatggcctagcaattggtgctgcttttactgaaggcttatcaagtggtttaagtacttctgtt

SEQ ID NO: 367117 - DNA, 120 bp, Artificial Sequence
  ENSG00000141424_17 (sequence is synthesized)
gctgtgttctgtcatgagttgcctcatgaattaggtgactttgctgttctactaaaggctggcatgaccgttaagcaggctgtcctttataatgcattgtcagccatgctggcgtatctt

SEQ ID NO: 367118 - DNA, 120 bp, Artificial Sequence
  ENSG00000141424_18 (sequence is synthesized)
ggaatggcaacaggaattttcattggtcattatgctgaaaatgtttctatgtggatatttgcacttactgctggcttattcatgtatgttgctctggttgatatggtacctgaaatgctg

SEQ ID NO: 367119 - DNA, 120 bp, Artificial Sequence
  ENSG00000141424_19 (sequence is synthesized)
cacaatgatgctagtgaccatggatgtagccgctgggggtatttctttttacagaatgctgggatgcttttgggttttggaattatgttacttatttccatatttgaacataaaatcgtg

SEQ ID NO: 367120 - DNA, 120 bp, Artificial Sequence
  ENSG00000141424_20 (sequence is synthesized)
tttcgtataaatttctagttaaggtttaaatgctagagtagcttaaaaagttgtcatagtttcagtaggtcatagggagatgagtttgtatgctgtactatgcagcgtttaaagttagtg

SEQ ID NO: 367121 - DNA, 120 bp, Artificial Sequence
  ENSG00000141424_21 (sequence is synthesized)
ggttttgtgatttttgtattgaatattgctgtctgttacaaagtcagttaaaggtacgttttaatatttaagttattctatcttggagataaaatctgtatgtgcaattcaccggtatta

SEQ ID NO: 367122 - DNA, 120 bp, Artificial Sequence
  ENSG00000141424_22 (sequence is synthesized)
ccagtttattatgtaaacaagagatttggcatgacatgttctgtatgtttcagggaaaaatgtctttaatgctttttcaagaactaacacagttattcctatactggattttaggtctct

SEQ ID NO: 367123 - DNA, 120 bp, Artificial Sequence
  ENSG00000141424_23 (sequence is synthesized)
gaagaactgctggtgtttaggaataagaatgtgcatgaagcctaaaataccaagaaagcttatactgaatttaagcaaagaaataaaggagaaaagagaagaatctgagaattggggagg

SEQ ID NO: 367124 - DNA, 120 bp, Artificial Sequence
  ENSG00000141424_24 (sequence is synthesized)
catagattcttataaaaatcacaaaatttgttgtaaattagaggggagaaatttagaattaagtataaaaaggcagaattagtatagagtacattcattaaacatttttgtcaggattat

SEQ ID NO: 367125 - DNA, 120 bp, Artificial Sequence
  ENSG00000141424_25 (sequence is synthesized)
ttcccgtaaaaacgtagtgagcacttttcatatactaatttagttgtacatttaactttgtataatacagaaatctaaatatatttaatgaattcaagcaatatatcacttgaccaagaa

SEQ ID NO: 367126 - DNA, 120 bp, Artificial Sequence
  ENSG00000141424_26 (sequence is synthesized)
attggaatttcaaaatgttcgtgcgggtatataccagatgagtacagtgagtagttttatgtatcaccagactgggttattgccaagttatatatcaccaaaagctgtatgactggatgt

SEQ ID NO: 367127 - DNA, 120 bp, Artificial Sequence
  ENSG00000141424_27 (sequence is synthesized)
tctggttacctggtttacaaaattatcagagtagtaaaactttgatatatatgaggatattaaaactacactaagtatcatttgattcgattcagaaagtactttgatatctctcagtgc

SEQ ID NO: 367128 - DNA, 120 bp, Artificial Sequence
  ENSG00000141424_28 (sequence is synthesized)
ttcagtgctatcattgtgagcaattgtcttttatatacggtactgtagccatactaggcctgtctgtggcattctctagatgtttcttttttacacaataaattccttatatcagcttga

SEQ ID NO: 367129 - DNA, 120 bp, Artificial Sequence
  ENSG00000141425_0 (sequence is synthesized)
ttgctggtttgcggccggtcttggatgaagcggcggccgtggtgagagcgtggggaagggtggggtgagggggcgaggccgcagctagggcggcgaaactctcctcccctcggccccacc

SEQ ID NO: 367130 - DNA, 120 bp, Artificial Sequence
  ENSG00000141425_1 (sequence is synthesized)
gcgtgggacggcgtgaacgtggtgtcggagggatgtcagccttctctgaggcggcgctggagaagaagctgtcggagttgagcaactcgcagcagagcgtgcagaccttgtccctgtggc

SEQ ID NO: 367131 - DNA, 120 bp, Artificial Sequence
  ENSG00000141425_2 (sequence is synthesized)
tcattcaccaccgtaaacactcgcgtcccatcgtcaccgtgtgggagcgggagctgcggaaagccaaaccaaacaggaagcttacttttctctacctagccaatgatgtcatacagaaca

SEQ ID NO: 367132 - DNA, 120 bp, Artificial Sequence
  ENSG00000141425_3 (sequence is synthesized)
gcaagaggaaggggccagagtttacaaaagattttgcaccagttatagtggaggcttttaagcatgtttcaagtgaaactgatgaaagttgtaagaagcaccttggaagagtgttatcta

SEQ ID NO: 367133 - DNA, 120 bp, Artificial Sequence
  ENSG00000141425_4 (sequence is synthesized)
tttgggaagaaaggtctgtttatgaaaatgatgtattagaacaacttaaacaagctctgtatggtgataagaagcctaggaagcgaacttatgaacagataaaggtggatgaaaatgaaa

SEQ ID NO: 367134 - DNA, 120 bp, Artificial Sequence
  ENSG00000141425_5 (sequence is synthesized)
actgttcctctctgggatctccaagtgaaccaccacagactctagatctcgttagagcattacaagatctggaaaatgcagcctcaggtgatgcagcagttcatcagaggatagcttctt

SEQ ID NO: 367135 - DNA, 120 bp, Artificial Sequence
  ENSG00000141425_6 (sequence is synthesized)
tacctgttgaagtccaagaagtatctctattagataaaataacagataaagaatctggagaaaggctttccaaaatggtagaggatgcgtgtatgttgctggcagattacaatggcagat

SEQ ID NO: 367136 - DNA, 120 bp, Artificial Sequence
  ENSG00000141425_7 (sequence is synthesized)
tttcttcgttgtcaaaaggaagcccttgcagagaaagagcataaattggaagagtacaagcgcaagctagccagagtttccctggtgcgcaaagaactcaggtcccggatccagagcctg

SEQ ID NO: 367137 - DNA, 120 bp, Artificial Sequence
  ENSG00000141425_8 (sequence is synthesized)
ccagacttatctcgattgcccaatgtcactggcagccacatgcacctgccctttgcgggagacatctacagtgaagattgatggaccagcctctttccaggtcccaggactttgcaagag

SEQ ID NO: 367138 - DNA, 120 bp, Artificial Sequence
  ENSG00000141425_9 (sequence is synthesized)
atggagacagtgcagagagctgtctggagtcacaatctgaacagattctcgggcgctccttctctccttccatcactacagtaagtaaaaggaccatagaggggaaccaggaatctgaga

SEQ ID NO: 367139 - DNA, 120 bp, Artificial Sequence
  ENSG00000141425_10 (sequence is synthesized)
atcagctgtgctcaatagccaacctccctgtccagatgcagctattttggtatctcctatcacatgcactctgaatcagggtttttctataagaaatctttcagaatcagcaaaagtggg

SEQ ID NO: 367140 - DNA, 120 bp, Artificial Sequence
  ENSG00000141425_11 (sequence is synthesized)
gatgacccaggcatcttgatttgcaaaatcacaaaactaagttgtcagttatcactgtagatgagcaactcatctttttaaagtatagttactgaactgattctgagaaatctttagaga

SEQ ID NO: 367141 - DNA, 120 bp, Artificial Sequence
  ENSG00000141425_12 (sequence is synthesized)
gaaaaaactcaacagtacaaattaactaattgggaaagttagaatgtcctttctgaatttttcattaaaaaaattacattatctgaaataacataaagctactaaactgctttgtattct

SEQ ID NO: 367142 - DNA, 120 bp, Artificial Sequence
  ENSG00000141425_13 (sequence is synthesized)
attaagaaatagctcctaaggatgtagtcttgtttcatagttgttgcactatatcaaaacttaaaatgtaagcccagttcttctctgtatagaaaggaaacattgtgttacttaatgaat

SEQ ID NO: 367143 - DNA, 120 bp, Artificial Sequence
  ENSG00000141425_14 (sequence is synthesized)
tatttatacagagcatttgttgccaactgttgttccagccatccacacaggagtctgttctgaggtggcaatagcacatgggaagatgaactttccctgtttgtttacccgttcttcttt

SEQ ID NO: 367144 - DNA, 120 bp, Artificial Sequence
  ENSG00000141425_15 (sequence is synthesized)
caaaaggaacaacgagtaatttataaaattgtttaaaatgttggtttgtttactattttattggtaaattaacatgacttaatttgaacaaagtgatgatttgtgtgtattaataagctc

SEQ ID NO: 367145 - DNA, 120 bp, Artificial Sequence
  ENSG00000141425_16 (sequence is synthesized)
acaaatagtgattattttcaaaagatctttttgtaaattttttttttgatccaaggccttgtgagaaatctcttgtttgtatttcttcaggtattttcaattgtttttctttattttctt

SEQ ID NO: 367146 - DNA, 120 bp, Artificial Sequence
  ENSG00000141425_17 (sequence is synthesized)
cagcatttaatcactgtatactatgtaattcctgaaggggaagaactaattaggagttgattgagactttattatggtatagttaggacttgattgtagaagggactaaatgttccaaca

SEQ ID NO: 367147 - DNA, 120 bp, Artificial Sequence
  ENSG00000141425_18 (sequence is synthesized)
taatctttacccttctccccaaacaaaatatcaattctgtgtctctacatgcctttgattccttagaggtcggtaatttaacataaaacagggatgtcactttgaggggcagatgaaagt

SEQ ID NO: 367148 - DNA, 120 bp, Artificial Sequence
  ENSG00000141425_19 (sequence is synthesized)
ctagagaactgttccttaatagcattgtaaaagttccattccaactgccagtgtagattttaaaagtgttaaatagtgactcccttgattaaactgtttgtaattatttgagtagattaa

SEQ ID NO: 367149 - DNA, 120 bp, Artificial Sequence
  ENSG00000141425_20 (sequence is synthesized)
taatgaaaatactttggaaataatatacattttgacattctaccaagaggacaactttggttctggaactggtttctatttgtcaaatcagtttccttttaacataattaatccctttaa

SEQ ID NO: 367150 - DNA, 120 bp, Artificial Sequence
  ENSG00000141425_21 (sequence is synthesized)
caaaaagccgtctatgggattaaaagacacgtgaaatgatacttttattattcccttgctcatataactttaaaaataatacttttagctctaatagctcaagaacacaatattcgttaa

SEQ ID NO: 367151 - DNA, 120 bp, Artificial Sequence
  ENSG00000141425_22 (sequence is synthesized)
tgttcagtaaagtagcctgagacattttcaatgtttccttaaggtttttgaatgactgtatatttggcagttaagcagtgccacactacagggtagatatggtaaattttatatttgtat

SEQ ID NO: 367152 - DNA, 120 bp, Artificial Sequence
  ENSG00000141425_23 (sequence is synthesized)
gtggatttgtactcaataatgacttaggataaacatttattttcattcattgctttacatactagacatttttcttctctttgtaagtagattcaaattagatagtcaataaaacatctt

SEQ ID NO: 367153 - DNA, 120 bp, Artificial Sequence
  ENSG00000141425_24 (sequence is synthesized)
gaaaatcccacaagccaattatgtctctctagtctgaatggcttcattgtttctttctcagtattagaaattatagttacaatgaattgcatatgaagaaggcagacatttatttttaat

SEQ ID NO: 367154 - DNA, 120 bp, Artificial Sequence
  ENSG00000141425_25 (sequence is synthesized)
agccaagtagttctgcaaatagttcttttaacaatttgacctctctccaaaacagagacacatataagtagtgctcatccatgcactactaataatacatggcttattccaaagttttta

SEQ ID NO: 367155 - DNA, 120 bp, Artificial Sequence
  ENSG00000141425_26 (sequence is synthesized)
gtcaacttttgggacttggggtgcattttctcacagaaagaatagtagttaggttccctaacactaccgctgatagctcacctgggaactgaatccacctaaccatgaatgtccttcact

SEQ ID NO: 367156 - DNA, 120 bp, Artificial Sequence
  ENSG00000141425_27 (sequence is synthesized)
tgtaacgtggttcacaggttactaatcatagatcctgaccagcatttgtaacactgctctaactaggacacagcatgcagcagccacactcacaccctgggatgtctgtgtacctctgtc

SEQ ID NO: 367157 - DNA, 120 bp, Artificial Sequence
  ENSG00000141425_28 (sequence is synthesized)
cctaggtgtaggaaatggaagaaaaagattcagccaagtggggaggtgacagatgcacaattatgaaacctggttgtacatgttatgaaagtatactaagtaagttagtttttattatta

SEQ ID NO: 367158 - DNA, 120 bp, Artificial Sequence
  ENSG00000141425_29 (sequence is synthesized)
atgtgaaagcaaaaacttgtatgttaacttattttcaatatcttgaccttatttatgatctgctaaagtggtgatttatccattcaaaatatatatttttttccatttaaaactaattta

SEQ ID NO: 367159 - DNA, 120 bp, Artificial Sequence
  ENSG00000141425_30 (sequence is synthesized)
taaactatgtactcctgggaagatttgaaatcttttagaagtttgttgaaatattttcaccatttcagacagacttctgacttagatactgattttaatgccagtatctgctctaaatat

SEQ ID NO: 367160 - DNA, 120 bp, Artificial Sequence
  ENSG00000141425_31 (sequence is synthesized)
ttatgataaaaatgcattatttttttaaagagcttgatgagatttgtgataagtgatagtactcaaaaacctgaatcccacccctcgaccaatcctccacaaacttcagttgttggttaa

SEQ ID NO: 367161 - DNA, 120 bp, Artificial Sequence
  ENSG00000141425_32 (sequence is synthesized)
cgtattaactgaacacagacaatacagtctgatttagaagtcatcttttcagccgtgtgataattaacatggtaagccttagcagcaaacattcttcctaaaaggaagacttcattttct

SEQ ID NO: 367162 - DNA, 120 bp, Artificial Sequence
  ENSG00000141425_33 (sequence is synthesized)
caagaaatgggattagttgggggtattataataccaaattgtaaatcatgagcgttttctccactgtgcacctgaggcagatcatgcatctttgagtgcagtttggtctgacccctcaag

SEQ ID NO: 367163 - DNA, 120 bp, Artificial Sequence
  ENSG00000141425_34 (sequence is synthesized)
tcttctttagtgcttatttatttaattctctttttgttaggaattttaaaatattttaatctatgtgcacattttgcattttttaacatagacctttttaagcagtagcccaggtaagct

SEQ ID NO: 367164 - DNA, 120 bp, Artificial Sequence
  ENSG00000141425_35 (sequence is synthesized)
tctccttgtattaatggtttttcttctacttgaaccaaattaatcttgcaagtaaacttagaaatttggaattagcaaaattgattgcatttaaaaattattcttgtgaaattccatgca

SEQ ID NO: 367165 - DNA, 120 bp, Artificial Sequence
  ENSG00000141425_36 (sequence is synthesized)
actataatttatcttaccagtttaaccctaatgtatcacagaaataataggaaaatagcaggtggcagtcacttgtagtaggatttatttagtttctgttttgagaagatgtagtctttt

SEQ ID NO: 367166 - DNA, 120 bp, Artificial Sequence
  ENSG00000141425_37 (sequence is synthesized)
aggtataccattaagtctttaaattactcccttaattccacccgccaattctaatgcttacatgttccagccccactcccggctcacactcttaggcagaaattcattgctcctgtaaat

SEQ ID NO: 367167 - DNA, 120 bp, Artificial Sequence
  ENSG00000141425_38 (sequence is synthesized)
taagtaataattaataccgctaatgagaaatctgggagtacaggaggtgattttaaaaaatgctcgtatttcctttgattagagtagcaattgttagggatacatgagccagatttggtt

SEQ ID NO: 367168 - DNA, 120 bp, Artificial Sequence
  ENSG00000141425_39 (sequence is synthesized)
ttatgtaaaaaaaatctttcagttgatgagttcttgtttaaattgtattgctgtggcaatttcttattgtaataatatgtaggagaatttctaatttgaatccctttatttacagaaagc

SEQ ID NO: 367169 - DNA, 120 bp, Artificial Sequence
  ENSG00000141425_40 (sequence is synthesized)
gtctctaattgtgccaaaaatggtgcttagattagattgccattgctacccatgggagctgctacttaattattcccacctcaaattcccagctctcaagttagcactactcctttgcaa

SEQ ID NO: 367170 - DNA, 120 bp, Artificial Sequence
  ENSG00000141425_41 (sequence is synthesized)
tttactccttctctgctcgtataaataccctcagatgatgatagttggtggccactatacctttgaagaggttgcccacttctacatggaaaggaaaagatggtttttttttttaaaaga

SEQ ID NO: 367171 - DNA, 120 bp, Artificial Sequence
  ENSG00000141425_42 (sequence is synthesized)
tgaatttgataattaacttgccactatttcaccttgtgatgaaacctcaattttaaacatagtgttaattgttttattgtccacagaattaagggtaagtaatgtcatacaatttttgtc

SEQ ID NO: 367172 - DNA, 120 bp, Artificial Sequence
  ENSG00000141425_43 (sequence is synthesized)
tttagtcttttagtatggtttctttaacttctattgagcttctgttgcagatattggacatgggcgtatcttctaacgatgtcgtcaccattagtatattcttcctgctaaaaataaata

SEQ ID NO: 367173 - DNA, 120 bp, Artificial Sequence
  ENSG00000141425_44 (sequence is synthesized)
tcaaaccctgaagcctgtattgtctcatgtttttgaaaattgaagagaagactgtaactttattctgctttatactttctcacttatgatgatggtcatttgtcactgtttacaaaaaca

SEQ ID NO: 367174 - DNA, 120 bp, Artificial Sequence
  ENSG00000141425_45 (sequence is synthesized)
gaatttatatttgaagtgtaactgtagaaaatagatcagatgccactccccacaacccccttttcccccagtgccttccagccacatttcatagttgacagtcatagattatgaggctga

SEQ ID NO: 367175 - DNA, 120 bp, Artificial Sequence
  ENSG00000141425_46 (sequence is synthesized)
tgataataataatgttaacattcatgtgtcaggtactattctaggcacttcacataagcaactcatttaatcttacacagcaggatgtattatccacatttgatagatacagaactgagg

SEQ ID NO: 367176 - DNA, 120 bp, Artificial Sequence
  ENSG00000141425_47 (sequence is synthesized)
cacaggaagattaagtaacttgcctaaggtcacaaagagctagtgagttgtttggaacgcagagaatctgcctccagagccagtgcacttcatcaaaaagacacattgcttcctgttttt

SEQ ID NO: 367177 - DNA, 120 bp, Artificial Sequence
  ENSG00000141425_48 (sequence is synthesized)
acttaaatctaagattaaagcaaatgctaaagtcctattttttccaactttttctgctccctctcttctcagaggtaatcactgtcttgaaataaagccttctaggaactttttttgttg

SEQ ID NO: 367178 - DNA, 120 bp, Artificial Sequence
  ENSG00000141425_49 (sequence is synthesized)
ttcttctgcataactggattttatattataaagaagaaatcacctcaattatgttcagctgttttttaacaagtaaatactctttacaagtacagaaataaacttgaaagttattccaca

SEQ ID NO: 367179 - DNA, 120 bp, Artificial Sequence
  ENSG00000141425_50 (sequence is synthesized)
tttttaaagcatatgtgtaatttcctagtgtttctgaatctagtattagaaattaagaaagaaagatgaaaaagatgggctggagaatggaaactagtaaaaataaaatttaattgtttt

SEQ ID NO: 367180 - DNA, 120 bp, Artificial Sequence
  ENSG00000141425_51 (sequence is synthesized)
tctttggaataactttatagacattatgagttgtgaaatcaccagcaaagagttgcgcttccctcctaattatagcttgtatgaaaacagtggaagtaaaatattttaatgataaaataa

SEQ ID NO: 367181 - DNA, 120 bp, Artificial Sequence
  ENSG00000141425_52 (sequence is synthesized)
tttcagtactggttaagcaatatatattagtcatcagattatggaattttgaaatattttaatcttattaacaagccataggatacttgaagatatcatatttgaacatattctagaact

SEQ ID NO: 367182 - DNA, 120 bp, Artificial Sequence
  ENSG00000141425_53 (sequence is synthesized)
acatttctcttgggctttaattacagcatttagaaatgaaatctgggagactcttctgtgttgtagtagatgatttgtaaccctctttccataatatccaatttaatactaaaaaaactt

SEQ ID NO: 367183 - DNA, 120 bp, Artificial Sequence
  ENSG00000141425_54 (sequence is synthesized)
ctagtgtacaatgataatgtaatgaatatatcatacataaaacttgtattctctaggttgatgttatagcctaccttctctttcaccactgatgtatttgccatataaatcctcattacc

SEQ ID NO: 367184 - DNA, 120 bp, Artificial Sequence
  ENSG00000141425_55 (sequence is synthesized)
tcattttagtactcaaataattattattactctgtctccaccactggagtaagctctcttcaaggtctagggccttgtcctgtttatattttcaacacctaacatagtatagcctccttt

SEQ ID NO: 367185 - DNA, 120 bp, Artificial Sequence
  ENSG00000141425_56 (sequence is synthesized)
tttcttaacatatgaaagaaattgattgtcttcaaaagcagtttatattaggagctttgtactagtaaatagcccatagggatgaaagaatatgaaattaaagtcttttgcacttgttta

SEQ ID NO: 367186 - DNA, 120 bp, Artificial Sequence
  ENSG00000141425_57 (sequence is synthesized)
cccatcgtcaccgtgtgggagcgggagctgcggaaagagtggaggtgcaacaaatgagaaattccaattggagattttgtcaaacaggaatttactccaaaccaaacaggaagcttactt

SEQ ID NO: 367187 - DNA, 120 bp, Artificial Sequence
  ENSG00000141425_58 (sequence is synthesized)
gagtttctgtttggagggataaacttcaaggcctttgtgaagaccaaaatggcatacaattttcctgataaatgcagtaaagtgtaaccaaaaatagtggaggtgcaacaaatgagaaat

SEQ ID NO: 367188 - DNA, 120 bp, Artificial Sequence
  ENSG00000141425_59 (sequence is synthesized)
agatgcagaaatctgcattttaaacaagctactcagatgattctaatgcaggtgtttttcatgcaccatctcactgagacctcaacaaagtttttatgagagaagcaagcaggggatgcc

SEQ ID NO: 367189 - DNA, 120 bp, Artificial Sequence
  ENSG00000141425_60 (sequence is synthesized)
ttcaaagttctgatggagctgaacaaagaagccagcttacagcttactggccaaggtttaacaacttgagcatcaaaatggaaaatacaaattgtaattaattaaaacaagtagactgtg

SEQ ID NO: 367190 - DNA, 120 bp, Artificial Sequence
  ENSG00000141425_61 (sequence is synthesized)
tcaaaaggaagcccttgcagagaaagagcataaattggaaatattggacatgggcgtatcttctaacgatgtcgtcaccattagtatattcttcctgctaaaaataaatatcaaaccctg

SEQ ID NO: 367191 - DNA, 120 bp, Artificial Sequence
  ENSG00000141425_62 (sequence is synthesized)
agctggcttcacctctcaatggcactcgccgcgggactttgcggcacctagcttgggcactctagcagcccagagggagctcgtcccccatcaagcccagcaggcacccacccggaaccg

SEQ ID NO: 367192 - DNA, 120 bp, Artificial Sequence
  ENSG00000141425_63 (sequence is synthesized)
ccagcaggcacccacccggaaccgcgcgtagcccaggctcctgccggcgcctctctctctacacctccctgagagcagatggagccggctccggcctctgccagccgcagagaggggctc

SEQ ID NO: 367193 - DNA, 120 bp, Artificial Sequence
  ENSG00000141425_64 (sequence is synthesized)
gttgtcacctctcaataggagaaagctatctaatatttaatgtatttaagaaaatggtgcaaatgtggtaaaattgtaagatgtgcttttagcaagaaagagtttctgtttggagggata

SEQ ID NO: 367194 - DNA, 120 bp, Artificial Sequence
  ENSG00000141425_65 (sequence is synthesized)
aacttcaaggcctttgtgaagaccaaaatggcatacaattttcctgataaatgcagtaaagtgtaaccaaaaatttaacctcttaaatttgaattgaggttgggtgtggtggctcacatc

SEQ ID NO: 367195 - DNA, 120 bp, Artificial Sequence
  ENSG00000141425_66 (sequence is synthesized)
ccatctcactgagacctcaacaaagtttttatgagttctgtctctggcgtggtctaatgtagcagcaccattactgttcctgagtaaaagcatcccgatcttgggtttttggtatcagtg

SEQ ID NO: 367196 - DNA, 120 bp, Artificial Sequence
  ENSG00000141428_0 (sequence is synthesized)
ctattttctcacctggttcccgcggcgagccagcggcagcggcggcggcgatgagacagaagcactaccttgaggctgcagcgcggggactgcacgacagctgcccgggccaagcccgct

SEQ ID NO: 367197 - DNA, 120 bp, Artificial Sequence
  ENSG00000141428_1 (sequence is synthesized)
acctcctctgggcctacacttcgtcgcacgatgataagagcacttttgaagaaacgtgtccatactgtttccagctgttggttctggataactctcgagtgcgtctcaaacccaaagcca

SEQ ID NO: 367198 - DNA, 120 bp, Artificial Sequence
  ENSG00000141428_2 (sequence is synthesized)
ggttgacacccaaaatacagaaacttcttaatcgagaagcgagaaactatacactcagttttaaagaagcaaaaatggtgaaaaagttcaaagactccaaaagtgtattgttgatcactt

SEQ ID NO: 367199 - DNA, 120 bp, Artificial Sequence
  ENSG00000141428_3 (sequence is synthesized)
gtaaaacatgcaacagaacagtgaaacatcatggtaaaagtagaagctttgtgtcaacattgaagagcaatcctgccactcctacaagtaaactcagcctgaagacaccagagagaagga

SEQ ID NO: 367200 - DNA, 120 bp, Artificial Sequence
  ENSG00000141428_4 (sequence is synthesized)
tggctcgaaaggcaagagcccagcatcggttttcagaacacctacatctggacagtcagtatctacttgctcctcaaagaacaccagcaaaacaaagaaacacttctctcaactaaaaat

SEQ ID NO: 367201 - DNA, 120 bp, Artificial Sequence
  ENSG00000141428_5 (sequence is synthesized)
gttacttagtcagaatgaatcccaaaagattccaaaggtggacttcagaaatttcttatcttctctgaagggtggacttttaaaataagaaatgcctgatgtcaattctgaaactaaagt

SEQ ID NO: 367202 - DNA, 120 bp, Artificial Sequence
  ENSG00000141428_6 (sequence is synthesized)
tggtaaaacaactttttaaactcttattcattttttgaatacatggaaactagatctgaatgcaaacttttcttggcatccttcagtgtttatggggaaaatacctcattagtgtgaata

SEQ ID NO: 367203 - DNA, 120 bp, Artificial Sequence
  ENSG00000141428_7 (sequence is synthesized)
cctgaaacctgcctacctcataggacagctgtgaggatcaaaaaatatatgaaagttccttgtagatacatatctatagatatatatgtgtatgtatataaagatagatatatacattga

SEQ ID NO: 367204 - DNA, 120 bp, Artificial Sequence
  ENSG00000141428_8 (sequence is synthesized)
ctcctctgggcctacacttcgtcgcacggtaagaagaacgcctgtctcttgtgctttgggctcttgtcgccccgctttcctctgttccgcacaacgctcaaataaggccgatggactcac

SEQ ID NO: 367205 - DNA, 120 bp, Artificial Sequence
  ENSG00000141428_9 (sequence is synthesized)
tgacacattgatcagtcttgaaatagtttcctcccttggcttctaggtcattacgtagttcacctcttcatttattacttctcgatttgctttgctggttcctcctaatctccccaagct

SEQ ID NO: 367206 - DNA, 120 bp, Artificial Sequence
  ENSG00000141428_10 (sequence is synthesized)
ttaagtattgtcgtggcccagtactcagcccttggacctcttttctaggcacactcgcttccttggtgacagtttttcatccaatctcatggcttttaaataccatatactgaggactta

SEQ ID NO: 367207 - DNA, 120 bp, Artificial Sequence
  ENSG00000141429_0 (sequence is synthesized)
ggtatgaacgtgatttctgatgaaactggattggaataattttcatgatctttgtatatttatatatatatatttttaaattttgcatttgacttaaagtgccatgagaaaatttgcata

SEQ ID NO: 367208 - DNA, 120 bp, Artificial Sequence
  ENSG00000141429_1 (sequence is synthesized)
ctgcaaggtggtcctagccacctccttgatttgggtactcttggatatgttcctgctgctttacttcagtgaatgcaacaaatgtgatgaaaaaaaggagagaggacttcctgctggaga

SEQ ID NO: 367209 - DNA, 120 bp, Artificial Sequence
  ENSG00000141429_2 (sequence is synthesized)
tgttctagagccagtacaaaagcctcatgaaggtcctggagaaatggggaaaccagtcgtcattcctaaagaggatcaagaaaagatgaaagagatgtttaaaatcaatcagttcaattt

SEQ ID NO: 367210 - DNA, 120 bp, Artificial Sequence
  ENSG00000141429_3 (sequence is synthesized)
aatggcaagtgagatgattgcactcaacagatctttaccagatgttaggttagaagggtgtaaaacaaaggtgtatccagataatcttcctacaacaagtgtggtgattgttttccacaa

SEQ ID NO: 367211 - DNA, 120 bp, Artificial Sequence
  ENSG00000141429_4 (sequence is synthesized)
tgaggcttggagcacacttctgcgaactgtccatagtgtcattaatcgctcaccaagacacatgatagaagaaattgttctagtagatgatgccagtgaaagagactttttgaaaaggcc

SEQ ID NO: 367212 - DNA, 120 bp, Artificial Sequence
  ENSG00000141429_5 (sequence is synthesized)
tttagagagttatgtgaaaaaactaaaagtaccagttcatgtaattcgaatggaacaacgttctggattgatcagagctagattaaaaggagctgctgtgtctaaaggccaagtgatcac

SEQ ID NO: 367213 - DNA, 120 bp, Artificial Sequence
  ENSG00000141429_6 (sequence is synthesized)
cttcctggatgcccattgtgagtgtacagtgggatggctggagcctctcttggccaggatcaaacatgacaggagaacagtggtgtgtcccatcatcgatgtgatcagtgatgatacttt

SEQ ID NO: 367214 - DNA, 120 bp, Artificial Sequence
  ENSG00000141429_7 (sequence is synthesized)
tgagtacatggcaggctctgatatgacctatggtgggttcaactggaagctcaattttcgctggtatcctgttccccaaagagaaatggacagaaggaaaggtgatcggactcttcctgt

SEQ ID NO: 367215 - DNA, 120 bp, Artificial Sequence
  ENSG00000141429_8 (sequence is synthesized)
caggacacctaccatggcaggaggccttttttcaatagacagagattactttcaggaaattggaacatatgatgctggaatggatatttggggaggagaaaacctagaaatttcctttag

SEQ ID NO: 367216 - DNA, 120 bp, Artificial Sequence
  ENSG00000141429_9 (sequence is synthesized)
gatttggcagtgtggaggaactttggaaattgttacatgctcacatgttggacatgtgtttcggaaagctacaccttacacgtttccaggaggcacagggcagattatcaataaaaataa

SEQ ID NO: 367217 - DNA, 120 bp, Artificial Sequence
  ENSG00000141429_10 (sequence is synthesized)
cagacgacttgcagaagtgtggatggatgaattcaagaatttcttctatataatttctccaggtgttacaaaggtagattatggagatatatcgtcaagagttggtctaagacacaaact

SEQ ID NO: 367218 - DNA, 120 bp, Artificial Sequence
  ENSG00000141429_11 (sequence is synthesized)
acaatgcaaacctttttcctggtacctagagaatatatatcctgattctcaaattccacgtcactatttctcattgggagagatacgaaatgtggaaacgaatcagtgtctagataacat

SEQ ID NO: 367219 - DNA, 120 bp, Artificial Sequence
  ENSG00000141429_12 (sequence is synthesized)
ggctagaaaagagaatgaaaaagttggaatttttaattgccatggtatggggggtaatcaggttttctcttatactgccaacaaagaaattagaacagatgacctttgcttggatgtttc

SEQ ID NO: 367220 - DNA, 120 bp, Artificial Sequence
  ENSG00000141429_13 (sequence is synthesized)
caaacttaatggcccagttacaatgctcaaatgccaccacctaaaaggcaaccaactctgggagtatgacccagtgaaattaaccctgcagcatgtgaacagtaatcagtgcctggataa

SEQ ID NO: 367221 - DNA, 120 bp, Artificial Sequence
  ENSG00000141429_14 (sequence is synthesized)
agccacagaagaggatagccaggtgcccagcattagagactgcaatggaagtcggtcccagcagtggcttcttcgaaacgtcaccctgccagaaatattctgagaccaaatttacaaaaa

SEQ ID NO: 367222 - DNA, 120 bp, Artificial Sequence
  ENSG00000141429_15 (sequence is synthesized)
aacgaaaaaaataaggattgactgggctacctcagcatacatttctgccacattcttaagtagcaaaaaaggaaaagtgctttcctcctctgcaggatgtaaggtttatcagccattaaa

SEQ ID NO: 367223 - DNA, 120 bp, Artificial Sequence
  ENSG00000141429_16 (sequence is synthesized)
cttctctagcttttcactagctgtgaaccagccttcctgtccatggacgtgaaactgcatagtaatgagactgtgcacactgatgtttacaagattgaaagagtctttctccgaaaatca

SEQ ID NO: 367224 - DNA, 120 bp, Artificial Sequence
  ENSG00000141429_17 (sequence is synthesized)
tggtaaagaatactgagacaatgaaaaaaaatcaacaaaatatgctttctggagaactgtaccttttatggtttgcttgcacatcagtagtttctgctgaacgtgctgtcataatgaaga

SEQ ID NO: 367225 - DNA, 120 bp, Artificial Sequence
  ENSG00000141429_18 (sequence is synthesized)
gatttccaagattttttttcctgattagaactggtagccagtatattaaatattgatataaaaataaaagaactggaaccagattcagaatcatgaaaacaacatttttacaacaacaaa

SEQ ID NO: 367226 - DNA, 120 bp, Artificial Sequence
  ENSG00000141429_19 (sequence is synthesized)
aaaactatattaaacagggtttaaaggaaattaaaacagaactatgagaagtacaatttgttatagtatagtatcaaatttctatatagattttatacctcagtggggaaaaataactga

SEQ ID NO: 367227 - DNA, 120 bp, Artificial Sequence
  ENSG00000141429_20 (sequence is synthesized)
ttccaatgacattcattttgttttcatctgtgatagtcatggatgcttttattttccttggggtgctgaaattgagctgaaaaaaaaaggctctttgaatatagttttaatttctctcta

SEQ ID NO: 367228 - DNA, 120 bp, Artificial Sequence
  ENSG00000141429_21 (sequence is synthesized)
cagttttttttgtttggtttgtgggctgttggaattgtaatttttaattgccttctaaaaaatggaaatttaacaatgtctgatctcagctgaacaaattagatgtttcagttgctcttg

SEQ ID NO: 367229 - DNA, 120 bp, Artificial Sequence
  ENSG00000141429_22 (sequence is synthesized)
ggtcaactggcttacagatttacatgtgcacacacacacaaatttcttatcacattttcgacttcttcacttgacctaactgattatgcgaaatacccaagattcatgctactgtaccac

SEQ ID NO: 367230 - DNA, 120 bp, Artificial Sequence
  ENSG00000141429_23 (sequence is synthesized)
agatttgttttcacagcaataaatcttcagttctttgtttatgattccacttaacaaaaggcctgcagaagtgatttattatttgggtatttggagataatacatttgatggttttttgg

SEQ ID NO: 367231 - DNA, 120 bp, Artificial Sequence
  ENSG00000141429_24 (sequence is synthesized)
aaaacctttttcactccatactcagatatgcttcattgtcaaatgcatatttagattagattattgaattgtaatgtttatctgctgctttttttaaataaaatttgactgaaaatgttt

SEQ ID NO: 367232 - DNA, 120 bp, Artificial Sequence
  ENSG00000141429_25 (sequence is synthesized)
aattggcattttttaatgacttagccaaagaagtgcagctattattccatattaataggcttgcatttcttttcctaaatcttatttaggctaaatcagttttatttttctctgattttt

SEQ ID NO: 367233 - DNA, 120 bp, Artificial Sequence
  ENSG00000141429_26 (sequence is synthesized)
tttaataccacagaatcacctgagtgtcaattgaaagttgtcaattaaaaggtaaccttttaatctcgtaggaggaatctcattaagacatttttcctgatatgtagagcagtctgttgg

SEQ ID NO: 367234 - DNA, 120 bp, Artificial Sequence
  ENSG00000141429_27 (sequence is synthesized)
caaaaatgcatatattttctttcatatttgtaaaattatatttaatggaattcttttctttgattatcaaggactttcactgcaggcagtgctatttcttgtgcctaagaatgtttccaa

SEQ ID NO: 367235 - DNA, 120 bp, Artificial Sequence
  ENSG00000141429_28 (sequence is synthesized)
aagtcgcatcgctaatgatatttgccaagttgagtgtacacaaagtttctcatatcctgttcaagttaatcaacatcaagcacatggggatgctttagggtgagtctatagtacaaaatg

SEQ ID NO: 367236 - DNA, 120 bp, Artificial Sequence
  ENSG00000141429_29 (sequence is synthesized)
cataaaccatgtccccaggaaatttgaaaggaagcaggtgctgaatggaatttttttccttttccatgagctgtgttaattctatctccagtaggcctaatgcttgaataagcaagatgt

SEQ ID NO: 367237 - DNA, 120 bp, Artificial Sequence
  ENSG00000141429_30 (sequence is synthesized)
ctaatcaataaattattttcatgctcagaatttcaggtttttgtactccagcatagcttggtcttatttcttactgtatgaaagcttaacagcaatgtgatttaaggttttgttttaaat

SEQ ID NO: 367238 - DNA, 120 bp, Artificial Sequence
  ENSG00000141429_31 (sequence is synthesized)
gggagatgtaagtgatttaattcatgggtacttttagaacctgatagataatcccattgcctttatttttctaattaaagaattcctaaatactttgaaaatacaaaatattcctgaata

SEQ ID NO: 367239 - DNA, 120 bp, Artificial Sequence
  ENSG00000141429_32 (sequence is synthesized)
ggcccgagagtagcgcgctggccgcgggaccggccgcgaccgccgcggccggcccggaggacgcctgccgccgccgccgccgcgcgcctagcgagggtatgaacgtgatttctgatgaaa

SEQ ID NO: 367240 - DNA, 120 bp, Artificial Sequence
  ENSG00000141429_33 (sequence is synthesized)
ccgggttggggcggccccgcgctcggcccgggagccgatccgctgtgagggctcctccatctcctcccaccccgtgacctgctcgacgcgcaacagcccgagttgtctttaacttgctgc

SEQ ID NO: 367241 - DNA, 120 bp, Artificial Sequence
  ENSG00000141429_34 (sequence is synthesized)
gcacctctcggcctggcccggccctgcccgtagccatgtgggacatgtggatttgggatatgaattcatttgaaaaaccactttggggtatgaacgtgatttctgatgaaactggattgg

SEQ ID NO: 367242 - DNA, 120 bp, Artificial Sequence
  ENSG00000141429_35 (sequence is synthesized)
gatgattgcactcaacagatctttaccagatgttaggttagaagggtaagtacttactgtggtcctgatagtatgtgaatgaaaagtatattctgaattttcagtaaattgcacttgagt

SEQ ID NO: 367243 - DNA, 120 bp, Artificial Sequence
  ENSG00000141429_36 (sequence is synthesized)
tacttaccccacttagaaaataattaaatgctgatagaaataatatctcaagcttctactgattattagcactatgtatttcaggcattggaagataattatttatcttaatggattaga

SEQ ID NO: 367244 - DNA, 120 bp, Artificial Sequence
  ENSG00000141429_37 (sequence is synthesized)
aggggattttaaactttattattaccaaaatactcacatactcaactttttacaaaaagatttaagttgtatgtaacttgaaacagtgaaatacacagtcgtaagtatacagctcactga

SEQ ID NO: 367245 - DNA, 120 bp, Artificial Sequence
  ENSG00000141429_38 (sequence is synthesized)
attttttgctatgtatacacctgtgtaaccatcagccaaatcaagacatagaatgatcccatcacccctgaaagtctccttatgttttttgtagtcattacttacatccccagaggcagc

SEQ ID NO: 367246 - DNA, 120 bp, Artificial Sequence
  ENSG00000141429_39 (sequence is synthesized)
cgttatattgacctctctaaacatagattagttttgtctctttttgaactttttatgatggatccacaccattttttgtgcctttaagattcatattgttgcatgtatcagaattttatt

SEQ ID NO: 367247 - DNA, 120 bp, Artificial Sequence
  ENSG00000141429_40 (sequence is synthesized)
cttttctactgcaaatagtgatttgtaatatgaatatgccattgtttatttatacattgatagacctttggattatttctactttttgacccctataaataaagctattgtgacattctt

SEQ ID NO: 367248 - DNA, 120 bp, Artificial Sequence
  ENSG00000141429_41 (sequence is synthesized)
gcagaagtgtggatggatgaattcaagaatttcttctatataatttctccaggttagcgttgttttgcattagaaatacaaggcttttaggttgatatttagtgtatatgtgtgtgtatc

SEQ ID NO: 367249 - DNA, 80 bp, Artificial Sequence
  ENSG00000141431_0 (sequence is synthesized)
agagtgtattgttgtgagcggggccgagcggagcatccccggagctgtcaccgcagcggccgcggcggtggcgcagcgcg

SEQ ID NO: 367250 - DNA, 120 bp, Artificial Sequence
  ENSG00000141431_1 (sequence is synthesized)
ccgccgccgccgccgccaccgcccgcgcgcctccccccgcggagcgagtgcgggtcaccgggtcactgggtcattgtctccgcgcccgaaccccgagcaccccgtggaatcccccacgtc

SEQ ID NO: 367251 - DNA, 120 bp, Artificial Sequence
  ENSG00000141431_2 (sequence is synthesized)
gcaccccgtggaatcccccacgtcatcatcagaaccatcaatgagatgcaaacatgaaagacaagaggaagaagaaggaccgcacctgggccgaggctgcccgcctggcactagaaaaac

SEQ ID NO: 367252 - DNA, 120 bp, Artificial Sequence
  ENSG00000141431_3 (sequence is synthesized)
accccaactcaccaatgacagcaaagcagatattggaagtcattcagaaagaagggttaaaagaaacaagtggaacctctccattagcctgtctgaatgcaatgcttcacactaacactc

SEQ ID NO: 367253 - DNA, 120 bp, Artificial Sequence
  ENSG00000141431_4 (sequence is synthesized)
gaataggggatggaacattcttcaaaatccctggaaagtcaggcctctatgctctcaaaaaagaggagtcgtcatgcccagcagatggcacgttggatttagtctgtgaatctgaattgg

SEQ ID NO: 367254 - DNA, 120 bp, Artificial Sequence
  ENSG00000141431_5 (sequence is synthesized)
atggtacagatatggccgaggcaaatgcccatggagaagaaaatggagtttgttcgaagcaggtaactgatgaagcatcttccactcgagattcaagccttactaacacagcagtgcaaa

SEQ ID NO: 367255 - DNA, 120 bp, Artificial Sequence
  ENSG00000141431_6 (sequence is synthesized)
gcaagttagtgtcttccttccagcagcacaccaaaaaggctcttaaacaggctttgaggcagcagcagaaaagaagaaatggagtctcaatgatggtaaacaagactgttcctcgtgttg

SEQ ID NO: 367256 - DNA, 120 bp, Artificial Sequence
  ENSG00000141431_7 (sequence is synthesized)
ttttgacaccattaaaggtgtctgatgagcagtcggattcgccttcaggatctgaatctaaaaatggtgaagcagacagttcagataaagaaatgaaacatgggcaaaaatctcccactg

SEQ ID NO: 367257 - DNA, 120 bp, Artificial Sequence
  ENSG00000141431_8 (sequence is synthesized)
gaaaacaaacaagtcagcacttaaaacgattaaaaaagtctggtttagggcacttgaaatggaccaaagctgaggacattgacatagaaaccccaggatctattcttgtcaacactaact

SEQ ID NO: 367258 - DNA, 120 bp, Artificial Sequence
  ENSG00000141431_9 (sequence is synthesized)
tgagggcattaataaataaacatacgtttgcttccttacctcagcattttcaacaatacctcctgcttttgctcccagaagtggataggcagatgggaagtgatggaattttacgcctca

SEQ ID NO: 367259 - DNA, 120 bp, Artificial Sequence
  ENSG00000141431_10 (sequence is synthesized)
gtacttcagctctaaataatgaattctttgcatatgcagcacaagggtggaaacagcgactggcagaaggagagtttaccccagaaatgcagttgcggataaggcaagaaattgagaagg

SEQ ID NO: 367260 - DNA, 120 bp, Artificial Sequence
  ENSG00000141431_11 (sequence is synthesized)
aaaagaaaacagaaccttggaaagaaaaattctttgagaggttttatggagaaaagctgggcatgtcaagagaggaatctgtgaagctcactactggaccaaacaacgctggagctcaaa

SEQ ID NO: 367261 - DNA, 120 bp, Artificial Sequence
  ENSG00000141431_12 (sequence is synthesized)
gtagttcttcatgtgggacttctggccttccagtttctgcacagacagccttggcagaacaacagccaaaaagcatgaaaagcccagcttctccagagcctggtttctgtgctactcttt

SEQ ID NO: 367262 - DNA, 120 bp, Artificial Sequence
  ENSG00000141431_13 (sequence is synthesized)
gccctatggtagaaattccacctaaagatataatggcagaattggagtcagaggatatcttgatccctgaagaatctgtaattcaggaggaaattgcagaagaggtagagactagtatct

SEQ ID NO: 367263 - DNA, 120 bp, Artificial Sequence
  ENSG00000141431_14 (sequence is synthesized)
gtgaatgccaggatgaaaatcataagacaatacctgaattttctgaggaggctgaaagtctaaccaattctcatgaagaaccccaaatagcacctcctgaagataacttggaatcctgtg

SEQ ID NO: 367264 - DNA, 120 bp, Artificial Sequence
  ENSG00000141431_15 (sequence is synthesized)
ttatgatgaatgatgttttagaaactttgcctcatattgaagttaagatagaagggaagtcagaatcaccccaggaagaaatgacagttgttatcgatcagttagaagtctgtgactctc

SEQ ID NO: 367265 - DNA, 120 bp, Artificial Sequence
  ENSG00000141431_16 (sequence is synthesized)
ttattccttccacttcatctatgactcatgtcagtgacacagaacataaggagtcagaaactgcagtagagaccagtacccccaaaataaaaacagggtcatcttctctagaaggccagt

SEQ ID NO: 367266 - DNA, 120 bp, Artificial Sequence
  ENSG00000141431_17 (sequence is synthesized)
ttccaaatgaaggaattgctatagatatggagctacagagtgaccctgaagaacagctttcagaaaatgcctgcatctctgaaacgtccttttcttctgagagcccagagggagcctgta

SEQ ID NO: 367267 - DNA, 120 bp, Artificial Sequence
  ENSG00000141431_18 (sequence is synthesized)
ccagcctgccttctccaggaggggaaacacagtccacatcagaagaatcatgtactccagcctcccttgagacaacattttgttctgaggtatctagcactgaaaatacagacaaataca

SEQ ID NO: 367268 - DNA, 120 bp, Artificial Sequence
  ENSG00000141431_19 (sequence is synthesized)
accagagaaattccactgatgaaaactttcatgcatctttgatgtcagaaatatctccaatatccacttcacctgaaatatcagaagcatctcttatgtccaacttaccattaacatctg

SEQ ID NO: 367269 - DNA, 120 bp, Artificial Sequence
  ENSG00000141431_20 (sequence is synthesized)
aagcatcaccagtatccaacttacctttaacatcagaaacctcaccgatgtctgacttacctttaacatcagaaacttcttcagtgtcttccatgcttctcacctctgagaccacttttg

SEQ ID NO: 367270 - DNA, 120 bp, Artificial Sequence
  ENSG00000141431_21 (sequence is synthesized)
tatccagtttgccacttccttcagaaacatctccaatttccaactcttccataaatgagagaatggcacatcagcaaagaaagtcaccttctgtatctgaagagccactctccccgcaga

SEQ ID NO: 367271 - DNA, 120 bp, Artificial Sequence
  ENSG00000141431_22 (sequence is synthesized)
aagatgagtcttccgccactgccaaacctctgggagagaaccttacctcccagcagaagaatctgtctaatactcccgaacccatcataatgagttcttcttccattgctcctgaagcat

SEQ ID NO: 367272 - DNA, 120 bp, Artificial Sequence
  ENSG00000141431_23 (sequence is synthesized)
ttccgtctgaagatttgcacaataagaccctgagtcagcaaacctgtaaatcacatgttgacactgagaagccctaccctgcttcaattccagaacttgcttctactgaaatgataaaag

SEQ ID NO: 367273 - DNA, 120 bp, Artificial Sequence
  ENSG00000141431_24 (sequence is synthesized)
ttaaaaatcatagcgtcctgcaaagaacagaaaaaaaagtgttaccttcaccattggaattatctgtcttttctgaagggacagataataagggaaatgagcttccatctgctaaattac

SEQ ID NO: 367274 - DNA, 120 bp, Artificial Sequence
  ENSG00000141431_25 (sequence is synthesized)
aggacaagcaatatatctcatcagtggataaggctccattttcagaaggctctagaaataaaacacataagcaagggagtacacagagtcggttagaaacctcacatacttccaagtcat

SEQ ID NO: 367275 - DNA, 120 bp, Artificial Sequence
  ENSG00000141431_26 (sequence is synthesized)
cagagccctccaagtcacctgatgggataagaaatgaaagtagagattcagagatatcaaagagaaaaactgcagagcaacacagctttggaatctgtaaggaaaagagagctaggatag

SEQ ID NO: 367276 - DNA, 120 bp, Artificial Sequence
  ENSG00000141431_27 (sequence is synthesized)
aagatgatcagtcaacccggaacatatcatctagcagcccacctgagaaagaacagcctcccagagaggaaccaagggttccccctctcaagattcagctttccaaaattgggccacctt

SEQ ID NO: 367277 - DNA, 120 bp, Artificial Sequence
  ENSG00000141431_28 (sequence is synthesized)
ttataatcaagagccaaccagtctccaaacctgagtctcgagcatccactagcacatctgtcagtggcgggaggaacacaggagccaggaccctcgcagatatcaaggcccgggcccaac

SEQ ID NO: 367278 - DNA, 120 bp, Artificial Sequence
  ENSG00000141431_29 (sequence is synthesized)
aagctcgggcccagcgagaggctgctgcagctgctgctgtggctgctgcagcgagcattgtctctggagccatgggaagtccaggagagggtggaaagacgagaactctggcacacatca

SEQ ID NO: 367279 - DNA, 120 bp, Artificial Sequence
  ENSG00000141431_30 (sequence is synthesized)
aagagcagacaaaggctaagctctttgcaaagcatcaagctcgagcccatctcttccagacctctaaagagacccggttgcctcctccgctcagctcaaaggaagggcctccaaacttag

SEQ ID NO: 367280 - DNA, 120 bp, Artificial Sequence
  ENSG00000141431_31 (sequence is synthesized)
aagtctcttctacccctgaaacaaaaatggaaggttcgactggtgtcattattgtcaatccaaactgtagatctcctagcaacaagtctgcccacctccgggagaccaccactgtactac

SEQ ID NO: 367281 - DNA, 120 bp, Artificial Sequence
  ENSG00000141431_32 (sequence is synthesized)
agcagtctcttaacccaagtaaacttccagaaactgccactgacttatctgtgcatagttctgatgaaaacatacctgtgtcacatttatctgagaaaattgtttcatctacctcttctg

SEQ ID NO: 367282 - DNA, 120 bp, Artificial Sequence
  ENSG00000141431_33 (sequence is synthesized)
aaaatagcagtgtgcccatgctttttaataaaaattctgtccctgtatctgtttgcagcactgctatatcgggagcaattaaagaacatccctttgtgagttctgttgataaatcctctg

SEQ ID NO: 367283 - DNA, 120 bp, Artificial Sequence
  ENSG00000141431_34 (sequence is synthesized)
tcctaatgtctgttgacagtgcaaacactacaatttctgcttgtaatataagcatgttaaaaaccatccagggaactgacactccatgcatagccattataccaaaatgtattgaaagca

SEQ ID NO: 367284 - DNA, 120 bp, Artificial Sequence
  ENSG00000141431_35 (sequence is synthesized)
ctcccatttcagccactacagagggctccagcatatcaagctccatggatgataagcagttactaatatcaagcagcagtgctagtaacttagtctccactcagtacacctctgtgccaa

SEQ ID NO: 367285 - DNA, 120 bp, Artificial Sequence
  ENSG00000141431_36 (sequence is synthesized)
ctccctccatcggaaacaatttgccaaacctctccactagctctgtcttgattcccccaatgggaattaacaacagatttccttctgagaagatagccatacctgggagtgaagaacagg

SEQ ID NO: 367286 - DNA, 120 bp, Artificial Sequence
  ENSG00000141431_37 (sequence is synthesized)
ccactgtatccatgggtaccactgtgagagcagccctcagctgcagtgattctgtagcggtcacagactctctggttgcacacccgaccgtcgcaatgtttactggaaacatgctgacaa

SEQ ID NO: 367287 - DNA, 120 bp, Artificial Sequence
  ENSG00000141431_38 (sequence is synthesized)
taaactcttatgatagtcctcccaagttaagtgctgaaagcttggacaaaaattcagggcctcgaaacagggcagataattctggaaaacctcagcaaccaccagggggctttgcaccag

SEQ ID NO: 367288 - DNA, 120 bp, Artificial Sequence
  ENSG00000141431_39 (sequence is synthesized)
cagccataaaccgatcaattccgtgtaaagtcatcgttgaccacagcaccacgctgacctccagtttgtctctgactgtctccgttgaaagctcagaagccagcttggacctgcagggca

SEQ ID NO: 367289 - DNA, 120 bp, Artificial Sequence
  ENSG00000141431_40 (sequence is synthesized)
gaccagtgaggacagaggcatccgtacagcccgtggcgtgtcctcaggtgtctgtgattagcaggcctgagccagttgccaacgaaggtatagatcacagttccactttcattgctgctt

SEQ ID NO: 367290 - DNA, 120 bp, Artificial Sequence
  ENSG00000141431_41 (sequence is synthesized)
cggcagcaaaacaagacagtaaaacattgccggccacctgcacaagtctccgagaattaccccttgttccagataaattaaatgagccgactgctcccagtcataactttgctgagcagg

SEQ ID NO: 367291 - DNA, 120 bp, Artificial Sequence
  ENSG00000141431_42 (sequence is synthesized)
cacgtggcccagctcctttcaaaagtgaagcagacacaacctgtagcaatcagtataacccaagtaaccggatttgctggaatgatgatgggatgaggagcacaggacagcctctggtta

SEQ ID NO: 367292 - DNA, 120 bp, Artificial Sequence
  ENSG00000141431_43 (sequence is synthesized)
ctcactcgggttcaagtaaacaaaaagaatatctagagcaaagctgtccaaaggctatcaaaactgaacatgccaactacttgaacgtgtcagaacttcatcccaggaatcttgtaacaa

SEQ ID NO: 367293 - DNA, 120 bp, Artificial Sequence
  ENSG00000141431_44 (sequence is synthesized)
atgttgctcttcctgtgaaatctgaacttcacgaagcagacaagggctttagaatggacactgaagacttccctggccctgagctgcctcctccggctgcagagggagcctctagtgtac

SEQ ID NO: 367294 - DNA, 120 bp, Artificial Sequence
  ENSG00000141431_45 (sequence is synthesized)
aacaaacacagaacatgaaagcttccacctcaagtcccatggaagaggctatttccttggctaccgatgccctgaagagagtccctggtgcagggagctcaggctgtcgtctgtcctctg

SEQ ID NO: 367295 - DNA, 120 bp, Artificial Sequence
  ENSG00000141431_46 (sequence is synthesized)
tggaggctaacaatccgctggtgacgcagttactacagggcaacctgcctttggaaaaagtgttgccacagcccagattgggagccaagcttgaaatcaacaggcttccattgcctcttc

SEQ ID NO: 367296 - DNA, 120 bp, Artificial Sequence
  ENSG00000141431_47 (sequence is synthesized)
aaactacctcagtgggtaaaacagcaccagagagaaacgttgaaattccgcccagctctccaaatccagatggtaagggctacttggcagggactctggcaccactccaaatgagaaagc

SEQ ID NO: 367297 - DNA, 120 bp, Artificial Sequence
  ENSG00000141431_48 (sequence is synthesized)
gagaaaaccaccccaaaaagagagtagctaggactgtaggagaacacactcaagttaaatgtgaaccaggaaaattgttggtggagccagatgttaaaggggtgccttgtgtcatcagtt

SEQ ID NO: 367298 - DNA, 120 bp, Artificial Sequence
  ENSG00000141431_49 (sequence is synthesized)
ccggcatcagtcagctaggacacagccagccatttaagcaagaatggctaaacaagcactccatgcagaacagaattgttcacagccctgaggtcaaacagcaaaagcggctgctcccct

SEQ ID NO: 367299 - DNA, 120 bp, Artificial Sequence
  ENSG00000141431_50 (sequence is synthesized)
cgtgtagcttccagcagaacctatttcatgttgacaagaatggcggcttccacactgacgctggtacctcacacagacagcagttttaccaaatgcctgtggctgccaggggccccattc

SEQ ID NO: 367300 - DNA, 120 bp, Artificial Sequence
  ENSG00000141431_51 (sequence is synthesized)
ctactgcagctctgttacaggcctcttccaagaccccagtggggtgtaatgcatttgccttcaacaggcatcttgaacagaagggattgggagaggttagtctttcctcagcacctcacc

SEQ ID NO: 367301 - DNA, 120 bp, Artificial Sequence
  ENSG00000141431_52 (sequence is synthesized)
agctaaggttagccaacatgttatcccccaatatgcccatgaaagaaggtgatgaggtgggaggcactgcacacacaatgccaaacaaagcactagtacatccgccgccgccaccgcctc

SEQ ID NO: 367302 - DNA, 120 bp, Artificial Sequence
  ENSG00000141431_53 (sequence is synthesized)
cccctccccctccacccttggctttgcccccgcctccccccccaccacctccgctacctccacctctccctaatgcagaagtcccatctgatcaaaaacaacctccagttaccatggaaa

SEQ ID NO: 367303 - DNA, 120 bp, Artificial Sequence
  ENSG00000141431_54 (sequence is synthesized)
ccactaagagacttagttggccacagtccacgggcatatgtagcaatataaaatcggaacctctttcttttgaggaaggtttaagcagcagctgtgaactgggcatgaaacaagtttcct

SEQ ID NO: 367304 - DNA, 120 bp, Artificial Sequence
  ENSG00000141431_55 (sequence is synthesized)
atgaccagaatgaaatgaaagaacagttaaaagcattcgcgctaaaaagtgcagatttctcttcctatttgctttctgagccacaaaagccttttacccaattagctgctcagaaaatgc

SEQ ID NO: 367305 - DNA, 120 bp, Artificial Sequence
  ENSG00000141431_56 (sequence is synthesized)
aggtgcagcaacaacagcagctctgtggaaattatccaacaatacactttggtagcacgagtttcaaaagggcagcatctgcaattgaaaagtccattgggattttgggaagtggctcca

SEQ ID NO: 367306 - DNA, 120 bp, Artificial Sequence
  ENSG00000141431_57 (sequence is synthesized)
atcctgccacaggcttgtctggtcagaacgctcagatgcccgttcagaactttgccgacagcagcaatgcagatgaattggaactgaaatgctcttgccggctgaaagccatgattgtgt

SEQ ID NO: 367307 - DNA, 120 bp, Artificial Sequence
  ENSG00000141431_58 (sequence is synthesized)
gcaaaggctgtggggccttctgccatgacgactgcataggtccttcaaaactttgtgtagcatgcctggttgtacgataagagctgagtgaaagatgcagtatcccttttccacacggaa

SEQ ID NO: 367308 - DNA, 120 bp, Artificial Sequence
  ENSG00000141431_59 (sequence is synthesized)
aagccaaatagcatcagcaacaacaaatagaataatgcagtggtttctatcatgctaatttattttgctttggagcaggtacctttcctctatggcattattttcttgcatttctcataa

SEQ ID NO: 367309 - DNA, 120 bp, Artificial Sequence
  ENSG00000141431_60 (sequence is synthesized)
aggggaggatgcatcccaactgaatggctcactggcatgtcttttatgtgttcagttgccattcctagctttggaaagtttctatctgtccatgtgtatacaagtcaatgccccattttt

SEQ ID NO: 367310 - DNA, 120 bp, Artificial Sequence
  ENSG00000141431_61 (sequence is synthesized)
gtttttcttttaaccgaggtgtagataggaaaaggacatttttaattacttaataaccggaaatgcagatgtgtaaggagaatgagaggaatgagttaaagtggttatgcatttttctat

SEQ ID NO: 367311 - DNA, 120 bp, Artificial Sequence
  ENSG00000141431_62 (sequence is synthesized)
agatgagccattacagcaaggaattttacagttgacttctctgaacctagctttaccacagtgattaaatcctatttagaaaggggaatctgatttaaatgtgtgattccttgtatttgc

SEQ ID NO: 367312 - DNA, 120 bp, Artificial Sequence
  ENSG00000141431_63 (sequence is synthesized)
tcctatcacaaaagatatattaaaggaggtatgccattaatgaaatccactgtcctgagtattatctttcctcctgttgtactttctcagagactatggcagaatatctggatcttcctt

SEQ ID NO: 367313 - DNA, 120 bp, Artificial Sequence
  ENSG00000141431_64 (sequence is synthesized)
ggattttgtacacatattgtagtgaaatgtgtcctacatctgaaattgcatgggactcatgcccagcaatctggttctaggcctttgacacctgataatatgagagcaattggccagcca

SEQ ID NO: 367314 - DNA, 120 bp, Artificial Sequence
  ENSG00000141431_65 (sequence is synthesized)
atagccataagcccagaggattttagagcttcatgtgtggcttttaagagcaggtttgaaaaaaaaaaaaaaaagaccctaaacttcaaagcaaggaaataagatgctgtatatgcacac

SEQ ID NO: 367315 - DNA, 120 bp, Artificial Sequence
  ENSG00000141431_66 (sequence is synthesized)
ataaatgcattgataatgtaaatatcctattcacgctaatgaattactagatattaaaagtggggggtggaaatcattgtagccctttattgatgacacccattcattctggcttcagac

SEQ ID NO: 367316 - DNA, 120 bp, Artificial Sequence
  ENSG00000141431_67 (sequence is synthesized)
cttgcagaggttggccatatctttttaaaagtgtcattgatgataaaagggactacccaaggctaaagcgtcaacatttttcagaacaattgcttttctcattatttacaacctatataa

SEQ ID NO: 367317 - DNA, 120 bp, Artificial Sequence
  ENSG00000141431_68 (sequence is synthesized)
ttcaactttgaaataacccttattttgaaaaaaactgttctaggtatggcatgttttgttttttccctcaggtatattcaatacattcttcatatttgggggaactgcttttgaaaaagg

SEQ ID NO: 367318 - DNA, 120 bp, Artificial Sequence
  ENSG00000141431_69 (sequence is synthesized)
gatactgcatcttaacagttatcttcagtgtgcatccagtaaagtctgcgtgttgagtatttgagctacattccatatattttggccaccctcataccagaggacagccgtagttcagga

SEQ ID NO: 367319 - DNA, 120 bp, Artificial Sequence
  ENSG00000141431_70 (sequence is synthesized)
ggctctgttttcaaaagcaagttcaaaagcacatgcacattgagggaagatgaaagaaaacaaaaaccaaccatgcccatttaacttcagattacagagcacaaaatgtggagtgccatt

SEQ ID NO: 367320 - DNA, 120 bp, Artificial Sequence
  ENSG00000141431_71 (sequence is synthesized)
aacccattgattgattgtggctgtagaatttaaaaagcaaacatggggggggtggggaatcatctgtatccagggtaagaatgaccaatattttcacatgggatcatcctaatcactgta

SEQ ID NO: 367321 - DNA, 120 bp, Artificial Sequence
  ENSG00000141431_72 (sequence is synthesized)
aactttttgacattcccgtaaaacacgtcttaaaagttgactggaatgagcagaaattacattcctgaaaacaagaacacttgtgatttttttataataaccaactatataatatgtttt

SEQ ID NO: 367322 - DNA, 120 bp, Artificial Sequence
  ENSG00000141431_73 (sequence is synthesized)
tttctccgtatttattgtgatgttgccaaatttctttctttaggtgatagagacatcatttcgaataacaaattgctgatagtgagaggtactttactttatcttagaaagaaagaaaag

SEQ ID NO: 367323 - DNA, 120 bp, Artificial Sequence
  ENSG00000141431_74 (sequence is synthesized)
gcctgctgctgtagccatgattttggtgcttcagtactgtcatttctgtttttcacagtaaaattggcaaaactaatgactgagaaagttagttagcaatgcacttaaccagccttaccc

SEQ ID NO: 367324 - DNA, 120 bp, Artificial Sequence
  ENSG00000141431_75 (sequence is synthesized)
gaggaaagcagcataagttccagtggatccttagttttctcttcactgcctgccaggttgtgttggggtggcatccttatcagtggtgtctttgtctgcctggctctgatatcatcctga

SEQ ID NO: 367325 - DNA, 120 bp, Artificial Sequence
  ENSG00000141431_76 (sequence is synthesized)
tttcgaagatcatgctgttagtctcacagcggggcacccctataatatagacacttgcatgccaactccttccaaattcattcactgctataccagtgtcagatactgtctacaccagca

SEQ ID NO: 367326 - DNA, 120 bp, Artificial Sequence
  ENSG00000141431_77 (sequence is synthesized)
aattgaaaaccatcacatcagtaactgacatggtgtcggaagaaactccagtctacagaacctttgcactcagtatgtgaggtacaattgaggctgatgagatactgagctcattatcag

SEQ ID NO: 367327 - DNA, 120 bp, Artificial Sequence
  ENSG00000141431_78 (sequence is synthesized)
ttccttcattgttgaatactgcctgcaagttgcttattgggaataagaaaaagtgtccttctgtatgttttgatttttcacataacaggcttggagaatcagttgttgatagtgcatgga

SEQ ID NO: 367328 - DNA, 120 bp, Artificial Sequence
  ENSG00000141431_79 (sequence is synthesized)
ttctatcatccaggtccgattagcataatttttctgcgccctttttttttttttttttgctccagttcaaattcctagtgttctcatatggtttatattactgaaaaattaatatcttta

SEQ ID NO: 367329 - DNA, 120 bp, Artificial Sequence
  ENSG00000141431_80 (sequence is synthesized)
agctaaaatataagggaaaggaagaagagaaatttagatgtaaaatgtgggtcagatattttataggtttccatttaatatatatatacacacaaaatccagtatattctgagtaggttc

SEQ ID NO: 367330 - DNA, 120 bp, Artificial Sequence
  ENSG00000141431_81 (sequence is synthesized)
ttagttttctgatttctacatgtgtctgctatgtgcaaatgtagtatattatttactacatggttattgtggtgtagtgtgcaaatgttagcatgtgcattatcctgattactggacaca

SEQ ID NO: 367331 - DNA, 120 bp, Artificial Sequence
  ENSG00000141431_82 (sequence is synthesized)
gttttattcttatcaggaatagaacttgcacatgtaccatacaatttttttttttttaatcacaaaggatgtatttccctaagtagcacttttggagcaggggaaggaagaaaactgcta

SEQ ID NO: 367332 - DNA, 120 bp, Artificial Sequence
  ENSG00000141431_83 (sequence is synthesized)
ttccctaatcctcctcctataagatatgcatatgcctgaggtgtataaagacatttaggttagttaatgggcatgttaataagagcattgtgatgcaaattcattttcaaaatgaaaata

SEQ ID NO: 367333 - DNA, 120 bp, Artificial Sequence
  ENSG00000141431_84 (sequence is synthesized)
attttttcttccccaaaatgagaatagtagaaattttggtgaactgagcaccatagttatataatatttccctgcgaaggtctagtttgaagaaaaaaaaaacttgaaaacaaacctatg

SEQ ID NO: 367334 - DNA, 120 bp, Artificial Sequence
  ENSG00000141431_85 (sequence is synthesized)
aggttgagcctggttgctataaagactttgggatggtatgtgtttctgggatgagctatatagaaagtttagttgactgctggaccttggatattcttactcggttcaaaatacacaaaa

SEQ ID NO: 367335 - DNA, 120 bp, Artificial Sequence
  ENSG00000141431_86 (sequence is synthesized)
acaagctggtacatatggtgctttataatgcagtcgagagtaagaatacatgttgctgtagccccatttcctttacaaacccccgcacaatttcaaaagtggaagttaccgtggcctctg

SEQ ID NO: 367336 - DNA, 120 bp, Artificial Sequence
  ENSG00000141431_87 (sequence is synthesized)
gtttcccagttcctccgtggtgtaatgaagtcccaggttttagaagctgaagccaagcctagggtagcatcgtctgtacggtggtgaggcccagcacagcggtagctgcctagtgggaat

SEQ ID NO: 367337 - DNA, 120 bp, Artificial Sequence
  ENSG00000141431_88 (sequence is synthesized)
gaccccctgagcatgcagagcccagagtcactgtccatctgcgttcccagagaacaattgtgaagagtcctagaacaggaactctgaatcagactgtcaggggcctatgtagccaaaatg

SEQ ID NO: 367338 - DNA, 120 bp, Artificial Sequence
  ENSG00000141431_89 (sequence is synthesized)
ttactaaatataaaattcctgtcgtcttcagtcttcatgctttgtcactgtaaaaagaacaaaaagcatttttactataatttaaaggagctgcttttttatagcacatactatttcgct

SEQ ID NO: 367339 - DNA, 120 bp, Artificial Sequence
  ENSG00000141431_90 (sequence is synthesized)
ttgtactatatttgatagttgcagaataatttagactgtagaaaaactttgttgtatttgtactgttcttgaatgtttcaaagaaagtgctttacttggttgccataattttcttgtact

SEQ ID NO: 367340 - DNA, 120 bp, Artificial Sequence
  ENSG00000141431_91 (sequence is synthesized)
gctgtattcccctccttcccctgcttcatggaaacctgatatgatacatattttcagtagttttttttttttaatgtgtgttcgtttgtacaattttttttttttggtcagtattctgaa

SEQ ID NO: 367341 - DNA, 120 bp, Artificial Sequence
  ENSG00000141431_92 (sequence is synthesized)
tgtttacatctgtttgacattagccatttaatgccttttttaaaggcggtattactcctacagtgtaacagcaaaatgtgaaatcaacccaaacataacatgcatgacaaacacagattg

SEQ ID NO: 367342 - DNA, 120 bp, Artificial Sequence
  ENSG00000141431_93 (sequence is synthesized)
ggggcgaaggccctgaacctacatagacattttatatcagcatacagaaaagtaaaatcctccttcagtcctctaccaaagaatatattattcccacaggaaaaactcagaaaaggtgtg

SEQ ID NO: 367343 - DNA, 120 bp, Artificial Sequence
  ENSG00000141431_94 (sequence is synthesized)
taaaatcctcagaagggggagcagttgattcagtaagactgcgacaatttaatactgttacgcttgctttgatacctgactaaatgtgactgagtgcaacaagcatttaagaaaattttt

SEQ ID NO: 367344 - DNA, 120 bp, Artificial Sequence
  ENSG00000141431_95 (sequence is synthesized)
agacagtgttttgtttagaattcagggatcatgcattctttaatggtgctgtttgttttttatttcttttctacaaagaaaacaagtgttgcctacaaaagtgactgctcacaataccat

SEQ ID NO: 367345 - DNA, 120 bp, Artificial Sequence
  ENSG00000141431_96 (sequence is synthesized)
aagttaaatgaaatgaaatgtttgtctcttcatgtttctctgtctttccctttctcaaagtaacaacttgggtttcaatattaagatattctggagaaaataaagaaattaaacatgaaa

SEQ ID NO: 367346 - DNA, 120 bp, Artificial Sequence
  ENSG00000141431_97 (sequence is synthesized)
ttcagaaagaagggttaaaagaaacaagaccccggcatggcttggagacagcgttggtgtgtatgaaggatcttcctccaatgaaggatttgggacaactttccatgatgattatattag

SEQ ID NO: 367347 - DNA, 120 bp, Artificial Sequence
  ENSG00000141431_98 (sequence is synthesized)
agcctcagctgctttcgtgttggtcatgaggtgatgctgaaccgaatgcttgaactagcaggagtggctgggattgcattggagtggttccgttcattccttccggaaatggaacctctc

SEQ ID NO: 367348 - DNA, 120 bp, Artificial Sequence
  ENSG00000141431_99 (sequence is synthesized)
accgcccgggacacttctccccgtacttcgctctcggggctctgctgtgccttctccacgggtgaatttccgagcgctcggcgcagctcgacttccctctctgccgctccggagaccttt

SEQ ID NO: 367349 - DNA, 120 bp, Artificial Sequence
  ENSG00000141431_100 (sequence is synthesized)
gtgtggcaattaccactccctcccggcccctccaccccccggaatttcatcaataactctgtgcacagtctgtgtagtaggatgtgatgtcatagagaaggggacagggctatccaaatt

SEQ ID NO: 367350 - DNA, 120 bp, Artificial Sequence
  ENSG00000141431_101 (sequence is synthesized)
ctctcaattgctgggaggagctgcccaggtgtgctgaggggcctgtactcaggaagagaaacagggaatcctccacagcactagaaaaacaccccaactcaccaatgacagcaaagcaga

SEQ ID NO: 367351 - DNA, 120 bp, Artificial Sequence
  ENSG00000141431_102 (sequence is synthesized)
gaagtcattcagaaagaagggttaaaagaaacaagatagaaaataactgacaaggatggaatggggtcaagtagagcaagttaagtggagataagaagacagaattctgttaaccttaaa

SEQ ID NO: 367352 - DNA, 120 bp, Artificial Sequence
  ENSG00000141431_103 (sequence is synthesized)
aaccttaacaggcagcaccaggtcttcatatgcttttaagtttaccttctgctatggaaaggatctttccttgaatgttcatattttcatcttgagaagtctggtttcagaccccggcat

SEQ ID NO: 367353 - DNA, 120 bp, Artificial Sequence
  ENSG00000141431_104 (sequence is synthesized)
agcgattatctccgggagccccgcgtccgggaccgcccgggacacttctccccgtacttcgctctcggggctctgctgtgccttctccacggagtaggatgtgatgtcatagagaagggg

SEQ ID NO: 367354 - DNA, 120 bp, Artificial Sequence
  ENSG00000141431_105 (sequence is synthesized)
aggaagagaaacagggaatcctccacagcactagaaaaacaccccaactcaccaatgacagcaaagcagatattggaagtcattcagaaagaagggttaaaagaaacaagtatcttcacc

SEQ ID NO: 367355 - DNA, 120 bp, Artificial Sequence
  ENSG00000141431_106 (sequence is synthesized)
agaagaggattttatctcaagaaactaccttcattacatatctataagaagcacctcctgacctgtgaaagttttatcatgagattgaaacagttcagtcacaactttgggttccacttc

SEQ ID NO: 367356 - DNA, 120 bp, Artificial Sequence
  ENSG00000141431_107 (sequence is synthesized)
gaattctagttctcttgctgtttctaccacatctgcagttagttccaccactgaagtgttgaagtggatcagaatccacttcttccatactcttgttaatgttgctattgtgaccaactc

SEQ ID NO: 367357 - DNA, 120 bp, Artificial Sequence
  ENSG00000141431_108 (sequence is synthesized)
gaatcatgaatgttctcaacggcatctagcagggtgaactcttctctgaagattttcaattcactttcctcagatccataagaggaattgctatctatggcttttacagccttaggaaat

SEQ ID NO: 367358 - DNA, 120 bp, Artificial Sequence
  ENSG00000141431_109 (sequence is synthesized)
atatgtcttaaataagaagacttgaaaatcaaaattattccttgatttatggactgcagaatagatgttatcttagcaggtatgaaagcaacattagtctctttgtacatctccctcatc

SEQ ID NO: 367359 - DNA, 120 bp, Artificial Sequence
  ENSG00000141431_110 (sequence is synthesized)
tcttgggtgactagatgcattgtcagtgaacagtagtattttgaaaggaatcttttttttttttcttttctgagcagtacgtcttaacagcttaaaatattcagtaaaccatgttgcaaa

SEQ ID NO: 367360 - DNA, 120 bp, Artificial Sequence
  ENSG00000141431_111 (sequence is synthesized)
acttccagcccgagccgccgcccgctcgccgggctcctgctctttgttattctgcgggagtgggctcgcccgggggcccctgtgtgtgtgcgtgcgcgcgcggaggggcgcagcgattat

SEQ ID NO: 367361 - DNA, 120 bp, Artificial Sequence
  ENSG00000141431_112 (sequence is synthesized)
ctctgtgcacagtctgtgtgaattgagggtggcttctggtgttttgtgtggcttcatcatttccttcctgcctctcatccacttcatgatgcactagaaaaacaccccaactcaccaatg

SEQ ID NO: 367362 - DNA, 120 bp, Artificial Sequence
  ENSG00000141431_113 (sequence is synthesized)
ggaagtcattcagaaagaagggttaaaagaaacaagttctggaagacagaaagcccagattaaggttggcagtgtccgtttctgaaatggaacctctccattagcctgtctgaatgcaat

SEQ ID NO: 367363 - DNA, 120 bp, Artificial Sequence
  ENSG00000141433_0 (sequence is synthesized)
agaacacgagcctcggcaaacgagtcccgcagctcctcctgctgctcccgctggttcctgcggcttctgctcagacaccaacgccagacggcgatgcctctcgggtggtgactccagcgc

SEQ ID NO: 367364 - DNA, 120 bp, Artificial Sequence
  ENSG00000141433_1 (sequence is synthesized)
aggaacttgaagaagcgctttgcccgccgtcctacctggcagctctcctggcagcgggaggagttgaaggaatgaccatgtgtagcggagcgaggctggccctgctggtctatgggataa

SEQ ID NO: 367365 - DNA, 120 bp, Artificial Sequence
  ENSG00000141433_2 (sequence is synthesized)
tcatgcacagcagcgtctacagctcacctgccgccgccggactccggttccccgggatcaggccagaggaagaggcgtacggcgaggacggaaacccgctgccagacttcgatggctcgg

SEQ ID NO: 367366 - DNA, 120 bp, Artificial Sequence
  ENSG00000141433_3 (sequence is synthesized)
agccgccgggcgcagggagccccgcctccgcgccgcgcgccgccgccgcctggtaccgcccggccgggagaagagatgtcgcccacgggatccttaacgaggcctaccgcaaagtgctgg

SEQ ID NO: 367367 - DNA, 120 bp, Artificial Sequence
  ENSG00000141433_4 (sequence is synthesized)
accagctgtccgccgggaagcacctgcagtcgctcgtggcccggggcgtgggtgggagcctcggcggcggcgcgggggacgacgcggagccgctctccaagcgccactcggacgggatct

SEQ ID NO: 367368 - DNA, 120 bp, Artificial Sequence
  ENSG00000141433_5 (sequence is synthesized)
tcacggacagctacagccgctaccggaaacaaatggctgtcaagaaatacttggcggccgtcctagggaagaggtataaacaaagggttaaaaacaaaggacgccgaatagcttatttgt

SEQ ID NO: 367369 - DNA, 120 bp, Artificial Sequence
  ENSG00000141433_6 (sequence is synthesized)
agcgatgggttaccagctaccctgtgtatacagccctgacgcaatgaaaagtcgttttccaaactgactcaacagtcatcgctcgtgtgttctatccaaacatgtatttatgtaatgaag

SEQ ID NO: 367370 - DNA, 120 bp, Artificial Sequence
  ENSG00000141433_7 (sequence is synthesized)
taatgaagtaaagccattaaatgaatattttgataataatattgtttttctttctacaaagcactagagaatgcacagatatactttgtggaccaattattgatatatattataaatata

SEQ ID NO: 367371 - DNA, 120 bp, Artificial Sequence
  ENSG00000141433_8 (sequence is synthesized)
atatatatatatatatatataaagtatagagagaagttcatacaaagcgtgcacaaggattgaaaattcgcccgagctgtttatgtttttataaaaataaatagaaaagtagacaatcat

SEQ ID NO: 367372 - DNA, 120 bp, Artificial Sequence
  ENSG00000141433_9 (sequence is synthesized)
gtagacaatcattgttttgaatattactcctatttttgtaaactggaattaaaaggatagtatttttatccatgacaggcctgaagatattactacttaccatttgctactgtacataaa

SEQ ID NO: 367373 - DNA, 120 bp, Artificial Sequence
  ENSG00000141433_10 (sequence is synthesized)
caatgatgccctgctccagggagattttgaggtaaagatatggagaattgctgaagggcattctttcccagtgagtctctggggcaggctgcttcaatcccagcctaactcaactgggct

SEQ ID NO: 367374 - DNA, 120 bp, Artificial Sequence
  ENSG00000141433_11 (sequence is synthesized)
ctgtccccctggttgggtggcaattccaatatttctgctttctttgattctccttttatgtgtagttgtctctcttcagactctcagcccagaagaaaattctcctgataaaacaacagc

SEQ ID NO: 367375 - DNA, 120 bp, Artificial Sequence
  ENSG00000141433_12 (sequence is synthesized)
tcgatccaaattgtgcttctccccagaattcacgcctctccctaggagaagagttgaggaactgtacagaaaagggcggcttcgttagaccgctctcttttctgtacttcctgagtggcc

SEQ ID NO: 367376 - DNA, 120 bp, Artificial Sequence
  ENSG00000141433_13 (sequence is synthesized)
aattagggcaattggaacaaagtgaaggacatagaggtatattggaagaggcagagcctgaggtggtaggaggaggaccctggaaatggactggtttgagattgccccaggtctgggaag

SEQ ID NO: 367377 - DNA, 120 bp, Artificial Sequence
  ENSG00000141433_14 (sequence is synthesized)
ctgagggcaaatccagtcccaatggtcctgactttgggcgctgggtattggaaatggatgcaaagtacaatgtgtttttctccagtgctgtccatgcttctcatcttgtgaaatggccag

SEQ ID NO: 367378 - DNA, 120 bp, Artificial Sequence
  ENSG00000141433_15 (sequence is synthesized)
gatcctctcctttgaaacctgctctgtaggagctacccttttcctttgtggttttatggagacctctccttcctaccctcctgcactgtttaagtactgtttaccatttttcattcactt

SEQ ID NO: 367379 - DNA, 120 bp, Artificial Sequence
  ENSG00000141433_16 (sequence is synthesized)
ctcttaaacttgtgaatgcttctcactttttttttttgtttgatgcaggcacttattgtaaattttagaaacccctctgtagccactagtaagtaattatgcactaaatatgaacccttt

SEQ ID NO: 367380 - DNA, 120 bp, Artificial Sequence
  ENSG00000141433_17 (sequence is synthesized)
gtttcttgtttattgagtttgtaggtaaaatgtatttttctacattattgcttattgcttagtaaaatttatttcataaaaccaacctttgtcatattagaatgtgtagtgttcacatgt

SEQ ID NO: 367381 - DNA, 120 bp, Artificial Sequence
  ENSG00000141433_18 (sequence is synthesized)
tgctcagttttgctaactgataaatcatttaatcctcttcttcatatgtatgagtactatcttatatctgtggtcaagagtgaggtaagcaagctccaacagaccctgagaacctacgct

SEQ ID NO: 367382 - DNA, 120 bp, Artificial Sequence
  ENSG00000141433_19 (sequence is synthesized)
tgtatcctttctttggctaaagaaagcatgtctgtttcctgtcaattctttgaacatacagagtaatctttataaacaaaagaaccttcacccagcaatcagatcgagcagcaacagaca

SEQ ID NO: 367383 - DNA, 120 bp, Artificial Sequence
  ENSG00000141433_20 (sequence is synthesized)
aaccagccagccaatctcccaaatttcaggcacaagtttatttatttatttttttatgttttgaaaaaagaagatgaagaagaagaaaaaaaaaagaacaaggaaagattaaacgttagc

SEQ ID NO: 367384 - DNA, 120 bp, Artificial Sequence
  ENSG00000141433_21 (sequence is synthesized)
ttgtaaagtttaaaggacctttccttttcctttacggatttgatcagtatgaagtcataaatcaaagaaaacagaattggatttgcattcccaggcgggatggatgctgccaggagatca

SEQ ID NO: 367385 - DNA, 120 bp, Artificial Sequence
  ENSG00000141433_22 (sequence is synthesized)
cattgcaaatagtgaaaacagaggcattcggtctatgcctgagtcctgtgtataggatcaatcttcctttaattccgcagtctcctcaggcaatgtgacacgggatgcagtttgcagctt

SEQ ID NO: 367386 - DNA, 120 bp, Artificial Sequence
  ENSG00000141433_23 (sequence is synthesized)
tagtgcctttcttcgccttttaaattgccacgaatcacagatggctatttagtggccctacaatgctgcaacacatcagcttgcattttagtcttaattatttgtttcttggataatggg

SEQ ID NO: 367387 - DNA, 120 bp, Artificial Sequence
  ENSG00000141433_24 (sequence is synthesized)
cagagttttctgtatttgtatcagctgttagtggtgaaatagggctctagttaaccttttatttatgaagtctaatttagtgttcccgtggctagttgcaagcattttacagtgatcacc

SEQ ID NO: 367388 - DNA, 120 bp, Artificial Sequence
  ENSG00000141433_25 (sequence is synthesized)
cagtttaatcttttgtatactttttagaaatgccaagagccttactaaactgaagcagatttatgatatagtgataatttaggtagatgttagtcttgaagctcttattttgtgtgcaac

SEQ ID NO: 367389 - DNA, 120 bp, Artificial Sequence
  ENSG00000141433_26 (sequence is synthesized)
tgattataaaaacaccttaaccaagtattattacacacatgatatctataactaggactttgataactgttatataaagtgtgtaaaatttgtatgaataaatttttgtaaacaatgcaa

SEQ ID NO: 367390 - DNA, 120 bp, Artificial Sequence
  ENSG00000141433_27 (sequence is synthesized)
attctttcgcttggcatcgcgtcaggggagttagctttccttcagccgggtctggctagttattgggcgccgggtagatgcatatatatatatttttttctaactatagcaagcaagaag

SEQ ID NO: 367391 - DNA, 120 bp, Artificial Sequence
  ENSG00000141433_28 (sequence is synthesized)
tggcagggcgcgcaccggctgtcgccaagtgctgttcaactcagggagccggggcttcgctccgtccctcccccggcttccagagctttttggggttggagggtgggaggccaggggcgt

SEQ ID NO: 367392 - DNA, 120 bp, Artificial Sequence
  ENSG00000141433_29 (sequence is synthesized)
ggacttttatcacctgtgaaaatccgcgcgagccccttactttggatcctcgccgagctggggaggaacttgcactgaccacaccttctgtccccggccaccccgcaggccagaggaaga

SEQ ID NO: 367393 - DNA, 120 bp, Artificial Sequence
  ENSG00000141433_30 (sequence is synthesized)
gcgtcaaggaacccacactccgcatctgccactcctagagccgggactagctcccgatcctagcagttgctctcgagatcatcccgggagttattggcgagttctgggcctctggaggtt

SEQ ID NO: 367394 - DNA, 120 bp, Artificial Sequence
  ENSG00000141433_31 (sequence is synthesized)
tccctgtcagcctccccggccgccgagggggcgcgcgcccaacaagggggtctctagcggccacctggggacagaaacagtgaccctgggcgcgcactttgcctccccgttagagatgtc

SEQ ID NO: 367395 - DNA, 120 bp, Artificial Sequence
  ENSG00000141434_0 (sequence is synthesized)
atagttagctactttcaactggaagctacaacatggatttatggaatctgtcttggtttctgttcttggatgctcttctcgtgatttctggcttggcaactccagaaaactttgatgtag

SEQ ID NO: 367396 - DNA, 120 bp, Artificial Sequence
  ENSG00000141434_1 (sequence is synthesized)
atggcggaatggaccaggacatatttgatatcaatgaaggtttgggactggatctttttgagggtgacatcagacttgatagggcacaaattagaaattccatcattggagaaaagtata

SEQ ID NO: 367397 - DNA, 120 bp, Artificial Sequence
  ENSG00000141434_2 (sequence is synthesized)
gatggcctcataccattccatatgttctagaagatagcttggaaatgaatgctaagggagttatcctcaatgcatttgaacgttatcgccttaaaacatgtattgactttaagccttggg

SEQ ID NO: 367398 - DNA, 120 bp, Artificial Sequence
  ENSG00000141434_3 (sequence is synthesized)
ctggagaaacaaactatatatcagtgttcaagggcagtggctgctggtcttcagtaggaaataggcgggttgggaagcaagaactttccatcggggcaaactgtgaccgaatagcaacag

SEQ ID NO: 367399 - DNA, 120 bp, Artificial Sequence
  ENSG00000141434_4 (sequence is synthesized)
ttcaacacgagttcctccacgctctgggattctggcatgagcagtcgcgttctgaccgggatgactatgtcaggataatgtgggacagaattctgtcaggcagagagcacaattttaaca

SEQ ID NO: 367400 - DNA, 120 bp, Artificial Sequence
  ENSG00000141434_5 (sequence is synthesized)
cctatagtgacgatatatcagattccctgaatgttccctatgattacacttcagtaatgcactacagtaaaactgcattccaaaatggaacagagccgacaattgtcacaagaatctcag

SEQ ID NO: 367401 - DNA, 120 bp, Artificial Sequence
  ENSG00000141434_6 (sequence is synthesized)
actttgaggatgtgatcggccaacgaatggatttcagtgactctgatctcctaaagttgaatcaactgtataactgctcctcttccttgagttttatggactcgtgcagttttgaactgg

SEQ ID NO: 367402 - DNA, 120 bp, Artificial Sequence
  ENSG00000141434_7 (sequence is synthesized)
aaaatgtgtgtggcatgatccaaagttcaggagataatgctgactggcaacgggtttcacaggttcccagggggccagagagtgatcactccaacatgggccagtgccaaggttctggtt

SEQ ID NO: 367403 - DNA, 120 bp, Artificial Sequence
  ENSG00000141434_8 (sequence is synthesized)
tcttcatgcatttcgatagcagctctgtaaatgtgggggccacagcagtgctggaaagtagaacgctgtaccctaaaagaggatttcagtgcctgcaattttacttatataacagtggca

SEQ ID NO: 367404 - DNA, 120 bp, Artificial Sequence
  ENSG00000141434_9 (sequence is synthesized)
aacatctatatcagggagtattctgcagacaatgtggatggcaatttaacccttgtggaagaaataaaagaaatacccactgggagctggcaactttatcatgtaacattgaaagtgacc

SEQ ID NO: 367405 - DNA, 120 bp, Artificial Sequence
  ENSG00000141434_10 (sequence is synthesized)
aagaagtttagagtggtgtttgaaggacgcaaaggctctggtgcatcactgggtggtctgtctattgatgacatcaatctttcggaaacacggtgccctcatcatatctggcatataagg

SEQ ID NO: 367406 - DNA, 120 bp, Artificial Sequence
  ENSG00000141434_11 (sequence is synthesized)
aatttcacacagttcattggcagcccaaatggaactctgtatagccctccattttactcttctaaaggttatgcctttcagatttacttaaatctagcccatgtgactaatgcagggata

SEQ ID NO: 367407 - DNA, 120 bp, Artificial Sequence
  ENSG00000141434_12 (sequence is synthesized)
tatttccacttgatctctggagccaatgatgatcaattacagtggccatgtccttggcaacaagccacaatgacacttttggatcaaaatcctgacattcgacagcgtatgtccaatcag

SEQ ID NO: 367408 - DNA, 120 bp, Artificial Sequence
  ENSG00000141434_13 (sequence is synthesized)
cggagtataactacagacccatttatgaccaccgataatggaaactatttctgggacaggccttctaaagtgggaacagtggctttgttctctaatggaactcagtttagaagaggtggg

SEQ ID NO: 367409 - DNA, 120 bp, Artificial Sequence
  ENSG00000141434_14 (sequence is synthesized)
ggctatggaaccagtgcctttataacccacgaaaggctgaaaagcagagattttataaaaggagatgatgtttatatcctactgacagtggaagacatatctcacctcaactctacacaa

SEQ ID NO: 367410 - DNA, 120 bp, Artificial Sequence
  ENSG00000141434_15 (sequence is synthesized)
atccagctaacaccagcccctagtgttcaagacctctgctcaaaaaccacctgtaaaaatgacggtgtctgcactgttcgagatggcaaagctgagtgcaggtgccagtcaggggaagac

SEQ ID NO: 367411 - DNA, 120 bp, Artificial Sequence
  ENSG00000141434_16 (sequence is synthesized)
tggtggtacatgggagaaaggtgtgaaaagagaggctccacccgagacaccatagtcattgctgtttcatctactgttgctgtgtttgccttgatgctgatcatcacccttgtcagtgtc

SEQ ID NO: 367412 - DNA, 120 bp, Artificial Sequence
  ENSG00000141434_17 (sequence is synthesized)
tattgcaccaggaagaaatatcgtgaaaggatgagctcaaatcgaccaaatttgactccgcaaaatcagcatgctttttgaagattaactcgacaatatggccagctaatgaaattaaaa

SEQ ID NO: 367413 - DNA, 120 bp, Artificial Sequence
  ENSG00000141434_18 (sequence is synthesized)
aggattcttcatcatggatttcgcctaagtgatattacagccacctcattcttctaaaagtggatatttttctgtaaatagctggaaatattataaatcactattttggtcaaagtcaaa

SEQ ID NO: 367414 - DNA, 120 bp, Artificial Sequence
  ENSG00000141434_19 (sequence is synthesized)
gaagaagcgaactgccatggtactgtagctgcaacatcaactcctgcctgggtctttagcctgctggcctaccctgcagattttggacttgccagcctccacaatcatgcaactccagaa

SEQ ID NO: 367415 - DNA, 120 bp, Artificial Sequence
  ENSG00000141434_20 (sequence is synthesized)
tagtgcctgggacattacattgcagcaatcatcctaggctctgacctttaggaaggggtggggactttcttgctagttgctggagagtaaaaaacaactggatctagtttttgtagacat

SEQ ID NO: 367416 - DNA, 120 bp, Artificial Sequence
  ENSG00000141437_0 (sequence is synthesized)
gcagtcctgcggggcgccggcggcgatgggttggggaaatggacgcctggagaacggaaatccagttatcaaaatggactcgggaagagagaacctaacagaacaataacaatggaagaa

SEQ ID NO: 367417 - DNA, 120 bp, Artificial Sequence
  ENSG00000141437_1 (sequence is synthesized)
attgggaacattatcacaaagctatcatcctgccaaactccaggctcagatgatgtcacaggttaaaaaatgcccttcatgagaaagatcttaagcaacatgatagattcagaagctcat

SEQ ID NO: 367418 - DNA, 120 bp, Artificial Sequence
  ENSG00000141437_2 (sequence is synthesized)
gaaaagaggccaccaatacttacatcttcaaaacaagatatatcacctcatattacaaatgttggtgaaatgaagcattacttgtgtggctgctgtgcagccttcaacaacgtcgcaatc

SEQ ID NO: 367419 - DNA, 120 bp, Artificial Sequence
  ENSG00000141437_3 (sequence is synthesized)
acatatcccattcagaaggtcctctttcggcaacagctgtatggcatcaaaacccgggatgcagtacttcagttgagaagggatggatttcgaaatttgtatcgtggaatccttccccca

SEQ ID NO: 367420 - DNA, 120 bp, Artificial Sequence
  ENSG00000141437_4 (sequence is synthesized)
ttgatgcagaagacaactacgcttgcacttatgtttggtctgtatgaggatttatcctgccttctccggaagcatgtccgtgctccagagtttgcaacccatggcgtggcggcagtgctt

SEQ ID NO: 367421 - DNA, 120 bp, Artificial Sequence
  ENSG00000141437_5 (sequence is synthesized)
tggaattggagagtattatcgaggcttggtgcccattcttttccggaatggactcagcaatgtcttgtttttcggccttcgaggtcccattaaggagcatctgcctaccgcaacgactca

SEQ ID NO: 367422 - DNA, 120 bp, Artificial Sequence
  ENSG00000141437_6 (sequence is synthesized)
cagtgctcatttggtcaatgattttatcggtggaggtctattgggtgccatgttgggattcttgtgttttccaattaatgttgtaaaaactcgcctacagtctcagattggtggggaatt

SEQ ID NO: 367423 - DNA, 120 bp, Artificial Sequence
  ENSG00000141437_7 (sequence is synthesized)
tcagtctttccccaaggttttccaaaaaatctggctggaacgggacagaaaactgataaatcttttcagaggtgcccatctgaattaccatcggtccctcatctcttggggcataatcaa

SEQ ID NO: 367424 - DNA, 120 bp, Artificial Sequence
  ENSG00000141437_8 (sequence is synthesized)
tgcaacttatgagttcttgttaaaatttatatgaaaaaaaaccatcagttaagtgccatttatcaactgaatagaccttctaagaagaatgcagtttggcctctttcttaattggccaaa

SEQ ID NO: 367425 - DNA, 120 bp, Artificial Sequence
  ENSG00000141437_9 (sequence is synthesized)
tacaagttcgtgtcataactccaggccacagtgagttacgggcaaagctgttttccttaagcatcaacaaaacagaataaaaggttccaataggaaaatgtaagggtttttttttgtttt

SEQ ID NO: 367426 - DNA, 120 bp, Artificial Sequence
  ENSG00000141441_0 (sequence is synthesized)
gcgggtggtgccggtggcggcggcgggggagcgcgggacaggaggcttcggggaagatggacccggcgccctcgctgggctgcagcctcaaggatgtgaagtggagctcggtggccgtgc

SEQ ID NO: 367427 - DNA, 120 bp, Artificial Sequence
  ENSG00000141441_1 (sequence is synthesized)
cgctcgacctcctggtcagcacttaccggctgccccagatcgcgcgcctggacaacggagagtgcgtagaagggctgcgggaaaatgactatctgctgattcattcctgccgccagtgga

SEQ ID NO: 367428 - DNA, 120 bp, Artificial Sequence
  ENSG00000141441_2 (sequence is synthesized)
ccaccatcactgcccacagcttggaggagggtcactatgtcattgggccaaagatagagattccggtacattatgcagggcaattcaagctgctggaacaagaccgagatataaaggagc

SEQ ID NO: 367429 - DNA, 120 bp, Artificial Sequence
  ENSG00000141441_3 (sequence is synthesized)
cagtgcaatatttcaacagtgtggaggaggtggctaaggcatttcctgaacgcgtgtacgtcatggaggatatcacattcaacgtgaaggttgcttcaggtgaatgcaatgaagacactg

SEQ ID NO: 367430 - DNA, 120 bp, Artificial Sequence
  ENSG00000141441_4 (sequence is synthesized)
aagtttacaacatcaccctgtgtactggggatgaactcactctaatggggcaggcagaaatcctttatgcaaagacattcaaggaaaagtcacgactcaacacaatcttcaaaaagattg

SEQ ID NO: 367431 - DNA, 120 bp, Artificial Sequence
  ENSG00000141441_5 (sequence is synthesized)
ggaagctcaattccatcagcaagctgggaaaaggcaaaatgccgtgcctcatttgtatgaatcaccggaccaacgaaagcattagccttccattccagtgcaagggcagatttagcaccc

SEQ ID NO: 367432 - DNA, 120 bp, Artificial Sequence
  ENSG00000141441_6 (sequence is synthesized)
gaagtcccctggaacttcagatgcaagagggcgaacacaccatccgcaacattgtggagaaaaccaggcttcctgtgaatgtgactgtgccaagccctccaccgagaaacccatacgacc

SEQ ID NO: 367433 - DNA, 120 bp, Artificial Sequence
  ENSG00000141441_7 (sequence is synthesized)
tccacttcatccgtgaggggcaccgctataagtttgtgaacatccagaccaagacggtggtggtttgctgtgtgctgcggaacaacaagatcctccccatgcactttcctttgcacttga

SEQ ID NO: 367434 - DNA, 120 bp, Artificial Sequence
  ENSG00000141441_8 (sequence is synthesized)
ctgtccccaagttcagcctcccagaacacctggtgaagggagagagctggcccgaaaccctggtccatcactggctaggtatctgccaagaacagttcgacatcgatgagtattcacggg

SEQ ID NO: 367435 - DNA, 120 bp, Artificial Sequence
  ENSG00000141441_9 (sequence is synthesized)
ctgtccgtgatgtgaaaaccgactggaatgaagaatgcaagagccccaagaagggtcggtgctctggccacaaccacgtgcccaattcgctcagctacgcccgcgatgagctcacccagt

SEQ ID NO: 367436 - DNA, 120 bp, Artificial Sequence
  ENSG00000141441_10 (sequence is synthesized)
ccttccaccgactctcggtctgtgtgtatggcaacaatctccatggcaacagtgaggtgaaccttcatggttgcagggacctggggggagattgggctccctttcctcatgacatcctgc

SEQ ID NO: 367437 - DNA, 120 bp, Artificial Sequence
  ENSG00000141441_11 (sequence is synthesized)
cctatcaggactctggagatagtgggagcgactaccttttcccagaagctagtgaagaatcagcaggcatcccgggaaagtcagaacttccctacgaagagctgtggctggaggaaggca

SEQ ID NO: 367438 - DNA, 120 bp, Artificial Sequence
  ENSG00000141441_12 (sequence is synthesized)
agcccagccatcagcctctcactcgctctctgagcgagaagaacagatgtgatcagtttagaggttctgtccgatccaaatgtgcgacttctcctcttcccatccctgggactctgggag

SEQ ID NO: 367439 - DNA, 120 bp, Artificial Sequence
  ENSG00000141441_13 (sequence is synthesized)
cagcagtgaagtcttcagatactgccctacctccacctccagtgcctcccaaatctgaagccgtcagagaagaatgccggctcctgaacgccccacctgttccaccccgaagcgcaaagc

SEQ ID NO: 367440 - DNA, 120 bp, Artificial Sequence
  ENSG00000141441_14 (sequence is synthesized)
ctttgtccaccagtccctccatccctcctcgcacagtcaagccagcgcggcaacagactcgctctcccagccccaccttgtcctactattcttcagggctacacaacatcgtcactaaaa

SEQ ID NO: 367441 - DNA, 120 bp, Artificial Sequence
  ENSG00000141441_15 (sequence is synthesized)
ctgacacaaatccttctgaaagcactcctgtttcctgctatccatgtaaccgagtgaaaactgattctgtggacctgaaatccccgtttggaagtccttctgctgaagctgtgtcctctc

SEQ ID NO: 367442 - DNA, 120 bp, Artificial Sequence
  ENSG00000141441_16 (sequence is synthesized)
ggctctcatggcctaaccattattcaggagcatcagaaagccagaccaggagtgacttcctgctggatccaagcaggagttatagttaccctagacaaaagacgccaggcacaccaaaga

SEQ ID NO: 367443 - DNA, 120 bp, Artificial Sequence
  ENSG00000141441_17 (sequence is synthesized)
gaaactgcccagcaccttttgattttgatggctgtgagctcctggccagccccactagcccagtcactgcagaattcagtagcagcgtctctggttgtcccaagtcagccagctactctc

SEQ ID NO: 367444 - DNA, 120 bp, Artificial Sequence
  ENSG00000141441_18 (sequence is synthesized)
tggagagcacagatgtgaaatctcttgcagctggtgtgacaaagcagagtacgtcatgccctgccttaccccccagggctccaaaactagtggaagagaaggtcgcctccgaaacatctc

SEQ ID NO: 367445 - DNA, 120 bp, Artificial Sequence
  ENSG00000141441_19 (sequence is synthesized)
ctttgcctctgaaaattgatggtgctgaggaagaccccaagtctgggtcaccagatctctcggaggaccagtattttgttaaaaagggcatgcaggacatcttctctgcctcctaccctt

SEQ ID NO: 367446 - DNA, 120 bp, Artificial Sequence
  ENSG00000141441_20 (sequence is synthesized)
tctcatctccgctccatctccagctggcccccagatcctgtggcgacggttccccatggcagccacctgctgacctatcaggactctctatagaggaagtgtccaagtcactacggttca

SEQ ID NO: 367447 - DNA, 120 bp, Artificial Sequence
  ENSG00000141441_21 (sequence is synthesized)
ttggtttgtccgaagatgtcatatcattctttgttactgaaaagattgatgggaacctgcttgttcagctaacggaagaaatcctctcagaggatttcaaattgagcaaattgcaggtga

SEQ ID NO: 367448 - DNA, 120 bp, Artificial Sequence
  ENSG00000141441_22 (sequence is synthesized)
agaagataatgcaattcattaatggctggaggcccaaaatatagccaaataacccccggccagcatggaacaaaactgatcaatgcgtgtgctagaaggggtgggctgggacacaatttc

SEQ ID NO: 367449 - DNA, 120 bp, Artificial Sequence
  ENSG00000141441_23 (sequence is synthesized)
atgtttttgcactaaaaaccttctctgtaaatagggataagagaaactcttactatgcagattacgtttttgaatggtgaacaggctattttgtacatcaataaaaatgctgtacagaac

SEQ ID NO: 367450 - DNA, 120 bp, Artificial Sequence
  ENSG00000141441_24 (sequence is synthesized)
acttggaggtgtgccttgtacgtcactcaacaaacactcagcagctgctaaaagaaaaaaaggcatgtgcagagaaatcattcttacccaagtaggtttatgtgagaaggtatgatattt

SEQ ID NO: 367451 - DNA, 120 bp, Artificial Sequence
  ENSG00000141441_25 (sequence is synthesized)
attacaaaatagccaaagctggaagacataaaaatctttaaaaaaaaaaaaaaaacacttttgaacaagtcccttctttcaggagggttgactttagacaattaactgtgttctgtgctc

SEQ ID NO: 367452 - DNA, 120 bp, Artificial Sequence
  ENSG00000141441_26 (sequence is synthesized)
tgtcattcagattgcttcttgctaattgttttactcttgtgcctgaaaatgttagtgatacgaattgacactttaatgttgtatgcttggtggggatctttttatcacaaggcattttcc

SEQ ID NO: 367453 - DNA, 120 bp, Artificial Sequence
  ENSG00000141441_27 (sequence is synthesized)
aagagtcatatgttgataaagggatatatgttgtccttagaaatcacacaaatcatgaccacaataatttatctgtaactgctgctaattttattgagcagagaaaaaagaatatacata

SEQ ID NO: 367454 - DNA, 120 bp, Artificial Sequence
  ENSG00000141441_28 (sequence is synthesized)
tataaacatgtataggtgcatacacaatacacccggatatgttttacacataattttgattctgatattttagataacatctgttcacttttaaacaatctgttgaggttttgggactgt

SEQ ID NO: 367455 - DNA, 120 bp, Artificial Sequence
  ENSG00000141441_29 (sequence is synthesized)
tcaatcttatttgggttcatcactgaaaacttagaacaaatcagtaaagaatcctgtattgaagaattaagtttgagtttaagcccactcaccgcagggctggtttttgcatgtaatact

SEQ ID NO: 367456 - DNA, 120 bp, Artificial Sequence
  ENSG00000141441_30 (sequence is synthesized)
cccatgatgtctggggaaatgacagtttctgttgaattataattctccggtttaagggtctccttcccctggtgtctgatggtgagaggtctgaagagcatttgtcagagtacattaggc

SEQ ID NO: 367457 - DNA, 120 bp, Artificial Sequence
  ENSG00000141441_31 (sequence is synthesized)
attctcaacctacttcatgctttacgagagctgagaaatcagacgcaccggcctttattattatatatgctacatctgttgagtatttttaaaataccaataagaggacttgtttatttc

SEQ ID NO: 367458 - DNA, 120 bp, Artificial Sequence
  ENSG00000141441_32 (sequence is synthesized)
ataaaccacttcttccctctctttcaaagaaaatacattattaccatacttttacattagtctgagaatttttgctaaatatgattaagtattccaaaatataatggcgtcattattctt

SEQ ID NO: 367459 - DNA, 120 bp, Artificial Sequence
  ENSG00000141441_33 (sequence is synthesized)
gacttttttagagaatatacatcttaagactgtattagttctcagagcaaggcatcatctactcccctgcacctgagagtctggccccagattccagatgtgcggacagcccatgaccga

SEQ ID NO: 367460 - DNA, 120 bp, Artificial Sequence
  ENSG00000141441_34 (sequence is synthesized)
ggtgcacacagtgccctcttgaataggaaggtcagccagtgaggcggcagcataacttgcaggatggacttatatcttaccatctcttcctgctaccaaaataaaaaaataaattgaaag

SEQ ID NO: 367461 - DNA, 120 bp, Artificial Sequence
  ENSG00000141441_35 (sequence is synthesized)
acaagacccaccagtctagttttgtagacctgtgaaatgtgtctttatttcttggcattagaagaaagatatttttaatccatatcgtggttttagagttgaagtgaattgatacccaat

SEQ ID NO: 367462 - DNA, 120 bp, Artificial Sequence
  ENSG00000141441_36 (sequence is synthesized)
tttccatcttagatctcctttatcaaaaaaaaaagcattttttttctcctaacgtgtctcccaaaatgtaaatactataggcaaaaagagtaccctgtaaaattctcacactggagcacc

SEQ ID NO: 367463 - DNA, 120 bp, Artificial Sequence
  ENSG00000141441_37 (sequence is synthesized)
tcttcaaaagtcacagataactcaatgaggaagtgctggtactgcactcacaggacatgagacctatgaagctttcgtgttttgaaagcatccttctgtgtgagggggactgcctccctt

SEQ ID NO: 367464 - DNA, 120 bp, Artificial Sequence
  ENSG00000141441_38 (sequence is synthesized)
agtaaagtaaacctctcagaacttctttttaaaataaaaacagacaagatgcagttactaagctgcaagttttcattggcaaacctagctgaatccgttttaaaatacttagcactcgga

SEQ ID NO: 367465 - DNA, 120 bp, Artificial Sequence
  ENSG00000141441_39 (sequence is synthesized)
cacaattctcaaactcaggaagaaggaacagggttggtttgggtttactataaaggttgcctcacataaacaactgactccttttagcgttttttttctttttgtaaaaactttacacaa

SEQ ID NO: 367466 - DNA, 120 bp, Artificial Sequence
  ENSG00000141441_40 (sequence is synthesized)
aatagggttttaaattctttttgcttgttttggacttggtgtatttttgtcaagtttatattgattggcaacgcagagactccttgagggcagggactgtggcctttgattcacttatgc

SEQ ID NO: 367467 - DNA, 120 bp, Artificial Sequence
  ENSG00000141441_41 (sequence is synthesized)
tacagtctagtatcactacagtgctgagtaaaagacacagcccctgccctcttggagatcatattgtttatatttgaaatctcagttgctaagagtatgtatgtgtgagtaagaaagacg

SEQ ID NO: 367468 - DNA, 120 bp, Artificial Sequence
  ENSG00000141441_42 (sequence is synthesized)
tgaagtcctatgggcagctgggtatatggagaattacgtgtgtcctgtctttaaaacgtcagcctctattaaggggtacagaacaccccaagatcactaaaacttggaatgtgttggagg

SEQ ID NO: 367469 - DNA, 120 bp, Artificial Sequence
  ENSG00000141441_43 (sequence is synthesized)
tgttttttgttttttgttttttttactgacctggaattcttttaattgtaataaatatcttctgtcacaaataaatgccacaaataaatgaaattgccattcctaagctgagcacctgtc

SEQ ID NO: 367470 - DNA, 120 bp, Artificial Sequence
  ENSG00000141441_44 (sequence is synthesized)
caaataaatgaaattgccattcctaagctgagcacctgtctgtgaaggaccttggtgtcctgactggacagagcattcatagctccaagagaatcatgacaagatatgcaaagcagggat

SEQ ID NO: 367471 - DNA, 120 bp, Artificial Sequence
  ENSG00000141441_45 (sequence is synthesized)
aataaggagaaagcccttccctttcgagaagcccttccctttcacagcccttccctgcgattctgcagtgaaaagtgatgcccagagatccacacacagaacccttctaaccagccaggt

SEQ ID NO: 367472 - DNA, 120 bp, Artificial Sequence
  ENSG00000141441_46 (sequence is synthesized)
caagacttatcatcttatctcctctggcaggtcccctgtaatcaaaagagaggaagtgtctatctaaacaagacccttttgggtccttagattcatggcaaaaatcatcatggcccccat

SEQ ID NO: 367473 - DNA, 120 bp, Artificial Sequence
  ENSG00000141441_47 (sequence is synthesized)
cagaaaagaaaatcagcaataaaccaagccaagcaactaaaatgtataatgtggacctgactcatgttgggaggcagaattcagacactcacagatcaatcttgcaagttttctcttctt

SEQ ID NO: 367474 - DNA, 120 bp, Artificial Sequence
  ENSG00000141441_48 (sequence is synthesized)
taagttgagctgctcaactttatgaactgtgaaatttacttacattctttcaacccacatatatcattgcagtttatgaagttgcagtgaactgcccattcagctaaattgcagtgttta

SEQ ID NO: 367475 - DNA, 120 bp, Artificial Sequence
  ENSG00000141441_49 (sequence is synthesized)
ttcttgtctcatgtcgaaatacaacaatcttatgggaaatattatgacagtccgttccaactgttctcagacacatgcataaacagtctctgctcacattccacagccacctgcatgtta

SEQ ID NO: 367476 - DNA, 120 bp, Artificial Sequence
  ENSG00000141441_50 (sequence is synthesized)
tccatacagctccctgagaagtccagggatgggaggtggggtgtggaaggatggagggtccttcattttctaaacactttgtataagtcactactcatcgtgcctagcaagtataagatt

SEQ ID NO: 367477 - DNA, 120 bp, Artificial Sequence
  ENSG00000141441_51 (sequence is synthesized)
aacattttgaataacaaactggaaaacaaataatccttcaaagaacctagcgaactgttcaaaggaaattttaatttcagtctaccagaaaagttaaatctgttgttggacgtagggggc

SEQ ID NO: 367478 - DNA, 120 bp, Artificial Sequence
  ENSG00000141441_52 (sequence is synthesized)
tttcagaaacatgcctcttatatcaatttccactatctttcaagttacctaaaggcaccaggctgcttgagcaagaagaataaaaggcctagagtgcaaattatgtgaagtagagttttt

SEQ ID NO: 367479 - DNA, 120 bp, Artificial Sequence
  ENSG00000141441_53 (sequence is synthesized)
agattgtgggattgtaataatacgggattctcatggttacatcatgttaaatcacactgttcagtctttaaaacttggtgttttaaaatttgtctcattgtgatagccagaaacaaggaa

SEQ ID NO: 367480 - DNA, 120 bp, Artificial Sequence
  ENSG00000141441_54 (sequence is synthesized)
taaacgtgatttcagtttaaactatatacaaatatcttctgtaattttgctgctctaatttttaggctataaattttgtaatagagcttatcagatcgcaaatttcctttgtttacaatc

SEQ ID NO: 367481 - DNA, 120 bp, Artificial Sequence
  ENSG00000141441_55 (sequence is synthesized)
tcatgtagtagggctcagataatttcttagctataaaccttttctcccactctcatattgtttcatttaaaatatttaagctaagcctaaaaattgaaatcagttaagaatttggagagt

SEQ ID NO: 367482 - DNA, 120 bp, Artificial Sequence
  ENSG00000141441_56 (sequence is synthesized)
ttatcttaaatggaaatggtgtattcttttcaaagaattttgtaaccatctttacagtttctttgcttggaaaacttgggttgttaactaccagttaacaatggcattactttccaaaac

SEQ ID NO: 367483 - DNA, 120 bp, Artificial Sequence
  ENSG00000141441_57 (sequence is synthesized)
gttatctaatgggcccaatgtgtacctcaagataaacacagtatgttatgtctaaaaatttccttgtctgttgatttaaatggttctgaaatgtctgtaataaagaaattttcaaagttg

SEQ ID NO: 367484 - DNA, 120 bp, Artificial Sequence
  ENSG00000141441_58 (sequence is synthesized)
agtcagtgctgggagcgctgctatggcgtttctcagacccgcggctcctcctcacacgctcgaggcggagggaaggaggggtaagaggaggaggaggcgagcgggcggccgccgcagctg

SEQ ID NO: 367485 - DNA, 80 bp, Artificial Sequence
  ENSG00000141441_59 (sequence is synthesized)
gagccgccgcagccacccgggccgccgccgccgcccgcagccgcgcggctgctctgagtcttctccgggcgtgagggcac

SEQ ID NO: 367486 - DNA, 80 bp, Artificial Sequence
  ENSG00000141441_60 (sequence is synthesized)
agtcttctccgggcgtgagggcacgcggggcgccccagccatgccccgcagcggcagctgagccgggcgccggccccctc

SEQ ID NO: 367487 - DNA, 120 bp, Artificial Sequence
  ENSG00000141441_61 (sequence is synthesized)
gagcagcagtgaagtcttcagatactgccctacctccacctccagtgcctcccaaatctgaagccagacagggttttatcacattgcccagactggtctcaaagtcctgagctcaagcca

SEQ ID NO: 367488 - DNA, 120 bp, Artificial Sequence
  ENSG00000141441_62 (sequence is synthesized)
ggcctcccaaagtgctgagattacaggtattttcacctacagcaatctacctgactagatctacttgtctgccatctacagagcaagtaactgaggcctcaatagacaggttgtgctact

SEQ ID NO: 367489 - DNA, 120 bp, Artificial Sequence
  ENSG00000141441_63 (sequence is synthesized)
tcccggttcatctttcattacttcactcttctccagactgtgctatattacctcacactatgcatctccctttttataatgagagttactgcaattttaaatatctcattttgcttcaca

SEQ ID NO: 367490 - DNA, 120 bp, Artificial Sequence
  ENSG00000141441_64 (sequence is synthesized)
gtcatcaatcctttgttgacaaaaatctaccttactgataatgccccaaccaaatataaatcaactactttctcttgcatacatgaagtgaaataaatagaacagcatgttttattctaa

SEQ ID NO: 367491 - DNA, 120 bp, Artificial Sequence
  ENSG00000141441_65 (sequence is synthesized)
agatgcgttcttgatccccatccgacaccttctgaatcagacacggtgaggcccagcaatctgttttcacggtcttctgggtgattttgagggcaattcaagctgctggaacaagaccga

SEQ ID NO: 367492 - DNA, 120 bp, Artificial Sequence
  ENSG00000141446_0 (sequence is synthesized)
agaagcagctgagtgtctcctgatacccggatgtgaggcgatccgctggcgctagtctgaccctccgccaggcaaaaggaagattgtctttggctatagagtttttttttttaaagatta

SEQ ID NO: 367493 - DNA, 120 bp, Artificial Sequence
  ENSG00000141446_1 (sequence is synthesized)
ctaaacatacaggaagtgataagaagtatcattcatcagaagcatcattcatcaatcaacttgaagaaaaaggtgatatattatttctttaaggtgctgtgtgatgtgttaagagcatat

SEQ ID NO: 367494 - DNA, 120 bp, Artificial Sequence
  ENSG00000141446_2 (sequence is synthesized)
tagaaggaatggttttgtctaattttcttcatgagttatggtggctgagacatcgagtctatattttggggcaaaaactaaacggcagcacaaaaggaaatctatattaatagaatattt

SEQ ID NO: 367495 - DNA, 120 bp, Artificial Sequence
  ENSG00000141446_3 (sequence is synthesized)
tgttgaacaaaggaggttagataagaactgcaaaccaacagactcagcaaacaaggaaagaaacgtgttagccataagacatgtttcaagtgaatcgaagtccaataactgtagacttca

SEQ ID NO: 367496 - DNA, 120 bp, Artificial Sequence
  ENSG00000141446_4 (sequence is synthesized)
gaagaaaaaagttttcaaaaattttatcaaaacaggtcactgataaataactcctccagtaatagagctaggcctgaaaccaaaattaattaaaaaattaacaaaacagattgaacctga

SEQ ID NO: 367497 - DNA, 120 bp, Artificial Sequence
  ENSG00000141446_5 (sequence is synthesized)
attaaatttcttttgataaaaaaacttattaaaaataatcaaaattttcctcaaatttttattaccttgtccaaagtaaagcaagtgtcttttagcattcatgccagcttttctcatgtt

SEQ ID NO: 367498 - DNA, 120 bp, Artificial Sequence
  ENSG00000141446_6 (sequence is synthesized)
ctaggaatgacagaaaccttacttgaagcaaactagtatttttgttgaaaatgtatatcagcatcagttaaagttgatttttcagacctgctcctcagtaataatactagctagtcagca

SEQ ID NO: 367499 - DNA, 120 bp, Artificial Sequence
  ENSG00000141446_7 (sequence is synthesized)
ttcacgcctaccaggacacaaaaatcctcttcaaaactactcagaaaagaaagtcattactcaggaatgatgtccattcaggagaaatcaaaagagaattcctccaaagttactaaaaaa

SEQ ID NO: 367500 - DNA, 120 bp, Artificial Sequence
  ENSG00000141446_8 (sequence is synthesized)
agtgacgataagaattcagaaacagaaattcaggattctcaaaagaatctagcaaaaaaatcaggtccaaaggagactataaaatcacaggctaaatcttccagtgaaagtaaaataaat

SEQ ID NO: 367501 - DNA, 120 bp, Artificial Sequence
  ENSG00000141446_9 (sequence is synthesized)
cagccagaattggaaacacgcatgagtacaaggtcatcaaaggcagcatctaatgataaagctactaaatccattaataaaaatacggtgactgtgaggggatattcacaagaatctaca

SEQ ID NO: 367502 - DNA, 120 bp, Artificial Sequence
  ENSG00000141446_10 (sequence is synthesized)
aaaaagaaattatctcagaaaaaattagtacatgaaaaccctaaagcaaatgaacagcttaaccggagatcacaaaggctacaacaattaacagaggtttcaagaaggtcgttacgcagt

SEQ ID NO: 367503 - DNA, 120 bp, Artificial Sequence
  ENSG00000141446_11 (sequence is synthesized)
agagaaattcagggtcaagttcaagcagttaaacagagtttgccaccaactaaaaaagagcagtgtagcagtactcagagtaaatctaataaaacaagtcaaaaacatgtgaagagaaaa

SEQ ID NO: 367504 - DNA, 120 bp, Artificial Sequence
  ENSG00000141446_12 (sequence is synthesized)
gtactggaagtaaagtctgactctaaagaagatgaaaatctagtaattaatgaagtaataaattctcccaaagggaaaaaacgcaaggtagaacatcagacagcttgtgcttgtagttct

SEQ ID NO: 367505 - DNA, 120 bp, Artificial Sequence
  ENSG00000141446_13 (sequence is synthesized)
caatgcacgcaaggatctgaaaagtgtcctcagaagactactagaagagacgaaacgaaacctgtgcctgtaacttctgaggtgaaaagatcaaaaatggctacttcagtggtcccgaaa

SEQ ID NO: 367506 - DNA, 120 bp, Artificial Sequence
  ENSG00000141446_14 (sequence is synthesized)
aagaatgagatgaagaagtcggttcatacacaagtgaatactaacacaacactcccaaaaagtccacagccatcagtgcctgaacaaagtgataatgagctggagcaagcaggaaagagc

SEQ ID NO: 367507 - DNA, 120 bp, Artificial Sequence
  ENSG00000141446_15 (sequence is synthesized)
aaacgaggtagtattctccagctctgtgaagaaattgctggtgaaattgagtcagataatgtagaggtaaaaaaggaatcttcacaaatggaaagtgtaaaggaagaaaagcccacagaa

SEQ ID NO: 367508 - DNA, 120 bp, Artificial Sequence
  ENSG00000141446_16 (sequence is synthesized)
ataaaattggaagagaccagtgttgaaagacaaatacttcatcagaaggaaacaaatcaggatgtgcaatgtaatcgttttttcccaagtagaaaaacaaagcctgtgaaatgtatacta

SEQ ID NO: 367509 - DNA, 120 bp, Artificial Sequence
  ENSG00000141446_17 (sequence is synthesized)
aatggaataaacagctcagccaagaagaactccaactggactaaaattaaactctcaaaatttaactctgtgcagcacaataagttggactctcaagtttcccctaaattaggcttatta

SEQ ID NO: 367510 - DNA, 120 bp, Artificial Sequence
  ENSG00000141446_18 (sequence is synthesized)
caaagtacgtttttagggacaaagctacatgatagaaatataacttgccagcaggaaaaaatgaaagaaattaattctgaagaagtgaaaattaatgatattacagtagaaattaataaa

SEQ ID NO: 367511 - DNA, 120 bp, Artificial Sequence
  ENSG00000141446_19 (sequence is synthesized)
accacagaaagggctcctgaaaattgtcatttggccaatgagataaaaccttctgacccaccattggataatcagatgaaacattcttttgattcagcatcaaataagaatttcagccaa

SEQ ID NO: 367512 - DNA, 120 bp, Artificial Sequence
  ENSG00000141446_20 (sequence is synthesized)
tgtttggaatccaagctagaaaacagtccagtggaaaatgttactgctgcttcgactctgctcagtcaagcaaaaattgatacaggagagaataaatttccaggttcagctccccaacag

SEQ ID NO: 367513 - DNA, 120 bp, Artificial Sequence
  ENSG00000141446_21 (sequence is synthesized)
catagtattctcagtaaccagacatctaaaagcagtgataacagggagacaccacgaaatcattctttgcctaagtgtaattcccatttggagataacaattccaaaggacttgaaacta

SEQ ID NO: 367514 - DNA, 120 bp, Artificial Sequence
  ENSG00000141446_22 (sequence is synthesized)
aaagaagcagagaaaactgatgaaaaacagttgattatagatgcaggacaaaaaagatttggagcagtttcttgtaatgtttgtggaatgctgtatacagcttcaaatccagaagatgaa

SEQ ID NO: 367515 - DNA, 120 bp, Artificial Sequence
  ENSG00000141446_23 (sequence is synthesized)
acacagcatctgcttttccacaaccagtttataagtgctgttaaatatgtgggctggaagaaagaaagaattctggctgaataccctgatggcaggataataatggttcttcctgaagac

SEQ ID NO: 367516 - DNA, 120 bp, Artificial Sequence
  ENSG00000141446_24 (sequence is synthesized)
ccaaagtatgccctgaaaaaggttgacgagattagagagatggttgacaatgatttaggttttcaacaggctccactaatgtgctattccagaactaaaacacttctcttcatttccaat

SEQ ID NO: 367517 - DNA, 120 bp, Artificial Sequence
  ENSG00000141446_25 (sequence is synthesized)
gacaaaaaagtagttggctgcctaattgcggaacatatccaatggggctacagagttatagaagagaaacttccagttatcaggtcagaagaagaaaaagtcagatttgaaaggcaaaaa

SEQ ID NO: 367518 - DNA, 120 bp, Artificial Sequence
  ENSG00000141446_26 (sequence is synthesized)
gcctggtgctgctcaacattaccagagcctgcaatctgcgggatcagtcgaatatgggtattcagcatgatgcgtcggaagaaaattgcttctcgcatgattgaatgcctaaggagtaac

SEQ ID NO: 367519 - DNA, 120 bp, Artificial Sequence
  ENSG00000141446_27 (sequence is synthesized)
tttatatatggctcatatttgagcaaagaagaaattgctttctcagatcccactcctgatggaaagctgtttgcaacacagtactgtggcactggtcaatttctggtatataattttatt

SEQ ID NO: 367520 - DNA, 120 bp, Artificial Sequence
  ENSG00000141446_28 (sequence is synthesized)
aatggacagaatagcacgtaaaacaaattcttgcctacaccactagaagacatctattgaagagaatggattggttgctgactttaaccaggaactagggccatttttattacaatgaac

SEQ ID NO: 367521 - DNA, 120 bp, Artificial Sequence
  ENSG00000141446_29 (sequence is synthesized)
tcaggactggcaacaaccatatggttgttccattttcataaaattggaaacaatgcagtaatagcttattgttttgttttttaaagaagatattttattatcttttacagaaatttatga

SEQ ID NO: 367522 - DNA, 120 bp, Artificial Sequence
  ENSG00000141446_30 (sequence is synthesized)
ttgatgtattttatctatagttatttagacatgtttacatgcagcagataattgttcatagtggactgaaaactaatgcaaggactatggtctcagtgataagtatattttgaagttctt

SEQ ID NO: 367523 - DNA, 120 bp, Artificial Sequence
  ENSG00000141446_31 (sequence is synthesized)
aatatggaaatataccagtgtagcttggtactgtatttttttatattgatctgctgataccagtgataggcttaaagattgtattttcacagagtggaaaccaatttttttagttattgt

SEQ ID NO: 367524 - DNA, 120 bp, Artificial Sequence
  ENSG00000141446_32 (sequence is synthesized)
tcaaggagggtgcaatattaagtgttttggaatttgaagctaatttttaaaaggcctgaactatactttgaagaaacccctatagaaaaggaaagctccagctaaataggaagaattaga

SEQ ID NO: 367525 - DNA, 120 bp, Artificial Sequence
  ENSG00000141446_33 (sequence is synthesized)
atattgagcttttttttcctgatttttctctttcctatctttgatggaaggaggaagtagaaagtggtaaagaattgaggctttccttcttggagagctgtaaatgacaagcattaggaa

SEQ ID NO: 367526 - DNA, 120 bp, Artificial Sequence
  ENSG00000141446_34 (sequence is synthesized)
aggtaccctcctagattcattattctttcattctggtttcacttttaaaataaatggcaacttggcacacctaggctgttaacaaatctcaaagaggtttataaaaacgtatagaatact

SEQ ID NO: 367527 - DNA, 120 bp, Artificial Sequence
  ENSG00000141446_35 (sequence is synthesized)
tggaagcaaagtatggatgactcggtatctgctttgttattcctcagaaatactgcactgagtatatgccctcattactggacttcattttgatacttgtctatccttcatagtgccctc

SEQ ID NO: 367528 - DNA, 120 bp, Artificial Sequence
  ENSG00000141446_36 (sequence is synthesized)
tacttttaaagggtttatatgttgaaaaactgctgtggccttttatgacctgtatataatgtagaataaaaataataaaatacttgatagctttttctaagtgaccaatgtactaactga

SEQ ID NO: 367529 - DNA, 120 bp, Artificial Sequence
  ENSG00000141446_37 (sequence is synthesized)
gtggttctgctcattaatcaccacgagtgtggatctgaagaagagtttattacctctctttttttgagtatgtttaacttcagatacacacaacgtagcttctccttccctattagattc

SEQ ID NO: 367530 - DNA, 120 bp, Artificial Sequence
  ENSG00000141446_38 (sequence is synthesized)
agaagcagctgagtgtctcctgatacccggatgtgaggcgatccgctggcgctagtctgaccctccgccaggcaaaaggaaggaatcctgagagtccccatatcacattttgagcactac

SEQ ID NO: 367531 - DNA, 120 bp, Artificial Sequence
  ENSG00000141446_39 (sequence is synthesized)
agtgagcgtggcggccatcttcgtcttctgggcacgtcagctgagccggttagggctgaagaggagcgttgcgcaagcgcacccaagacggtcacaggtaactcccatctgacgagcgag

SEQ ID NO: 367532 - DNA, 120 bp, Artificial Sequence
  ENSG00000141447_0 (sequence is synthesized)
gtggtcccggcgccgggtcccggagacagacgttacgcgggctcgagcgtcctcggggagtgccagccagagttggtgacgaccacttcctcgacgtggggcgggcggacgggaagcctg

SEQ ID NO: 367533 - DNA, 120 bp, Artificial Sequence
  ENSG00000141447_1 (sequence is synthesized)
gggtcgtggccaccgcctcgggagctctgggagcccgggtgaccgcgtagaaatgaacacagaagcggagcaacagcttctccatcacgccagaaatggcaatgctgaagaagtaagaca

SEQ ID NO: 367534 - DNA, 120 bp, Artificial Sequence
  ENSG00000141447_2 (sequence is synthesized)
actattagagaccatggcgaggaatgaagtgattgctgacattaattgcaaaggaagaagtaagtctaacttgggctggacacctctacatctggcatgctattttggacacagacaagt

SEQ ID NO: 367535 - DNA, 120 bp, Artificial Sequence
  ENSG00000141447_3 (sequence is synthesized)
ggtccaggatctgttgaaggctggtgcagaagtgaatgtgttgaatgacatgggagacacgccgcttcatcgagctgcctttacaggacgaaaggagttggtaatgcttctcttagaata

SEQ ID NO: 367536 - DNA, 120 bp, Artificial Sequence
  ENSG00000141447_4 (sequence is synthesized)
taatgctgatactactattgttaatgggagtggacagacagcaaaagaagttactcatgctgaagaaatcagaagcatgcttgaagctgtagaaaggactcaacaaagaaagcttgaaga

SEQ ID NO: 367537 - DNA, 120 bp, Artificial Sequence
  ENSG00000141447_5 (sequence is synthesized)
attacttttagcagcagcaagagaaggcaaaacaacagaactcacagctctgctcaacaggcccaatcctcctgatgttaactgttcggatcagttaggaaatacacccttgcattgtgc

SEQ ID NO: 367538 - DNA, 120 bp, Artificial Sequence
  ENSG00000141447_6 (sequence is synthesized)
agcttaccgggcccataaacaatgtgccttaaagcttctaagaagtggagcagaccctaatctgaagaacaaaaatgatcagaaacctcttgaccttgcccagggtgctgaaatgaaaca

SEQ ID NO: 367539 - DNA, 120 bp, Artificial Sequence
  ENSG00000141447_7 (sequence is synthesized)
cattcttgttggtaataaggtcatctacaaagcattgaaacgatatgagggccctctctggaagagttcaagattttttggctggagattattctgggtagtgttagagcatggagtcct

SEQ ID NO: 367540 - DNA, 120 bp, Artificial Sequence
  ENSG00000141447_8 (sequence is synthesized)
ttcatggtataggaaacagcctgatgcagttcataatatttatcgccagggatgcaaacacctgactcaagcagtatgcacggtaaaatccactgatagctgcctcttctttattaaatg

SEQ ID NO: 367541 - DNA, 120 bp, Artificial Sequence
  ENSG00000141447_9 (sequence is synthesized)
ctttgatgacaccattcatggcttccgggttcctaagaatagccttcagcagtcaagagaggactggctggaagcaatagaagaacattctgcttacagcactcactactgttcccagga

SEQ ID NO: 367542 - DNA, 120 bp, Artificial Sequence
  ENSG00000141447_10 (sequence is synthesized)
ccagctgactgatgaggaggaggaagatacggtttctgctgcagacctgaagaaatcattagagaaagcacagtcatgccaacagcgactagatagggaaatttccaactttctcaaaat

SEQ ID NO: 367543 - DNA, 120 bp, Artificial Sequence
  ENSG00000141447_11 (sequence is synthesized)
gattaaggagtgtgacatggctaaagaaatgcttccatcatttcttcagaaagttgaagttgtctcagaagcttctagagaaacttgtgtagctttgactgattgccttaatctcttcac

SEQ ID NO: 367544 - DNA, 120 bp, Artificial Sequence
  ENSG00000141447_12 (sequence is synthesized)
caaacaagaaggggtgaggaattttaaattggaacaagagcaagaaaaaaacaaaatcttgtcagaagcactggagacgctggccactgaacatcatgaattagagcagtctctggtgaa

SEQ ID NO: 367545 - DNA, 120 bp, Artificial Sequence
  ENSG00000141447_13 (sequence is synthesized)
aggctctccacccgccagcatccttagcgaggacgagttctatgatgcgctgtcagattccgagtccgaaaggtccctgagtagattggaagcagtgacagcacgctcctttgaagagga

SEQ ID NO: 367546 - DNA, 120 bp, Artificial Sequence
  ENSG00000141447_14 (sequence is synthesized)
aggagagcatttgggcagtagaaaacacagaatgtccgaagaaaaagactgtggtggcggagatgctctctccaatggcatcaagaaacacagaacaagtttgccttctcctatgttttc

SEQ ID NO: 367547 - DNA, 120 bp, Artificial Sequence
  ENSG00000141447_15 (sequence is synthesized)
cagaaatgacttcagtatctggagcatcctcagaaaatgtattggaatggaactatccaagatcacgatgccagttatatttaatgagcctctgagcttcctacagcgcctaactgaata

SEQ ID NO: 367548 - DNA, 120 bp, Artificial Sequence
  ENSG00000141447_16 (sequence is synthesized)
catggagcatacttacctcatccacaaggccagttcactctctgatcctgtggaaaggatgcagtgtgtagctgcgtttgctgtatctgctgttgcttctcagtgggaacggactggaaa

SEQ ID NO: 367549 - DNA, 120 bp, Artificial Sequence
  ENSG00000141447_17 (sequence is synthesized)
acaggtcagccatcacccaccaatcagtgcatttcatgctgaaggattaaacaatgacttcatctttcatggctctatctatcccaaactgaaattctgggggaagagtgtagaagcaga

SEQ ID NO: 367550 - DNA, 120 bp, Artificial Sequence
  ENSG00000141447_18 (sequence is synthesized)
acccaaaggaaccatcaccttggagctccttgaacacaatgaggcatatacatggacaaatcccacctgctgtgtgcataatatcattgtgggtaaactgtggatcgaacagtatggcaa

SEQ ID NO: 367551 - DNA, 120 bp, Artificial Sequence
  ENSG00000141447_19 (sequence is synthesized)
tgtggaaattataaaccacaagactggggacaaatgtgtgttgaattttaagccatgtggcctttttggtaaggaattacacaaagttgaaggctacattcaagataaaagcaaaaagaa

SEQ ID NO: 367552 - DNA, 120 bp, Artificial Sequence
  ENSG00000141447_20 (sequence is synthesized)
gctctgtgccctctatgggaagtggactgaatgtttatacagtgttgaccctgccacgtttgacgcttacaaaaaaaatgataagaaaaatacagaagagaagaagaacagcaaacagat

SEQ ID NO: 367553 - DNA, 120 bp, Artificial Sequence
  ENSG00000141447_21 (sequence is synthesized)
gagcacctctgaggagttggatgaaatgccagtgccggattctgaaagtgtattcattatccctggaagcgttcttctatggcgaatagccccacggcctccaaattctgcccagatgta

SEQ ID NO: 367554 - DNA, 120 bp, Artificial Sequence
  ENSG00000141447_22 (sequence is synthesized)
taattttactagttttgcaatggttttgaatgaagtagacaaagacatggagagtgtgattcccaagacagactgcaggttacggcctgacatcagagccatggaaaatggagagataga

SEQ ID NO: 367555 - DNA, 120 bp, Artificial Sequence
  ENSG00000141447_23 (sequence is synthesized)
tcaagctagtgaagaaaaaaaacgacttgaggaaaaacaaagagcagcccgcaaaaacaggtccaagtcagaagaggactggaagacgaggtggttccatcaaggtcctaatccctacaa

SEQ ID NO: 367556 - DNA, 120 bp, Artificial Sequence
  ENSG00000141447_24 (sequence is synthesized)
tggagcacaggactggatttactctggcagctactgggacagaaattacttcaatttgcctgacatttattaaaatgcatacaagtcagggtgtttggctaatctacaaataagtcttaa

SEQ ID NO: 367557 - DNA, 120 bp, Artificial Sequence
  ENSG00000141447_25 (sequence is synthesized)
acctatgtttttaaatttttttcccttggtttctacttatcttttaaaaaaaaaaatgaaaaaacactcatgagataactgcatttcacccaacaaaagcagggtataaggcgatattgg

SEQ ID NO: 367558 - DNA, 120 bp, Artificial Sequence
  ENSG00000141447_26 (sequence is synthesized)
tgatgaaagtcttaggaaaaatgcataattttgctataaaatgtacttatttggaatactattttatatagaggtaagagaacactgctggggaatatgctttttatggttgctgttgcc

SEQ ID NO: 367559 - DNA, 120 bp, Artificial Sequence
  ENSG00000141447_27 (sequence is synthesized)
atatttactgaaggtttatacctaaatgtaactttagctttatggaactatatagtaatcccaaatcaagttattttgaatatttttatgctgtcatgcttgaatgttttagatgtaacc

SEQ ID NO: 367560 - DNA, 120 bp, Artificial Sequence
  ENSG00000141447_28 (sequence is synthesized)
tttgacatatttagaactctcctcctatacaatgtttattctcagatatagaggttatgtcattttataaagacttcattgataagatggcttttattcatactaatcctcccaatgtta

SEQ ID NO: 367561 - DNA, 120 bp, Artificial Sequence
  ENSG00000141447_29 (sequence is synthesized)
ccccttccatcttccaagaagaaaaaaaatgcctgaatattcagaatagatatttctgatttgaaaattctaaagaattaaactggaaaagtatttcatttacttagtgctctgaattta

SEQ ID NO: 367562 - DNA, 120 bp, Artificial Sequence
  ENSG00000141447_30 (sequence is synthesized)
cttttacagttttctgcagtcagtatcattaaaatggttaagtttacatttgaactgaaaatatgtataaaatctagcaattcacaaaaatgccctagaaatatagattttaatcaccat

SEQ ID NO: 367563 - DNA, 120 bp, Artificial Sequence
  ENSG00000141447_31 (sequence is synthesized)
tacataatgacaaaccttgttaaatgcttccacttccagtggcaaatgccactagggaaagtaagttgcactcatgtaagtatcaaactatataaaaggaggccttgtgcatttcaagtt

SEQ ID NO: 367564 - DNA, 120 bp, Artificial Sequence
  ENSG00000141447_32 (sequence is synthesized)
tgcaaagtacctgtgtacttaaaatatgtgtggagacctactgtacagtagttttgcccctttaattggggcacattcatcttaaatcttatagtatttatccacccaaaccccagactg

SEQ ID NO: 367565 - DNA, 120 bp, Artificial Sequence
  ENSG00000141447_33 (sequence is synthesized)
agatactgctcccaggggcctaggtagctgccagtccgtgattttaattgctgtcttgaagttaacaagtgttataatgaaataatctacctgatgctaaataaaggctttagaatgttc

SEQ ID NO: 367566 - DNA, 120 bp, Artificial Sequence
  ENSG00000141447_34 (sequence is synthesized)
tgtgtagctgcgtttgctgtatctgctgttgcttctcagtgggaacggactggaaaacctttcaacccactgctgggagagacttatgaattagtgcgacacaatgaggcatatacatgg

SEQ ID NO: 367567 - DNA, 120 bp, Artificial Sequence
  ENSG00000141447_35 (sequence is synthesized)
gggtgaccgcgtaggtcagtttctcgcggctgtccacgcctggagttcgaggccggttcccgcgctgacgggttcccgccgggctgcgctcgggagaaatgaacacagaagcggagcaac

SEQ ID NO: 367568 - DNA, 120 bp, Artificial Sequence
  ENSG00000141447_36 (sequence is synthesized)
ctgcctttacaggacgaaagatctgttctcagggaagctgagatggagatgagtgggcagcaggtttatggagtgctcgtggcatcacacctgtgcacgagggtggggaagaagtggaca

SEQ ID NO: 367569 - DNA, 120 bp, Artificial Sequence
  ENSG00000141447_37 (sequence is synthesized)
ggagtggacaagtcaagtagtgctgccggctcaagcgatgcctcagcctttctgctgtgtgcgaagctttgcagaggagatgatgcttcaaagttgtccctgttggggatgagcagccag

SEQ ID NO: 367570 - DNA, 120 bp, Artificial Sequence
  ENSG00000141447_38 (sequence is synthesized)
gcctttatacactgggacagtcagtcatggatacgtggatactctggaaaccctcatccctggaggtctgagcccctggataccatgcccttcttaggctggagttgctgcccttgtcca

SEQ ID NO: 367571 - DNA, 120 bp, Artificial Sequence
  ENSG00000141447_39 (sequence is synthesized)
atgtgtacagccctacttttttctgctgatcaagttcaattacttctgctaagatggtgactattcttgcctgctggtccttggatgcaaggaccccaatgttcaggcagcctttggtgc

SEQ ID NO: 367572 - DNA, 120 bp, Artificial Sequence
  ENSG00000141447_40 (sequence is synthesized)
cttctagcatacgaatcagagcattatctttaggtgtggaataagctgccccaaaacctgttgaagccaaccaggcactgtgctcccttctgttatgggaagtgcaagatgcagtaattt

SEQ ID NO: 367573 - DNA, 120 bp, Artificial Sequence
  ENSG00000141447_41 (sequence is synthesized)
attcttctgaggaagtgtcttgtcattgcccagaccagtgaacttctaaaaatttactgacatggaaaagctcctgaattcttcctaagttttacctcccacccactggatcagatatgt

SEQ ID NO: 367574 - DNA, 120 bp, Artificial Sequence
  ENSG00000141447_42 (sequence is synthesized)
cttaccaaggctttgaacatcctagcctcgtggagaagaagcctcttctcctggttctgttagcatgatgttatgaaaggaaattaaattttgggaccccaaactcattttgccaaaggg

SEQ ID NO: 367575 - DNA, 120 bp, Artificial Sequence
  ENSG00000141447_43 (sequence is synthesized)
aaaaatcaagctgagaactgggtcatgcaaacctgcctcccccttttggttcctaaataaggtggctacaagaggaaaagctacatgcctcccccatattttgctcacaaggaaattcct

SEQ ID NO: 367576 - DNA, 120 bp, Artificial Sequence
  ENSG00000141447_44 (sequence is synthesized)
agtgagcaatgcaaagtgatagcttatctttacaggtgcagtcacccaggcccaccacacgcaaatgcatatctaattgttcccctgccccattttgtctgtgttatgtagaatgcagat

SEQ ID NO: 367577 - DNA, 120 bp, Artificial Sequence
  ENSG00000141447_45 (sequence is synthesized)
tccctacgtttttcttctgccccgtttatgtcatcttatgtaaaaacatgcagattcatggagccagacaaaggcatgactatcttttcccacccacccccttacctgaaaattgtgtac

SEQ ID NO: 367578 - DNA, 120 bp, Artificial Sequence
  ENSG00000141447_46 (sequence is synthesized)
ttctcaatatcctgccctttcccctttaaatttgaagccctcaaaaatcatcttcagagaaagatgtctgtctcctgggtgcgtgtccttaactttggcaaataaatctaaaatgattga

SEQ ID NO: 367579 - DNA, 120 bp, Artificial Sequence
  ENSG00000141447_47 (sequence is synthesized)
ccagggccggtgtctccaggagagggccgagcgcacagcagctctaggacctcgcaggcgcctcggcgcggcactcacgtagagcccaaggagcagtccccgacctctcctcggagggcc

SEQ ID NO: 367580 - DNA, 120 bp, Artificial Sequence
  ENSG00000141447_48 (sequence is synthesized)
cccaaggagcagtccccgacctctcctcggagggccgtgcaggcttccccggcggtccctacctgcgcctccgcccgccagcggcgctggggaaggggaggagcggcccggacgctgccc

SEQ ID NO: 367581 - DNA, 80 bp, Artificial Sequence
  ENSG00000141447_49 (sequence is synthesized)
cccgcgctctccccgcgagccccggagggcgggtctgcggccgagccagcggcggcggaggggcagcgcagacctctgcg

SEQ ID NO: 367582 - DNA, 120 bp, Artificial Sequence
  ENSG00000141447_50 (sequence is synthesized)
cgctggcgggcaacgcctctgcccgacctcgctggggaaggctggcgctgctgcccggccggagccaggggcaggctgcgcaaaggtgacttagggagaccttgcgggccgccctgggtc

SEQ ID NO: 367583 - DNA, 120 bp, Artificial Sequence
  ENSG00000141447_51 (sequence is synthesized)
gcgcctcccggatcggctcgcctcggctcgactggaggggaggaggaggagcaggccgagcgcattcgcgctggagcttgcgaggagcgcagggtggagcgcgccagccggggtcctcgg

SEQ ID NO: 367584 - DNA, 120 bp, Artificial Sequence
  ENSG00000141447_52 (sequence is synthesized)
aaggtaaagcatcattaatgaatggagaagtcttctgaagtgacaccagtgccttatccctagaggaatatcagcatagaaagcacagtcatgccaacagcgactagatagggaaatttc

SEQ ID NO: 367585 - DNA, 120 bp, Artificial Sequence
  ENSG00000141447_53 (sequence is synthesized)
tagggaaatttccaactttctcaaaatgattaaggagtgtgacatggctaaagttctcaagagttgactataaatagcctacaaggctgggcgctgtggctcacacctgtaatcctggca

SEQ ID NO: 367586 - DNA, 72 bp, Artificial Sequence
  ENSG00000141447_54 (sequence is synthesized)
gaaaaataaatagcctacaaatcaaacttaagtattgagaaaaagaaatgcttccatcatttcttcagaaag

SEQ ID NO: 367587 - DNA, 120 bp, Artificial Sequence
  ENSG00000141447_55 (sequence is synthesized)
tattgagaaaaagaaatgcttccatcatttcttcagaaagttgaagttgtctcagaagcttctagagaaacttgtgtagctttgactgattgccttaatctcttcaccaaacaagaaggg

SEQ ID NO: 367588 - DNA, 120 bp, Artificial Sequence
  ENSG00000141447_56 (sequence is synthesized)
tggagcatcctcagaaaatgtattggaatggtaaattaatggttttgtcatatgatattaagcagatatgtttaatcgcatattctttagaaaggaacctaaaagtttgcattaaagtgg

SEQ ID NO: 367589 - DNA, 120 bp, Artificial Sequence
  ENSG00000141447_57 (sequence is synthesized)
tcattctatgttcaatgtttgtaagtgaggtatttggaggagtagttaccattgttttctctgttataaccatctgaccagcaaccgaagaaagccacacaaaaaaatgtatacaccagc

SEQ ID NO: 367590 - DNA, 120 bp, Artificial Sequence
  ENSG00000141447_58 (sequence is synthesized)
actttgggtcaaaaggccacaggatctttgagtctgacagtgaggtccagtactaaggtcatggagacccccactctgtagcatccctgtgaggagatcattccgtttctgcttgtgtac

SEQ ID NO: 367591 - DNA, 120 bp, Artificial Sequence
  ENSG00000141447_59 (sequence is synthesized)
tccagcaatggggaactcctgattattcttttttttaaaaaaaaaatagcttcattgaggtataacttacattgcataaacttcacctgtgatattgtgaaatatatatttggtctttga

SEQ ID NO: 367592 - DNA, 120 bp, Artificial Sequence
  ENSG00000141447_60 (sequence is synthesized)
ccttgtacactaaagatgtacaaaaagatggctggcaacccctaggtggcttcaggatgggggctggtcaccagaaagaccaaggcaggactagggggttgggactttcagccgaacttt

SEQ ID NO: 367593 - DNA, 120 bp, Artificial Sequence
  ENSG00000141447_61 (sequence is synthesized)
aaagcaatagttcatcattcaagacacttaattgttctttattaaataaatacatgaattaggttagcctgattaattaaaattgtatgtttaatcattagatttttttattactagctt

SEQ ID NO: 367594 - DNA, 120 bp, Artificial Sequence
  ENSG00000141447_62 (sequence is synthesized)
aataaaagtaggcatattaatgaagattttattttcagttctgagtgtgacagttgaaaaaataaccaaagcacaccctaaataattaaaaaataatgtcaatacacaaataaaaattaa

SEQ ID NO: 367595 - DNA, 120 bp, Artificial Sequence
  ENSG00000141448_0 (sequence is synthesized)
ctcctcctcctcttcacctccagcgcccagctgctcgctgagcgcagttccgacccacagcctggcacccttcggcgagcgctgtttgtttagggctcggtgagtccaatcaggagccca

SEQ ID NO: 367596 - DNA, 120 bp, Artificial Sequence
  ENSG00000141448_1 (sequence is synthesized)
ggctgcagttttccggcagagcagtaagaggcgcctcctctctcctttttattcaccagcagcgcggcgcagaccccggactcgcgctcgcccgctggcgccctcggcttctctccgcgc

SEQ ID NO: 367597 - DNA, 120 bp, Artificial Sequence
  ENSG00000141448_2 (sequence is synthesized)
ctgggagcaccctccgccgcggccgttctccatgcgcagcgcccgcccgaggagctagacgtcagcttggagcggcgccggaccgtggatggccttgactgacggcggctggtgcttgcc

SEQ ID NO: 367598 - DNA, 120 bp, Artificial Sequence
  ENSG00000141448_3 (sequence is synthesized)
gaagcgcttcggggccgcgggtgcggacgccagcgactccagagcctttccagcgcgggagccctccacgccgccttcccccatctcttcctcgtcctcctcctgctcccggggcggaga

SEQ ID NO: 367599 - DNA, 120 bp, Artificial Sequence
  ENSG00000141448_4 (sequence is synthesized)
gcggggccccggcggcgccagcaactgcgggacgcctcagctcgacacggaggcggcggccggacccccggcccgctcgctgctgctcagttcctacgcttcgcatcccttcggggctcc

SEQ ID NO: 367600 - DNA, 120 bp, Artificial Sequence
  ENSG00000141448_5 (sequence is synthesized)
ccacggaccttcggcgcctggggtcgcgggccccgggggcaacctgtcgagctgggaggacttgctgctgttcactgacctcgaccaagccgcgaccgccagcaagctgctgtggtccag

SEQ ID NO: 367601 - DNA, 120 bp, Artificial Sequence
  ENSG00000141448_6 (sequence is synthesized)
ccgcggcgccaagctgagccccttcgcacccgagcagccggaggagatgtaccagaccctcgccgctctctccagccagggtccggccgcctacgacggcgcgcccggcggcttcgtgca

SEQ ID NO: 367602 - DNA, 120 bp, Artificial Sequence
  ENSG00000141448_7 (sequence is synthesized)
ctctgcggccgcggcggcagcagccgcggcggcggccagctccccggtctacgtgcccaccacccgcgtgggttccatgctgcccggcctaccgtaccacctgcaggggtcgggcagtgg

SEQ ID NO: 367603 - DNA, 120 bp, Artificial Sequence
  ENSG00000141448_8 (sequence is synthesized)
ctaccgtaccacctgcaggggtcgggcagtgggccagccaaccacgcgggcggcgcgggcgcgcaccccggctggcctcaggcctcggccgacagccctccatacggcagcggaggcggc

SEQ ID NO: 367604 - DNA, 80 bp, Artificial Sequence
  ENSG00000141448_9 (sequence is synthesized)
cgctggctcagccgcggcgcacgtctcggcgcgcttcccctactctcccagcccgcccatggccaacggcgccgcgcggg

SEQ ID NO: 367605 - DNA, 120 bp, Artificial Sequence
  ENSG00000141448_10 (sequence is synthesized)
aggcgtgagcggcggcggcagtagcctggcggccatgggcggccgcgagccccagtacagctcgctgtcggccgcgcggccgctgaacgggacgtaccaccaccaccaccaccaccacca

SEQ ID NO: 367606 - DNA, 120 bp, Artificial Sequence
  ENSG00000141448_11 (sequence is synthesized)
ccaccatccgagcccctactcgccctacgtgggggcgccactgacgcctgcctggcccgccggacccttcgagaccccggtgctgcacagcctgcagagccgcgccggagccccgctccc

SEQ ID NO: 367607 - DNA, 120 bp, Artificial Sequence
  ENSG00000141448_12 (sequence is synthesized)
ggtgccccggggtcccagtgcagacctgctggaggacctgtccgagagccgcgagtgcgtgaactgcggctccatccagacgccgctgtggcggcgggacggcaccggccactacctgtg

SEQ ID NO: 367608 - DNA, 120 bp, Artificial Sequence
  ENSG00000141448_13 (sequence is synthesized)
caacgcctgcgggctctacagcaagatgaacggcctcagccggcccctcatcaagccgcagaagcgcgtgccttcatcacggcggcttggattgtcctgtgccaactgtcacaccacaac

SEQ ID NO: 367609 - DNA, 120 bp, Artificial Sequence
  ENSG00000141448_14 (sequence is synthesized)
taccaccttatggcgcagaaacgccgagggtgaacccgtgtgcaatgcttgtggactctacatgaaactccatggggtgcccagaccacttgctatgaaaaaagagggaattcaaaccag

SEQ ID NO: 367610 - DNA, 120 bp, Artificial Sequence
  ENSG00000141448_15 (sequence is synthesized)
attgcagcaaaaatacttcccccacaacacaacctacagcctcaggggcgggtgccccggtgatgactggtgcgggagagagcaccaatcccgagaacagcgagctcaagtattcgggtc

SEQ ID NO: 367611 - DNA, 120 bp, Artificial Sequence
  ENSG00000141448_16 (sequence is synthesized)
aagatgggctctacataggcgtcagtctcgcctcgccggccgaagtcacgtcctccgtgcgaccggattcctggtgcgccctggccctggcctgagcccacgccgccaggaggcagggag

SEQ ID NO: 367612 - DNA, 120 bp, Artificial Sequence
  ENSG00000141448_17 (sequence is synthesized)
ggctccgccgcgggcctcactccactcgtgtctgcttttgtgcagcggtccagacagtggcgactgcgctgacagaacgtgattctcgtgcctttattttgaaagagatgtttttcccaa

SEQ ID NO: 367613 - DNA, 120 bp, Artificial Sequence
  ENSG00000141448_18 (sequence is synthesized)
gaggcttgctgaaagagtgagagaagatggaagggaagggccagtgcaactgggcgcttgggccactccagccagcccgcctccggggcggaccctgctccacttccagaagccaggact

SEQ ID NO: 367614 - DNA, 120 bp, Artificial Sequence
  ENSG00000141448_19 (sequence is synthesized)
aggacctgggccttgcctgctatggaatattgagagagattttttaaaaaagattttgcattttgtccaaaatcatgtgcttcttctgatcaattttggttgttccagaatttcttcata

SEQ ID NO: 367615 - DNA, 120 bp, Artificial Sequence
  ENSG00000141448_20 (sequence is synthesized)
ccttttccacatccagatttcatgtgcgttcatggagaagatcacttgaggccatttggtacacatctctggaggctgagtcggttcatgaggtctcttatcaaaaatattactcagttt

SEQ ID NO: 367616 - DNA, 120 bp, Artificial Sequence
  ENSG00000141448_21 (sequence is synthesized)
gcaagactgcattgtaactttaacatacactgtgactgacgtttctcaaagttcatattgtgtggctgatctgaagtcagtcggaatttgtaaacagggtagcaaacaagatatttttct

SEQ ID NO: 367617 - DNA, 120 bp, Artificial Sequence
  ENSG00000141448_22 (sequence is synthesized)
tccatgtatacaataatttttttaaaaagtgcaatttgcgttgcagcaatcagtgttaaatcatttgcataagatttaacagcattttttataatgaatgtaaacattttaacttaatgg

SEQ ID NO: 367618 - DNA, 120 bp, Artificial Sequence
  ENSG00000141448_23 (sequence is synthesized)
tacttaaaataatttaaaagaaaaatgttaacttagacattcttatgcttcttttacaactacatcccattttatatttccaattgttaaagaaaaatatttcaagaacaaatcttctct

SEQ ID NO: 367619 - DNA, 120 bp, Artificial Sequence
  ENSG00000141448_24 (sequence is synthesized)
caggaaaattgcctttctctatttgttaagaatttttatacaagaacaccaatataccccctttattttactgtggaatatgtgctggaaaaattgcaacaacactttactacctaacgg

SEQ ID NO: 367620 - DNA, 120 bp, Artificial Sequence
  ENSG00000141448_25 (sequence is synthesized)
atagcatttgtaaatactctaggtatctgtaaacactctgatgaagtctgtatagtgtgactaacccacaggcaggttggtttacattaatttttttttttgaatgggatgtcctatgga

SEQ ID NO: 367621 - DNA, 120 bp, Artificial Sequence
  ENSG00000141448_26 (sequence is synthesized)
aacctatttcaccagagttttaaaaataaaaagggtattgttttgtcttctgtacagtgagttccttcccttttcaaagctttctttttatgctgtatgtgactatagatattcatataa

SEQ ID NO: 367622 - DNA, 120 bp, Artificial Sequence
  ENSG00000141448_27 (sequence is synthesized)
aacaagtgcacgtgaagtttgcaaaatgctttaaggccttcctttcaaagcatagtccttttggagccgttttgtaccttttataccttggcttatttgaagttgacacatggggttagt

SEQ ID NO: 367623 - DNA, 120 bp, Artificial Sequence
  ENSG00000141448_28 (sequence is synthesized)
tactactctccatgtgcattggggacagtttttataagtgggaaggactcagtattattatatttgagatgataagcattttgtttgggaacaatgcttaaaaatattccagaaagttca

SEQ ID NO: 367624 - DNA, 120 bp, Artificial Sequence
  ENSG00000141448_29 (sequence is synthesized)
gattttttttctttgtgaatgaaatatattctggcccacgaacagggcgatttcctttcagttttttccttttgcaacgtgccttgaagtctcaaagctcacctgaggttgcagacgtta

SEQ ID NO: 367625 - DNA, 120 bp, Artificial Sequence
  ENSG00000141448_30 (sequence is synthesized)
cccccaacagaagataggtagaaatgattccagtggcctctttgtattttcttcattgttgagtagatttcaggaaatcaggaggtgtttcacaatacagaatgatggcctttaactgtg

SEQ ID NO: 367626 - DNA, 120 bp, Artificial Sequence
  ENSG00000141448_31 (sequence is synthesized)
attgatctccacgcccggggcagaaataggatctttgagaagtctcaaatgggatctttgagaagtcagatcccatttgaactagaaaaaggagtggaggcgaggtagcgtgcagcctac

SEQ ID NO: 367627 - DNA, 120 bp, Artificial Sequence
  ENSG00000141449_0 (sequence is synthesized)
tagcacctcggagtcgggcggccggagcagcggagcgcagcgcggcgcagggaacggcactgggggtggggagaccagcccggccgagccgagggccaccccctggtcctctgccctcgc

SEQ ID NO: 367628 - DNA, 120 bp, Artificial Sequence
  ENSG00000141449_1 (sequence is synthesized)
ggtcctctgccctcgcgccccgctagggccaggtgcacaaaaagctttaaacaagttaaaatctaggcaacagactccctgaagtgttgactgcccaacttaatcatgactgtgattcaa

SEQ ID NO: 367629 - DNA, 120 bp, Artificial Sequence
  ENSG00000141449_2 (sequence is synthesized)
aaatgttaataaataaaccaaggtgtagatcatggggaattcatatgctgggcaactgaaatctgctcgatttgaggaagctctccacaactccatagaagcctccctcagatgtagtag

SEQ ID NO: 367630 - DNA, 120 bp, Artificial Sequence
  ENSG00000141449_3 (sequence is synthesized)
tgtggtaccacggccaattttttcccagctatacctggaccctgaccagcatcctttctcatctgcagatgtcaaacccaaggtggaggatctggacaaagatttggtaaaccgctacac

SEQ ID NO: 367631 - DNA, 120 bp, Artificial Sequence
  ENSG00000141449_4 (sequence is synthesized)
tcaaaatggaagtctggatttttctaacaatctaacagttaatgaaatggaagatgatgaagacgatgaagaaatgtctgattcaaacagcccaccaattccctattcacaaaaacctgc

SEQ ID NO: 367632 - DNA, 120 bp, Artificial Sequence
  ENSG00000141449_5 (sequence is synthesized)
cccagaaggatcttgcactacagatggtttttgtcaagcaggaaaggatttgcgtttggtatcactgtgtatggaacaaattgacatcccagcaggattcctcctggtgggggccaagtc

SEQ ID NO: 367633 - DNA, 120 bp, Artificial Sequence
  ENSG00000141449_6 (sequence is synthesized)
tcccaatctgcctgaacacatcctagtttgtgctgtggacaagcgatttctaccagatgatcatggaaaaaatgcacttttagggttttctggaaattgtatcggctgtggagaaagagg

SEQ ID NO: 367634 - DNA, 120 bp, Artificial Sequence
  ENSG00000141449_7 (sequence is synthesized)
atttcgatatttcacggaattttccaaccacattaacttgaagctcaccactcagccaaagaagcagaagcacttaaagtactacctagtcagaagctcccagggtgtactgtctaaagg

SEQ ID NO: 367635 - DNA, 120 bp, Artificial Sequence
  ENSG00000141449_8 (sequence is synthesized)
acctcttatctgctggaaagaatgtagaagccgacaatcctctgcttcttgccactctattaagccaagctcttcagtgtcgtcaactgtgaccccagaaaatgggacaactaatggata

SEQ ID NO: 367636 - DNA, 120 bp, Artificial Sequence
  ENSG00000141449_9 (sequence is synthesized)
caaatcaggattcactcagacagatgctgctaatggaaacagtagccatggagggaagggcagtgcatccagctccactccagcccacacagggaattactctttgtcaccacgacctag

SEQ ID NO: 367637 - DNA, 120 bp, Artificial Sequence
  ENSG00000141449_10 (sequence is synthesized)
ctatgcatcaggagatcaagctaccatgttcatttctgggccaccaaagaaacgacaccggggatggtatcctgggtcacctctcccccaacctggcttagttgtacctgtccctacagt

SEQ ID NO: 367638 - DNA, 120 bp, Artificial Sequence
  ENSG00000141449_11 (sequence is synthesized)
tcgccctctttcaagaacggagccccttttatctgccccagttccacagaccccactaactggaattttacaacccaggcccattcctgcaggggaaactgtaattgttcctgaaaacct

SEQ ID NO: 367639 - DNA, 120 bp, Artificial Sequence
  ENSG00000141449_12 (sequence is synthesized)
gctgagtaactcaggagttagaccagtaattctgataggctatggcactttaccctatttctatggaaatgttggtgacattgttgtgagtcctctgctggtgaattgctacaagattcc

SEQ ID NO: 367640 - DNA, 120 bp, Artificial Sequence
  ENSG00000141449_13 (sequence is synthesized)
acagttggaaaacaaagatttggaaaaattagggttgaccggcagccaatttctgagcgtggaaaacatgattcttctgacgatacagtatcttgtgcggctgggtcctgatcaggtacc

SEQ ID NO: 367641 - DNA, 120 bp, Artificial Sequence
  ENSG00000141449_14 (sequence is synthesized)
tctcagggaagaatttgagcaaattatgctgaaagctatgcaagaatttactctgagagaaagagccctgcagataggtgctcagtgtgtccctgtgtcaccaggacaactcccctggct

SEQ ID NO: 367642 - DNA, 120 bp, Artificial Sequence
  ENSG00000141449_15 (sequence is synthesized)
tgctagattaattgccagcgtatctcaagacttggttcatgtggttgtgacccagaactctttggcggagggcatttcagagaccttaaggactctcagtgaaatgagacactatcaaag

SEQ ID NO: 367643 - DNA, 120 bp, Artificial Sequence
  ENSG00000141449_16 (sequence is synthesized)
gctgccagattatgtggtggtaatttgtgcatcgaaaatcagaggaaatgaattttgtgtggtagtgttaggtcagcaccagtcccgagctctggcagagagcatgctcaccacaagtga

SEQ ID NO: 367644 - DNA, 120 bp, Artificial Sequence
  ENSG00000141449_17 (sequence is synthesized)
gtttttgaaagaaattagttatgagcttatcacaggaaaggtcagtttcctggcatcacatttcaaaaccacatcattaggcgatgacctagacaagctgctggaaaaaatgcaacaaag

SEQ ID NO: 367645 - DNA, 120 bp, Artificial Sequence
  ENSG00000141449_18 (sequence is synthesized)
aagaggagacagtgtggttacccctttcgatggagaccttaatgaatgtgtgtcaccccaggaggctgctgctatgattcccacacaaaacctggatttagataatgaaaccttccacat

SEQ ID NO: 367646 - DNA, 120 bp, Artificial Sequence
  ENSG00000141449_19 (sequence is synthesized)
ttatcaaccgcagctaacagttgccagaaaactcttatcccaggtgtgtgctatagcggacagtggcagccagagcctggacctcggtcacttcagcaaagtagacttcatcatcattgt

SEQ ID NO: 367647 - DNA, 120 bp, Artificial Sequence
  ENSG00000141449_20 (sequence is synthesized)
tcccagatcggaggtgttggttcagcaaactcttcagcggattcgacaatcaggtgtccttgtagacttgggtctggaggaaaatgggacagcccatcagagagcagaaaaatatgttgt

SEQ ID NO: 367648 - DNA, 120 bp, Artificial Sequence
  ENSG00000141449_21 (sequence is synthesized)
tcgtctagacaatgagattcaaaccaagtttgaagtttttatgaggagagtgaaacagaacccgtacacactgtttgtgctagttcatgacaactcccatgtggaactaacgagtgtcat

SEQ ID NO: 367649 - DNA, 120 bp, Artificial Sequence
  ENSG00000141449_22 (sequence is synthesized)
ttcaggctctttgtcacatagcgaacccagtcatgggctagctgatagagtcattaattgcagagaagttctggaagctttcaacctcctggtgctccaggtcagctccttcccatacac

SEQ ID NO: 367650 - DNA, 120 bp, Artificial Sequence
  ENSG00000141449_23 (sequence is synthesized)
tctgcagacccaacagtcccgcattagctctagcaatgaggttcactggatacagctggatactggggaggacgtgggctgcgaggagaagctgtactttggcttgagtgagtacagcaa

SEQ ID NO: 367651 - DNA, 120 bp, Artificial Sequence
  ENSG00000141449_24 (sequence is synthesized)
gtctctgcagtgggggatcacgagcccacttctgagatgtgacgagacttttgaaaaaatggtgaacacactcttggagaggtaccccaggctgcacagcatggtcgtccgctgctatct

SEQ ID NO: 367652 - DNA, 120 bp, Artificial Sequence
  ENSG00000141449_25 (sequence is synthesized)
ctccgcgaccacagcacaccagaaacactcagcattatggatgacctcatcagctccccaggcaaaaacaaaagtgggaggggacacatgctcattatcagggtgccctcggtgcagctg

SEQ ID NO: 367653 - DNA, 120 bp, Artificial Sequence
  ENSG00000141449_26 (sequence is synthesized)
gcgatgttagccaaggagcggctacaggaggtgcgcgacaaactgggtctgcagtatcggtttgagatcatccttgggaacccggccaccgaactcagtgttgcaactcactttgtggcg

SEQ ID NO: 367654 - DNA, 120 bp, Artificial Sequence
  ENSG00000141449_27 (sequence is synthesized)
cgattaaagagttggagaggaaatgaaccagaagagtggatccctcggacataccaagatttagacggtctaccttgtattgtgatattaactggcaaagatcctcttggagaaaccttt

SEQ ID NO: 367655 - DNA, 120 bp, Artificial Sequence
  ENSG00000141449_28 (sequence is synthesized)
cccaggtctttgaagtactgtgacctccggttaattgactcaagctatttaactcgcacggccttggagcaggaggtgggtctggcatgctgctatgtctcaaaagaggtcatccgggga

SEQ ID NO: 367656 - DNA, 120 bp, Artificial Sequence
  ENSG00000141449_29 (sequence is synthesized)
cccactgttgccctggacctcagcgggaaggagcaggagagagctgctgtcagtgagaatgactccgatgagctgctcatcgacctggagcggccccagagcaacagcagcgctgtcaca

SEQ ID NO: 367657 - DNA, 120 bp, Artificial Sequence
  ENSG00000141449_30 (sequence is synthesized)
gggacctcgggttccatcatggagaatggagtgagctcttccagcacagctgacaagtcccagaagcagtccctgacccccagctttcagagcccagccaccagcttggggctggatgaa

SEQ ID NO: 367658 - DNA, 120 bp, Artificial Sequence
  ENSG00000141449_31 (sequence is synthesized)
ggggtctccgccagctcagctggagccggagccggggagactctgaagcaggaatgtgactccctgggcccccagatggcgagcagcaccacctccaagccgtcatcatcatcctcagga

SEQ ID NO: 367659 - DNA, 120 bp, Artificial Sequence
  ENSG00000141449_32 (sequence is synthesized)
cccaggaccctcccatggccgggacagcccatcagaggctgccggggcccacaggcagccctgccaccagtggtgatcctatccaaagcggcctacagtctcctgggctcccagaagagt

SEQ ID NO: 367660 - DNA, 120 bp, Artificial Sequence
  ENSG00000141449_33 (sequence is synthesized)
ggcaagctgccatcctcctcctccctgctgccccacgccgacgtggcctgggtgagctccctgcggccactcctgaacaaggacatgagcagtgaggagcagtccctctactacaggcag

SEQ ID NO: 367661 - DNA, 120 bp, Artificial Sequence
  ENSG00000141449_34 (sequence is synthesized)
tggaccttggcccggcagcaccacgctgactatagcaaccagctggacccggcctctggcacccgaaacttccacccccgacggctcctgctgacagggcccccacaggtgggaaagacg

SEQ ID NO: 367662 - DNA, 120 bp, Artificial Sequence
  ENSG00000141449_35 (sequence is synthesized)
ggctcctatttacagttcctcaggatcctcttccgcatgctcatcaggctcctggaggtggacgtgtatgatgaggaggagatcaacaccgatcacaatgaaagcagtgaagtgagccag

SEQ ID NO: 367663 - DNA, 120 bp, Artificial Sequence
  ENSG00000141449_36 (sequence is synthesized)
tcagagggagagccctggcctgacatcgagagcttcagtaaaatgccttttgatgtcagtgtgcatgaccccaagtacagtttgatgagcctggtgtatactgagaagctggcaggggtc

SEQ ID NO: 367664 - DNA, 120 bp, Artificial Sequence
  ENSG00000141449_37 (sequence is synthesized)
aaacaagaagtgataaaggaatccaaagttgaagagcccaggaaacgggaaactgtatccataatgctgaccaaatatgcagcctataacacctttcaccactgtgaacagtgccgccag

SEQ ID NO: 367665 - DNA, 120 bp, Artificial Sequence
  ENSG00000141449_38 (sequence is synthesized)
tacatggacttcacctctgcctcccagatgtctgactccacccttcatgccttcacattctcttcttctatgctgggagaagaggttcagctctatttcatcattcccaaatccaaagag

SEQ ID NO: 367666 - DNA, 120 bp, Artificial Sequence
  ENSG00000141449_39 (sequence is synthesized)
agtcattttgtcttcagcaagcagggcaagcacctggagagcatgcggctgcccctggtttcagacaagaatttgaatgcagtcaagagccctattttcactccttccagtggtcgacat

SEQ ID NO: 367667 - DNA, 120 bp, Artificial Sequence
  ENSG00000141449_40 (sequence is synthesized)
gagcacggactcctaaaccttttccacgccatggagggcatcagccaccttcacctcctggtggtcaaagagtatgagatgcctctgtaccgcaagtactggcccaaccacatcatgctg

SEQ ID NO: 367668 - DNA, 120 bp, Artificial Sequence
  ENSG00000141449_41 (sequence is synthesized)
gtgcttcccggcatgttcaataatgcaggcgtgggtgctgccaggttcctcatcaaggagctatcatatcacaacctagaattggagagaaaccgcctggaggagctaggcattaaacgc

SEQ ID NO: 367669 - DNA, 120 bp, Artificial Sequence
  ENSG00000141449_42 (sequence is synthesized)
cagtgtgtctggcctttcatcgtcatgatggatgactcatgtgtcctatggaacattcacagtgttcaggagccatccagccagcccatggaagtaggagtttccagtaagaatgtgtcc

SEQ ID NO: 367670 - DNA, 120 bp, Artificial Sequence
  ENSG00000141449_43 (sequence is synthesized)
ttgaagactgtcttgcagcacattgaagccacaccaaaaattgtccactatgcaatcttgggcatacagaaatggagcagcaagctgacttctcagagcctaaaggccccattctctagg

SEQ ID NO: 367671 - DNA, 120 bp, Artificial Sequence
  ENSG00000141449_44 (sequence is synthesized)
tgtcacgtgcatgatttcattctcctcaacacagacttgactcagaatgtgcagtatgacttcaacaggtatttctgtgaagatgctgactttaatctgagaacaaacagtagtggcctg

SEQ ID NO: 367672 - DNA, 120 bp, Artificial Sequence
  ENSG00000141449_45 (sequence is synthesized)
ctcatctgccgctttaataacttcagtctcatgaagaaacatgttcaggttggagggcaaagggactttatcattaaaccaaagatcatggtgtcagagagcttagcacccatcttgccc

SEQ ID NO: 367673 - DNA, 120 bp, Artificial Sequence
  ENSG00000141449_46 (sequence is synthesized)
cttcaatacatctgtgctcccgacagtgaacacacactactggcagcccctgcacagtttctcctggagaaattccttcagcacgcctcatataaactcttccccaaagccatccataac

SEQ ID NO: 367674 - DNA, 120 bp, Artificial Sequence
  ENSG00000141449_47 (sequence is synthesized)
ttcaggagtcctgtgctggccattgactgctaccttaacattggaccagaggtggccatatgctatatcagctccagaccccactccagcaatgtcaactgtgaaggggtgtttttcagt

SEQ ID NO: 367675 - DNA, 120 bp, Artificial Sequence
  ENSG00000141449_48 (sequence is synthesized)
ggactccttttgtacctctgtgactcttttgtaggtgctgatcttaagaaatttaaatttctaaaaggtgctacactgtgtgtcatctgccaagacagaagttccttgcgccaaacaatt

SEQ ID NO: 367676 - DNA, 120 bp, Artificial Sequence
  ENSG00000141449_49 (sequence is synthesized)
gtccgcttagagctagaagatgagtggcagttccgcctccgggacgagtttcaaactgctaacagcagtgatgacaagcctctctactttcttactggacgtcatgtatgagcttttgaa

SEQ ID NO: 367677 - DNA, 120 bp, Artificial Sequence
  ENSG00000141449_50 (sequence is synthesized)
gtttctgagagcatctgtcactttaggcattacaagatggatgggtctccagtgaactgctggttgaagcaaatggtgaaaataagaaaatcaaggggtttcagggtctgcagaggggac

SEQ ID NO: 367678 - DNA, 120 bp, Artificial Sequence
  ENSG00000141449_51 (sequence is synthesized)
agacaacaaggaaacactgttagaaatcaagagtaagctgagcaatagaggaagagagcaaagatggatcagatgtcattttataaacatcttggaaatcagaatcttttggtggctttc

SEQ ID NO: 367679 - DNA, 120 bp, Artificial Sequence
  ENSG00000141449_52 (sequence is synthesized)
gtgatctgagggagacatctgcatcatggtgcacaaaaagctttaaacaagttaaaatctaggcaacagactccctgaagtgttgactgcccaacttaatcatgactgtgattcaaaaat

SEQ ID NO: 367680 - DNA, 120 bp, Artificial Sequence
  ENSG00000141449_53 (sequence is synthesized)
ctttaaagtacaatcactgtggagcaaagtgcaacatatttgtctaaattctccaaagaactccccaaatctgatccaggtctttggggacatcactttccttcagttccaattacagga

SEQ ID NO: 367681 - DNA, 120 bp, Artificial Sequence
  ENSG00000141449_54 (sequence is synthesized)
cccttaaattcaggtaaactctatcctaggcagttatgcaattacttaagatacggtctgcccatgggatcctgaggaggatatactttggagagtgaatatggagtttgcattattttt

SEQ ID NO: 367682 - DNA, 120 bp, Artificial Sequence
  ENSG00000141449_55 (sequence is synthesized)
ttctattactatgttagggggaaactgactgtcaggattaactagcctgaatgtgttacatgagactcatgccattggtgtggaatcaattgaagattaacgtttgaggcctgaaccctc

SEQ ID NO: 367683 - DNA, 120 bp, Artificial Sequence
  ENSG00000141449_56 (sequence is synthesized)
agtttctcttcagatctgtactttggtacagtattactcaggggtttgaaatgatagaatgtagacgatatttgtatttaaaaaaagaagtagctttgtctttctctgtgcagtgttagt

SEQ ID NO: 367684 - DNA, 120 bp, Artificial Sequence
  ENSG00000141449_57 (sequence is synthesized)
ttaagatttataatcttctatgtattgaaacttttggcaaaatttccacaggagttagaagtttactatttaaactgaacaaacaaatcagtaaatgcagagcaggcattgtgtgcattt

SEQ ID NO: 367685 - DNA, 120 bp, Artificial Sequence
  ENSG00000141449_58 (sequence is synthesized)
atgcatcttctcctagcctaattcctttgctttacccactctttaaatgtgtttccagtctttaagaatatcttatctatgagactatggaacagtgattaatcttttgcaagaacttaa

SEQ ID NO: 367686 - DNA, 120 bp, Artificial Sequence
  ENSG00000141449_59 (sequence is synthesized)
gtcagttaagaagctttcagcaggtaacctgcacccaccgtttggttggaattaagcagttggcaccagcaaacctaaatgtcaggctgaggttctgttgcagagtgaaactagtttgtt

SEQ ID NO: 367687 - DNA, 120 bp, Artificial Sequence
  ENSG00000141449_60 (sequence is synthesized)
tcctttcagggactcaagcaaagcttcctttaaaagatgcactaaatattaccaccttacactgacaacgccacagaaattgccgaattgggaaattgagccatagaaagagaaatgttt

SEQ ID NO: 367688 - DNA, 120 bp, Artificial Sequence
  ENSG00000141449_61 (sequence is synthesized)
ttttacttaatcttaccagtgactcttgtgaggagtaaggaagactccattaagagtctttttgattcattaaaatcagcagggggtgtttgtccagtatcggcaatgggaggcatatgt

SEQ ID NO: 367689 - DNA, 120 bp, Artificial Sequence
  ENSG00000141449_62 (sequence is synthesized)
ttctacagatttctcaaatattttaatcaaaaacattatttttagaaagtgttctagataaaactaagtcttagaagtttactcttaaattactccagttctcatcattgaacaatctct

SEQ ID NO: 367690 - DNA, 120 bp, Artificial Sequence
  ENSG00000141449_63 (sequence is synthesized)
tgagagttttctcattagcccatatttactactttatccccacttaaaatggccatttttacttgaatcaatcttgtttgtgacctgaaactactgaggggcctactaagcctgcattta

SEQ ID NO: 367691 - DNA, 120 bp, Artificial Sequence
  ENSG00000141449_64 (sequence is synthesized)
cttagaacaaatagtgttaattgaccagctttattatcttatgacaacaaggagtttacaaagctagtgaaaaaatggaatgtattagactaaaaatggtttgcagatctcttggtttta

SEQ ID NO: 367692 - DNA, 120 bp, Artificial Sequence
  ENSG00000141449_65 (sequence is synthesized)
atatagctacttataatgctttaactgtattttgaagtgaacaattccttttaaccccatttttaattgtccttcaaagaggacctgccttatatatgctttaaaaaatactccttaatt

SEQ ID NO: 367693 - DNA, 120 bp, Artificial Sequence
  ENSG00000141449_66 (sequence is synthesized)
ttagtacagcagaatttttggtaaagaggtatgttttgaagcaatttggtttaaatatgaatgtatttcacttgttcctgttttgttgaaagggcctaatgcaaataataccaagaaacc

SEQ ID NO: 367694 - DNA, 120 bp, Artificial Sequence
  ENSG00000141449_67 (sequence is synthesized)
cactgtctgtgcaatattccaataacatttacatagggcaaataaaatacttgaaagaattctgaaacaattgtacctggggtggatggcctctcagggtttcttctggctttatgactt

SEQ ID NO: 367695 - DNA, 120 bp, Artificial Sequence
  ENSG00000141449_68 (sequence is synthesized)
catagtttaaagaactttttttttaagtagttacatcagatgcaggtactccattagttagggctgcactctgaaaattcaaattattattatgagctcttaaatactatttaactctgg

SEQ ID NO: 367696 - DNA, 120 bp, Artificial Sequence
  ENSG00000141449_69 (sequence is synthesized)
aagagatatgccagaataaagccaaaagaccatcacccctataatggagaaattgatctgcctattcttttcaaagcctatcttactaatgtttggatcttttaaaatcatcttatcatc

SEQ ID NO: 367697 - DNA, 120 bp, Artificial Sequence
  ENSG00000141449_70 (sequence is synthesized)
agtataattcttgagtatgttaggtccttctttaaggataaaattgcacaagcacaggacaccatgatttgtgtgtatatatatatatatcctagtgtgttcagctttaagctttgcaat

SEQ ID NO: 367698 - DNA, 120 bp, Artificial Sequence
  ENSG00000141449_71 (sequence is synthesized)
cccttaggacactgatgtgggatgaatggattcgctaggcccacacagtaactcacctgtagacctgctgaacctcagcatgtatgacagttcacacaggttaatactgaatgtaaacga

SEQ ID NO: 367699 - DNA, 120 bp, Artificial Sequence
  ENSG00000141449_72 (sequence is synthesized)
aaaactagaagacaattgttataattttttttggctgtaatttatgcaattgctttttgtgatttttagaaaatggggcacccgtgttattactgtaaaatgttcttaaccaaaatttgg

SEQ ID NO: 367700 - DNA, 120 bp, Artificial Sequence
  ENSG00000141449_73 (sequence is synthesized)
tgaatttcactagtctacctcacattttgttaatgattcaaaattgtcttgtgtctactgttatatttttgtcctttgatttaatttgcttaatgtattaaagttatctcccaccccctc

SEQ ID NO: 367701 - DNA, 120 bp, Artificial Sequence
  ENSG00000141449_74 (sequence is synthesized)
atcatgccatccataacttcaggagtcctgtgctggccattgactgctaccttaacattggaccagaggtggccatatgctatatcagctccagaccccactccagcaatgtcaactgtg

SEQ ID NO: 367702 - DNA, 120 bp, Artificial Sequence
  ENSG00000141449_75 (sequence is synthesized)
ggggcccccctgggatggggagaagggcttcgaagataaactgagctccattcccctggcatgaaactttcagattcccctgcctctagaaattgtcctgccctcctcaccactcttcgg

SEQ ID NO: 367703 - DNA, 120 bp, Artificial Sequence
  ENSG00000141449_76 (sequence is synthesized)
ttcagcaaactcttcagcggattcgacaatcaggtaagagtgaactttcaaagaggagcccacctagatccagcttcagatcccctctgcctctttcttttgcttaatccaaacgtctag

SEQ ID NO: 367704 - DNA, 120 bp, Artificial Sequence
  ENSG00000141449_77 (sequence is synthesized)
aggatgcttaaaaccttcttcagtaataaaaatcataaaagcactttgttattttgggtttatctgaagttttccctcaaagtactctgtcctttttccctcaaggtcaagggtaaattg

SEQ ID NO: 367705 - DNA, 120 bp, Artificial Sequence
  ENSG00000141449_78 (sequence is synthesized)
ttgtgcatgtttgccaggtatcattaagttcatgatgtaatctgtgggactagaatctggtcatttatggatgaagagaaattttctcaaggcgaggatggccctgcatgggttgatggc

SEQ ID NO: 367706 - DNA, 120 bp, Artificial Sequence
  ENSG00000141449_79 (sequence is synthesized)
gtctgtgccacctgaactcctcccacctgcaggcctcatttgcataggtggattcttggccatctagcacattaacagcacgtctgggacctggaaaccagaacaccatcccccatgtca

SEQ ID NO: 367707 - DNA, 120 bp, Artificial Sequence
  ENSG00000141449_80 (sequence is synthesized)
gcaatgacgttctttaagaaaaaaaggttagcgttatttctaataactttaagtgtaaagaaaaaaaaatgtttttcccagaaaatgtgaaaaggtagagagcaaaaattttacaagtct

SEQ ID NO: 367708 - DNA, 120 bp, Artificial Sequence
  ENSG00000141449_81 (sequence is synthesized)
atttcaaaaccacatcattaggtgagtggttgtaagatttggcaacactggcagcccctagttgtatgattttctgagtttaaatcttagcctgtcaagatgagtgtggagctcaagctt

SEQ ID NO: 367709 - DNA, 120 bp, Artificial Sequence
  ENSG00000141449_82 (sequence is synthesized)
gccagctgatctttcatttgaaatggtttatcctaagtattttgtcactaacaccacaggaagcagtaagggggtctagaggaaggcccattggtactggattcaaaagtctcagctcag

SEQ ID NO: 367710 - DNA, 120 bp, Artificial Sequence
  ENSG00000141449_83 (sequence is synthesized)
atgtgcctgaaggaagtgtgtcaactttccactaatcacatattcagttcctttgaaattaaaagaagtttcacttagtgcctcagagatgactgcagagttggtgtcgggttacataat

SEQ ID NO: 367711 - DNA, 120 bp, Artificial Sequence
  ENSG00000141449_84 (sequence is synthesized)
gaaacagtattttttcttacttgtcaggaaataacctcttacagcggtcatttctgtaaaccccactttctggaaaacaagacacactgtatcctgtcctcattgggtttttgctctgta

SEQ ID NO: 367712 - DNA, 120 bp, Artificial Sequence
  ENSG00000141449_85 (sequence is synthesized)
tcttcatctcctgcaatctatgacatttcttcagtctttcctggcttttcatgaccttaagtgaatactaatcaattgttttgtgtagggaatgtttgagttttctcacaattaaattga

SEQ ID NO: 367713 - DNA, 120 bp, Artificial Sequence
  ENSG00000141449_86 (sequence is synthesized)
ctatgattcccacacaaaacctgggtaatgtcatctcagaccaagaggaggaagtcagtccttgggacagacattgtaaaaactaagtcattctaagggttttgaggattcttcaagtca

SEQ ID NO: 367714 - DNA, 120 bp, Artificial Sequence
  ENSG00000141449_87 (sequence is synthesized)
cagaccacaacagccttttcctgattgtctacatgataaacctggttgaaattaaaaatgctttcccatgtggcctggatcaaaggctttgttcctagtaaaagtcttctggaatgaaaa

SEQ ID NO: 367715 - DNA, 120 bp, Artificial Sequence
  ENSG00000141452_0 (sequence is synthesized)
gcagccgccgctacagtccgggccgggctccaccgcgcatcctgctccactctggcgaccgcccccggggcccccgccgcgggcgcggcgcccgccatgggcgaggaggactactatctg

SEQ ID NO: 367716 - DNA, 120 bp, Artificial Sequence
  ENSG00000141452_1 (sequence is synthesized)
gactactatctggagctgtgcgagcggccggtgcagttcgagaaggcgaaccctgtcaactgcgtcttcttcgatgaggccaacaagcaggtttttgctgttcgatctggtggagctact

SEQ ID NO: 367717 - DNA, 120 bp, Artificial Sequence
  ENSG00000141452_2 (sequence is synthesized)
ggcgtggtagttaaaggcccagatgataggaatcccatctcatttagaatggatgacaaaggagaagtgaagtgcattaagttttccttagaaaataagatattggctgttcagaggacc

SEQ ID NO: 367718 - DNA, 120 bp, Artificial Sequence
  ENSG00000141452_3 (sequence is synthesized)
tcaaagactgtggatttttgtaattttatccctgataattcccagctggaatacacacaggagtgcaagactaagaatgccaacattctaggattctgctggactagttcaactgaaatt

SEQ ID NO: 367719 - DNA, 120 bp, Artificial Sequence
  ENSG00000141452_4 (sequence is synthesized)
gtcttcataacagatcaaggaatcgaattttaccaggtattaccagagaaacggagtctgaaactcttgaagagccacaatctcaatgtgaattggtacatgtactgccccgagagcgcc

SEQ ID NO: 367720 - DNA, 120 bp, Artificial Sequence
  ENSG00000141452_5 (sequence is synthesized)
gtgatcttgctgtctaccacggtcctggagaatgtcctgcagccttttcactttagggctggcactatgtcgaagctgcccaaatttgagattgaattaccagctgcgcctaagtcaact

SEQ ID NO: 367721 - DNA, 120 bp, Artificial Sequence
  ENSG00000141452_6 (sequence is synthesized)
aaacccagcctttccgaaagagacatcgcaatggctaccatatacgggcagctgtatgttctcttcttgaggcatcattctcggacctccaacagcacaggagcggaggtggtcctctat

SEQ ID NO: 367722 - DNA, 120 bp, Artificial Sequence
  ENSG00000141452_7 (sequence is synthesized)
catctaccacgagaaggtgcctgtaaaaagatgcacatattgaagttaaataggacgggaaagtttgccctgaacgtggtggacaacctggtagtcgtgcatcatcaggatacagagaca

SEQ ID NO: 367723 - DNA, 120 bp, Artificial Sequence
  ENSG00000141452_8 (sequence is synthesized)
tcggtaatattcgatatcaagttacggggagagtttgacggctccgttaccttccaccaccccgtgcttcccgctcgatcgatccagccctatcagatccccatcacaggtcctgctgcc

SEQ ID NO: 367724 - DNA, 120 bp, Artificial Sequence
  ENSG00000141452_9 (sequence is synthesized)
catcttggattgtctttcaacctgacatcattatcagcgcaagccaaggttacctctggaacctccaagtgaaacttgagcccatagtaaatctcttaccagacaaaggaagactcatgg

SEQ ID NO: 367725 - DNA, 120 bp, Artificial Sequence
  ENSG00000141452_10 (sequence is synthesized)
actttctcctccagagaaaggaatgcaagatggtcatcctgtctgtctgttcacagatgttaagtgagtcagacagagcatcgctgcccgtgatagccactgtttttgataaactcaacc

SEQ ID NO: 367726 - DNA, 120 bp, Artificial Sequence
  ENSG00000141452_11 (sequence is synthesized)
atgagtataaaaagtacctggatgccgagcagagttatgcgatggcggtggaagcagggcagagccgaagcagcccgctcctcaagaggccggtgcggacccaggcggtgctggaccagt

SEQ ID NO: 367727 - DNA, 120 bp, Artificial Sequence
  ENSG00000141452_12 (sequence is synthesized)
cagatgtgtacacccatgtcctgtcagcctttgtggaaaagaaggagatgcctcataaatttgtgatagccgtgctgatggaatacattcgttctcttaaccagtttcagattgcagtac

SEQ ID NO: 367728 - DNA, 120 bp, Artificial Sequence
  ENSG00000141452_13 (sequence is synthesized)
agcattacctacatgaacttgttatcaaaacccttgtccagcacaacctcttttatatgctgcatcagttcctgcagtaccacgtcctcagcgactccaaacctttggcttgtctgctgt

SEQ ID NO: 367729 - DNA, 120 bp, Artificial Sequence
  ENSG00000141452_14 (sequence is synthesized)
tatccctagagagtttctatcctcctgctcatcagctatctctggacatgctgaagcgactttcaacagcaaatgatgaaatagtagaagttctcctttccaaacaccaagtgttagctg

SEQ ID NO: 367730 - DNA, 120 bp, Artificial Sequence
  ENSG00000141452_15 (sequence is synthesized)
ccttaaggtttatccggggcattggtggccatgacaacatttctgcacgaaaatttttagatgctgcaaagcagactgaagacaacatgcttttctatacaatattccgcttttttgaac

SEQ ID NO: 367731 - DNA, 120 bp, Artificial Sequence
  ENSG00000141452_16 (sequence is synthesized)
agcgaaaccagcgtttgcgagggagccccaatttcacaccaggggaacactgtgaagaacatgttgcttttttcaaacagatttttggagaccaagctctaatgaggcctacaacattct

SEQ ID NO: 367732 - DNA, 120 bp, Artificial Sequence
  ENSG00000141452_17 (sequence is synthesized)
gaaatcacttgctgtttttttatataaaaatgtgtacaaagttaatttattgcattaataaagctctttaaactataaaatgttataaagtgtatctacaacctcaactgtcactaaaaa

SEQ ID NO: 367733 - DNA, 120 bp, Artificial Sequence
  ENSG00000141452_18 (sequence is synthesized)
ggcggactctttggtgaggagaggtgcatccccaccactgtcctgcctgccctgcagtggccccgtgtgaagagaccctcagcccggcccttctcaaacctgtctgccctcaagcgagtc

SEQ ID NO: 367734 - DNA, 120 bp, Artificial Sequence
  ENSG00000141452_19 (sequence is synthesized)
ggactaagaatgccaacattctaggattctgctggactagttcaactgaaattgtcttcataacagatcaaggaatcgaattttaccaggtattaccagagaaacggagtctgaaactct

SEQ ID NO: 367735 - DNA, 120 bp, Artificial Sequence
  ENSG00000141452_20 (sequence is synthesized)
gtaaacagaatgatgtttttctaattcaaatggttttttataattttgtcatttggtctgccctaagaggcctgaagtctgtgtgcgcacatggaattcctgtctgtagggagggtcttc

SEQ ID NO: 367736 - DNA, 120 bp, Artificial Sequence
  ENSG00000141452_21 (sequence is synthesized)
gtggcacttactagcacctcttgtcagagtggaatatctggagcagttgatttgggagccaaatacttcaaaagtggggcagccacttcctagcactggaaattaacaagtcagcgtgat

SEQ ID NO: 367737 - DNA, 120 bp, Artificial Sequence
  ENSG00000141452_22 (sequence is synthesized)
tcaaaacaaggaagttgctgaaaacgaggagacttcatgtgattagagtcacttgaagtgattagaatcactggagtttccttgggagatgcctcataaatttgtgatagccgtgctgat

SEQ ID NO: 367738 - DNA, 120 bp, Artificial Sequence
  ENSG00000141452_23 (sequence is synthesized)
gaggagacttcatgtgattagagtcacttgaagtgattagaatcactggagtttccttgggtgaggccctagagctggtagtttggcttctaatgctgaggcctaaagcataattgttga

SEQ ID NO: 367739 - DNA, 120 bp, Artificial Sequence
  ENSG00000141456_0 (sequence is synthesized)
acaggcagcctcatccgccatcactccgggaaccgagcaccccgctgcctcggcgcccaggctgctctctccgcgcatgctccttcccagcttgagcccgcgagtccagcctgccttcac

SEQ ID NO: 367740 - DNA, 120 bp, Artificial Sequence
  ENSG00000141456_1 (sequence is synthesized)
tcagtgcgcaagaccgcagccccctccccacgccccctccccagtaggcggccgtcgcggtgtgtttgcgtcatcgcgccacgccaccactggaacccgggggaagatggcggcagccgt

SEQ ID NO: 367741 - DNA, 120 bp, Artificial Sequence
  ENSG00000141456_2 (sequence is synthesized)
tctgagtgggccctctgcgggctccgcggctggggttcctggcgggaccgggggtctctcggcagtgagctcgggcccgcggctccgcctgctgctgctggagagtgtttctggtttgct

SEQ ID NO: 367742 - DNA, 120 bp, Artificial Sequence
  ENSG00000141456_3 (sequence is synthesized)
gcaacctcgaacggggtctgccgttgctccggtgcatcccccaaaccgctcggccccacatttgcccgggctcatgtgcctattgcggctgcatgggtcggtgggcggggcccagaacct

SEQ ID NO: 367743 - DNA, 120 bp, Artificial Sequence
  ENSG00000141456_4 (sequence is synthesized)
ttcagctcttggggcattggtgagtctcagtaatgcacgtctcagttccatcaaaactcggtttgagggcctgtgtctgctgtccctgctggtaggggagagccccacagagctattcca

SEQ ID NO: 367744 - DNA, 120 bp, Artificial Sequence
  ENSG00000141456_5 (sequence is synthesized)
gcagcactgtgtgtcttggcttcggagcattcagcaggtgttacagacccaggacccgcctgccacaatggagctggccgtggctgtcctgagggacctcctccgatatgcagcccagct

SEQ ID NO: 367745 - DNA, 120 bp, Artificial Sequence
  ENSG00000141456_6 (sequence is synthesized)
gcctgcactgttccgggacatctccatgaaccacctccctggccttctcacctccctgctgggcctcaggccagagtgtgagcagtcagcattggaaggaatgaaggcttgtatgaccta

SEQ ID NO: 367746 - DNA, 120 bp, Artificial Sequence
  ENSG00000141456_7 (sequence is synthesized)
tttccctcgggcttgtggttctctcaaaggcaagctggcctcattttttctgtctagggtggatgccttgagccctcagctccaacagttggcctgtgagtgttattcccggctgccctc

SEQ ID NO: 367747 - DNA, 120 bp, Artificial Sequence
  ENSG00000141456_8 (sequence is synthesized)
tttaggggctggcttttcccaaggcctgaagcacaccgagagctgggagcaggagctacacagtctgctggcctcactgcacaccctgctgggggccctgtacgagggagcagagactgc

SEQ ID NO: 367748 - DNA, 120 bp, Artificial Sequence
  ENSG00000141456_9 (sequence is synthesized)
tcctgtgcagaatgaaggccctggggtggagatgctgctgtcctcagaagatggtgatgcccatgtccttctccagcttcggcagaggttttcgggactggcccgctgcctagggctcat

SEQ ID NO: 367749 - DNA, 120 bp, Artificial Sequence
  ENSG00000141456_10 (sequence is synthesized)
gctcagctctgagtttggagctcccgtgtccgtccctgtgcaggaaatcctggatttcatctgccggaccctcagcgtcagtagcaagaatattagcttgcatggagatggtcccctgcg

SEQ ID NO: 367750 - DNA, 120 bp, Artificial Sequence
  ENSG00000141456_11 (sequence is synthesized)
gctgctgctgctgccctctatccaccttgaggccttggacctgctgtctgcactcatcctcgcgtgtggaagccggctcttgcgctttgggatcctgatcggccgcctgcttccccaggt

SEQ ID NO: 367751 - DNA, 120 bp, Artificial Sequence
  ENSG00000141456_12 (sequence is synthesized)
cctcaattcctggagcatcggtagagattccctctctccaggccaggagaggccttacagcacggttcggaccaaggtgtatgcgatattagagctgtgggtgcaggtttgtggggcctc

SEQ ID NO: 367752 - DNA, 120 bp, Artificial Sequence
  ENSG00000141456_13 (sequence is synthesized)
ggcgggaatgcttcagggaggagcctctggagaggccctgctcacccacctgctcagcgacatctccccgccagctgatgcccttaagctgcgtagcccgcgggggagccctgatgggag

SEQ ID NO: 367753 - DNA, 120 bp, Artificial Sequence
  ENSG00000141456_14 (sequence is synthesized)
tttgcagactgggaagcctagcgcccccaagaagctaaagctggatgtgggggaagctatggccccgccaagccaccggaaaggggatagcaatgccaacagcgacgtgtgtgcggctgc

SEQ ID NO: 367754 - DNA, 120 bp, Artificial Sequence
  ENSG00000141456_15 (sequence is synthesized)
gacctggtcctccccctggtcatgggtgtacagcagggtgaggtcctaggcagctccccgtacacgagctcccgctgccgccgtgaactctactgcctgctgctggcgctgctgctggcc

SEQ ID NO: 367755 - DNA, 120 bp, Artificial Sequence
  ENSG00000141456_16 (sequence is synthesized)
ccgtctcctcgctgcccacctcctcttgcctgtgccctgcaagccttctccctcggccagcgagaagatagccttgaggtctcctctttctgctcagaagcactggtgacctgtgctgct

SEQ ID NO: 367756 - DNA, 120 bp, Artificial Sequence
  ENSG00000141456_17 (sequence is synthesized)
ctgacccacccccgggttcctcccctgcagcccatgggccccacctgccccacacctgctccagttccccctcctgaggccccatcgcccttcagggccccaccgttccatcctccgggc

SEQ ID NO: 367757 - DNA, 120 bp, Artificial Sequence
  ENSG00000141456_18 (sequence is synthesized)
cccatgccctcagtgggctccatgccctcagcaggccccatgccttcagcaggccccatgccctcagcaggccctgtgccctcggcacgccctggacctcccaccacagccaaccaccta

SEQ ID NO: 367758 - DNA, 120 bp, Artificial Sequence
  ENSG00000141456_19 (sequence is synthesized)
ggcctttctgtcccaggcctagtgtctgtccctccccggcttcttcctggccctgagaaccaccgggcaggctcaaatgaggaccccatccttgcccctagtgggactcccccacctact

SEQ ID NO: 367759 - DNA, 120 bp, Artificial Sequence
  ENSG00000141456_20 (sequence is synthesized)
atacccccagatgaaacttttggggggagagtgcccagaccagcctttgtccactatgacaaggaggaggcatctgatgtggagatctccttggaaagtgactctgatgacagcgtggtg

SEQ ID NO: 367760 - DNA, 120 bp, Artificial Sequence
  ENSG00000141456_21 (sequence is synthesized)
atcgtgcccgaggggcttccccccctgccacccccaccaccctcaggtgccacaccaccccctatagcccccactgggccaccaacagcctcccctcctgtgccagcgaaggaggagcct

SEQ ID NO: 367761 - DNA, 120 bp, Artificial Sequence
  ENSG00000141456_22 (sequence is synthesized)
gaagaacttcctgcagccccagggcctctcccgccacccccacctccgccgccgcctgttcctggtcctgtgacgctccctccaccccagttggtccctgaagggactcctggtggggga

SEQ ID NO: 367762 - DNA, 120 bp, Artificial Sequence
  ENSG00000141456_23 (sequence is synthesized)
ggacccccagccctggaagaggatttgacagttattaatatcaacagcagtgatgaagaggaggaggaagaggaagaagaggaagaagaagaagaggaagaagaggaagaggaggaagac

SEQ ID NO: 367763 - DNA, 120 bp, Artificial Sequence
  ENSG00000141456_24 (sequence is synthesized)
tttgaggaagaggaagaggatgaagaggaatattttgaagaggaagaagaggaggaagaagagtttgaggaagaatttgaggaagaagaaggtgagttagaggaagaagaagaagaggag

SEQ ID NO: 367764 - DNA, 120 bp, Artificial Sequence
  ENSG00000141456_25 (sequence is synthesized)
gatgaggaggaggaagaagaactggaagaggtggaagacctggagtttggcacagcaggaggggaggtagaagaaggtgcacctccacccccaaccctgcctccagctctgcctccccct

SEQ ID NO: 367765 - DNA, 120 bp, Artificial Sequence
  ENSG00000141456_26 (sequence is synthesized)
gagtctcccccaaaggtgcagccagaacccgaacctgaacccgggctgcttttggaagtggaggagccagggacggaggaggagcgtggggctgacacagctcccaccctggcccctgaa

SEQ ID NO: 367766 - DNA, 120 bp, Artificial Sequence
  ENSG00000141456_27 (sequence is synthesized)
gcgctcccctcccagggagaggtggagagggaaggggaaagccctgcggcagggccccctccccaggagcttgttgaagaagagccctctgctcccccaaccctgttggaagaggagact

SEQ ID NO: 367767 - DNA, 120 bp, Artificial Sequence
  ENSG00000141456_28 (sequence is synthesized)
gaggatgggagtgacaaggtgcagcccccaccagagacacctgcagaagaagagatggagacagagacagaggccgaagctctccaggaaaaggagcaggatgacacagctgccatgctg

SEQ ID NO: 367768 - DNA, 120 bp, Artificial Sequence
  ENSG00000141456_29 (sequence is synthesized)
gccgacttcatcgattgtccccctgatgatgagaagccaccacctcccacagagcctgactcctagccatcttctgcaccccactctttgtttccaataaagttatgtccttagatagcg

SEQ ID NO: 367769 - DNA, 120 bp, Artificial Sequence
  ENSG00000141456_30 (sequence is synthesized)
tgtctgctgggcttttcagggtgtccatagtattccccagatgtctccatagctgtcctctttttgacgatccagagaggaacaactgacattggtgtaatggactgtcccatcactcag

SEQ ID NO: 367770 - DNA, 120 bp, Artificial Sequence
  ENSG00000141456_31 (sequence is synthesized)
cacgatggtgtcagaattgtaggattctggctggatgctaaacgtgcagaattgtgtgtagggttaagaatgaggagttatagagacacagccctgctttcgtgtttgtattcggggtgg

SEQ ID NO: 367771 - DNA, 120 bp, Artificial Sequence
  ENSG00000141456_32 (sequence is synthesized)
gaaatgtgtggagaatgcatcctagtgagtggacctgtgtcaacacccacatgcccacacgcatgcgtgctcagccccttggtctgaaagggcaggctgagtgattgctcagtctatgga

SEQ ID NO: 367772 - DNA, 120 bp, Artificial Sequence
  ENSG00000141456_33 (sequence is synthesized)
agtttaggaaattaggaaaaggtgtggagcagtttagtcattgaattctgggaaatttggaccttaccccaagatgaaagggtgtccgtagtgggtacgttgggaatgacctctgttttg

SEQ ID NO: 367773 - DNA, 120 bp, Artificial Sequence
  ENSG00000141456_34 (sequence is synthesized)
gggctagtcctcctaatgacagttcccctcacagctccctggcaggagtttgataagctcaccccaggccttcctgctcactcttgaggtgtggatatttcccacccagtgtcttttctt

SEQ ID NO: 367774 - DNA, 63 bp, Artificial Sequence
  ENSG00000141456_35 (sequence is synthesized)
ctcttgaggtgtggatatttcccacccagtgtcttttcttttctttttttttttgagatggac

SEQ ID NO: 367775 - DNA, 120 bp, Artificial Sequence
  ENSG00000141456_36 (sequence is synthesized)
cttggactcccaaagtgctgggatcacaagcatgagacaccgcacctgactgtcccagtgtcttttctttaagcactaatcctattctaggccttgctgggatggacgtgtgaggatgaa

SEQ ID NO: 367776 - DNA, 120 bp, Artificial Sequence
  ENSG00000141456_37 (sequence is synthesized)
ccgagagatgtgtctgtgagagggtaccaagattggtgggcttgaactaggggccccgtggttttttttgctcagtcagttgaatcatgaacgtaagtaaagtgccttcgcaatgcagaa

SEQ ID NO: 367777 - DNA, 120 bp, Artificial Sequence
  ENSG00000141456_38 (sequence is synthesized)
gagggagtcatttctcccaacatgtatcctgaagagccctttgaggaggtggcatttgagctaatttttggaaacttcagtaggattttaaaaagttacccctcaacttgttttcgaaat

SEQ ID NO: 367778 - DNA, 120 bp, Artificial Sequence
  ENSG00000141456_39 (sequence is synthesized)
aaacagaaaagtgagaacagtataatagataacctttgcctagatttgccaattaacatttagtcatgttaactcttatccctataaactgcgtatctacatgtagacatgtatctatat

SEQ ID NO: 367779 - DNA, 120 bp, Artificial Sequence
  ENSG00000141456_40 (sequence is synthesized)
tacacccatatatctgtctaatctatacatctgtagttatacacatttcttttttcatgggaccacgtgaaagtaagctgtagacaccgtggcccttcccatcccagattctttaacatg

SEQ ID NO: 367780 - DNA, 120 bp, Artificial Sequence
  ENSG00000141456_41 (sequence is synthesized)
aattatcttctaagataagaatgtttttctgcacaatcctgataccattatcaaacctaagaaaaataacagtaatccagtgataattgtgatattaaaattttcctattaattcctaaa

SEQ ID NO: 367781 - DNA, 120 bp, Artificial Sequence
  ENSG00000141456_42 (sequence is synthesized)
cctaccttttccagctcccagatgtcctattccaccctgggattacctctgctcccttctttctttgcttcttccacctcattccaagtatttcaggagttggaaaccacagtggatctg

SEQ ID NO: 367782 - DNA, 120 bp, Artificial Sequence
  ENSG00000141456_43 (sequence is synthesized)
gggatgaagtcttgctgtagcctagtgagaataaaagagcagtcactttctctgaagtctagcctccgcccacttaacatgactctcttctttctttgaaggtttgagggcctgtgtctg

SEQ ID NO: 367783 - DNA, 120 bp, Artificial Sequence
  ENSG00000141456_44 (sequence is synthesized)
ctccctggccttctcacctccctgctgggcctcaggccagaggtgagatgtctccctggacccttccccatggccccccgcagtcctcaccttcacacactgtttaattgtttgatggaa

SEQ ID NO: 367784 - DNA, 120 bp, Artificial Sequence
  ENSG00000141456_45 (sequence is synthesized)
tttttttctccaggggcgtgttcccttaggaagtgggcatatgtacatctttgctttcattgtcaccgtccccaggattcaagacctctctctattcccaagagtgtggagagttacatt

SEQ ID NO: 367785 - DNA, 120 bp, Artificial Sequence
  ENSG00000141456_46 (sequence is synthesized)
gcagcactgtgtgtcttggcttcggagcattcagcaggtgttacagtatccgtgtctccacaccctcttttctgccaggtagtggcttggatggtcagactgacattaaccgtggcattc

SEQ ID NO: 367786 - DNA, 120 bp, Artificial Sequence
  ENSG00000141456_47 (sequence is synthesized)
tgtcatctcttcagagcccttgctcaggataccaggcaaccaggaaagtactggggacctgagtctccccaaacagtgtcatcctggagtcgtcccagagagcttcctacttttgtccaa

SEQ ID NO: 367787 - DNA, 120 bp, Artificial Sequence
  ENSG00000141456_48 (sequence is synthesized)
ataacatcacttcctatgtgtcgtgacacaggagcacagtgtcagagtgtagcaaatgcttccttgggggagggtgaatttggggatcagctgagtcattgctgagaggcccagccatcc

SEQ ID NO: 367788 - DNA, 120 bp, Artificial Sequence
  ENSG00000141456_49 (sequence is synthesized)
ttcttaccttccatccagggtctattttagaggataggggtttgattttgttgggagagctgagatcaggggttgggtttcttacctatgtgtacatatgtaaatggtcattccctgttt

SEQ ID NO: 367789 - DNA, 120 bp, Artificial Sequence
  ENSG00000141456_50 (sequence is synthesized)
tcgcgtgagtgggattgggctggctgtggtgaagggatagggcgtgccagaaacgagggtcaccattccttctctgccccaggtgtggaagccggctcttgcgctttgggatcctgatcg

SEQ ID NO: 367790 - DNA, 120 bp, Artificial Sequence
  ENSG00000141458_0 (sequence is synthesized)
cttcctgaccggcgcgcgcagcctgctgccgcggtcagcgcctgctcctgctcctccgctcctcctgcgcggggtgctgaaacagcccggggaagtagagccgcctccggggagcccaac

SEQ ID NO: 367791 - DNA, 120 bp, Artificial Sequence
  ENSG00000141458_1 (sequence is synthesized)
cagccgaacgccgccggcgtcagcagccttgcgcggccacagcatgaccgctcgcggcctggcccttggcctcctcctgctgctactgtgtccagcgcaggtgttttcacagtcctgtgt

SEQ ID NO: 367792 - DNA, 120 bp, Artificial Sequence
  ENSG00000141458_2 (sequence is synthesized)
ttggtatggagagtgtggaattgcatatggggacaagaggtacaattgcgaatattctggcccaccaaaaccattgccaaaggatggatatgacttagtgcaggaactctgtccaggatt

SEQ ID NO: 367793 - DNA, 120 bp, Artificial Sequence
  ENSG00000141458_3 (sequence is synthesized)
cttctttggcaatgtcagtctctgttgtgatgttcggcagcttcagacactaaaagacaacctgcagctgcctctacagtttctgtccagatgtccatcctgtttttataacctactgaa

SEQ ID NO: 367794 - DNA, 120 bp, Artificial Sequence
  ENSG00000141458_4 (sequence is synthesized)
cctgttttgtgagctgacatgtagccctcgacagagtcagtttttgaatgttacagctactgaagattatgttgatcctgttacaaaccagacgaaaacaaatgtgaaagagttacaata

SEQ ID NO: 367795 - DNA, 120 bp, Artificial Sequence
  ENSG00000141458_5 (sequence is synthesized)
ctacgtcggacagagttttgccaatgcaatgtacaatgcctgccgggatgtggaggccccctcaagtaatgacaaggccctgggactcctgtgtgggaaggacgctgacgcctgtaatgc

SEQ ID NO: 367796 - DNA, 120 bp, Artificial Sequence
  ENSG00000141458_6 (sequence is synthesized)
caccaactggattgaatacatgttcaataaggacaatggacaggcaccttttaccatcactcctgtgttttcagattttccagtccatgggatggagcccatgaacaatgccaccaaagg

SEQ ID NO: 367797 - DNA, 120 bp, Artificial Sequence
  ENSG00000141458_7 (sequence is synthesized)
ctgtgacgagtctgtggatgaggtcacagcaccatgtagctgccaagactgctctattgtctgtggccccaagccccagcccccacctcctcctgctccctggacgatccttggcttgga

SEQ ID NO: 367798 - DNA, 120 bp, Artificial Sequence
  ENSG00000141458_8 (sequence is synthesized)
cgccatgtatgtcatcatgtggatcacctacatggcgtttttgcttgtgttttttggagcattttttgcagtgtggtgctacagaaaacggtattttgtctccgagtacactcccatcga

SEQ ID NO: 367799 - DNA, 120 bp, Artificial Sequence
  ENSG00000141458_9 (sequence is synthesized)
tagcaatatagctttttctgttaatgcaagtgacaaaggagaggcgtcctgctgtgaccctgtcagcgcagcatttgagggctgcttgaggcggctgttcacacgctgggggtctttctg

SEQ ID NO: 367800 - DNA, 120 bp, Artificial Sequence
  ENSG00000141458_10 (sequence is synthesized)
cgtccgaaaccctggctgtgtcattttcttctcgctggtcttcattactgcgtgttcgtcaggcctggtgtttgtccgggtcacaaccaatccagttgacctctggtcagcccccagcag

SEQ ID NO: 367801 - DNA, 120 bp, Artificial Sequence
  ENSG00000141458_11 (sequence is synthesized)
ccaggctcgcctggaaaaagagtactttgaccagcactttgggcctttcttccggacggagcagctcatcatccgggcccctctcactgacaaacacatttaccagccatacccttcggg

SEQ ID NO: 367802 - DNA, 120 bp, Artificial Sequence
  ENSG00000141458_12 (sequence is synthesized)
agctgatgtaccctttggacctccgcttgacatacagatactgcaccaggttcttgacttacaaatagccatcgaaaacattactgcctcttatgacaatgagactgtgacacttcaaga

SEQ ID NO: 367803 - DNA, 120 bp, Artificial Sequence
  ENSG00000141458_13 (sequence is synthesized)
catctgcttggcccctctttcaccgtataacacgaactgcaccattttgagtgtgttaaattacttccagaacagccattccgtgctggaccacaagaaaggggacgacttctttgtgta

SEQ ID NO: 367804 - DNA, 120 bp, Artificial Sequence
  ENSG00000141458_14 (sequence is synthesized)
tgccgattaccacacgcactttctgtactgcgtacgggctcctgcctctctgaatgatacaagtttgctccatgacccttgtctgggtacgtttggtggaccagtgttcccgtggcttgt

SEQ ID NO: 367805 - DNA, 120 bp, Artificial Sequence
  ENSG00000141458_15 (sequence is synthesized)
gttgggaggctatgatgatcaaaactacaataacgccactgcccttgtgattaccttccctgtcaataattactataatgatacagagaagctccagagggcccaggcctgggaaaaaga

SEQ ID NO: 367806 - DNA, 120 bp, Artificial Sequence
  ENSG00000141458_16 (sequence is synthesized)
gtttattaattttgtgaaaaactacaagaatcccaatctgaccatttccttcactgctgaacgaagtattgaagatgaactaaatcgtgaaagtgacagtgatgtcttcaccgttgtaat

SEQ ID NO: 367807 - DNA, 120 bp, Artificial Sequence
  ENSG00000141458_17 (sequence is synthesized)
tagctatgccatcatgtttctatatatttccctagccttggggcacatgaaaagctgtcgcaggcttctggtggattcgaaggtctcactaggcatcgcgggcatcttgatcgtgctgag

SEQ ID NO: 367808 - DNA, 120 bp, Artificial Sequence
  ENSG00000141458_18 (sequence is synthesized)
ctcggtggcttgctccttgggtgtcttcagctacattgggttgcccttgaccctcattgtgattgaagtcatcccgttcctggtgctggctgttggagtggacaacatcttcattctggt

SEQ ID NO: 367809 - DNA, 120 bp, Artificial Sequence
  ENSG00000141458_19 (sequence is synthesized)
ccagtatgttcctgtcatccttttctgagactgtagcatttttcttaggagcattgtccgtgatgccagccgtgcacaccttctctctctttgcgggattggcagtcttcattgactttc

SEQ ID NO: 367810 - DNA, 120 bp, Artificial Sequence
  ENSG00000141458_20 (sequence is synthesized)
ttctgcagattacctgtttcgtgagtctcttggggttagacattaaacgtcaagagaaaaatcggctagacatcttttgctgtgtcagaggtgctgaagatggaacaagcgtccaggcct

SEQ ID NO: 367811 - DNA, 120 bp, Artificial Sequence
  ENSG00000141458_21 (sequence is synthesized)
cagagagctgtttgtttcgcttcttcaaaaactcctattctccacttctgctaaaggactggatgagaccaattgtgatagcaatatttgtgggtgttctgtcattcagcatcgcagtcc

SEQ ID NO: 367812 - DNA, 120 bp, Artificial Sequence
  ENSG00000141458_22 (sequence is synthesized)
tgaacaaagtagatattggattggatcagtctctttcgatgccagatgactcctacatggtggattatttcaaatccatcagtcagtacctgcatgcgggtccgcctgtgtactttgtcc

SEQ ID NO: 367813 - DNA, 120 bp, Artificial Sequence
  ENSG00000141458_23 (sequence is synthesized)
tggaggaagggcacgactacacttcttccaaggggcagaacatggtgtgcggcggcatgggctgcaacaatgattccctggtgcagcagatatttaacgcggcgcagctggacaactata

SEQ ID NO: 367814 - DNA, 120 bp, Artificial Sequence
  ENSG00000141458_24 (sequence is synthesized)
cccgaataggcttcgccccctcgtcctggatcgacgattatttcgactgggtgaagccacagtcgtcttgctgtcgagtggacaatatcactgaccagttctgcaatgcttcagtggttg

SEQ ID NO: 367815 - DNA, 120 bp, Artificial Sequence
  ENSG00000141458_25 (sequence is synthesized)
accctgcctgcgttcgctgcaggcctctgactccggaaggcaaacagaggcctcaggggggagacttcatgagattcctgcccatgttcctttcggataaccctaaccccaagtgtggca

SEQ ID NO: 367816 - DNA, 120 bp, Artificial Sequence
  ENSG00000141458_26 (sequence is synthesized)
aagggggacatgctgcctatagttctgcagttaacatcctccttggccatggcaccagggtcggagccacgtacttcatgacctaccacaccgtgctgcagacctctgctgactttattg

SEQ ID NO: 367817 - DNA, 120 bp, Artificial Sequence
  ENSG00000141458_27 (sequence is synthesized)
acgctctgaagaaagcccgacttatagccagtaatgtcaccgaaaccatgggcattaacggcagtgcctaccgagtatttccttacagtgtgttttatgtcttctacgaacagtacctga

SEQ ID NO: 367818 - DNA, 120 bp, Artificial Sequence
  ENSG00000141458_28 (sequence is synthesized)
ccatcattgacgacactatcttcaacctcggtgtgtccctgggcgcgatatttctggtgaccatggtcctcctgggctgtgagctctggtctgcagtcatcatgtgtgccaccatcgcca

SEQ ID NO: 367819 - DNA, 120 bp, Artificial Sequence
  ENSG00000141458_29 (sequence is synthesized)
tggtcttggtcaacatgtttggagttatgtggctctggggcatcagtctgaacgctgtatccttggtcaacctggtgatgagctgtggcatctccgtggagttctgcagccacataacca

SEQ ID NO: 367820 - DNA, 120 bp, Artificial Sequence
  ENSG00000141458_30 (sequence is synthesized)
gagcgttcacggtgagcatgaaaggcagccgcgtggagcgcgcggaagaggcacttgcccacatgggcagctccgtgttcagtggaatcacacttacaaaatttggagggattgtggtgt

SEQ ID NO: 367821 - DNA, 120 bp, Artificial Sequence
  ENSG00000141458_31 (sequence is synthesized)
tggcttttgccaaatctcaaattttccagatattctacttcaggatgtatttggccatggtcttactgggagccactcacggattaatatttctccctgtcttactcagttacatagggc

SEQ ID NO: 367822 - DNA, 120 bp, Artificial Sequence
  ENSG00000141458_32 (sequence is synthesized)
catcagtaaataaagccaaaagttgtgccactgaagagcgatacaaaggaacagagcgcgaacggcttctaaatttctagccctctcgcagggcatcctgactgaactgtgtctaagggt

SEQ ID NO: 367823 - DNA, 120 bp, Artificial Sequence
  ENSG00000141458_33 (sequence is synthesized)
cggtcggtttaccactggacgggtgctgcatcggcaaggccaagttgaacaccggatggtgccaaccatcggttgtttggcagcagctttgaacgtagcgcctgtgaactcaggaatgca

SEQ ID NO: 367824 - DNA, 120 bp, Artificial Sequence
  ENSG00000141458_34 (sequence is synthesized)
cagttgacttgggaagcagtattactagatctggaggcaaccacaggacactaaacttctcccagcctcttcaggaaagaaacctcattctttggcaagcaggaggtgacactagatggc

SEQ ID NO: 367825 - DNA, 120 bp, Artificial Sequence
  ENSG00000141458_35 (sequence is synthesized)
tgtgaatgtgatccgctcactgacactctgtaaaggccaatcaatgcactgtctgtctctccttttaggagtaagccatcccacaagttctataccatatttttagtgacagttgaggtt

SEQ ID NO: 367826 - DNA, 120 bp, Artificial Sequence
  ENSG00000141458_36 (sequence is synthesized)
gtagatacactttataacattttatagtttaaagagctttattaatgcaataaattaactttgtacacatttttatataaaaaaacagcaagtgatttcagaatgttgtaggcctcatta

SEQ ID NO: 367827 - DNA, 120 bp, Artificial Sequence
  ENSG00000141458_37 (sequence is synthesized)
gagcttggtctccaaaaatctgtttgaaaaaagcaacatgttcttcacagtgttcccctagaaaggaagagatttaattgccagttagatgtggcatgaaatgagggacaaagaaagcat

SEQ ID NO: 367828 - DNA, 120 bp, Artificial Sequence
  ENSG00000141458_38 (sequence is synthesized)
ctcgtaggtgtgtctactgggttttaacttatttttctttaataaaatacattgttttcctaagttttggggttaccctatctgctttgagagacaaatacaaaagctaaatggaagaga

SEQ ID NO: 367829 - DNA, 120 bp, Artificial Sequence
  ENSG00000141458_39 (sequence is synthesized)
agaaggacattactgaaagggaattctatcctgaggcattcttttcaagtatttgaactcatactaatggtcatttgataatgataaatgatactgagtaaaaaaatttcttctaaaaga

SEQ ID NO: 367830 - DNA, 120 bp, Artificial Sequence
  ENSG00000141458_40 (sequence is synthesized)
ctcacagcccagcaggaaacaaaaggagagtcactaacctctgaaaatgctttgcagcccacactacctagatccccagaccctcagtggattcctgatttcctcctattgatctctgca

SEQ ID NO: 367831 - DNA, 120 bp, Artificial Sequence
  ENSG00000141458_41 (sequence is synthesized)
ccttatgaccagatggttagaacctgatgcctcctaactggtcctgtaccaccggaacagagctgaaggttctaagccaggggtgtccaatgttttggcttccctgggccttaagaggaa

SEQ ID NO: 367832 - DNA, 76 bp, Artificial Sequence
  ENSG00000141458_42 (sequence is synthesized)
actaacaatagctgatgagcttaaaaaatatcattaaaaaaatctcataatgttttaagaaagtttatggcccaca

SEQ ID NO: 367833 - DNA, 89 bp, Artificial Sequence
  ENSG00000141458_43 (sequence is synthesized)
tggcccacagaccgtgggttggacaggcttgttctaaatgtttagtttttttcccccaattcaccagcagttaccttcatgccaagtgg

SEQ ID NO: 367834 - DNA, 120 bp, Artificial Sequence
  ENSG00000141458_44 (sequence is synthesized)
gatgttaaaaagtgaactcagctgggcacagcggcctacacctgtaatcccagcactgtgagaggatgaagcaggaggatcacaggaattcgagaccagcctcagcaacacagtgagacc

SEQ ID NO: 367835 - DNA, 120 bp, Artificial Sequence
  ENSG00000141458_45 (sequence is synthesized)
ccgtctctattccaatacatacattttttaaattaaaaattcatttaaaaaaaaaaaactcaagggatggattacagaagggcccaaggaaacttttcggggtctgaacatgttcattgc

SEQ ID NO: 367836 - DNA, 120 bp, Artificial Sequence
  ENSG00000141458_46 (sequence is synthesized)
cttgattgtggtgatggtttcatgggtgtatacatgtcaaaactcacatattgcataatattaagtgtgtacagtttattatgtgtcaactatgcctcaataaagctgcttttaaaaatc

SEQ ID NO: 367837 - DNA, 120 bp, Artificial Sequence
  ENSG00000141458_47 (sequence is synthesized)
cagggccacgccggcagagtcgcaccacaaagtaatcctcctcagtgactgaagagtctggatcctgtacttacaaagcagcttctaaggattgcaagctttcaggcaattcatgaatta

SEQ ID NO: 367838 - DNA, 120 bp, Artificial Sequence
  ENSG00000141458_48 (sequence is synthesized)
gctgccacatcgtggacagaacggacgttctgtggaactgtacctgttggtacggctcctttttaggtggcagtgtgctgaagcaggaaaataacagacaagttaaacatgagacagctg

SEQ ID NO: 367839 - DNA, 120 bp, Artificial Sequence
  ENSG00000141458_49 (sequence is synthesized)
gcagtctttcccatttaaaatgcaggggagcccgggccagaacccagcgtgtgatgtgcggttggtgcctggagagtcgtcttggttcaactctacaccctggcttagcctatctcttta

SEQ ID NO: 367840 - DNA, 120 bp, Artificial Sequence
  ENSG00000141458_50 (sequence is synthesized)
ccactgtagaaaatacctggtaaagagtaaaaactaaaactttgtttcgtaacacttttaaatatttaagttttcacctgagaatataaagaaagataatcaattgggagacacgatgca

SEQ ID NO: 367841 - DNA, 120 bp, Artificial Sequence
  ENSG00000141458_51 (sequence is synthesized)
gtgtctgtgcagaatacacagcttttaacttggtcatacctctcccccaggatcataaggcagcaaatagtgttaggtagtagatgatgctacctgggttcagttcccattgctttgaac

SEQ ID NO: 367842 - DNA, 120 bp, Artificial Sequence
  ENSG00000141458_52 (sequence is synthesized)
ggggcaggagaatcacttgaacctgggagaaatccttgtaaggaagtgtttttgttcaattacaggttggtaaaagtggtttctaacacagtatctcttcttttaggtgttcagtggaat

SEQ ID NO: 367843 - DNA, 120 bp, Artificial Sequence
  ENSG00000141458_53 (sequence is synthesized)
agcggaggaggctctcagccaggcagtcagctcaggcctgaaatgtctcactgaaaatagactttcttggaaaagttgtttttatgcaaaatgtatgttaaatctggctttaccttaaaa

SEQ ID NO: 367844 - DNA, 120 bp, Artificial Sequence
  ENSG00000141458_54 (sequence is synthesized)
aacctttgaaaggactaatttaccacctaatactttgaaggcttttttcattaagtgctcatgtagtttttcttttgactgttagcagtataaaacgtagaaaaggaagttaggttttaa

SEQ ID NO: 367845 - DNA, 120 bp, Artificial Sequence
  ENSG00000141458_55 (sequence is synthesized)
aaggaggagatctacttcagggcagaaaatgatgcatagtatgcctaagatgaaaatggtatttcagattcattaaactgtgaaagtgacatgtggctgaagcttttagataaggggaaa

SEQ ID NO: 367846 - DNA, 120 bp, Artificial Sequence
  ENSG00000141458_56 (sequence is synthesized)
gattatccctcactagtaaggaaagtaatcgatagagaagaaagtaatgcccctcactgtcagtattttaaaatgttttacaaaaaatctggagacctattcttctaacagtcctccctg

SEQ ID NO: 367847 - DNA, 120 bp, Artificial Sequence
  ENSG00000141458_57 (sequence is synthesized)
cattgactttcttctgcagattacctgtttcgtgagtctcttggggttagacattaaacgtcaagaggtaagttggtgccaggattatagtctatttaatttgagtctagaatctagagg

SEQ ID NO: 367848 - DNA, 120 bp, Artificial Sequence
  ENSG00000141458_58 (sequence is synthesized)
attctacttcaggatgtatttggccatggtcttactgggagccactcacggattaatatttctccctgtcttactcagttacatagatgatttgaaggtacctgtactgcaatctgaaac

SEQ ID NO: 367849 - DNA, 120 bp, Artificial Sequence
  ENSG00000141458_59 (sequence is synthesized)
tggttaagagaacgaatgtattccatcagcacggctatcacaaatttatgaggcatctcctagggagaaaaaaatgtggtcttacaaataccaacgaggtgcaaaagaggctgcatataa

SEQ ID NO: 367850 - DNA, 120 bp, Artificial Sequence
  ENSG00000141458_60 (sequence is synthesized)
ctctctatccaacccccaccttgtttccatcttaaaatggcccagtgttcatctttcactggttttgcacacatcgctccagaaccacccgtcaacaattatgctttaggcctcagcatt

SEQ ID NO: 367851 - DNA, 120 bp, Artificial Sequence
  ENSG00000141458_61 (sequence is synthesized)
agaagccaaactaccagctctagggcctcacccaaggaaactccagtgattctaatcacttcaagtgactctaatcacatgaagtctcctcgttttcagcaacttccttgttttgagcat

SEQ ID NO: 367852 - DNA, 120 bp, Artificial Sequence
  ENSG00000141458_62 (sequence is synthesized)
tctcagtccagaagaggcggaaagctgcagcccaccttcttttccacaaaggctgacaggacatgggtgtacacatctgactggtccagcaccgcctgggtccgcaccggcctcttgagg

SEQ ID NO: 367853 - DNA, 120 bp, Artificial Sequence
  ENSG00000141458_63 (sequence is synthesized)
agcgggctgcttcggctctgccctgcttccaccgcctgaaagaaaaaaaccacaaactatgatcttcggcatcttagaggaagggtgctgtttacagttcatccacaaggactgaattct

SEQ ID NO: 367854 - DNA, 120 bp, Artificial Sequence
  ENSG00000141458_64 (sequence is synthesized)
caaaactccgtctcaaaaaaaaaaaagcagttcagatccgtgcagattatgcaatagctgtggggtgtagcctgagaacttgcatttccaagaaactccagatgctgctcatgtggctgg

SEQ ID NO: 367855 - DNA, 120 bp, Artificial Sequence
  ENSG00000141458_65 (sequence is synthesized)
ctgctcatgtggctggtcagtggcccacactgctgagtcatgacggtttatggagcccagcagaccgtgtgggacggcacagaaactgccatttgggatcagacctactgattcccacag

SEQ ID NO: 367856 - DNA, 120 bp, Artificial Sequence
  ENSG00000141458_66 (sequence is synthesized)
cccagaacacccacagcaatagagtccaaaaggactcagccatccctcacgtctggcagcgtaggaatggacactgtcccagcaactggccctcttcagtgcctgtctcagacctcttac

SEQ ID NO: 367857 - DNA, 120 bp, Artificial Sequence
  ENSG00000141458_67 (sequence is synthesized)
ccttccatgaacagctaaaggggagtggagttctggggcttttgttggtttaaaaccattttcagcctaggactaatcagatcctggaattgaaataattcattctccttgtcctaaact

SEQ ID NO: 367858 - DNA, 120 bp, Artificial Sequence
  ENSG00000141458_68 (sequence is synthesized)
tttcttctggcttcagaagatatgatgtacaagtaatacagcgggaattggtggcgataagccatggttattaccttgactacaaacacgcctgctaagtgctaacactgaatcgtcact

SEQ ID NO: 367859 - DNA, 120 bp, Artificial Sequence
  ENSG00000141458_69 (sequence is synthesized)
atctcaacaggattctttcccaaaagggaagaaaggtgtggcaaatataaatatttctaatttaattttctaagtcctcactctggcataacagaaaaatatacaaaatattgcaaagca

SEQ ID NO: 367860 - DNA, 120 bp, Artificial Sequence
  ENSG00000141458_70 (sequence is synthesized)
caagaacccaccaattccggacacaatgtgaagagcatttaaaatagtgcctaagcctaggacaccgccagtgctttgtgttttcacagtcctgtgtttggtatggagagtgtggaattg

SEQ ID NO: 367861 - DNA, 120 bp, Artificial Sequence
  ENSG00000141469_0 (sequence is synthesized)
accatctcctgagaagcactctcccttgtcgtggaggtgggcaaatctttatcagccactgccttctgctgccaggaagccagctagagtggtctttaaagaaaactgggcatctcctgc

SEQ ID NO: 367862 - DNA, 120 bp, Artificial Sequence
  ENSG00000141469_1 (sequence is synthesized)
tacttaaaatcaaaaactacctaaaataaagattatagagccagaggaagagatagccatggaggacagccccactatggttagagtggacagccccactatggttaggggtgaaaacca

SEQ ID NO: 367863 - DNA, 120 bp, Artificial Sequence
  ENSG00000141469_2 (sequence is synthesized)
ggtttcgccatgtcaagggagaaggtgcttccccaaagctcttggctatgtcaccggtgacatgaaagaacttgccaaccagcttaaagacaaacccgtggtgctccagttcattgactg

SEQ ID NO: 367864 - DNA, 120 bp, Artificial Sequence
  ENSG00000141469_3 (sequence is synthesized)
gattctccggggcatatcccaagtggtgttcgtcaacaaccccgtcagtggaatcctgattctggtaggacttcttgttcagaacccctggtgggctctcactggctggctgggaacagt

SEQ ID NO: 367865 - DNA, 120 bp, Artificial Sequence
  ENSG00000141469_4 (sequence is synthesized)
ggtctccactctgatggccctcttgctcagccaggacaggtcattaatagcatctgggctctatggctacaatgccaccctggtgggagtactcatggctgtcttttcggacaagggaga

SEQ ID NO: 367866 - DNA, 120 bp, Artificial Sequence
  ENSG00000141469_5 (sequence is synthesized)
ctatttctggtggctgttactccctgtatgtgctatgtccatgacttgcccaattttctcaagtgcattgaattccatgctcagcaaatgggacctccccgtcttcaccctccctttcaa

SEQ ID NO: 367867 - DNA, 120 bp, Artificial Sequence
  ENSG00000141469_6 (sequence is synthesized)
catggcgttgtcaatgtacctttcagccacaggacattacaatccattctttccagccaaactggtcatacctataactacagctccaaatatctcctggtctgacctcagtgccctgga

SEQ ID NO: 367868 - DNA, 120 bp, Artificial Sequence
  ENSG00000141469_7 (sequence is synthesized)
gttgttgaaatctataccagtgggagttggtcagatctatggctgtgataatccatggacagggggcattttcctgggagccatcctactctcctccccactcatgtgcctgcatgctgc

SEQ ID NO: 367869 - DNA, 120 bp, Artificial Sequence
  ENSG00000141469_8 (sequence is synthesized)
cataggatcattgctgggcatagcagcgggactcagtctttcagccccatttgaggacatctactttggactctggggtttcaacagctctctggcctgcattgcaatgggaggaatgtt

SEQ ID NO: 367870 - DNA, 120 bp, Artificial Sequence
  ENSG00000141469_9 (sequence is synthesized)
catggcgctcacctggcaaacccacctcctggctcttggctgtgccctgttcacggcctatcttggagtcggcatggcaaactttatggctgaggttggattgccagcttgtacctggcc

SEQ ID NO: 367871 - DNA, 120 bp, Artificial Sequence
  ENSG00000141469_10 (sequence is synthesized)
cttctgtttggccacgctattgttcctcatcatgaccacaaaaaattccaacatctacaagatgcccctcagtaaagttacttatcctgaagaaaaccgcatcttctacctgcaagccaa

SEQ ID NO: 367872 - DNA, 120 bp, Artificial Sequence
  ENSG00000141469_11 (sequence is synthesized)
gaaaagaatggtggaaagccctttgtgagaacaagccccatttgcagccatggtcacgagtcatttctgcctgactgctccagctaacttccagggtctcagcaaactgctgtttttcac

SEQ ID NO: 367873 - DNA, 120 bp, Artificial Sequence
  ENSG00000141469_12 (sequence is synthesized)
gagtatcaactttcatactgacgcgtctgtaatctgttcttatgctcattttgtattttcctttcaactccaggaatatccttgagcatatgagagtcacatccaggtgatgtgctctgg

SEQ ID NO: 367874 - DNA, 120 bp, Artificial Sequence
  ENSG00000141469_13 (sequence is synthesized)
tatggaatttgaaaccccaatggggccttggcactaagactggaatgtatataaagtcaaagtgctccaacagaaggaggaagtgaaaacaaactattagtatttattgatattcttggt

SEQ ID NO: 367875 - DNA, 120 bp, Artificial Sequence
  ENSG00000141469_14 (sequence is synthesized)
gtttagctggctcgatgatgttaacagtattaaaaattaaaccccataaaccaactaagccttatggaattcacagtcacaaaatcgaagttaatccagaattctgtgataagcagcttg

SEQ ID NO: 367876 - DNA, 120 bp, Artificial Sequence
  ENSG00000141469_15 (sequence is synthesized)
gctttttttttaaatcaatgcaagttacacattatagccagaatctgtatcacagaggtgcaagctgacagcagagctcagtccccacttcctgcaaacaatggcctgcaccctatccct

SEQ ID NO: 367877 - DNA, 120 bp, Artificial Sequence
  ENSG00000141469_16 (sequence is synthesized)
ttgtcaatcaaaattattctgtattgcaacttttctcagagattgcaaaggattttttaggtagagattatttttccttatgaaaaatgatctgttttaaatgagataaaataggagaag

SEQ ID NO: 367878 - DNA, 120 bp, Artificial Sequence
  ENSG00000141469_17 (sequence is synthesized)
ttcctggcttaacctgttcttacatattaaagaaaagttacttactgtatttatgaaatactcagcttaggcatttttactttaacccctaaattgattttgtaaatgccacaaatgcat

SEQ ID NO: 367879 - DNA, 120 bp, Artificial Sequence
  ENSG00000141469_18 (sequence is synthesized)
agaattgttaccaacctccaaagggctctttaaaatcatattttttattcatttgaggatgtcttataaagactgaaggcaaaggtcagattgcttacgggtgttatttttataagttgt

SEQ ID NO: 367880 - DNA, 120 bp, Artificial Sequence
  ENSG00000141469_19 (sequence is synthesized)
tgaattccttaatttaaaaaagctcattattttttgcacactcacaatattctctctcagaaatcaatggcatttgaaccaccaaaaagaaataaagggctgagtgcggtggctcacgcc

SEQ ID NO: 367881 - DNA, 67 bp, Artificial Sequence
  ENSG00000141469_20 (sequence is synthesized)
cgcctgtaatcccagcactttggggagcccaggcgggcagtatctacaaaaaatacaaaaattagcc

SEQ ID NO: 367882 - DNA, 75 bp, Artificial Sequence
  ENSG00000141469_21 (sequence is synthesized)
agctacttgggaggctgaggtgggaaaatgacttgagcccaggaggaggaggcagagtgaaactgtgtctctcaa

SEQ ID NO: 367883 - DNA, 79 bp, Artificial Sequence
  ENSG00000141469_22 (sequence is synthesized)
gtaaggattcccctgttttcctctctttaattttaaagttatcagttccgtaaagtctctgtaaccaaacatactgaag

SEQ ID NO: 367884 - DNA, 120 bp, Artificial Sequence
  ENSG00000141469_23 (sequence is synthesized)
cctgttttcctctctttaattttaaagttatcagttccgtaaagtctctgtaaccaaacatactgaagacagcaacagaagtcacgttcagggactggctcacacctgtaatcccagcac

SEQ ID NO: 367885 - DNA, 89 bp, Artificial Sequence
  ENSG00000141469_24 (sequence is synthesized)
tccatctcttaaaaaataaaaatagtaacattagccaggtgtagcagcacacatctgcagcagctactcaggaggctgaggtggaaaga

SEQ ID NO: 367886 - DNA, 120 bp, Artificial Sequence
  ENSG00000141469_25 (sequence is synthesized)
gaggtggaaagatcgcttgtgcacagaagttcgaggctgcagtgagctatatgatcatgtcactgcactccagcctgtgtgaccgagcaagaccctatctcaaaaaaattaattaattaa

SEQ ID NO: 367887 - DNA, 120 bp, Artificial Sequence
  ENSG00000141469_26 (sequence is synthesized)
ttaattaattaatttaaaaaggaagtcatgttcatttactttccacttcagtgtgtatcgtgtagtattttggaggttggaaagtgaaacgtaggaatcctgaagattttttccacttct

SEQ ID NO: 367888 - DNA, 120 bp, Artificial Sequence
  ENSG00000141469_27 (sequence is synthesized)
agtttgcagtgctcagtgcacaatatacattttgctgaatgaataaacagaaatagggaagtaaacctacaaatattttagggagaagctcacttcttccttttctcaggaaaccaagca

SEQ ID NO: 367889 - DNA, 120 bp, Artificial Sequence
  ENSG00000141469_28 (sequence is synthesized)
agcaaacatatcgttccaattttaaaacccagtgaccaaagcctttggaactatgaatttgcaactgtcataggtttatggatattgctgtggagaagctcaattttcagtgtttgaact

SEQ ID NO: 367890 - DNA, 120 bp, Artificial Sequence
  ENSG00000141469_29 (sequence is synthesized)
gaaccctttcttgttagggaacgtgtgaaagaagaattgtggggaaaaaaaagcaagcataaccaaagatcatcagcagtgaagaatctaggctgtggctgagagaaccagaggcctcta

SEQ ID NO: 367891 - DNA, 120 bp, Artificial Sequence
  ENSG00000141469_30 (sequence is synthesized)
aaatggacccgagtcgatcttcagaacagggatctaccatgcaggagcttcttgtgctcacacaaatctgtaaatgggaacattgtacattgtcgaatttaaatgatattaattttctca

SEQ ID NO: 367892 - DNA, 120 bp, Artificial Sequence
  ENSG00000141469_31 (sequence is synthesized)
agctatttttgttactattttcctaaaattgaatatttgcagggagcacttatactttttcctaatgtctgtataacaaatttctatgcaagtacatgaataaattatgctcacagctca

SEQ ID NO: 367893 - DNA, 120 bp, Artificial Sequence
  ENSG00000141469_32 (sequence is synthesized)
atttgttagctatggtaaatggaacaatgatggggccagaaatatccatgaggaccatttgatcacagcctggcaacacagagaagacaggctggtttctctatgtgggctttcagtgtt

SEQ ID NO: 367894 - DNA, 120 bp, Artificial Sequence
  ENSG00000141469_33 (sequence is synthesized)
tctttggtagtgtcttatgtggctgtggcttcaacattccacaattatgccttccagggtctgatgattttggcgtttccctgcttcccaattgacctggctgtgctgttggctgttctt

SEQ ID NO: 367895 - DNA, 120 bp, Artificial Sequence
  ENSG00000141469_34 (sequence is synthesized)
gcacactcaaggtggttttgccattggcttcctccctcagcctgcctctgggattatgccactgctattcttttttatctaccatcagcacaatgaaatcatcatttttgtcttcaaggt

SEQ ID NO: 367896 - DNA, 120 bp, Artificial Sequence
  ENSG00000141469_35 (sequence is synthesized)
accaaattctggtgatattggtgctttcttgcagctacttatcatgagaagtgaatggtctcatagtgaacacagtcatggttatagtgttcatacgttccagagacatgtttcctataa

SEQ ID NO: 367897 - DNA, 120 bp, Artificial Sequence
  ENSG00000141469_36 (sequence is synthesized)
ttatgccctgcacatttttctatcatacaatccttagattacagctctttggttttcaacagctttgtccaattccatctttcccagtttctctaccttgatgaaatatccttcttgcct

SEQ ID NO: 367898 - DNA, 120 bp, Artificial Sequence
  ENSG00000141469_37 (sequence is synthesized)
ggttttacatatttaaataacaaattccaaaagtaaagagtatctgaggcagtcacatgacataaggacaaattcaagccatcttggacttgcagagggtggggagaccgtgtcaacaca

SEQ ID NO: 367899 - DNA, 120 bp, Artificial Sequence
  ENSG00000141469_38 (sequence is synthesized)
cacaattttaaaaatttcttccctttcaatcttttaaaaacaaaactttttataaaataaaaatgtaatttaaaaaggctacctgtcttggcaagtagctgatcagcctgcattggtgag

SEQ ID NO: 367900 - DNA, 120 bp, Artificial Sequence
  ENSG00000141469_39 (sequence is synthesized)
caggccattccataacctggtttcttgctccttaattgacagcatggagctaacgtacttaatttcagctctttctacgtgatttgactcattctgttaacattaactgtttttcagtct

SEQ ID NO: 367901 - DNA, 120 bp, Artificial Sequence
  ENSG00000141469_40 (sequence is synthesized)
tctcaactagactgaactccttaagtgcaagaaatacacgcttagtaaatgtttgttggaccagacactgcaccttatgaaattaaagaccagaacattctcatggtagcattacagaca

SEQ ID NO: 367902 - DNA, 120 bp, Artificial Sequence
  ENSG00000141469_41 (sequence is synthesized)
ctgatggcaaaggtactgtgggatttgggtttggctaataagctctgtggtggtgtttcagaaggaaaatggtgctctcttagttctatggaacatagtggtccagatcttctactgtaa

SEQ ID NO: 367903 - DNA, 120 bp, Artificial Sequence
  ENSG00000141469_42 (sequence is synthesized)
ttaaaatcaaaaactacctaaaataaagattatagacccttttggaactaaagctggtgacgcagcgcgcagaggcatcgcccggctaagcttggccctggcagatgggtcgcaggaaca

SEQ ID NO: 367904 - DNA, 120 bp, Artificial Sequence
  ENSG00000141469_43 (sequence is synthesized)
ttaaaatcaaaaactacctaaaataaagattataaaaaagtaaggatgaatggacggtctttgattggcggcgctggtgacgcccgtcatggtcctgtttggaaggacccttttggaact

SEQ ID NO: 367905 - DNA, 120 bp, Artificial Sequence
  ENSG00000141469_44 (sequence is synthesized)
atgcttacaaagcgtggctagtatcttattacagaaaacagagcccacatcatgcatccttcttctcacatttcataaacaaggccaagggaaactgctgtggggcaacctgttgctttg

SEQ ID NO: 367906 - DNA, 120 bp, Artificial Sequence
  ENSG00000141469_45 (sequence is synthesized)
gtgttggtccccaagatgcagccctcacaatctgcccccaaacgtgtcagaacatgaaccccctcctccccctctggaagaagcaacctcagatccaacagcagagacacgcagcagaac

SEQ ID NO: 367907 - DNA, 120 bp, Artificial Sequence
  ENSG00000141469_46 (sequence is synthesized)
aaaatctgggcattggtccctgtgtaggatggcttcccgttattttttttttaagcaaagtaaatgaacatcaaatttccatagtcagctgctgtctttctgcccactgagagctctttg

SEQ ID NO: 367908 - DNA, 120 bp, Artificial Sequence
  ENSG00000141469_47 (sequence is synthesized)
gtgaaggcaaagtcctccttcttcattagcggtctcccatgtggggccacatcttccctcaccaggaacccagtgggcgcgctccagcccccctcagcttgccttttgcgtggtcattag

SEQ ID NO: 367909 - DNA, 120 bp, Artificial Sequence
  ENSG00000141469_48 (sequence is synthesized)
gtttttgtacgatgcttacgtagactttgaaatacatttccaaatataatctcattttttaatatgaatatgatctggaagttactagtgttatttatgtgcaagtgcaaccaaagctca

SEQ ID NO: 367910 - DNA, 120 bp, Artificial Sequence
  ENSG00000141469_49 (sequence is synthesized)
caaggttttgctttggccctagacctagaagcctgctgagtgagcgccttggccctagaaaagaggagcagggggttgtccggagcccctccgaccacgctgctctcagtcaggcaccac

SEQ ID NO: 367911 - DNA, 120 bp, Artificial Sequence
  ENSG00000141469_50 (sequence is synthesized)
agacacaggcagagctggctagaggtcagaggcatggccccagtgagaagcagcagctgtgccctgtgagcagcagggagaagtttgtccccttattcaagccaggaggaaggttccatt

SEQ ID NO: 367912 - DNA, 120 bp, Artificial Sequence
  ENSG00000141469_51 (sequence is synthesized)
tggaaacccccaaggtaaaccagtgctgattgagaggggctgacatcagaatgggggcacctctacatgttcggcacggtgctttgaagatgtcatccctcatcacaactttataaagga

SEQ ID NO: 367913 - DNA, 120 bp, Artificial Sequence
  ENSG00000141469_52 (sequence is synthesized)
agaaaagttaccccactttacactgaggaatctgaggctcagaaactcccctcaggcccttgctggagtcttacatctgtgtagaagttgtgccaagtctaagaaaatttcaccccagga

SEQ ID NO: 367914 - DNA, 120 bp, Artificial Sequence
  ENSG00000141469_53 (sequence is synthesized)
gacaccgtgttgatccttttcagttgtaaatctttccaaaaatatgagtaggggccagaggaaacaggagaagaaaaagatgcattttggtaggattattgctggtcaaagaccttggaa

SEQ ID NO: 367915 - DNA, 120 bp, Artificial Sequence
  ENSG00000141469_54 (sequence is synthesized)
tgctgtggaaactgtggcaaagcagttggtactctgtcaagaacagagagagagacatcgggtactgaagccaggggaccagttccttggtgttgctttggcattgatgcctgaagtggg

SEQ ID NO: 367916 - DNA, 120 bp, Artificial Sequence
  ENSG00000141469_55 (sequence is synthesized)
tggcgctcacctggcaaacccacctcctggctcttggctgtggtgagtctcccacgcccctgggggagggctgctcatgactacaggatctcaatcaaggataagcagtaaaaacggact

SEQ ID NO: 367917 - DNA, 120 bp, Artificial Sequence
  ENSG00000141469_56 (sequence is synthesized)
gcatgaaaaatcagggccagggttctggcttgagcccacttgctgtctaagtgtgtgaacaggacaagtgacgtcccctctctgagagcattaaaatcacctctgcctacctctctgatg

SEQ ID NO: 367918 - DNA, 120 bp, Artificial Sequence
  ENSG00000141469_57 (sequence is synthesized)
atctcctgagaagcactctcccttgtcgtggaggtgggcaaatctttatcagccactgccttctgctgccaggaagccagctagagtggtgtcattaatagcatctgggctctatggcta

SEQ ID NO: 367919 - DNA, 120 bp, Artificial Sequence
  ENSG00000141480_0 (sequence is synthesized)
gcattggcgcggggaggagcagggatcttggcagcgggcgaggaggctgcgagcgagccgcgaaccgagcgggcggcgggcgcgcgcaccatgggggagaaacccgggaccagggtcttc

SEQ ID NO: 367920 - DNA, 120 bp, Artificial Sequence
  ENSG00000141480_1 (sequence is synthesized)
aagaagtcgagccctaactgcaagctcaccgtgtacttgggcaagcgggacttcgtagatcacctggacaaagtggaccctgtagatggcgtggtgcttgtggaccctgactacctgaag

SEQ ID NO: 367921 - DNA, 120 bp, Artificial Sequence
  ENSG00000141480_2 (sequence is synthesized)
gaccgcaaagtgtttgtgaccctcacctgcgccttccgctatggccgtgaagacctggatgtgctgggcttgtccttccgcaaagacctgttcatcgccacctaccaggccttccccccg

SEQ ID NO: 367922 - DNA, 120 bp, Artificial Sequence
  ENSG00000141480_3 (sequence is synthesized)
gtgcccaacccaccccggccccccacccgcctgcaggaccggctgctgaggaagctgggccagcatgcccaccccttcttcttcaccataccccagaatcttccatgctccgtcacactg

SEQ ID NO: 367923 - DNA, 120 bp, Artificial Sequence
  ENSG00000141480_4 (sequence is synthesized)
cagccaggcccagaggatacaggaaaggcctgcggcgtagactttgagattcgagccttctgtgctaaatcactagaagagaaaagccacaaaaggaactctgtgcggctggtgatccga

SEQ ID NO: 367924 - DNA, 120 bp, Artificial Sequence
  ENSG00000141480_5 (sequence is synthesized)
aaggtgcagttcgccccggagaaacccggcccccagccttcagccgaaaccacacgccacttcctcatgtctgaccggtccctgcacctcgaggcttccctggacaaggagctgtactac

SEQ ID NO: 367925 - DNA, 120 bp, Artificial Sequence
  ENSG00000141480_6 (sequence is synthesized)
catggggagcccctcaatgtaaatgtccacgtcaccaacaactccaccaagaccgtcaagaagatcaaagtctctgtgagacagtacgccgacatctgcctcttcagcaccgcccagtac

SEQ ID NO: 367926 - DNA, 120 bp, Artificial Sequence
  ENSG00000141480_7 (sequence is synthesized)
ggagaagcggggtctcgccctggatgggaaactcaagcacgaggacaccaacctggcttccagcaccatcgtgaaggagggtgccaacaaggaggtgctgggaatcctggtgtcctacag

SEQ ID NO: 367927 - DNA, 120 bp, Artificial Sequence
  ENSG00000141480_8 (sequence is synthesized)
ggtcaaggtgaagctggtggtgtctcgaggcggggatgtctctgtggagctgccttttgttcttatgcaccccaagccccacgaccacatccccctccccagaccccagtcagccgctcc

SEQ ID NO: 367928 - DNA, 120 bp, Artificial Sequence
  ENSG00000141480_9 (sequence is synthesized)
ggagacagatgtccctgtggacaccaacctcattgaatttgataccaactatgccacagatgatgacattgtgtttgaggactttgcccggcttcggctgaaggggatgaaggatgacga

SEQ ID NO: 367929 - DNA, 120 bp, Artificial Sequence
  ENSG00000141480_10 (sequence is synthesized)
ctatgatgatcaactctgctaggaagcggggtgggaagaagggaggggatggggttgggagaggtgagggcaggattaagatccccactgtcaatgggggattgtcccagcccctcttcc

SEQ ID NO: 367930 - DNA, 120 bp, Artificial Sequence
  ENSG00000141480_11 (sequence is synthesized)
cttcccctcacctggaagcttcttcaaccaatcccttcacactctctcccccatccccccaagatacacactggaccctctcttgctgaatgtgggcattaattttttgactgcagctct

SEQ ID NO: 367931 - DNA, 120 bp, Artificial Sequence
  ENSG00000141480_12 (sequence is synthesized)
gcttctccagccccgccgtgggtggcaagctgtgttcatacctaaattttctggaaggggacagtgaaaagaggagtgacaggagggaaagggggagacaaaactcctactctcaacctc

SEQ ID NO: 367932 - DNA, 120 bp, Artificial Sequence
  ENSG00000141480_13 (sequence is synthesized)
acaccaacacctcccattatcactctctctgcccccattccttcaagaggagaccctttggggacaaggccgtttctttgtttctgagcataaagaagaaaataaatcttttactaagca

SEQ ID NO: 367933 - DNA, 120 bp, Artificial Sequence
  ENSG00000141480_14 (sequence is synthesized)
cagaggatacaggaaaggtacgggaggaacagctctgagggctcctagggcaggacatgggccagcaggagcctggaggcacagctgagccagagggtgaactgtcgagatgccagggtg

SEQ ID NO: 367934 - DNA, 120 bp, Artificial Sequence
  ENSG00000141480_15 (sequence is synthesized)
gtctcgaggcgggtgagtgtcatgggggagcctgggtgggggtcacactggctctctctagtcccatgtcgtcgtcctcttcacgatgcctctccccttccccagggatgtctctgtgga

SEQ ID NO: 367935 - DNA, 120 bp, Artificial Sequence
  ENSG00000141480_16 (sequence is synthesized)
agcatgcccaccccttcttcttcaccgtgaggatgcccctgccctctgagggccagggggctggggctgggactgtgtctggggtgggggtaaggcactgctgtgggcagatctggaaga

SEQ ID NO: 367936 - DNA, 120 bp, Artificial Sequence
  ENSG00000141480_17 (sequence is synthesized)
aacagtgaggcagggaccctagatccacttcccttcagggtcccagtgcattcaggaagcccttgattatctgcctcctctctggggccccttccttcttcccttctcatccccaggagt

SEQ ID NO: 367937 - DNA, 67 bp, Artificial Sequence
  ENSG00000141480_18 (sequence is synthesized)
tctggggccccttccttcttcccttctcatccccaggagtcctttctccagcctcttttttgttgtt

SEQ ID NO: 367938 - DNA, 69 bp, Artificial Sequence
  ENSG00000141480_19 (sequence is synthesized)
acgactaattttgtatttttagtagtgatggggttttgccacgttggtcaggctggtctggaacccctg

SEQ ID NO: 367939 - DNA, 120 bp, Artificial Sequence
  ENSG00000141480_20 (sequence is synthesized)
agggaagtgaaatgggctggccttggaagggcgccccagagagatggaggctggaggtggaagccaggagtagggttcaggcaagtcttatgctgctgagggaggagcagcggctgctag

SEQ ID NO: 367940 - DNA, 120 bp, Artificial Sequence
  ENSG00000141480_21 (sequence is synthesized)
gtgccaggggactggggaagtggggctcctgaccactcatctcaccctcccttgccagtgtttgtgaccctcacctgcgccttccgctatggccgtgaagacctggatgtgctgggcttg

SEQ ID NO: 367941 - DNA, 120 bp, Artificial Sequence
  ENSG00000141480_22 (sequence is synthesized)
gcattggcgcggggaggagcagggatcttggcagcgggcgaggaggctgcgagcgagccgcgaaccgagcgggcggcgggcgcgcgcaccatgggggagaaacccgggaccagctcaccg

SEQ ID NO: 367942 - DNA, 120 bp, Artificial Sequence
  ENSG00000141480_23 (sequence is synthesized)
tgcacgcatgacactgcctcctgctctgtggacccgcatggatctggggatgggggctccccttgcactaccatgaccaagcctctgccaggttctgggctttggagaggaagaagactt

SEQ ID NO: 367943 - DNA, 120 bp, Artificial Sequence
  ENSG00000141480_24 (sequence is synthesized)
agtccccagggtcgtgagaccacaatgaggcaagagtccctgcccgagaggagggaagggggaggaagaaagggcagtgatggtggcgggagcctccggtaagatgtggccttttctccc

SEQ ID NO: 367944 - DNA, 120 bp, Artificial Sequence
  ENSG00000141480_25 (sequence is synthesized)
cgtgagagggtgacacggatgccacggtgcagtttagaccctgggggaggggcgaagccacacatcaagaggacatttgtaaaggaggttgccttggctgggtgtggacagttgccgtgg

SEQ ID NO: 367945 - DNA, 120 bp, Artificial Sequence
  ENSG00000141480_26 (sequence is synthesized)
cccccaaaagctgtactaccatggggagcccctcaatgtaaatgtccacgtcaccaacaactccaccaagaccgtcaagaagatcaaagtctctggtaggaggtggggtttggaaggggg

SEQ ID NO: 367946 - DNA, 120 bp, Artificial Sequence
  ENSG00000141480_27 (sequence is synthesized)
aagaagtcgagccctaactgcaagctccccacttcctgtgacagctaagcgccgacttccttccctcctgaagccccttgccgcagaggctgctcagcctgagccagccacagggctggg

SEQ ID NO: 367947 - DNA, 120 bp, Artificial Sequence
  ENSG00000141480_28 (sequence is synthesized)
agacaaggggcatttccccttgccaccacgttagaaataggaaggaccttccgggaagaagggttccccttgccaccacgttagaaataggaaggaccttccgggaagaagggttcccct

SEQ ID NO: 367948 - DNA, 120 bp, Artificial Sequence
  ENSG00000141480_29 (sequence is synthesized)
tgccaccacgttagaaataggaaggaccttccgggaagaagggttccccttgccaccacgttagaaataggaaggaccttccgggaagaagggttccccttgccaccacgttagaaatag

SEQ ID NO: 367949 - DNA, 120 bp, Artificial Sequence
  ENSG00000141480_30 (sequence is synthesized)
gaaataggaaggaccttccgggaagaaggggaaaggggcagagctgggcaaagccccacagcctcaggcaggaggcctgggtgagcactgcttctcaggcctgggagggagagggtcctg

SEQ ID NO: 367950 - DNA, 120 bp, Artificial Sequence
  ENSG00000141480_31 (sequence is synthesized)
gtgtggggtccctgctgagtctgagggaggcagtggggtttccctttctgttttgttagggtcttcaagaagtcgagccctaactgcaagctcaccgtgtacttgggcaagcgggacttc

SEQ ID NO: 367951 - DNA, 120 bp, Artificial Sequence
  ENSG00000141480_32 (sequence is synthesized)
gcgaaccgagcgggcggcgggcgcgcgcaccatgggggagaaacccgggaccagggtcttcaagaagtcgagccctaactgcaagccccttgccgcagaggctgctcagcctgagccagc

SEQ ID NO: 367952 - DNA, 120 bp, Artificial Sequence
  ENSG00000141480_33 (sequence is synthesized)
acacacacaaacacacctcgctggttgggctgagtcctccctgaggacacacacagacacacatgcacatacatgttcacacacacacctgactggttggctgaggacacacacacacac

SEQ ID NO: 367953 - DNA, 120 bp, Artificial Sequence
  ENSG00000141480_34 (sequence is synthesized)
acacacacacacaaacacacacacaccgggctggtgggcagaggtgtgcagagataaaggagcagctcaaaagcctaaaggtccactagtctgagaaacgccaccaccctcactttccaa

SEQ ID NO: 367954 - DNA, 120 bp, Artificial Sequence
  ENSG00000141480_35 (sequence is synthesized)
ccaacactattgggaggaaacctggaacaactccttcctgatagcccagcctggagatccccgggcagggcagccagttttgagggctccgatgccctgtcaccatcctccccaatctcc

SEQ ID NO: 367955 - DNA, 120 bp, Artificial Sequence
  ENSG00000141480_36 (sequence is synthesized)
gggaggagcagggatcttggcagcgggcgaggaggctgcgagcgagccgcgaaccgagcgggcggcgggcgcgcgcaccatgggggagaaacccgggaccagatggcgtggtgcttgtgg

SEQ ID NO: 367956 - DNA, 80 bp, Artificial Sequence
  ENSG00000141485_0 (sequence is synthesized)
agcgttggagtccaaagacgcctcccaccgccgccgggtggcagaattgggggcaggcgcgtcccacagaccccgagggg

SEQ ID NO: 367957 - DNA, 120 bp, Artificial Sequence
  ENSG00000141485_1 (sequence is synthesized)
ggcggagttgtcaccgccccctccccaatccccggggactgtggccccttcttaagcccgcggcgcctctagctgcccctcactcgtctcgcccgccagtctccctcccgcgcgatggcc

SEQ ID NO: 367958 - DNA, 120 bp, Artificial Sequence
  ENSG00000141485_2 (sequence is synthesized)
tcggcgctgagctatgtctccaagttcaagtccttcgtgatcttgttcgtcaccccgctcctgctgctgccactcgtcattctgatgcccgccaagtttgtcaggtgtgcctacgtcatc

SEQ ID NO: 367959 - DNA, 120 bp, Artificial Sequence
  ENSG00000141485_3 (sequence is synthesized)
atcctcatggccatttactggtgcacagaagtcatccctctggctgtcacctctctcatgcctgtcttgcttttcccactcttccagattctggactccaggcaggtgtgtgtccagtac

SEQ ID NO: 367960 - DNA, 120 bp, Artificial Sequence
  ENSG00000141485_4 (sequence is synthesized)
atgaaggacaccaacatgctgttcctgggcggcctcatcgtggccgtggctgtggagcgctggaacctgcacaagaggatcgccctgcgcacgctcctctgggtgggggccaagcctgca

SEQ ID NO: 367961 - DNA, 120 bp, Artificial Sequence
  ENSG00000141485_5 (sequence is synthesized)
cggctgatgctgggcttcatgggcgtcacagccctcctgtccatgtggatcagtaacacggcaaccacggccatgatggtgcccatcgtggaggccatattgcagcagatggaagccaca

SEQ ID NO: 367962 - DNA, 120 bp, Artificial Sequence
  ENSG00000141485_6 (sequence is synthesized)
agcgcagccaccgaggccggcctggagctggtggacaagggcaaggccaaggagctgccagggagtcaagtgatttttgaaggccccactctggggcagcaggaagaccaagagcggaag

SEQ ID NO: 367963 - DNA, 120 bp, Artificial Sequence
  ENSG00000141485_7 (sequence is synthesized)
aggttgtgtaaggccatgaccctgtgcatctgctacgcggccagcatcgggggcaccgccaccctgaccgggacgggacccaacgtggtgctcctgggccagatgaacgagttgtttcct

SEQ ID NO: 367964 - DNA, 120 bp, Artificial Sequence
  ENSG00000141485_8 (sequence is synthesized)
gacagcaaggacctcgtgaactttgcttcctggtttgcatttgcctttcccaacatgctggtgatgctgctgttcgcctggctgtggctccagtttgtttacatgagattcaattttaaa

SEQ ID NO: 367965 - DNA, 120 bp, Artificial Sequence
  ENSG00000141485_9 (sequence is synthesized)
aagtcctggggctgcgggctagagagcaagaaaaacgagaaggctgccctcaaggtgctgcaggaggagtaccggaagctggggcccttgtccttcgcggagatcaacgtgctgatctgc

SEQ ID NO: 367966 - DNA, 120 bp, Artificial Sequence
  ENSG00000141485_10 (sequence is synthesized)
ttcttcctgctggtcatcctgtggttctcccgagaccccggcttcatgcccggctggctgactgttgcctgggtggagggtgagacaaagtatgtctccgatgccactgtggccatcttt

SEQ ID NO: 367967 - DNA, 120 bp, Artificial Sequence
  ENSG00000141485_11 (sequence is synthesized)
gtggccaccctgctattcattgtgccttcacagaagcccaagtttaacttccgcagccagactgaggaagaaaggaaaactccattttatccccctcccctgctggattggaaggtaacc

SEQ ID NO: 367968 - DNA, 120 bp, Artificial Sequence
  ENSG00000141485_12 (sequence is synthesized)
caggagaaagtgccctggggcatcgtgctgctactagggggcggatttgctctggctaaaggatccgaggcctcggggctgtccgtgtggatggggaagcagatggagcccttgcacgca

SEQ ID NO: 367969 - DNA, 120 bp, Artificial Sequence
  ENSG00000141485_13 (sequence is synthesized)
gtgcccccggcagccatcaccttgatcttgtccttgctcgttgccgtgttcactgagtgcacaagcaacgtggccaccaccaccttgttcctgcccatctttgcctccatgtctcgctcc

SEQ ID NO: 367970 - DNA, 120 bp, Artificial Sequence
  ENSG00000141485_14 (sequence is synthesized)
acccctccaaatgccatcgtgttcacctatgggcacctcaaggttgctgacatggtgaaaacaggagtcataatgaacataattggagtcttctgtgtgtttttggctgtcaacacctgg

SEQ ID NO: 367971 - DNA, 120 bp, Artificial Sequence
  ENSG00000141485_15 (sequence is synthesized)
ggacgggccatatttgacttggatcatttccctgactgggctaatgtgacacatattgagacttaggaagagccacaagaccacacacacagcccttaccctcctcaggactaccgaacc

SEQ ID NO: 367972 - DNA, 120 bp, Artificial Sequence
  ENSG00000141485_16 (sequence is synthesized)
ttctggcacaccttgtacagagttttggggttcacaccccaaaatgacccaacgatgtccacacaccaccaaaacccagccaatgggccacctcttcctccaagcccagatgcagagatg

SEQ ID NO: 367973 - DNA, 120 bp, Artificial Sequence
  ENSG00000141485_17 (sequence is synthesized)
gtcatgggcagctggagggtaggctcagaaatgaagggaacccctcagtgggctgctggacccatctttcccaagccttgccattatctctgtgagggaggccaggtagccgagggatca

SEQ ID NO: 367974 - DNA, 120 bp, Artificial Sequence
  ENSG00000141485_18 (sequence is synthesized)
ggatgcaggctgctgtacccgctctgcctcaagcatcccccacacagggctctggttttcactcgcttcgtcctagatagtttaaatgggaatcggatcccctggttgagagctaagaca

SEQ ID NO: 367975 - DNA, 120 bp, Artificial Sequence
  ENSG00000141485_19 (sequence is synthesized)
accacctaccagtgcccatgtcccttccagctcaccttgagcagcctcagatcatctctgtcactctggaagggacaccccagccagggacggaatgcctggtcttgagcaacctcccac

SEQ ID NO: 367976 - DNA, 120 bp, Artificial Sequence
  ENSG00000141485_20 (sequence is synthesized)
tgctggagtgcgagtgggaatcagagcctcctgaagcctctgggaactcctcctgtggccaccaccaaaggatgaggaatctgagttgccaacttcaggacgacacctggcttgccaccc

SEQ ID NO: 367977 - DNA, 120 bp, Artificial Sequence
  ENSG00000141485_21 (sequence is synthesized)
acagtgcaccacaggccaacctacgcccttcatcacttggttctgttttaatcgactggccccctgtcccacctctccagtgagcctccttcaactccttggtcccctgttgtctgggtc

SEQ ID NO: 367978 - DNA, 120 bp, Artificial Sequence
  ENSG00000141485_22 (sequence is synthesized)
aacatttgccgagacgccttggctggcaccctctggggtcccccttttctcccaggcaggtcatcttttctgggagatgcttcccctgccatccccaaatagctaggatcacactccaag

SEQ ID NO: 367979 - DNA, 120 bp, Artificial Sequence
  ENSG00000141485_23 (sequence is synthesized)
tatgggcagtgatggcgctctgggggccacagtgggctatctaggccctccctcacctgaggcccagagtggacacagctgttaatttccactggctatgccacttcagagtctttcatg

SEQ ID NO: 367980 - DNA, 120 bp, Artificial Sequence
  ENSG00000141485_24 (sequence is synthesized)
ccagcgtttgagctcctctgggtaaaatcttccctttgttgactggccttcacagccatggctggtgacaacagaggatcgttgagattgagcagcgcttggtgatctctcagcaaacaa

SEQ ID NO: 367981 - DNA, 120 bp, Artificial Sequence
  ENSG00000141485_25 (sequence is synthesized)
cccctgcccgtgggccaatctacttgaagttactcggacaaagaccccaaagtggggcaacaactccagagaggctgtgggaatcttcagaacccccctgtaagagacagacatgagaga

SEQ ID NO: 367982 - DNA, 120 bp, Artificial Sequence
  ENSG00000141485_26 (sequence is synthesized)
caagcatcttctttcccccgcaagtccattttatttccttcttgtgctgctctggaagagaggcagtagcaaagagatgagctcctggatggcattttccagggcaggagaaagtatgag

SEQ ID NO: 367983 - DNA, 120 bp, Artificial Sequence
  ENSG00000141485_27 (sequence is synthesized)
agcctcaggaaaccccatcaaggaccgagtatgtgtctggttccttgggtgggacgattcctgaccacactgtccagctcttgctctcattaaatgctctgtctcccgcggaaagctcca

SEQ ID NO: 367984 - DNA, 120 bp, Artificial Sequence
  ENSG00000141485_28 (sequence is synthesized)
tttttttttttttttttttgcatttccttctgtcatccattgcaaagacgtaccagcttcagggtagtatggaaagatccctggtctcgcagtcagaagacccgagttcaagatgtggga

SEQ ID NO: 367985 - DNA, 120 bp, Artificial Sequence
  ENSG00000141485_29 (sequence is synthesized)
ctggtctcgcagtcagaagacccgagttcaagatgtgggatctctgaacatggcccttcagttctttcttccgagagctgtgctgatggccaagtaagatgagggctatgaaaagcctct

SEQ ID NO: 367986 - DNA, 120 bp, Artificial Sequence
  ENSG00000141485_30 (sequence is synthesized)
gtagactgcaaaatgagcatgggagaggctgtcattattctggaattgggagacagatttacagagggcctgaacacaggattgaaggtggtgaatttccattcggctgcctgggcgtct

SEQ ID NO: 367987 - DNA, 120 bp, Artificial Sequence
  ENSG00000141485_31 (sequence is synthesized)
gcatgtataaaaagcaaacctaagtggtttttttctcctccaagtgaagatgaaagtgttaaaaatagcaaggaggtgaaagtgttcaaaatagcaaagtggcctgtctcctcttctcct

SEQ ID NO: 367988 - DNA, 120 bp, Artificial Sequence
  ENSG00000141485_32 (sequence is synthesized)
aagcagactgtccaaacagacgcccagtagaaggagcaccttttgatactgggcacgtggtggtgatgcctcctctctcctagcacaggccgtggctttgtcatctccagccctaactgg

SEQ ID NO: 367989 - DNA, 120 bp, Artificial Sequence
  ENSG00000141485_33 (sequence is synthesized)
gagcaccgagggttccaaccaggcaaatgcaggccctaacgggctctttgaaaacgggcttttctagaaccaggaacctcaagtaaaaactcccccagctacctctaaggcccatcacac

SEQ ID NO: 367990 - DNA, 120 bp, Artificial Sequence
  ENSG00000141485_34 (sequence is synthesized)
tcctgtctcacgcccacctatgagaaaggaaaaggtgatggtcattgagctgggctgcagaggagtgtgaggtgcagacaccatgaggtacccacagccaggaaaacgaggatggtcggg

SEQ ID NO: 367991 - DNA, 120 bp, Artificial Sequence
  ENSG00000141485_35 (sequence is synthesized)
gagacgcgccagcgaagagctgggcccctgcgtgggacccctcagtggttcccagggggcgtgggacttgcgcagtcctttcagagggctgtttaccaacaggaaccgtaacattaaacc

SEQ ID NO: 367992 - DNA, 120 bp, Artificial Sequence
  ENSG00000141485_36 (sequence is synthesized)
tgctcagaccccttgactcagcaatttcatgtctgggaatatatcttaggaaaataatcagagatgcctaccaacatatgtgatgatgatgtatgacagaattattatacaaatatatcc

SEQ ID NO: 367993 - DNA, 120 bp, Artificial Sequence
  ENSG00000141485_37 (sequence is synthesized)
atagtaacagggggtttgctgaaataaattatcatatattcatataatatgacattatcaggccattaaaaatcacagtttcaaagagtaataaaatgggaacatgctcatagtatagtt

SEQ ID NO: 367994 - DNA, 120 bp, Artificial Sequence
  ENSG00000141485_38 (sequence is synthesized)
ttttaaaattgcagatggtatatggctaaaaatgtctaataatgcaaagatgtatacagaccttaatcctctagcctcctccctagagatgacctctgttaatttctcaaatatttttct

SEQ ID NO: 367995 - DNA, 62 bp, Artificial Sequence
  ENSG00000141485_39 (sequence is synthesized)
ccctagagatgacctctgttaatttctcaaatatttttctggatattttacacactcacaca

SEQ ID NO: 367996 - DNA, 83 bp, Artificial Sequence
  ENSG00000141485_40 (sequence is synthesized)
catcttaatttttaaaaaatctaaccatgaagccttggttatcttggagagctttcctgattagcacaaaaagaaaaaaaaat

SEQ ID NO: 367997 - DNA, 120 bp, Artificial Sequence
  ENSG00000141485_41 (sequence is synthesized)
ttggagagctttcctgattagcacaaaaagaaaaaaaaatccaattctttacagctgcatactattccattatttgtatgtgtcatattttatttaaccatcctgctattagtgaccatt

SEQ ID NO: 367998 - DNA, 120 bp, Artificial Sequence
  ENSG00000141485_42 (sequence is synthesized)
gagttggcttcctgtgttttgccgttacatggttgcaacaaacatgtttgcatgtgtctgccctcatgtgcatgatacatgattgatttgatagattttaggaattacatcattcattca

SEQ ID NO: 367999 - DNA, 120 bp, Artificial Sequence
  ENSG00000141485_43 (sequence is synthesized)
tacactcagcaaatatttaatgagtgcctactctctgataggtgctgttggatgtggctaaattttaaagtgtagaatttaaaaggtggctaccaaattccatgtgcaaaatgaccccac

SEQ ID NO: 368000 - DNA, 120 bp, Artificial Sequence
  ENSG00000141485_44 (sequence is synthesized)
gcatgtataaaaacacacacatccacagatttatatgcgggagagaagatgtggtccctggcctctaggctctctcagtctgtggcaagacagacagacatgtgcacgcggcactgtaag

SEQ ID NO: 368001 - DNA, 120 bp, Artificial Sequence
  ENSG00000141485_45 (sequence is synthesized)
gttgagcacagtctaagtactcagcatggtctctggcacatagtaggtgcccaagaaatacatgtcgaatgaattgagggggtaaggccttctagggcaggtggcctctgacctcagcct

SEQ ID NO: 368002 - DNA, 120 bp, Artificial Sequence
  ENSG00000141485_46 (sequence is synthesized)
tcagtgttccgtaggtggaattatctgccagagacgtggcaaaagggagaggaaccaagactgaggcacagaggttcaaacgtacccggcacattcagagaatccttttcagaatcacgt

SEQ ID NO: 368003 - DNA, 120 bp, Artificial Sequence
  ENSG00000141485_47 (sequence is synthesized)
ccccaagagcttctgtgttctgtacggtgatgttgcagtgctgtttttccgcagtctcgctccatcggcctcaatccgctgtacatcatgctgccctgtaccctgagtgcctcctttgcc

SEQ ID NO: 368004 - DNA, 120 bp, Artificial Sequence
  ENSG00000141485_48 (sequence is synthesized)
ctttttctgagatgatctcaagcctcacacactgttctttctctgaggtgggttatagactctcccacctggagaagcctgtgcaggcaccaggggagtccttggaaggggtgaaggtgg

SEQ ID NO: 368005 - DNA, 120 bp, Artificial Sequence
  ENSG00000141485_49 (sequence is synthesized)
ggctgagggactcatatggccaaggatgaacttgacaaattagcaagaaccatgaagataggcagggcaggcttaggcagcagggggatgctaatgacagtcacagagatttgtaggggt

SEQ ID NO: 368006 - DNA, 120 bp, Artificial Sequence
  ENSG00000141485_50 (sequence is synthesized)
gcctgaagaggtagaagcagggagagggagagagagagcactgcctgggagtagatgatgccttggaaacaaatgtagtcagaggaagaactcttcattagctctgtcacctttgctggg

SEQ ID NO: 368007 - DNA, 120 bp, Artificial Sequence
  ENSG00000141485_51 (sequence is synthesized)
agaagggcagctttgcagctctgggctgggaaagaggcaagtgtttgagcccaagaggccagaaatgtacctgggaccaatcgggtgttcgttatctcagagcctctgctgggtatctca

SEQ ID NO: 368008 - DNA, 120 bp, Artificial Sequence
  ENSG00000141485_52 (sequence is synthesized)
gggactccatgagcattttcaaaaaaaaaggtgggtcccagaaaccatggactgcaaacttgactccaatccccagtaaaatatctacaacagggtagtgaagcgatggttagtgaccat

SEQ ID NO: 368009 - DNA, 120 bp, Artificial Sequence
  ENSG00000141485_53 (sequence is synthesized)
gagggaagcttgcagagcaggcatcagaaagagcctgaggaggtccacagggaagctggcacgtccttgtaggatagttaaggcactggggtgagcaatgaacctggactcacggaacac

SEQ ID NO: 368010 - DNA, 120 bp, Artificial Sequence
  ENSG00000141485_54 (sequence is synthesized)
tgggctctgtgaccgtttccctgaatggcctaagctgttgcctcctgtcacttctctgaggtcattttccaaatgcgcacgggcatagagaacccatccactctgcctacttcccaggga

SEQ ID NO: 368011 - DNA, 120 bp, Artificial Sequence
  ENSG00000141485_55 (sequence is synthesized)
tgccttgagcactgaggatacctgggggacatgaagtcgcactgtcctgggggtcgggacaccccagccagggacagagcatggcacagggacatcgaggcccagtgagccgaccctttg

SEQ ID NO: 368012 - DNA, 120 bp, Artificial Sequence
  ENSG00000141485_56 (sequence is synthesized)
tttagcatcaaatcaaaagccatcatattttctagaaatgagagaccccaggaaagtggacctcagggccctcagaattcttctgcttggctcccttgagtggccagcttgggtgggagg

SEQ ID NO: 368013 - DNA, 120 bp, Artificial Sequence
  ENSG00000141485_57 (sequence is synthesized)
ccactccagtgggtttcattctgcagcatgctggagagcttccacttccaaacccaagttcacacatgcttctgtatccttcctgccaccttgctcctctgagtatggtctccggttgtc

SEQ ID NO: 368014 - DNA, 120 bp, Artificial Sequence
  ENSG00000141485_58 (sequence is synthesized)
caaggcactgcctgtcctgggagtcacctgtatgtgaggcacccttggtgccttgagatatcatgtagaagccttggttcttctcagacaactccattcatgcaaactctccccctcctc

SEQ ID NO: 368015 - DNA, 120 bp, Artificial Sequence
  ENSG00000141485_59 (sequence is synthesized)
ctagcctgggtcccgggctttgtttttttttgggtccataatgtctgcctgtgtggacagcagcttgggccctggtgcagaacagctcctaggtcccttcttcaggctcctacccctgcc

SEQ ID NO: 368016 - DNA, 120 bp, Artificial Sequence
  ENSG00000141485_60 (sequence is synthesized)
cctgctcctacccccaggtgaattaggagccctgaggaggagcctggctgcagcgaggcccacagactgagagtagctgagctccttctgtccctagccttggacagctggggcatgtag

SEQ ID NO: 368017 - DNA, 120 bp, Artificial Sequence
  ENSG00000141485_61 (sequence is synthesized)
agccacagagcagagtcaggccctgccctgctcacagcccaaggagagagcagacatggaaacaggtgctttgaacccagcacagcgatgattagagtagggggaaggattgagaagggt

SEQ ID NO: 368018 - DNA, 120 bp, Artificial Sequence
  ENSG00000141485_62 (sequence is synthesized)
caggccagccccacctggtgcacacactgagagcgtggtcccagaggagggatgttgtttgagcaggctctgaaggaccatgaggagtcttcctgatagacagcagagaagggagcaggg

SEQ ID NO: 368019 - DNA, 120 bp, Artificial Sequence
  ENSG00000141485_63 (sequence is synthesized)
gttacaagcaaagggagtgtttcttctgaatactgtttgtgtgatagctccactgcagcatggaggggtcaaagtgtatgtgcggggcggaggggagatggcagggttggagtggcagcc

SEQ ID NO: 368020 - DNA, 120 bp, Artificial Sequence
  ENSG00000141485_64 (sequence is synthesized)
gggagaatagtcacactttcccaagctccctccccagctcaccctacccctactctgcttagcccttctgaacttctgagaggtgcaacagagtttgggggtgggtgggaatttcctagc

SEQ ID NO: 368021 - DNA, 120 bp, Artificial Sequence
  ENSG00000141485_65 (sequence is synthesized)
cagaagtgggaagctggggctgcctgcacataggggtattccagcacaccctagggcaagctcatattgagttggcaccatctggatgcctgggcttcccctgctagatggtggggcagg

SEQ ID NO: 368022 - DNA, 120 bp, Artificial Sequence
  ENSG00000141485_66 (sequence is synthesized)
tggaggaagcaaagaagggaaggagggagggaggggaggctctaaaaccgtcatccctattccaatatctgatcttgaattggcctcaacacctgtgcatccctgcaggggtggacccag

SEQ ID NO: 368023 - DNA, 120 bp, Artificial Sequence
  ENSG00000141497_0 (sequence is synthesized)
cggctgcagtctgggccggggccctgtgccgctgaagacatggagtttgtgtctggataccgggatgagttccttgatttcactgcccttctcttcggctggttccgaaagtttgtggca

SEQ ID NO: 368024 - DNA, 120 bp, Artificial Sequence
  ENSG00000141497_1 (sequence is synthesized)
gagcgtggagctgtagggactagccttgagggccgctgccggcagctggaggcccagatcagaaggctaccccaggaccctgccctttgggtgctccatgtcctgcccaaccatagtgtg

SEQ ID NO: 368025 - DNA, 120 bp, Artificial Sequence
  ENSG00000141497_2 (sequence is synthesized)
ggcatcagcctggggcaaggggcagaaccaggtcctggaccaggcctggggactgcctggctcctgggagacaaccctccactccacctgcgagacctgagcccctacatcagctttgtc

SEQ ID NO: 368026 - DNA, 120 bp, Artificial Sequence
  ENSG00000141497_3 (sequence is synthesized)
agcctagaggatggggaggaaggggaggaggaagaggaggaagatgaagaagaagagaagagagaggacgggggtgcaggcagcacagagaaggtggaaccagaggaggaccgggagcta

SEQ ID NO: 368027 - DNA, 120 bp, Artificial Sequence
  ENSG00000141497_4 (sequence is synthesized)
gcccctaccagcagggagtccccccaggaaacaaaccctccaggagagtcagaggaggctgcccgggaggcaggaggtggcaaggatggctgccgagaggacagggtggagaacgaaaca

SEQ ID NO: 368028 - DNA, 120 bp, Artificial Sequence
  ENSG00000141497_5 (sequence is synthesized)
agaccccagaagaggaagggacagaggagtgaggctgcccccctgcacgtttcctgtctcttacttgtgacggatgagcatggcaccatcttgggcattgatctgctagtggatggagcc

SEQ ID NO: 368029 - DNA, 120 bp, Artificial Sequence
  ENSG00000141497_6 (sequence is synthesized)
cagggaaccgcaagctggggctcagggaccaaggacctggctccttgggcctatgctctcctctgtcacagcatggcctgtcccatgggctctggggatccccgaaagccccgacagctt

SEQ ID NO: 368030 - DNA, 120 bp, Artificial Sequence
  ENSG00000141497_7 (sequence is synthesized)
actgtgggagatgcccggctgcatcgagagctggagagcttggtcccaaggctaggtgtgaagttagccaaaaccccaatgcggacatggggtccccggccaggcttcacctttgcttcc

SEQ ID NO: 368031 - DNA, 120 bp, Artificial Sequence
  ENSG00000141497_8 (sequence is synthesized)
cttcgtgctcgaacctgccatgtgtgtcacaggcacagctttgaagcgaagctgacaccttgcccccagtgtagtgctgtcttgtattgtggagaggcttgtctccgggctgactggcag

SEQ ID NO: 368032 - DNA, 120 bp, Artificial Sequence
  ENSG00000141497_9 (sequence is synthesized)
gaaaccttcaacaaagaggccttcctggcctctcggggcctcactcgtggctattggacccagctcagcatgctgattccaggcccgggcttctccagacacccccgaggcaacacgcca

SEQ ID NO: 368033 - DNA, 120 bp, Artificial Sequence
  ENSG00000141497_10 (sequence is synthesized)
tccctcagccttcttcgcggtggagacccctaccagcttctccagggagacgggactgccctgatgcctcctgtgcccccacatccaccccggggtgtttttgtccctgagctcaacatc

SEQ ID NO: 368034 - DNA, 120 bp, Artificial Sequence
  ENSG00000141497_11 (sequence is synthesized)
caaaacaaacagtcactgaagatccacgtggtggaggccgggaaggagtttgaccttgtcatggtgttttgggagcttttggtcctgctcccccatgtggccctggagctgcagtttgta

SEQ ID NO: 368035 - DNA, 120 bp, Artificial Sequence
  ENSG00000141497_12 (sequence is synthesized)
ggtgatggcctgccccccgaaagcgacgagcagcattttaccctgcagagggacagcctggaggtgtctgtccggcctggttccggcatatcagcacggcccagctctggcactaaggag

SEQ ID NO: 368036 - DNA, 120 bp, Artificial Sequence
  ENSG00000141497_13 (sequence is synthesized)
aaagggggccgcagggacctgcagatcaaggtgtcagcaaggccctaccacctgttccaggggcccaagcctgacctggttattggatttaactccgggtttgctctcaaggatacgtgg

SEQ ID NO: 368037 - DNA, 120 bp, Artificial Sequence
  ENSG00000141497_14 (sequence is synthesized)
ctgaggtctctgccccggttacagtccctccgagtgccagccttcttcaccgagagcagcgagtacagctgtgtgatggacggccagaccatggcggtggccactggagggggcaccagc

SEQ ID NO: 368038 - DNA, 120 bp, Artificial Sequence
  ENSG00000141497_15 (sequence is synthesized)
cctccccagcccaaccccttccgctccccctttcgcctcagagcggccgacaactgcatgtcctggtactgcaatgccttcatcttccacctggtttacaagcctgctcaagggagcggg

SEQ ID NO: 368039 - DNA, 120 bp, Artificial Sequence
  ENSG00000141497_16 (sequence is synthesized)
gcccgcccggcgcccgggcccccacccccatccccaactccctctgctcctcctgcccccacccgaaggcgccgaggagaaaagaaacctgggcggggggcccgccggcggaaatgaatg

SEQ ID NO: 368040 - DNA, 120 bp, Artificial Sequence
  ENSG00000141497_17 (sequence is synthesized)
ctgataccctagtagtccccagctcccaaacactgaaaggaaaacgtgaaaacactcaaggcctagggggaggacaggttggtaaaacatgaaaaggtaaataaaattacttgtttgaaa

SEQ ID NO: 368041 - DNA, 80 bp, Artificial Sequence
  ENSG00000141497_18 (sequence is synthesized)
gcgctgcatgagcctcccgggcggcccggtggagagagtcgccgccagccccggccgcgcgcacctgcggggcagccacc

SEQ ID NO: 368042 - DNA, 120 bp, Artificial Sequence
  ENSG00000141497_19 (sequence is synthesized)
tactacacatggcggggcctcagcttggactcccccatagccgtgcttctcacctacccgctgaccgtgtactacgtcatcacccacctggtgccccagtccttccctgagctcaacatc

SEQ ID NO: 368043 - DNA, 120 bp, Artificial Sequence
  ENSG00000141497_20 (sequence is synthesized)
gaaaagtggtggcggctgcaggtaccggaggagtggggcggccgggaggggctaggtctaccggggctgcccgccacgcagatccgagcccagggaaccccctcgctcccactcccatac

SEQ ID NO: 368044 - DNA, 120 bp, Artificial Sequence
  ENSG00000141497_21 (sequence is synthesized)
cccacagacgcatccaaaatgcttccctccccaccaaaccgttcccgataggattagccctctctcctctctagccttaatttaaactctgcttttgagggtgtgaactctccaatttta

SEQ ID NO: 368045 - DNA, 120 bp, Artificial Sequence
  ENSG00000141497_22 (sequence is synthesized)
agccccaaataccatctcatccctgagtagtcttctccaaccctggtcacccactttcaagtccagcccccattttcctccctaaactcccatcctcagccctgaaaaatcctcttctcc

SEQ ID NO: 368046 - DNA, 120 bp, Artificial Sequence
  ENSG00000141497_23 (sequence is synthesized)
gctcctagcatatccacggatccaaccctaagtgactctcaaacctaccctctccctcaatttgtgacccagccccaaactccatcattgctctcctgtccctcaccatatatcccttct

SEQ ID NO: 368047 - DNA, 120 bp, Artificial Sequence
  ENSG00000141497_24 (sequence is synthesized)
tgcttttcagccctgacccctccagtgacctcctggttgggtcctgcccttctgccccccactccccatcttgcctggtgcatcctccagttccctgacttccagtggcttttccacccc

SEQ ID NO: 368048 - DNA, 120 bp, Artificial Sequence
  ENSG00000141499_0 (sequence is synthesized)
ttctttttttttttcctccgggaagatgagatatactcattcttgaaaatacctccgggcttgccttctgcacacttctttccctccctgtctcacgccatggtagcgtccgcctaggtt

SEQ ID NO: 368049 - DNA, 120 bp, Artificial Sequence
  ENSG00000141499_1 (sequence is synthesized)
gcaggcgacccgcggggtggggcacaccattcaaagaaggggagggattgaggtttgcatcaaaacaaatacccctgcctttgcaaaggccataactaagtaatccagaaaaagaaatgc

SEQ ID NO: 368050 - DNA, 120 bp, Artificial Sequence
  ENSG00000141499_2 (sequence is synthesized)
aggcggagaatagcagcctccctctgccaagtaagaggaaccggcctaaaggacattttctctctctctcctcccctctcatcgggtgaatagtgagctgctccggcaaaaagaaaccgg

SEQ ID NO: 368051 - DNA, 120 bp, Artificial Sequence
  ENSG00000141499_3 (sequence is synthesized)
aaatgctgctgcaagaggcagaaatgtaaatgtggagccaaacaataacagggctgccgggcctctcagattgcgacggtcctcctcggcctggcgggcaaacccctggtttagcacttc

SEQ ID NO: 368052 - DNA, 120 bp, Artificial Sequence
  ENSG00000141499_4 (sequence is synthesized)
tcacttccacgactgacagccttcaattggattttctccatctagcggagccgggggctgcctggaaagatcgctccaggaaggacaaaggtccggaagttgtgggaccttagcagcttg

SEQ ID NO: 368053 - DNA, 120 bp, Artificial Sequence
  ENSG00000141499_5 (sequence is synthesized)
ggctccccggatcacccccaaatgatcatttcggaatggagccccagttttcactaggatgccatgggctctaaaatatacagctatgagttctcaatgtttcgagatccaaaagtctca

SEQ ID NO: 368054 - DNA, 120 bp, Artificial Sequence
  ENSG00000141499_6 (sequence is synthesized)
gacctcaatgctttgtgcatcttttatttcagggattccctacgcccagcaccgggtggatgtgcaaagaagtacgctttaggccggctcaaggttccccaaagctccactcctctgcct

SEQ ID NO: 368055 - DNA, 120 bp, Artificial Sequence
  ENSG00000141499_7 (sequence is synthesized)
aggcgttcaactttgagttcggatggtcctaacatccccatcatctacacccaggtctcccaacaatgcaactcctatgatgatccctctagccaagcttccatcccactcacccccaaa

SEQ ID NO: 368056 - DNA, 120 bp, Artificial Sequence
  ENSG00000141499_8 (sequence is synthesized)
ctcgctaagtccccactgccccacccccagccccagcgattttcccgagctgaaaatacacggagccgagagcccgtgactcagagaggactcatcaagttcagtcaggagcttacccaa

SEQ ID NO: 368057 - DNA, 120 bp, Artificial Sequence
  ENSG00000141499_9 (sequence is synthesized)
tccagggaagcgtgtcaccgtcgtggaaagcacgctcccagcccgaacgcaaagtgtccccggagcccagcagctacctgctccctggacggtggctctagacttttgagaagctcaaaa

SEQ ID NO: 368058 - DNA, 120 bp, Artificial Sequence
  ENSG00000141499_10 (sequence is synthesized)
cttttagcgccagtcttgagcacatgggaggggaaaaccccaatcccatcaacccctgcgaggctcctggcacaaagctggacagtcgccatgacaagtaagggcaagtaatccgcctgc

SEQ ID NO: 368059 - DNA, 120 bp, Artificial Sequence
  ENSG00000141499_11 (sequence is synthesized)
cggaggaagcaaaggaaatggagttggggaggagggtgcagagtcaggattctcgccgacctggtgccgtagatactaacattttggggtggaaaattctgcaagccagagctgtgaggg

SEQ ID NO: 368060 - DNA, 120 bp, Artificial Sequence
  ENSG00000141499_12 (sequence is synthesized)
cagaattggtggaaatcattttggaggaatcctgcattgtgtcaaatatgaagggtggaaggaagaaagcttttgcgtttgctctcagctggatcctttcttctcatcagttaaaatgtc

SEQ ID NO: 368061 - DNA, 120 bp, Artificial Sequence
  ENSG00000141499_13 (sequence is synthesized)
attttttaggaaggctttccgtaatatcacaccctaacgttttctcccagatactttatatcacaccatcttatttaatctccttcacaacccttatcactctgataagatttatttgtt

SEQ ID NO: 368062 - DNA, 120 bp, Artificial Sequence
  ENSG00000141499_14 (sequence is synthesized)
cattgctttcagtacatggaaacgtaagccttatgaggatatagaatttttctactatcttattcattgttgtattcctgagtgcctatatcagtgctgggtagcaagtaagagctcgat

SEQ ID NO: 368063 - DNA, 120 bp, Artificial Sequence
  ENSG00000141499_15 (sequence is synthesized)
aataaatattttttgaatgagggagacaggtctgaagcctggagaatgagatgcagaagaggtgcaagacctgctgcgccctctgcaggcggcgggggggcggtgcaggtgctttaagaa

SEQ ID NO: 368064 - DNA, 120 bp, Artificial Sequence
  ENSG00000141499_16 (sequence is synthesized)
gcgttcagactacaactcccagcagccacgaggagccctagggcttgatgggaacgggaaaccttctaacctttcacgtcccggctccgcgggttccgtgggtcgcccgcgaaatctgat

SEQ ID NO: 368065 - DNA, 120 bp, Artificial Sequence
  ENSG00000141499_17 (sequence is synthesized)
ccgggatgcggcggcccaatcggaaggtggaccgaaatcccgcgacagcaagaggcccgtagcgacccgcggtgctaaggaacacagtgctttcaaaagaattggcgtccgctgttcgcc

SEQ ID NO: 368066 - DNA, 120 bp, Artificial Sequence
  ENSG00000141499_18 (sequence is synthesized)
tctcctcccgggagtcttctgcctactcccagaagaggagggaagcacaggtgggtttctttagctctgcgtcggatccctgagaacttcgaagccatcctggctgaggctaatctccgc

SEQ ID NO: 368067 - DNA, 120 bp, Artificial Sequence
  ENSG00000141499_19 (sequence is synthesized)
tgtgcttcctctgcagtatgaagactttggagactcaaccgttagctccggactgctgtccttcagaccaggacccagctccagcccatccttctccccacgcttccccgatgaataaaa

SEQ ID NO: 368068 - DNA, 120 bp, Artificial Sequence
  ENSG00000141499_20 (sequence is synthesized)
atgcggactctgaactgatgccaccgcctcccgaaaggggggatccgccccggttgtccccagatcctgtggctggctcagctgtgtcccaggagctacgggagggggacccagtttctc

SEQ ID NO: 368069 - DNA, 120 bp, Artificial Sequence
  ENSG00000141499_21 (sequence is synthesized)
tctccactcccctggaaacagagtttggttcccctagtgagttgagtcctcgaatcgaggagcaagaactttctgaaaatacaagccttcctgcagaagaagcaaacgggagcctttctg

SEQ ID NO: 368070 - DNA, 120 bp, Artificial Sequence
  ENSG00000141499_22 (sequence is synthesized)
aagaagaagcgaacgggccagagttggggtctggaaaagccatggaagatacctctggggaacccgctgcagaggacgagggagacaccgcttggaactacagcttctcccagctgcctc

SEQ ID NO: 368071 - DNA, 120 bp, Artificial Sequence
  ENSG00000141499_23 (sequence is synthesized)
gatttctcagtggttcctggtcagagttcagcacccaacctgagaacttcttgaaaggctgtaagtgggctcctgacggttcctgcatcttgaccaatagtgctgataacatcttgcgaa

SEQ ID NO: 368072 - DNA, 120 bp, Artificial Sequence
  ENSG00000141499_24 (sequence is synthesized)
tttataacctgcccccagagctgtaccatgagggggagcaggtggaatatgcagaaatggtccctgtccttcgaatggtggaaggtgataccatctatgattactgctggtattctctga

SEQ ID NO: 368073 - DNA, 120 bp, Artificial Sequence
  ENSG00000141499_25 (sequence is synthesized)
tgtcctcagcccagccagacacctcctacgtggccagcagcagccgggagaacccgattcatatctgggacgcattcactggagagctccgggcttcctttcgcgcctacaaccacctgg

SEQ ID NO: 368074 - DNA, 120 bp, Artificial Sequence
  ENSG00000141499_26 (sequence is synthesized)
atgagctgacggcagcccattcgctctgcttctccccggatggctcccagctcttctgtggcttcaaccggactgtgcgtgttttttccacggcccggcctggccgagactgcgaggtcc

SEQ ID NO: 368075 - DNA, 120 bp, Artificial Sequence
  ENSG00000141499_27 (sequence is synthesized)
gagccacatttgcaaaaaagcagggccagagcggcatcatctcctgcatagccttcagcccagcccagcccctctatgcctgtggctcctacggccgctccctgggtctgtatgcctggg

SEQ ID NO: 368076 - DNA, 120 bp, Artificial Sequence
  ENSG00000141499_28 (sequence is synthesized)
atgatggctcccctctcgccttgctgggagggcaccaagggggcatcacccacctctgctttcatcccgatggcaaccgcttcttctcaggagcccgcaaggatgctgagctcctgtgct

SEQ ID NO: 368077 - DNA, 120 bp, Artificial Sequence
  ENSG00000141499_29 (sequence is synthesized)
gggatctccggcagtctggttacccactgtggtccctgggtcgagaggtgaccaccaatcagcgcatctacttcgatctggacccgaccgggcagttcctagtgagtggcagcacgagcg

SEQ ID NO: 368078 - DNA, 120 bp, Artificial Sequence
  ENSG00000141499_30 (sequence is synthesized)
gggctgtctctgtgtgggacacggacgggcctggcaatgatgggaagccggagcccgtgttgagttttctgccccagaaggactgcaccaatggcgtgagcctgcaccctagcctgcctc

SEQ ID NO: 368079 - DNA, 120 bp, Artificial Sequence
  ENSG00000141499_31 (sequence is synthesized)
tcctggccactgcctccggtcagcgtgtgtttcctgagcccacagagagtggggacgaaggagaggagctgggccttcccttgctctccacgcgccacgtccaccttgaatgtcggcttc

SEQ ID NO: 368080 - DNA, 120 bp, Artificial Sequence
  ENSG00000141499_32 (sequence is synthesized)
agctctggtggtgtgggggggcgccagactccagcatccctgatgatcaccagggcgagaaagggcagggaggaacggagggaggtgtgggtgagctgatataaaaaggtttttatgata

SEQ ID NO: 368081 - DNA, 120 bp, Artificial Sequence
  ENSG00000141499_33 (sequence is synthesized)
tgaattcgagttccgcctcctaccaggaagaaccggctcgggccggagggctgcacggaggaccacacggacgcctgcgggcccgccccttccgcttcacgacgttcagcctgcgtctgg

SEQ ID NO: 368082 - DNA, 120 bp, Artificial Sequence
  ENSG00000141499_34 (sequence is synthesized)
tgataagcctaggaatgccagagcccagctgtagggtcccagtccctgggtgtgaggggttcctgccccaggggtgaggcctctgccagcaaatctctcctctctctcgcaggaccgggc

SEQ ID NO: 368083 - DNA, 120 bp, Artificial Sequence
  ENSG00000141499_35 (sequence is synthesized)
tctgtgcctccaagggaggaggagagggaagggcactgccacctgcacaggggccttttgtgagccgggggccacctgtgggggttcacgccgtcctctgtacggccccgggagcaggtg

SEQ ID NO: 368084 - DNA, 120 bp, Artificial Sequence
  ENSG00000141499_36 (sequence is synthesized)
cagtcggcagaggagcaaacaggctcagagcaggtaggaaaccttcccaaggccaaccagctggtcaaaggactgcttccttcctgaactcataccctgtcagctgtggagcttttggtc

SEQ ID NO: 368085 - DNA, 120 bp, Artificial Sequence
  ENSG00000141499_37 (sequence is synthesized)
tctgaaatctttctagaaaattgttgataaagctgattccgttttcctgtaggccttcaacttgcatctctccaaggaagaactgggatttgagagggatgaagtggggcttgggcattt

SEQ ID NO: 368086 - DNA, 120 bp, Artificial Sequence
  ENSG00000141499_38 (sequence is synthesized)
aggtcctttgggaggatagatgtggggagcatcagaggtctttgtcctgcttgtgacagacagcatgggggggatgttgagtccaagcatgttggtgctgggacgggagacagacctctg

SEQ ID NO: 368087 - DNA, 120 bp, Artificial Sequence
  ENSG00000141499_39 (sequence is synthesized)
ggggaaaaaatcccaagctgaaggagtgcctggagaccccgagggaggcagggacatccagggctttgggggtgactccaggtcctgttccttgtctccaggatgctgagctcctgtgct

SEQ ID NO: 368088 - DNA, 120 bp, Artificial Sequence
  ENSG00000141499_40 (sequence is synthesized)
catctacttcgatctggacccgtgagtggctgtgactccttcctacacagggccctgataagcctaggaatgccagagcccagctgaccgggcagttcctagtgagtggcagcacgagcg

SEQ ID NO: 368089 - DNA, 120 bp, Artificial Sequence
  ENSG00000141503_0 (sequence is synthesized)
agtgcgcggtcgctccgcgcctgcgcaggagaggtggtaggctcgggtggctggctccggggagatagcgcctgtcagtcggtgggtcggtcctcgcgccggccctccccctccccggtc

SEQ ID NO: 368090 - DNA, 120 bp, Artificial Sequence
  ENSG00000141503_1 (sequence is synthesized)
tccgggggaggcgcggtggagtccgcccccggggttctccgatgggggagaagcggcgacggcggcagtggagtaaccgagccggagcgtgagcggccccggtgccccgttccccacgga

SEQ ID NO: 368091 - DNA, 120 bp, Artificial Sequence
  ENSG00000141503_2 (sequence is synthesized)
ggccatgggcgacccagcccccgcccgcagcctggacgacatcgacctgtccgccctgcgggaccctgctgggatctttgagcttgtggaggtggtcggcaatggaacctacggacaggt

SEQ ID NO: 368092 - DNA, 120 bp, Artificial Sequence
  ENSG00000141503_3 (sequence is synthesized)
gtacaagggtcggcatgtcaagacggggcagctggctgccatcaaggtcatggatgtcacggaggacgaggaggaagagatcaaacaggagatcaacatgctgaaaaagtactctcacca

SEQ ID NO: 368093 - DNA, 120 bp, Artificial Sequence
  ENSG00000141503_4 (sequence is synthesized)
ccgcaacatcgccacctactacggagccttcatcaagaagagccccccgggaaacgatgaccagctctggctggtgatggagttctgtggtgctggttcagtgactgacctggtaaagaa

SEQ ID NO: 368094 - DNA, 120 bp, Artificial Sequence
  ENSG00000141503_5 (sequence is synthesized)
cacaaaaggcaacgccctgaaggaggactgtatcgcctatatctgcagggagatcctcaggggtctggcccatctccatgcccacaaggtgatccatcgagacatcaaggggcagaatgt

SEQ ID NO: 368095 - DNA, 120 bp, Artificial Sequence
  ENSG00000141503_6 (sequence is synthesized)
gctgctgacagagaatgctgaggtcaagctagtggattttggggtgagtgctcagctggaccgcaccgtgggcagacggaacactttcattgggactccctactggatggctccagaggt

SEQ ID NO: 368096 - DNA, 120 bp, Artificial Sequence
  ENSG00000141503_7 (sequence is synthesized)
catcgcctgtgatgagaaccctgatgccacctatgattacaggagtgatatttggtctctaggaatcacagccatcgagatggcagagggagccccccctctgtgtgacatgcaccccat

SEQ ID NO: 368097 - DNA, 120 bp, Artificial Sequence
  ENSG00000141503_8 (sequence is synthesized)
gcgagccctcttcctcattcctcggaaccctccgcccaggctcaagtccaagaagtggtctaagaagttcattgacttcattgacacatgtctcatcaagacttacctgagccgcccacc

SEQ ID NO: 368098 - DNA, 120 bp, Artificial Sequence
  ENSG00000141503_9 (sequence is synthesized)
cacggagcagctactgaagtttcccttcatccgggaccagcccacggagcggcaggtccgcatccagcttaaggaccacattgaccgatcccggaagaagcggggtgagaaagaggagac

SEQ ID NO: 368099 - DNA, 120 bp, Artificial Sequence
  ENSG00000141503_10 (sequence is synthesized)
agaatatgagtacagcggcagcgaggaggaagatgacagccatggagaggaaggagagccaagctccatcatgaacgtgcctggagagtcgactctacgccgggagtttctccggctcca

SEQ ID NO: 368100 - DNA, 120 bp, Artificial Sequence
  ENSG00000141503_11 (sequence is synthesized)
gcaggaaaataagagcaactcagaggctttaaaacagcagcagcagctgcagcagcagcagcagcgagaccccgaggcacacatcaaacacctgctgcaccagcggcagcggcgcataga

SEQ ID NO: 368101 - DNA, 120 bp, Artificial Sequence
  ENSG00000141503_12 (sequence is synthesized)
ggagcagaaggaggagcggcgccgcgtggaggagcaacagcggcgggagcgggagcagcggaagctgcaggagaaggagcagcagcggcggctggaggacatgcaggctctgcggcggga

SEQ ID NO: 368102 - DNA, 120 bp, Artificial Sequence
  ENSG00000141503_13 (sequence is synthesized)
ggaggagcggcggcaggcggagcgcgagcaggaatacaagcggaagcagctggaggagcagcggcagtcagaacgtctccagaggcagctgcagcaggagcatgcctacctcaagtccct

SEQ ID NO: 368103 - DNA, 120 bp, Artificial Sequence
  ENSG00000141503_14 (sequence is synthesized)
gcagcagcagcaacagcagcagcagcttcagaaacagcagcagcagcagctcctgcctggggacaggaagcccctgtaccattatggtcggggcatgaatcccgctgacaaaccagcctg

SEQ ID NO: 368104 - DNA, 120 bp, Artificial Sequence
  ENSG00000141503_15 (sequence is synthesized)
ggcccgagaggtagaagagagaacaaggatgaacaagcagcagaactctcccttggccaagagcaagccaggcagcacggggcctgagccccccatcccccaggcctccccagggccccc

SEQ ID NO: 368105 - DNA, 120 bp, Artificial Sequence
  ENSG00000141503_16 (sequence is synthesized)
aggacccctttcccagactcctcctatgcagaggccggtggagccccaggagggaccgcacaagagcctggtggcacaccgggtcccactgaagccatatgcagcacctgtaccccgatc

SEQ ID NO: 368106 - DNA, 120 bp, Artificial Sequence
  ENSG00000141503_17 (sequence is synthesized)
ccagtccctgcaggaccagcccacccgaaacctggctgccttcccagcctcccatgaccccgaccctgccatccccgcacccactgccacgcccagtgcccgaggagctgtcatccgcca

SEQ ID NO: 368107 - DNA, 120 bp, Artificial Sequence
  ENSG00000141503_18 (sequence is synthesized)
gaattcagaccccacctctgaaggacctggccccagcccgaatcccccagcctgggtccgcccagataacgaggccccacccaaggtgcctcagaggacctcatctatcgccactgccct

SEQ ID NO: 368108 - DNA, 120 bp, Artificial Sequence
  ENSG00000141503_19 (sequence is synthesized)
taacaccagtggggccggagggtcccggccagcccaggcagtccgtgccagacctcgcagcaactccgcctggcaaatctatctgcaaaggcgggcagagcggggcaccccaaagcctcc

SEQ ID NO: 368109 - DNA, 120 bp, Artificial Sequence
  ENSG00000141503_20 (sequence is synthesized)
ccagcctctcacgggcacctcccccaggctggctcactggagcggaaccgcgtgggagtctcctccaaaccggacagctcccctgtgctctcccctgggaataaagccaagcccgacgac

SEQ ID NO: 368110 - DNA, 120 bp, Artificial Sequence
  ENSG00000141503_21 (sequence is synthesized)
caccgctcacggccaggccggcccgcagactttgtgttgctgaaagagcggactctggacgaggcccctcggcctcccaagaaggccatggactactcgtcgtccagcgaggaggtggaa

SEQ ID NO: 368111 - DNA, 120 bp, Artificial Sequence
  ENSG00000141503_22 (sequence is synthesized)
agcagtgaggacgacgaggaggaaggcgaaggcgggccagcagaggggagcagagatacccctgggggccgcagcgatggggatacagacagcgtcagcaccatggtggtccacgacgtc

SEQ ID NO: 368112 - DNA, 120 bp, Artificial Sequence
  ENSG00000141503_23 (sequence is synthesized)
gaggagatcaccgggacccagcccccatacgggggcggcaccatggtggtccagcgcacccctgaagaggagcggaacctgctgcatgctgacagcaatgggtacacaaacctgcctgac

SEQ ID NO: 368113 - DNA, 120 bp, Artificial Sequence
  ENSG00000141503_24 (sequence is synthesized)
gtggtccagcccagccactcacccaccgagaacagcaaaggccaaagcccaccctcgaaggatgggagtggtgactaccagtctcgtgggctggtaaaggcccctggcaagagctcgttc

SEQ ID NO: 368114 - DNA, 120 bp, Artificial Sequence
  ENSG00000141503_25 (sequence is synthesized)
acgatgtttgtggatctagggatctaccagcctggaggcagtggggacagcatccccatcacagccctagtgggtggagagggcactcggctcgaccagctgcagtacgacgtgaggaag

SEQ ID NO: 368115 - DNA, 120 bp, Artificial Sequence
  ENSG00000141503_26 (sequence is synthesized)
ggttctgtggtcaacgtgaatcccaccaacacccgggcccacagtgagacccctgagatccggaagtacaagaagcgattcaactccgagatcctctgtgcagccctttggggggtcaac

SEQ ID NO: 368116 - DNA, 120 bp, Artificial Sequence
  ENSG00000141503_27 (sequence is synthesized)
ctgctggtgggcacggagaacgggctgatgttgctggaccgaagtgggcagggcaaggtgtatggactcattgggcggcgacgcttccagcagatggatgtgctggaggggctcaacctg

SEQ ID NO: 368117 - DNA, 120 bp, Artificial Sequence
  ENSG00000141503_28 (sequence is synthesized)
ctcatcaccatctcagggaaaaggaacaaactgcgggtgtattacctgtcctggctccggaacaagattctgcacaatgacccagaagtggagaagaagcagggctggaccaccgtgggg

SEQ ID NO: 368118 - DNA, 120 bp, Artificial Sequence
  ENSG00000141503_29 (sequence is synthesized)
gacatggagggctgcgggcactaccgtgttgtgaaatacgagcggattaagttcctggtcatcgccctcaagagctccgtggaggtgtatgcctgggcccccaaaccctaccacaaattc

SEQ ID NO: 368119 - DNA, 120 bp, Artificial Sequence
  ENSG00000141503_30 (sequence is synthesized)
atggccttcaagtcctttgccgacctcccccaccgccctctgctggtcgacctgacagtagaggaggggcagcggctcaaggtcatctatggctccagtgctggcttccatgctgtggat

SEQ ID NO: 368120 - DNA, 120 bp, Artificial Sequence
  ENSG00000141503_31 (sequence is synthesized)
gtcgactcggggaacagctatgacatctacatccctgtgcacatccagagccagatcacgccccatgccatcatcttcctccccaacaccgacggcatggagatgctgctgtgctacgag

SEQ ID NO: 368121 - DNA, 120 bp, Artificial Sequence
  ENSG00000141503_32 (sequence is synthesized)
gacgagggtgtctacgtcaacacgtacgggcgcatcattaaggatgtggtgctgcagtggggggagatgcctacttctgtggcctacatctgctccaaccagataatgggctggggtgag

SEQ ID NO: 368122 - DNA, 120 bp, Artificial Sequence
  ENSG00000141503_33 (sequence is synthesized)
aaagccattgagatccgctctgtggagacgggccacctcgacggggtcttcatgcacaaacgagctcagaggctcaagttcctgtgtgagcggaatgacaaggtgttttttgcctcagtc

SEQ ID NO: 368123 - DNA, 120 bp, Artificial Sequence
  ENSG00000141503_34 (sequence is synthesized)
cgctctgggggcagcagccaagtttacttcatgactctgaaccgtaactgcatcatgaactggtgacggggccctgggctggggctgtcccacactggacccagctctccccctgcagcc

SEQ ID NO: 368124 - DNA, 120 bp, Artificial Sequence
  ENSG00000141503_35 (sequence is synthesized)
aggcttcccgggccgcccctctttcccctccctgggcttttgcttttactggtttgatttcactggagcctgctgggaacgtgacctctgacccctgatgctttcgtgatcacgtgacca

SEQ ID NO: 368125 - DNA, 120 bp, Artificial Sequence
  ENSG00000141503_36 (sequence is synthesized)
tcctcttccccaacatgtcctcttcccaaaactgtgcctgtccccagcttctggggagggacacagcttccccttcccaggaattgagtgggcctagcccctccccccttttctccattt

SEQ ID NO: 368126 - DNA, 120 bp, Artificial Sequence
  ENSG00000141503_37 (sequence is synthesized)
gagaggagagtgcttggggcttgaaccccttaccccactgctgctgactgggcagggccctggacccctttatttgcacgtcaggggagccggctccccccttgaatgtaccagaccctg

SEQ ID NO: 368127 - DNA, 120 bp, Artificial Sequence
  ENSG00000141503_38 (sequence is synthesized)
gggggggtcactgggccctagatttttggggggtcaccagccactccaggggcagggaccatttcttcattttctgaaagcactttaatgattccccttcccccaaactccagggaatgg

SEQ ID NO: 368128 - DNA, 120 bp, Artificial Sequence
  ENSG00000141503_39 (sequence is synthesized)
aggggggaccccgccagccaaaacattccccccattcccgacccccctctcctcttctagcccatgcccttccccggtggagggagggagcagggagccctcactctccacgccccttgc

SEQ ID NO: 368129 - DNA, 120 bp, Artificial Sequence
  ENSG00000141503_40 (sequence is synthesized)
ttgcatctgtatatagtgtgagcagcaagtaacccttctccctccccccccacccctcctcaatgtagtggccttggatatcctgtttgttaataaagacaattcaaccagctcccacca

SEQ ID NO: 368130 - DNA, 120 bp, Artificial Sequence
  ENSG00000141503_41 (sequence is synthesized)
cgcagtgagtcacctggtggcaggcatggcctgcctcatcctggtttggggcttagcctcagggtgctgggtgtcaggggtggggtctccgctgatctaccgagaagggctgtggggatg

SEQ ID NO: 368131 - DNA, 120 bp, Artificial Sequence
  ENSG00000141503_42 (sequence is synthesized)
taagcgagcaattggtgaggttagtgagatgggcctgcttgtgggagcccctcctgtcgccctgctggggtgtcccggcaccctttgtctacctccacccaggcccagcttctccctgcc

SEQ ID NO: 368132 - DNA, 120 bp, Artificial Sequence
  ENSG00000141503_43 (sequence is synthesized)
ggagcggcggcaggcggagcgcgagcaggaatatattcgtcacaggctagaggaggagcagcgacagctcgagatccttcagcaacagctgctccaggaacaggccctgctgctggaata

SEQ ID NO: 368133 - DNA, 120 bp, Artificial Sequence
  ENSG00000141503_44 (sequence is synthesized)
agagatacccctgggggccggtacggcatcgggagtggggccctcccactccaaggcacagggagggaggggaagtggcagtggggaagaggtggggctttggggcaagtctgagggaga

SEQ ID NO: 368134 - DNA, 120 bp, Artificial Sequence
  ENSG00000141503_45 (sequence is synthesized)
gcggctcccttctctagagagtggggtgagggtgcaggttcctgtctctctcccgctgccctgtgtgttgtggggtggcctcttcaagtgcctgtctgcccctgtgccagcctgccctgt

SEQ ID NO: 368135 - DNA, 120 bp, Artificial Sequence
  ENSG00000141503_46 (sequence is synthesized)
aaaagcctgggctctggctgccatctgctgcctttggcacttctgtggccacgggcaggacctggaggggccccaccttcctctctcacagcagcgatggggatacagacagcgtcagca

SEQ ID NO: 368136 - DNA, 120 bp, Artificial Sequence
  ENSG00000141503_47 (sequence is synthesized)
cagttcttctaccattctggaagctccctagaatctcctggaatgcttaatggacctttccagcaccgaaattcaagaattatgactcatcggtcagcagaaaagaccctgctgggatct

SEQ ID NO: 368137 - DNA, 120 bp, Artificial Sequence
  ENSG00000141503_48 (sequence is synthesized)
ctcaaagctaacaagtgacagaaatgggacttgagccagaccttttgactccaagtccagcactctatccccctctcccatgcacctcctctcctcctgtctttctcctcctttctgcgt

SEQ ID NO: 368138 - DNA, 120 bp, Artificial Sequence
  ENSG00000141503_49 (sequence is synthesized)
attatgaggtgccaagacctgatataggggatggaggtaaaaagagatggggtgagaagctgcagcccctcctcccacctcctcctccttctggcagccctagtgggtggagagggcact

SEQ ID NO: 368139 - DNA, 120 bp, Artificial Sequence
  ENSG00000141503_50 (sequence is synthesized)
ggcttcctgaaagcgggcccctctgggagctcagagggcagtcagccactaccactgccctgcgctcccttcagattccgaggacttcccagctggcccccagggggcgagtggtgcacc

SEQ ID NO: 368140 - DNA, 120 bp, Artificial Sequence
  ENSG00000141503_51 (sequence is synthesized)
ctctcccctaacatcccagcctgcctttcctccgggtgaggggcactgtgagtctcctcctgcagtctctgtgtctccctcaactcttctgccaccccttcttcccttctttccctctcc

SEQ ID NO: 368141 - DNA, 120 bp, Artificial Sequence
  ENSG00000141503_52 (sequence is synthesized)
cttctcatggtgctaacctttcctaacctctctcctaacctctctcctaacctctcttctggctctttcttcccctgcggcccctcccagagctataagcgagcaattggtgaggacttt

SEQ ID NO: 368142 - DNA, 120 bp, Artificial Sequence
  ENSG00000141503_53 (sequence is synthesized)
cccgctcctgctgcctgccgcccctgctccccgtgcccttcccccttctctcccccacccccagattcctcctatcttttctagcttcactctttctctctgttttctcccacccttcaa

SEQ ID NO: 368143 - DNA, 120 bp, Artificial Sequence
  ENSG00000141503_54 (sequence is synthesized)
ccccaaccctgaccccctccctcttccttccctgcctcattcccatctctttaccccatccctgactccccgaccccttcctcatcccccctcattccctgtgccctcttcttccccatc

SEQ ID NO: 368144 - DNA, 120 bp, Artificial Sequence
  ENSG00000141503_55 (sequence is synthesized)
tgtgccgcatggccccctggggctcatgtcatcccctcccctacctctctcttactcttcccctgcaccccctcattctcctgcggatcccttcctccttctccaactcgctgctgctgc

SEQ ID NO: 368145 - DNA, 120 bp, Artificial Sequence
  ENSG00000141503_56 (sequence is synthesized)
aggacatcaagggaatacatctcctctctaggcagttggagaaaagagagggcatgcctgctctaactcccagggccacaccctgctgagccctctctccctacccttgggcccaggaat

SEQ ID NO: 368146 - DNA, 120 bp, Artificial Sequence
  ENSG00000141503_57 (sequence is synthesized)
taaaggcccctggcaagagctcgttcacgatgtttgtggatctagggatctaccagcctggaggcagtggggacagcatccccatcacaggtgaggacaggaggacagacctgctgtgag

SEQ ID NO: 368147 - DNA, 120 bp, Artificial Sequence
  ENSG00000141503_58 (sequence is synthesized)
gccagggtccaggggcagcctggaggggagcacagtggtcttgagacgcagcctcacaaagcatagccacaggacctctcccttgggccctagcacctgcctgggcacagaggcaaggaa

SEQ ID NO: 368148 - DNA, 120 bp, Artificial Sequence
  ENSG00000141503_59 (sequence is synthesized)
caggtacaggtgtggtgagtgggggagggaggaggggctcagctccttggcgctgtcaccatcttctgcctgggaggagggcaggcactggaaggtggggccacactttctcaccccttg

SEQ ID NO: 368149 - DNA, 120 bp, Artificial Sequence
  ENSG00000141503_60 (sequence is synthesized)
agtggccagcgcatacttgttcatgaagagagaaatggatctgggagccagggacttggggcctgggtggggcagtgtagtgacagaccacggggaggcgcccgtggcgcaagaagggaa

SEQ ID NO: 368150 - DNA, 120 bp, Artificial Sequence
  ENSG00000141504_0 (sequence is synthesized)
atgcccggacagaggatcgcctcgctggcctactctctcctcccgtacggcgccggaatcccagctccacttaccaggccgcggctaccccgccgtcccccccgactcccgccaccccgc

SEQ ID NO: 368151 - DNA, 120 bp, Artificial Sequence
  ENSG00000141504_1 (sequence is synthesized)
tctctcaggctcttcaggatccaagtccgtaggccctttaaggggtctagttgccgtttgcgaggccctgggactttggtcccagacagcggggatccggatggcttccgtgcggatccg

SEQ ID NO: 368152 - DNA, 120 bp, Artificial Sequence
  ENSG00000141504_2 (sequence is synthesized)
agaggccaaggagggagactgtggagatatcctgaggctgattcgggagctagccgaattcgaaaaactctcggatcaggtgaagatcagtgaagaagccctgagagcagatggctttgg

SEQ ID NO: 368153 - DNA, 120 bp, Artificial Sequence
  ENSG00000141504_3 (sequence is synthesized)
acatggaagggacgcaccatttatctggaggatatctatgtgatgccggaatatcggggtcaagggattggttccaaaataatcaaaaaggtggctgaggtggccttggataagggctgc

SEQ ID NO: 368154 - DNA, 120 bp, Artificial Sequence
  ENSG00000141504_4 (sequence is synthesized)
tcccaattccgcctggccgtcctggactggaaccagagggccatggacttgtacaaggccctaggagcccaagatctgacggaagctgagggctggcacttcttctgctttcaaggagag

SEQ ID NO: 368155 - DNA, 120 bp, Artificial Sequence
  ENSG00000141504_5 (sequence is synthesized)
gcaacgagaaagttggcaggaaagtgacgccatccctaggaggatctctgtcttgagtttctccttccccatcagctgaagcactcttcagagactacgtccacagacactgatgctgag

SEQ ID NO: 368156 - DNA, 120 bp, Artificial Sequence
  ENSG00000141504_6 (sequence is synthesized)
gcctccctggaggaaggagggttaggggtgcctatcctcaagtattggaagagcagaattgagggagagacctttcttccttgttgagggtgaaaaataaataagaattacatgtcctga

SEQ ID NO: 368157 - DNA, 120 bp, Artificial Sequence
  ENSG00000141504_7 (sequence is synthesized)
gccggtaacccgggggtcagagtggcgcggccagagcggggtcgtaggaggcgggggcagggggaggggctcgccttgggaacctgctcggggagcagcggggcccttctgctctaatct

SEQ ID NO: 368158 - DNA, 120 bp, Artificial Sequence
  ENSG00000141504_8 (sequence is synthesized)
agcttccgtacccacgccttaggagctagccgaattcgaaaaactctcggatcaggtgaagatcagtgaagaaggtgggggctcagcgcccaggttctggcggaggctggggaggaaatg

SEQ ID NO: 368159 - DNA, 120 bp, Artificial Sequence
  ENSG00000141504_9 (sequence is synthesized)
agggatgggttccccaggcgacagctccaggctgggcatacacccacgtcctctttctctatctctttgtcacaactccaatctcggcagccctgagagcagatggctttggagacaatc

SEQ ID NO: 368160 - DNA, 120 bp, Artificial Sequence
  ENSG00000141504_10 (sequence is synthesized)
ctttctatcactgtttggtagcagagattcttccagcgcccgggaagctactgggtaagagcacctggcccttagaagtccacctctccagccggcctcagaggtctccccacaggcttc

SEQ ID NO: 368161 - DNA, 120 bp, Artificial Sequence
  ENSG00000141504_11 (sequence is synthesized)
aagccttactccccttttctctctctcagggccctgcgtggtgggctatgggatatactatttcatctacagtacatggaagggacgcaccatttatctggaggatatctatgtgatgcc

SEQ ID NO: 368162 - DNA, 120 bp, Artificial Sequence
  ENSG00000141504_12 (sequence is synthesized)
ggaatatcggggtactgggcagaagctgaggctggggtgggagcaaagcaccccacagaccccactgttatcccctgtccccagagcccagccggtgtcattttctgatccccttcagct

SEQ ID NO: 368163 - DNA, 120 bp, Artificial Sequence
  ENSG00000141504_13 (sequence is synthesized)
caaacaatagctattttttgcctctttctctccacaacaggtcaagggattggttccaaaataatcaaaaaggtggctgaggtgaggagatgggtggggcgacaagtgaggacctgaaga

SEQ ID NO: 368164 - DNA, 120 bp, Artificial Sequence
  ENSG00000141504_14 (sequence is synthesized)
agcaagggtatatggaggggggacccgggttgaaagagggagtgagaaaacctttttcttttttgaccccagaaaagttagtgttgtcttctcccacaggtggccttggataagggctgc

SEQ ID NO: 368165 - DNA, 120 bp, Artificial Sequence
  ENSG00000141504_15 (sequence is synthesized)
gggaacctgctcggggagcagcggggcccttctgctctaatctagcttccgtacccacgccttaggagctagccgaattcgaaaaactctcggatcaggtgaagatcagtgaagaaggtc

SEQ ID NO: 368166 - DNA, 120 bp, Artificial Sequence
  ENSG00000141504_16 (sequence is synthesized)
gacaatcctttctatcactgtttggtagcagagattcttccagcgcccgggaagctactgggtcaagggattggttccaaaataatcaaaaaggtggctgaggtgaggagatgggtgggg

SEQ ID NO: 368167 - DNA, 120 bp, Artificial Sequence
  ENSG00000141505_0 (sequence is synthesized)
acacagacacgcagacacagagacaccggggcccagggccctcctatggaccctgcccgctcccctcccattgtccacggctgtccgcccacccccattctccaagcttcagccccctcc

SEQ ID NO: 368168 - DNA, 120 bp, Artificial Sequence
  ENSG00000141505_1 (sequence is synthesized)
ttagttcggcatctgcacagcactgaagaacctgggaatcagaccctgagaccctgagcaatcccaggtccagcgccagccctatcatgaccaaggagtatcaagaccttcagcatctgg

SEQ ID NO: 368169 - DNA, 120 bp, Artificial Sequence
  ENSG00000141505_2 (sequence is synthesized)
acaatgaggagagtgaccaccatcagctcagaaaagggccacctcctccccagcccctcctgcagcgtctctgctccggacctcgcctcctcctgctctccctgggcctcagcctcctgc

SEQ ID NO: 368170 - DNA, 120 bp, Artificial Sequence
  ENSG00000141505_3 (sequence is synthesized)
tgcttgtggttgtctgtgtgatcggatcccaaaactcccagctgcaggaggagctgcggggcctgagagagacgttcagcaacttcacagcgagcacggaggcccaggtcaagggcttga

SEQ ID NO: 368171 - DNA, 120 bp, Artificial Sequence
  ENSG00000141505_4 (sequence is synthesized)
gcacccagggaggcaatgtgggaagaaagatgaagtcgctagagtcccagctggagaaacagcagaaggacctgagtgaagatcactccagcctgctgctccacgtgaagcagttcgtgt

SEQ ID NO: 368172 - DNA, 120 bp, Artificial Sequence
  ENSG00000141505_5 (sequence is synthesized)
tctcgctccgggaaggcctgggctgacgccgacaactactgccggctggaggacgcgcacctggtggtggtcacgtcctgggaggagcagaaatttgtccagcaccacataggccctgtg

SEQ ID NO: 368173 - DNA, 120 bp, Artificial Sequence
  ENSG00000141505_6 (sequence is synthesized)
aacacctggatgggcctccacgaccaaaacgggccctggaagtgggtggacgggacggactacgagacgggcttcaagaactggaggccggagcagccggacgactggtacggccacggg

SEQ ID NO: 368174 - DNA, 120 bp, Artificial Sequence
  ENSG00000141505_7 (sequence is synthesized)
ctcggaggaggcgaggactgtgcccacttcaccgacgacggccgctggaacgacgacgtctgccagaggccctaccgctgggtctgcgagacagagctggacaaggccagccaggagcca

SEQ ID NO: 368175 - DNA, 120 bp, Artificial Sequence
  ENSG00000141505_8 (sequence is synthesized)
cctctcctttaatttatttcttcaatgcctcgacctgccgcaggggtccgggattgggaatccgcccatctgggggcctcttctgctttctcgggaattttcatctaggattttaaggga

SEQ ID NO: 368176 - DNA, 120 bp, Artificial Sequence
  ENSG00000141505_9 (sequence is synthesized)
aggggaaggatagggtgatgttccgaaggtgaggagcttgaaacccgtggcgctttctgcagtttgcaggttatcattgtgaactttttttttttaagagtaaaaagaaatatacctaaa

SEQ ID NO: 368177 - DNA, 120 bp, Artificial Sequence
  ENSG00000141505_10 (sequence is synthesized)
cccaaacggtgcacggaagagtgaggtgactggcatgtgtgggggcaacacgattctcctccctggggagcagagcagaggcaacccatcccccactcccacccccacactcccctaagt

SEQ ID NO: 368178 - DNA, 120 bp, Artificial Sequence
  ENSG00000141505_11 (sequence is synthesized)
gccctggggccctgggctgaggagtctggagcgacccgcctgcggatccgacctcctggggcccacagctggctctgtccccaggaactggaggccggagcagccggacgactggtacgg

SEQ ID NO: 368179 - DNA, 120 bp, Artificial Sequence
  ENSG00000141505_12 (sequence is synthesized)
cccgtgagcctggctctctctctgggtctgtctccctcccccaacactgggaaaggtgtcggaactgcctctctcaggagaggggcggagtgtggggttggagtccctttattggtgaca

SEQ ID NO: 368180 - DNA, 120 bp, Artificial Sequence
  ENSG00000141505_13 (sequence is synthesized)
ggtgcccaaagctttcctgtgcctcctggccctcggaggtggacccgggggtgtgggaacagctggaagctggagagatgaggtcactgtcggcttcctatgacgaagtcacgccccctc

SEQ ID NO: 368181 - DNA, 120 bp, Artificial Sequence
  ENSG00000141505_14 (sequence is synthesized)
ttcctttccccttccaacaccacccagggaccccggtcgtgcgagcgtgtgcgtgtgtgtgtcagtgatcagtttggtgaagggggaaaaggtttctgtgaagggtctgaggattctgtg

SEQ ID NO: 368182 - DNA, 120 bp, Artificial Sequence
  ENSG00000141505_15 (sequence is synthesized)
aggggggcgatgaggggtctctgacctgagggagaacgagactcttttgcttcaaaaacaaattccccttgacccatttctttgtcctccgagcagggaattgtttaggctgagcaagga

SEQ ID NO: 368183 - DNA, 120 bp, Artificial Sequence
  ENSG00000141505_16 (sequence is synthesized)
tgaagttcgtgggggatggggtgcagcgcgctttgacggaaggagggtccgcagcggaggagacccggcagggaggcccccccaaccctccagctctcagggcacagggctaacgtgtct

SEQ ID NO: 368184 - DNA, 120 bp, Artificial Sequence
  ENSG00000141505_17 (sequence is synthesized)
tattgcaccttctctccctgcacgcagccaaagacaagtggaattcatggacagagaaagaaaccttccttctttccccactttcaggggaagcagcgactccgaggcgcgggccactca

SEQ ID NO: 368185 - DNA, 120 bp, Artificial Sequence
  ENSG00000141505_18 (sequence is synthesized)
attgcgtttcaaggcgcgggaggagggggtggactgaggttcctggattggctgcagtgacgcagtcatgccattaggtgtcagcaaaagctcagggcctcggtgggatggggcggctca

SEQ ID NO: 368186 - DNA, 120 bp, Artificial Sequence
  ENSG00000141505_19 (sequence is synthesized)
gcgcttagcccccttccccagccctcttttctccccgatttccagttgcctctggccctgcagggtcgcccaccgcccgcatttcttcatgtacatggttcctcctagactactagggcc

SEQ ID NO: 368187 - DNA, 120 bp, Artificial Sequence
  ENSG00000141505_20 (sequence is synthesized)
gggtgttgacgggggaccgtggcaagggagtggtgggtgcagtggtggcggacacagcgatcccgttttcttctctctgcacgctgtcctggccagactcccagctgcaggaggagctgc

SEQ ID NO: 368188 - DNA, 120 bp, Artificial Sequence
  ENSG00000141505_21 (sequence is synthesized)
gtgtgtgtgtgtgtgtgtgtgaaagagagtgagaatgtgtggatgtgtgtgagaaagtgtgagtgtgtgtggatgtgtgtgagaatgagagggagtgtgtgtgtgtgtgagtctgtgtgt

SEQ ID NO: 368189 - DNA, 120 bp, Artificial Sequence
  ENSG00000141505_22 (sequence is synthesized)
gagaatgagagggagtgtgtgtgtgtgtgagtctgtgtgtgagaatgagggggagtgtgttttgggtgtgtgtatgagagccttgtgtggatgtgagaatgagagggagtgtgtatgtct

SEQ ID NO: 368190 - DNA, 120 bp, Artificial Sequence
  ENSG00000141505_23 (sequence is synthesized)
cctccttagttcggcatctgcacagcactgaagaacctgggaatcagaccctgagaccctgagcaaccaggcgtggtggcgtgcacctgttgtcccagctactccagaggctgaggcagg

SEQ ID NO: 368191 - DNA, 120 bp, Artificial Sequence
  ENSG00000141505_24 (sequence is synthesized)
tgatggagccgtcaatcagatgggagtaaagagatgggcccctcattcccactctagtcctggtgagcccccacctcagccccagcctcagtcttgactcagtcccaggtccagcgccag

SEQ ID NO: 368192 - DNA, 120 bp, Artificial Sequence
  ENSG00000141505_25 (sequence is synthesized)
gcacagcactgaagaacctgggaatcagaccctgagaccctgagcaagtaaaatgggaagagaggtggcgggaggctggctgggggtgcaggggtgcggagggaacccagggtgtgttgg

SEQ ID NO: 368193 - DNA, 120 bp, Artificial Sequence
  ENSG00000141505_26 (sequence is synthesized)
ggggtgctgggtgggaaacatcagaggatggattctggatgtcaggcctgggaggggatggaggaaagaagaaagctcccggtggggcgcggtggtccacgcctgtaatcccagcacgtt

SEQ ID NO: 368194 - DNA, 120 bp, Artificial Sequence
  ENSG00000141506_0 (sequence is synthesized)
tgggcagatgctgcggctcgccgcgcggctccagctggggcgcggtggtcccgacggtcacccgaatcgcagggagtcgccgctggagaggggctcggcgcccggcggggactgcaggcg

SEQ ID NO: 368195 - DNA, 120 bp, Artificial Sequence
  ENSG00000141506_1 (sequence is synthesized)
atgacccaggatgcagccaggggccacgacatgcacggaggaccgcatccagcatgccctggaacgctgcctgcatggactcagcctcagccgccgctccacctcctggtcagctgggct

SEQ ID NO: 368196 - DNA, 120 bp, Artificial Sequence
  ENSG00000141506_2 (sequence is synthesized)
gtgtctgaactgctggagcctgcaggagctggtcagcagggacccgggccacttccttatcctccttgagcagatcctgcagaagacccgagaggtccaggagaagggcacctacgacct

SEQ ID NO: 368197 - DNA, 120 bp, Artificial Sequence
  ENSG00000141506_3 (sequence is synthesized)
gctcaccccgctggccctgctcttctattccactgttctttgtacaccacacttcccaccagactcggatctccttctgaaggcagccagcacctaccaccggttcctgacctggcctgt

SEQ ID NO: 368198 - DNA, 120 bp, Artificial Sequence
  ENSG00000141506_4 (sequence is synthesized)
tccttactgcagcatctgccaggagctgctcaccttcattgatgctgaactcaaggccccagggatctcctaccagagactggtgagggctgagcagggcctgcccatcaggagtcaccg

SEQ ID NO: 368199 - DNA, 120 bp, Artificial Sequence
  ENSG00000141506_5 (sequence is synthesized)
cagctccaccgtcaccgtgctgctgctgaacccagtggaagtgcaggccgagttccttgctgtagccaataagctgagtacgcccggacactcgcctcacagtgcctacaccaccctgct

SEQ ID NO: 368200 - DNA, 120 bp, Artificial Sequence
  ENSG00000141506_6 (sequence is synthesized)
cctgcacgccttccaggccacctttggggcccactgtgacgtcccgggcctgcactgcaggctacaggccaagaccctggcagagcttgaggacatcttcacggagaccgcagaggcaca

SEQ ID NO: 368201 - DNA, 120 bp, Artificial Sequence
  ENSG00000141506_7 (sequence is synthesized)
ggagctggcatctggcatcggggatgctgcagaggcccggcggtggctcaggaccaagctgcaggcggtgggagaaaaagctggcttccctggggtgttagacactgcaaaaccagggaa

SEQ ID NO: 368202 - DNA, 120 bp, Artificial Sequence
  ENSG00000141506_8 (sequence is synthesized)
gctccacaccatccccatccctgtcgccaggtgctacacctacagctggagccaggacagctttgacatcctgcaggaaatcctgctcaaggaacaggagctactccagccagggatcct

SEQ ID NO: 368203 - DNA, 120 bp, Artificial Sequence
  ENSG00000141506_9 (sequence is synthesized)
gggagatgatgaagaggaggaagaggaggaggaggaggtggaggaggacttggaaactgacgggcactgtgccgagagagattccctgctctccaccagctctttggcgtcccatgactc

SEQ ID NO: 368204 - DNA, 120 bp, Artificial Sequence
  ENSG00000141506_10 (sequence is synthesized)
caccttgtcccttgcatcctcccaggcctcggggccggccctctcgcgccatctgctgacttcctttgtctcaggcctctctgatggcatggacagcggctacgtggaggacagcgagga

SEQ ID NO: 368205 - DNA, 120 bp, Artificial Sequence
  ENSG00000141506_11 (sequence is synthesized)
gagctcctccgagtggccttggaggcgtggcagccaggaacgccgaggccaccgcaggcctgggcagaagttcatcaggatctataaactcttcaagagcaccagccagctggtactgcg

SEQ ID NO: 368206 - DNA, 120 bp, Artificial Sequence
  ENSG00000141506_12 (sequence is synthesized)
gagggactctcggagcctggagggcagctcggacacggccctgcccctgaggcgggcagggagcctctgcagccccctggacgaaccagtatcacccccttcccgggcccagcgctcccg

SEQ ID NO: 368207 - DNA, 120 bp, Artificial Sequence
  ENSG00000141506_13 (sequence is synthesized)
ctccctgccccagcccaaactcggtacccagctgcccagctggcttctggcccctgcttcacgcccccagcgccgccgccccttcctgagtggagatgaggatcccaaggcttccacgct

SEQ ID NO: 368208 - DNA, 120 bp, Artificial Sequence
  ENSG00000141506_14 (sequence is synthesized)
acgtgttgtggtctttggctccgatcggatttcagggaaggtggctcgggcgtacagcaaccttcggcggctggagaacaatcgcccactcctcacacggttcttcaaacttcagttctt

SEQ ID NO: 368209 - DNA, 120 bp, Artificial Sequence
  ENSG00000141506_15 (sequence is synthesized)
ctacgtgcctgtgaagcgaagtcatgggaccagccctggtgcctgtccaccccctcggagccagacgccctcacccccgacagactcccctaggcacgccagccctggagagctgggcac

SEQ ID NO: 368210 - DNA, 120 bp, Artificial Sequence
  ENSG00000141506_16 (sequence is synthesized)
caccccatgggaggagagcaccaatgacatctcccactacctcggcatgctggacccctggtatgagcgcaatgtactgggcctcatgcacctgccccctgaagtcctgtgccagcagtc

SEQ ID NO: 368211 - DNA, 120 bp, Artificial Sequence
  ENSG00000141506_17 (sequence is synthesized)
cctgaaggctgaagcccaggccctggagggctccccaacccagctgcccatcctggctgacatgctactctactactgccgctttgccgccagaccggtgctgctgcaagtctatcagac

SEQ ID NO: 368212 - DNA, 120 bp, Artificial Sequence
  ENSG00000141506_18 (sequence is synthesized)
gagctgggtcactccgctgccacacgtgccatcaaggcgtcaggtcctggcagcaagcggctgggcatcgatggcgaccgggaggctgttcctctaacactacagattatttacagcaag

SEQ ID NO: 368213 - DNA, 120 bp, Artificial Sequence
  ENSG00000141506_19 (sequence is synthesized)
ggggccatcagtggacgaagtcgctggagcaacctggagaaggtctgtacctccgtgaacctcaacaaggcctgccggaagcaggaggagctggattccagcatggaggccctgacgcta

SEQ ID NO: 368214 - DNA, 120 bp, Artificial Sequence
  ENSG00000141506_20 (sequence is synthesized)
aacctgacagaagtggtgaaaaggcagaactccaaatccaagaagggctttaaccagattagcacatcgcagatcaaagtggacaaggtgcagatcatcggctccaacagctgccccttt

SEQ ID NO: 368215 - DNA, 120 bp, Artificial Sequence
  ENSG00000141506_21 (sequence is synthesized)
gctgtgtgcctggaccaggatgagagaaagatcctgcagagtgtagtcagatgtgaggtctcaccgtgctacaagccagagaagagcgacctctcctcaccaccccagacgcctcctgac

SEQ ID NO: 368216 - DNA, 120 bp, Artificial Sequence
  ENSG00000141506_22 (sequence is synthesized)
ctgccggcccaggccgcacctgatctctgctcccttctctgcctgcccatcatgactttcagtggagctctgccctagtgtgggcccagcgccagactggacagaagccctggggcaacc

SEQ ID NO: 368217 - DNA, 120 bp, Artificial Sequence
  ENSG00000141506_23 (sequence is synthesized)
tcctcggccacccctccaggacagtccctctctgtggagaactgaatggccctgtgcagagccatagtcccactgtgggtcctgcaatgagcaggggctgggagtagagggtttctgggg

SEQ ID NO: 368218 - DNA, 120 bp, Artificial Sequence
  ENSG00000141506_24 (sequence is synthesized)
cctcagggttctgggaaagcaacagctatcagagagagaagggccagaccccatagcctcttagattcctggcagtagaaggagaaggatgggtaaattgacctctgaagtccctgacca

SEQ ID NO: 368219 - DNA, 120 bp, Artificial Sequence
  ENSG00000141506_25 (sequence is synthesized)
ttagcatggtctaggatcctttctagaaggaagatctgaggctctggtgctcagggggatggcttgggccttttctctcaaccttggctgagcctaccccttactttgccaaagacttga

SEQ ID NO: 368220 - DNA, 120 bp, Artificial Sequence
  ENSG00000141506_26 (sequence is synthesized)
ggaccctgtatgtctggagttcagtcccctcctctgtggggctcaggtgattgaaatgtggatgaaacatttctctacttcaagaccacctctccctgcaaacaccacacacacatggca

SEQ ID NO: 368221 - DNA, 120 bp, Artificial Sequence
  ENSG00000141506_27 (sequence is synthesized)
tgcatgtacgcacatgcgcacacacacacgcacacacctcaataatttctctcaagtttcctgagtctccagaaaaacagcactaacgctggacctgtctactctcagaacccggcacag

SEQ ID NO: 368222 - DNA, 120 bp, Artificial Sequence
  ENSG00000141506_28 (sequence is synthesized)
attctctcttgatctccttttggaatctgagattcttagaagacaggatagggttaaatttagtagcagctcagttctagctaaatcactagaggaagttaattaactttaagccttcat

SEQ ID NO: 368223 - DNA, 120 bp, Artificial Sequence
  ENSG00000141506_29 (sequence is synthesized)
ttctccagcactaaaatggagtggagagttggggtggaaataagacatccttaaaaggttaaattgtctgcaaagcacctagcccagtgccgagctcccagtaggtgttcagtaaagctt

SEQ ID NO: 368224 - DNA, 120 bp, Artificial Sequence
  ENSG00000141506_30 (sequence is synthesized)
agtgcctgactttctgaacactgattcctcctgtttggagtcactgggatactctcattgccgttgggatgttcctcactccttcccagttcgtggctgaggcagaacccagactgaaga

SEQ ID NO: 368225 - DNA, 120 bp, Artificial Sequence
  ENSG00000141506_31 (sequence is synthesized)
gggaagagacattccagaggaggattgccttcgtcagggtaaggggtgggctgctcaggggccctacccttcacccccttctgtatcagattggccctcccactcccatctcactctgcg

SEQ ID NO: 368226 - DNA, 120 bp, Artificial Sequence
  ENSG00000141506_32 (sequence is synthesized)
tgtacaatcttccatatccgcaagttcactggcactcttctggcacctgggcaagatcccagaacagaggatggagtgactggcctcacagagcttagtgcccgactcaggggaaatggg

SEQ ID NO: 368227 - DNA, 120 bp, Artificial Sequence
  ENSG00000141506_33 (sequence is synthesized)
actggtgcatgggaaatggtcagcctaggataggacacgagagtctgaaattcaaagcaaccagcttgaagtggtttgagaagctggaagcaaacatgggctagagagatagggcagaag

SEQ ID NO: 368228 - DNA, 120 bp, Artificial Sequence
  ENSG00000141506_34 (sequence is synthesized)
tcaagacgaggatctggactgatgtggagaaagtagccacggaagcatgaactgtatcctgcacaaagtccctcttccccgcctcctaattcattatgcccaaaaggccttacgtgaaat

SEQ ID NO: 368229 - DNA, 120 bp, Artificial Sequence
  ENSG00000141506_35 (sequence is synthesized)
tccagcccagagtactcatgacttgagagacgtggacagagccagcttctaccttgcctggccgtctctcccctgtcttaatgtctgctcttgctctaagctccagaagagtggcgggcc

SEQ ID NO: 368230 - DNA, 120 bp, Artificial Sequence
  ENSG00000141506_36 (sequence is synthesized)
atgtatcttcaatatgtttttgctgtatgggcaggttgtcttattatgtgatcaacagatgtccaggaactaatgagtggaatttaatattattgtcaaataaaacttgatttgtcctat

SEQ ID NO: 368231 - DNA, 120 bp, Artificial Sequence
  ENSG00000141506_37 (sequence is synthesized)
tgggcagatgctgcggctcgccgcgcggctccagctggggcgcggtggtcccgacggtcacccgaatcgcagggagtcgccgctggagaggggctcggcgcccggcggggactgcagctg

SEQ ID NO: 368232 - DNA, 120 bp, Artificial Sequence
  ENSG00000141506_38 (sequence is synthesized)
cctacagctggagccaggacagctttgggaatatagaaggggatccggggcccagacgcccagacagtgctggccttgcttccctgcagacatcctgcaggaaatcctgctcaaggaaca

SEQ ID NO: 368233 - DNA, 120 bp, Artificial Sequence
  ENSG00000141506_39 (sequence is synthesized)
aagcatattgagggagttgctgtggccttgtcatcaggaacacgctctctgccccatccctggaggtttggaaaacacagcctggaaattcagaaaaagtcctccgagtgattctgattt

SEQ ID NO: 368234 - DNA, 120 bp, Artificial Sequence
  ENSG00000141506_40 (sequence is synthesized)
tcccctcaggatcttcctgcccagcccactggggtctgaccactccctgggtacttggcgacacttcccactgcccagtgccctttccacctctctgctcccattcctgaccccttactt

SEQ ID NO: 368235 - DNA, 120 bp, Artificial Sequence
  ENSG00000141506_41 (sequence is synthesized)
gggtgctctgtcctgccactcagatgtggccctccagatgccattcctaccctggaggcagctgtaaggcccctggtcctgtttccacagcacctgagctatagctgggctgggctgatc

SEQ ID NO: 368236 - DNA, 120 bp, Artificial Sequence
  ENSG00000141506_42 (sequence is synthesized)
gacagcgaggcccaggaccgagttttggtgttggaggtggaggtggggatatgactcgtgaggtgtaaaaggacgcatagaagcaaactgctaggcaccctggagggtccacagaacagc

SEQ ID NO: 368237 - DNA, 120 bp, Artificial Sequence
  ENSG00000141506_43 (sequence is synthesized)
agatgctgcggctcgccgcgcggctccagctggggcgcggtggtcccgacggtcacccgaatcgcagggagtcgccgctggagaggggctcggcgcccggcggggactgcagaaaccccc

SEQ ID NO: 368238 - DNA, 120 bp, Artificial Sequence
  ENSG00000141506_44 (sequence is synthesized)
aagaggctctcctccctgccccatcgtgggctgccttgggaagctggacccaggcagaccctacacctcctctgaccagccctgcaccagagggaagatgagccctccacatcatggcat

SEQ ID NO: 368239 - DNA, 120 bp, Artificial Sequence
  ENSG00000141506_45 (sequence is synthesized)
cctgtcaacatgggaagaaaaagtggaagcaggactggctctctctgtgccctctggggtcccaccaacccaccccgactccaggcctttctgccccatgcagggtccccagcaaggact

SEQ ID NO: 368240 - DNA, 120 bp, Artificial Sequence
  ENSG00000141506_46 (sequence is synthesized)
atgagtcctctttgctggctcagaagaggaacttggagatgggggaaggccctgttgttggatatttcaacaccacctcaccactggcaggggaattggtggcgggggcgggggggcggg

SEQ ID NO: 368241 - DNA, 120 bp, Artificial Sequence
  ENSG00000141506_47 (sequence is synthesized)
gggcggcattcccggcagcagctggaattttacaatgggagctcctctcaacaagatagggagggggcttgggagggtgatgccagggaagccaggccctgcttgcccagcttttgaaaa

SEQ ID NO: 368242 - DNA, 120 bp, Artificial Sequence
  ENSG00000141506_48 (sequence is synthesized)
cgtgaggttctgctgacaagtcataagaaacagctgatgactgactcagacggaaatgagcgtgtcaaaggggtgggtggtgagcccggtgtgctgggttaacccccagggcagctcagc

SEQ ID NO: 368243 - DNA, 120 bp, Artificial Sequence
  ENSG00000141506_49 (sequence is synthesized)
tgagggtcccctggctgggttccctctccccatctctcaggctcccaggggctagtggctcaggcaagtcctgcctctgagaagaacttggggcgagctcgagaaagccttggaatgccg

SEQ ID NO: 368244 - DNA, 120 bp, Artificial Sequence
  ENSG00000141506_50 (sequence is synthesized)
gggaggctggcacaccagaattccaccagtgcctgaggatatcctgcccttccgtggagaaggctttgatgtgtcccttgagcagggtggggttggggggaaggggcacaccgaggccag

SEQ ID NO: 368245 - DNA, 120 bp, Artificial Sequence
  ENSG00000141506_51 (sequence is synthesized)
gagatgggaaagtcacaggcggccccagaatgagaaagagaagccatgggcagtcaggcattgggtgcggtgtgctagcagcagtcctatggcactgtgttctgcccccttaaggacagg

SEQ ID NO: 368246 - DNA, 120 bp, Artificial Sequence
  ENSG00000141506_52 (sequence is synthesized)
agtgtgcagaagtggtgttggctgagaacattcatttgcatcttgtgtttgcatccattacagtgtgggacacgtaatgagtgagcaggatgactcactcctgcttcatggcataaccag

SEQ ID NO: 368247 - DNA, 120 bp, Artificial Sequence
  ENSG00000141506_53 (sequence is synthesized)
tggagaggcaggaccctgggaaggtgtgatcacagcggagatggggccctggagaggcaggaccctgggaatgtgtgatcacagcggagatgggccctggagtgatggggtcactgagga

SEQ ID NO: 368248 - DNA, 120 bp, Artificial Sequence
  ENSG00000141506_54 (sequence is synthesized)
cagggaatacaaagagcagaggaccaaggggagaaccttgagcccttcatgatgtaatggcgggcagagggcagcgatccagcaaagcagagaggcaccagccagagaggcgctagaaaa

SEQ ID NO: 368249 - DNA, 120 bp, Artificial Sequence
  ENSG00000141506_55 (sequence is synthesized)
accaggaaggtgccatcacgaaagcccaggagaggttttcaaggaggggagagcagtgaactgtaaggtcaagtaagctgaggaccaagaagtgttcttcggtttaacaacatggaggtc

SEQ ID NO: 368250 - DNA, 120 bp, Artificial Sequence
  ENSG00000141506_56 (sequence is synthesized)
cctgatgacagagacattcacacaaagacttgaagagggggttcaggtctggctctgccagaaacagcatgtctgtgggcccaacccttcttcactctgggcccggcaggagagcttcag

SEQ ID NO: 368251 - DNA, 120 bp, Artificial Sequence
  ENSG00000141506_57 (sequence is synthesized)
gaccacccctgcaggtgctctcagctcttgtacctttcaacctggtcacagaggctgctgacccctagaccaagccagtgacgtgagctcttccctggagtcatccaggtctatccaggg

SEQ ID NO: 368252 - DNA, 120 bp, Artificial Sequence
  ENSG00000141510_0 (sequence is synthesized)
gttttcccctcccatgtgctcaagactggcgctaaaagttttgagcttctcaaaagtctagagccaccgtccagggagcaggtagctgctgggctccggggacactttgcgttcgggctg

SEQ ID NO: 368253 - DNA, 120 bp, Artificial Sequence
  ENSG00000141510_1 (sequence is synthesized)
ggagcgtgctttccacgacggtgacacgcttccctggattggcagccagactgccttccgggtcactgccatggaggagccgcagtcagatcctagcgtcgagccccctctgagtcagga

SEQ ID NO: 368254 - DNA, 120 bp, Artificial Sequence
  ENSG00000141510_2 (sequence is synthesized)
aacattttcagacctatggaaactacttcctgaaaacaacgttctgtcccccttgccgtcccaagcaatggatgatttgatgctgtccccggacgatattgaacaatggttcactgaaga

SEQ ID NO: 368255 - DNA, 120 bp, Artificial Sequence
  ENSG00000141510_3 (sequence is synthesized)
cccaggtccagatgaagctcccagaatgccagaggctgctccccccgtggcccctgcaccagcagctcctacaccggcggcccctgcaccagccccctcctggcccctgtcatcttctgt

SEQ ID NO: 368256 - DNA, 120 bp, Artificial Sequence
  ENSG00000141510_4 (sequence is synthesized)
cccttcccagaaaacctaccagggcagctacggtttccgtctgggcttcttgcattctgggacagccaagtctgtgacttgcacgtactcccctgccctcaacaagatgttttgccaact

SEQ ID NO: 368257 - DNA, 120 bp, Artificial Sequence
  ENSG00000141510_5 (sequence is synthesized)
ggccaagacctgccctgtgcagctgtgggttgattccacacccccgcccggcacccgcgtccgcgccatggccatctacaagcagtcacagcacatgacggaggttgtgaggcgctgccc

SEQ ID NO: 368258 - DNA, 120 bp, Artificial Sequence
  ENSG00000141510_6 (sequence is synthesized)
ccaccatgagcgctgctcagatagcgatggtctggcccctcctcagcatcttatccgagtggaaggaaatttgcgtgtggagtatttggatgacagaaacacttttcgacatagtgtggt

SEQ ID NO: 368259 - DNA, 120 bp, Artificial Sequence
  ENSG00000141510_7 (sequence is synthesized)
ggtgccctatgagccgcctgaggttggctctgactgtaccaccatccactacaactacatgtgtaacagttcctgcatgggcggcatgaaccggaggcccatcctcaccatcatcacact

SEQ ID NO: 368260 - DNA, 120 bp, Artificial Sequence
  ENSG00000141510_8 (sequence is synthesized)
ggaagactccagtggtaatctactgggacggaacagctttgaggtgcgtgtttgtgcctgtcctgggagagaccggcgcacagaggaagagaatctccgcaagaaaggggagcctcacca

SEQ ID NO: 368261 - DNA, 120 bp, Artificial Sequence
  ENSG00000141510_9 (sequence is synthesized)
cgagctgcccccagggagcactaagcgagcactgcccaacaacaccagctcctctccccagccaaagaagaaaccactggatggagaatatttcacccttcagatccgtgggcgtgagcg

SEQ ID NO: 368262 - DNA, 120 bp, Artificial Sequence
  ENSG00000141510_10 (sequence is synthesized)
aggagccaggggggagcagggctcactccagccacctgaagtccaaaaagggtcagtctacctcccgccataaaaaactcatgttcaagacagaagggcctgactcagactgacattctc

SEQ ID NO: 368263 - DNA, 120 bp, Artificial Sequence
  ENSG00000141510_11 (sequence is synthesized)
cacttcttgttccccactgacagcctcccacccccatctctccctcccctgccattttgggttttgggtctttgaacccttgcttgcaataggtgtgcgtcagaagcacccaggacttcc

SEQ ID NO: 368264 - DNA, 120 bp, Artificial Sequence
  ENSG00000141510_12 (sequence is synthesized)
atttgctttgtcccggggctccactgaacaagttggcctgcactggtgttttgttgtggggaggaggatggggagtaggacataccagcttagattttaaggtttttactgtgagggatg

SEQ ID NO: 368265 - DNA, 120 bp, Artificial Sequence
  ENSG00000141510_13 (sequence is synthesized)
tttgggagatgtaagaaatgttcttgcagttaagggttagtttacaatcagccacattctaggtaggggcccacttcaccgtactaaccagggaagctgtccctcactgttgaattttct

SEQ ID NO: 368266 - DNA, 120 bp, Artificial Sequence
  ENSG00000141510_14 (sequence is synthesized)
ctaacttcaaggcccatatctgtgaaatgctggcatttgcacctacctcacagagtgcattgtgagggttaatgaaataatgtacatctggccttgaaaccaccttttattacatggggt

SEQ ID NO: 368267 - DNA, 120 bp, Artificial Sequence
  ENSG00000141510_15 (sequence is synthesized)
ctagaacttgacccccttgagggtgcttgttccctctccctgttggtcggtgggttggtagtttctacagttgggcagctggttaggtagagggagttgtcaagtctctgctggcccagc

SEQ ID NO: 368268 - DNA, 120 bp, Artificial Sequence
  ENSG00000141510_16 (sequence is synthesized)
caaaccctgtctgacaacctcttggtgaaccttagtacctaaaaggaaatctcaccccatcccacaccctggaggatttcatctcttgtatatgatgatctggatccaccaagacttgtt

SEQ ID NO: 368269 - DNA, 90 bp, Artificial Sequence
  ENSG00000141510_17 (sequence is synthesized)
tttttctttttctttgagactgagtggcgtgatcttggcttactgcagcctttgcctccccggctcgagcagtcctgcctcagcctccgg

SEQ ID NO: 368270 - DNA, 84 bp, Artificial Sequence
  ENSG00000141510_18 (sequence is synthesized)
agttcatgccaccatggccagccaacttttgcatgttttgtagagatggggtctcacagtgttgcccaggctggtctcaaactc

SEQ ID NO: 368271 - DNA, 120 bp, Artificial Sequence
  ENSG00000141510_19 (sequence is synthesized)
ggtctcaaactcctgggctcaggcgatccacctgtctcagcctcccagagtgctgggattacaattgtgagccaccacgtccagctggaagggtcaacatcttttacattctgcaagcac

SEQ ID NO: 368272 - DNA, 120 bp, Artificial Sequence
  ENSG00000141510_20 (sequence is synthesized)
gcaagcacatctgcattttcaccccacccttcccctccttctccctttttatatcccatttttatatcgatctcttattttacaataaaactttgctgccacctgtgtgtctgaggggtg

SEQ ID NO: 368273 - DNA, 120 bp, Artificial Sequence
  ENSG00000141510_21 (sequence is synthesized)
aaaagtctagagccaccgtccagggagcaggtagctgctgggctccggggacactttgcgttcgggctgggagcgtgctttccacgacggtgacacgcttccctggattggccagactgc

SEQ ID NO: 368274 - DNA, 120 bp, Artificial Sequence
  ENSG00000141510_22 (sequence is synthesized)
tgctacttgacttacgatggtgttacttcctgataaactcgtcgtaagttgaaaatattatccgtgggcgtgagcgcttcgagatgttccgagagctgaatgaggccttggaactcaagg

SEQ ID NO: 368275 - DNA, 120 bp, Artificial Sequence
  ENSG00000141510_23 (sequence is synthesized)
aatgcagggctgaggagtgtccgaagagaatgggcaggtgagcggtgagacagttgttcttccagaagctttgcagtgaaaggaatcaaagaaatggagccgtgtatcagcagccagact

SEQ ID NO: 368276 - DNA, 65 bp, Artificial Sequence
  ENSG00000141510_24 (sequence is synthesized)
agacagcgtggtggcccacgcctgtaatcccagctactaagggggctgaggcaggaggatctctt

SEQ ID NO: 368277 - DNA, 120 bp, Artificial Sequence
  ENSG00000141510_25 (sequence is synthesized)
aaatacaaaaattagcctggcagtggtggcccacgcctgtaatcccagctactaagggggctgaggcaggaggatctcttaaccagggaggaggaggttgcagtgagcagagattgtgcc

SEQ ID NO: 368278 - DNA, 120 bp, Artificial Sequence
  ENSG00000141510_26 (sequence is synthesized)
ttatttgacctccctataaccccatgagatgtgcaaagtaaatgggtttaactattgcacagttgaaaaaactgaagcttacagaggctaagggcctcccctgcttggctgggcgcagtg

SEQ ID NO: 368279 - DNA, 120 bp, Artificial Sequence
  ENSG00000141510_27 (sequence is synthesized)
gcagaaggcaagcccggaggtattttcaagaatgagtatatctcatcttcccggaggaaaaaaaaaaagaatgggtacgtctgagaatcaaattttgaaagagtgcaatgatgggtcgtt

SEQ ID NO: 368280 - DNA, 120 bp, Artificial Sequence
  ENSG00000141510_28 (sequence is synthesized)
tgataatttgtcggaaaaacaatctacctgttatctagctttgggctaggccattccagttccagacgcaggctgaacgtcgtgaagcggaaggggcgggcccgcaggcgtccgtgtggt

SEQ ID NO: 368281 - DNA, 120 bp, Artificial Sequence
  ENSG00000141510_29 (sequence is synthesized)
cctccgtgcagccctccggcccgagccggttcttcctggtaggaggcggaactcgaattcatttctcccgctgccccatctcttagctcgcggttgtttcattccgcagtttcttcccat

SEQ ID NO: 368282 - DNA, 120 bp, Artificial Sequence
  ENSG00000141510_30 (sequence is synthesized)
gcacctgccgcgtaccggccactttgtgccgtacttacgtcatctttttcctaaatcgaggtggcatttacacacagcgccagtgcacacagcaagtgcacaggaagatgagttttggcc

SEQ ID NO: 368283 - DNA, 120 bp, Artificial Sequence
  ENSG00000141510_31 (sequence is synthesized)
gacccttttcatcgtcccagaaacgtttcatcacgtctcttcccagtcgattcccgaccccacctttattttgatctccataaccattttgcctgttggagaacttcatatagaatggaa

SEQ ID NO: 368284 - DNA, 86 bp, Artificial Sequence
  ENSG00000141510_32 (sequence is synthesized)
ggcgctgtggctcacgttgaggataggagttccagaccagcgtggccaacgtggtgaatccccgtctctactaaaaaatacaaaaa

SEQ ID NO: 368285 - DNA, 120 bp, Artificial Sequence
  ENSG00000141510_33 (sequence is synthesized)
cgacaagaacgaaactccgtctcaaaaaaaaggggggaatcatacattatgtgctcatttttgtcgggcttctgtccttcaatgtactgtctgacattcgttcatgttgtatatatcagt

SEQ ID NO: 368286 - DNA, 120 bp, Artificial Sequence
  ENSG00000141510_34 (sequence is synthesized)
gtatatatcagtattttgctccttttcatttagtatagtccatcgattgtatatccgtccttttgatggccttttgagttgtttcccatttgcggttatgaaataaagctgctataaaca

SEQ ID NO: 368287 - DNA, 67 bp, Artificial Sequence
  ENSG00000141510_35 (sequence is synthesized)
ccactgtgaaaagctcctgaggtgtagacgccaactctctctagctcgctagtgggttgcaggaggt

SEQ ID NO: 368288 - DNA, 120 bp, Artificial Sequence
  ENSG00000141510_36 (sequence is synthesized)
acgccaactctctctagctcgctagtgggttgcaggaggtgcttacgcatgtttgtttctttgctgccgtcttccagttgctttatctgttcacttgtgccctgactttcaactctgtct

SEQ ID NO: 368289 - DNA, 120 bp, Artificial Sequence
  ENSG00000141510_37 (sequence is synthesized)
ctttcagagacttttaacttaaacatctgtccctacccagcaggcaaactagagctcctgaagctcagtccctgtccttgcctctgtagacaggtcaccttgatgagcttcctttttttt

SEQ ID NO: 368290 - DNA, 120 bp, Artificial Sequence
  ENSG00000141510_38 (sequence is synthesized)
tttttaatttttttttattttaggctttattggggcataattgatcccccaaaattgcatacattcaaggtatgcagtgtgatgatttgatatgggggtatattgtgaaaccattaccac

SEQ ID NO: 368291 - DNA, 120 bp, Artificial Sequence
  ENSG00000141510_39 (sequence is synthesized)
aatcaaattaatcagcacgtccatcatcacacacagttaccatttgtgtgtgtgcacgtgtgttcacctacgacgaggacacttggacctactctgcagatctcaagtaaacagaaaatc

SEQ ID NO: 368292 - DNA, 120 bp, Artificial Sequence
  ENSG00000141510_40 (sequence is synthesized)
tccctttttgacaaccatcctccaccctttcaatcccaaccttttcctagattatgtccctagctctgtttttatttctgctgtgctgcttcagatccattctgactctgccaaaccctt

SEQ ID NO: 368293 - DNA, 120 bp, Artificial Sequence
  ENSG00000141510_41 (sequence is synthesized)
ctttgcgtgagccactgcgcctggccacaacaccccatttctattttaataaaataaaatactgtgaaaaacatttacaatttttaaattttaattttaaaattaaacttatatttattc

SEQ ID NO: 368294 - DNA, 120 bp, Artificial Sequence
  ENSG00000141510_42 (sequence is synthesized)
aaaagtctagagccaccgtccagggagcaggtagctgctgggctccggggacactttgcgttcgggctgggagcgtgctttccacgacggtgacacgcttccctggattggtactcccct

SEQ ID NO: 368295 - DNA, 120 bp, Artificial Sequence
  ENSG00000141519_0 (sequence is synthesized)
agcgtcgcctagcaacgggaaatggcggaaccgggcggcgcggcgggccggtcccatccggaagatggatcggcttctgagggagagaaggaagggaataatgaaagccacatggtgtca

SEQ ID NO: 368296 - DNA, 120 bp, Artificial Sequence
  ENSG00000141519_1 (sequence is synthesized)
ccaccagagaaggatgatggccagaaaggtgaagaagctgtcggtagcacagagcatcctgaggaagtcacaacccaagcggaagctgcaattgaagagggggaggtggagacagaaggg

SEQ ID NO: 368297 - DNA, 120 bp, Artificial Sequence
  ENSG00000141519_2 (sequence is synthesized)
gaagcagcagtggaaggggaagaggaggctgtgtcctatggagatgctgaaagcgaagaggaatattactatacagaaacttcatccccggaagggcaaatcagtgctgcagatacgact

SEQ ID NO: 368298 - DNA, 120 bp, Artificial Sequence
  ENSG00000141519_3 (sequence is synthesized)
tacccgtatttcagtcctcctcaggaactgcctggagaggaggcatacgatagtgttagcggggaggctggtctccaaggcttccagcaagaggccaccggtccaccagaatccagagaa

SEQ ID NO: 368299 - DNA, 120 bp, Artificial Sequence
  ENSG00000141519_4 (sequence is synthesized)
aggagggtcacctccccagagccatcccacggagtcttaggcccgtcggagcaaatgggccaggtcacctctgggccagcagtgggcagattgacaggatccacagaggagccccagggg

SEQ ID NO: 368300 - DNA, 120 bp, Artificial Sequence
  ENSG00000141519_5 (sequence is synthesized)
caggtgctcccaatgggcgtccagcaccgcttccggctgagccacgggagcgacatcgagtcctcagacctggaggagttcgtctcgcaggagccagtgatccccccaggggtgcccgat

SEQ ID NO: 368301 - DNA, 120 bp, Artificial Sequence
  ENSG00000141519_6 (sequence is synthesized)
gcccaccccagggaaggagacctgccagtgttccaggaccagatccagcagcccagcaccgaggagggggccatggcagagagagtggagtccgaggggagtgacgaggaagcagaagac

SEQ ID NO: 368302 - DNA, 120 bp, Artificial Sequence
  ENSG00000141519_7 (sequence is synthesized)
gaagggtcccagctggtggttttggacccagaccaccccctgatggtaagattccaggctgccctgaagaactacctgaaccgacagatcgaaaagttgaagctggacctccaagagctg

SEQ ID NO: 368303 - DNA, 120 bp, Artificial Sequence
  ENSG00000141519_8 (sequence is synthesized)
gttgtggctaccaagcagagccgagcccagcggcaggagctgggggtgaatctctatgaggtgcagcagcacctggtacacctgcagaagctgctggagaagagtcacgaccgccacgca

SEQ ID NO: 368304 - DNA, 120 bp, Artificial Sequence
  ENSG00000141519_9 (sequence is synthesized)
atggcctcgagcgagcgcaggcagaaggaggaggagctgcaggccgcccgcgctctctacaccaagacctgcgcagccgccaacgaggagcgcaaaaagttggcggctctgcagactgag

SEQ ID NO: 368305 - DNA, 120 bp, Artificial Sequence
  ENSG00000141519_10 (sequence is synthesized)
atggagaacttggccctgcatctcttctacatgcagaacatcgaccaggacatgcgtgacgacatccgcgtgatgacacaagtggtaaagaaggccgagacggagaggatccgggcagaa

SEQ ID NO: 368306 - DNA, 120 bp, Artificial Sequence
  ENSG00000141519_11 (sequence is synthesized)
atcgagaagaaaaagcaggacctgtatgtggaccagctcaccactcgagcccagcaactggaagaagacattgccctgtttgaggctcagtacttggcccaagctgaggacacccggatt

SEQ ID NO: 368307 - DNA, 120 bp, Artificial Sequence
  ENSG00000141519_12 (sequence is synthesized)
ttaaggaaagcagtgagtgaggcctgcaccgagatcgacgccatcagcgtggagaagaggcgcatcatgcagcaatgggccagcagcctggtgggcatgaagcaccgcgacgaggcgcac

SEQ ID NO: 368308 - DNA, 120 bp, Artificial Sequence
  ENSG00000141519_13 (sequence is synthesized)
agggcggtgctggaggcgctcagaggatgccagcatcaagccaaatccaccgacggcgagattgaggcctataagaaatccatcatgaaggaggaagaaaagaacgagaagctggcgagc

SEQ ID NO: 368309 - DNA, 120 bp, Artificial Sequence
  ENSG00000141519_14 (sequence is synthesized)
atcctgaaccggacagagacggaagccacactgctgcagaagctcaccacccagtgcctgaccaagcaggtggccctgcagagccagttcaatacctacaggctcaccctgcaggacaca

SEQ ID NO: 368310 - DNA, 120 bp, Artificial Sequence
  ENSG00000141519_15 (sequence is synthesized)
gaggatgccctcagccaggaccagctggaacaaatgatactcacggaggagttgcaggccatccgccaagccatccagggcgagctggagctcaggaggaagacggatgctgccatccgg

SEQ ID NO: 368311 - DNA, 120 bp, Artificial Sequence
  ENSG00000141519_16 (sequence is synthesized)
gagaagctgcaggagcacatgacctccaacaagaccaccaaatacttcaaccagctcatcctgaggctgcagaaggagaagaccaacatgatgacacatctttccaaaatcaacggtgac

SEQ ID NO: 368312 - DNA, 120 bp, Artificial Sequence
  ENSG00000141519_17 (sequence is synthesized)
agaaagtcaacgagctcatcaccaacagccagagcgagatctcccggcgcacgatcctgatcgagaggaagcaagggctcatcaacttcctcaacaagcagctggagcggatggtctccg

SEQ ID NO: 368313 - DNA, 120 bp, Artificial Sequence
  ENSG00000141519_18 (sequence is synthesized)
agctggggggggaagaagtggggcccctggagcttgaaatcaaaaggctgagcaagctgatcgacgagcacgatggcaaggcggtccaggcccaggtgacctggctgcgcctgcagcagg

SEQ ID NO: 368314 - DNA, 120 bp, Artificial Sequence
  ENSG00000141519_19 (sequence is synthesized)
agatggtcaaggtgacacaggagcaggaggagcagctggcctccctggacgcatccaagaaggagctccacatcatggagcagaagaaactacgagtagaaagcaagattgagcaggaga

SEQ ID NO: 368315 - DNA, 120 bp, Artificial Sequence
  ENSG00000141519_20 (sequence is synthesized)
agaaggagcagaaggagatcgagcaccacatgaaggacctggacaacgacctgaagaagctcaacatgttgatgaataaaaaccggtgcagctcggaggagctggagcagaacaaccggg

SEQ ID NO: 368316 - DNA, 120 bp, Artificial Sequence
  ENSG00000141519_21 (sequence is synthesized)
tgacagagaatgagttcgtgcgctcgctgaaggcctctgagagggagaccatcaagatgcaggacaagctgaaccagctcagcgaggagaaggcgaccctcctgaatcaactggtggaag

SEQ ID NO: 368317 - DNA, 120 bp, Artificial Sequence
  ENSG00000141519_22 (sequence is synthesized)
cagaacaccagattatgctttgggagaaaaaaatccaactggcaaaagagatgcgttcctcagtggattccgagatcggccagacggagatccgggccatgaagggcgagatccacagga

SEQ ID NO: 368318 - DNA, 120 bp, Artificial Sequence
  ENSG00000141519_23 (sequence is synthesized)
tgaaggtcaggctcgggcagctgctgaagcagcaggagaagatgatccgtgccatggagttggcggttgcccgcagagagaccgtcaccacccaggccgaggggcagcgcaagatggaca

SEQ ID NO: 368319 - DNA, 120 bp, Artificial Sequence
  ENSG00000141519_24 (sequence is synthesized)
ggaaggcgctcacccgcaccgacttccaccacaagcagcttgagctgcgccggaaaatcagggacgttcgcaaggccaccgatgagtgcaccaaaaccgtcctggaactggaagaaacac

SEQ ID NO: 368320 - DNA, 120 bp, Artificial Sequence
  ENSG00000141519_25 (sequence is synthesized)
aaagaaatgtgagcagctccctcctagagaagcaggaaaagctgtcggtgattcaggcagacttcgacacactcgaggccgacctcacccggcttggggccctcaaacgacagaaccttt

SEQ ID NO: 368321 - DNA, 120 bp, Artificial Sequence
  ENSG00000141519_26 (sequence is synthesized)
cagagatcgtggccctgcagacacgccttaagcacctgcaggctgtgaaggaggggcgctacgtgttcctgttccgctccaagcagtccctagtgctggagcgccagcgcctggacaagc

SEQ ID NO: 368322 - DNA, 120 bp, Artificial Sequence
  ENSG00000141519_27 (sequence is synthesized)
gactggctctcatcgccaccatcctggaccgcgtgcgggacgagtacccccagttccaggaggccctgcacaaggtcagccagatgatcgccaacaagctcgagtcaccagggccctcct

SEQ ID NO: 368323 - DNA, 120 bp, Artificial Sequence
  ENSG00000141519_28 (sequence is synthesized)
agggagcagcctggactccgccttgcaaggcctccaggaagagatccggaattgtgtttgtcatgagggacttggaatcttttgtgttcctaaaaaccacatgtaccctcagaagggcat

SEQ ID NO: 368324 - DNA, 120 bp, Artificial Sequence
  ENSG00000141519_29 (sequence is synthesized)
cgtttaagagaaataagccagccccacccataggaatctttttagccactcagcaatttaataaaccaggtaaaatcctagcgtttcccatggcatcccatcgcaaagacagagcctgtg

SEQ ID NO: 368325 - DNA, 120 bp, Artificial Sequence
  ENSG00000141519_30 (sequence is synthesized)
actgcagacccacacacccacactcccacactgggcttactcgtccaggtaacactttggtttgcagcactcccaaatctgcacgtgcctctcacaacacaacgctgccacaggtccaca

SEQ ID NO: 368326 - DNA, 120 bp, Artificial Sequence
  ENSG00000141519_31 (sequence is synthesized)
agctggtgggctgagcagaggtgggaaagttaaggcagctccagccagcctggcccgggaggctggtccccccagcacttccctctactaggtgcatctgaaaacccacaaaccaccttc

SEQ ID NO: 368327 - DNA, 120 bp, Artificial Sequence
  ENSG00000141519_32 (sequence is synthesized)
tttaccagttttcccatccccaccccttagaactctcaggtcccttttcctgcccccatgtccccatttgagttaaattcagatccacagcttgcaggagaaagtcagtggccccagaca

SEQ ID NO: 368328 - DNA, 120 bp, Artificial Sequence
  ENSG00000141519_33 (sequence is synthesized)
cacgtaacagggtgagcactgaaataagagcacgctggggcgtccacaccaagggactacgccccagtctgcccacctatcttttctccatcattaacccagcgctctttctccctggac

SEQ ID NO: 368329 - DNA, 120 bp, Artificial Sequence
  ENSG00000141519_34 (sequence is synthesized)
ttccaagtaccaatgaccttggggcttctttgcagtttaaagggaaaatgctctacaaaataatttcactttcaaacatttcagcagaagaataaaatcttttttctgaatatctagtaa

SEQ ID NO: 368330 - DNA, 120 bp, Artificial Sequence
  ENSG00000141519_35 (sequence is synthesized)
acgggacgcgcgcaggcacgtgcacgaacaacacgggacgcgcgcgggcacgtgcacgaacaacacgggacgcgcgcaggcacgtgcacgaacaacacgggacgcgcgcaggcacgtgca

SEQ ID NO: 368331 - DNA, 120 bp, Artificial Sequence
  ENSG00000141519_36 (sequence is synthesized)
cgaacaagggacgcgcgcaggcacgtgcacgaacacaggacacacacagcacgtgcatgaacaacacaggacacacacagcacgtgcatgaacaacacaggacacacacaagcacgtgca

SEQ ID NO: 368332 - DNA, 120 bp, Artificial Sequence
  ENSG00000141519_37 (sequence is synthesized)
tgaacaacacaggacacacacaagcacgtgcatgtcatctcacaaaacgctgttttattcctactccatgtaatcacagcacgctggtatttttaaatgccggttgtaaccctcaaactt

SEQ ID NO: 368333 - DNA, 120 bp, Artificial Sequence
  ENSG00000141519_38 (sequence is synthesized)
tgtgaccctctaacgtatcccactgtgagacagtctcacaccacagaagggctcagagagcacccccatctcatccttcacagccgcgttgtctctccatggtcacaattagatttcatt

SEQ ID NO: 368334 - DNA, 120 bp, Artificial Sequence
  ENSG00000141519_39 (sequence is synthesized)
gcctttaaaaggctggtaattaaattgcaagtggtcatcaagctaaaggttcagggccttaaggataacagtaagagcagttcataaaataaatgggcctcactttcaccatgccatgct

SEQ ID NO: 368335 - DNA, 120 bp, Artificial Sequence
  ENSG00000141519_40 (sequence is synthesized)
accgctcgttcccgcctttctaccacatggcattccgctgggatacttctacggggaagcttcctgcccggggcatcgagggcgttcgcgtccgtctgttatggcggtgctgctgtagat

SEQ ID NO: 368336 - DNA, 120 bp, Artificial Sequence
  ENSG00000141519_41 (sequence is synthesized)
aaccggatccgcgaatgctaacgctcaccaggatgctatatagccttttttatattgcctatcaagcccggaatgtctgggtctagcgggtattgctaagtaggattgtgacagtcacgc

SEQ ID NO: 368337 - DNA, 120 bp, Artificial Sequence
  ENSG00000141519_42 (sequence is synthesized)
ccccggcagcggtgtttcaaagtcccctgacagctcagcatgttgtcacacttcaggactgtgccaatccgattgatgaagaaaatagataatcttgttttataaaacgtgcatgcgcag

SEQ ID NO: 368338 - DNA, 120 bp, Artificial Sequence
  ENSG00000141519_43 (sequence is synthesized)
aacgggacgctttctctgggatgcattgagtcagggaatagaagatggggtgaatgatgtttctgacccacagaccgttgggatgcttttgctgtcactttcccatcatgctgcatgagg

SEQ ID NO: 368339 - DNA, 120 bp, Artificial Sequence
  ENSG00000141519_44 (sequence is synthesized)
cattgagttcgccttagtgagctccctcgtgtggggcgcagctctgtgcactggctctctgatgtctcacacgtaactggctctccccgctgcatttctacagaggatgccagcatcaag

SEQ ID NO: 368340 - DNA, 120 bp, Artificial Sequence
  ENSG00000141519_45 (sequence is synthesized)
gagccgccgtgcccggccctgcagtgatgctgagacgagctctgggacgtgggcacctcccaggggaggggcactcagtggggcacgtcgctggatttgcacgcagccttaaaagcaaat

SEQ ID NO: 368341 - DNA, 120 bp, Artificial Sequence
  ENSG00000141519_46 (sequence is synthesized)
aacaaacgcgcatgctccctgtattttgtaaatgtgaaccactgcctgcccagctgcccagttcgcagtcacagcgggagggttgagaaatgtcacgaaatggctccaagctcacggact

SEQ ID NO: 368342 - DNA, 120 bp, Artificial Sequence
  ENSG00000141519_47 (sequence is synthesized)
tcagagctctccttgagagaggagcatggaaggttatcatccccgccaagccagggcactcaggtggaaacactggcacgggaaaagccagggtcctgccaggcaggctcctggtgctgt

SEQ ID NO: 368343 - DNA, 120 bp, Artificial Sequence
  ENSG00000141519_48 (sequence is synthesized)
ccccacatcacctccagttgggcttagaaaaccattccaccggggctccccaacccttctgaggcccaaggggctgccaaagcaccagggtgcctggaatgatggaggcgggcatccttc

SEQ ID NO: 368344 - DNA, 120 bp, Artificial Sequence
  ENSG00000141519_49 (sequence is synthesized)
ctggaccactctccacccacatgtccacctgccgagacatcccgggtcctgcccggtcttgggtcggggatccatgctggtcaggcctgcagcagagcccccatgggaaatgctgcccag

SEQ ID NO: 368345 - DNA, 120 bp, Artificial Sequence
  ENSG00000141519_50 (sequence is synthesized)
acacatcatgtgcccttctcggaggtcctgctgcctctcgccctgcccttcttgggttgcccaaacccgtctgttggtgagtagcaagtcccaaaagaccctatggagctgtcagctgag

SEQ ID NO: 368346 - DNA, 120 bp, Artificial Sequence
  ENSG00000141519_51 (sequence is synthesized)
tatcggtgtcccaaggcaagagctgccgaaataccatgctgtgagatggggaggatcacccatggagagggcagagagaggggctcacatgcccatgtcctggggtagtcagggcacacc

SEQ ID NO: 368347 - DNA, 120 bp, Artificial Sequence
  ENSG00000141519_52 (sequence is synthesized)
ggggacagcaggaggagctggagaagccctgtgaggagtggccagcggatgaaccagctgtggcctcttgtgccctccacccatcttaacatcaagaagagctgttgttttctgccccta

SEQ ID NO: 368348 - DNA, 120 bp, Artificial Sequence
  ENSG00000141519_53 (sequence is synthesized)
cccctgagcttggctggggcagggcaggggtctaagggcctccctctcctggagactcacagtgtctgagcatcaaccaggtcccggtgctccacagatttgcaagtgtctgggggaggg

SEQ ID NO: 368349 - DNA, 120 bp, Artificial Sequence
  ENSG00000141519_54 (sequence is synthesized)
agcctggccctcccacacgccctgcccacacctgctggctgtccccacaggcaggtcctctcagttccgttggaggaccaggctttgggagcttagcagccaaaaagagaccccctgtcc

SEQ ID NO: 368350 - DNA, 120 bp, Artificial Sequence
  ENSG00000141519_55 (sequence is synthesized)
tctcctctcctctgtcctggcagggacgagattcaggcaggagcgccaggaacgacaagagggaggggatgaagggagctacagggagagacaaaacctggctcacctctcggacactgc

SEQ ID NO: 368351 - DNA, 120 bp, Artificial Sequence
  ENSG00000141519_56 (sequence is synthesized)
ccgtgtccacgcagtcccggggctcaggacgatggagggcgggggtacggtccttgcggtgggcgttctgcaccaggatgtaatttccacacccgttcaagatgcttgtaggggtattag

SEQ ID NO: 368352 - DNA, 120 bp, Artificial Sequence
  ENSG00000141519_57 (sequence is synthesized)
aaatccagcctgcagccctgccctcggtgccgggatagagggcaccagccccggcatccacaatcccatggccctccccacagctgtcccgccccctcccccatgcaggcctctgagagg

SEQ ID NO: 368353 - DNA, 120 bp, Artificial Sequence
  ENSG00000141519_58 (sequence is synthesized)
tcacacagaggtcctgcgtcccctctgtgcgagtcacggcctctcctgatcaggtcacggcctctcctgatcccaggccagtaatagcaccaccggctgctcacatgtttgtggctttgt

SEQ ID NO: 368354 - DNA, 120 bp, Artificial Sequence
  ENSG00000141519_59 (sequence is synthesized)
gatttgttccactgacaaatgttgatggagtatctgttatgggctgggctcatgttcagcgtgcgagggttacaaaatagaacacaaaaaacaaacattcctgtgctcttagaggttacc

SEQ ID NO: 368355 - DNA, 120 bp, Artificial Sequence
  ENSG00000141519_60 (sequence is synthesized)
ttagaggttacctcctggggcaggaggacagatgatgagcaaaataattttaaaagatacagtgtgttgtagctaggcatggtggtacacacctgtggtgccagctactcaggaggctga

SEQ ID NO: 368356 - DNA, 68 bp, Artificial Sequence
  ENSG00000141519_61 (sequence is synthesized)
ggaggatcgcttgagcctgggaggtcgagactgcagtgagccaagggaaaagaaaagaaaagaaaaga

SEQ ID NO: 368357 - DNA, 120 bp, Artificial Sequence
  ENSG00000141519_62 (sequence is synthesized)
tggaagcagagtgagtcccagtctccagccacacgtgggtcatgaaggtcactgcacctacaggcctctgtccgttgaagaccatgtaggaggccaggtgtggcagctcacacccatatc

SEQ ID NO: 368358 - DNA, 120 bp, Artificial Sequence
  ENSG00000141519_63 (sequence is synthesized)
tggtggcacgtgtctcacccgctgagctttaacttcccctccacctttcgtagtctccaccccttgtgcccagcacagagcctggcatacagcaagcgctcaagaaaggctggaccaagg

SEQ ID NO: 368359 - DNA, 120 bp, Artificial Sequence
  ENSG00000141519_64 (sequence is synthesized)
aatgagggtctggctggccccacagcacccgcagccaggcagccagcagcagtcacacaaccaggagatgcttttccttttgggtgctgtgattaaagaaacaaaatgaaaccattttgt

SEQ ID NO: 368360 - DNA, 120 bp, Artificial Sequence
  ENSG00000141519_65 (sequence is synthesized)
cattttgtttttaaaagtttttagaccaaaacattttcaaatgaataatattggattaaccatactcatttctggccaggcgcagtggctcgcacctgtaatcccaacattttgggaggc

SEQ ID NO: 368361 - DNA, 67 bp, Artificial Sequence
  ENSG00000141519_66 (sequence is synthesized)
gggcgcctgtaatccccgctactcgggagggtgagacagagaactgcttgaattgcggaggttgtag

SEQ ID NO: 368362 - DNA, 71 bp, Artificial Sequence
  ENSG00000141519_67 (sequence is synthesized)
ccaggcatggtgtgggcgcctgtaatccccgctactcgggagggtgagacagagaactgcttgaatagaca

SEQ ID NO: 368363 - DNA, 120 bp, Artificial Sequence
  ENSG00000141519_68 (sequence is synthesized)
ctgccacgggccttaagaaaagtcaaggccaggttctctctgagggtccagcacctggcctggctctccgaggctcatggcctgtgaaccctgcagcgtccccaagggaagacgtcacct

SEQ ID NO: 368364 - DNA, 120 bp, Artificial Sequence
  ENSG00000141519_69 (sequence is synthesized)
ccgagatggtcctgttgtccagctctcccctgcatcccagactaaccagtgtcctctctgcaaaccgtcctcattgccctcagagacatggcttccttttggttgcaaacattgtaaaaa

SEQ ID NO: 368365 - DNA, 120 bp, Artificial Sequence
  ENSG00000141519_70 (sequence is synthesized)
aaatggcggaaccgggcggcgcggcgggccggtaagccgggccgaggggcagcgggtcttggagtcgccaggccgcgctctccgttcaccgctccaggtcccatccggaagatggatcgg

SEQ ID NO: 368366 - DNA, 120 bp, Artificial Sequence
  ENSG00000141519_71 (sequence is synthesized)
aaatggcggaaccgggcggcgcggcgggccggcatgatatagtgctatggttcctgacaaacaggacaaagacgtgacaacagcctgggggtggcagagaagtaacaagtcccatccgga

SEQ ID NO: 368367 - DNA, 120 bp, Artificial Sequence
  ENSG00000141519_72 (sequence is synthesized)
gagtcccagtctccagccacacgtgggtcatgaaggtcactgcacctacaggcctctgtccgttgaagaccatgtaggaggccaggctggagtgcagccgtgcgatctcagctcactgca

SEQ ID NO: 368368 - DNA, 120 bp, Artificial Sequence
  ENSG00000141519_73 (sequence is synthesized)
caacctcctgagtagctgggattacagaggttggcaaacgtttgcataaggagcccagtagtgaacacttcaggctttgagagcctcacgctttctgtcgcagctgcttggctctgccat

SEQ ID NO: 368369 - DNA, 120 bp, Artificial Sequence
  ENSG00000141519_74 (sequence is synthesized)
tgccagtgtcgcacggcccacggggtttgtcaccctatgtgaggaacttgggaatacattataaatacaaattgcaatccctgttagaaatgtcttagcaaggctgggtgcggtggctca

SEQ ID NO: 368370 - DNA, 120 bp, Artificial Sequence
  ENSG00000141522_0 (sequence is synthesized)
agtgcgggagggatcctgaaccgcgcggccgaaccctccggtgtcccgacccaggctaagcttgagcatggctgagcaggagcccacagccgagcagctggcccagattgcagcggagaa

SEQ ID NO: 368371 - DNA, 120 bp, Artificial Sequence
  ENSG00000141522_1 (sequence is synthesized)
cgaggaggatgagcactcggtcaactacaagcccccggcccagaagagcatccaggagatccaggagctggacaaggacgacgagagcctgcgaaagtacaaggaggccctgctgggccg

SEQ ID NO: 368372 - DNA, 120 bp, Artificial Sequence
  ENSG00000141522_2 (sequence is synthesized)
cgtggccgtttccgcagaccccaacgtccccaacgtcgtggtgactggcctgaccctggtgtgcagctcggccccgggccccctggagctggacctgacgggcgacctggagagcttcaa

SEQ ID NO: 368373 - DNA, 120 bp, Artificial Sequence
  ENSG00000141522_3 (sequence is synthesized)
gaagcagtcgtttgtgctgaaggagggtgtggagtaccggataaaaatctctttccgggttaaccgagagatagtgtccggcatgaagtacatccagcatacgtacaggaaaggcgtcaa

SEQ ID NO: 368374 - DNA, 120 bp, Artificial Sequence
  ENSG00000141522_4 (sequence is synthesized)
gattgacaagactgactacatggtaggcagctatgggccccgggccgaggagtacgagttcctgacccccgtggaggaggcacccaagggtatgctggcccggggcagctacagcatcaa

SEQ ID NO: 368375 - DNA, 120 bp, Artificial Sequence
  ENSG00000141522_5 (sequence is synthesized)
gtcccgcttcacagacgacgacaagaccgaccacctgtcctgggagtggaatctcaccatcaagaaggactggaaggactgagcccagccagaggcgggcagggcagactgacggacgga

SEQ ID NO: 368376 - DNA, 120 bp, Artificial Sequence
  ENSG00000141522_6 (sequence is synthesized)
cgacggacaggcggatgtgtcccccccagcccctcccctccccataccaaagtgctgacaggccctccgtgcccctcccaccctggtccgcctccctggcctggctcaaccgagtgcctc

SEQ ID NO: 368377 - DNA, 120 bp, Artificial Sequence
  ENSG00000141522_7 (sequence is synthesized)
agcctcctcggtctcctgtctcgttgctgcttctgcctgtgctgtgggggagagaggccgcagccaggcctctgctgccctttctgtgccccccaggttctatctccccgtcacacccga

SEQ ID NO: 368378 - DNA, 120 bp, Artificial Sequence
  ENSG00000141522_8 (sequence is synthesized)
ggcctggcttcaggagggagcggagcagccattctccaggccccgtggttgcccctggacgtgtgcgtctgctgctccggggtggagctggggtgtgggatgcacggcctcgtgggggcc

SEQ ID NO: 368379 - DNA, 120 bp, Artificial Sequence
  ENSG00000141522_9 (sequence is synthesized)
gggccgtcctccagccccgctgctccctggccagcccccttgtcgctgtcggtcccgtctaaccatgatgccttaacatgtggagtgtaccgtggggcctcactagcctctaactccctg

SEQ ID NO: 368380 - DNA, 120 bp, Artificial Sequence
  ENSG00000141522_10 (sequence is synthesized)
tgtctgcatgagcatgtggcctccccgtcccttccccggtggcgaacccagtgacccagggacacgtggggtgtgctgctgctgctccccagcccaccagtgcctggccagcctgccccc

SEQ ID NO: 368381 - DNA, 120 bp, Artificial Sequence
  ENSG00000141522_11 (sequence is synthesized)
ttccctggacagggctgtggagatggctccggcggcttggggaaagccaaattgccaaaactcaagtcacctcagtaccatccaggaggctgggtattgtcctgcctctgccttttctgt

SEQ ID NO: 368382 - DNA, 120 bp, Artificial Sequence
  ENSG00000141522_12 (sequence is synthesized)
ctcagcgggcagtgcccagagcccacacccccccaagagccctcgatggacagcctcactcaccccacctgggcccagccaggagccccgcctggccatcagtatttattgcctccgtcc

SEQ ID NO: 368383 - DNA, 120 bp, Artificial Sequence
  ENSG00000141522_13 (sequence is synthesized)
gtgccgtccctgggccactggcctggcgcctgttcccccaggctctcagtgccaccacccccggcaggccttccctgacccagccaggaacaaacaagggaccaagtgcacacattgctg

SEQ ID NO: 368384 - DNA, 120 bp, Artificial Sequence
  ENSG00000141522_14 (sequence is synthesized)
agagccgtctcctgtgcctcccccgccccatccccggtcttcgtgttgtgtctgccaggctcaggcagaggcgcctgtccctgcttcttttctgaccgggaaataaatgcccctgaagga

SEQ ID NO: 368385 - DNA, 80 bp, Artificial Sequence
  ENSG00000141522_15 (sequence is synthesized)
gggccagacctgagggcccctccttggggacgcggggggcgccgggccggcagccgcggtccatcgcgttcgggggcgac

SEQ ID NO: 368386 - DNA, 120 bp, Artificial Sequence
  ENSG00000141522_16 (sequence is synthesized)
gcccggcacggattgcgggccctgcggaagtgcgggccgcgccctaggatcccggcgcctacggctatcctcgcgcggcgcggaggccccagcccctggaggaagcagggcggcctggac

SEQ ID NO: 368387 - DNA, 120 bp, Artificial Sequence
  ENSG00000141522_17 (sequence is synthesized)
ggcggcctggaccccggcctgggtgtcccgggtgtgctgctccctgacccacctcccacgctgccgggaaggatctgagcctgacagatcccctgccgggtgtcccgacccaggctaagc

SEQ ID NO: 368388 - DNA, 120 bp, Artificial Sequence
  ENSG00000141522_18 (sequence is synthesized)
tctggggcctgctagccccgccccacacatacagggggctgctgcctcctccatcgtggagggggaggtgtgtcctctctccccatgatcggctgcagttcccattttgtcttagatgtt

SEQ ID NO: 368389 - DNA, 120 bp, Artificial Sequence
  ENSG00000141522_19 (sequence is synthesized)
atacctggggtgggggcacctcacactgccccagaggatgcccctgagcaggaatcgcgggggtggagaggagcgaaggtggcccccttggagcccttttggagctccggctgcagccca

SEQ ID NO: 368390 - DNA, 120 bp, Artificial Sequence
  ENSG00000141522_20 (sequence is synthesized)
ctgaccctggtgtgcagctcggccccgggccccctggagctggacctgacgggtgagtgccctgcggccgcgggggtccgggcggcccctggtggggatctcgggaagtgcagccagggg

SEQ ID NO: 368391 - DNA, 120 bp, Artificial Sequence
  ENSG00000141524_0 (sequence is synthesized)
aggaagcggaggaaggtgaagtaggaccgaattcctgtgccgaagaggcctgcagtgggagagcaggatgggggctccggaggtggcgcccaggctctgagctaccctaggtctgcagac

SEQ ID NO: 368392 - DNA, 120 bp, Artificial Sequence
  ENSG00000141524_1 (sequence is synthesized)
tagcgggcattggccagagacatggcccagccactggccttcatcctcgatgtccctgagaccccaggggaccagggccagggccccagcccctatgatgaaagcgaagtgcacgactcc

SEQ ID NO: 368393 - DNA, 120 bp, Artificial Sequence
  ENSG00000141524_2 (sequence is synthesized)
ttccagcagctcatccaggagcagagccagtgcacggcccaggaggggctggagctgcagcagagagagcgggaggtgacaggaagtagccagcagacactctggcggcccgagggcacc

SEQ ID NO: 368394 - DNA, 120 bp, Artificial Sequence
  ENSG00000141524_3 (sequence is synthesized)
cagagcacggccacactccgcatcctggccagcatgcccagccgcaccattggccgcagccgaggtgccatcatctcccagtactacaaccgcacggtgcagcttcggtgcaggagcagc

SEQ ID NO: 368395 - DNA, 120 bp, Artificial Sequence
  ENSG00000141524_4 (sequence is synthesized)
cggcccctgctcgggaactttgtccgctccgcctggcccagcctccgcctgtacgacctggagctggaccccacggccctggaggaggaggagaagcagagcctcctggtgaaggagctc

SEQ ID NO: 368396 - DNA, 120 bp, Artificial Sequence
  ENSG00000141524_5 (sequence is synthesized)
cagagcctggcagtggcacagcgggaccacatgcttcgcgggatgcccttaagcctggctgagaaacgcagcctgcgagagaagagcaggaccccgagggggaagtggaggggccagccg

SEQ ID NO: 368397 - DNA, 120 bp, Artificial Sequence
  ENSG00000141524_6 (sequence is synthesized)
ggcagcggcggggtctgctcctgctgtggccggctcagatatgcctgcgtgctggccttgcacagcctgggcctggcgctgctctccgccctgcaggccctgatgccgtggcgctacgcc

SEQ ID NO: 368398 - DNA, 120 bp, Artificial Sequence
  ENSG00000141524_7 (sequence is synthesized)
ctgaagcgcatcgggggccagttcggctccagcgtgctctcctacttcctctttctcaagaccctgctggctttcaatgccctcctgctgctgctgctggtggccttcatcatgggccct

SEQ ID NO: 368399 - DNA, 120 bp, Artificial Sequence
  ENSG00000141524_8 (sequence is synthesized)
caggtcgccttcccacccgccctgccgggccctgcccccgtctgcacaggcctggagctcctcacaggcgcgggttgcttcacccacaccgtcatgtactacggccactacagtaacgcc

SEQ ID NO: 368400 - DNA, 120 bp, Artificial Sequence
  ENSG00000141524_9 (sequence is synthesized)
acgctgaaccagccgtgtggcagccccctggatggcagccagtgcacacccagggtgggtggcctgccctacaacatgcccctggcctacctctccactgtgggcgtgagcttctttatc

SEQ ID NO: 368401 - DNA, 120 bp, Artificial Sequence
  ENSG00000141524_10 (sequence is synthesized)
acctgcatcaccctggtgtacagcatggctcactctttcggggagagctaccgggtgggcagcacctctggcatccacgccatcaccgtcttctgctcctgggactacaaggtgacgcag

SEQ ID NO: 368402 - DNA, 120 bp, Artificial Sequence
  ENSG00000141524_11 (sequence is synthesized)
caatattcgcacccggctgaaggagctgctggccgagtggcagctgcggcacagccccaggagcgtgtgcgggaggctgcggcaggcggctgtgctggggcttgtgtggctgctgtgtct

SEQ ID NO: 368403 - DNA, 120 bp, Artificial Sequence
  ENSG00000141524_12 (sequence is synthesized)
ggggaccgcgctgggctgcgccgtggccgtccacgtcttctcggagttcatgatccagagtccagaggctgctggccaggaggctgtgctgctggtcctgcccctggtggttggcctcct

SEQ ID NO: 368404 - DNA, 120 bp, Artificial Sequence
  ENSG00000141524_13 (sequence is synthesized)
caacctgggggccccctacctgtgccgtgtcctggccgccctggagccgcatgactccccggtactggaggtgtacgtggccatctgcaggaacctcatcctcaagctggccatcctggg

SEQ ID NO: 368405 - DNA, 120 bp, Artificial Sequence
  ENSG00000141524_14 (sequence is synthesized)
gacactgtgctaccactggctgggccgcagggtgggcgtcctgcagggccagtgctgggaggattttgtgggccaggagctgtaccggttcctggtgatggacttcgtcctcatgttgct

SEQ ID NO: 368406 - DNA, 120 bp, Artificial Sequence
  ENSG00000141524_15 (sequence is synthesized)
ggacacgctttttggggaactggtgtggaggattatctccgagaagaagctgaagaggaggcggaagccggagtttgacattgcccggaatgtcctggagctgatttatgggcagactct

SEQ ID NO: 368407 - DNA, 120 bp, Artificial Sequence
  ENSG00000141524_16 (sequence is synthesized)
gacctggctgggggtgctcttctcgcccctcctccccgccgtgcagatcatcaagctgctgctcgtcttctatgtcaagaagaccagccttctggccaactgccaggcgccgcgccggcc

SEQ ID NO: 368408 - DNA, 120 bp, Artificial Sequence
  ENSG00000141524_17 (sequence is synthesized)
ctggctggcctcacacatgagcaccgtcttcctcacgctgctctgcttccccgccttcctgggcgccgctgtcttcctctgctacgccgtctggcaggtgaagccctcgagcacctgcgg

SEQ ID NO: 368409 - DNA, 120 bp, Artificial Sequence
  ENSG00000141524_18 (sequence is synthesized)
ccccttccggaccctggacaccatgtacgaggccggcagggtgtgggtgcgccacctggaggcggcaggccccagggtctcctggctgccctgggtgcaccggtacctgatggaaaacac

SEQ ID NO: 368410 - DNA, 120 bp, Artificial Sequence
  ENSG00000141524_19 (sequence is synthesized)
cttctttgtcttcctggtgtcagccctgctgctggccgtgatctacctcaacatccaggtggtgcggggccagcgcaaggtcatctgcctgctcaaggagcagatcagcaatgagggtga

SEQ ID NO: 368411 - DNA, 120 bp, Artificial Sequence
  ENSG00000141524_20 (sequence is synthesized)
ggacaaaatcttcttaatcaacaagcttcactccatctacgagaggaaggagagggaggagaggagcagggttgggacaaccgaggaggctgcggcaccccctgccctgctcacagatga

SEQ ID NO: 368412 - DNA, 120 bp, Artificial Sequence
  ENSG00000141524_21 (sequence is synthesized)
acaggatgcctagggggacggcgatgggcctcacgggcccgcccagcaccctgagaccacactgttgcctcccagtgaccctgctgggacaccaggacaaggaagacagtttcgcctctc

SEQ ID NO: 368413 - DNA, 120 bp, Artificial Sequence
  ENSG00000141524_22 (sequence is synthesized)
gaaagccgcagctgcgcctaggctggagctggaagggtgggtgaatccggcttgggcatccccaatgaactctgccctgcctgggactctatttattctgattaaaggggttttgcaaat

SEQ ID NO: 368414 - DNA, 120 bp, Artificial Sequence
  ENSG00000141524_23 (sequence is synthesized)
gcgggactgtctgggctgtgagtggcacctcctgtggttcccccaggaatgggtggtgtggacagctgccaggcgttgaagaccacccctggctctgtgcccctgtctcatcagatgggg

SEQ ID NO: 368415 - DNA, 120 bp, Artificial Sequence
  ENSG00000141524_24 (sequence is synthesized)
gccgagacctcagttcccggcggctcttgcggggcacaggtgagccctggctgcgcgcgcggcccctcctccccggcgcctcccagatgggggctccggaggtggcgcccaggctctgag

SEQ ID NO: 368416 - DNA, 120 bp, Artificial Sequence
  ENSG00000141524_25 (sequence is synthesized)
ggccacctccaggcgcaggtctgggtcctgggaacctcagctggagtgggggcgccctctgctggccaagccccagatggcaggggctggaccgcgccagggcttgattcgcttgctgcc

SEQ ID NO: 368417 - DNA, 120 bp, Artificial Sequence
  ENSG00000141524_26 (sequence is synthesized)
tttgaccagcctgaactcgcgcccaggaggggcttacacctgcacaagtgagccgagcaggcacggattgtgaccagagcgatgcgtcaaccattgggtgatgctgtagcatctactgga

SEQ ID NO: 368418 - DNA, 120 bp, Artificial Sequence
  ENSG00000141524_27 (sequence is synthesized)
gcaggagacaaatttagagagggacttggaggggagacatatcagttgcaaatgagttgtggggacagttgcctcccaggcataggtaaccagcacctgtgcttggaggcgaacagggct

SEQ ID NO: 368419 - DNA, 120 bp, Artificial Sequence
  ENSG00000141524_28 (sequence is synthesized)
tggtgaggtggggctggccccctgcttctggctgccagcagctggctggggggtggtgatcctgggtctgactgggctgagtttgaggagcccgtgggataccgaaaaccgtaggctgtg

SEQ ID NO: 368420 - DNA, 120 bp, Artificial Sequence
  ENSG00000141524_29 (sequence is synthesized)
gggggtgggcacagggattcggggaccagcccgtcatgaccccgtgctccaggtctgcagggaccagcccatgacagcccagggctccaggtctgcggggaccagcccatcacagcccag

SEQ ID NO: 368421 - DNA, 120 bp, Artificial Sequence
  ENSG00000141524_30 (sequence is synthesized)
ggctccaggcctgcggggaccagcccgtcagcctcagttctccaggcctgcggggaccagcccgtcatgaccccagtgctccaggtctgtggggaccagcccgtcagcctgtgctccagg

SEQ ID NO: 368422 - DNA, 120 bp, Artificial Sequence
  ENSG00000141524_31 (sequence is synthesized)
cctgcaggaaccagcccgtcagcctcagtgctccaggcctgcggggaccagcccgtcagcctgtgctccaggcctgcggggaccagcccgtcatgaccccagtgctccaggtctgtgggg

SEQ ID NO: 368423 - DNA, 120 bp, Artificial Sequence
  ENSG00000141524_32 (sequence is synthesized)
accagcccgtcagcctgtgctccaggcctgcgggaaccagcccgtcatgaccccagtgctccaggcctgcggggaccagcccgtcatgaccccagtgctccaggtctgtggggaccagcc

SEQ ID NO: 368424 - DNA, 120 bp, Artificial Sequence
  ENSG00000141524_33 (sequence is synthesized)
cgtcacggcgcagggttccaggcttgtggggaccagcctgtcacagcccagggctccaggcctgcaggagctgcgcttgggattgggggaatgaacccaggtggggaaatggtcaaagag

SEQ ID NO: 368425 - DNA, 120 bp, Artificial Sequence
  ENSG00000141524_34 (sequence is synthesized)
cgatgggcccagaaaagggtcagacccagatggagatgccactggctgctagcagacccccacgctgggtctagcccacccaatcccatggggatgctcctgtgctctgcagacatctgg

SEQ ID NO: 368426 - DNA, 120 bp, Artificial Sequence
  ENSG00000141524_35 (sequence is synthesized)
gtgctgccacaggggcccgacagagttggcatctgggtggatctgagccaagtggtgcttctgggcctcagcaagtagctggtgctgattctgggcagccaactgtggcagcatcttcag

SEQ ID NO: 368427 - DNA, 120 bp, Artificial Sequence
  ENSG00000141524_36 (sequence is synthesized)
gtgcgagtgctgctgggtgaagctgcgtgggcagtccagaaagtgacgtgacagtccacagggaccgacgtagggtttccagcccctatctgtgcagatgctgtcctccaaaccatcacg

SEQ ID NO: 368428 - DNA, 120 bp, Artificial Sequence
  ENSG00000141524_37 (sequence is synthesized)
gtccctctctggctggggacgtgcgcctgccactgctggcttgccagcatgatcattggttgtgacctgttgagcccatcttgccagcctcacaaaggacagtactagctgcttatgaca

SEQ ID NO: 368429 - DNA, 120 bp, Artificial Sequence
  ENSG00000141524_38 (sequence is synthesized)
ggaaagtggaagaacttggcctggatatttctggagaattaccgtgtgtgctagtcagtctttcgtgtcaaccaggccaggctgtggggcccagtgatctcatcgagaggggccgaggtg

SEQ ID NO: 368430 - DNA, 120 bp, Artificial Sequence
  ENSG00000141524_39 (sequence is synthesized)
ttgctgtgatcgtgtgctgctggaatgtggtgaacacctacagtcgatttcacctaaagatcatccttgagaatgtgggtgggcctcatcctatcagctgaaagctttaagagcaaaacc

SEQ ID NO: 368431 - DNA, 120 bp, Artificial Sequence
  ENSG00000141524_40 (sequence is synthesized)
cgaggtgtcccagagagggaattctgccttgagacggcggcttcccactcccactggatgtccagcccgcggccccacggctgggtgagcccgtcctctcctcgtttctgtctccggacc

SEQ ID NO: 368432 - DNA, 120 bp, Artificial Sequence
  ENSG00000141524_41 (sequence is synthesized)
caccgtgtggccccagaccctccagtgaggacctcccgtatttcttcagagcagcccttgcgtgctggaggcctgggcttcagtgtgtccctgggtgccctggggcatgttctgtgacct

SEQ ID NO: 368433 - DNA, 120 bp, Artificial Sequence
  ENSG00000141524_42 (sequence is synthesized)
cccagctcctcgcctcatggggccgctgtatcaagtgacacagtttgtgtgctgcgtaccatgcctggcacccatttgaggtgttgcaaggaggccatgtttgctcgatgagagcagcct

SEQ ID NO: 368434 - DNA, 120 bp, Artificial Sequence
  ENSG00000141524_43 (sequence is synthesized)
aagatctacaaactgttgttcgagtggatgggaacttgatgctattttcaggctgaatgacaagactccgcgatgcttctcggcctgggctgcacaacggaatctaccagggaggtttta

SEQ ID NO: 368435 - DNA, 120 bp, Artificial Sequence
  ENSG00000141524_44 (sequence is synthesized)
aaaacactggtacttgctggaggtggtggcgcctgtctgtaattgcagctgctccagaggctgaggcggaggattgcttgagcccaagagtttcggtttatttgctttttcagagtcttg

SEQ ID NO: 368436 - DNA, 120 bp, Artificial Sequence
  ENSG00000141524_45 (sequence is synthesized)
gcggaggaaggtgaagtaggaccgaattcctgtgccgaagaggcctgcagtgggagagcagggtgggtcagggaggccggggccggggctggggccgcgctgagagtccaagggcgggcc

SEQ ID NO: 368437 - DNA, 120 bp, Artificial Sequence
  ENSG00000141524_46 (sequence is synthesized)
ggggtgcccgccaggctcccacccgcccgagtccggaggtaccgctgacagtcacctgggggtgctgcgtgggcccgaggtttgcggtgcctgcgggcggaaggggtgggaggggggagg

SEQ ID NO: 368438 - DNA, 120 bp, Artificial Sequence
  ENSG00000141524_47 (sequence is synthesized)
gctgccactgaggtcacagagttagtaacccaaggcagagccagtacgtggcagggctggttttaaattgagtcaggctggctctgggctgctgattacatttcccttttcactttggcc

SEQ ID NO: 368439 - DNA, 120 bp, Artificial Sequence
  ENSG00000141524_48 (sequence is synthesized)
actaggaagcttagatccacacatacgcccacttcctggctcttggtttttccttgtccttgtttggtggccctttcaccttttcttttatgtttttgctgcttgcgatgttgaatacac

SEQ ID NO: 368440 - DNA, 120 bp, Artificial Sequence
  ENSG00000141524_49 (sequence is synthesized)
gccgctctgccacctccggggctcagaaatgagagagaatcctgctgcggtcgaattcgggcccagccccgctccaactctcagagggacacacagccacggcctcagtctccccatctg

SEQ ID NO: 368441 - DNA, 120 bp, Artificial Sequence
  ENSG00000141524_50 (sequence is synthesized)
tcaaatggggtgaaagatccaaagggcacagaaagtctggaccggcacaggcaaagaaagccaagacctgctgcaccccgcatccacctgtgcctgggcccaccgtcaccccaaggagag

SEQ ID NO: 368442 - DNA, 120 bp, Artificial Sequence
  ENSG00000141524_51 (sequence is synthesized)
acaattccctctcttctccacgtggcagtttgcccttccggaagagcctgtgtcccaaaccccacagttcctgggactcggcatctgccacatctgactctggatgtcgggggaccccct

SEQ ID NO: 368443 - DNA, 120 bp, Artificial Sequence
  ENSG00000141524_52 (sequence is synthesized)
aggttagataagagtggggatggataaggaagcagggaagatgttttggtcattgggaccagcagtgcaaaggccctgaggtgagcccagcatcttctggtccatgtctcgctgggaggc

SEQ ID NO: 368444 - DNA, 120 bp, Artificial Sequence
  ENSG00000141524_53 (sequence is synthesized)
gcaggtgtgtggccgcacatgaaaacatcatttggtgctggagctgatactggttgtttagctccgggtgtatccaaacctacttaggatgaggccggtgtgaccaagcccctggtgggg

SEQ ID NO: 368445 - DNA, 120 bp, Artificial Sequence
  ENSG00000141524_54 (sequence is synthesized)
ggaggtgagggggtcctgggcggactgggtggtgagtgttctccccttagtggccgggacgtgtggccgggaggttctcaggcctggacctttcccatcagggccctgtgtctccaccct

SEQ ID NO: 368446 - DNA, 120 bp, Artificial Sequence
  ENSG00000141524_55 (sequence is synthesized)
gggccctgtgtctccacccttcagaggaagactcaggaaatagaaccgaactcatttttagattggaaaggaaaacaggtttcaaagtgatgtgtatggccaggcatggtggctcatgcc

SEQ ID NO: 368447 - DNA, 120 bp, Artificial Sequence
  ENSG00000141524_56 (sequence is synthesized)
tcgcgggatgcccttaagcctggctgagaaacgcagcctgcggtgagcagccccgaccctgaccatgccgccgctgctgcgcccccagacccacttcctcagctgggctaggtggtgggg

SEQ ID NO: 368448 - DNA, 120 bp, Artificial Sequence
  ENSG00000141524_57 (sequence is synthesized)
ctcctcacaggcgcggtgaggaagccctaggactgggggacggggggtgcctgtcttctgctaccctggtaccgtgttcccttcttgtcccagctcccctggggcccccaacccttgccc

SEQ ID NO: 368449 - DNA, 120 bp, Artificial Sequence
  ENSG00000141524_58 (sequence is synthesized)
cgctgtgactccaggtggccacagccagctccccgcctccccctcaatgaccctggatgctcatcgtgctggggttcccatggggctggaggcccaagattgctgtggccaaggcccctc

SEQ ID NO: 368450 - DNA, 120 bp, Artificial Sequence
  ENSG00000141524_59 (sequence is synthesized)
cctgtttccctcactgcccctgcctggcctcctcctgctctgcccctgtggctgtcaggcctgagggtcgggtggggcgtggggaaagtccctgactcggctggatctccctgtggcagg

SEQ ID NO: 368451 - DNA, 120 bp, Artificial Sequence
  ENSG00000141524_60 (sequence is synthesized)
ccattggtgagtgggaccctcagcctcggcctcggccccggccccgagttgaccccagtccctggggctgggctgggcttcctgccaggcatctccctgggtagtggctgctcccgtagc

SEQ ID NO: 368452 - DNA, 120 bp, Artificial Sequence
  ENSG00000141524_61 (sequence is synthesized)
tcagagccaggcccagggcgggctcctagcccatcccatctgctgcctgggggcccagcacagccccatgtggccctcgctgggctccaaaaatgactccagagtcatcacggggtaaaa

SEQ ID NO: 368453 - DNA, 120 bp, Artificial Sequence
  ENSG00000141524_62 (sequence is synthesized)
ataggctttcggaatgcagtggtgcctgaagtctttgttgaaaggattttcctgggtcctgggaaggggtgagggacgcagaggcctgtggtgagcccatcctgaggggagggaggcctg

SEQ ID NO: 368454 - DNA, 120 bp, Artificial Sequence
  ENSG00000141524_63 (sequence is synthesized)
agagcctggcatggcagcgaccttcagcagatggaggtgctgttggcatcacccgtttgcgtgcaagtgaccggcaggcttctgtcttcctctgtaaatgaggaggctgcagggagcagg

SEQ ID NO: 368455 - DNA, 120 bp, Artificial Sequence
  ENSG00000141524_64 (sequence is synthesized)
gtccaggctctgcctggacgcacagccctggtcgcccttccctcttgagctcccccagggcttggaggggtgctgaggggtagcaggatggtggcagagcgcagcctttccccacagacc

SEQ ID NO: 368456 - DNA, 120 bp, Artificial Sequence
  ENSG00000141524_65 (sequence is synthesized)
ggcagacctgcgactggcccagtcgcccctggggccctttgccactcccttggcaaggagagccgagacctcagttcccggcggctcttgcggggcacaggaatgggtggtgtggacagc

SEQ ID NO: 368457 - DNA, 120 bp, Artificial Sequence
  ENSG00000141524_66 (sequence is synthesized)
actcccccggccccggcagacctgcgactggcccagtcgcccctggggccctttgccactcccttggcaaggagagccgagacctcagttcccggcggctcttgcggggcacagatgggg

SEQ ID NO: 368458 - DNA, 120 bp, Artificial Sequence
  ENSG00000141524_67 (sequence is synthesized)
acctggtgagggtcctctgcttgcctcctactgtctggcccctcggtcagtgcccctttccccccgggggtcctgtacctgcctccccctggggccacagccaggcccggccatggaccc

SEQ ID NO: 368459 - DNA, 120 bp, Artificial Sequence
  ENSG00000141524_68 (sequence is synthesized)
tggagtgatgcagaccctaaccccggggactcagttttggccactgtcacatgccctgcccgtggtctggaaccagcctgatctcggggaggggagggcactggagcagcccctgaactg

SEQ ID NO: 368460 - DNA, 120 bp, Artificial Sequence
  ENSG00000141526_0 (sequence is synthesized)
agtcagttaggtaacaggccacgggccccgggctcaggccactgcacggacccagggaacgggctgacagtccagcagaggcctcagcgaggcggcggcgctgcgcacaaacctgaggac

SEQ ID NO: 368461 - DNA, 120 bp, Artificial Sequence
  ENSG00000141526_1 (sequence is synthesized)
ctaggcgggtgaggcggaaccaaccctcctggccatgggaggggccgtggtggacgagggccccacaggcgtcaaggcccctgacggcggctggggctgggccgtgctcttcggctgttt

SEQ ID NO: 368462 - DNA, 120 bp, Artificial Sequence
  ENSG00000141526_2 (sequence is synthesized)
cgtcatcactggcttctcctacgccttccccaaggccgtcagtgtcttcttcaaggagctcatacaggagtttgggatcggctacagcgacacagcctggatctcctccatcctgctggc

SEQ ID NO: 368463 - DNA, 120 bp, Artificial Sequence
  ENSG00000141526_3 (sequence is synthesized)
catgctctacgggacaggtccgctctgcagtgtgtgcgtgaaccgctttggctgccggcccgtcatgcttgtggggggtctctttgcgtcgctgggcatggtggctgcgtccttttgccg

SEQ ID NO: 368464 - DNA, 120 bp, Artificial Sequence
  ENSG00000141526_4 (sequence is synthesized)
gagcatcatccaggtctacctcaccactggggtcatcacggggttgggtttggcactcaacttccagccctcgctcatcatgctgaaccgctacttcagcaagcggcgccccatggccaa

SEQ ID NO: 368465 - DNA, 120 bp, Artificial Sequence
  ENSG00000141526_5 (sequence is synthesized)
cgggctggcggcagcaggtagccctgtcttcctgtgtgccctgagcccgctggggcagctgctgcaggaccgctacggctggcggggcggcttcctcatcctgggcggcctgctgctcaa

SEQ ID NO: 368466 - DNA, 120 bp, Artificial Sequence
  ENSG00000141526_6 (sequence is synthesized)
ctgctgcgtgtgtgccgcactcatgaggcccctggtggtcacggcccagccgggctcggggccgccgcgaccctcccggcgcctgctagacctgagcgtcttccgggaccgcggctttgt

SEQ ID NO: 368467 - DNA, 120 bp, Artificial Sequence
  ENSG00000141526_7 (sequence is synthesized)
gctttacgccgtggccgcctcggtcatggtgctggggctcttcgtcccgcccgtgttcgtggtgagctacgccaaggacctgggcgtgcccgacaccaaggccgccttcctgctcaccat

SEQ ID NO: 368468 - DNA, 120 bp, Artificial Sequence
  ENSG00000141526_8 (sequence is synthesized)
gcgggcttcgtggcggggcttgggaaggtgcggccctactccgtctacctcttcagcttctccatgttcttcaacggcctcgcggacctggcgggttctacggcgggcgactacggcggc

SEQ ID NO: 368469 - DNA, 120 bp, Artificial Sequence
  ENSG00000141526_9 (sequence is synthesized)
ctcgtggtcttctgcatcttctttggcatctcctacggcatggtgggggccctgcagttcgaggtgctcatggccatcgtgggcacccacaagttctccagtgccattggcctggtgctg

SEQ ID NO: 368470 - DNA, 120 bp, Artificial Sequence
  ENSG00000141526_10 (sequence is synthesized)
ctgatggaggcggtggccgtgctcgtcgggcccccttcgggaggcaaactcctggatgcgacccacgtctacatgtacgtgttcatcctggcgggggccgaggtgctcacctcctccctg

SEQ ID NO: 368471 - DNA, 120 bp, Artificial Sequence
  ENSG00000141526_11 (sequence is synthesized)
attttgctgctgggcaacttcttctgcattaggaagaagcccaaagagccacagcctgaggtggcggccgcggaggaggagaagctccacaagcctcctgcagactcgggggtggacttg

SEQ ID NO: 368472 - DNA, 120 bp, Artificial Sequence
  ENSG00000141526_12 (sequence is synthesized)
cgggaggtggagcatttcctgaaggctgagcctgagaaaaacggggaggtggttcacaccccggaaacaagtgtctgagtggctgggcggggccggcaggcacagggaggaggtacagaa

SEQ ID NO: 368473 - DNA, 120 bp, Artificial Sequence
  ENSG00000141526_13 (sequence is synthesized)
gccggcaacgcttgctatttattttacaaactggactggctcaggcagggccacggctgggctccagctgccggcccagcggatcgtcgcccgatcagtgttttgagggggaaggtggcg

SEQ ID NO: 368474 - DNA, 120 bp, Artificial Sequence
  ENSG00000141526_14 (sequence is synthesized)
gggtgggaaccgtgtcattccagagtggatctgcggtgaagccaagccgcaaggttacaaggcatcctcaccaggggccccgcctgctgctcccaggtggcctgcggccactgctatgct

SEQ ID NO: 368475 - DNA, 120 bp, Artificial Sequence
  ENSG00000141526_15 (sequence is synthesized)
caaggacctggaaacccatgcttcgagacaacgtgactttaatgggagggtgggtgggccgcagacaggctggcagggcaggtgctgcgtggggccctctccagcccgtcctaccctggg

SEQ ID NO: 368476 - DNA, 120 bp, Artificial Sequence
  ENSG00000141526_16 (sequence is synthesized)
ctcacatggggcctgtgcccacccctcttgagtgtcttggggacagctctttccacccctggaagatggaaataaacctgcgtgtgggtggagtgttaggaccaacggtttcctaggagt

SEQ ID NO: 368477 - DNA, 120 bp, Artificial Sequence
  ENSG00000141526_17 (sequence is synthesized)
acctggggaaacggaagttcagggagggcgaggccgtgccccacatccaggcagcgcaggccgcgggccgctcccctagccaggaagagccgccgtccgcaccgggaccggagaggaagc

SEQ ID NO: 368478 - DNA, 120 bp, Artificial Sequence
  ENSG00000141526_18 (sequence is synthesized)
tccttggccttgcatggcctgtttatttttaaaagtgcaaacttgcaaccccaaacaagctggggccctgaggccgtcaacccctccagtctcccctgtgacccgcagtctgcgtcctgt

SEQ ID NO: 368479 - DNA, 77 bp, Artificial Sequence
  ENSG00000141526_19 (sequence is synthesized)
cccctccagtctcccctgtgacccgcagtctgcgtcctgttcccagtttcattcctcaagtgcatatatttttattt

SEQ ID NO: 368480 - DNA, 62 bp, Artificial Sequence
  ENSG00000141526_20 (sequence is synthesized)
gcatatatttttaatatcttgtagttaccctgctgtatactgtcatcttagggaccttttaa

SEQ ID NO: 368481 - DNA, 120 bp, Artificial Sequence
  ENSG00000141526_21 (sequence is synthesized)
agttaccctgctgtatactgtcatcttagggaccttttaaacaataccagtatgagcgggacctaccctgctgctcagtgaccccaggcagtgtgtcctaaggtggtgtgtcctgaggcg

SEQ ID NO: 368482 - DNA, 120 bp, Artificial Sequence
  ENSG00000141526_22 (sequence is synthesized)
tgcgacactctgtcctgtcccaggcactgtggtgggggcatccggtgtccaggtgcagaggcaaaagctgctcccgggtttcccagaaatggttccgaggcctgggtcccagagagccag

SEQ ID NO: 368483 - DNA, 120 bp, Artificial Sequence
  ENSG00000141526_23 (sequence is synthesized)
tgcaggttggggggtggacctctggctctgtgggggggtctgttctgctccagtgggccgtgtctgccttgtcatcatccagacagccacagctggctcctgggtcccctcgtcaagcag

SEQ ID NO: 368484 - DNA, 120 bp, Artificial Sequence
  ENSG00000141526_24 (sequence is synthesized)
catttcccagtaacagtgacttcgtggaacacttaggaagcccttaaaaaccatcctcggacctctgaggcagggactccagggggcacagcacctgtggtggggacaggcaggcaggct

SEQ ID NO: 368485 - DNA, 120 bp, Artificial Sequence
  ENSG00000141526_25 (sequence is synthesized)
ggatgcggggagggcccgggaggaggagtgaggagccacgcacggaactgctcagactctcccagcaaaggtcctggcccttgtgcatgcctttagttacatgtctgccttagaggcaaa

SEQ ID NO: 368486 - DNA, 120 bp, Artificial Sequence
  ENSG00000141526_26 (sequence is synthesized)
gacgagccgtcacgggggacccaccgggtcaggggtctgcggacacgcttgcaggaggaacccaaggaaagggggtgggggtggagccccacagattgcgtcgtgggtgggcgtggagct

SEQ ID NO: 368487 - DNA, 120 bp, Artificial Sequence
  ENSG00000141526_27 (sequence is synthesized)
tgcacagcaggcctgctgctgcctcccagggcgctggttcacagcacggtcccagcagggagaggctgagccggttggactagaccacccaaggtctcaggttgcagctccctggtgagg

SEQ ID NO: 368488 - DNA, 120 bp, Artificial Sequence
  ENSG00000141526_28 (sequence is synthesized)
agaggacaaggtgacttctgggtggggtggggcatgaagatggaagtctgacctcgggttccaacttgactcaaacgagctgagctcctggagtttagaaagggacaccagcttcagaca

SEQ ID NO: 368489 - DNA, 120 bp, Artificial Sequence
  ENSG00000141526_29 (sequence is synthesized)
tcgtgggggctggcatggtttgctctcgtgggctggatgggagcctccctagcccctcctgatttcaggctgcagcctatgggtcactccaggcacaggtggggtgagtcaagatctcac

SEQ ID NO: 368490 - DNA, 120 bp, Artificial Sequence
  ENSG00000141526_30 (sequence is synthesized)
tggaggagtcactgagcaagagggccggtgggaggcaagggggcatccagggacaaggggccagctctgcccccacttccccaccccacccactctaatactgcagcccctgtgcttcca

SEQ ID NO: 368491 - DNA, 120 bp, Artificial Sequence
  ENSG00000141526_31 (sequence is synthesized)
actgccccctccagcctggggcccagcccctcaccgccagagactgcccgcctcctcttgggcaagctcctggtgggctccactgaagccaaagtgggcccttgggggcaggagagccag

SEQ ID NO: 368492 - DNA, 120 bp, Artificial Sequence
  ENSG00000141526_32 (sequence is synthesized)
agcaaggcacgctccacctagatttagaccgggagagacctggaggatgccaaccccagaggtcctggggcgagctcagtgctggggaccggaggtgccgtctgctgccagaatcatggt

SEQ ID NO: 368493 - DNA, 120 bp, Artificial Sequence
  ENSG00000141526_33 (sequence is synthesized)
gtgcgtggtccctgcccagcacgggtcagccagagcgagccagggcagaaatgacggccaggtcgatgttcctgtcgggggctgcttgtcccaggaggtaatctgagtcctggccgagcc

SEQ ID NO: 368494 - DNA, 120 bp, Artificial Sequence
  ENSG00000141526_34 (sequence is synthesized)
caaaaaagccactgccctttagagccagctgtgagggtgcaggaggcagtgcagagggagtgggacccacagctgctagcctccctccaaaccctcctgcctccaccagacaccaggtca

SEQ ID NO: 368495 - DNA, 120 bp, Artificial Sequence
  ENSG00000141526_35 (sequence is synthesized)
gggggccacaagtgtgggtgccgggcagctgcccctcagctgagctgccgggccacccagctcgtgtccctcccctgccaggctgcagctgggatggtcacccgggcagcctgagtcagc

SEQ ID NO: 368496 - DNA, 120 bp, Artificial Sequence
  ENSG00000141526_36 (sequence is synthesized)
tcgtagcaggggcaggcgctgcatggagggggctgcggggcaggtgcctggaggccgctgtgccagggtggcctctgaaatgtgccagggagcccctacgtggtggttagatgggagctg

SEQ ID NO: 368497 - DNA, 120 bp, Artificial Sequence
  ENSG00000141526_37 (sequence is synthesized)
aggtggaacaagccactttattcactgctgtgtttaagaaacaggaccctcctgccttccctttttcgcccctctgcctggctggcagtgtgcgtggtgtggtcagtgcccagggctggt

SEQ ID NO: 368498 - DNA, 120 bp, Artificial Sequence
  ENSG00000141526_38 (sequence is synthesized)
ctttgcaccctgtcctccatccagcccggcccagcgcttgggcttgtcctggacacctaacacccacctgccctcgtggccagcagtggcctgcgtggctgggagcccggtcagaggccg

SEQ ID NO: 368499 - DNA, 120 bp, Artificial Sequence
  ENSG00000141526_39 (sequence is synthesized)
ccggggccctcagtaggtgcgtcgtgggcgctggggacggcagcgggtgccctggcgggccgcgtgcagccggagagatgccatgtccctgctcctctgcaatgaaaagcaagcgaaaag

SEQ ID NO: 368500 - DNA, 120 bp, Artificial Sequence
  ENSG00000141526_40 (sequence is synthesized)
gctctacgggacaggtgagggtggcctcacaccgggccccctgtccggggctctgctggcggatcctgctgggcgcgtgtagctgggctcagcaacagggccttccgcctgctccccagg

SEQ ID NO: 368501 - DNA, 120 bp, Artificial Sequence
  ENSG00000141526_41 (sequence is synthesized)
gaaccctggagggaagcccttggggccaggatcctgctgggcagcaacatgctctccacggggccaacccaggcagggcgcgaagtccatcctggcccctgtccaaacgggtcggctgta

SEQ ID NO: 368502 - DNA, 120 bp, Artificial Sequence
  ENSG00000141526_42 (sequence is synthesized)
cgggcccccttcgggaggggtcctgctgtcacccaggctggagggcagtggcaccatcacagctccctgcagccttaacctcccgaactctagccatcctcctgcctcagcctccagagt

SEQ ID NO: 368503 - DNA, 120 bp, Artificial Sequence
  ENSG00000141526_43 (sequence is synthesized)
ctacagatgtaagccactgcacctggcctgtttctttttcctccctaccccccaaatgtctcagcagaaatcaccccttttgttagctgtaagtaacaatgtaccccgtcatccatggca

SEQ ID NO: 368504 - DNA, 120 bp, Artificial Sequence
  ENSG00000141526_44 (sequence is synthesized)
ccaaggggcccagcaggcggcgctcacgtgtcatcatggcctgcgctcggggagcctgcccacggggtgcccctggtgccccgcggggggaggggtggtgtgggaaggggaggccggctc

SEQ ID NO: 368505 - DNA, 120 bp, Artificial Sequence
  ENSG00000141526_45 (sequence is synthesized)
aggcctctggaggacagcagggcgggtggctgcggggtgtcccggccccacctcgttgtccccctctcgagtgggtgggtggcaggggctctgcaccctgggagcctgagcctgtgggaa

SEQ ID NO: 368506 - DNA, 120 bp, Artificial Sequence
  ENSG00000141526_46 (sequence is synthesized)
cggcgagaggcggcgagaggcgggctgaggcggcccagcggcggcaggtgaggcggaaccaaccctcctggccatgggaggggccgtggtggacgagggccccacaggcgtcaaggccgt

SEQ ID NO: 368507 - DNA, 80 bp, Artificial Sequence
  ENSG00000141526_47 (sequence is synthesized)
agaggcgggcagaggcggcgagaggcggcgagaggcgggctgaggcggcccagcggcggcaggtaggcgcggccgcgatg

SEQ ID NO: 368508 - DNA, 120 bp, Artificial Sequence
  ENSG00000141526_48 (sequence is synthesized)
gcaagggggcgacctcggggtccgcgctctcacccccaccccgcccactttgtccatcaggtccgggggcgcccggggcatggactagccttctcgaccccgagcgggccccaccgaggg

SEQ ID NO: 368509 - DNA, 120 bp, Artificial Sequence
  ENSG00000141526_49 (sequence is synthesized)
ctagccttctcgaccccgagcgggccccaccgagggctcccgagagccagccgcgcccctccgcgccctcgcatacctggctgcccagtctcgtctcccccggtccggcccggcgcccac

SEQ ID NO: 368510 - DNA, 120 bp, Artificial Sequence
  ENSG00000141526_50 (sequence is synthesized)
gagatggctgcgccggcggccaagcccggtccgggtataaatagctcggtccgcggtggcggggggcgcgggctatatttggtggggctgctgcagccctccctgtatgggtggcctccc

SEQ ID NO: 368511 - DNA, 120 bp, Artificial Sequence
  ENSG00000141526_51 (sequence is synthesized)
cgagggagtggggagcacttgcgctcgggccgtggcgctttcccctgttcgcaacaccctgaacactccccgacccacacccgcccttgggcaatgactaacagcccgagaccgtgcagg

SEQ ID NO: 368512 - DNA, 120 bp, Artificial Sequence
  ENSG00000141526_52 (sequence is synthesized)
gaagtgggggaccctctccagagccaggctgggctccctgggttcgccctacctccacccctggcccccagctcgtgggaaaaccaggcgcagcctttggtagcctcccacttcctaacc

SEQ ID NO: 368513 - DNA, 120 bp, Artificial Sequence
  ENSG00000141526_53 (sequence is synthesized)
cacgcctcagtttccctatacgaaaagtgggttggtcaggagcctccctgggtgttgggccagtcaagagacaggagccgcagagtggaagggaagcccttagctctggccggggcctcc

SEQ ID NO: 368514 - DNA, 120 bp, Artificial Sequence
  ENSG00000141526_54 (sequence is synthesized)
aggggtggctggagtcggtgagggacgatggggggagccgaggggcggctgtcctcctctctgtcccagaggcatgggctgaaagggtccctctcctggtgatggccagagtcaggcctg

SEQ ID NO: 368515 - DNA, 120 bp, Artificial Sequence
  ENSG00000141526_55 (sequence is synthesized)
ctgggcgggaaatggcagttggcccaccccaaggcccaggggcttgtccatgctgagcacaagggtgggaggtcttgtgtctgttggggccggggagtccaaggtcccagcttcactgca

SEQ ID NO: 368516 - DNA, 120 bp, Artificial Sequence
  ENSG00000141526_56 (sequence is synthesized)
caggcctggaagtcaggtgggtgctggcctgaccctgctgaaggagggtctattccgccagcgtggtgtggaggcggctgggctcgactccctcatggagggaaggaactgaggaggtgc

SEQ ID NO: 368517 - DNA, 120 bp, Artificial Sequence
  ENSG00000141526_57 (sequence is synthesized)
taggaggccgtgggggggtgtctgcccccagagaggctttgagtgcatgggggctctgccgtggcacgtgcagcgtctgtcccccagggccccatggtgtggacagagtctggggtgggc

SEQ ID NO: 368518 - DNA, 120 bp, Artificial Sequence
  ENSG00000141526_58 (sequence is synthesized)
acctggaggcctggtctcaaggcaggcttggtaacgaccccatgtgaccttgggcagggcccgccatccaggccacccagaaagccatgtggcctgcacgatcaggccagaccccactga

SEQ ID NO: 368519 - DNA, 120 bp, Artificial Sequence
  ENSG00000141526_59 (sequence is synthesized)
ggagcggggcactttactttggaggggcagctaccagagggctctatggatcccagcccagccgtcaggccggacgggtcccccctactggcctgcagtgacccttatgccaggctcggc

SEQ ID NO: 368520 - DNA, 120 bp, Artificial Sequence
  ENSG00000141526_60 (sequence is synthesized)
tggctcagcggtgggtcctggggtgacctggccacgtgggacagaagggcctgtgccgctccctccagtgaggtgccaaatgtgggccacactctgggccccagcgggggccttccgggc

SEQ ID NO: 368521 - DNA, 120 bp, Artificial Sequence
  ENSG00000141526_61 (sequence is synthesized)
agtggcgcagagccattggaggtgcccgggccctggggcaggggcggggcgggagcagacagagctcagggcgtcctcctagcgtcacctgcccgagtcaggcccatctgtgaaatgggc

SEQ ID NO: 368522 - DNA, 120 bp, Artificial Sequence
  ENSG00000141526_62 (sequence is synthesized)
cacgccgggcagccgcacgcaacggaaccgaaccgccgggctcctgctccgagacccgcagttcacgagtcgacgcccccgagtcccgagccgcgcccactggtcccacctctgcagcaa

SEQ ID NO: 368523 - DNA, 120 bp, Artificial Sequence
  ENSG00000141526_63 (sequence is synthesized)
gtggagtcggccccgccctgtggcttcgaggccccgacgcctggcgcggctcccgggctccgctgaccccggtggacccgcgcgccggcaattacggtagcgtccagtagggcgcctact

SEQ ID NO: 368524 - DNA, 120 bp, Artificial Sequence
  ENSG00000141526_64 (sequence is synthesized)
cagtagggcgcctactgcgggcaatacgggggctcctcccatggcgcggtcacgtcccccacgtcccgcggctggcggggcggggccgggcggagcatccttccctccccctcccccggg

SEQ ID NO: 368525 - DNA, 120 bp, Artificial Sequence
  ENSG00000141526_65 (sequence is synthesized)
gccgacccccgcccgcagagccgggaagccggaacccgcaggcgccctccagccgtccctccggcccgggcggggattgcgccgaggaggggcctctcctggcgagggtggagttttggg

SEQ ID NO: 368526 - DNA, 120 bp, Artificial Sequence
  ENSG00000141526_66 (sequence is synthesized)
tggagttttgggttccccccttcgccccgcacctcccgccttcctgcctcctcccggtcttcaccttcccccccgggtccccacgacgcccgctgggcggcggtggggtagggggcgcct

SEQ ID NO: 368527 - DNA, 120 bp, Artificial Sequence
  ENSG00000141526_67 (sequence is synthesized)
cctgacccgactccccttccagccttggccttcaggcactggctttagggtggaggggcggccttgcggggtccaggaggcctcggaggtgggggacggcggctctggaccagctccggc

SEQ ID NO: 368528 - DNA, 120 bp, Artificial Sequence
  ENSG00000141526_68 (sequence is synthesized)
ccccaccacctcccggccccagggcggtgacagccttgcggagaaggggtcttcaaagctctgagaccccgcagtgccagctcaggattgaagcctgcggcggcacatgcagccttcctt

SEQ ID NO: 368529 - DNA, 120 bp, Artificial Sequence
  ENSG00000141526_69 (sequence is synthesized)
tcccaaaggggacttgcgcccagccccacttggggcaccagtgggggctcctggccctggccctgggtgggagtggccaatccgcaaatgaggcctgtgtgtctgccccgccggcccctg

SEQ ID NO: 368530 - DNA, 120 bp, Artificial Sequence
  ENSG00000141526_70 (sequence is synthesized)
ccgtcgtgatgtaagcggacacagagcggcagggcacgggctgcgcgaggggtctgcgggggtcagaggtggggcgcagggcccaggcctggggcagccccttgcgcagcgtccaccccc

SEQ ID NO: 368531 - DNA, 120 bp, Artificial Sequence
  ENSG00000141527_0 (sequence is synthesized)
gctcttccttctgcccagctccgtcccacccagcagcccgcagagaaaggaggcagctggcaccacactgggctttggagacactgcggggactgtggaccccaccctgctgcacggagc

SEQ ID NO: 368532 - DNA, 120 bp, Artificial Sequence
  ENSG00000141527_1 (sequence is synthesized)
tcctgcaaaagcaaacctgagaaccttgggtcctcccagcgcccagccatgggggaactgtgccgcagggactccgcactcacggcactggacgaggagacactgtgggagatgatggag

SEQ ID NO: 368533 - DNA, 120 bp, Artificial Sequence
  ENSG00000141527_2 (sequence is synthesized)
agccaccgccacaggatcgtacgctgcatctgccccagccgcctcaccccctacctgcgccaggccaaggtgctgtgccagctggacgaggaggaggtgctgcacagcccccggctcacc

SEQ ID NO: 368534 - DNA, 120 bp, Artificial Sequence
  ENSG00000141527_3 (sequence is synthesized)
aacagcgccatgcgggccgggcacttgctggatttgctgaagactcgagggaagaacggggccatcgccttcctggagagcctgaagttccacaaccctgacgtctacaccctggtcacc

SEQ ID NO: 368535 - DNA, 120 bp, Artificial Sequence
  ENSG00000141527_4 (sequence is synthesized)
gggctgcagcctgatgttgacttcagtaactttagcggtctcatggagacatccaagctgaccgagtgcctggctggggccatcggcagcctgcaggaggagctgaaccaggaaaagggg

SEQ ID NO: 368536 - DNA, 120 bp, Artificial Sequence
  ENSG00000141527_5 (sequence is synthesized)
cagaaggaggtgctgctgcggcggtgccagcagctgcaggagcacctgggcctggccgagacccgtgccgagggcctgcaccagctggaggctgaccacagccgcatgaagcgtgaggtt

SEQ ID NO: 368537 - DNA, 120 bp, Artificial Sequence
  ENSG00000141527_6 (sequence is synthesized)
agcgcacacttccatgaggtgctgaggctgaaggacgagatgctcagcctctcgctgcactatagcaatgcgctgcaggagaaggagctggccgcctcacgctgccgcagcctgcaggag

SEQ ID NO: 368538 - DNA, 120 bp, Artificial Sequence
  ENSG00000141527_7 (sequence is synthesized)
gagctgtatctactgaagcaggagctgcagcgagccaacatggtttcctcctgtgagctggaattgcaagagcagtccctgaggacagccagcgaccaggagtccggggatgaggagctg

SEQ ID NO: 368539 - DNA, 120 bp, Artificial Sequence
  ENSG00000141527_8 (sequence is synthesized)
aaccgcctgaaggaggagaatgagaaactgcgctcgctgactttcagcctggcggagaaggacattctggagcagagcctggacgaggcgcgggggagccgacaggagctggtggagcgc

SEQ ID NO: 368540 - DNA, 120 bp, Artificial Sequence
  ENSG00000141527_9 (sequence is synthesized)
atccactcgctgcgggagcgggccgtggctgccgagaggcagcgagagcagtactgggaagagaaggaacagaccctgctgcagttccagaagagtaagatggcctgccaactctacagg

SEQ ID NO: 368541 - DNA, 120 bp, Artificial Sequence
  ENSG00000141527_10 (sequence is synthesized)
gagaaggtgaatgcgctgcaggcccaggtgtgcgagctgcagaaggagcgagaccaggcgtactccgcgagggacagtgctcagagggagatttcccagagcctggtggagaaggactcc

SEQ ID NO: 368542 - DNA, 120 bp, Artificial Sequence
  ENSG00000141527_11 (sequence is synthesized)
ctccgcaggcaggtgttcgagctgacggaccaggtctgcgagctgcgcacacagcttcgccagctgcaggcagagcctccgggtgtgctcaagcaggaagccaggaccagggagccctgt

SEQ ID NO: 368543 - DNA, 120 bp, Artificial Sequence
  ENSG00000141527_12 (sequence is synthesized)
ccacgggagaagcagcggctggtgcggatgcatgccatctgccccagagacgacagcgactgcagcctcgtcagctccacagagtctcagctcttgtcggacctgagtgccacgtccagc

SEQ ID NO: 368544 - DNA, 120 bp, Artificial Sequence
  ENSG00000141527_13 (sequence is synthesized)
cgcgagctggtggacagcttccgctccagcagccccgcgccccccagccagcagtccctgtacaagcgggtggccgaggacttcggggaagaaccctggtctttcagcagctgcctggag

SEQ ID NO: 368545 - DNA, 120 bp, Artificial Sequence
  ENSG00000141527_14 (sequence is synthesized)
atcccggagggagacccgggagccctgccgggagctaaggcaggcgacccacacctggattatgagctcctagacacggcagaccttccgcagctggaaagcagcctgcagccagtctcc

SEQ ID NO: 368546 - DNA, 120 bp, Artificial Sequence
  ENSG00000141527_15 (sequence is synthesized)
cctggaaggcttgatgtctcggagagcggcgtcctcatgcggcggaggccagcccgcaggatcctgagccaggtcaccatgctggcgttccagggggatgcattgctggagcagatcagc

SEQ ID NO: 368547 - DNA, 120 bp, Artificial Sequence
  ENSG00000141527_16 (sequence is synthesized)
gtcatcggcgggaacctcacgggcatcttcatccaccgggtcaccccgggctcggcggcggaccagatggccttgcgcccgggcacccagattgtgatggttgattacgaagcctcagag

SEQ ID NO: 368548 - DNA, 120 bp, Artificial Sequence
  ENSG00000141527_17 (sequence is synthesized)
acggcttctgctgcctgtctgtgaaggtcaacacggacggttataagaggctactccaggacctggaggccaaagtggcgacctcgggggactcattctacatccgggtcaacctggcca

SEQ ID NO: 368549 - DNA, 120 bp, Artificial Sequence
  ENSG00000141527_18 (sequence is synthesized)
tggagggcagggccaaaggggagctgcaggtgcattgcaacgaggtcctgcacgtcaccgacaccatgttccagggctgcggctgctggcatgcccaccgcgtgaactcttacaccatga

SEQ ID NO: 368550 - DNA, 120 bp, Artificial Sequence
  ENSG00000141527_19 (sequence is synthesized)
aggatactgccgcgcacggcaccatccccaactactccagggctcagcagcagctcatagccctcatccaggacatgactcagcagtgcaccgtgacccgcaagccatcttctgggggac

SEQ ID NO: 368551 - DNA, 120 bp, Artificial Sequence
  ENSG00000141527_20 (sequence is synthesized)
cacagaagctggtccgcatcgtcagtatggacaaagccaaggccagccctctgcgtttgtcctttgacaggggccagttggaccccagcaggatggagggctccagcacgtgcttctggg

SEQ ID NO: 368552 - DNA, 120 bp, Artificial Sequence
  ENSG00000141527_21 (sequence is synthesized)
ccgagagctgcctcaccctggtgccctataccctggtgcggccccatcgacccgcccggccccggcctgtgctcctcgtgcccagggcggttgggaagatcctgagcgagaaactgtgcc

SEQ ID NO: 368553 - DNA, 120 bp, Artificial Sequence
  ENSG00000141527_22 (sequence is synthesized)
tcctccaagggtttaagaagtgcctggcagagtacttgagccaggaggagtatgaggcctggagccagagaggggacatcatccaggagggagaggtgtccgggggccgctgctgggtga

SEQ ID NO: 368554 - DNA, 120 bp, Artificial Sequence
  ENSG00000141527_23 (sequence is synthesized)
cccgccatgctgtggagtccctcatggaaaagaacacccatgccctcctggacgtccagctggacagtgtctgcaccctgcacaggatggacatcttccccatcgtcatccacgtctctg

SEQ ID NO: 368555 - DNA, 120 bp, Artificial Sequence
  ENSG00000141527_24 (sequence is synthesized)
tcaacgagaagatggcaaagaagctcaagaagggcctacagcggttgggcacctcagaggagcagctcctggaggctgcgaggcaggaggagggagacctggaccgggcgccctgtctat

SEQ ID NO: 368556 - DNA, 120 bp, Artificial Sequence
  ENSG00000141527_25 (sequence is synthesized)
acagcagcctggctcctgacggctggagcgacctggacggcctgctcagctgtgtccgccaggccatcgccgacgagcagaagaaggtggtgtggacggagcagagcccccgatgatgca

SEQ ID NO: 368557 - DNA, 120 bp, Artificial Sequence
  ENSG00000141527_26 (sequence is synthesized)
ccgtgccccttcccgggactgtgggggcttctgtgtgcctgttaatgcagtcctgttcctcagcccaggccctcttggcacagctgtgggctccttggcacatgaggccggctctcccca

SEQ ID NO: 368558 - DNA, 120 bp, Artificial Sequence
  ENSG00000141527_27 (sequence is synthesized)
ctggctggggtctaaccttgaaccctcaccacgtgcaggtcacacacagtgaagccacttgtaactgcacacttttctgtggaaacatcttcaccctttaccaggcttggcatggtctga

SEQ ID NO: 368559 - DNA, 120 bp, Artificial Sequence
  ENSG00000141527_28 (sequence is synthesized)
actggaaaccctgagaatgtttctgcagtgggacaggagggacgtcttcccatgccttccctagaaccggaggccccggacttctctggaaaaccgcctgtctgcaggcccgattcaaat

SEQ ID NO: 368560 - DNA, 120 bp, Artificial Sequence
  ENSG00000141527_29 (sequence is synthesized)
ctatgggggctgcacttcccttttacattttgatgtgtcaaaggcttttggagtgaccaaaagcacagaggcagcgggtggggcgcctgggtggtccccaaggtcgctgccacccttgcc

SEQ ID NO: 368561 - DNA, 120 bp, Artificial Sequence
  ENSG00000141527_30 (sequence is synthesized)
cggggcagaggcagaagcccacatatgctgtgacgctggccaccttttctcagcttctgaggctgcgatgcctcaggaactccagtttacagagaccagtgtgtttacttgtaaataaag

SEQ ID NO: 368562 - DNA, 120 bp, Artificial Sequence
  ENSG00000141527_31 (sequence is synthesized)
cctctgcgtggtggagacggtactttcagtgggtctgtgccccgtggcccctgtgcctgttcggtgggggtgtcccagagaagcctggcaccagtacccccgtacaaggcccagcggact

SEQ ID NO: 368563 - DNA, 120 bp, Artificial Sequence
  ENSG00000141527_32 (sequence is synthesized)
ctgccttcccctgacctggctttgcaccccagcccttcttgggccaaacatctttactccaccttcagggctcggggaggacccaggtccgccagcacctggccttgcccctgcctcctg

SEQ ID NO: 368564 - DNA, 120 bp, Artificial Sequence
  ENSG00000141527_33 (sequence is synthesized)
gggctgttgcagactgaatgtcattttgacagcagtgtccaagaatcaggaagctgttctagaattcaggttggtatcatcataaatgagttcagaaaaagaacttctgtatattttact

SEQ ID NO: 368565 - DNA, 89 bp, Artificial Sequence
  ENSG00000141527_34 (sequence is synthesized)
agagattgggccacattcagtcctcgcttccctgggagggggaagagtttcactctggctccttctgcaacctccacttcccaggttca

SEQ ID NO: 368566 - DNA, 120 bp, Artificial Sequence
  ENSG00000141527_35 (sequence is synthesized)
ctcctgagtagctgggactacaggcgagcaccaccacagccggctaatttttctatttctagtagaaatggggtttcaccatgttggcaggctggtctcgaactctgacctcaagtgatc

SEQ ID NO: 368567 - DNA, 120 bp, Artificial Sequence
  ENSG00000141527_36 (sequence is synthesized)
cctcaagtgatctgcctgcctcagcctctgaaagtgctggattgcaggcgtgagccaccgcaccaggcctaaacagatttctttacaatctaccaccatgaacagcaagcattagcattg

SEQ ID NO: 368568 - DNA, 120 bp, Artificial Sequence
  ENSG00000141527_37 (sequence is synthesized)
gcaaacctgagaaccttgcatacagatccctgcaagaggcatctgtctccagtggtccagcctctccttccaaatgaaaagaatcaagtcacaggaattcatgggtctgtaaggaatcgc

SEQ ID NO: 368569 - DNA, 120 bp, Artificial Sequence
  ENSG00000141527_38 (sequence is synthesized)
tcccatctgtgcccaggagattaacaaaggcggtggctgcagctctgtgagcagtggagaaaaattaggcacaacctgatatcctcccacaggagcggtcctcccagcgcccagccatgg

SEQ ID NO: 368570 - DNA, 120 bp, Artificial Sequence
  ENSG00000141527_39 (sequence is synthesized)
cgggcacccagattgtgatgacaggaaagtgcttatcacaaagaacccccgatctcgactggggaagggttggcagttgactctctggccagcactatgtgtagcacgcatcactagagg

SEQ ID NO: 368571 - DNA, 120 bp, Artificial Sequence
  ENSG00000141527_40 (sequence is synthesized)
gcgcacggcaccatccccaactactccaggtgagcagctgcctcgagctcggtgcgtccccagagaggcccacagggaaatggcacccagcctgcctcggcttcctcctcctgcccagca

SEQ ID NO: 368572 - DNA, 120 bp, Artificial Sequence
  ENSG00000141527_41 (sequence is synthesized)
atagagggtgggcgtggtgagacccccctaaggagggaagcctgccaagatcactgctgaagatgttgtttctttgtgatggatgctttatatattgcaaatgaaatgttcattctagaa

SEQ ID NO: 368573 - DNA, 120 bp, Artificial Sequence
  ENSG00000141527_42 (sequence is synthesized)
gggggcttggccctcaggctgtggggtttctgacaggtggtttagttaaggtgaggctaagaacaagagatgaaatttagtgactcatctcacccactttctctttacctccttccttcc

SEQ ID NO: 368574 - DNA, 120 bp, Artificial Sequence
  ENSG00000141527_43 (sequence is synthesized)
ctttctctttacctccttccttcctgctgttccccagaccccaaaattggcagaattaaaagctgctggaacagaattaaaagctggaactgggcacagtggctcattcctgtaatccca

SEQ ID NO: 368575 - DNA, 72 bp, Artificial Sequence
  ENSG00000141527_44 (sequence is synthesized)
ggggagaccctgtctcaaacaaacaaaaataaaagccgctggaggtgcatcacaatgcccgacttggtgggt

SEQ ID NO: 368576 - DNA, 120 bp, Artificial Sequence
  ENSG00000141527_45 (sequence is synthesized)
aagccgctggaggtgcatcacaatgcccgacttggtgggtttactgcagcgactgtgttctggagtggacttggccaattgtaaagcatgggattcgcgttaaggatgggggaaagaaac

SEQ ID NO: 368577 - DNA, 120 bp, Artificial Sequence
  ENSG00000141527_46 (sequence is synthesized)
cttggcgtctcctcctcggcccctctcagtagattggtatttattgagatattccttccataagcattcactgggcccagggcactggccatcttgcagcccggattgtgtctctgttta

SEQ ID NO: 368578 - DNA, 120 bp, Artificial Sequence
  ENSG00000141527_47 (sequence is synthesized)
taagctccttcctgggaagtgagtgtcagaggggaatgacctgtctgctggtttctccctcgctgtgaaactgccggtagatctgttgaaggagaaggctgacctggtaaagggaggaac

SEQ ID NO: 368579 - DNA, 120 bp, Artificial Sequence
  ENSG00000141527_48 (sequence is synthesized)
tggtgtcctcagaggttgccagcttcctgtgttccttctccttggccatgaatctgcacttttcccaggcatgatgggtggcttttccgtggcttctctcctgcccggtgtagagtggca

SEQ ID NO: 368580 - DNA, 120 bp, Artificial Sequence
  ENSG00000141527_49 (sequence is synthesized)
agactgcatccgtccacacacctgaccgtgcagttgccgccatcttctcgggattctgcttgcctagggcaggcctctggggaagccagcaccccaggctgacctctctctgccccaggc

SEQ ID NO: 368581 - DNA, 120 bp, Artificial Sequence
  ENSG00000141527_50 (sequence is synthesized)
cctggattatgagctcctagacacggcaggtgagcacgcccaaccctgaacctccacagcagtccacctcccctgggcagagcagggagctgatgagaaagccggggcctctctccaggg

SEQ ID NO: 368582 - DNA, 120 bp, Artificial Sequence
  ENSG00000141527_51 (sequence is synthesized)
aaagggcagatagaagcagagctcaacttctgccctgggccttgaccttggcctcgaccttgcactttgggaaagtcccgcctgccagccagcgtaagccaaaggccggctgcgctctgt

SEQ ID NO: 368583 - DNA, 120 bp, Artificial Sequence
  ENSG00000141527_52 (sequence is synthesized)
ctgctggtgtccttgtgtttttccctagagccaggggagttgtgtctgatccacgccctgctcagcacccagccccctgctctgatctgtaacgcttgggcttcccagtggtttcagaag

SEQ ID NO: 368584 - DNA, 120 bp, Artificial Sequence
  ENSG00000141527_53 (sequence is synthesized)
gcagcaggcagggtggcttagtggtgccaggctgaggcgaggcacagcgtgacatctacctgcggggagcatctctcctctcaggcgctggccctgaggcctcgcgcttctcctgtagct

SEQ ID NO: 368585 - DNA, 120 bp, Artificial Sequence
  ENSG00000141527_54 (sequence is synthesized)
catttctgtttgtgattggaccggccctctctgcttcccaagtccatgggcccgtcatgggtgggtgccttaatcctttccacctcggcgcgaccggctcccagccttgggccttgcaca

SEQ ID NO: 368586 - DNA, 120 bp, Artificial Sequence
  ENSG00000141527_55 (sequence is synthesized)
cagtaggtgctttgctccccatttggaattcaccccatggccaccagggggcgcaagtgccctgcgctgcccctgtgccttctgtgggtcgcagaatcagaaatcttcatctttggggac

SEQ ID NO: 368587 - DNA, 120 bp, Artificial Sequence
  ENSG00000141527_56 (sequence is synthesized)
taggtgaaccctttcgtgggtttttcagtctcgaggcaggaagccccctgagtgctaaaagcatcattaggaggaagggtgagaaatgcccccagctcctgatcaggggagaagctgttt

SEQ ID NO: 368588 - DNA, 120 bp, Artificial Sequence
  ENSG00000141527_57 (sequence is synthesized)
gtccagaggaaggaggccagcaggacctggtgggatagtccctggaaggccagggccctgcacacagactgcaagtcaacacaggagctttgctgtctgaacagccccggtcccgcgttc

SEQ ID NO: 368589 - DNA, 120 bp, Artificial Sequence
  ENSG00000141527_58 (sequence is synthesized)
cgatgcagatccactctgggctgggcctctgctctttcctgggctgacgtaaagcgttctgctcatttatagatgagagtcgtgccgtgcagaacccagcatgtcacccgtggtgctgct

SEQ ID NO: 368590 - DNA, 120 bp, Artificial Sequence
  ENSG00000141527_59 (sequence is synthesized)
gccatgcggcgcttctgaccaggggtctttgcatgaggccccttgacagggctgctctgggtggtcactttgggtgtgtacagtaaaatacacgtgacataaaattcactattttaacca

SEQ ID NO: 368591 - DNA, 120 bp, Artificial Sequence
  ENSG00000141527_60 (sequence is synthesized)
tctctgaatgctgagttctgccttaaaacagcatgggtcatgctagatgaaagggatctctgttttatactctcatctcttcgctattgccgtgggatgaaagacagcagaaggaaggtg

SEQ ID NO: 368592 - DNA, 120 bp, Artificial Sequence
  ENSG00000141527_61 (sequence is synthesized)
tctaagttcagaacaaagtgagcaagaccagctggctgctgttggtagcagaggcacagccagcctgtcatggcactggggggccgaggtgagctgtgccccctcctcctgggcttgtga

SEQ ID NO: 368593 - DNA, 120 bp, Artificial Sequence
  ENSG00000141527_62 (sequence is synthesized)
aagctgacgagaggaaactgctggggagggtgaaatgggtggtgctgacctggtagaaactccacgggcctcaaagcggaacctttcccgaattaaccagcctgtctggcctgtctttgg

SEQ ID NO: 368594 - DNA, 120 bp, Artificial Sequence
  ENSG00000141527_63 (sequence is synthesized)
tgtgaggattctgcgtaatgccctggttgcatatacttttagtggaattgacctcaaatacatccagagtacacagctcatttcattggctttgaatgtgatcccaatgggtttttgcct

SEQ ID NO: 368595 - DNA, 120 bp, Artificial Sequence
  ENSG00000141527_64 (sequence is synthesized)
gtgagccaggcctagggaactctcaggtctctgctggccctggctctgctgtgtggttcacagagtgagacttgcagccgtcgaccctggcaggctgctccctggttcgggggctcacag

SEQ ID NO: 368596 - DNA, 120 bp, Artificial Sequence
  ENSG00000141527_65 (sequence is synthesized)
gctgtacagtaaaatgctagagcttgggagaccctggggagcctctagtcctaggattgacaactcagagacctgccaccaccagctgggaagcagaggagtctggggtaaggagcaggc

SEQ ID NO: 368597 - DNA, 120 bp, Artificial Sequence
  ENSG00000141527_66 (sequence is synthesized)
agctgctggccagtgccagtgattgcggccacacagaaatgcaggcctgtgtggaaatgcaggccagtgtggaaatgcaggccagtgtggaaatgccgtgtagtacagtagtgcaggtct

SEQ ID NO: 368598 - DNA, 120 bp, Artificial Sequence
  ENSG00000141527_67 (sequence is synthesized)
gccagtgtggaaatgccgtgtagtacagtagtgcaggtctgggtagaaatgcaggtccatgtttgggaggtcaaggtgggcggatcatgagctcaagagatcgagaccatcttggccaac

SEQ ID NO: 368599 - DNA, 81 bp, Artificial Sequence
  ENSG00000141527_68 (sequence is synthesized)
cctggcgacagagcgagactcagtctcaacaacaataacaacaacaacaaaagaaatacagatccatgtagaaaggcaggc

SEQ ID NO: 368600 - DNA, 120 bp, Artificial Sequence
  ENSG00000141540_0 (sequence is synthesized)
agcactcgggccgagccatgcaggcggcgcgcgtggactacatcgctccctggtgggtcgtgtggctgcacagcgtcccgcacgtcggcctgcgcctgcagcccgtgaacagcaccttca

SEQ ID NO: 368601 - DNA, 120 bp, Artificial Sequence
  ENSG00000141540_1 (sequence is synthesized)
gccccggcgacgagagttaccaggagtcgctgctgttcctggggctggtggccgccgtctgcctgggcctgaacctcatcttccttgtggcttacctggtctgtgcatgccactgccggc

SEQ ID NO: 368602 - DNA, 120 bp, Artificial Sequence
  ENSG00000141540_2 (sequence is synthesized)
gggacgatgcggtgcagaccaagcagcaccactcctgctgcatcacctggacggccgtggtggccgggctcatctgctgtgctgcggtgggcgttggtttctatggaaacagcgagacca

SEQ ID NO: 368603 - DNA, 120 bp, Artificial Sequence
  ENSG00000141540_3 (sequence is synthesized)
acgatggggcgtaccagctgatgtactccttggacgatgccaaccacaccttctctgggatcgatgctctggtttccggaactacccagaagatgaaggtggacctagagcagcacctgg

SEQ ID NO: 368604 - DNA, 120 bp, Artificial Sequence
  ENSG00000141540_4 (sequence is synthesized)
cccggctcagtgagatctttgctgcccggggcgattacctgcagaccctgaagttcatacagcagatggcgggcagcgttgttgttcagctctcaggactgcccgtgtggagggaggtca

SEQ ID NO: 368605 - DNA, 120 bp, Artificial Sequence
  ENSG00000141540_5 (sequence is synthesized)
ccatggagctgaccaagctatccgaccagactggctacgtggagtactacaggtggctctcctacctcctgctctttatcctggacctggtcatctgcctcattgcctgcctgggactgg

SEQ ID NO: 368606 - DNA, 120 bp, Artificial Sequence
  ENSG00000141540_6 (sequence is synthesized)
ccaagcgctccaagtgtctcctggcctcgatgctgtgctgtggggcactgagcctgctcctcagttgggcatccctggccgctgatggctctgcggcagtggccaccagtgacttctgtg

SEQ ID NO: 368607 - DNA, 120 bp, Artificial Sequence
  ENSG00000141540_7 (sequence is synthesized)
tggctcctgacaccttcatcctgaacgtcacggagggccagatcagcacagaggtgactcgctactacctgtattgcagccagagtggaagcagccccttccagcagaccctgaccacct

SEQ ID NO: 368608 - DNA, 120 bp, Artificial Sequence
  ENSG00000141540_8 (sequence is synthesized)
tccagcgcgcacttaccaccatgcagatccaggtcgcggggctgctgcagtttgccgtgcccctcttctccactgcagaggaagacctgcttgcaatccagctcctgctgaactcctcag

SEQ ID NO: 368609 - DNA, 120 bp, Artificial Sequence
  ENSG00000141540_9 (sequence is synthesized)
agtccagccttcaccagctgaccgccatggtggactgccgagggctgcacaaggattatctggacgctcttgctggcatctgctacgacggcctccagggcttgctgtaccttggcctct

SEQ ID NO: 368610 - DNA, 120 bp, Artificial Sequence
  ENSG00000141540_10 (sequence is synthesized)
tctccttcctggccgccctcgccttctccaccatgatctgtgcagggccaagggcctggaagcacttcaccaccagaaacagagactacgatgacattgatgatgatgacccctttaacc

SEQ ID NO: 368611 - DNA, 120 bp, Artificial Sequence
  ENSG00000141540_11 (sequence is synthesized)
cccaagcctggcgcatggcggctcacagtcccccgaggggacagcttcacagcttctgcagctacagcagtggcctgggaagtcagaccagcctgcagcccccggcccagaccatctcca

SEQ ID NO: 368612 - DNA, 120 bp, Artificial Sequence
  ENSG00000141540_12 (sequence is synthesized)
acgcccctgtctccgagtacatgaaccaagccatgctctttggtaggaacccacgctacgagaacgtgccactaatcgggagagcctcccctccgcctacgtactctcccagcatgagag

SEQ ID NO: 368613 - DNA, 120 bp, Artificial Sequence
  ENSG00000141540_13 (sequence is synthesized)
ccacctacctgtctgtggcggatgagcacctgaggcactacgggaatcagtttccagcctaacagactttcgggggttcctgcctcctttttccgttctggtttttaattagtgcaaata

SEQ ID NO: 368614 - DNA, 120 bp, Artificial Sequence
  ENSG00000141540_14 (sequence is synthesized)
ctgggattcccgaccaaagccccagggggtgcagaagactcaccacgcgggccagcctctctcttttgccctgctctccacaccagaaatgcccccaggtgcttggctgcctcagaggta

SEQ ID NO: 368615 - DNA, 120 bp, Artificial Sequence
  ENSG00000141540_15 (sequence is synthesized)
ccatccctgagctggctgcctggccctgctcacccctacgcctcgcccttgccaggaggggagtggcagtgaggagggggccaggtcaggcaccaccatcaagagagctgtgtgttctct

SEQ ID NO: 368616 - DNA, 120 bp, Artificial Sequence
  ENSG00000141540_16 (sequence is synthesized)
ctggtcccacaacgatgactctgcctcttgtcagcccagccaagagcccagacgacccctctgtcctcgttccctgtcctcgttccctgcaggtaacatgagaagggctgatcaggagat

SEQ ID NO: 368617 - DNA, 120 bp, Artificial Sequence
  ENSG00000141540_17 (sequence is synthesized)
gctctttaagaagttcgcacccctgctgacaccagaacagcccaaatcagagttcccagggccagacaggctcttcctgggccacagaggggaggcatcaggaaagctctgcagtggggg

SEQ ID NO: 368618 - DNA, 120 bp, Artificial Sequence
  ENSG00000141540_18 (sequence is synthesized)
gctggtggctccggggctgggggatcacaggctggtgaaccccggtgggaacagaggtgaaagcctgccacattccgcctgtctccctaaccctccattgcctcgcctctattccagaat

SEQ ID NO: 368619 - DNA, 120 bp, Artificial Sequence
  ENSG00000141540_19 (sequence is synthesized)
caatgctgcagaatgtgttagctgcagataggcatggtctcaggtatgaacagacactttgaaacgactttaggtctttcttttctccagtgttttaaacatgttgattatccaaagaat

SEQ ID NO: 368620 - DNA, 120 bp, Artificial Sequence
  ENSG00000141540_20 (sequence is synthesized)
tgaaactcctagcacatccagtttttacaacagatttgcagctcattccttaccctggttaggtcactacttttgcagattttgctggcactgatctggagatctgcagatctggaggag

SEQ ID NO: 368621 - DNA, 120 bp, Artificial Sequence
  ENSG00000141540_21 (sequence is synthesized)
acgggaaggagtcgattcttaaataaggatcagtgaggcatcctgtcccaagctactgtttggtggggatctgggttcatctcacccacagagggaggatctttaagaggagaaaaaagc

SEQ ID NO: 368622 - DNA, 120 bp, Artificial Sequence
  ENSG00000141540_22 (sequence is synthesized)
caagagggaaagccagagttccctgttctaggggactagccaaatgcctacatcagctgtcccctccctgttgtctccaagtaagtttgccagaaaaggttttagcaaagtgctacaact

SEQ ID NO: 368623 - DNA, 120 bp, Artificial Sequence
  ENSG00000141540_23 (sequence is synthesized)
gtgtctttataggaggataggcctctgccctgccccacccccaccacctgtccccacccagtgtcccaggccacaggagcttattggccaggagggaataatgtcccccaatactgcctg

SEQ ID NO: 368624 - DNA, 120 bp, Artificial Sequence
  ENSG00000141540_24 (sequence is synthesized)
ttgagggaccagagttggggtctttggtgcttccaacctcctgccaacctggagttcacaacaccagagccccacggcctcgcacactgaagcaggggcgtgcggtgactcggtgcttct

SEQ ID NO: 368625 - DNA, 120 bp, Artificial Sequence
  ENSG00000141540_25 (sequence is synthesized)
gttttggaagaaccacctgtcatcaaaacatggacagcagggtgttctcagctcccagcgaagcctccacaacagaatggggccacagggcagccgggactccctgtctcacctacatta

SEQ ID NO: 368626 - DNA, 120 bp, Artificial Sequence
  ENSG00000141540_26 (sequence is synthesized)
acccatgcatactgtatgccataaactcactttggtatatccgcgtcacatgcagagaggaactctgcgacgtcaaagtgttgcttcttaaagtttcattattggcaactagagggttgt

SEQ ID NO: 368627 - DNA, 120 bp, Artificial Sequence
  ENSG00000141540_27 (sequence is synthesized)
ttttaatgcatggaaactaaacagattcctcggggagttcctgaaggaaccaggtgggcaaacctttgcttatatacatgcggcctcacctggaagagaaataaaccacttgtactaaaa

SEQ ID NO: 368628 - DNA, 120 bp, Artificial Sequence
  ENSG00000141540_28 (sequence is synthesized)
cccccagtcctcgcccagctcctctgggaaaacacatccgcctagaggagatgtttccaggaacccctgacaacatgaggcgtggaggcagggaaaatacattgaatcacagccacagag

SEQ ID NO: 368629 - DNA, 120 bp, Artificial Sequence
  ENSG00000141540_29 (sequence is synthesized)
cagataatgggaagggagggggtgcctggcttctccaggggctgagacagggagactcagtacaagggaccaggggttcgggatgggagggttggatgcggttggctctgggtcactggg

SEQ ID NO: 368630 - DNA, 120 bp, Artificial Sequence
  ENSG00000141540_30 (sequence is synthesized)
ggaccctgaacaatgcaagggaggctgttccccattgtccagactcctagccatttcctcaacacatctgtctccctgggttgcaagtggatgtcccaatcccattgccagagtcttctt

SEQ ID NO: 368631 - DNA, 120 bp, Artificial Sequence
  ENSG00000141540_31 (sequence is synthesized)
accgtaagtgctgtgatgcactaacctctaggtgctagaaccctgcacggcactgagtaagtactccataaatgtctatcaacttagcaagttagtgagtgatgctctattgtggacccc

SEQ ID NO: 368632 - DNA, 120 bp, Artificial Sequence
  ENSG00000141540_32 (sequence is synthesized)
tgaggcagtggctcctgaaggaggacggggccaccggcagagcagggcactcagaggggtcccctgcccggggagcatgtgccagaggagggggacatccctaaggaacaggccagagga

SEQ ID NO: 368633 - DNA, 120 bp, Artificial Sequence
  ENSG00000141540_33 (sequence is synthesized)
cctgagctctccctggctgctctggaaggcggaggccccccagtttatccagtccctagagcaccccaggccagatctggggtgcgcctggcttggaggccatgtccttgctgccgcctc

SEQ ID NO: 368634 - DNA, 120 bp, Artificial Sequence
  ENSG00000141540_34 (sequence is synthesized)
tcctggggcctgcgtctgctcccaccctgccgcatgggccttagcaatcacttagccaggccgtgctgtggggccaggtcctccagctcataagtggcagccgcctctcagctccatgcc

SEQ ID NO: 368635 - DNA, 120 bp, Artificial Sequence
  ENSG00000141540_35 (sequence is synthesized)
cttcccaccccatgtcttggcaggtgagcacctgcacccaaggctcacagatgcttcagcaccaacctcattctttagaaagagtttgggggaggcttcatagattgaacacccgtccct

SEQ ID NO: 368636 - DNA, 120 bp, Artificial Sequence
  ENSG00000141540_36 (sequence is synthesized)
gtagcacttgatcatagcaagacaaaatgtaaaacagcagatgaggccatggtgtaacgaactcccacacacacagcctgcagctgccctggggcccaggatgctggcccccaaaggtct

SEQ ID NO: 368637 - DNA, 120 bp, Artificial Sequence
  ENSG00000141540_37 (sequence is synthesized)
gtcccagaagaggcattcgggaataagagtaacagcatgcgctctgccccagtcacttttctgagcactttacttgcattgggtgaatagcattatcatctccatgtcacagatgaggca

SEQ ID NO: 368638 - DNA, 120 bp, Artificial Sequence
  ENSG00000141540_38 (sequence is synthesized)
accggggcacaggaagaataagtaacttgtccaaggcaacagagctaggaaggggcagagccaggtttgaacccaggaggctggctccagactgtcctttgccacctgggagggagctca

SEQ ID NO: 368639 - DNA, 120 bp, Artificial Sequence
  ENSG00000141540_39 (sequence is synthesized)
cttcaccagctgaccgccatggtggactgccgagggctgcacaaggccaagcctgtcccctttgccccctcttctcaaggtgtgctgcttcttgccatcctggcctcagcttcagtgccc

SEQ ID NO: 368640 - DNA, 120 bp, Artificial Sequence
  ENSG00000141540_40 (sequence is synthesized)
ccgtctctggttccccaccctgcaacctcctccgccctgttcagagccagcttcttagtgcccagctcacagattatctggacgctcttgctggcatctgctacgacggcctccagggct

SEQ ID NO: 368641 - DNA, 120 bp, Artificial Sequence
  ENSG00000141540_41 (sequence is synthesized)
cctcaccaccactcagatcgctgagtaggagatgagcgtggtgggccaggaccggaagtctggctctgggtgttatttaaggtggctcctgtttttgtcgctgctgttcctggggctggt

SEQ ID NO: 368642 - DNA, 120 bp, Artificial Sequence
  ENSG00000141542_0 (sequence is synthesized)
cggggccgggccgccgcctctgcgctcagccccgcaggccgggcatgggtgggggcgccgggccgtcacgatgagcgccctgggcagcccggtccgggcctacgactttctgctcaagtt

SEQ ID NO: 368643 - DNA, 120 bp, Artificial Sequence
  ENSG00000141542_1 (sequence is synthesized)
ccggtccgggcctacgactttctgctcaagttcctgctggtgggcgacagcgacgtgggcaagggcgagatcctggcgagcctgcaggatggcgcggccgagtccccgtacggccacccg

SEQ ID NO: 368644 - DNA, 120 bp, Artificial Sequence
  ENSG00000141542_2 (sequence is synthesized)
gcgggcatcgactacaagacgaccaccatcctgctggacgggcggcgggtgaagctgcagctctgggatacttcaggccagggaagattttgtaccatattccgctcctactcccggggc

SEQ ID NO: 368645 - DNA, 120 bp, Artificial Sequence
  ENSG00000141542_3 (sequence is synthesized)
gcacagggtgtgatcctggtctatgacattgcgaaccgctggtcttttgacggcattgatcgatggattaaggagatcgatgagcatgcccccggagtccccaagatcctggtggggaac

SEQ ID NO: 368646 - DNA, 120 bp, Artificial Sequence
  ENSG00000141542_4 (sequence is synthesized)
cgcctgcacctggcgttcaagcggcaggtgcccacggagcaggcccaggcctacgccgagcgcctgggcgtgaccttctttgaggtcagccctctgtgcaatttcaacatcacagagtcg

SEQ ID NO: 368647 - DNA, 120 bp, Artificial Sequence
  ENSG00000141542_5 (sequence is synthesized)
ttcacggagctggccaggatcgtgctgctgcggcatgggatggaccggctctggcggccgagcaaggtgctgagcttgcaagacctctgctgccgggcggtcgtgtcctgcacgccggtg

SEQ ID NO: 368648 - DNA, 120 bp, Artificial Sequence
  ENSG00000141542_6 (sequence is synthesized)
cacctggtggacaagctcccgctccccattgccttaagaagccacctcaagtccttctcgatggccaacggcctgaatgccaggatgatgcacggcggttcctactccctcaccaccagc

SEQ ID NO: 368649 - DNA, 120 bp, Artificial Sequence
  ENSG00000141542_7 (sequence is synthesized)
tccacccacaaaaggagcagcctccgcaaagtgaagctcgtccgccccccccagagcccccccaaaaactgcaccagaaacagctgcaaaatttcttaaggaaggcactgaaagaaacac

SEQ ID NO: 368650 - DNA, 120 bp, Artificial Sequence
  ENSG00000141542_8 (sequence is synthesized)
ggcggaatctctccaggagaagctcggcgttacccccggcagctggtggatgcatctcagatcccggttcctctcggcgaatgctgcttgcgaatgtgtgcgacgccttccgtgtgatgg

SEQ ID NO: 368651 - DNA, 120 bp, Artificial Sequence
  ENSG00000141542_9 (sequence is synthesized)
aaacacactaccccgtcggacttcgaatttctacgtggatgtgcatgaagctcttgttttcgatgtgtgtttgtaaagggaaaattagtactctgctcgactcttggtaacatgaaattc

SEQ ID NO: 368652 - DNA, 120 bp, Artificial Sequence
  ENSG00000141542_10 (sequence is synthesized)
tgaatgttactttatcatgattgcactgcaactttttccttaaaataactgcttttgtaagaacggtgatattggagtgattagtataaattcaatggaatttgagaagcaatggcagcg

SEQ ID NO: 368653 - DNA, 120 bp, Artificial Sequence
  ENSG00000141542_11 (sequence is synthesized)
ggataatttagagtcactgatattacgagaggggtctttttgtaaacctccttttcaatgtcaaagcgccaatttataaaacgctgcagatgtagaggttatgtgcaactgatctgtcca

SEQ ID NO: 368654 - DNA, 120 bp, Artificial Sequence
  ENSG00000141542_12 (sequence is synthesized)
gtttgtgtatgaaatggatttgataaagtttttgctagttatttactacattttgggattaataagtgatttatatgcatatttttctgtaaatctacagttttttgtacaagatattct

SEQ ID NO: 368655 - DNA, 120 bp, Artificial Sequence
  ENSG00000141542_13 (sequence is synthesized)
acaagttatgaagctaagggaagaaaatgccaaagatacctctagttatgttgaacacagccagcacagtttcgacatgtcaaggaagagctgtttcagtaaagaatgaagtgaaaacac

SEQ ID NO: 368656 - DNA, 120 bp, Artificial Sequence
  ENSG00000141542_14 (sequence is synthesized)
gaaaacacttatttaggaaaatgtttctcaacaataaaatgtatagttgtttctctcttggtagagttggcgaccggttctttcgaattttgtatttatttatttatttatttttgagac

SEQ ID NO: 368657 - DNA, 120 bp, Artificial Sequence
  ENSG00000141542_15 (sequence is synthesized)
caggcgtgagccactgcgcccggccagattttgtgtatttcttatagccctttacttcactgcgccactgcctggtgtagacatcacatatcggagctaatacacgacactggcaacaag

SEQ ID NO: 368658 - DNA, 120 bp, Artificial Sequence
  ENSG00000141542_16 (sequence is synthesized)
cgacactggcaacaaggctgaatccttgaactgttgtcgcctgttgagaaaggattccttttccggaacagaagtgcagaggaggagagagcggagagttaaaagctggcacccaggcat

SEQ ID NO: 368659 - DNA, 120 bp, Artificial Sequence
  ENSG00000141542_17 (sequence is synthesized)
gtgcctgtctgagaaatcagagccgtgctcctgagcctcggtgaggagctccgaggggctgtcaggaattccgcatgaagatgtagcccctgaccccgactgcctcagagcagggctgac

SEQ ID NO: 368660 - DNA, 120 bp, Artificial Sequence
  ENSG00000141542_18 (sequence is synthesized)
cgcaaagacctccagggccgctctcttccctggtcacactgttgaacgtttctctgtggctgggggtcgcaaatgagggactaaaccaaaaaaacgaagcgagaaaatacccagatgttc

SEQ ID NO: 368661 - DNA, 87 bp, Artificial Sequence
  ENSG00000141542_19 (sequence is synthesized)
ctaaaccaaaaaaacgaagcgagaaaatacccagatgttcctagttcctgctgatgatctgtagattcttagaaacttaagggaccc

SEQ ID NO: 368662 - DNA, 87 bp, Artificial Sequence
  ENSG00000141542_20 (sequence is synthesized)
agccggatcatgatgaaaccccgtctctaataaaattacaaaaattggcttggcatggcagcgcacacctgtaatcccagctactca

SEQ ID NO: 368663 - DNA, 87 bp, Artificial Sequence
  ENSG00000141542_21 (sequence is synthesized)
cgtaccactgcaccccagcctgggcgacagaaatttaagggaccctagaatcaggggcaaagcctgtattcagagatggtggaaccg

SEQ ID NO: 368664 - DNA, 120 bp, Artificial Sequence
  ENSG00000141542_22 (sequence is synthesized)
gaatcaggggcaaagcctgtattcagagatggtggaaccgaggcccagacaggagagaggagcactggtccctgcgggtggacccaggcttgggggtgtctggccacctgggcacggcag

SEQ ID NO: 368665 - DNA, 120 bp, Artificial Sequence
  ENSG00000141542_23 (sequence is synthesized)
ccacggggacaaagtccacggggaggcaggggtgtggtctgtgggcagaaggtgaaccctgaggggacagtgtctggagagggtggccagcctcgtgcaggcacgctgcaaagacctgtg

SEQ ID NO: 368666 - DNA, 120 bp, Artificial Sequence
  ENSG00000141542_24 (sequence is synthesized)
cacccttctctctgctgtgccacaggtggggtgagaacgacagggccgacctcccagctgcaaacacaaggacactgagatgcacagaaaggagagtccacgttgaagaaacccacgttg

SEQ ID NO: 368667 - DNA, 120 bp, Artificial Sequence
  ENSG00000141542_25 (sequence is synthesized)
aggggcctcttctccctccgttcccagctcgctgatggtgaagggtaaggaaatggatcctcccattgcaacattaaaccaggccaaacctgtatttttctcttccttcctttttcttgt

SEQ ID NO: 368668 - DNA, 120 bp, Artificial Sequence
  ENSG00000141542_26 (sequence is synthesized)
tttgtaattgatgtctcctcgggactactgataatgtcctagaaagaataaaataaagtttcccaaggctttgtgactcagagctctttggaggtgttcaccgaatgcacgggccgcccg

SEQ ID NO: 368669 - DNA, 120 bp, Artificial Sequence
  ENSG00000141542_27 (sequence is synthesized)
gaggccttggccctccagggaaacaccaccagaagtccccagaagcggaacatgtagcaaggaggctccccgagatctcccagagggagcacagccctgccaagttattggttttggact

SEQ ID NO: 368670 - DNA, 120 bp, Artificial Sequence
  ENSG00000141542_28 (sequence is synthesized)
tccggcttccagagctacgagaaaataaatatttgttatttaagtcaccaggtttgtggcgattgttacggcagcctcaggaaactcctacaaggaagtgagttacgctcacggcagaaa

SEQ ID NO: 368671 - DNA, 120 bp, Artificial Sequence
  ENSG00000141542_29 (sequence is synthesized)
gtgctacagcaaaccaaggcagaacaaaaacagacgaaacctaatacagaccggactaagtagaagactgtgtgtttgggtggtgaatatacaaaaaacataaatataaattaaacctta

SEQ ID NO: 368672 - DNA, 120 bp, Artificial Sequence
  ENSG00000141542_30 (sequence is synthesized)
gatcgatgaggtatgttgtagaaatgccactgcccaagatccctgtaggcttgggaggacgtcaggccaggaattagggccgggccctccagggctcatgggtacccatggatcacaggc

SEQ ID NO: 368673 - DNA, 120 bp, Artificial Sequence
  ENSG00000141542_31 (sequence is synthesized)
cagggcaccggatggcgctccagcaggaaggagggtgcctcacctcggcacaacactggatagggctttggtgatagctacaatcacgaaagctcaggaagctggtccagacgaaacgag

SEQ ID NO: 368674 - DNA, 120 bp, Artificial Sequence
  ENSG00000141542_32 (sequence is synthesized)
cgtccacggcgtacctcggctatgcgtggggtcaggtttggcctgcttcactccctgctgtggtcgggctgggctgaccagcagtgaccggcgcttgtgcctgctggcacgcagaccagc

SEQ ID NO: 368675 - DNA, 120 bp, Artificial Sequence
  ENSG00000141542_33 (sequence is synthesized)
ccgcctggcaatggtgacatggcgtggtcgacactaagcccactgtatgagtgtcccggggctgctagaaccgacgaccacaacctgggcgtcctgaacaacagaaatgcattctctcac

SEQ ID NO: 368676 - DNA, 120 bp, Artificial Sequence
  ENSG00000141542_34 (sequence is synthesized)
ggttctggaggccagagcccaaaaccaaggtgtcggcagggccacttccctacagccgcctctcccagctctcggcggtgccagcaaccctgggccctccctggcttgtggctgcaccgc

SEQ ID NO: 368677 - DNA, 120 bp, Artificial Sequence
  ENSG00000141542_35 (sequence is synthesized)
tccagcctctgccttcgcgtaacatggcctcctccgagtgtctgtgtcttctcttctcccaaggacaccagtcattagatgagggccctaattcagtgcggccgcaccgtaactatttac

SEQ ID NO: 368678 - DNA, 120 bp, Artificial Sequence
  ENSG00000141542_36 (sequence is synthesized)
gtctgcaaagacggtctttccaaacgaggtcccatgctgaggttctgggtggacatgaactcgtggggggttcctcgacccagagcacccacattacgacgacaacaaaatctcactgaa

SEQ ID NO: 368679 - DNA, 120 bp, Artificial Sequence
  ENSG00000141542_37 (sequence is synthesized)
ctctggcggccgagcaagggtaggcccaggggctattccgggggccacctctgccctccagatgccgaggtgggtcagcggccccctggataagtgtctgcctcccgggacccgtctcaa

SEQ ID NO: 368680 - DNA, 120 bp, Artificial Sequence
  ENSG00000141542_38 (sequence is synthesized)
ccactgtgtccgttctcagagcaaggcatttgagagaagtaatgactacagctttgtcagaaagctcatgagggagctcctgggatctgtacgtgggcagaggggacgtcgcggcagggc

SEQ ID NO: 368681 - DNA, 120 bp, Artificial Sequence
  ENSG00000141542_39 (sequence is synthesized)
ttgctgcatgtacaagccagggccacgggcgtccgagccttgggagggcgggagaacaggtgtgggcaccacccctcattcccagcccaggtggggacatccactaagcaaggtttatct

SEQ ID NO: 368682 - DNA, 120 bp, Artificial Sequence
  ENSG00000141542_40 (sequence is synthesized)
ggatgtcgctgtggcaaagtccgagggccagcgctgccctggagattgagcgcctggaggacagggctggagattgagcgcctggaggacagggctggagattgagcgcctggaggacag

SEQ ID NO: 368683 - DNA, 120 bp, Artificial Sequence
  ENSG00000141542_41 (sequence is synthesized)
ggctggagattgagcgcctggaggacagggctggagattgagcgcctggaggacagggctggagattgagcgcctggaggacagggctggagattgagcgcctggaggacagggctggag

SEQ ID NO: 368684 - DNA, 120 bp, Artificial Sequence
  ENSG00000141542_42 (sequence is synthesized)
attgagcgcctggaggacagggctggagattgagcgcctggaggacagggctttgtctgcactgtgccctcggggtctgggctcagtgagggatgaaccctaccagagctacaggaataa

SEQ ID NO: 368685 - DNA, 120 bp, Artificial Sequence
  ENSG00000141542_43 (sequence is synthesized)
aagacgaccaccatcctgctggacgggcggcgggtgaagctgcagctctgtttgactttttaaatgacagagaagagcatgagcctgggaggacatcccaacacccggatcccttcaggg

SEQ ID NO: 368686 - DNA, 120 bp, Artificial Sequence
  ENSG00000141542_44 (sequence is synthesized)
acattggaaagttttgttggggtctcacgctggcggcgtggtggctgctgactggcgggtgtgtggtgcacttgctgtggctctgaagttccagaacctgttgtcaggaagaagcactgg

SEQ ID NO: 368687 - DNA, 120 bp, Artificial Sequence
  ENSG00000141542_45 (sequence is synthesized)
cgggggcacacccagcggccacagccccgcggcaaacccaccggcctccaggtcacatgtaggccctgcagtgcctgtcggggagccccctgggccagggtgatgcgagcctgaccccca

SEQ ID NO: 368688 - DNA, 120 bp, Artificial Sequence
  ENSG00000141542_46 (sequence is synthesized)
cagaggccaaggcggctgaggacaggaggggcccgggtgcgggagggcgcaggcagggcccctgtgagcttgggcagacacagggagggggtcccatccgcctgccttgtaaacctggaa

SEQ ID NO: 368689 - DNA, 120 bp, Artificial Sequence
  ENSG00000141543_0 (sequence is synthesized)
aggcgtctgttctcggcagcggcacagcgaggtcggcagcggcacagcgaggtcggcagcggcacagcgaggtcggcagcggcacagcgaggtcggcagcggcagcgaggtcggcagcgg

SEQ ID NO: 368690 - DNA, 120 bp, Artificial Sequence
  ENSG00000141543_1 (sequence is synthesized)
cgcgcgctgtgctcttccgcggactctgaatcatggcgaccacggccacgatggcgacctcgggctcggcgcgaaagcggctgctcaaagaggaagacatgactaaagtggaattcgaga

SEQ ID NO: 368691 - DNA, 120 bp, Artificial Sequence
  ENSG00000141543_2 (sequence is synthesized)
ccagcgaggaggtggatgtgacccccacgttcgacaccatgggcctgcgggaggacctgctgcggggcatctacgcttacggttttgaaaaaccatcagcaatccagcaacgagcaatca

SEQ ID NO: 368692 - DNA, 120 bp, Artificial Sequence
  ENSG00000141543_3 (sequence is synthesized)
agcagatcatcaaagggagagatgtcatcgcacagtctcagtccggcacaggaaaaacagccaccttcagtatctcagtcctccagtgtttggatattcaggttcgtgaaactcaagctt

SEQ ID NO: 368693 - DNA, 120 bp, Artificial Sequence
  ENSG00000141543_4 (sequence is synthesized)
tgatcttggctcccacaagagagttggctgtgcagatccagaaggggctgcttgctctcggtgactacatgaatgtccagtgccatgcctgcattggaggcaccaatgttggcgaggaca

SEQ ID NO: 368694 - DNA, 120 bp, Artificial Sequence
  ENSG00000141543_5 (sequence is synthesized)
tcaggaagctggattacggacagcatgttgtcgcgggcactccagggcgtgtttttgatatgattcgtcgcagaagcctaaggacacgtgctatcaaaatgttggttttggatgaagctg

SEQ ID NO: 368695 - DNA, 120 bp, Artificial Sequence
  ENSG00000141543_6 (sequence is synthesized)
tttcaaagagcagatttacgatgtatacaggtacctgcctccagccacacaggtggttctcatcagtgccacgctgccacacgagattctggagatgaccaacaagttcatgaccgaccc

SEQ ID NO: 368696 - DNA, 120 bp, Artificial Sequence
  ENSG00000141543_7 (sequence is synthesized)
aatccgcatcttggtgaaacgtgatgaattgactctggaaggcatcaagcaatttttcgtggcagtggagagggaagagtggaaatttgacactctgtgtgacctctacgacacactgac

SEQ ID NO: 368697 - DNA, 120 bp, Artificial Sequence
  ENSG00000141543_8 (sequence is synthesized)
catcactcaggcggtcatcttctgcaacaccaaaagaaaggtggactggctgacggagaaaatgagggaagccaacttcactgtatcctcaatgcatggagacatgccccagaaagagcg

SEQ ID NO: 368698 - DNA, 120 bp, Artificial Sequence
  ENSG00000141543_9 (sequence is synthesized)
ggagtccatcatgaaggagttccggtcgggcgccagccgagtgcttatttctacagatgtctgggccagggggttggatgtccctcaggtgtccctcatcattaactatgatctccctaa

SEQ ID NO: 368699 - DNA, 120 bp, Artificial Sequence
  ENSG00000141543_10 (sequence is synthesized)
taacagagaattgtacatacacagaattgggagatcaggtcgatacggccggaagggtgtggccattaactttgtaaagaatgacgacatccgcatcctcagagatatcgagcagtacta

SEQ ID NO: 368700 - DNA, 120 bp, Artificial Sequence
  ENSG00000141543_11 (sequence is synthesized)
ttccactcagattgatgagatgccgatgaacgttgctgatcttatctgaagcagcagatcagtgggatgagggagactgttcacctgctgtgtactcctgtttggaagtatttagatcca

SEQ ID NO: 368701 - DNA, 120 bp, Artificial Sequence
  ENSG00000141543_12 (sequence is synthesized)
gattctacttaatggggtttatatggactttcttctcataaatggcctgccgtctcccttcctttgaagaggatatggggattctgctctcttttcttatttacatgtaaataatacatt

SEQ ID NO: 368702 - DNA, 120 bp, Artificial Sequence
  ENSG00000141543_13 (sequence is synthesized)
acagcgaggtcggcagcggcacagcgaggtcggcagcggcacagcgaggtcggcagcggcacagcgaggtcggcagcggcagcgaggtcggcagcggcacagcgaggtcggcagcggcag

SEQ ID NO: 368703 - DNA, 120 bp, Artificial Sequence
  ENSG00000141543_14 (sequence is synthesized)
tttcttttctttttcttttttttttttgagacagtctccctctgttgcccaggcaggagcgcagtggcgtgatctcctctcaccgcaagctccacttcctgggttcatgccattctccta

SEQ ID NO: 368704 - DNA, 84 bp, Artificial Sequence
  ENSG00000141543_15 (sequence is synthesized)
ctctcaccgcaagctccactacgtagctgggagtacaggcggccgccaccatgccaggctaatttttttgtattttcagtagag

SEQ ID NO: 368705 - DNA, 120 bp, Artificial Sequence
  ENSG00000141543_16 (sequence is synthesized)
ctttttttttggaaagagtttcatcgttgatgagttttgctctgctgcccaggctgaagagcagtggcaccatcacaactcattgcagccacaacctcctgggctcaagcgatcctctca

SEQ ID NO: 368706 - DNA, 90 bp, Artificial Sequence
  ENSG00000141543_17 (sequence is synthesized)
gcacatctggctaatatttaaggcctaggctggtctgtcactcatgggtttaagtgattctcccatcttggccttacaaagtgctgggat

SEQ ID NO: 368707 - DNA, 89 bp, Artificial Sequence
  ENSG00000141543_18 (sequence is synthesized)
tctcactttgtggcctaggctggtctgtcactcatgggtttaagtgattctcccatcttggccttaatgcctggcctcatttttctaat

SEQ ID NO: 368708 - DNA, 120 bp, Artificial Sequence
  ENSG00000141543_19 (sequence is synthesized)
tgtcgcccaggcaggagtatagtggcaggatcatgacttaccacaatgttgacaaactaaaacagataattatctgtttaaatatttaaattattaaagtatttaagttatctgttgaaa

SEQ ID NO: 368709 - DNA, 120 bp, Artificial Sequence
  ENSG00000141543_20 (sequence is synthesized)
attgtgggtgactcaggccagcctctattgctttttatttggtatctaggactctcggggtgggtttcttgatccctagatcacttcagattgaagaagcaccaaagggaaaccagattc

SEQ ID NO: 368710 - DNA, 120 bp, Artificial Sequence
  ENSG00000141543_21 (sequence is synthesized)
cctcaaccagataacactccggtgggcggggagtagggacggagagaacgcgtggatgtggcctggtgctgtaaaaatgagatttcctgtcaaacgtaccttatcaccactctgcctcta

SEQ ID NO: 368711 - DNA, 120 bp, Artificial Sequence
  ENSG00000141543_22 (sequence is synthesized)
ttgtcaagtttactaaaacactgggccgcatttataaaggattttatgtcgtaatttcaaaaactttttatagccagagtctggctgtgttgctgaagctcgtgtcaaaacccggacctc

SEQ ID NO: 368712 - DNA, 120 bp, Artificial Sequence
  ENSG00000141543_23 (sequence is synthesized)
aggctatcctcttgcctgagtgtaaaggaattgaaagcatgcaaattcttttaaaattcctgttttaaaaaaccaaataggctgggcaacatatagagaccgtatctctaccaataataa

SEQ ID NO: 368713 - DNA, 120 bp, Artificial Sequence
  ENSG00000141543_24 (sequence is synthesized)
ctatagtcccagctactcaggaggctgtggtgggaggatcgcttgaggtcaggaggctgaggctgcagtgagctttgattgtgccactgtacttcagccagggcaacagagcaagaccct

SEQ ID NO: 368714 - DNA, 120 bp, Artificial Sequence
  ENSG00000141543_25 (sequence is synthesized)
ttcagccagggcaacagagcaagaccctgtctcaaacaaaacaaaacaacccatcttttataatcctcattgtggtttgaaccaataattctaaatttaaaaattaggtgactatttatt

SEQ ID NO: 368715 - DNA, 120 bp, Artificial Sequence
  ENSG00000141543_26 (sequence is synthesized)
tatcagtgtttcgtttagaatcgtattccatgtggtgcacattgtgaaatgttaagtaggatacagaatggaggcctgtgtgacggaagtggtgataggatggaggacagggctggggct

SEQ ID NO: 368716 - DNA, 120 bp, Artificial Sequence
  ENSG00000141543_27 (sequence is synthesized)
gctgggtctgcaccagatatcacggtgtgaccttttccaccagggtctccctggatcctggcttggcccaccctcaagtcctagaaggaaggatgagtatgtaacaggatttgtctttgt

SEQ ID NO: 368717 - DNA, 120 bp, Artificial Sequence
  ENSG00000141543_28 (sequence is synthesized)
aggagttccggtcgggcgccaggtgggtctgctatgctgtggctctgcaggtcagggtttgctagactgtgtctaagcacttcatatgtaccgcctaagtgcaggccccacacccggggg

SEQ ID NO: 368718 - DNA, 120 bp, Artificial Sequence
  ENSG00000141543_29 (sequence is synthesized)
gatgccaagcttctgctctgaaagctgaggccctgggtgagcagaaaaccttccagttaaggaggggtccgctgtgctcctgtaatacttaggttgaggtgataactagccttaactagc

SEQ ID NO: 368719 - DNA, 120 bp, Artificial Sequence
  ENSG00000141543_30 (sequence is synthesized)
gtggtttcattcatttgaacttgattcagacttccttctttgcccaccttgtggtcagcttaacatatgtgctgtgtgtgtctttttttgtttgtttgtttttgagacagtctcacttcg

SEQ ID NO: 368720 - DNA, 86 bp, Artificial Sequence
  ENSG00000141543_31 (sequence is synthesized)
tttcaagtgactcctgtgtctcagcctcccgagtagctggaatggctaatttttttttttttttttcatttttagtagagatgggg

SEQ ID NO: 368721 - DNA, 71 bp, Artificial Sequence
  ENSG00000141543_32 (sequence is synthesized)
tggcagtgctgggattacaggcataagccgccgccatgcccggctgaagttaccgtttttaattttttgct

SEQ ID NO: 368722 - DNA, 120 bp, Artificial Sequence
  ENSG00000141543_33 (sequence is synthesized)
cgccatgcccggctgaagttaccgtttttaattttttgctaggcaaaagtgaagtatttttcccaattattggtttaggaccgattaaacaagttaaagatagtctagtaaaagatgtct

SEQ ID NO: 368723 - DNA, 120 bp, Artificial Sequence
  ENSG00000141543_34 (sequence is synthesized)
atttttttaatctgatggagcacatgaccgaagtaactaaatccaccaacagcccctctgcacaggggtttctggtgctgtccctgaggcttcacgtttgcagacagactgttgagagag

SEQ ID NO: 368724 - DNA, 120 bp, Artificial Sequence
  ENSG00000141543_35 (sequence is synthesized)
gagaatctcgtatattttggacctgcagccaggattccttaaaattagcaatggaagcaagtccagtcttacacttgtatgagtaatttaatcgcctcaaacactctttctttttgcagc

SEQ ID NO: 368725 - DNA, 120 bp, Artificial Sequence
  ENSG00000141543_36 (sequence is synthesized)
cgagtgcttatttctacagatgtctgggccagggggttggatgtccctcaggtgtccctcatcattaactatgatctccctaataacagagaattgtacatacacaggtaaggtgcaagc

SEQ ID NO: 368726 - DNA, 120 bp, Artificial Sequence
  ENSG00000141543_37 (sequence is synthesized)
ctgtaattgtagagggaacttccctattcttagtttggggcacctgagtttgtttttttgttgttgtgggtttttttgttttgtttttgagacgaagtttcgctctgtcacccaggctgg

SEQ ID NO: 368727 - DNA, 120 bp, Artificial Sequence
  ENSG00000141543_38 (sequence is synthesized)
ctgttttttgttttgagaagtctgttgtgaggttttagttaaatttacgttaacaaattttcattttgtttgtgttgttccttaatctgtttctttcttcactttcagttgctgatctta

SEQ ID NO: 368728 - DNA, 120 bp, Artificial Sequence
  ENSG00000141543_39 (sequence is synthesized)
gtctcaaaaaaaaaaaaaaaaaagcaaaattaacttgtttttgtcagagaaaagagcaggagaattttgtggtttcgagataataatggcataaataataatcggtgatcatctcggagg

SEQ ID NO: 368729 - DNA, 120 bp, Artificial Sequence
  ENSG00000141543_40 (sequence is synthesized)
gaatattgatactggttctgcaaatgatgcggtaaagtcccgaatgcacatctctgctttggtatactagcttgcagtagcatctgttgattggatttgtaggtggactggctgacggag

SEQ ID NO: 368730 - DNA, 120 bp, Artificial Sequence
  ENSG00000141551_0 (sequence is synthesized)
gccccgccgggttgctaggggaagtgacgtcacagcgcgatggcggcggctcctttaggcagctgaaaggggatttaggcccggaagatccgagtccatccgcggcggggagagggcaag

SEQ ID NO: 368731 - DNA, 120 bp, Artificial Sequence
  ENSG00000141551_1 (sequence is synthesized)
cgggaccggtaggggccggagcagcggcggcggcgctcggactgtcccatccgccccgtattgaggcgctgggagcggcggggcgacaggaaagcgatggtgaaagcggggccgtgaggg

SEQ ID NO: 368732 - DNA, 120 bp, Artificial Sequence
  ENSG00000141551_2 (sequence is synthesized)
gggcggagccgggagccggacccgcagtagcggcagcagcggcgccgcctcccagagttcagacccaggaagcggccgggagggcaggagcgaatcgggccgccgccgccatggagctga

SEQ ID NO: 368733 - DNA, 120 bp, Artificial Sequence
  ENSG00000141551_3 (sequence is synthesized)
gagtcgggaacaggtaccggctgggccggaagatcggcagcggctccttcggagacatctatctcggtacggacattgctgcaggagaagaggttgccatcaagcttgaatgtgtcaaaa

SEQ ID NO: 368734 - DNA, 120 bp, Artificial Sequence
  ENSG00000141551_4 (sequence is synthesized)
ccaaacaccctcagctccacattgagagcaaaatctacaagatgatgcagggaggagtgggcatccccaccatcagatggtgcggggcagagggggactacaacgtcatggtgatggagc

SEQ ID NO: 368735 - DNA, 120 bp, Artificial Sequence
  ENSG00000141551_5 (sequence is synthesized)
tgctggggccaagcctggaggacctcttcaacttctgctccaggaaattcagcctcaaaaccgtcctgctgcttgctgaccaaatgatcagtcgcatcgaatacattcattcaaagaact

SEQ ID NO: 368736 - DNA, 120 bp, Artificial Sequence
  ENSG00000141551_6 (sequence is synthesized)
tcatccaccgggatgtgaagccagacaacttcctcatgggcctggggaagaagggcaacctggtgtacatcatcgacttcgggctggccaagaagtaccgggatgcacgcacccaccagc

SEQ ID NO: 368737 - DNA, 120 bp, Artificial Sequence
  ENSG00000141551_7 (sequence is synthesized)
acatcccctatcgtgagaacaagaacctcacggggacggcgcggtacgcctccatcaacacgcaccttggaattgaacaatcccgaagagatgacttggagtctctgggctacgtgctaa

SEQ ID NO: 368738 - DNA, 120 bp, Artificial Sequence
  ENSG00000141551_8 (sequence is synthesized)
tgtacttcaacctgggctctctcccctggcaggggctgaaggctgccaccaagagacagaaatacgaaaggattagcgagaagaaaatgtccacccccatcgaagtgttgtgtaaaggct

SEQ ID NO: 368739 - DNA, 120 bp, Artificial Sequence
  ENSG00000141551_9 (sequence is synthesized)
acccttccgaatttgccacatacctgaatttctgccgttccttgcgttttgacgacaagcctgactactcgtacctgcggcagcttttccggaatctgttccatcgccagggcttctcct

SEQ ID NO: 368740 - DNA, 120 bp, Artificial Sequence
  ENSG00000141551_10 (sequence is synthesized)
atgactacgtgttcgactggaacatgctcaaatttggtgccagccgggccgccgatgacgccgagcgggagcgcagggaccgagaggagcggctgagacactcgcggaacccggctaccc

SEQ ID NO: 368741 - DNA, 120 bp, Artificial Sequence
  ENSG00000141551_11 (sequence is synthesized)
gcggcctcccttccacagcctccggccgcctgcgggggacgcaggaagtggctccccccacacccctcacccctacctcacacacggctaacacctccccccggcccgtctccggcatgg

SEQ ID NO: 368742 - DNA, 120 bp, Artificial Sequence
  ENSG00000141551_12 (sequence is synthesized)
agagagagcggaaagtgagtatgcggctgcaccgcggggcccccgtcaacatctcctcgtccgacctcacaggccgacaagatacctctcgcatgtccacctcacagattcctggtcggg

SEQ ID NO: 368743 - DNA, 120 bp, Artificial Sequence
  ENSG00000141551_13 (sequence is synthesized)
tggcttccagtggtcttcagtctgtcgtgcaccgatgagaactctccttattgctgtgaagggcagacaatgcatggctgatctactctgttaccaatggctttactagtgacacgtccc

SEQ ID NO: 368744 - DNA, 120 bp, Artificial Sequence
  ENSG00000141551_14 (sequence is synthesized)
ccggtctaggatcgaaatgttaacaccgggagctctccaggccactcacccagcgacgctcgtgggggaaacatactaaacggacagactccaagagctgccaccgctggggctgcactg

SEQ ID NO: 368745 - DNA, 120 bp, Artificial Sequence
  ENSG00000141551_15 (sequence is synthesized)
ctgtactccctgacgattccactgtaactaccaatcttctacttggttaagacagttttgtatcattttgctaaaaattattggcttaaatctgtgtaaagaaaatctgtctttttattg

SEQ ID NO: 368746 - DNA, 120 bp, Artificial Sequence
  ENSG00000141551_16 (sequence is synthesized)
tttcttgtctgtttttgcagtcttacaaaaaaaatgttgactaaggaattctgagacaggctggcttggagttagtgtatgaggtggagtcgggcagggagaaggtgcaggtggatctca

SEQ ID NO: 368747 - DNA, 120 bp, Artificial Sequence
  ENSG00000141551_17 (sequence is synthesized)
agggtgtgtgctgtgtttgttttgcagtgttttattgtccgctttggagaggagatttctcatcaaaagtccgtggtgtgtgtgtgtgcccgtgtgtggtgggacctcttcaacctgatt

SEQ ID NO: 368748 - DNA, 120 bp, Artificial Sequence
  ENSG00000141551_18 (sequence is synthesized)
ttggcgtctcaccctccctcctcccgtaattgacatgcctgctgtcaggaactcttgaggccctcggagagcagttagggaccgcaggctgccgcggggcaggggtgcagtgggtgttac

SEQ ID NO: 368749 - DNA, 120 bp, Artificial Sequence
  ENSG00000141551_19 (sequence is synthesized)
caggcaaagcactgcgcgcttcttccccaggaggtgggcaggcagctgagagcttggaagcagaggctttgagaccctagcaggacaattgggagtcccaggattcaaggtggaagatgc

SEQ ID NO: 368750 - DNA, 120 bp, Artificial Sequence
  ENSG00000141551_20 (sequence is synthesized)
gtttctggtcccttgggagaggactgtgaaccgagaggtggttactgtagtgtttgttgccttgctgcctttgcactcagtccattttctcagcactcaatgctcctgtgcggattggca

SEQ ID NO: 368751 - DNA, 120 bp, Artificial Sequence
  ENSG00000141551_21 (sequence is synthesized)
ctccgtctgtatgaatgcctgtgcttaaaaccaggagcggggctgtccttgccacgtgccaagactagctcagaaaagccggcaggccagaaggacccaccctgaggtgccaaggagcag

SEQ ID NO: 368752 - DNA, 120 bp, Artificial Sequence
  ENSG00000141551_22 (sequence is synthesized)
gtgactctcccaaccggacccagaaccttcacggccagaaagtagagtctgcgctgtgaccttctgttgggcgcgtgtctgttggtcagaagtgaagcagcgtgcgtggggccgagtccc

SEQ ID NO: 368753 - DNA, 120 bp, Artificial Sequence
  ENSG00000141551_23 (sequence is synthesized)
accagaaggcaggtggcctccgtgagctggtgctgccccaggctccatgctgctgtgccctgaggttcccaggatgccttctcgcctctcactccgcagcacttgggcggtagccagtgg

SEQ ID NO: 368754 - DNA, 120 bp, Artificial Sequence
  ENSG00000141551_24 (sequence is synthesized)
ccatgtgctcccaaccccaatgcgcagggcagtctgtgttcgtgggcacttcggctggaccccatcacgatggacgatgttccctttggactctagggcttcgaaggtgtgcaccttggt

SEQ ID NO: 368755 - DNA, 120 bp, Artificial Sequence
  ENSG00000141551_25 (sequence is synthesized)
tctcccttctcctccccagagttccccggatgccataactggctggcgtcccagaacacagttgttcacccccccaccagctggctggccgtctgcctgagcccatggatgctttctcaa

SEQ ID NO: 368756 - DNA, 120 bp, Artificial Sequence
  ENSG00000141551_26 (sequence is synthesized)
tcctaggctggttactgtgtaagcgttttggagtacggggccttgagcgggtgggagctgtgtgttgaagtacagagggaggttggggtgggtcagagccgagttaagagattttctttg

SEQ ID NO: 368757 - DNA, 120 bp, Artificial Sequence
  ENSG00000141551_27 (sequence is synthesized)
ttgctggaccccttcttgaaggtagacgtcccccacccggagagacgtcgcgctgtggcctgaagtggcgcaagcttgctttgtaaatatctgtggtcccgatgtagtgcccagaacgtt

SEQ ID NO: 368758 - DNA, 120 bp, Artificial Sequence
  ENSG00000141551_28 (sequence is synthesized)
tgtgcgaggcagctctgcgcccgggttccagcccgagcctcgccgggtcgcgtcttcggagtgcttgtgacagtccttgcccagtatctagtccccgtcgccccgtgcaggagacgtagg

SEQ ID NO: 368759 - DNA, 120 bp, Artificial Sequence
  ENSG00000141551_29 (sequence is synthesized)
taggacgtcgtgtcagctgtgcactgacggccagtctccgagctgtgcgtttgtatcgccactgtatttgtgtactttaacaatcgtgtaaataataaattcataatgacttctaccttt

SEQ ID NO: 368760 - DNA, 120 bp, Artificial Sequence
  ENSG00000141551_30 (sequence is synthesized)
cggcctctgaccgggctcccagccacgcaggccactgctggccacgagggcaggtgggtgttaggtgtccaggacaagcccaagcgctgggccgggctggatggaggacagggtgcaaag

SEQ ID NO: 368761 - DNA, 120 bp, Artificial Sequence
  ENSG00000141551_31 (sequence is synthesized)
accagccctgggcactgaccacaccacgcacactgccagccaggcagaggggcgaaaaagggaaggcaggagggtcctgtttcttaaacacagcagtgaataaagtggcttgttccacct

SEQ ID NO: 368762 - DNA, 120 bp, Artificial Sequence
  ENSG00000141551_32 (sequence is synthesized)
accccgccaccttccccctcaaaacactgatcgggcgacgatccgctgggccggcagctggagcccagccgtggccctgcctgagccagtccagtttgtaaaataaatagcaagcgttgc

SEQ ID NO: 368763 - DNA, 120 bp, Artificial Sequence
  ENSG00000141551_33 (sequence is synthesized)
gcgtgagccaccgcgcccggccgattccagtgtcttatactctgaagggactcgtgagggaagaggagagagctgggtacggacattgctgcaggagaagaggttgccatcaagcttgaa

SEQ ID NO: 368764 - DNA, 120 bp, Artificial Sequence
  ENSG00000141551_34 (sequence is synthesized)
aaggactgtttcctgacagttggcacacacttgctgtctgatagaatcagccactcgcttgtgctgttcttgccattattatggccattaattcacagaggaaatggaaatttgctgagc

SEQ ID NO: 368765 - DNA, 89 bp, Artificial Sequence
  ENSG00000141551_35 (sequence is synthesized)
ctcagccttgaggctgcagttggctccgctcactggcttctcgaggctccggcggcccagctcactggcttctcgaggctccggcggcc

SEQ ID NO: 368766 - DNA, 120 bp, Artificial Sequence
  ENSG00000141551_36 (sequence is synthesized)
ttttcgggctgttggtgttcggccagggctctttggctacagtagcctgggccctaaaggccatctagttgctgagtctgtttggggtttttacttggtgagaagaaggccttgtcattc

SEQ ID NO: 368767 - DNA, 120 bp, Artificial Sequence
  ENSG00000141551_37 (sequence is synthesized)
caacagtcgatgactcgctttgatcaactcctgcccaggactaggcctgagccctgtcgtcgtaccggcgaggatgtgcgtctcccctgccttcaggctgtgccctgagacccagttgtg

SEQ ID NO: 368768 - DNA, 120 bp, Artificial Sequence
  ENSG00000141551_38 (sequence is synthesized)
gggctgcccagcacctgccatcctgctgggatcaggttttcttagtgcttgagaagactcaggagggcctgtcccatgccattgttggccttaagagcaagtgattccagaagaggagtg

SEQ ID NO: 368769 - DNA, 68 bp, Artificial Sequence
  ENSG00000141551_39 (sequence is synthesized)
agctgagagtcgggaacaggtaccggctgggccggaagatcggcagcggctccttcggagacatctat

SEQ ID NO: 368770 - DNA, 120 bp, Artificial Sequence
  ENSG00000141551_40 (sequence is synthesized)
acccgtctccgctccactcggatccttcgaccctgccgagcccggctccgcgggcaccttgcttgcatgcctcttcctccttcccgtcttcctgtcactcgttctgctgagcacgtgtcc

SEQ ID NO: 368771 - DNA, 120 bp, Artificial Sequence
  ENSG00000141551_41 (sequence is synthesized)
ggcggtggcgattcctggtcgggtggcttccagtggtcttcagtctgtcgtgcaccgatgagaactctccttattgctgtgaagggcagacaatgcatggctgatctactctgttaccaa

SEQ ID NO: 368772 - DNA, 120 bp, Artificial Sequence
  ENSG00000141551_42 (sequence is synthesized)
tgctgtctcggcttaaaatctgacctccccacccccgtgcatctggatagtgcagcacagatccggctgccggctgctggccacgccaccacacctgcacaggctgttggaggctgcagg

SEQ ID NO: 368773 - DNA, 120 bp, Artificial Sequence
  ENSG00000141551_43 (sequence is synthesized)
gtccggaccctgagtgtactcctcgtccgaccaaacgctctcatccccaccccgctttcctccccagctgtcaccatttggggcctgtctttggcctccgatggttcctgtccctctcct

SEQ ID NO: 368774 - DNA, 120 bp, Artificial Sequence
  ENSG00000141551_44 (sequence is synthesized)
ctttctgcacgtgttagtgagcatgttcacagagcagcagggggtagctgctgcccatttggaagtttaaggaagttctgagcccacagggagatgccatggcgagtggggttttttcga

SEQ ID NO: 368775 - DNA, 120 bp, Artificial Sequence
  ENSG00000141551_45 (sequence is synthesized)
ttgttgggggagctgagaggcctggctctgaccccttgtggggatgatgctgtcatcccatgaggagaaacgtgcagcctgtggggggctttgcaggcagtctcgtcccagtgccctttg

SEQ ID NO: 368776 - DNA, 120 bp, Artificial Sequence
  ENSG00000141551_46 (sequence is synthesized)
gtaggtattttctcacgtggccggggcagcctaggacctagggttgctttctgccaaagctggttccattccggcctcacctcctgcctcctcagggtgccagccgggccgccgatgacg

SEQ ID NO: 368777 - DNA, 120 bp, Artificial Sequence
  ENSG00000141551_47 (sequence is synthesized)
gaatcgggccgccgccgccatggagctgagagtcgggaacaggtaccggctgggccggaagatcggcagcggctccttcggagacatctatctcggctggagtgcagtggcgcgatctcg

SEQ ID NO: 368778 - DNA, 82 bp, Artificial Sequence
  ENSG00000141551_48 (sequence is synthesized)
caggctggtctcgaactccggacctcaagtgatccgcccagttcggcctcccgaagtgctgggaagccaccgcgcctggccc

SEQ ID NO: 368779 - DNA, 120 bp, Artificial Sequence
  ENSG00000141551_49 (sequence is synthesized)
cggatctgagtgttggtggccatcggccacagccaggtcctgactgtccaggcagcccagggtcctctctggccacagcctctcatagaaagccccgagtgagaggcagcagacgggggc

SEQ ID NO: 368780 - DNA, 120 bp, Artificial Sequence
  ENSG00000141551_50 (sequence is synthesized)
aagaccaagcgcgatcgcggaaggaagtggtggcccccgcggggtctccgcgcaagtcccggcaccgccggatcgtggccagaacccaacggccactaggctagcgcggccaggggttgg

SEQ ID NO: 368781 - DNA, 120 bp, Artificial Sequence
  ENSG00000141551_51 (sequence is synthesized)
acaggactaggcctgagccctgtcgtcgtaccggcgaggatgtgcgtctcccctgccttcaggctgtgccctgagacccagttgtggggctgcccagcacctgccatcctgctgggatca

SEQ ID NO: 368782 - DNA, 69 bp, Artificial Sequence
  ENSG00000141551_52 (sequence is synthesized)
aggctccggcggctcagctcactggcgtctcgaggctccggcggctcagctgactggcttctggcactg

SEQ ID NO: 368783 - DNA, 120 bp, Artificial Sequence
  ENSG00000141551_53 (sequence is synthesized)
gcttctcgaggctccggcggctcagctgactggcttctcgaggccccggcggctcagctgactggcttctcgaggccccggcggctcagcgcactggcttctcgaggccccggcggctca

SEQ ID NO: 368784 - DNA, 90 bp, Artificial Sequence
  ENSG00000141551_54 (sequence is synthesized)
cagctttcactggcttctcgaggcttctggaggcttcggtggctcagctcactggcttctcgaggctctggtggctcagctcactggctt

SEQ ID NO: 368785 - DNA, 120 bp, Artificial Sequence
  ENSG00000141551_55 (sequence is synthesized)
actggcttctcgaggctctggtggctcagctcactggcttggaggccaccttctcggtaccagcatagcacgtttccattcagtgggttcctcagtctctcaggaacacacgtgattcct

SEQ ID NO: 368786 - DNA, 120 bp, Artificial Sequence
  ENSG00000141551_56 (sequence is synthesized)
aagcacctccgtgcagtttctctgctaatcctggtgtgtagtctgtgcagagaacagtgctgggagagaccgatgtctagtggcgggttgtcccctctctgtcgcctcacctctctgttt

SEQ ID NO: 368787 - DNA, 120 bp, Artificial Sequence
  ENSG00000141551_57 (sequence is synthesized)
tgtgggagctgaaggcaaagcgcctaggcctgtggagggtggagtgtggagggttgctgcaggcacctgggggaacaatttggtcagttcggcatccccctcgctaattgttaaactacc

SEQ ID NO: 368788 - DNA, 120 bp, Artificial Sequence
  ENSG00000141551_58 (sequence is synthesized)
ctgctgtggctgaggggcaggaacaatgcagccactgatgtagtgtcccacagttgagcggtccctccctgagactgccctggggtgccatctcgcgcccttgctctgctcacagatcag

SEQ ID NO: 368789 - DNA, 120 bp, Artificial Sequence
  ENSG00000141551_59 (sequence is synthesized)
cttggggttggtggggacaacagggtacttggtggtggacactaagtgccctgtgtcaggcgatgctcgctcctgagggtggatgagccaggctgcccaggcgcctttagaaatgccggc

SEQ ID NO: 368790 - DNA, 120 bp, Artificial Sequence
  ENSG00000141551_60 (sequence is synthesized)
cgtccgagtcaagagcgggctgtggtttctccagggcttcttctttcctttcttccccccatttttgagagtttttaatctcgccagggtgtggcgtcttggttgcagatgaggcttctc

SEQ ID NO: 368791 - DNA, 120 bp, Artificial Sequence
  ENSG00000141551_61 (sequence is synthesized)
gggagggcctgggagacatgctgggccgtcatggggcttgtctcctggttgcaggtggccagtctcaggtctcaggtccctgaggccagcaaaccgtgggggctttctcctgctgtttga

SEQ ID NO: 368792 - DNA, 120 bp, Artificial Sequence
  ENSG00000141551_62 (sequence is synthesized)
gtgccccgctgcccgcagccgtccccaggcagctgacaccgctcgcctgcttgcgccccattgtgggtgcccccagcccgagggagccttcctcattcttcctcattcttgccactggcc

SEQ ID NO: 368793 - DNA, 120 bp, Artificial Sequence
  ENSG00000141551_63 (sequence is synthesized)
agggatggaggcccgtagggacctccacgggcttcttgtgagaccctccctggtggcatgccctgcaacgaggctttccttcttttgacggcctcacctgtcttcccttggacgagaagt

SEQ ID NO: 368794 - DNA, 120 bp, Artificial Sequence
  ENSG00000141551_64 (sequence is synthesized)
accctgttgcgcagcccaggcctagccacggccaccgcctcttcagcatcctgcagcggtctctcctctcctcgctctggcttttgttgtcttttgcgtttgctaacgtgctctttgaac

SEQ ID NO: 368795 - DNA, 120 bp, Artificial Sequence
  ENSG00000141551_65 (sequence is synthesized)
tagaacagctttctccatatggatccattatatttcttcaaatagttttctgggttgttcgccaacaggggcagggttagtggggcagggctgtttcaccagcaggcatcctggggggtg

SEQ ID NO: 368796 - DNA, 120 bp, Artificial Sequence
  ENSG00000141551_66 (sequence is synthesized)
cccagatcccccacgggtcttccggatgagcaggaactcagttcagaaatgccctggagcctggctctgggcttgtggggaggtgtttgttgggatcacaggatggagccaggcctgctg

SEQ ID NO: 368797 - DNA, 120 bp, Artificial Sequence
  ENSG00000141551_67 (sequence is synthesized)
ccgtgagcggggctgggtgtagctggctagccaggaacatgccggagtggggagcactcttgaccacttgccgtcttttaatgattggggttttactgcacgtttctaattcactaataa

SEQ ID NO: 368798 - DNA, 120 bp, Artificial Sequence
  ENSG00000141551_68 (sequence is synthesized)
tttcactagaaacagacctttttgtataacttcttcccaaagagaccaaagatgcagggattttggcttcgtggttattttgactttgtggttatatgaattgggctcgaggggtctggg

SEQ ID NO: 368799 - DNA, 120 bp, Artificial Sequence
  ENSG00000141551_69 (sequence is synthesized)
ctgcgtcacgagaatgggtcccttacgtgcacacaaccctgctgtcacctccagacacagcacagaaagggtttaactggcttctttccacgagcctggcacttgcgcatcagttcctgt

SEQ ID NO: 368800 - DNA, 120 bp, Artificial Sequence
  ENSG00000141551_70 (sequence is synthesized)
gagcagttcccgggagggtctgcccgtgccctcgtgtcttgatgtgcggctggctctgtagcccctgaaccatggtacaggagcccagagtgctccccatgctgggtgctgaccggactt

SEQ ID NO: 368801 - DNA, 120 bp, Artificial Sequence
  ENSG00000141551_71 (sequence is synthesized)
ggacagcctcgccccagcgcttggctgacaaagactagggaaggggcctgagtgctttttgtttcttttaaagaaagtaaagtgtccagtggtttgggatctttgtgggcagtgaaggtg

SEQ ID NO: 368802 - DNA, 120 bp, Artificial Sequence
  ENSG00000141551_72 (sequence is synthesized)
tcctgagcgtgctgagtagccacagccctgagtccagctgccttttctcggtacacggccttggcggcacctgggtgtggctgttgtagccaccagcccccaaggtggccgtgagcagtg

SEQ ID NO: 368803 - DNA, 120 bp, Artificial Sequence
  ENSG00000141551_73 (sequence is synthesized)
tctccttccatggtgagctgtggcaggaacccgcagctggctcttaggccctcgttttccatatgaggaaatacaacgtgggctctaacagcagggaggagtctccagagagagctggtt

SEQ ID NO: 368804 - DNA, 120 bp, Artificial Sequence
  ENSG00000141551_74 (sequence is synthesized)
tgggggtgtgttctctccaaaagaagcctcttggcctctgctcctggacaccctggggggccttcctgagaggcatgttgagggctccccacctccagggcgggccccctcctttgtcac

SEQ ID NO: 368805 - DNA, 120 bp, Artificial Sequence
  ENSG00000141551_75 (sequence is synthesized)
catctcacaggaaggctttggccgtgtgtccttcctgccagactctgccagcaccagcacacgtggtggctgtgagcagcagctcccgttttgaatcccaagggggaatacaggaggctc

SEQ ID NO: 368806 - DNA, 120 bp, Artificial Sequence
  ENSG00000141551_76 (sequence is synthesized)
ccgtcgctcttccctgttctttctgctcctctcaggagaccttgcgccctgtggagatgggaggaggcagcaggaaggtctcccagggcttgctggccgtggctgggtgtggatgggtgg

SEQ ID NO: 368807 - DNA, 120 bp, Artificial Sequence
  ENSG00000141551_77 (sequence is synthesized)
cagaggcccgtcctgagaggcaagtgaggctgtgctctgtgcctgggctcccccaggtggcacctgtcggtctgtggacctggttgaggcaaggatgcccatctggacatggagccgaca

SEQ ID NO: 368808 - DNA, 120 bp, Artificial Sequence
  ENSG00000141551_78 (sequence is synthesized)
caggtagtcagggggccagcgggacgcttaccaacagctgtcttttccccacctcagaatagcattcctttcgaacaccacggcaagtagctgctcgtctcccatcggaaggcagcactg

SEQ ID NO: 368809 - DNA, 120 bp, Artificial Sequence
  ENSG00000141551_79 (sequence is synthesized)
gttctccacaccctgacaaagcagtcacagcttccttcagagagtcttgggtccagagaccctccctcaacacaaagaaacatcttatgggccgggcatggtggctcacgcctggaatcc

SEQ ID NO: 368810 - DNA, 120 bp, Artificial Sequence
  ENSG00000141552_0 (sequence is synthesized)
gcgtgcgcactggcgtgcgagactcggcgggcgctgttgagggagtcgggccgcgactgtggtcgtttttataccttcccgcgcggacgccggcgctgccaacggaagggcgggtagggc

SEQ ID NO: 368811 - DNA, 120 bp, Artificial Sequence
  ENSG00000141552_1 (sequence is synthesized)
gagacggagtttcgtcatgttggccaggcccatttgagatctttgaagatatcctcaacgtgaggctctgctgccatgaaggtgaagattaagtgctggaacggcgtggccacttggctc

SEQ ID NO: 368812 - DNA, 120 bp, Artificial Sequence
  ENSG00000141552_2 (sequence is synthesized)
tgggtggccaacgatgagaactgtggcatctgcaggatggcatttaacggatgctgccctgactgcaaggtgcccggcgacgactgcccgctggtgtggggccagtgctcccactgcttc

SEQ ID NO: 368813 - DNA, 120 bp, Artificial Sequence
  ENSG00000141552_3 (sequence is synthesized)
ttcaaggagtgaggcccgacctggctctcgctggaggggcatcctgagactccttcctcatgctggcgccgatggctgctggggacagcgcccctgagctgcaacaaggtggaaacaagg

SEQ ID NO: 368814 - DNA, 120 bp, Artificial Sequence
  ENSG00000141552_4 (sequence is synthesized)
gctggagctgcgtttgttttgccatcactatgttgacacttttatccaataagtgaaaactcattaaactactcaaatcttgctggaggcctctgggtgcctgtgttctcggcatataga

SEQ ID NO: 368815 - DNA, 120 bp, Artificial Sequence
  ENSG00000141552_5 (sequence is synthesized)
tgtggtctcggtgtgttttgatatgaaaactctcatgaataaacatctccgtgaaacgccaaggccctcgtcaaaccctgagtcatgactgggaggagaaggagcaggatcagacggtag

SEQ ID NO: 368816 - DNA, 120 bp, Artificial Sequence
  ENSG00000141552_6 (sequence is synthesized)
agcctggggcatgctcttcaggcatgctcttgcctgctggattgccggcggcggccctgggaccctccctcaggctggctctgagggaccctggctgtgcaaagctggcggccactgctt

SEQ ID NO: 368817 - DNA, 120 bp, Artificial Sequence
  ENSG00000141552_7 (sequence is synthesized)
gcccgatcggccagggctgggggcgctgggggcgctacgggcgcggcgggtgcctgggagctgctgggagtccttgtttccgctcccgcccaggactgtgcgctcggctcgcggtggggt

SEQ ID NO: 368818 - DNA, 120 bp, Artificial Sequence
  ENSG00000141552_8 (sequence is synthesized)
gtgcgcactggcgtgcgagactcggcgggcgctgttgagggagtcgggccgcgactgtggtcgtttttataccttcccgcgcggacgccggcgctgccaacggaagggcgggctctgctg

SEQ ID NO: 368819 - DNA, 120 bp, Artificial Sequence
  ENSG00000141552_9 (sequence is synthesized)
gtgcgagactcggcgggcgctgttgagggagtcgggccgcgactgtggtcgtttttataccttcccgcgcggacgccggcgctgccaacggaagggcgggtagggcggtgcgtgattagg

SEQ ID NO: 368820 - DNA, 120 bp, Artificial Sequence
  ENSG00000141552_10 (sequence is synthesized)
cacgatgtttcccaggctgggttcggactcctgggccggtatgatcttcctgccttggccccctgagtagctgggactgcactgtggcaggcttatacctgtgttggtgcctaaacgttc

SEQ ID NO: 368821 - DNA, 120 bp, Artificial Sequence
  ENSG00000141552_11 (sequence is synthesized)
tcagtgtcctgacactgggaagtgtgtccacacgtctgaggcttcccttcctagggaaaggtggccctgggaggctcctttgtgtgcctctgctccccacaatcgtggtgggaaggggcc

SEQ ID NO: 368822 - DNA, 120 bp, Artificial Sequence
  ENSG00000141552_12 (sequence is synthesized)
gctgggggagtggcagccccggcatctcaggctgcttctggacagagcacaggctgtgtctccagtaacctagggagcccttggcattcatggggccagtgacccgtgcccagtgtctct

SEQ ID NO: 368823 - DNA, 120 bp, Artificial Sequence
  ENSG00000141552_13 (sequence is synthesized)
tgacccttcctcacagcaacctgaggagtagaccaggcctcacctgaaatctgtgtcagggttctctagagagacaggactctatatgaagagtatatatgaagagtttattgggagtat

SEQ ID NO: 368824 - DNA, 120 bp, Artificial Sequence
  ENSG00000141552_14 (sequence is synthesized)
agggagtcgggccgcgactgtggtcgtttttataccttcccgcgcggacgccggcgctgccaacggaagggtccaagtgattcctgtggctcagcttcccgaatagagctgggagctggc

SEQ ID NO: 368825 - DNA, 120 bp, Artificial Sequence
  ENSG00000141552_15 (sequence is synthesized)
ggcgctgttgagggagtcgggccgcgactgtggtcgtttttataccttcccgcgcggacgccggcgctgccaacggaagggcgggtagggcggtccaagtgattcctgtggctcagcttc

SEQ ID NO: 368826 - DNA, 120 bp, Artificial Sequence
  ENSG00000141552_16 (sequence is synthesized)
tgactgtcctctccatggagaaagcatttctaggtgtttgggctggtgcccgcagcctgtgcctgtcctgggaggcagggcccatccacaggtgcccatcaacacagcttccccaacgcc

SEQ ID NO: 368827 - DNA, 120 bp, Artificial Sequence
  ENSG00000141552_17 (sequence is synthesized)
ctaggtccccagaccccacccctcctgcccttgatcaagagaccagttcactactcagatgcacgtctccttggtgccttgaccattcatgtgacctttttggcatcacagatcaagtgt

SEQ ID NO: 368828 - DNA, 120 bp, Artificial Sequence
  ENSG00000141552_18 (sequence is synthesized)
ctcttttaaattgctcttaaggatgtaacaaagagtgcgtgggatgccctgagggcaggcattcgacttctggagcagcagcttaacttctgaaattcctccgaaccatgtgtccacacc

SEQ ID NO: 368829 - DNA, 120 bp, Artificial Sequence
  ENSG00000141552_19 (sequence is synthesized)
tcgtctggctgcatccgtgggccagatgtgggtggtgaatcctgtggattagaggtggtgctaggtagcccccaagtgactgcagtggtgggtccacaggcagcctgcagagcccgccct

SEQ ID NO: 368830 - DNA, 120 bp, Artificial Sequence
  ENSG00000141552_20 (sequence is synthesized)
gcagcatgccagctgggcctgtgatggggcatccagagggtgttgccctgaacactcagcatgtctccgctgacacagtgtgctcaggctttgttaacatggggcctgttggctgcagag

SEQ ID NO: 368831 - DNA, 120 bp, Artificial Sequence
  ENSG00000141552_21 (sequence is synthesized)
actcaggagttgagagtctaatttttggacctgctgatggttaagtcatagtgagtcagtgttaacgcgcaaagcgtttgacgagtccaatgtgcttccatactaagcagcaccaggttt

SEQ ID NO: 368832 - DNA, 120 bp, Artificial Sequence
  ENSG00000141552_22 (sequence is synthesized)
cttttgctaaaattgaactcctgtgaaaaattcagagtgactaagttcattcaacaaagaccgtgggagcccgaggctggtaaacaatgagtccatcccgcatcccaggggactctggtg

SEQ ID NO: 368833 - DNA, 120 bp, Artificial Sequence
  ENSG00000141552_23 (sequence is synthesized)
gcagtgcagttttgccgagaggagttttaatttaaaaaaatgcaatcaggagaccagcaggtcctggaatgagtcaccctcagtgcatctgcggactcatcagacaccccaggccggctt

SEQ ID NO: 368834 - DNA, 120 bp, Artificial Sequence
  ENSG00000141552_24 (sequence is synthesized)
cgggtggggaatgcactagaacgaagtgacacctttgactaaacgaggcctcccccgagtactcagagtggcccagacccctctcctcagggggctagcaggcttcagctctcatttgaa

SEQ ID NO: 368835 - DNA, 120 bp, Artificial Sequence
  ENSG00000141552_25 (sequence is synthesized)
agggccgatatcaagcagagttgtgctgaggccagaaacccccacgggcaggtcctcccagggctgggagtgggcatgccgtggggccggcgctgccaggacaggagggtggccacgagc

SEQ ID NO: 368836 - DNA, 120 bp, Artificial Sequence
  ENSG00000141552_26 (sequence is synthesized)
cctgtaggtcagacattgccctttttccccagcctcaagcacaggggacacagggtgggctaggccagagcgccacctcctcagagaggcccctgggctccccactgagcatgatgagcc

SEQ ID NO: 368837 - DNA, 120 bp, Artificial Sequence
  ENSG00000141552_27 (sequence is synthesized)
tgggtgaggggaggcgcctgctgcggttgccccgggtggaggccgcatgtccggtgtcccttggtcattgctggtcttcgcctgggggcgggctggtcaggagaccgattgggtaacact

SEQ ID NO: 368838 - DNA, 120 bp, Artificial Sequence
  ENSG00000141552_28 (sequence is synthesized)
cctgatttcggcttctctgaaacatgagaggctgcagtgctggagccactgcccagggtccctacctgcacccctgcctggcttgtcacatgctctgtgtccagcctggtcatgcctgtc

SEQ ID NO: 368839 - DNA, 120 bp, Artificial Sequence
  ENSG00000141552_29 (sequence is synthesized)
ccatgctgtctgagcggccccgactgtgagtgtcccctctgtgctgtctgctgcctgctggactagcctcagtagctcctgttaaatacctgcacgaaatacccagtttcattttctttt

SEQ ID NO: 368840 - DNA, 77 bp, Artificial Sequence
  ENSG00000141552_30 (sequence is synthesized)
tttttttttttttttgagaccgagtttcggccgcaacctctgcctcccgggttcaaacggttctcctgcctcagcct

SEQ ID NO: 368841 - DNA, 120 bp, Artificial Sequence
  ENSG00000141556_0 (sequence is synthesized)
gccagcgtcggttgccgccttagcgggcgcctccttttcatccctcatccttcatccctggctttcgcgctctagcggagtgggatctgcgaacacgtgaggcgggggcgcggtccccag

SEQ ID NO: 368842 - DNA, 120 bp, Artificial Sequence
  ENSG00000141556_1 (sequence is synthesized)
gctgccgagatggccctgagcgacgaaccggccgcgggcggccccgaggaggaggcggaggacgagacactggcctttggcgcggcgctggaagcgttcggcgagagcgcggagacccgg

SEQ ID NO: 368843 - DNA, 120 bp, Artificial Sequence
  ENSG00000141556_2 (sequence is synthesized)
gcgctgctgggccgcctgcgggaggtgcacggcggcggcgcggagcgcgaggtggccctggagcggttccgcgtaataatggacaaataccaggagcagcctcatctgttggacccgcac

SEQ ID NO: 368844 - DNA, 120 bp, Artificial Sequence
  ENSG00000141556_3 (sequence is synthesized)
cttgaatggatgatgaacttgttgttggacatagtgcaagatcagacatctccagcttcccttgtacatctggcttttaaatttctttacatcatcaccaaggttcgaggctataaaaca

SEQ ID NO: 368845 - DNA, 120 bp, Artificial Sequence
  ENSG00000141556_4 (sequence is synthesized)
tttcttcgtttatttcctcatgaagttgccgatgtagagcctgttttagatttggtcacaattcagaatcccaaggaccatgaagcttgggaaacccgctacatgcttttgctctggctc

SEQ ID NO: 368846 - DNA, 120 bp, Artificial Sequence
  ENSG00000141556_5 (sequence is synthesized)
tccgtgacctgcctgatcccttttgatttttctcgccttgacgggaacctcctcacccagcctgggcaagcacgaatgtccataatggaccgtattctccaaatagcagagtcctacttg

SEQ ID NO: 368847 - DNA, 120 bp, Artificial Sequence
  ENSG00000141556_6 (sequence is synthesized)
attgtcagtgacaaggcccgagatgcagctgctgtccttgtgtccagatttatcacacgtcctgatgtcaagcaaagcaagatggctgagttcctggactggagcctgtgcaatctggcc

SEQ ID NO: 368848 - DNA, 120 bp, Artificial Sequence
  ENSG00000141556_7 (sequence is synthesized)
cgttcctccttccagaccatgcagggggtcatcaccatggatgggacgctgcaggccctggcacaaatatttaaacatggaaaacgtgaagactgtttgccctatgctgccactgtcctc

SEQ ID NO: 368849 - DNA, 120 bp, Artificial Sequence
  ENSG00000141556_8 (sequence is synthesized)
aggtgcctcgatggctgcagactccctgagagcaaccagaccctgctgcggaagctgggggtgaagcttgtgcagcgactggggctgacattcctgaagccgaaggtggcagcatggagg

SEQ ID NO: 368850 - DNA, 120 bp, Artificial Sequence
  ENSG00000141556_9 (sequence is synthesized)
taccagcgtggctgccgatctttggctgcaaatctgcagctcctcactcagggtcagagtgagcagaagccactcatcctgaccgaagatgacgacgaagatgacgacgtcccagagggg

SEQ ID NO: 368851 - DNA, 120 bp, Artificial Sequence
  ENSG00000141556_10 (sequence is synthesized)
gtggagcgtgtgatagagcagctgctggtcgggctgaaggacaaggacacggtcgtgcggtggtctgcagccaagggcatcggtaggatggctggcaggcttcccagagccctggcggat

SEQ ID NO: 368852 - DNA, 120 bp, Artificial Sequence
  ENSG00000141556_11 (sequence is synthesized)
gatgtggtcgggtctgtgctggactgcttcagtttccaggagactgacaaggcgtggcatgggggatgtctggcgctggcagagctgggcaggagaggcctgttgctgccgtctcgactc

SEQ ID NO: 368853 - DNA, 120 bp, Artificial Sequence
  ENSG00000141556_12 (sequence is synthesized)
gtggatgttgtcgccgtgatcctgaaggcgctgacctacgacgagaagcggggtgcctgcagcgtgggcaccaacgtcagggacgccgcctgctacgtgtgctgggccttcgcgcgtgcc

SEQ ID NO: 368854 - DNA, 120 bp, Artificial Sequence
  ENSG00000141556_13 (sequence is synthesized)
tatgagcctcaggagctgaagccctttgtgactgcaatctcgagtgcactggtgattgctgcggtgtttgaccgagacataaactgcagaagagcagcctctgccgccttccaggagaat

SEQ ID NO: 368855 - DNA, 120 bp, Artificial Sequence
  ENSG00000141556_14 (sequence is synthesized)
gtggggagacagggcactttccctcatggtattgatattttgaccacagctgactattttgccgtcggtaacagatccaactgtttcctggttataagtgtgtttattgccggctttcct

SEQ ID NO: 368856 - DNA, 120 bp, Artificial Sequence
  ENSG00000141556_15 (sequence is synthesized)
gagtacacgcagccaatgatagaccacctggttaccatgaagatcagccactgggatggggtcatccgagagttggctgcgagggcgctgcacaacctggcccagcaggcacccgagttc

SEQ ID NO: 368857 - DNA, 120 bp, Artificial Sequence
  ENSG00000141556_16 (sequence is synthesized)
agcgccacgcaagtcttcccgaggctgctgtccatgacactgagtccagatcttcacatgaggcatgggtcgattctcgcctgcgcagaagttgcttacgccttgtacaaacttgcagcc

SEQ ID NO: 368858 - DNA, 120 bp, Artificial Sequence
  ENSG00000141556_17 (sequence is synthesized)
caagagaacaggcccgtcacggaccatctggacgagcaggcagtgcagggcctgaagcagattcaccagcagctctatgatcgtcagttatacaggggtctgggaggacagctcatgaga

SEQ ID NO: 368859 - DNA, 120 bp, Artificial Sequence
  ENSG00000141556_18 (sequence is synthesized)
caagcagtgtgtgttttaatagaaaagttgtcactttccaaaatgccctttagaggtgacaccgtaattgatggttggcaatggctgataaatgacactttgagacatctccatctcatc

SEQ ID NO: 368860 - DNA, 120 bp, Artificial Sequence
  ENSG00000141556_19 (sequence is synthesized)
tcaagtcactcccgccagcagatgaaggatgcagcagtctcggccctggctgctctatgcagtgaatattacatgaaggagccgggggaggcagatcccgcaattcaggaggagctgatc

SEQ ID NO: 368861 - DNA, 120 bp, Artificial Sequence
  ENSG00000141556_20 (sequence is synthesized)
acgcagtacctggctgagcttcggaaccccgaggagatgactcgctgtggcttctcgttggccttgggcgcccttccaggcttccttctgaaaggccggctccagcaggttctcacaggt

SEQ ID NO: 368862 - DNA, 120 bp, Artificial Sequence
  ENSG00000141556_21 (sequence is synthesized)
ttaagagcagttacccacacttcccccgaggacgtaagttttgctgagtccaggagagacggcttgaaggccattgcgaggatttgccagactgttggtgtgaaagcaggagccccagac

SEQ ID NO: 368863 - DNA, 120 bp, Artificial Sequence
  ENSG00000141556_22 (sequence is synthesized)
gaagctgtgtgcggagagaatgtttcccagatttactgtgcgctgctgggctgcatggacgactacaccacggacagcagaggggacgtgggcacctgggtccgcaaggccgccatgacc

SEQ ID NO: 368864 - DNA, 120 bp, Artificial Sequence
  ENSG00000141556_23 (sequence is synthesized)
agtctgatggatctgacacttctgctggctcggagccagcctgagctgatcgaggcccatacctgtgagcgcatcatgtgctgtgtggcccagcaggccagtgagaagattgaccgtttc

SEQ ID NO: 368865 - DNA, 120 bp, Artificial Sequence
  ENSG00000141556_24 (sequence is synthesized)
cgtgctcacgccgccagcgtgttcctgacgctcctgcactttgacagccctcccatcccccacgtgccccaccgaggagaactggaaaagctgtttcccaggtccgatgtggcctccgtg

SEQ ID NO: 368866 - DNA, 120 bp, Artificial Sequence
  ENSG00000141556_25 (sequence is synthesized)
aactggagtgcaccttcccaggccttcccacgcatcacccagctccttgggctgcccacctaccgctaccacgtcctgctggggctagtcgtgtccctgggcggcttgacggagtcgacg

SEQ ID NO: 368867 - DNA, 120 bp, Artificial Sequence
  ENSG00000141556_26 (sequence is synthesized)
atccggcactccacccagagcctctttgagtacatgaagggcattcagagcgacccgcaggccctgggcagcttcagcgggacccttctgcagatctttgaggacaaccttctgaatgag

SEQ ID NO: 368868 - DNA, 120 bp, Artificial Sequence
  ENSG00000141556_27 (sequence is synthesized)
agggtgtccgtgccgctgctgaagacgctggaccacgtgctcacccacggctgcttcgacatcttcaccacggaggaggaccacccctttgctgtgaagttgcttgcgctctgtaagaaa

SEQ ID NO: 368869 - DNA, 120 bp, Artificial Sequence
  ENSG00000141556_28 (sequence is synthesized)
gaaatcaagaattcaaaagatatccagaagctcctgtcaggcatcgcagtgttctgcgagatggtgcagttccccggcgacgtgaggaggcaggccctcctgcagctgtgtctgctcctc

SEQ ID NO: 368870 - DNA, 120 bp, Artificial Sequence
  ENSG00000141556_29 (sequence is synthesized)
gcgcggatgtgctggacgaggtggtgactgtgctcagtgacactgcgtgggacgcggagcttgcagtggtgagagagcagcgcaaccgtctgtgtgaccttctgggcgtacccaggcccc

SEQ ID NO: 368871 - DNA, 120 bp, Artificial Sequence
  ENSG00000141556_30 (sequence is synthesized)
agctggtgccccagcctggtgcctgctgaagccagtcctggagcccatacctcacccctgcctggtgaggatgtcttgttcctgagggaggccggtgtggaaagcctcgcacagtggtgc

SEQ ID NO: 368872 - DNA, 120 bp, Artificial Sequence
  ENSG00000141556_31 (sequence is synthesized)
ctccagctgttgaagggtagcgctggcccttggaggctggcactagctgacagcttttcctctctgcacctgcgctctggtgacttggggtggacgcctctgccttcacttgaacacaaa

SEQ ID NO: 368873 - DNA, 120 bp, Artificial Sequence
  ENSG00000141556_32 (sequence is synthesized)
tgtgcttcctataaaatcatgtaccaagaagttcctgccttttgtctctgagcctgatgtgtgtaggggtgatggaaaggctcactgcccaggggtcagccagaggggaggtgggctgca

SEQ ID NO: 368874 - DNA, 120 bp, Artificial Sequence
  ENSG00000141556_33 (sequence is synthesized)
ctcctcctgcctggagaccaggcccccttcttgcctggtgctgtccctgctgtgggagacgtctggccacaggcagtgccccacccagtcttggagagagatgaatgttaaatcagaggt

SEQ ID NO: 368875 - DNA, 120 bp, Artificial Sequence
  ENSG00000141556_34 (sequence is synthesized)
tcaaatgctagagaactgagaagccctggtggcaggcatggtctggagtgctgggcagatgctgtttctgggcccgtctgcctggtgggggtgctgtcctcccccctgtgcacacgtgag

SEQ ID NO: 368876 - DNA, 120 bp, Artificial Sequence
  ENSG00000141556_35 (sequence is synthesized)
catcgtgcatgtggcccctctgcagtgcaggagtcactgattgatgggtgtgccgaccagcagcttcacaaatgtctgctgcaaggggaatcgtcagagtccaatgtgtgcctctacagt

SEQ ID NO: 368877 - DNA, 120 bp, Artificial Sequence
  ENSG00000141556_36 (sequence is synthesized)
aatgtcggaaataaataccattcttgaaataattacactgtcttaggagagcctgggcagagtccacacttgggtttttaggcaaagggcaggaggctacctttgtctctgtgtctgagc

SEQ ID NO: 368878 - DNA, 120 bp, Artificial Sequence
  ENSG00000141556_37 (sequence is synthesized)
tcgtgctgatccatcccaaagctggtgaggggaacgtgtataaaaatttcactgtggtagcaacccacacccatctctgggacctgtgctgtgctcatagggcttgaggtgcagaaccac

SEQ ID NO: 368879 - DNA, 120 bp, Artificial Sequence
  ENSG00000141556_38 (sequence is synthesized)
ggccagcagcaccaaagcagccccaggtgtggccactcagaggcccaagggcttgggtgagcaaccctttccctatgtgaggagcccaggggtgccatgtgcgtggtgtagattagggtg

SEQ ID NO: 368880 - DNA, 120 bp, Artificial Sequence
  ENSG00000141556_39 (sequence is synthesized)
gctccctggcctgctctcaggtggggatggggcctggacacaggaacatgggcaggccgagaactgggaggtgccaccgcatctgtgaggcttgtgaggtcaccaggaccacaagaccag

SEQ ID NO: 368881 - DNA, 120 bp, Artificial Sequence
  ENSG00000141556_40 (sequence is synthesized)
gactgtgacagtccgtgctgtgtgtttagcagacagctcttcacgggatgtgtgtgacgacctggccacacaggagtgtggggttaacacactactgttgttgtgtttgacctggtggcc

SEQ ID NO: 368882 - DNA, 120 bp, Artificial Sequence
  ENSG00000141556_41 (sequence is synthesized)
aatggtctttataccctaaaagagccttgggttacatttttacgagatttaaatattttattccaacctgtgtaataggggtctcctcctccttgaactgtcccgattggctggggtcac

SEQ ID NO: 368883 - DNA, 120 bp, Artificial Sequence
  ENSG00000141556_42 (sequence is synthesized)
gtggtgagggtcctgggtgaccaggcctagccttggccacatgagtccacacagtggaaaaggcttggctcctgtggtcggcacacacgagactctggttgcgcctgctgggtgtggaac

SEQ ID NO: 368884 - DNA, 120 bp, Artificial Sequence
  ENSG00000141556_43 (sequence is synthesized)
aggcgcaccatcgccatgcctgcagctcacaaagctcctgctggcctgggatgcactgaggatggaaggaacaagtggcttctgagaaaaacatgatgaactgttcttagtgcaattaaa

SEQ ID NO: 368885 - DNA, 120 bp, Artificial Sequence
  ENSG00000141556_44 (sequence is synthesized)
agaagattccagataaatggcattttaagacatggaggcaggtcgattacccacccagacccatcagtgacactatgtggcaaagcagttcttcttttaatgtcggtctaacttagcaac

SEQ ID NO: 368886 - DNA, 120 bp, Artificial Sequence
  ENSG00000141556_45 (sequence is synthesized)
ccgaggaaagtggatcactccactggccactgcctctttcccactggatcccatccatcactggggcacttgtgctcaccagacacctggtggcctggaaagccctctttcagcagccgt

SEQ ID NO: 368887 - DNA, 120 bp, Artificial Sequence
  ENSG00000141556_46 (sequence is synthesized)
ttctggagcccaccagggtccaggtgatagagtttggcaaggaaccccttgctcacatgatagctggggcagacaatagcaaatgaacaagcaagcaccatcaaggcaggcaacactgag

SEQ ID NO: 368888 - DNA, 120 bp, Artificial Sequence
  ENSG00000141556_47 (sequence is synthesized)
tgctatgaacaaagataaagtgggcaatggaatggcatgttgggtgttgactccgagaaggtgttcagaaaacctctctgaaggggcagcatttgggcagaggtccagactgtgtccaat

SEQ ID NO: 368889 - DNA, 120 bp, Artificial Sequence
  ENSG00000141556_48 (sequence is synthesized)
ggcagaaaagagaatgcttgtggtcccagaagtggagcaagctttgtgagtttagagagcagcaagaagccagtatccctgggaccggggagctgatgtgggatttgtgtacccacaaac

SEQ ID NO: 368890 - DNA, 120 bp, Artificial Sequence
  ENSG00000141556_49 (sequence is synthesized)
acgttctaggtgctaaccagaaaccctccatgtgagagcagagaccttggagatcctgagggtttctgctgagccctggaatctagtcacgctattttgatagcagaatggatgagagaa

SEQ ID NO: 368891 - DNA, 120 bp, Artificial Sequence
  ENSG00000141556_50 (sequence is synthesized)
tttaaggcccagggccagatctaatggaccactatataaagctgggaccctaaataagtctttttcaaaggaacagcagcaagactcttatctcaatctatctcccctgaagtggcctga

SEQ ID NO: 368892 - DNA, 120 bp, Artificial Sequence
  ENSG00000141556_51 (sequence is synthesized)
attaatactacctgtatgatccccaaaactcctaaagtggaaaatttgattgacttggccctgaccagtggtattcccagacaagggcagaagatgcaaatacaaaacctctctggtaga

SEQ ID NO: 368893 - DNA, 120 bp, Artificial Sequence
  ENSG00000141556_52 (sequence is synthesized)
atgtaggctataatatgagtacatttttgaaaagggctagaaatgatcaagaagagattagaaaaaaacagagcccctagaaatgtaagaagtgaaatgaaaagctcaatggatagctta

SEQ ID NO: 368894 - DNA, 120 bp, Artificial Sequence
  ENSG00000141556_53 (sequence is synthesized)
gacacagctgaagagagaattagaaaactggaagatctgaaaacattatccagagaactggaagatatgacagcaacatcaagagacattgaagaatgtctaacctttgggtaattgggg

SEQ ID NO: 368895 - DNA, 120 bp, Artificial Sequence
  ENSG00000141556_54 (sequence is synthesized)
tctcagaatgaaatgaaatgatgcagatattccatactgacatgcaacagtccccagatacagaagcctaacagtctcacatttagacctgccacagtgaaactgcagaactgtaagaag

SEQ ID NO: 368896 - DNA, 120 bp, Artificial Sequence
  ENSG00000141556_55 (sequence is synthesized)
gacagagtgatataaacgactaccaatttcccagcagcagcactggagttgagcagtgagtagaccaaggtcttcattatgctgagagaaaatagctgtcaagttgcttgaattgtgccc

SEQ ID NO: 368897 - DNA, 120 bp, Artificial Sequence
  ENSG00000141556_56 (sequence is synthesized)
acagcataacattaaagaagagaacaaaattaagtcatttagataaaaatatgccattcttatctgtttggttttttaatcttggcttaatatttggggttgagtcatttgttttgagag

SEQ ID NO: 368898 - DNA, 120 bp, Artificial Sequence
  ENSG00000141556_57 (sequence is synthesized)
ctgtcctgtttattgcagggtgttcagcaacatcccagatggaagcagcatccccctacccagctgtgacaaaaagaaaaaaaaatgtctccagacactgccaaatatcttctgggggtg

SEQ ID NO: 368899 - DNA, 120 bp, Artificial Sequence
  ENSG00000141556_58 (sequence is synthesized)
cccctggttgagaaccactgctttagtggataaactttaggcaggagggaaatgatcgcagttggatagttggaggaatgtggagcaagggaagcaataaactgtgaccataaaaacata

SEQ ID NO: 368900 - DNA, 120 bp, Artificial Sequence
  ENSG00000141556_59 (sequence is synthesized)
ctgggctctggtccaggctttgtagaccgtgcaggcggctgcatccccgacctgacccaggcctgctcgctctggtgtgcaccgacctgccagctttgtggcactttgtggcatggggct

SEQ ID NO: 368901 - DNA, 120 bp, Artificial Sequence
  ENSG00000141556_60 (sequence is synthesized)
atcccagttgacttgaaattcaggttttgcttgtgaaagtagctggctggggcttctgttgatgacagtgctgtgtggacggcctggttcgctgggtgtgcctcacagacacaggacact

SEQ ID NO: 368902 - DNA, 120 bp, Artificial Sequence
  ENSG00000141556_61 (sequence is synthesized)
ttggctcagagctgggctggagtgaggcctgtgtctcttgggaccacagagagcggacagttgagacggtggaccagtctcaagataagagtctttatttcagatacagataagacgctg

SEQ ID NO: 368903 - DNA, 120 bp, Artificial Sequence
  ENSG00000141556_62 (sequence is synthesized)
gtgcctggtgcttccctgtctcttgggagcatgtatggagctgggccttttcttccattgctttctatctctctcgggcatatttggttagggggtcaggggcccagtgtcttcctcatg

SEQ ID NO: 368904 - DNA, 120 bp, Artificial Sequence
  ENSG00000141556_63 (sequence is synthesized)
acccaggaggcttagggcctgtgggatggttgagtctgatgaaggtgggacagggccagcgccactctcttcctgcggccgcagccttggagctcccagcgtcccctcggggttcaatcc

SEQ ID NO: 368905 - DNA, 120 bp, Artificial Sequence
  ENSG00000141556_64 (sequence is synthesized)
tccaggacctgtgtctgatgcctgcatgtgggtacctgggctccatcaggttctagatcggcctccgccctccactttcagggctccaggcccagcttctcatgtctgtggggagggtct

SEQ ID NO: 368906 - DNA, 120 bp, Artificial Sequence
  ENSG00000141556_65 (sequence is synthesized)
ccagagccttggtctgtggctgagctgtggaacttgaaggcctctctgcatcttgtcactcgtggcccctgcaccttgggtcatgacctgctttatgtggcaaccctgtgacagctgcta

SEQ ID NO: 368907 - DNA, 120 bp, Artificial Sequence
  ENSG00000141556_66 (sequence is synthesized)
agtcctagaaaacacgtaacaggacgtgaggtgccctctgcgccgtgtgggcgcgtgcggggagacccgggccccaggacgtgaggtgccctctgcgccgtgcgggcgcgtgcggggaga

SEQ ID NO: 368908 - DNA, 120 bp, Artificial Sequence
  ENSG00000141556_67 (sequence is synthesized)
cccgggccacatgcgagcggggccccgagacattctgcactcgggaattgcggggattatcaaatcccgcttcagtgggaaacgtgagcgaaacccaaggtgagtggccgcagcctttcg

SEQ ID NO: 368909 - DNA, 120 bp, Artificial Sequence
  ENSG00000141556_68 (sequence is synthesized)
tcacgtgctctcccgcatgtcctaagtgagggctcaggctgagctgccgttgccgagagccttgtgtctgcttcgggtgtctgcactgtgagtggctccgtgctggcgtccgcaccagcc

SEQ ID NO: 368910 - DNA, 120 bp, Artificial Sequence
  ENSG00000141556_69 (sequence is synthesized)
ggccagaccttcgcgtctctgcagctcggagcagttctgctcttcagcagatgcttgaccggctgtagccaagcctgaggggtggcaggctcgggggtcccactgccttctgaggtgtct

SEQ ID NO: 368911 - DNA, 120 bp, Artificial Sequence
  ENSG00000141556_70 (sequence is synthesized)
gaagaaatgggcaaactggttttgaaagtaactgtgctgaattcccacccacaggcagtgagttctcgttcttccgcgtctcaccacctctccatgctgtcttttccagtgtgtttattg

SEQ ID NO: 368912 - DNA, 120 bp, Artificial Sequence
  ENSG00000141556_71 (sequence is synthesized)
ggagtttcggacacacagactggaattgaactaacgggcaccccaggaagactgtggggcgagacgaggaggatggggggaccagccgtcgccccactctcctgttcatcatcacagcct

SEQ ID NO: 368913 - DNA, 120 bp, Artificial Sequence
  ENSG00000141556_72 (sequence is synthesized)
tgaagcagattcaccagcagccgtgcatctgcagctggggtctgatgtctcctgaaagtaaagcagaattttgtgtgtgcgtctgtcggatttctctggggagacagtgtgttcatcttt

SEQ ID NO: 368914 - DNA, 120 bp, Artificial Sequence
  ENSG00000141556_73 (sequence is synthesized)
agcttctgccagcacgtccacacggcccgttccctcgtctcatgtcaggacccctgggattacgggaccagcagagctgccttctctggccactgcccacacctgtgggcccctgtggca

SEQ ID NO: 368915 - DNA, 120 bp, Artificial Sequence
  ENSG00000141556_74 (sequence is synthesized)
tccaggccacttgctctggggcgtttggggggccggggagtgggtggagctggcaccagcttgatccaggctcctcatgcctggccctggggtctgtttgtgctccaagtgccaagagtg

SEQ ID NO: 368916 - DNA, 120 bp, Artificial Sequence
  ENSG00000141556_75 (sequence is synthesized)
ccaccctacccctcctcatctgcttcccatgagtggggccggggctgggtgagaggcccccagaagctgcccctgtgcacctcaccagcccgtcactcttctaaagtaacaaaaacaagt

SEQ ID NO: 368917 - DNA, 120 bp, Artificial Sequence
  ENSG00000141556_76 (sequence is synthesized)
gttggctccttcctctcagcctccttccggcaggaggttatatctgagagggaggaggagaaccatgtctagatacatgggggcagtggggatgggctgagcatcaggacacagcctccc

SEQ ID NO: 368918 - DNA, 120 bp, Artificial Sequence
  ENSG00000141556_77 (sequence is synthesized)
ccatttctgtgtgtgtaaaggctgaactcaacagcagactttggaattaaatgtgctttttacatttttattaggaaaaatttcaaacgtgtgaatgcaggttaagagcagtgcagtgaa

SEQ ID NO: 368919 - DNA, 120 bp, Artificial Sequence
  ENSG00000141556_78 (sequence is synthesized)
cctcccttcccgctccccagatggggtgcccttccgaggacacgttagtcatgagcacctgtcagccacatagctcaggctgccgggtgtgtgggaaacggcacaaatggtttcctgcag

SEQ ID NO: 368920 - DNA, 120 bp, Artificial Sequence
  ENSG00000141556_79 (sequence is synthesized)
gggtgtcacctttccgacgtacccatgggtgcccggagttgcctccttagtgggatcaagaccatcccccacatgtcatggacagctggtgacctggtcgctcttggtgtttgagcagta

SEQ ID NO: 368921 - DNA, 120 bp, Artificial Sequence
  ENSG00000141556_80 (sequence is synthesized)
cgacggagttgaaggtgttccgagtccccgtggccggcggcgacagagttgaaggcgtttggagtccccgtggctggcggtgatggagttgaaggcgttccgaatccccgtggccggtgg

SEQ ID NO: 368922 - DNA, 120 bp, Artificial Sequence
  ENSG00000141556_81 (sequence is synthesized)
tgacggagttgaaggcgttccgagtccctgtagctggcggcgatggagttgaatgcgttccgagtccccaggacgccattttggctgaatttcctttaccctcctgctccgtgaagcggg

SEQ ID NO: 368923 - DNA, 120 bp, Artificial Sequence
  ENSG00000141556_82 (sequence is synthesized)
gcccattggggaggtgctgctctgtaatctgctcttcttcttgaatgtgtggttagggcagccacattgatgtcccccaggctccagagtgaccgccccttaggggtcctgctgggcgtt

SEQ ID NO: 368924 - DNA, 120 bp, Artificial Sequence
  ENSG00000141556_83 (sequence is synthesized)
ggccgctgttggccgcagggcaccgttggcctgtgcattgctgccacctacccatgatgggcagaattgtcacgagctcaggaggaaaccatggaaaaaccgcaggtcctggagcctccg

SEQ ID NO: 368925 - DNA, 120 bp, Artificial Sequence
  ENSG00000141556_84 (sequence is synthesized)
tgtggttgtcgtgggcagctttccacgcgacgtgccctccctgggcgtgaggctgcatttgcacttagcggggagagggggaatgttgtgggttctagttgggctttttgatgatgatat

SEQ ID NO: 368926 - DNA, 120 bp, Artificial Sequence
  ENSG00000141556_85 (sequence is synthesized)
ttggaaagacttgagacaaagtagccaccctgtcctgtcccttcctcacccaccacacccactgctccccgctggcaggcactgcaggctgcacaagtaaccgtggaacctaaacactga

SEQ ID NO: 368927 - DNA, 120 bp, Artificial Sequence
  ENSG00000141556_86 (sequence is synthesized)
gaagtcctgtccctccttggggctggacacggtcccttgcccctgaactctagacgccctgcattgccctggtgctcccatgtcaagactggccgcggtcgtccatcccatggtttgtga

SEQ ID NO: 368928 - DNA, 120 bp, Artificial Sequence
  ENSG00000141556_87 (sequence is synthesized)
cgagctctgcctctgctgccctcgcgctctgccctggcgggaggggaggctccggaaaggagctgcgtggtcaggggctgcctccccgattctcctgtgtgccctgggggtcgctgttga

SEQ ID NO: 368929 - DNA, 120 bp, Artificial Sequence
  ENSG00000141556_88 (sequence is synthesized)
gtgccttgctctgcggcgctcaggtggacactgggcaggtgcgccagccagcgataggcaccttggctgctctgtggctccttgaggtgggggtcctcatggcagggcgagcggccctgc

SEQ ID NO: 368930 - DNA, 120 bp, Artificial Sequence
  ENSG00000141556_89 (sequence is synthesized)
aggagatcctctgtgaggcgtcctcacttcccacagtgactttccaagtgcgacactcgtgtgtgtaggcacagtgcagatgtacgcacacacacacctccggcttggggccccaggccc

SEQ ID NO: 368931 - DNA, 120 bp, Artificial Sequence
  ENSG00000141556_90 (sequence is synthesized)
tcctgtcaggcatcgcagtgtgagtttcaagtgctgctggccttagacggaatggcagggcgcagcctcccttggctgagggcaggagtccacggctccaggcgggagaggagcagttag

SEQ ID NO: 368932 - DNA, 120 bp, Artificial Sequence
  ENSG00000141556_91 (sequence is synthesized)
gctgtgtgacctgcgggtgcccagcctgtggggcttcctcatcgcccccatccaggcagatcgagtgccggctctctgtgctctccaggaggtggcctttcacagcagggacgttctgtg

SEQ ID NO: 368933 - DNA, 120 bp, Artificial Sequence
  ENSG00000141556_92 (sequence is synthesized)
ccacactgggctgccagagcacagtgaagggagcccccagggctgtggtgtcccggggctgtctcagcagcctcagaagttaggactttttttttgttaattgaatagccttcacatttg

SEQ ID NO: 368934 - DNA, 120 bp, Artificial Sequence
  ENSG00000141556_93 (sequence is synthesized)
ttgcttgtgcaggatctaattgagttaaagatttgggtttatattggtgggagccgggggagaccgtttgaaggaaaagatttaggggtaacaaaagaataaaagtttcccaaaatgtga

SEQ ID NO: 368935 - DNA, 120 bp, Artificial Sequence
  ENSG00000141556_94 (sequence is synthesized)
tgtataaaaatttacagaatgctggtatttccctcaataagagcttacacaatttaacagccatgagaggaaggggccttagacttaacacaacgtggagaatgttcactttggcttttc

SEQ ID NO: 368936 - DNA, 120 bp, Artificial Sequence
  ENSG00000141556_95 (sequence is synthesized)
ttaatagaagctgtttttgctgttgtttttgatttcatggtgtttttgattgcctgggtacgctaacttgattttttgacagatggttggcaatggctgataaatgacactttgagacat

SEQ ID NO: 368937 - DNA, 120 bp, Artificial Sequence
  ENSG00000141556_96 (sequence is synthesized)
ttctctttggagaagtgtcttcatttttttctgttctccttccctgactgttgtggtctgatcctcccttgtcacacatgtgacttgagggtgttttctccctgcctgtcctttcacgca

SEQ ID NO: 368938 - DNA, 120 bp, Artificial Sequence
  ENSG00000141556_97 (sequence is synthesized)
gcaggttagttaatagagagcaggcgagattgcttctctggtgagggagcaggttggttaataaagcatttaaacaagaatgatgtcatcttcactgctgggatcctgcagctagctgtg

SEQ ID NO: 368939 - DNA, 120 bp, Artificial Sequence
  ENSG00000141556_98 (sequence is synthesized)
tgtctgtggagggaggaggtggttaatgggcctggaaggcacctcctcttggttgcagccctgctgtggctgggatgggatgcagggtcagcgtcctcctcctgacgccttccactgacg

SEQ ID NO: 368940 - DNA, 120 bp, Artificial Sequence
  ENSG00000141556_99 (sequence is synthesized)
gggctccctggcctgggtcctgtcgtctctccggggtggggcggtggcgcttccctccggcaaatgcactgcatccctgtcccagatccggaagaccacggccagccaggtgtacgagac

SEQ ID NO: 368941 - DNA, 120 bp, Artificial Sequence
  ENSG00000141556_100 (sequence is synthesized)
gtcccgcgggggccacgcacgcccccttctctcctatgccagcatccgttccctctagtcagggtgggaagtgggagggaccagccgcagggggcgtccccatccacctttcaaccggag

SEQ ID NO: 368942 - DNA, 120 bp, Artificial Sequence
  ENSG00000141556_101 (sequence is synthesized)
agacggcagagcgtgacctcggggaagcacgtcccacgttccatacatgtggaaggagctctgtgtttctgatctacccgagggtcctggactgttctgagcgtgtcttctcaggatcag

SEQ ID NO: 368943 - DNA, 120 bp, Artificial Sequence
  ENSG00000141560_0 (sequence is synthesized)
ctctcgagtctccgccagatccggggcgggtccgcggccgcggcgggaacatggaggagctcctgaggcgcgagctgggctgcagctctgtcagggccacgggccactcggggggcgggt

SEQ ID NO: 368944 - DNA, 120 bp, Artificial Sequence
  ENSG00000141560_1 (sequence is synthesized)
gcatcagccagggccggagctacgacacggatcaaggacgagtgttcgtgaaagtgaaccccaaggcggaggccagaagaatgtttgaaggtgagatggcaagtttaactgccatcctga

SEQ ID NO: 368945 - DNA, 120 bp, Artificial Sequence
  ENSG00000141560_2 (sequence is synthesized)
aaacaaacacggtgaaagtgcccaagcccatcaaggttctggatgccccaggcggcgggagcgtgctggtgatggagcacatggacatgaggcatctgagcagtcatgctgcaaagcttg

SEQ ID NO: 368946 - DNA, 120 bp, Artificial Sequence
  ENSG00000141560_3 (sequence is synthesized)
gagcccagctggccgatttacaccttgataacaagaagcttggagagatgcgcctgaaggaggcgggcacagtggggagaggaggtgggcaggaggaacggccctttgtggcccggtttg

SEQ ID NO: 368947 - DNA, 120 bp, Artificial Sequence
  ENSG00000141560_4 (sequence is synthesized)
gatttgacgtggtgacgtgctgtggatacctcccccaggtgaatgactggcaggaggactgggtcgtgttctatgcccggcagcgcattcagccccagatggacatggtggagaaggagt

SEQ ID NO: 368948 - DNA, 120 bp, Artificial Sequence
  ENSG00000141560_5 (sequence is synthesized)
ctggggacagggaggccctccagctttggtctgctctgcagttaaagatccctgacctgttccgtgacctggagatcatcccagccttactccacggggacctctggggtggaaacgtag

SEQ ID NO: 368949 - DNA, 120 bp, Artificial Sequence
  ENSG00000141560_6 (sequence is synthesized)
cagaggattcctctgggccggtgatttttgacccagcttctttctacggccactcggaatatgagctggcaatagctggcatgtttgggggctttagcagctccttttactccgcctacc

SEQ ID NO: 368950 - DNA, 120 bp, Artificial Sequence
  ENSG00000141560_7 (sequence is synthesized)
aggattcgagaagcgccttcagttgtatcagctctttcactacttgaaccactggaatcattttggatcggggtacagaggatcctccctgaacatcatgaggaatctggtcaagtgagc

SEQ ID NO: 368951 - DNA, 120 bp, Artificial Sequence
  ENSG00000141560_8 (sequence is synthesized)
gggccttactctggaaggaggcctcagaggtttctccacagtcctcttctgggcaaattcttgtttcttcacatgctggactagcttaagaccaatgcagtagcttatttccaagccttg

SEQ ID NO: 368952 - DNA, 120 bp, Artificial Sequence
  ENSG00000141560_9 (sequence is synthesized)
caaagtatataatatctaagaggaaaggttttgtcatcccagcgttgtccactttgtggggctttgtaggtagacggagccacactacaggcagggtatgagcagagggatgtatggagt

SEQ ID NO: 368953 - DNA, 120 bp, Artificial Sequence
  ENSG00000141560_10 (sequence is synthesized)
gtgggtgactctgagcctcactgctgctgcaaggtggggaaactgtaagtgaacccctgtgggtgcgggggagggtatccggtgcgcagggaggtggccagcgcccccgggcactgctgc

SEQ ID NO: 368954 - DNA, 120 bp, Artificial Sequence
  ENSG00000141560_11 (sequence is synthesized)
tcataggtacctttccactgcctcctccctgctctcctgtgcaggaatgtctctgagctgttcacgttgatgcttcttggttggcaagacttgggtgtagacatgaaaccatcttactaa

SEQ ID NO: 368955 - DNA, 120 bp, Artificial Sequence
  ENSG00000141560_12 (sequence is synthesized)
aagcgtcttaaaatgaccaattccagaatcaagcgtattccgttttcttcctgcatgatccctgggccctcccgcaggctgagcaagtctgtaaactgattctgggagaaaccaagctgc

SEQ ID NO: 368956 - DNA, 120 bp, Artificial Sequence
  ENSG00000141560_13 (sequence is synthesized)
tggccatagggtgtccttgggtacatccaggagtcttcattgcttctgttattaccccgtctcctctgccattttctacagcttgctgagttgtcattcctttgcaacattaaaatacat

SEQ ID NO: 368957 - DNA, 120 bp, Artificial Sequence
  ENSG00000141560_14 (sequence is synthesized)
gctgaactcatatttttccttccttcactgttgtagtaaagagacatatttcatgaatggcattgatgctaataaatcctttgcacaaaaatttgaataaacttccagtggtttcgataa

SEQ ID NO: 368958 - DNA, 120 bp, Artificial Sequence
  ENSG00000141560_15 (sequence is synthesized)
gatgctgacatctgctggagcaggctctgttaggggtgttgtgtgagctggtggagacccaggccctgtttgtctctggcaggggcataagctggtaggagctcgctgaggtcgtgtctg

SEQ ID NO: 368959 - DNA, 120 bp, Artificial Sequence
  ENSG00000141560_16 (sequence is synthesized)
aaggtgactcagtttcgagagtgggcgctgggatcccttggaactaatttcctttcttttacttttgcttgcaagggagaggaggtgggcaggaggaacggccctttgtggcccggtttg

SEQ ID NO: 368960 - DNA, 120 bp, Artificial Sequence
  ENSG00000141560_17 (sequence is synthesized)
gcagctctgtcagggccacgggccactcggggggcgggtgcatcagccagggccggagctacgacacggatcaaggacgagtgttcgtgaaagtgaaccccaaggcggagggagaggagg

SEQ ID NO: 368961 - DNA, 120 bp, Artificial Sequence
  ENSG00000141560_18 (sequence is synthesized)
tttggatcggggtacagaggatcctccctgaacatcatgaggaatctggtcaaggcccctcagcagaaggcagaacagaaccgagttcctttagaatgctggtttttgtgtggagtgagg

SEQ ID NO: 368962 - DNA, 120 bp, Artificial Sequence
  ENSG00000141560_19 (sequence is synthesized)
aaggaccgtgagtgtggtcagtttccaacctgacaggacctgctcccgttggccaggactgcagcttgttactttgaccctgggaagaaggtccatcccgacggcgcgtgtgccgcttgg

SEQ ID NO: 368963 - DNA, 120 bp, Artificial Sequence
  ENSG00000141560_20 (sequence is synthesized)
cagcacagcatcaggtgcccgggacccgggacatcatcgttctgtgtcagcacatcaggtgcccggggcccggacatcatcgttccactcagcacagcatcaggtgcctgggaccctgga

SEQ ID NO: 368964 - DNA, 120 bp, Artificial Sequence
  ENSG00000141560_21 (sequence is synthesized)
catcattgttctgctcagcacagcatcaggtgcccgggaccctggacgtcattctgcatcagcacaacatcaccagtgacgagagcctccccaagtggttgacgggaaggatggttcggt

SEQ ID NO: 368965 - DNA, 120 bp, Artificial Sequence
  ENSG00000141560_22 (sequence is synthesized)
cctccagaggcggtggccttctcttcctcgatgacattgccgggctgcaccttgtgagaggccgtcgctgagagtgcagccaaatggaaccatcaggaggggtgtctcgggggtgtcgaa

SEQ ID NO: 368966 - DNA, 120 bp, Artificial Sequence
  ENSG00000141560_23 (sequence is synthesized)
ggaatccgtgtgcagcccacatgggagaggaggtgggcaggaggaacggccctttgtggcccggtttggatttgacgtggtgacgtgctgtggatacctcccccaggtgaatgactggca

SEQ ID NO: 368967 - DNA, 120 bp, Artificial Sequence
  ENSG00000141560_24 (sequence is synthesized)
caggatcgagggaattttccggtattttaatctgctgacatttggaatccgtgtgcagcccacatggtaaatgtggggagatttgctgatgatcggaacagatcaccaggggcctgctgt

SEQ ID NO: 368968 - DNA, 120 bp, Artificial Sequence
  ENSG00000141562_0 (sequence is synthesized)
gtcccagtctcccggtgcttccctgaggctgaggcgcccggcctcccgcccgccgcgctccagatgaagtgtgagcactgcacgcgcaaggaatgtagtaagaaaacaaaaactgatgac

SEQ ID NO: 368969 - DNA, 120 bp, Artificial Sequence
  ENSG00000141562_1 (sequence is synthesized)
caagagaatgtgtcagccgatgcaccgagtccagcccaggaaaatggagagaagggagaattccacaagttggctgatgccaagatatttttgagcgactgcctggcatgtgacagctgt

SEQ ID NO: 368970 - DNA, 120 bp, Artificial Sequence
  ENSG00000141562_2 (sequence is synthesized)
atgactgcagaggaaggagtccaactttcccagcaaaatgccaaggacttcttccgcgttctgaaccttaacaagaaatgtgatacctcaaagcacaaagtgctggtagtgtctgtgtgt

SEQ ID NO: 368971 - DNA, 120 bp, Artificial Sequence
  ENSG00000141562_3 (sequence is synthesized)
cctcaatctttgccttattttgctgctaaattcaacctcagtgtaactgatgcatccagaagactctgtggtttcctcaaaagtcttggggtgcactatgtatttgatacgacgatagct

SEQ ID NO: 368972 - DNA, 120 bp, Artificial Sequence
  ENSG00000141562_4 (sequence is synthesized)
gcggattttagtatcctggagagtcaaaaagaattcgtgcgtcgctatcgccagcacagtgaggaggaacgcaccctgcccatgctgacctctgcctgtcctggctgggtccgatacgcc

SEQ ID NO: 368973 - DNA, 120 bp, Artificial Sequence
  ENSG00000141562_5 (sequence is synthesized)
gagcgggtgctgggtcgccccatcactgcccacctctgcaccgccaagtccccccagcaggtcatgggctctttggtgaaggattatttcgccagacagcagaacctgtctccagagaag

SEQ ID NO: 368974 - DNA, 120 bp, Artificial Sequence
  ENSG00000141562_6 (sequence is synthesized)
attttccacgtcattgtggccccttgttatgacaagaagctggaggctcttcaggaaagccttccccctgctttgcatggctcccggggcgctgactgcgtgttaacatcaggtgaaatt

SEQ ID NO: 368975 - DNA, 120 bp, Artificial Sequence
  ENSG00000141562_7 (sequence is synthesized)
gctcaaataatggagcaaggtgacctctcagtgagagatgctgccgtcgacactctgtttggagacttgaaggaggacaaagtgacgcgtcatgatggagccagctcagacgggcacctg

SEQ ID NO: 368976 - DNA, 120 bp, Artificial Sequence
  ENSG00000141562_8 (sequence is synthesized)
gcacacatcttcagacatgcggccaaggagctgttcaacgaggatgtggaggaggtcacttaccgagccctgagaaacaaagacttccaagaggtcacccttgagaagaacggagaggtg

SEQ ID NO: 368977 - DNA, 120 bp, Artificial Sequence
  ENSG00000141562_9 (sequence is synthesized)
gtgttacgctttgctgcagcctatggctttcgaaacatccagaacatgatcctgaagcttaagaagggcaagttcccattccactttgtggaggtcctcgcctgtgctggaggatgctta

SEQ ID NO: 368978 - DNA, 120 bp, Artificial Sequence
  ENSG00000141562_10 (sequence is synthesized)
aatggcagaggccaagcccagactccagacggacatgcggataaggccctgctgcggcagatggaaggcatttacgctgacatccctgtgcggcgtccggagtccagtgcacacgtgcag

SEQ ID NO: 368979 - DNA, 120 bp, Artificial Sequence
  ENSG00000141562_11 (sequence is synthesized)
gagctgtaccaggagtggctggaggggatcaactcccccaaggcccgagaggtgctgcataccacgtaccagagccaggagcgtggcacacacagcctggacatcaagtggtgaagtcag

SEQ ID NO: 368980 - DNA, 120 bp, Artificial Sequence
  ENSG00000141562_12 (sequence is synthesized)
gccagggccttccagctgctcttggggccagagccaagagcctctcagtagagggaggggctgccctgagtggagtattaaagacacttaagaaaaccgctcaatggattactttggttt

SEQ ID NO: 368981 - DNA, 120 bp, Artificial Sequence
  ENSG00000141562_13 (sequence is synthesized)
tttggtttctccgagttccctgctaccccgtttattggaggcccctcaggcagtttcatgtggtgctatcttcataataggtgtgggattggaactttttttttctttttttttttttga

SEQ ID NO: 368982 - DNA, 120 bp, Artificial Sequence
  ENSG00000141562_14 (sequence is synthesized)
ccgccttggcctcccaaagtgccaggactgcaggcatgagccaccgtgcctggcagattggaacgttttaacatgagaggagcacttccccaatttatcccttcatcctaagattgtgaa

SEQ ID NO: 368983 - DNA, 120 bp, Artificial Sequence
  ENSG00000141562_15 (sequence is synthesized)
aaagtcccaaagagtgggaatggagacagactactgtattttaggtttaaaaagaaaaatccagaaagtgtcctgtgaagagctaggacccccagaggttctaatgcacatgacttgaag

SEQ ID NO: 368984 - DNA, 120 bp, Artificial Sequence
  ENSG00000141562_16 (sequence is synthesized)
gtgatttgatgtgggagtgagggcagagggtggggtggctgtgcctgtggactcctgtggccctggggttgttagggcaggcagtccacagtcccagatccctgcccattttggctcttt

SEQ ID NO: 368985 - DNA, 120 bp, Artificial Sequence
  ENSG00000141562_17 (sequence is synthesized)
cttttacccactcatattttccttgaaaatgtttttgccagaacattaataactgtcagccttttagaatcaggagacttacgtacaaatctggattttcagcttttcttagaaaaactg

SEQ ID NO: 368986 - DNA, 120 bp, Artificial Sequence
  ENSG00000141562_18 (sequence is synthesized)
tagtttctgacaacagtaggccccattcctcacagccagtcaccaccctcctcccattcctcacagccagtcaccaccctcctggaccatactcggccctgggccattcctcacagccag

SEQ ID NO: 368987 - DNA, 120 bp, Artificial Sequence
  ENSG00000141562_19 (sequence is synthesized)
tcaccaccctcctcccattcctcacagccagtcaccaccctcctggaccacactcggccctgggccattcctcacagccagtcaccaccctcctggaccatactcagggccctggaggcc

SEQ ID NO: 368988 - DNA, 120 bp, Artificial Sequence
  ENSG00000141562_20 (sequence is synthesized)
tggcaacccaggccccaactcaaacttgtacattcagtctttcagtcggactcgcactggggcaagggtgacagacacgagaatggaaaattgagaaggctgcccgcaccagctgggtgg

SEQ ID NO: 368989 - DNA, 120 bp, Artificial Sequence
  ENSG00000141562_21 (sequence is synthesized)
gtgcagggggccccagctcatcatcagcactgtcgtggggtgggagtcgggggtaaaggttccgtctgaccctgaggggttgaggatattcaggtggtccagcctcccgcagaagacttc

SEQ ID NO: 368990 - DNA, 120 bp, Artificial Sequence
  ENSG00000141562_22 (sequence is synthesized)
cctgtcacccttggcagacaggtttcttctcacacggccctggcccatccactcgccatgaagccctctgtgctcagggtgatggagccccctccattctggcactgcactgtgggcatg

SEQ ID NO: 368991 - DNA, 120 bp, Artificial Sequence
  ENSG00000141562_23 (sequence is synthesized)
agcttgccttaaaaagaaaggagaggccaggcacggtggctcgtgccctataatcccagcacactgggaggccaaggtgggaggattgctggagtccaggagtttctacatgggagactc

SEQ ID NO: 368992 - DNA, 120 bp, Artificial Sequence
  ENSG00000141562_24 (sequence is synthesized)
agtagctgggattacaggcgcgcgccaccgcgcctggctaattgtattcttagttgagacgggtttcgccatgttgatcgggccggtcaggctggaatttctgacctcaggtgatccaac

SEQ ID NO: 368993 - DNA, 90 bp, Artificial Sequence
  ENSG00000141562_25 (sequence is synthesized)
aaaaatttttttttaaaaaggagaaagcagtttaaccacaaacagtgaaacagagctggcagacgcctgaaactccatggaaccatgcag

SEQ ID NO: 368994 - DNA, 120 bp, Artificial Sequence
  ENSG00000141562_26 (sequence is synthesized)
cagagctggcagacgcctgaaactccatggaaccatgcagctgtaccctagggctcctcccaggaaaagagagatgtcaacgtggcccaaggtgtcctgaagcactgggattggattaac

SEQ ID NO: 368995 - DNA, 120 bp, Artificial Sequence
  ENSG00000141562_27 (sequence is synthesized)
tcgagcgatggccttcccagccctccgtgctgcagagcctctgctcgctaggctgccttcatctcactctgtgtgctgtgcctgtgcacctgtcttgtcaataactgcatatattgtgtt

SEQ ID NO: 368996 - DNA, 120 bp, Artificial Sequence
  ENSG00000141562_28 (sequence is synthesized)
gcgttgcctgtcttgctggataactgcatatattgtgttcagttgtgtatttgttttgctttcagtctatatacagttgggtttccaacctctgattctggaataaacagttgcagcgtg

SEQ ID NO: 368997 - DNA, 87 bp, Artificial Sequence
  ENSG00000141562_29 (sequence is synthesized)
ccggggcgctgactgcgtgttaacatcaggtaaggtacttatctcttggtggtgcacacctgtaatcacagctactcaggaggctgc

SEQ ID NO: 368998 - DNA, 120 bp, Artificial Sequence
  ENSG00000141562_30 (sequence is synthesized)
tactccgccgagcctacgtgacacgacgtcaagtggcaatggcggcggacgagggctgtgcccccggcccgccccgttaggagccgcgagtaaggcgagtgtccaacgccgagctggctg

SEQ ID NO: 368999 - DNA, 120 bp, Artificial Sequence
  ENSG00000141562_31 (sequence is synthesized)
gctgacagagcccggccgcggcctccgcgggcccaggggcctccaggccccgtgaccaccggaccgagcaccctggaacggccccagcttggcctcgggacagtccgcgcgctcaccgac

SEQ ID NO: 369000 - DNA, 120 bp, Artificial Sequence
  ENSG00000141562_32 (sequence is synthesized)
cgctcgctcgcttcagggctcttcaaggcgcccccggcctcggcaccctgggcccgctcggcgtggaggcggccggcgcggggtccgctgcgctctgcagggcgggttcggtcttcgcgg

SEQ ID NO: 369001 - DNA, 120 bp, Artificial Sequence
  ENSG00000141562_33 (sequence is synthesized)
gggtccgctgcgctctgcagggcgggttcggtcttcgcggttctccctgaacttgtccatctttcccacgcccgcgaagcgcggaaacgcacggagaccgagcctctcgtgccgcgcacc

SEQ ID NO: 369002 - DNA, 120 bp, Artificial Sequence
  ENSG00000141562_34 (sequence is synthesized)
tggcacaggggcccaggaaggggaggttccccatctgtccagcgtggtcacggccccccaggtgagcaaaaaggaagctgtggcttcaggaaacatcagcagtgctgtttctcaccaacg

SEQ ID NO: 369003 - DNA, 120 bp, Artificial Sequence
  ENSG00000141562_35 (sequence is synthesized)
cccgtctctattcctcccttcctcttacaacctttttctttcttcttaaccttttctgtggcatctggtggttttcctgggcccattcggggtagagtagaaatgctgcccaccctgctg

SEQ ID NO: 369004 - DNA, 120 bp, Artificial Sequence
  ENSG00000141562_36 (sequence is synthesized)
cagccgatgcaccgagtccagcccaggaaaatggagaggcaagtagatttttcagttttgtatcagcccagagtaaactactgctgctgtttttctctttgggggctcacagcaccgtgc

SEQ ID NO: 369005 - DNA, 120 bp, Artificial Sequence
  ENSG00000141562_37 (sequence is synthesized)
aaaaagaccataagcatctggagcacctgcaagagcctgtgcatgggctcggcgtgactgagagtcctccgccttgcccgagcatcaggcaggccctcccaagacccctcaagatgctag

SEQ ID NO: 369006 - DNA, 120 bp, Artificial Sequence
  ENSG00000141562_38 (sequence is synthesized)
atgccctcaggaagtctggtttcactctttctgtcactgtacgtcagcattcatgaaggacttgtattttctctgccttgtgaggtttggagacttgaaggaggacaaagtgacgcgtca

SEQ ID NO: 369007 - DNA, 120 bp, Artificial Sequence
  ENSG00000141562_39 (sequence is synthesized)
acctgccaggcccagggctgccctgctttatgacgaggccatgtgaagcactgcgatgcagtcccccaggcccctgccacaaccctcagccaccctatagctgttgaatgggataccatt

SEQ ID NO: 369008 - DNA, 120 bp, Artificial Sequence
  ENSG00000141562_40 (sequence is synthesized)
caccagggctgccagggagttgaaggtttggcgggcttccatggtgtgattgccaccctaaacccttgaggaaggacaaaatgcacaaacagctttgtcctcgctggcgcagggctgttc

SEQ ID NO: 369009 - DNA, 120 bp, Artificial Sequence
  ENSG00000141562_41 (sequence is synthesized)
atgtgtgcaccagcccccttcttcctgagtgccgtctgtgcctcacattccgtgtggtctatggggcagtggggcagctccctcaggcccctttgcaccaagagtggcagtctgggttct

SEQ ID NO: 369010 - DNA, 120 bp, Artificial Sequence
  ENSG00000141562_42 (sequence is synthesized)
gctgggggcggtgacctcgatacccagcaaggcccagggctcctgctgcaccccaggcactgggcagagagcaccacaaaggcagcagcgtgtgtcctcgccaacagtccgcatcccagg

SEQ ID NO: 369011 - DNA, 120 bp, Artificial Sequence
  ENSG00000141562_43 (sequence is synthesized)
ccggcgcaaggacccggtccccccggcgccgccatggcaacaaccgcgcagcgcacgcaggggggttttgtagctgttattgccggaatgggctcctgtggatgctgctctgtggctggc

SEQ ID NO: 369012 - DNA, 120 bp, Artificial Sequence
  ENSG00000141562_44 (sequence is synthesized)
actgtaggcatgcaccactgaagccagctcatgtttcattttttaaatcctgacttttaaaaaaatatttaccagaagcccaaacctcaccataatcctgattttttttctcctttttct

SEQ ID NO: 369013 - DNA, 120 bp, Artificial Sequence
  ENSG00000141562_45 (sequence is synthesized)
taattatgtttgccagtgtttgtctattttattagtctttgcatagaccatctattaacgttgttctgaatttctcattaaggtgtgtaacttttactccttgtgtaatcagcagatacc

SEQ ID NO: 369014 - DNA, 73 bp, Artificial Sequence
  ENSG00000141562_46 (sequence is synthesized)
aggcgtgaacctgggaggcggaacttgcatggctcactgtatggctcaccgcagccttgacctctgaggctca

SEQ ID NO: 369015 - DNA, 120 bp, Artificial Sequence
  ENSG00000141562_47 (sequence is synthesized)
ctttgcagatgtttgggaggaccacacccagtcctgagggaggcagcagacagacatggatggagtgctggtgctcggtagagttgaagaggggatgggagccagatgtggctacagcac

SEQ ID NO: 369016 - DNA, 120 bp, Artificial Sequence
  ENSG00000141562_48 (sequence is synthesized)
tttcatctgtggggcccggcctcagacccacaacagtcccagccccaagaaagtgctgcatgcagccaggctcgatggctcacgcctgtaattctagtactttggaggccgaggcgggca

SEQ ID NO: 369017 - DNA, 120 bp, Artificial Sequence
  ENSG00000141562_49 (sequence is synthesized)
aagagtgcagcatgcagtgtctggagggcagcagcagggggcattcggtctcccatccctcttgttctgggcaccaagcgtaagctgccgtcacctcttcaccagccctaaatatgggtg

SEQ ID NO: 369018 - DNA, 120 bp, Artificial Sequence
  ENSG00000141564_0 (sequence is synthesized)
gtcctggcaatatggcgtcctccttgatgggctgatgagatgagtttcactgtagctccaaaccagagggcaaagctcccatgacccaataagcccacattgtccctttcctccgtggtt

SEQ ID NO: 369019 - DNA, 120 bp, Artificial Sequence
  ENSG00000141564_1 (sequence is synthesized)
ccgtgtcgcccgtttctcaggactcgttctcaggcaggagagagcctcggggctgaaggccaggaccagccaggccgcgcggacctgaggttgaggaaccgggtgcaggcgagcacgatg

SEQ ID NO: 369020 - DNA, 120 bp, Artificial Sequence
  ENSG00000141564_2 (sequence is synthesized)
ggccggtcgtggctctggttgcagcagctcagacgagtgcgggacccgcagggctgagagtggctggaggagacccagggccctttgaacccgatcccttggccggagacctcagcccag

SEQ ID NO: 369021 - DNA, 120 bp, Artificial Sequence
  ENSG00000141564_3 (sequence is synthesized)
tcggcccagtgggcgaaccggcaccaagagcggcctgcctgtcttcggaactgctgaggcggtggaggccgagagcagggtcatcgtgaggcctgaagtctcttacgcttttggcagctc

SEQ ID NO: 369022 - DNA, 120 bp, Artificial Sequence
  ENSG00000141564_4 (sequence is synthesized)
ccctcgcagcccctctggaaacgtacagcctcaggagcagccagtggcttgggacctggggtggtgtgtgtctgcggagcttcttgggctgccccatttcctagcggcccccacctcccc

SEQ ID NO: 369023 - DNA, 120 bp, Artificial Sequence
  ENSG00000141564_5 (sequence is synthesized)
acttcccgctcagagttagagataaggatctcagacttttgcctgagtaagggtctccgcactctttatccatttggttttcgatttcccgtttttgtttcttatttcaccaattctggt

SEQ ID NO: 369024 - DNA, 120 bp, Artificial Sequence
  ENSG00000141564_6 (sequence is synthesized)
acacgctagtttttaaggctggaggttctcgagcgcttgctgccaaggactcccccaccccctcccccactgatggagtccgaaatgctgcaatcgcctcttctgggcctgggggaggaa

SEQ ID NO: 369025 - DNA, 120 bp, Artificial Sequence
  ENSG00000141564_7 (sequence is synthesized)
gatgaggctgatcttacagactggaacctacctttggcttttatgaaaaagaggcactgtgagaaaattgaaggctccaaatccttagctcagagctggaggatgaaggatcggatgaag

SEQ ID NO: 369026 - DNA, 120 bp, Artificial Sequence
  ENSG00000141564_8 (sequence is synthesized)
acagtcagtgttgccttagttttgtgcctgaatgttggtgtggaccctcccgatgtggtgaagaccacgccctgtgcacgcttggaatgctggatcgatcctctgtcgatgggtcctcag

SEQ ID NO: 369027 - DNA, 120 bp, Artificial Sequence
  ENSG00000141564_9 (sequence is synthesized)
aaagctctggaaaccatcggtgcaaatttacagaagcagtacgagaactggcagccaagggcccggtacaagcagagccttgacccaactgtggatgaagtcaagaagctctgcacgtcc

SEQ ID NO: 369028 - DNA, 120 bp, Artificial Sequence
  ENSG00000141564_10 (sequence is synthesized)
ttacgtcgcaacgccaaggaggagcgagtcctctttcactacaatggccacggggtgccccggcccacagtcaacggggaggtctgggtcttcaacaagaactacacgcagtacatccct

SEQ ID NO: 369029 - DNA, 120 bp, Artificial Sequence
  ENSG00000141564_11 (sequence is synthesized)
ctgtccatatatgacctgcagacgtggatgggcagcccgtcgatcttcgtctacgactgctccaatgctggcttgatcgtcaagtccttcaagcagttcgcactacagcgggagcaggag

SEQ ID NO: 369030 - DNA, 120 bp, Artificial Sequence
  ENSG00000141564_12 (sequence is synthesized)
ctggaggtagctgcaatcaacccaaatcaccctcttgctcagatgcctttgcctccgtcgatgaaaaactgcatccagctggcagcctgcgaggccaccgagctgctgcccatgatcccc

SEQ ID NO: 369031 - DNA, 120 bp, Artificial Sequence
  ENSG00000141564_13 (sequence is synthesized)
gacctcccggctgacctattcacctcctgcctcaccacccccatcaagatcgccctgcgctggttttgcatgcagaaatgtgtcagtctggtgcctggcgtcacactggatttgatagaa

SEQ ID NO: 369032 - DNA, 120 bp, Artificial Sequence
  ENSG00000141564_14 (sequence is synthesized)
aagatccctggccgcctgaacgacaggaggacgcccctgggtgaactgaactggatcttcacagccatcacagacaccatcgcgtggaacgtgctcccccgggatctcttccaaaagctc

SEQ ID NO: 369033 - DNA, 120 bp, Artificial Sequence
  ENSG00000141564_15 (sequence is synthesized)
ttcagacaggacttgctggtggctagtctgtttcgaaattttttattggcggaaaggattatgaggtcgtataactgcactcccgtcagcagcccgcgtctgccgcccacgtacatgcac

SEQ ID NO: 369034 - DNA, 120 bp, Artificial Sequence
  ENSG00000141564_16 (sequence is synthesized)
gccatgtggcaagcctgggacctggctgttgacatctgtctgtctcagctgccgacgatcatcgaggaaggcactgcgtttcggcacagcccgttcttcgccgagcagctgaccgcattc

SEQ ID NO: 369035 - DNA, 120 bp, Artificial Sequence
  ENSG00000141564_17 (sequence is synthesized)
caggtgtggctcaccatgggcgtggagaaccgaaacccacccgaacagctgcccatcgtcctgcaggtgctgttaagccaagtgcaccggctgagagcattggacttgcttggaagattt

SEQ ID NO: 369036 - DNA, 120 bp, Artificial Sequence
  ENSG00000141564_18 (sequence is synthesized)
ttggacctgggtccctgggcagtgagcctggccttgtctgtcggcatcttcccctacgtgctgaagctgctccagagctcggcccgagagctgcggccacttctcgttttcatctgggcc

SEQ ID NO: 369037 - DNA, 120 bp, Artificial Sequence
  ENSG00000141564_19 (sequence is synthesized)
aagatcctcgcagtggacagctcgtgccaagcggacctcgtgaaggacaacggccacaagtacttcctgtcggtcctggcggacccctacatgccagctgaacaccggaccatgacggct

SEQ ID NO: 369038 - DNA, 120 bp, Artificial Sequence
  ENSG00000141564_20 (sequence is synthesized)
ttcattctcgccgtgatcgtcaacagctatcacacggggcaggaagcctgccttcagggaaacctcattgccatctgcctggagcagctcaacgacccgcaccccttgctgcgccagtgg

SEQ ID NO: 369039 - DNA, 120 bp, Artificial Sequence
  ENSG00000141564_21 (sequence is synthesized)
gtggccatctgcctcggcaggatctggcagaacttcgactcggcgaggtggtgcggcgtgagggacagcgctcatgagaagctctacagcctcctctccgaccccattcccgaggtccgc

SEQ ID NO: 369040 - DNA, 120 bp, Artificial Sequence
  ENSG00000141564_22 (sequence is synthesized)
tgcgcagcggtcttcgcccttggcacgttcgtgggcaactctgcagagaggacggaccactccaccaccatcgaccacaacgtggccatgatgctggcccagctggtcagcgacgggagc

SEQ ID NO: 369041 - DNA, 120 bp, Artificial Sequence
  ENSG00000141564_23 (sequence is synthesized)
cccatggtccggaaggagctggtggtggctctgagtcatcttgtggttcagtatgaaagcaatttctgcaccgtggccctgcagttcatagaagaggaaaagaactacgccttgccttct

SEQ ID NO: 369042 - DNA, 120 bp, Artificial Sequence
  ENSG00000141564_24 (sequence is synthesized)
ccagcaaccacagagggagggagtttgaccccagtgcgagacagcccgtgcacccccagacttcgttctgtgagctcctatggaaacatccgtgctgtcgccacagccaggagcctcaac

SEQ ID NO: 369043 - DNA, 120 bp, Artificial Sequence
  ENSG00000141564_25 (sequence is synthesized)
aaatctttgcagaacctgagtttgacagaggaatctggtggcgcggtggcgttctcccccggaaacctcagcaccagcagcagcgccagcagcaccctgggcagccccgagaatgaggag

SEQ ID NO: 369044 - DNA, 120 bp, Artificial Sequence
  ENSG00000141564_26 (sequence is synthesized)
catatcctgtccttcgagaccatcgacaagatgcgccgcgccagctcctactcctccctcaactccctcatcggagtttcctttaacagtgtttacactcagatttggagagtcctgctg

SEQ ID NO: 369045 - DNA, 120 bp, Artificial Sequence
  ENSG00000141564_27 (sequence is synthesized)
cacctggctgctgacccctatccagaggtctcggacgtggccatgaaagtactcaacagcatcgcctacaaggccaccgtgaacgcccggccgcagcgcgtcctggacacctcctccctc

SEQ ID NO: 369046 - DNA, 120 bp, Artificial Sequence
  ENSG00000141564_28 (sequence is synthesized)
cggtcagccgagacttgccttctggccggccgggcaccacaggccccgctggggcgcagtacacccctcactcccaccagttcccccggacacggaagatgttcgacaagggcccagagc

SEQ ID NO: 369047 - DNA, 120 bp, Artificial Sequence
  ENSG00000141564_29 (sequence is synthesized)
agactgcggacgacgcggacgatgctgctggacacaaaagtttcatctccgccacggtgcagacggggttctgcgactggagcgcccgctattttgcccagcccgtcatgaagatcccag

SEQ ID NO: 369048 - DNA, 120 bp, Artificial Sequence
  ENSG00000141564_30 (sequence is synthesized)
aagagcacgacctggagagtcagatccgcaaggagcgggagtggcggttcctgcgaaacagccgtgtcaggaggcaggcccagcaagtcattcagaagggcattacgagattggacgacc

SEQ ID NO: 369049 - DNA, 120 bp, Artificial Sequence
  ENSG00000141564_31 (sequence is synthesized)
aaatatttctgaacaggaaccccggcgtcccctctgtggtgaaattccaccccttcacgccgtgcatcgccgtagccgacaaggacagcatctgcttttgggactgggagaaaggggaga

SEQ ID NO: 369050 - DNA, 120 bp, Artificial Sequence
  ENSG00000141564_32 (sequence is synthesized)
agctggattatttccacaatgggaaccctcggtacacgagggtcactgccatggagtatctgaacggccaggactgctcgcttctgctgacggccacagacgatggtgccatcagggtct

SEQ ID NO: 369051 - DNA, 120 bp, Artificial Sequence
  ENSG00000141564_33 (sequence is synthesized)
ggaagaattttgctgatttggaaaagaacccagagatggtgaccgcgtggcaggggctctcggacatgctgccaacgacgcgaggagctgggatggtggtggactgggagcaggagaccg

SEQ ID NO: 369052 - DNA, 120 bp, Artificial Sequence
  ENSG00000141564_34 (sequence is synthesized)
gcctcctcatgagctcaggagacgtgcggatcgtccggatctgggacacagaccgtgagatgaaggtgcaggacatccctacgggcgcagacagctgtgtgacgagtctgtcctgtgatt

SEQ ID NO: 369053 - DNA, 120 bp, Artificial Sequence
  ENSG00000141564_35 (sequence is synthesized)
cccaccgctcactcatcgtggctggcctcggtgacggctccatccgcgtctacgacagaaggatggcactcagcgaatgccgcgtcatgacgtaccgggagcacacagcctgggtggtga

SEQ ID NO: 369054 - DNA, 120 bp, Artificial Sequence
  ENSG00000141564_36 (sequence is synthesized)
aggcctccctgcagaagcgtcccgacggccacatcgtgagtgtgagcgtcaatggagatgtgcgcatctttgatccccggatgcctgagtcggtaaatgtgcttcagatcgtgaaggggc

SEQ ID NO: 369055 - DNA, 120 bp, Artificial Sequence
  ENSG00000141564_37 (sequence is synthesized)
tgacggccctggacatccacccccaggcggacctgatcgcatgtggctccgtcaatcagttcaccgccatctacaacagcagcggagagctcatcaacaacatcaagtactacgacggct

SEQ ID NO: 369056 - DNA, 120 bp, Artificial Sequence
  ENSG00000141564_38 (sequence is synthesized)
tcatgggccagcgggtcggcgccatcagctgcctggccttccacccgcactggcctcacctggccgtgggaagcaacgactactacatctccgtgtactcggtggagaagcgtgtcagat

SEQ ID NO: 369057 - DNA, 120 bp, Artificial Sequence
  ENSG00000141564_39 (sequence is synthesized)
agcggcgtgacccgggcccaccaggccacggccgcctgctgtacatagtgaagctgtcactcgccggggcacggggcgtcggctgctgcggccccgcagtgtgaacgttggctgctgcct

SEQ ID NO: 369058 - DNA, 120 bp, Artificial Sequence
  ENSG00000141564_40 (sequence is synthesized)
tagctgctgatgacggcaggagggccctgctactcgcttttgtctgtcttcgctgtcgtgtctggaatgtcagggaaggggagggctcgggttgacggtggcttcccactgagcaccagc

SEQ ID NO: 369059 - DNA, 120 bp, Artificial Sequence
  ENSG00000141564_41 (sequence is synthesized)
atccaggtgcacccccgcggccacggcgcctctgtccctctcctgttctgtgtttctctgagacgctgaaaggggaaacacctcactttatttccatgtaatcagagcattagctgcaga

SEQ ID NO: 369060 - DNA, 120 bp, Artificial Sequence
  ENSG00000141564_42 (sequence is synthesized)
aaaaccccccgacagagccctggcggagaggcaggcgctggggctcctacgggtccctggggcagctgtccccatcaggccaagagcgagcgagaggcgctgccccagccaggcccacca

SEQ ID NO: 369061 - DNA, 120 bp, Artificial Sequence
  ENSG00000141564_43 (sequence is synthesized)
cctctcacagtcagtgcacgcaagcagggacatttcctagccagctgggggacactggaaattcgggaaaccaagagagaggaagaaggagacgcccctccaactggcgggtgtgaagga

SEQ ID NO: 369062 - DNA, 120 bp, Artificial Sequence
  ENSG00000141564_44 (sequence is synthesized)
agccgcccaggggtccgggctgtccttggccgctggcagcatcactgagcaggaagcgcacagcccaccctccccgcacctccaggtctctggactccagttttggcccctctcacacag

SEQ ID NO: 369063 - DNA, 120 bp, Artificial Sequence
  ENSG00000141564_45 (sequence is synthesized)
agctgtcagcaggggccgctgtggcggtgcacaggggaggcaggtccttggcgaggtagcccctgccttaatccacggggctcctttccctccgaagggctgctcttccccacaggcgcg

SEQ ID NO: 369064 - DNA, 120 bp, Artificial Sequence
  ENSG00000141564_46 (sequence is synthesized)
gggacagcagcccgacctgtggtctccatgcctgtgccctcacacaggtgtagcacacgcatgtgcagatggcaccacggccggcacctgggggcacacacatgcaggcggcgtggtctc

SEQ ID NO: 369065 - DNA, 120 bp, Artificial Sequence
  ENSG00000141564_47 (sequence is synthesized)
cctgctctgtccccacacgttcctcacatacaggcaagaggcactgccgggtcccggacggctccgggtgacaccagccccgtctccagccttgagccgcccatgctgatgcgacctcgg

SEQ ID NO: 369066 - DNA, 120 bp, Artificial Sequence
  ENSG00000141564_48 (sequence is synthesized)
ctgacagctgggcctgtggtgcagacaggagctgtgtggacagtcccgcccaggaggggccgcagggcgtgtatgagcagttttgcaaacagaacacaaccacaatgatggtattttgaa

SEQ ID NO: 369067 - DNA, 120 bp, Artificial Sequence
  ENSG00000141564_49 (sequence is synthesized)
aagtgttctttccgtgttcgtcgggaatcaggattattgagaggtgaaggagccaggtggcttcattctggcggtgagaggcccacgaccacgggagtgagagctggtgtggcgaggccc

SEQ ID NO: 369068 - DNA, 120 bp, Artificial Sequence
  ENSG00000141564_50 (sequence is synthesized)
ggctctcctgcggtgtggctggtggcctgccgtggccaagagcatcttctgggtggatggaaccctgcctggtcacatttggccagagacacacctggccctcagggggctgagctggag

SEQ ID NO: 369069 - DNA, 120 bp, Artificial Sequence
  ENSG00000141564_51 (sequence is synthesized)
actgagctggggctggccgggacgtgacaaggcaggacagaggcggcccctccgctgctcctttttggaatgcgagctcccaccagaagaaggttccggcacgaatcccatccccacgtc

SEQ ID NO: 369070 - DNA, 120 bp, Artificial Sequence
  ENSG00000141564_52 (sequence is synthesized)
tgggccgagaaagcagcccgggtccggaaggtgtagagagtcccggcctcactcagctcacagggcgtgccaggcggcaacaccagaatcttccagaagcccagctccacccgcacacgc

SEQ ID NO: 369071 - DNA, 120 bp, Artificial Sequence
  ENSG00000141564_53 (sequence is synthesized)
agcttcccatccagtccttcaactcaattcttacccaacacgcgtttctgtttgttttgagacaaaatcaccacctgtcaaaaggcaggtggctccagaggggtcaagacccccccccgc

SEQ ID NO: 369072 - DNA, 120 bp, Artificial Sequence
  ENSG00000141564_54 (sequence is synthesized)
ccccgctccaccctggagcccacccccatgggcaccgcgtgccgcctgcacgtgggctgtcttcacaggtctgatgtgaaaattcaatcacgacgttaaccggctcgagagagcgccggc

SEQ ID NO: 369073 - DNA, 120 bp, Artificial Sequence
  ENSG00000141564_55 (sequence is synthesized)
ctagaggctcattatctatttattttaccaaacgcgaattgagacggactttgacaaaacacgaaatggtaatgtgaagctaagagcagagagtgaccaacagtaaacaacacgcgcaga

SEQ ID NO: 369074 - DNA, 120 bp, Artificial Sequence
  ENSG00000141564_56 (sequence is synthesized)
gtgaaggcacccatctggcagggggcagggcgctcttgcaggttccgccgtgcagagaagaagccacaaggaccgagggaggcctgaaggagatgtctaacctgagccgtagaacgtaag

SEQ ID NO: 369075 - DNA, 120 bp, Artificial Sequence
  ENSG00000141564_57 (sequence is synthesized)
cctcgcagtggacagcgtgagtatccccgccctcctccccagagtgatgtgaacctgccggcccttctggggatgccgagccctgcgtttccagcctgccctttctccagcctcgctccc

SEQ ID NO: 369076 - DNA, 120 bp, Artificial Sequence
  ENSG00000141564_58 (sequence is synthesized)
tctccaggcaccgccgttcccttcctctcttctggggtaaagtgggacgcgcccgcctcggcagccacctctgggtcgtgggggctgtcacctacctgtcctgtccctggccttcccctg

SEQ ID NO: 369077 - DNA, 120 bp, Artificial Sequence
  ENSG00000141564_59 (sequence is synthesized)
actctctgcctttgcagacccgggtgctggtcctcactcgtgcacccctctgcctgcactccttaggagcactgctgggtgtgtcccggtccctctgcctgcactctttaggagcactgc

SEQ ID NO: 369078 - DNA, 120 bp, Artificial Sequence
  ENSG00000141564_60 (sequence is synthesized)
tgggtgtgtcccggttctccgcccctggttctggtttcaccattctgggcagcttccatgtaacgaaacaggagcacggagttacctggctctgcccttcctgggcacacagcactctgc

SEQ ID NO: 369079 - DNA, 120 bp, Artificial Sequence
  ENSG00000141564_61 (sequence is synthesized)
gtccgcttgggggcagctgcactgcagagcatttgttctgaatgtgttgtcttttctgtgaacatccaagtacgctgcataaataggtacactctctttgcctttaactaagttgaaaaa

SEQ ID NO: 369080 - DNA, 120 bp, Artificial Sequence
  ENSG00000141564_62 (sequence is synthesized)
ggtctcggacgtggccatgaaagtactcaacagcatcgcctacaagagacagagtctcagtgtgtcgcccaagctggtctctaactcctcagttcaagtgatcctcctgccttggcctcc

SEQ ID NO: 369081 - DNA, 120 bp, Artificial Sequence
  ENSG00000141564_63 (sequence is synthesized)
caggcatgagccaccacacccagacttttcttccctttctgatagcagtaatttttgactcattcaaaacccttctagttaatggtttcttattcatggccattctagctcaagggaact

SEQ ID NO: 369082 - DNA, 120 bp, Artificial Sequence
  ENSG00000141564_64 (sequence is synthesized)
ctagctcaagggaacttttcaaagaatcagtttttggtttcattggtttttctctgttgtttgtccattttccatttgattgattgagctttcatcaataaagcttgctttcttctgctt

SEQ ID NO: 369083 - DNA, 120 bp, Artificial Sequence
  ENSG00000141564_65 (sequence is synthesized)
atcatagtgaggactctgactccgtttcttcacacactgaactctcggttcccgcctaccgtcccgggttcgcagctagcattcggcacaggtggtgaagcagtgtgggcccagagcaga

SEQ ID NO: 369084 - DNA, 120 bp, Artificial Sequence
  ENSG00000141564_66 (sequence is synthesized)
accagctaggacagagggtctcaatgtaacagagtatgaaaaagctactgaaacagtttccttatccaacaaaccgcttgtggagttttggtgtgtatcaaacaatactgacaattattt

SEQ ID NO: 369085 - DNA, 120 bp, Artificial Sequence
  ENSG00000141564_67 (sequence is synthesized)
caaaagactacgtatacatgtgcagctccatatgtgatgctggattttcttcctgtgcttcagttgaatcaatgtattacagcagattaaatacaattgcaaaggtgagaatccagtgac

SEQ ID NO: 369086 - DNA, 120 bp, Artificial Sequence
  ENSG00000141564_68 (sequence is synthesized)
ttctattcctgagccagacagtaaagagatttgcaacaatgaaaaacattgccactcttttcactaaaattttttgtttgggaaaatagtttcatttttaataaaaatgtcattcatgtt

SEQ ID NO: 369087 - DNA, 120 bp, Artificial Sequence
  ENSG00000141564_69 (sequence is synthesized)
cgccctccgtggcactgtgatgtcatggaattgcacggagctgggcagggaggccccacacctaacttggggaccccgtgtagcattaacaagtgaagctaaatgcagggctcccagaga

SEQ ID NO: 369088 - DNA, 120 bp, Artificial Sequence
  ENSG00000141564_70 (sequence is synthesized)
tctccacacagaggagtgggggtctccttcagagggcagaagccttggagggccttttaggactgcacgggagcagcggccggctgaagcctcacagctctgcaactcgggagggtagca

SEQ ID NO: 369089 - DNA, 120 bp, Artificial Sequence
  ENSG00000141564_71 (sequence is synthesized)
ctttgcaagagagtttctaaccttttagaaaccagtagtgagaaaataacttgctgacttgaatttatgaagcacatgcaagatcgctctggagaattaaactgttgggctcatgatcaa

SEQ ID NO: 369090 - DNA, 120 bp, Artificial Sequence
  ENSG00000141564_72 (sequence is synthesized)
agggccagggtcctttgcagaacgggctccagacagcagtagaagggctccagctccaaaaccaggaacgtttggtgtatgcgatggaaagcagagagcgggacaggcagacgatggtgc

SEQ ID NO: 369091 - DNA, 120 bp, Artificial Sequence
  ENSG00000141564_73 (sequence is synthesized)
gtctcaaaaaaaataaataaataaataagggggaaaagatgctggctcctggatccactcttgtgtgtttcttttgacaggcattacgagattggacgaccaaatatttctgaacaggaa

SEQ ID NO: 369092 - DNA, 120 bp, Artificial Sequence
  ENSG00000141564_74 (sequence is synthesized)
ctattcacctcctgcctcaccacccccatcaagatcgccctgcgctggtgagtggcccctgctgtgcccctgggacccactcaactgggctctcccgcagggaccccaacccatgtgggc

SEQ ID NO: 369093 - DNA, 120 bp, Artificial Sequence
  ENSG00000141564_75 (sequence is synthesized)
cccaggcattcacctggtcccaggagcccacgtgacagacatgagtgtccccgccttctttttgtgtcattcgggattccaggtggaggtttgggttctactctttgagagctcaagatc

SEQ ID NO: 369094 - DNA, 120 bp, Artificial Sequence
  ENSG00000141564_76 (sequence is synthesized)
cttcttccttctgatctgttcgtgggcagctcactgctttgcgatttccaagaacaccctctccttacctttgttcactgcggaggcgtcttagtaccaggataggtcatactggaaact

SEQ ID NO: 369095 - DNA, 120 bp, Artificial Sequence
  ENSG00000141564_77 (sequence is synthesized)
ggactttctttcaggggaagaaaaggctgttatgaaaaaggaagtcatttaattccttgcttgagttgaagcgtaatctttcaatgtatttttagcaatgaaaaaagagccatgattttt

SEQ ID NO: 369096 - DNA, 120 bp, Artificial Sequence
  ENSG00000141564_78 (sequence is synthesized)
ctgtctccatcctttttaagttatagccgtcgggaacataactgaagaaatgtgtgtgatattccaagatggtagaagccgcatttcagccccaacatccccagcagaacgcacagtggg

SEQ ID NO: 369097 - DNA, 120 bp, Artificial Sequence
  ENSG00000141564_79 (sequence is synthesized)
atatgtgtgtttcctgcctccaaatccaatattctcccctagaccatcttgccagtctttaatatctcctttcccattttatgttttgctgaaaagcttatatgtcgtggctgttaccgg

SEQ ID NO: 369098 - DNA, 120 bp, Artificial Sequence
  ENSG00000141564_80 (sequence is synthesized)
ctagtagataaatacctctcccttgaggtgccgtgcgaatggtgcagctgtgcagcagacaccgtgctgtcggccgaggacactcttgaggcttctgtcaagatggcctaacactctaga

SEQ ID NO: 369099 - DNA, 120 bp, Artificial Sequence
  ENSG00000141564_81 (sequence is synthesized)
caagtctcctgccttctcacccacagccctgggcggacacggggagctaacagcacagcaaagtaagggcccccagggacaccctgggaggggccagaggggcagggcagcctgaggggg

SEQ ID NO: 369100 - DNA, 120 bp, Artificial Sequence
  ENSG00000141568_0 (sequence is synthesized)
cgggtccccgccgggcggctgggccgtggcgcgcctggagggccgcgagttcgagtatctgatgaagaagcgctcggtgaccatcggccgcaactcgtcgcagggctcggtggacgtgag

SEQ ID NO: 369101 - DNA, 120 bp, Artificial Sequence
  ENSG00000141568_1 (sequence is synthesized)
tgagcatgggccactcgagcttcatctcccggcgccacctcgagatcttcacgcccccgggcggcggcggccatggcggggccgctccggagctgccgcccgcgcagcccaggcccgacg

SEQ ID NO: 369102 - DNA, 120 bp, Artificial Sequence
  ENSG00000141568_2 (sequence is synthesized)
cggcgacttctacctgcgctgcttgggcaagaacggggtattcgtggacggcgtgttccagaggcgcggggcgccgccgctgcagctgccgcgcgtgtgcacattcaggttcccgagcac

SEQ ID NO: 369103 - DNA, 120 bp, Artificial Sequence
  ENSG00000141568_3 (sequence is synthesized)
aaacatcaagataacgttcactgccctgtccagcgagaagagagagaagcaggaggcgtctgagtctccagtgaaggccgtacagccacacatctcgcccctgaccatcaacattccaga

SEQ ID NO: 369104 - DNA, 120 bp, Artificial Sequence
  ENSG00000141568_4 (sequence is synthesized)
caccatggcccacctcatcagccctctgccctcccccacgggaaccatcagcgctgcaaactcctgcccctccagcccccggggagcggggtcttcagggtacaaggtgggccgagtgat

SEQ ID NO: 369105 - DNA, 120 bp, Artificial Sequence
  ENSG00000141568_5 (sequence is synthesized)
gccatctgacctcaatttaatggctgacaactcacagcctgaaaatgaaaaggaagcttcaggtggagacagcccgaaggatgattcaaagccgccttactcctacgcgcagctgatagt

SEQ ID NO: 369106 - DNA, 120 bp, Artificial Sequence
  ENSG00000141568_6 (sequence is synthesized)
tcaggcgattacgatggctcccgacaaacagctcaccctgaacgggatttatacacacatcactaaaaattatccctactacaggactgcggacaagggctggcagaattcaattcgcca

SEQ ID NO: 369107 - DNA, 120 bp, Artificial Sequence
  ENSG00000141568_7 (sequence is synthesized)
caatctctctctgaatcgttatttcatcaaagtgccgcgttcccaggaagaaccaggcaaaggctcgttctggaggatagacccagcctctgaaagcaaattaatagaacaggcttttag

SEQ ID NO: 369108 - DNA, 120 bp, Artificial Sequence
  ENSG00000141568_8 (sequence is synthesized)
gaaacgacggcctaggggcgtgccctgctttagaacccctctgggaccgctctcttctaggagtgccccagcctctcccaatcacgcgggagtgctgtctgctcactctagtggcgccca

SEQ ID NO: 369109 - DNA, 120 bp, Artificial Sequence
  ENSG00000141568_9 (sequence is synthesized)
gacccctgagagcctgtcgagggaaggttcgccggcccccctggagcctgagcctggcgctgcacagcccaaactcgctgtcatccaggaagcccggtttgcccagagcgccccagggtc

SEQ ID NO: 369110 - DNA, 120 bp, Artificial Sequence
  ENSG00000141568_10 (sequence is synthesized)
acctctgtccagtcagccagtcttaatcaccgtccagcggcagctaccacaggccatcaagcctgtcacctacactgtggccaccccagtgaccacctcgacctcccagccacccgtcgt

SEQ ID NO: 369111 - DNA, 120 bp, Artificial Sequence
  ENSG00000141568_11 (sequence is synthesized)
gcagacggttcacgtcgtccaccagatcccagcggtgtcggtcaccagtgtggccggactggccccagcgaacacgtacactgtctctggacaagctgtggtcaccccggcagccgtgct

SEQ ID NO: 369112 - DNA, 120 bp, Artificial Sequence
  ENSG00000141568_12 (sequence is synthesized)
ggcccctcctaaggcagaggcccaggagaatggagaccacagggaagtcaaagtgaaagtagagcctattcccgccattggccacgccacgctcggcactgccagccggatcattcagac

SEQ ID NO: 369113 - DNA, 120 bp, Artificial Sequence
  ENSG00000141568_13 (sequence is synthesized)
ggcacagaccaccccggtccagacggtgaccatagtacaacaggcacctctaggtcaacaccagctaccaataaaaactgtaacacaaaacggcactcacgtggcatcagtccccactgc

SEQ ID NO: 369114 - DNA, 120 bp, Artificial Sequence
  ENSG00000141568_14 (sequence is synthesized)
ggtccacggccaggtgaacaatgccgcggcgagtcctttgcacatgttggcaacacacgcatccgcatcggcctccctgcccacaaagcgccacaacggtgaccagccggagcagccgga

SEQ ID NO: 369115 - DNA, 120 bp, Artificial Sequence
  ENSG00000141568_15 (sequence is synthesized)
gctgaagcggatcaagacagaagacggcgagggcatcgtcattgccctgagcgtggacacgccaccggcagccgtaagggaaaagggtgtccagaactagcgaccgggagagcttttctt

SEQ ID NO: 369116 - DNA, 120 bp, Artificial Sequence
  ENSG00000141568_16 (sequence is synthesized)
taacgatatcaactctgtggtgccaaaaggagacgcggcctcccgccagcactcgggggtgcagggccctgtggttggacttcacctctcagcactgaaaacccaaaacccagctggcct

SEQ ID NO: 369117 - DNA, 120 bp, Artificial Sequence
  ENSG00000141568_17 (sequence is synthesized)
taacactccttaaagacagaagtcacacttgaacaaaacccacacacaacaaaacctgatttgggagacggtgtctccactgagcacctgctgggctgagcttctacctacgagtgaaac

SEQ ID NO: 369118 - DNA, 120 bp, Artificial Sequence
  ENSG00000141568_18 (sequence is synthesized)
tctgtcctcccgcgaggaccaggcatcgctgtgtgaggacggcacggccagcgcctgctgtgagtgggtctcccaagactaggcctcaggacgcggggggagccatccccgccgccctca

SEQ ID NO: 369119 - DNA, 120 bp, Artificial Sequence
  ENSG00000141568_19 (sequence is synthesized)
tttcacatcactccatttctactgagactttcagaatcacacaggccctttccgtggatttcatttggggcaaagaaacaacgtagttttgtttttgttttcagcctatggaatgatttc

SEQ ID NO: 369120 - DNA, 120 bp, Artificial Sequence
  ENSG00000141568_20 (sequence is synthesized)
cttttgtctgtcttgttcaagttcagacgaagctactctggcatctgcacatttccgtgttacagcagctgcctgatgaattttatccacctccatttcagcatgtggctcgcgtggaca

SEQ ID NO: 369121 - DNA, 120 bp, Artificial Sequence
  ENSG00000141568_21 (sequence is synthesized)
ggtggacggacgctgtggccgcatggaaccttgagaacccagggacgagccagtgccgggaaggaactgccgggactcaccgagctgcacttaactgttctctttctggctattttttgt

SEQ ID NO: 369122 - DNA, 120 bp, Artificial Sequence
  ENSG00000141568_22 (sequence is synthesized)
tgtttgtttctttgtgttgactttgtccctggcaaaattttccactctgagtaaaacaagtctcctaagtattgtgtatgtttaaaacgacagaaccatttctacttcatttggaaaaag

SEQ ID NO: 369123 - DNA, 120 bp, Artificial Sequence
  ENSG00000141568_23 (sequence is synthesized)
attcagtcttttatcacaggcccttttgaaactcagatcccaggtctctccgtggtatgtttgtatttggggtgtccctccggctctaggcggcctctgacctgctgtctactccccacc

SEQ ID NO: 369124 - DNA, 120 bp, Artificial Sequence
  ENSG00000141568_24 (sequence is synthesized)
ttcggtgagcggccgccatggtggagcagggtccgagccacgtcctgcagggcacgtctggggcatttcctgttttgtggtaggaaatgtccctgacctttcagaaccgaacccaatcct

SEQ ID NO: 369125 - DNA, 120 bp, Artificial Sequence
  ENSG00000141568_25 (sequence is synthesized)
gaggctgactcctctacggaaaatgaggacaggacgggggtgagggaatgagagtgggaggtccctgcacctcctcgcccggctcctcaggaagaaaaccgctggcccttcccgagtgtg

SEQ ID NO: 369126 - DNA, 120 bp, Artificial Sequence
  ENSG00000141568_26 (sequence is synthesized)
ccggccgagggccgagggccgtgcacatggggagagggcgtcagcctgatggctgagcttttaaatgtcatcatcataacattatttatttaaatgtagttattttggtatttaattttt

SEQ ID NO: 369127 - DNA, 120 bp, Artificial Sequence
  ENSG00000141568_27 (sequence is synthesized)
ttttagagaggaaaaaacctgtattttcctggtgggatgaaatagggatgaaatggctcagaatggtatatttaggcaattttaaaacatttattatttacataaagaccaaatatgatg

SEQ ID NO: 369128 - DNA, 120 bp, Artificial Sequence
  ENSG00000141568_28 (sequence is synthesized)
aatctgttccgtgaattgtgtcggccctcagcatggggctggggcagcgtcactgcggtgacgcccattgaaaggtatgaaatgactgcacactagctggattatcactcagccgtttaa

SEQ ID NO: 369129 - DNA, 120 bp, Artificial Sequence
  ENSG00000141568_29 (sequence is synthesized)
gaaataaaagcaaaaccatcacgtgactgagaccgtgtgtgtgaccgcagcaaagcgcagcgtgtggatggatcagagcccctcggtgcagctgtctgcatcttccaagcactttacaga

SEQ ID NO: 369130 - DNA, 120 bp, Artificial Sequence
  ENSG00000141568_30 (sequence is synthesized)
taccttggaatgtatatttttgtcttcttactcagaaggtttgcagtttgtaaaataatcaggattctgctctgtcctgtgtgtggggtcagctccctccacagagggctccagctctgt

SEQ ID NO: 369131 - DNA, 120 bp, Artificial Sequence
  ENSG00000141568_31 (sequence is synthesized)
tggtcacagctgatggggttctctgattgataggagacgagctcttgagctctaaggaacagtgaggtcgccggtggggagcttggctgggacaccaagcaaatgcatcgtatgtcccct

SEQ ID NO: 369132 - DNA, 120 bp, Artificial Sequence
  ENSG00000141568_32 (sequence is synthesized)
tggagacgtttttatgcagctgtgtatgttactatccagaaggagtcgggggtagactttcccgtgtaagctcagtccataaactggttacttctgatcctggaacgtggacttcacatg

SEQ ID NO: 369133 - DNA, 120 bp, Artificial Sequence
  ENSG00000141568_33 (sequence is synthesized)
ataggtctggatctgtttctgttgggatcacaggtaaggaaaatgtccattcaaatggtaaagaagggaggagggtgttttttttttttttttttgccgtaggcaccattctgcatcttg

SEQ ID NO: 369134 - DNA, 120 bp, Artificial Sequence
  ENSG00000141568_34 (sequence is synthesized)
aacccagactgaagtgtgcctctcacagatggaaggtgcacacgctcctgtctcctcctcactctgccacgttcacttggctttttcattggtacctaggaatttaagaatatcgaagcg

SEQ ID NO: 369135 - DNA, 120 bp, Artificial Sequence
  ENSG00000141568_35 (sequence is synthesized)
agagcagtaacaaaccatagatgagcagactcccacaccgggttttcttgcccgtctttaaggcactgtttctaaattttgaacttagctctgaatccccaagaacttgagcacagcaag

SEQ ID NO: 369136 - DNA, 120 bp, Artificial Sequence
  ENSG00000141568_36 (sequence is synthesized)
ggttgctgagctgctgtcgccgcagccctggcccctggtgctggagctgcagcacctttgggagaggtcctgcgtcgtcctcagctgcgtcgctgtgaactcccgctctccactgtgttc

SEQ ID NO: 369137 - DNA, 120 bp, Artificial Sequence
  ENSG00000141568_37 (sequence is synthesized)
ctcagtgtctgcttttcaggaagtctgctgtgacctttgcccaacttctgagctcctcagggactaggaacaatttcagtagctttgccctgaaccaaacgagaaaacaaaagggaactc

SEQ ID NO: 369138 - DNA, 120 bp, Artificial Sequence
  ENSG00000141568_38 (sequence is synthesized)
ccgtatgacccacgtcacgtggtgcactcagagtgtgtgcggcatgatcctcggttgctcctcctctcactttagtagagtacgcggtggacagctgatctccttcagtcgtctacccac

SEQ ID NO: 369139 - DNA, 120 bp, Artificial Sequence
  ENSG00000141568_39 (sequence is synthesized)
ttccgtcattgtcctccgctagaataacagagtagttggtagtcatggccagaaggggggtgggggcagtgtgaggacttggggtttctgtgctgtgtgacacaaggagataagtgacaa

SEQ ID NO: 369140 - DNA, 120 bp, Artificial Sequence
  ENSG00000141568_40 (sequence is synthesized)
tcttgaagtcctaacttccactattctagaaagtatagtggtgatttgtgtgcaaagatttgaagttttaaaaaagtaccaagttcctgaaattcaataaaatatttttattaattttaa

SEQ ID NO: 369141 - DNA, 120 bp, Artificial Sequence
  ENSG00000141568_41 (sequence is synthesized)
agccccttctcactcgtggtttcggttctgactgtaacaattttagcttttgtctgaggcaatgtttgcatttcgaagctgcaggaaatctagtcatgctggggaagtggtcgtggagtc

SEQ ID NO: 369142 - DNA, 120 bp, Artificial Sequence
  ENSG00000141568_42 (sequence is synthesized)
ggccgtcatgggattcccgtgggaggacctgcctgaaaagagatgagagtttctaatacattgagagggaaaaatactctcgcctcttgtagatttcctgggtgtggcctggaagcggcc

SEQ ID NO: 369143 - DNA, 120 bp, Artificial Sequence
  ENSG00000141568_43 (sequence is synthesized)
acagctgcgctcagctcagagccagcttcgtgtgcagagcccagcagagatggcggagccacttggcatccaagcaccttgccctgtttgtgtccacctggttctgccgtgagaacccct

SEQ ID NO: 369144 - DNA, 120 bp, Artificial Sequence
  ENSG00000141568_44 (sequence is synthesized)
cacatgataggtctggatctgtttctgttgggatcacagtggatcagtgttatagactcggaatccattttccatcccacacgcaaagcatcctaaagcagaagtgtaaaagagacatta

SEQ ID NO: 369145 - DNA, 120 bp, Artificial Sequence
  ENSG00000141568_45 (sequence is synthesized)
atccccaggcctggagtggttaaaagaaagaggtctggagaaatgacaactactgagaactcttgcagatgctcaaaccacacagacacgataggtgctaagtcacaactcctgtccttg

SEQ ID NO: 369146 - DNA, 120 bp, Artificial Sequence
  ENSG00000141568_46 (sequence is synthesized)
tacaaatgttactaagtgacaagcacatccatgcagggcattttgtttgtcctttagcaaaggagtcttggagttgttcacacaacttccccactgcaggggccttctgtggcatcccca

SEQ ID NO: 369147 - DNA, 120 bp, Artificial Sequence
  ENSG00000141568_47 (sequence is synthesized)
tggaggacgatcagtgacaaacgtgaaggacacttctagaggaaagccaccaagcaggcaatcccgcccactgtggacaccaggtgaagggaagggcagggtgctggggagacaagaggt

SEQ ID NO: 369148 - DNA, 120 bp, Artificial Sequence
  ENSG00000141568_48 (sequence is synthesized)
agtcctagactccaggaaccgggaaggtgaggaaaggatgctctttcccatttacagggtggtctcccgtgactttgctcccacctataaatcatcctaactccttaaaatcctgtcaga

SEQ ID NO: 369149 - DNA, 120 bp, Artificial Sequence
  ENSG00000141568_49 (sequence is synthesized)
gtctcaatgagttacccaggtcactcatcctggtcactgcctccaagtcacacagcaggctgttaatggtccaaataaacagcactgttagaaactgaataaagcacttaagtgcgtaga

SEQ ID NO: 369150 - DNA, 120 bp, Artificial Sequence
  ENSG00000141568_50 (sequence is synthesized)
ctaacacggctcctccgggtcacgtgggtgggctcagcggcctcccgtgcctcccctaggtctggagtctcccctgccctctcgttgggctccaagcctcttcctcagcccagcttcctg

SEQ ID NO: 369151 - DNA, 83 bp, Artificial Sequence
  ENSG00000141568_51 (sequence is synthesized)
ctcgttgggctccaagcctcttcctcagcccagcttcctgctttgtggcagccgtgctttctggaagctgagcagtttgtccc

SEQ ID NO: 369152 - DNA, 76 bp, Artificial Sequence
  ENSG00000141568_52 (sequence is synthesized)
agcctcccgagtagttgggactataggcccccaccaccttgcccctggccagttcgagactggtcttgaactcgta

SEQ ID NO: 369153 - DNA, 76 bp, Artificial Sequence
  ENSG00000141568_53 (sequence is synthesized)
tttttagtagagatggtgtttcaccatgctggccagttcgagactggtcttgaactcgtaacctcaggtgatcctc

SEQ ID NO: 369154 - DNA, 120 bp, Artificial Sequence
  ENSG00000141568_54 (sequence is synthesized)
ttatgtgtaaattggtcctctgctatttctgttgctcagaggtggaaaggagaagggaacacgataaagtcacacatccacactgttgacaggggtttggcttccagggaacacacctct

SEQ ID NO: 369155 - DNA, 120 bp, Artificial Sequence
  ENSG00000141568_55 (sequence is synthesized)
gtggcctcagggctatgtcctgaattctaaaacggggctctcacggctgacccgatgtcactgggtccccgtttgctgcttgagtctcttcggagcccagtgttgactcccgctcttcgt

SEQ ID NO: 369156 - DNA, 120 bp, Artificial Sequence
  ENSG00000141568_56 (sequence is synthesized)
ggctgccccggctatctggccatgaggagctgaccacgcacctggccggactcacatccgctccgctagggaagacctgggggcggaggtcggtctctgaccagccagcgtccctgcagg

SEQ ID NO: 369157 - DNA, 120 bp, Artificial Sequence
  ENSG00000141568_57 (sequence is synthesized)
ggactgcgagtaggaggcgggtattgcccacgccagggcctgtggtctgagagggctggcccttgacggacaggtgggcaagtccccctcccacatctctaggcaccagggcgtagcgta

SEQ ID NO: 369158 - DNA, 120 bp, Artificial Sequence
  ENSG00000141568_58 (sequence is synthesized)
ccatgtgtgctgtgtttgtggttgggttcaggtactgccctgtaggcgtgtctgctctgagcctcctgggacagcctgaagtggttgctgcacagctgctttggggcctcccaggggtgt

SEQ ID NO: 369159 - DNA, 120 bp, Artificial Sequence
  ENSG00000141568_59 (sequence is synthesized)
gttcctgctcccaccctggggtgctctgagttggtcttgggttagagaagtgcagtggctggtgtgtgcgcagcctaggggcctaggacctgcttctcagagcatcacggggcccaccaa

SEQ ID NO: 369160 - DNA, 120 bp, Artificial Sequence
  ENSG00000141568_60 (sequence is synthesized)
gaagtgccccctggggaggtgacagcgtcttccagaaatgccgccgcccacaaggaggactggcctgtgccggaagctggagatggtggggtcctgatggcacctggtaggtgagggtgc

SEQ ID NO: 369161 - DNA, 120 bp, Artificial Sequence
  ENSG00000141568_61 (sequence is synthesized)
cccagagaaacagagccaaggcggcggcctggagacagattctgtggaatctgcccactctgttgtggggcctgccaagctcagcatctgcagggtggaccgaaccccggggaaagagtc

SEQ ID NO: 369162 - DNA, 120 bp, Artificial Sequence
  ENSG00000141568_62 (sequence is synthesized)
agtgctggattctcaagagtccagaggccatccagggcagagtgctcccctcagaggacctcagtcttttcttagtccttcacctgattggatgaggcccacccactcatggcgatcagc

SEQ ID NO: 369163 - DNA, 120 bp, Artificial Sequence
  ENSG00000141568_63 (sequence is synthesized)
tgatttactcagagctgactgatttaaatgttaatttcatctaaagaagtaactatacagaaacatccagattaatggttgaccaaaatctgggcactgtggctcagccaggctggcaca

SEQ ID NO: 369164 - DNA, 120 bp, Artificial Sequence
  ENSG00000141568_64 (sequence is synthesized)
taacattacccatcgcatgttagttggaagcttggcctttggaattaactcagcctggtcagccgttagcagccagcagtctctgttctgcccacacacctctgtggactgacccaggac

SEQ ID NO: 369165 - DNA, 120 bp, Artificial Sequence
  ENSG00000141568_65 (sequence is synthesized)
acaggtgagcagcatccatgagaaactgtggtgcttctctcctatgggacagatggagccccgctcccttctgtgtggaaatggtccaggagcatcttgtgcgggtggtgggggggcgag

SEQ ID NO: 369166 - DNA, 120 bp, Artificial Sequence
  ENSG00000141568_66 (sequence is synthesized)
ggcagggcctccgcatgagggagagcagcgagcggcagccactccttcgccgagccagcagggccatctcctgtctgcctcaaccactactggactcagcctttctcccccagcagtgac

SEQ ID NO: 369167 - DNA, 120 bp, Artificial Sequence
  ENSG00000141568_67 (sequence is synthesized)
tgttaataaaaatgtccgctaatcaggcagttcacttgctgcagttttttggggtcccaagggcccagcccaggctcctgtgcccttggccaccgtgggccagtccctggggtcttgtgg

SEQ ID NO: 369168 - DNA, 120 bp, Artificial Sequence
  ENSG00000141568_68 (sequence is synthesized)
gagcctccgcgggcctgggagtggcaggacccttagagggcgagagttcacatgagagcgtggggttctgactcgcgagggttcacgtgagagcgtggggttctgagtcgcgagggttca

SEQ ID NO: 369169 - DNA, 120 bp, Artificial Sequence
  ENSG00000141568_69 (sequence is synthesized)
agcgataggcacagaggaaggtagatgaagccccgcgcccccctggcggagcccagccctgttcaccgcgtgctgtgcgggtgcctgtgccaggatcagctggctggacggctatagccc

SEQ ID NO: 369170 - DNA, 120 bp, Artificial Sequence
  ENSG00000141568_70 (sequence is synthesized)
cacgcctgcaggccacatacctgggagagtgtgggccttccgagccttctggctcccggccccacagaggaattacggtcccatgtccctcacaaggacccttgcagagggagcagtgca

SEQ ID NO: 369171 - DNA, 120 bp, Artificial Sequence
  ENSG00000141568_71 (sequence is synthesized)
acagcaggccccatccagacagaccagcaggtgcttctggagacaagagcaaagccttttccggcagcccggaacctgggatgagaaacgacaggtggaaggttgtccagagacacctac

SEQ ID NO: 369172 - DNA, 120 bp, Artificial Sequence
  ENSG00000141568_72 (sequence is synthesized)
agcgtggatgctgttccgagtcagcgtaggagaaaggccactggaaaccagagtcacactgcgcgtctgtgcatctctggcctaccgcagtggccccggctgtctgcacattttttgtag

SEQ ID NO: 369173 - DNA, 120 bp, Artificial Sequence
  ENSG00000141568_73 (sequence is synthesized)
acacattagagtcggttgaggccacacctgcggccacagactgcgaccgcgattgcagggaggagcatctgaggtggtcacggggtttgcccagctcacaccaactgcagccgcggcgag

SEQ ID NO: 369174 - DNA, 120 bp, Artificial Sequence
  ENSG00000141568_74 (sequence is synthesized)
acaagggctggcaggtaaatgccttcagtttgttgttaaatagaggctgatggataccgagaagaaagtggagcggctgctgtctggaacacaggcacaggataggaaggtagaaggggg

SEQ ID NO: 369175 - DNA, 120 bp, Artificial Sequence
  ENSG00000141568_75 (sequence is synthesized)
agaggagttgggggccggtgctgccatgctctgcctcaccttctttgtgtggagcagaaggaagcgtggttctggaggagcgtctaggcctgcatgctttactgttgtggaaattcatgt

SEQ ID NO: 369176 - DNA, 120 bp, Artificial Sequence
  ENSG00000141568_76 (sequence is synthesized)
ggagccgggctgaggctgcgggtcccttgtggccgccaggtgctcacgcgtgcctcggtggggatctggcagccagatttggggtgaggatttgatgatgtgggtatccctagctggtcc

SEQ ID NO: 369177 - DNA, 120 bp, Artificial Sequence
  ENSG00000141568_77 (sequence is synthesized)
cacagtgacgatgggtgttgcgttgtgagcatgtaaaacggcagtgacgtctgagggtccctggacgtctttcacacccagcctcaaagcggagcctttccaggcagagcagcagctgcc

SEQ ID NO: 369178 - DNA, 120 bp, Artificial Sequence
  ENSG00000141569_0 (sequence is synthesized)
gccgccgccgggccatggccgcgcagctgctggaggagaagctgacctgcgccatctgcctggggctctaccaggacccagtgacgctgccctgcggccacaacttctgcggggcctgca

SEQ ID NO: 369179 - DNA, 120 bp, Artificial Sequence
  ENSG00000141569_1 (sequence is synthesized)
tccgggactggtgggaccgctgcggaaaggcgtgccccgagtgccgggagccctttcccgacggcgccgagctgcgccgcaacgtggccctcagcggcgtgctggaggtggtgcgcgccg

SEQ ID NO: 369180 - DNA, 120 bp, Artificial Sequence
  ENSG00000141569_2 (sequence is synthesized)
cccggccccgaccctgccgcgcgctgcccccgccacgggcggccgctggagctcttctgccggaccgagggccgctgtgtgtgcagcgtgtgcaccgtgcgcgagtgtcgcctccacgag

SEQ ID NO: 369181 - DNA, 120 bp, Artificial Sequence
  ENSG00000141569_3 (sequence is synthesized)
tgtgcaccgtgcgcgagtgtcgcctccacgagcgggcgctgctggatgccgagcgcctcaagcgcgaggcccagctgagagccagcctggaggttacccagcagcaggccacccaggccg

SEQ ID NO: 369182 - DNA, 120 bp, Artificial Sequence
  ENSG00000141569_4 (sequence is synthesized)
aaggccagctactagagctgcgcaagcaaagcagccagatccagaactcggcctgcatcttggcctcctgggtctccggcaagttcagcagcctgctacaggccctggaaatacagcaca

SEQ ID NO: 369183 - DNA, 120 bp, Artificial Sequence
  ENSG00000141569_5 (sequence is synthesized)
cgacagcactgaggagcatcgaggtggccaagacgcaggcgctggcacaggctcgagacgaggagcagcggctgcgggtccatttggaggctgtggctcgccatggctgcaggatccggg

SEQ ID NO: 369184 - DNA, 120 bp, Artificial Sequence
  ENSG00000141569_6 (sequence is synthesized)
agctcctggagcaggtggatgagcagaccttcctgcaggaatcgcagctcctccagcccccagggcctcttgggccactgacccctctgcagtgggatgaagaccaacagctgggtgacc

SEQ ID NO: 369185 - DNA, 120 bp, Artificial Sequence
  ENSG00000141569_7 (sequence is synthesized)
tgaagcagttgctaagccggctgtgtggcctcctcttggaagaggggagccaccctggggcaccagccaagcctgtggacttagcccccgtggaggccccaggtcccctggcaccggtcc

SEQ ID NO: 369186 - DNA, 120 bp, Artificial Sequence
  ENSG00000141569_8 (sequence is synthesized)
caagcacagtttgtccactgaggaggaaactctggcagaattatcgcaatctgacctttgatccagtcagcgccaaccgtcacttctatctgtcgcgccaggaccagcaggtgaagcact

SEQ ID NO: 369187 - DNA, 120 bp, Artificial Sequence
  ENSG00000141569_9 (sequence is synthesized)
gtcgtcagtcccggggcccaggcgggcccggcagctttgagctctggcaggtgcaatgtgcccagagcttccaggccgggcaccactactgggaggtgcgcgcgtcagaccactcggtga

SEQ ID NO: 369188 - DNA, 120 bp, Artificial Sequence
  ENSG00000141569_10 (sequence is synthesized)
cactgggcgtctcctacccgcaactgccacggtgcaggctggggccccacacagacaacattggccggggaccctgctcctgggggctctgcgtccaggaggacagcctccaggcctggc

SEQ ID NO: 369189 - DNA, 120 bp, Artificial Sequence
  ENSG00000141569_11 (sequence is synthesized)
acaacggggaagcccagcgcctcccaggggtgtcagggcggctcctgggcatggatttggacctggcctcaggctgcctcaccttctacagcctggagccccagacccagcccctgtaca

SEQ ID NO: 369190 - DNA, 120 bp, Artificial Sequence
  ENSG00000141569_12 (sequence is synthesized)
ccttccatgccctcttcaaccagcccctcacccccgtcttctggctcctcgagggtaggaccctgaccctgtgccatcagccaggggctgtgttccctctggggccccaggaagaggtgc

SEQ ID NO: 369191 - DNA, 120 bp, Artificial Sequence
  ENSG00000141569_13 (sequence is synthesized)
tcagctgaagaaggcatgggatggagccctggcatagctgccaccatgcctatgtgcccaagagctgcccagcttcagcttggggactggaggaccagctgttggcctctctgttaactc

SEQ ID NO: 369192 - DNA, 120 bp, Artificial Sequence
  ENSG00000141569_14 (sequence is synthesized)
ggtgagcataaacgcagagttcactgttgcagcctttttgaaggggacacagtctaggagggggataaatgggatgcccttgccccagagagaacccagttctaggtactgtctgggcct

SEQ ID NO: 369193 - DNA, 120 bp, Artificial Sequence
  ENSG00000141569_15 (sequence is synthesized)
gggaggcgagagcagtgcccaggggacttctgggcttacaggacagcgtgtgtgacaaaattcagatctacctgaacttgcctctggagatgataagggccaaaggagcagtcagggagg

SEQ ID NO: 369194 - DNA, 120 bp, Artificial Sequence
  ENSG00000141569_16 (sequence is synthesized)
ggcggtgagccagagtagtcccagggggagacagattcctccctcctccccgcctgcagctctctttaattttttgtaacatttggagagacgtccgtcctgtcttgtagtctttttatt

SEQ ID NO: 369195 - DNA, 120 bp, Artificial Sequence
  ENSG00000141569_17 (sequence is synthesized)
ttgtgcatccttataattgtattctacaaacaattttgttttctgcatttaaacatttttgtgtttttaggagatggtcttgctctgtcactcaggctggagtacagtggcacaatcatg

SEQ ID NO: 369196 - DNA, 120 bp, Artificial Sequence
  ENSG00000141569_18 (sequence is synthesized)
cctcccacctcagcctccagagtagctcagattacagtgttttctgaagtttcctgacttaacataagcatttttcacatgattgaaaattttcactgattgctgtagtcattctaatga

SEQ ID NO: 369197 - DNA, 120 bp, Artificial Sequence
  ENSG00000141569_19 (sequence is synthesized)
gaaaattttcactgattgctgtagtcattctaatgactatcaagtttatttatccattattggacatttaaatttctttctttttagctatacaaacattgatgtgttttttttgagaca

SEQ ID NO: 369198 - DNA, 120 bp, Artificial Sequence
  ENSG00000141569_20 (sequence is synthesized)
tttttagctatacaaacattgatgtgttttttttgagacaggatctccatctgtcacccaggctggtgtgcaggggtgcggtcatgggctcatgggattctcctacctcagcctcctgag

SEQ ID NO: 369199 - DNA, 120 bp, Artificial Sequence
  ENSG00000141569_21 (sequence is synthesized)
gatgaatatttctgagtgggatgtttggccacatttatggtcatgtatgtaggctgttacctcaagtgagtcactcagggaacaatgagcacttgaagatttttttatacaaaaggccac

SEQ ID NO: 369200 - DNA, 120 bp, Artificial Sequence
  ENSG00000141569_22 (sequence is synthesized)
agtgaggccaccttgagtcaagccgactaaggcccctcaaccctgtcactaagcagcacgtgacactggcaggaccttcatctccagcatcccacccctgggtgtgggactttggggcag

SEQ ID NO: 369201 - DNA, 120 bp, Artificial Sequence
  ENSG00000141569_23 (sequence is synthesized)
ccgtgtgtgcaggtgtcggcacaggctagctcctcctggtttggtgtggtgtttgccattgcagagcaagctgccacgaagacccctgggcatgattttgcttgtatttccggaagtggg

SEQ ID NO: 369202 - DNA, 120 bp, Artificial Sequence
  ENSG00000141569_24 (sequence is synthesized)
gaagtggggttgctgggtcatagggcaggtgtaattttttttacttgaaatgttccacttcttgttctgggaggtggttccaagggtgtctgcttttggccaggcgcagtggctcacgct

SEQ ID NO: 369203 - DNA, 120 bp, Artificial Sequence
  ENSG00000141569_25 (sequence is synthesized)
tctgtctcaaaaaaaaaaaaaaaaagggagggctgtctgctttttgtaacttgaaaaactggacatctatgttatatgtactcatggataaatatttcacaataaaactttttaaaagga

SEQ ID NO: 369204 - DNA, 120 bp, Artificial Sequence
  ENSG00000141569_26 (sequence is synthesized)
tatttggaaatagagtattttcagatgtgactgagttaagatgagggcatactggagtagagcgtgccctaatccaacaactggtgtcctgataagaggaaatgggcaccgggcacagtg

SEQ ID NO: 369205 - DNA, 120 bp, Artificial Sequence
  ENSG00000141569_27 (sequence is synthesized)
cggccaccagctggtccctggaacaccaggcagcagggagcggggctgagcagggagctgggcacaggggtcctggggaggttcccgggaccctgcctccccacatccctgaccctcagc

SEQ ID NO: 369206 - DNA, 120 bp, Artificial Sequence
  ENSG00000141570_0 (sequence is synthesized)
agagtattatggtctgtcgtgcgctggctgctgcttttctgctcctggaagcggccaaggggggaagcggcgagtcaacatggagctttcagcggtgggggagcgggtgttcgcggccga

SEQ ID NO: 369207 - DNA, 120 bp, Artificial Sequence
  ENSG00000141570_1 (sequence is synthesized)
agccctcctgaagcggcgcatacggaaaggacgcatggaatacctcgtgaaatggaagggatggtcgcagaagtacagcacatgggaaccggaggaaaacatcctggatgctcgcttgct

SEQ ID NO: 369208 - DNA, 120 bp, Artificial Sequence
  ENSG00000141570_2 (sequence is synthesized)
cgcagcctttgaggaaagggaaagagagatggagctctatggccccaaaaagcgtggacccaagcccaaaaccttcctcctcaaagcgcaggccaaggcaaaggccaaaacttacgagtt

SEQ ID NO: 369209 - DNA, 120 bp, Artificial Sequence
  ENSG00000141570_3 (sequence is synthesized)
tcgaagtgactcagccaggggcatccggatcccctaccctggccgctcgccccaggacctggcctccacttcccgggcccgggagggccttcgaaacatgggtttgtccccgccagcgag

SEQ ID NO: 369210 - DNA, 120 bp, Artificial Sequence
  ENSG00000141570_4 (sequence is synthesized)
cagcaccagcaccagcagcacctgccgcgcagaggcccctcgggaccgggaccgagaccgggatagggaccgggagcgggatcgagaaagggagagggagcgagagagggagcgggaacg

SEQ ID NO: 369211 - DNA, 120 bp, Artificial Sequence
  ENSG00000141570_5 (sequence is synthesized)
tgagagggaacgagagcggggtaccagcagagtggatgacaagcccagctcaccgggggacagctcgaagaagcgaggccccaagccccggaaggagctcccggacccctcacagaggcc

SEQ ID NO: 369212 - DNA, 120 bp, Artificial Sequence
  ENSG00000141570_6 (sequence is synthesized)
cttaggcgaacccagcgccggcctcggagagtacctcaagggcaggaagctggacgacaccccttccggggcaggaaagtttccagccggccacagtgtgatccagctggcccgaagaca

SEQ ID NO: 369213 - DNA, 120 bp, Artificial Sequence
  ENSG00000141570_7 (sequence is synthesized)
ggactcggacctggtgcagtgtggtgtgaccagccctagctcagctgaggccacgggcaaactggctgtggacaccttcccggccagggtgataaagcacagggctgccttcctggaggc

SEQ ID NO: 369214 - DNA, 120 bp, Artificial Sequence
  ENSG00000141570_8 (sequence is synthesized)
caaaggccagggtgccctagatcccaatggcacccgggtccgacatggctcaggcccccccagctctggggggggcctgtaccgggacatgggggcccaggggggaaggccctccctcat

SEQ ID NO: 369215 - DNA, 120 bp, Artificial Sequence
  ENSG00000141570_9 (sequence is synthesized)
cgccaggatccctgtggccagaatcctgggggacccggaggaagagtcctggagcccctccctgactaacctggagaaggtggtggtcacggacgtgacctcaaactttttgaccgtcac

SEQ ID NO: 369216 - DNA, 120 bp, Artificial Sequence
  ENSG00000141570_10 (sequence is synthesized)
cattaaggaaagtaacacggaccaaggcttttttaaagagaaaagatgaatgctgggtgggtgtgtccaggaggagagcaggggagagagtgagcgtgagcttggcatagtgatttttat

SEQ ID NO: 369217 - DNA, 120 bp, Artificial Sequence
  ENSG00000141570_11 (sequence is synthesized)
ttctgggtgggatgtggccttttggctggtcccgtccctgatgtcacccccaccccaccagcccctttcatccctccttcctccccctcagtttttgttggaaagattatctctagagtt

SEQ ID NO: 369218 - DNA, 120 bp, Artificial Sequence
  ENSG00000141570_12 (sequence is synthesized)
atattttctattagatgtaaatatgttatttaagaaaaatatctaaatatatatatttcaactcgaagttgttttatttaaaggagagagactctcattgtgctttagttggggcagccc

SEQ ID NO: 369219 - DNA, 120 bp, Artificial Sequence
  ENSG00000141570_13 (sequence is synthesized)
gaatgagctggggcaggaggggcccccttgccccagagctctagggaagttgggccctgggtacaggtttctgagagtgtctggaggggcttggcctgcccacctcacccctcctccctt

SEQ ID NO: 369220 - DNA, 120 bp, Artificial Sequence
  ENSG00000141570_14 (sequence is synthesized)
ctcccacagcccaatgccagactcctggcaccaaggcccggcccagatttgctctctcttcccattggccaggcaggccaacaaaaggttggctccccaatcagaaaaaagggggggtgg

SEQ ID NO: 369221 - DNA, 120 bp, Artificial Sequence
  ENSG00000141570_15 (sequence is synthesized)
ttttttaaggtaaagaagtctattagggaaaaaagtattaacttgaataagcttttcgtgtgtgatgttgaaggttaaaacgtccccagcaggcagggacaggaggtttctccccaggac

SEQ ID NO: 369222 - DNA, 120 bp, Artificial Sequence
  ENSG00000141570_16 (sequence is synthesized)
cacaccaggaaatgcactttagggaggggtgtgtgtgtggtacacgcagatcgtgtgtatgtcatgtggataaaatctccccgttccctcgttcctttccttactccgcagaaagaaaag

SEQ ID NO: 369223 - DNA, 120 bp, Artificial Sequence
  ENSG00000141570_17 (sequence is synthesized)
aaatccagcgaatctgtttacattcccgaaatgccaggataaattgggaggattgcgtgtcagtgctgagagttcgagacagttgttttgcaagaaaagtgttggggtggacttttcctt

SEQ ID NO: 369224 - DNA, 120 bp, Artificial Sequence
  ENSG00000141570_18 (sequence is synthesized)
ttcgcgtcctctagctttgccaggagaagagacggtggcccccacctcccaggaagagttggacaagcctccctgcctggggagggcgggccgccagctctgtggtggacacatggccag

SEQ ID NO: 369225 - DNA, 120 bp, Artificial Sequence
  ENSG00000141570_19 (sequence is synthesized)
acaggcccaccctgcgggacccacggagggaggcgcggcggcgggcgctgctaggagcagtggcttcgcacccagggcctctccacggccaggcttggagtgtggctgaggaccacggct

SEQ ID NO: 369226 - DNA, 120 bp, Artificial Sequence
  ENSG00000141570_20 (sequence is synthesized)
cggagctcggagctggggctagactcacccccgcggctccggccgggcacgggaaggaggggcgaggcggggttttcatccaagaatgcgcatcggaacttttgctttttcctttttttt

SEQ ID NO: 369227 - DNA, 120 bp, Artificial Sequence
  ENSG00000141570_21 (sequence is synthesized)
cccccgtccttcttaaaagcaaaagctataatttataggtcttttcgattcgcagtgttctctatttgaactcgacattcaaactccgccaaagggggagggaggagcgggagttgggag

SEQ ID NO: 369228 - DNA, 120 bp, Artificial Sequence
  ENSG00000141570_22 (sequence is synthesized)
tggggacggccgcggcggggaaggccgtgcgaggcggcggggcctgggacgcccctgcccggcggacttgaccgctctgcgctccgaggacgcagaatgcgcgcccctcttttgactcaa

SEQ ID NO: 369229 - DNA, 120 bp, Artificial Sequence
  ENSG00000141570_23 (sequence is synthesized)
aagcacaaatcagtcccctccactccacccccgtctcttggagcacggatcccgcagcctccctgccctccccgcccttaaagggccagcgaagatctaacttcccattgcttgttgagg

SEQ ID NO: 369230 - DNA, 120 bp, Artificial Sequence
  ENSG00000141570_24 (sequence is synthesized)
gaggggcgcgggggccctgcacgccagaggaagcacagactcggggggagcgaggcggggagtcgggggtgggggagcttcgcgtggggtggggggtgctgggagggaaccccagcctcg

SEQ ID NO: 369231 - DNA, 120 bp, Artificial Sequence
  ENSG00000141570_25 (sequence is synthesized)
tcctccgcactcccggcttctcagcctctcctccagactttcttgcctttaaagagagaaaaggagggaaacggtgtactacatgattgtgtttgtttttgaatatcaaattgcgcctat

SEQ ID NO: 369232 - DNA, 120 bp, Artificial Sequence
  ENSG00000141570_26 (sequence is synthesized)
aaagagaagcccctggaatggggatttttatctactcacatttgtaaaactggtattttagactttgtataaagaagcgccgttgaccgagtgtatctatttaaatgtcgatgctatttt

SEQ ID NO: 369233 - DNA, 120 bp, Artificial Sequence
  ENSG00000141570_27 (sequence is synthesized)
cagatgaaacttcactgaaggggcatgtctgttacctagtggacgggactgggggatacgcgtcttcacctggccgccgccttcccttctctcccgcctgtcctttactcccacctccct

SEQ ID NO: 369234 - DNA, 120 bp, Artificial Sequence
  ENSG00000141570_28 (sequence is synthesized)
cccttcctgggggctgactttgccccttcccttggaccttctttccagccagctctgtccctgccgcccctccgtcctgctgtttgtccgtggccgtgtgtgtatgtgtctccttctctc

SEQ ID NO: 369235 - DNA, 120 bp, Artificial Sequence
  ENSG00000141570_29 (sequence is synthesized)
gctcttgcgacgctgacctggggggtgggtgggcaggggccgggggccacgtggctgggagtctgcaaccgcgcagggtgtgtgcgctgttgggtttatttaattctaagatttgtacaa

SEQ ID NO: 369236 - DNA, 120 bp, Artificial Sequence
  ENSG00000141570_30 (sequence is synthesized)
atctccaatcgatctccgcctcagctcaagagtgaagcttcggtacctatcttctgcggtcgtgaatgtctgtatccaataccgctttttacgtgtttaaatatatactttgtaaataga

SEQ ID NO: 369237 - DNA, 120 bp, Artificial Sequence
  ENSG00000141570_31 (sequence is synthesized)
agtgcttctctaacaaggaggatgtgtggatgtctcctagggaggagaaagtgggacaggaaaggtgggagcttcttgctcttgggaacaactagcggcgggaaccaaggccagaaacct

SEQ ID NO: 369238 - DNA, 120 bp, Artificial Sequence
  ENSG00000141570_32 (sequence is synthesized)
ggacaacctcacttccagtcacccaggctgggccttgggaccagtttccagaatgtcgggtcaccctgcggcattcccgcagcaggcggcaggcgcccagccctagctcggcgtctagga

SEQ ID NO: 369239 - DNA, 120 bp, Artificial Sequence
  ENSG00000141574_0 (sequence is synthesized)
cattttcctggggctccggggcgcggagaagctgcatcccagaggagcgcgtccaggagcggacccgggagtgtttcaagagccagtgacaaggaccaggggcccaagtcccaccagcca

SEQ ID NO: 369240 - DNA, 120 bp, Artificial Sequence
  ENSG00000141574_1 (sequence is synthesized)
tgcagacctgccccctggcattccctggccacgtttcccaggcccttgggaccctcctgtttttggctgcctccttgagtgctcagaatgaaggctgggacagccccatctgcacagagg

SEQ ID NO: 369241 - DNA, 120 bp, Artificial Sequence
  ENSG00000141574_2 (sequence is synthesized)
gggtagtctctgtgtcttggggcgagaacaccgtcatgtcctgcaacatctccaacgccttctcccatgtcaacatcaagctgcgtgcccacgggcaggagagcgccatcttcaatgagg

SEQ ID NO: 369242 - DNA, 120 bp, Artificial Sequence
  ENSG00000141574_3 (sequence is synthesized)
tggctccaggctacttctcccgggacggctggcagctccaggttcagggaggcgtggcacagctggtgatcaaaggcgcccgggactcccatgctgggctgtacatgtggcacctcgtgg

SEQ ID NO: 369243 - DNA, 120 bp, Artificial Sequence
  ENSG00000141574_4 (sequence is synthesized)
gacaccagagaaataacagacaagtcacgctggaggtttcaggtgcagaaccccagtccgcccccgacactgggttctggcctgtgccagcggtggtcactgctgtcttcatcctcttgg

SEQ ID NO: 369244 - DNA, 120 bp, Artificial Sequence
  ENSG00000141574_5 (sequence is synthesized)
tcgctctggtcatgttcgcctggtacaggtgccgctgttcccagcaacgccgggagaagaagttcttcctcctagaaccccagatgaaggtcgcagccctcagagcgggagcccagcagg

SEQ ID NO: 369245 - DNA, 120 bp, Artificial Sequence
  ENSG00000141574_6 (sequence is synthesized)
gcctgagcagagcctccgctgaactgtggaccccagactccgagcccaccccaaggccgctggcactggtgttcaaaccctcaccacttggagccctggagctgctgtccccccaaccct

SEQ ID NO: 369246 - DNA, 120 bp, Artificial Sequence
  ENSG00000141574_7 (sequence is synthesized)
tgtttccatatgccgcagacccatagccgcctgcaaggcagagaggacacaggagagccagccctgagtgccgaccttgggtggcggggcctgggtctctcgtcccacccggagggcaca

SEQ ID NO: 369247 - DNA, 120 bp, Artificial Sequence
  ENSG00000141574_8 (sequence is synthesized)
ttccaagctctgcttcctcagtttccaaaatggaaccacctcacctccgcagcacccgacttaccaggacgcatgcccctccctctgccctcatcaaacccacagacccggactcccttt

SEQ ID NO: 369248 - DNA, 120 bp, Artificial Sequence
  ENSG00000141574_9 (sequence is synthesized)
ctgccaccccaggctggtccggccccaggtgtggggtccgctctctccactcccagggctccgcgcccaagtgagggggcccctgccggagcctcagacacactccagttcagggctgtg

SEQ ID NO: 369249 - DNA, 120 bp, Artificial Sequence
  ENSG00000141574_10 (sequence is synthesized)
gggggccttggccacatacctgtcccttggctatgagcaggctttgggggcccttccgcggcagccccgggggccgaggtagggtcgggggcttagaggctgggatggctcctggcccca

SEQ ID NO: 369250 - DNA, 120 bp, Artificial Sequence
  ENSG00000141574_11 (sequence is synthesized)
ggcggctcgggctggggggtcaggtggacgccgccctccggggctggacgcgcatccctcagtccctcggccacccgggggtcgctccctcgtgcccaccgcacctgccgagcctctttg

SEQ ID NO: 369251 - DNA, 120 bp, Artificial Sequence
  ENSG00000141574_12 (sequence is synthesized)
gtcgctccctcgtgcccaccgcacctgccgagcctctttggacccagatctgttcatgcttttgtcttcgtcactgcggcggggccctttgatgtcttcatctgtatggggtggaaaaat

SEQ ID NO: 369252 - DNA, 120 bp, Artificial Sequence
  ENSG00000141574_13 (sequence is synthesized)
caccgggaatcccccttcagttctttgaaaaagttccatgactcgaatatctgaaatgaagaaaacaaaccgactcacaaacctccaagtagctccaaatgcaatttttaaaatggaaaa

SEQ ID NO: 369253 - DNA, 120 bp, Artificial Sequence
  ENSG00000141574_14 (sequence is synthesized)
caaaaatctgaaagaaacgtctttagtggctttaagccccaaaacgtccctaaggcgtcctcgagatgaagacgggggggagcccccagccaggtggagaccccgcagggacgcggcggc

SEQ ID NO: 369254 - DNA, 120 bp, Artificial Sequence
  ENSG00000141574_15 (sequence is synthesized)
gcccggtgaccgaggcctcgcacagccggccgccctgagggtcgggccggagccagggtccaagaggggcgcgtttgtgtctcgggttaaaataaggttccgtccgcgtgctgggtcaga

SEQ ID NO: 369255 - DNA, 120 bp, Artificial Sequence
  ENSG00000141574_16 (sequence is synthesized)
tgtgcaaggctgagctcctgcgtggaggcaggtggggctttgtggagcttccacacagggaccctcatcccccagccactctcaggggatccagatccacacggatccagcacctcctgt

SEQ ID NO: 369256 - DNA, 120 bp, Artificial Sequence
  ENSG00000141574_17 (sequence is synthesized)
atgcagggcatgagtggggaccccgtgggaagcacagaagcggcgacctcgctggggcctgtgagaggctcatcactgcctgtggggccctcccccagcaccgtgggtgtgtgccctgga

SEQ ID NO: 369257 - DNA, 120 bp, Artificial Sequence
  ENSG00000141574_18 (sequence is synthesized)
cattttcctggggctccggggcgcggagaagctgcatcccagaggagcgcgtccaggagcggacccgaagggactggacttgtactgagcatagcggctgcctggagtggggaacccaga

SEQ ID NO: 369258 - DNA, 120 bp, Artificial Sequence
  ENSG00000141574_19 (sequence is synthesized)
cctcaggacacggcacccgcagcctgcgccaatgtgggaccatccctgagcctcagcagcacctcggggttggtgacgtgcctcccagcagtgacagtgtccccacacctgcactctgcg

SEQ ID NO: 369259 - DNA, 120 bp, Artificial Sequence
  ENSG00000141574_20 (sequence is synthesized)
acagactcgaggcctccaggagcggagccaaacagccccgcggggaacgcgcgccgcacgcgagctggacccgcccaggcacgaactctcctggaaaaatgctcccggcggctttcctgc

SEQ ID NO: 369260 - DNA, 120 bp, Artificial Sequence
  ENSG00000141574_21 (sequence is synthesized)
ttcctttagcgtgaaccgcgggtgcggtgcctcccgtgaaaataataaattcaccgtcacgcttgttgtgaacgcgggtggttcccgaaacttggaggcttcccgtaaacccagctcctt

SEQ ID NO: 369261 - DNA, 120 bp, Artificial Sequence
  ENSG00000141574_22 (sequence is synthesized)
tttcattttcctggggctccggggcgcggagaagctgcatcccagaggagcgcgtccaggagcggacccggtgagggagtgtttcaagagccagtgacaaggaccaggggcccaagtccc

SEQ ID NO: 369262 - DNA, 120 bp, Artificial Sequence
  ENSG00000141574_23 (sequence is synthesized)
ctggaggtttcagaaccccgaggcctgaaggaccgggccagcgcgcagctcctgggacctggcacatccaggggtgcagaaccccagtccgcccccgacactgggttctggcctgtgcca

SEQ ID NO: 369263 - DNA, 120 bp, Artificial Sequence
  ENSG00000141576_0 (sequence is synthesized)
agccgcagcggccatgggggccctgacgagccggcagcacgcgggcgtggaggaggtggacatcccgtctaattccgtgtaccgctacccgcccaagtccggaagctattttgccagcca

SEQ ID NO: 369264 - DNA, 120 bp, Artificial Sequence
  ENSG00000141576_1 (sequence is synthesized)
cttcattatgggaggagagaagtttgactcaactcatcctgaaggttacctgtttggagagaacagcgatctgaactttctggggaacagaccagttgtgtttccttacgccgccccacc

SEQ ID NO: 369265 - DNA, 120 bp, Artificial Sequence
  ENSG00000141576_2 (sequence is synthesized)
tccccaagaacccgtgaagactctgagaagcctggtcaatatccgaaaggacacactgaggctcgtcaaatgtgctgaggaagtgaagagccctggagaagaggccagtaaagctaaagt

SEQ ID NO: 369266 - DNA, 120 bp, Artificial Sequence
  ENSG00000141576_3 (sequence is synthesized)
ccactacaatgttgagttcacctttgacacagatgctcgggtagccatcaccatctattaccaggccacggaagagttccagaatggtattgccagctacattcccaaagacaacagcct

SEQ ID NO: 369267 - DNA, 120 bp, Artificial Sequence
  ENSG00000141576_4 (sequence is synthesized)
ccagtcggagactgtgcagtacaagcgaggagtgtgtcagcagttctgcctgccctcccacaccgtggatccctccgagtgggccgaagaggagcttggctttgatttagaccgagaagt

SEQ ID NO: 369268 - DNA, 120 bp, Artificial Sequence
  ENSG00000141576_5 (sequence is synthesized)
ttaccctctagtggtacatgccgtggtggatgaaggagacgagtattttggccattgccatgtactgctgggtacttttgagaagcacacagatggaactttctgtgtcaagcccctcaa

SEQ ID NO: 369269 - DNA, 120 bp, Artificial Sequence
  ENSG00000141576_6 (sequence is synthesized)
acagaaacaagtagtagacggggtcagctacctccttcaggagatctatggaattgaaaacaagtacaacacacaagattctaaggtggctgaagacgaagtgagtgataacagtgccga

SEQ ID NO: 369270 - DNA, 120 bp, Artificial Sequence
  ENSG00000141576_7 (sequence is synthesized)
gtgtgtggtgtgtctctcggatgtccgggacaccttgattctgccctgtcgccacctctgcctctgtaacacctgtgcagacacgctgcgctaccaggccaacaactgccccatctgccg

SEQ ID NO: 369271 - DNA, 120 bp, Artificial Sequence
  ENSG00000141576_8 (sequence is synthesized)
actgcccttccgggcactgcttcagatccgagccatgaggaaaaaattgggccccttgtccccaaccagctttaaccccatcatctcatcccagacatctgactctgaagagcatccatc

SEQ ID NO: 369272 - DNA, 120 bp, Artificial Sequence
  ENSG00000141576_9 (sequence is synthesized)
ctcagagaatattccaccaggctatgaagtagtatctcttctggaggccctcaacgggcccctcaccccgtccccagcagttcctccacttcacgtgcttggagatggccacctctcagg

SEQ ID NO: 369273 - DNA, 120 bp, Artificial Sequence
  ENSG00000141576_10 (sequence is synthesized)
aatgctcccttcatatggcagtgatggccacctgccccccgtcaggacgatctcgcctcttgaccgcctgtctgacagcagcagtcagggactcaaactcaaaaagagtctctccaaatc

SEQ ID NO: 369274 - DNA, 120 bp, Artificial Sequence
  ENSG00000141576_11 (sequence is synthesized)
cacttcccaaaactcttccgtgctgcatgaagaggaagatgagcattcctgcagcgagtcggagacacagctctctcagagaccgtcggttcagcatctcggagaggaatgtggtgtgac

SEQ ID NO: 369275 - DNA, 120 bp, Artificial Sequence
  ENSG00000141576_12 (sequence is synthesized)
tccagaaagtgagaatctcaccttgtcgtcatctggagctattgaccagtcgtcttgcacagggacgcctctgtcatccactatttcctccccagaaggccctgccagcagcagcttggc

SEQ ID NO: 369276 - DNA, 120 bp, Artificial Sequence
  ENSG00000141576_13 (sequence is synthesized)
ccagtctgtcatgtccatggcatcctcccagatcagcactgacaccgtctcctccatgtctggctcctacatcgcccctggcactgaagaggagggagaggctctctcttccccccagcc

SEQ ID NO: 369277 - DNA, 120 bp, Artificial Sequence
  ENSG00000141576_14 (sequence is synthesized)
tgccagcagggccccctcagaagaaggagaggggctgccagcggagtctccagacagcaactttgctggcctcccagctggagagcaggatgcagagggaaatgatgttatagaggaaga

SEQ ID NO: 369278 - DNA, 120 bp, Artificial Sequence
  ENSG00000141576_15 (sequence is synthesized)
ggatggatcacccacgcaggaaggccagaggacgtgcgcatttctaggtatggagtgtgacaataacaatgactttgacatcgcaagcgtgaaagcactggacaataagctgtgctctga

SEQ ID NO: 369279 - DNA, 120 bp, Artificial Sequence
  ENSG00000141576_16 (sequence is synthesized)
ggtctgcttacctggtgcctggcaggctgatgacaatgccgtcagtcggaatgcccagcgccggcgcttgtcatccagcagcctggaggactctgagacgaggccctgtgtgtggggccc

SEQ ID NO: 369280 - DNA, 120 bp, Artificial Sequence
  ENSG00000141576_17 (sequence is synthesized)
tttggctgtctgagccccagcctctgcacttgggctcccctcctgccctgcattccatccatcctcactcagctgctgcctactgggcatcctcagcaagatgctggagactttttaccc

SEQ ID NO: 369281 - DNA, 120 bp, Artificial Sequence
  ENSG00000141576_18 (sequence is synthesized)
tcctgtgacagctgttacaacctgtaaccacaatccctcacctctcagagggaactggaaccctcctttctccgtgtgacctaaagccactcaatgaactgcagctcacgagaccttttg

SEQ ID NO: 369282 - DNA, 120 bp, Artificial Sequence
  ENSG00000141576_19 (sequence is synthesized)
tgtcctcacggtatattgatgttcaggtggagctggggtccatgggctaatttcttacacatcttttttctccttagggggtagaacaagaaggcttagagtttggcagctttgttacaa

SEQ ID NO: 369283 - DNA, 120 bp, Artificial Sequence
  ENSG00000141576_20 (sequence is synthesized)
acatccctctggcatttcctggtctctggcacatcataaccaattggaaacctgcagtttggggtagggctggaggatcgctcctgtggaaagggagagccatactgcacggacgtagcg

SEQ ID NO: 369284 - DNA, 120 bp, Artificial Sequence
  ENSG00000141576_21 (sequence is synthesized)
tttccctctacaagcactaggagcacctttctcaaggacaagaaatggtagcaaccaaaaggttggttgaaggaaacaatccttccttctggtggcagagccagtcttctgggcctcaca

SEQ ID NO: 369285 - DNA, 61 bp, Artificial Sequence
  ENSG00000141576_22 (sequence is synthesized)
ccttccttctggtggcagagccagtcttctgggcctcacatgcctgtgcggttaagaagga

SEQ ID NO: 369286 - DNA, 120 bp, Artificial Sequence
  ENSG00000141576_23 (sequence is synthesized)
cgccaatgcactccagcctgggcgacagagaaaaaaaaaaaaaaagaaggagcccttgaatctgagaatcccccagttaagatgatttcccttaaggagcatttctcctgatcaggtgca

SEQ ID NO: 369287 - DNA, 120 bp, Artificial Sequence
  ENSG00000141576_24 (sequence is synthesized)
gagcatttctcctgatcaggtgcattcagggaggcctgcaactccatcctaaggtgacatttcaagaaacacatgtgttgaccacctctgtgtgccaagcactgggtgaggagtggtcgt

SEQ ID NO: 369288 - DNA, 120 bp, Artificial Sequence
  ENSG00000141576_25 (sequence is synthesized)
atattaccataattcatcctcactcaattgggaggtggcattcttgtccctgttgcccccatctctacccccttttgttaatggttgagagaaatgtggaccagtgattctcagtttggt

SEQ ID NO: 369289 - DNA, 120 bp, Artificial Sequence
  ENSG00000141576_26 (sequence is synthesized)
gcccaggtccccaaaggaagtgatggagagccttgagctaagttcaggcagcagcatgtggccagcagcagtgtgctgggagcagaggttggaatcagggctcagggccttcacttcaag

SEQ ID NO: 369290 - DNA, 60 bp, Artificial Sequence
  ENSG00000141576_27 (sequence is synthesized)
gcttgaactgattgaaaagatcgaaactctgtctcaaacaaaaaaaaaaaaattcaaggc

SEQ ID NO: 369291 - DNA, 120 bp, Artificial Sequence
  ENSG00000141576_28 (sequence is synthesized)
tcgaaactctgtctcaaacaaaaaaaaaaaaattcaaggctgtttccaaggcagcctcaaaaagagcctggtgcccagggggtccttcgtttctgtgtggctgcagaggccaggagtgca

SEQ ID NO: 369292 - DNA, 120 bp, Artificial Sequence
  ENSG00000141576_29 (sequence is synthesized)
gtgactgtctcactgcctagtggttgtggctcacatcctgccctgatggagaggggggcctgtcgtccaaccctctctgaaaaactgcagtagactttaccatttcaggccccacctaat

SEQ ID NO: 369293 - DNA, 120 bp, Artificial Sequence
  ENSG00000141576_30 (sequence is synthesized)
gttctttccttccttccccctacattcttcccgcccctttcatagttaagatgcataagctgagcaataaccccacttcctgatttccctgaaatatgagcccagaagcagcaggtgaca

SEQ ID NO: 369294 - DNA, 120 bp, Artificial Sequence
  ENSG00000141576_31 (sequence is synthesized)
gggagcttcccttaccctggggtggtggcacacagaccacctcctgtcctgtcccctgcaggtagtattcacagtgtggtgttacctgggaggagggaggaaggagctgagatgaaggag

SEQ ID NO: 369295 - DNA, 120 bp, Artificial Sequence
  ENSG00000141576_32 (sequence is synthesized)
attcaggtaaacagtagccacagtggccaggacccccttcctgaggatccctgtccttcctcgcagcaggtgcttagtcctctcctagggagaagcacggaaagattcctcaaggcctca

SEQ ID NO: 369296 - DNA, 120 bp, Artificial Sequence
  ENSG00000141576_33 (sequence is synthesized)
gtcccatgtccaaggcatacctaggttagaaatgtcctttacttgtttctcagttactatttctcctcttcctccctccccctgccttctcttggctgtcatttagctctctggcccaca

SEQ ID NO: 369297 - DNA, 120 bp, Artificial Sequence
  ENSG00000141576_34 (sequence is synthesized)
gaaatactccatccaaggagctggtcctcagtcagcctgatgaggacaggtcagtggccaacccttttgccccagtccttcatctggagacagtcacatagtcacgtcaacagttcaccc

SEQ ID NO: 369298 - DNA, 120 bp, Artificial Sequence
  ENSG00000141576_35 (sequence is synthesized)
aaagagaagaggtggggcctggcttctcccacagggcacagcctaactatggagacccagggctccttcctgctgcactaggcctgtgctctccctattgccttcaggtggtgtgatccc

SEQ ID NO: 369299 - DNA, 120 bp, Artificial Sequence
  ENSG00000141576_36 (sequence is synthesized)
ggcttcctcacagagcccttttttccttctgcccagctccatcccaccagagtttctacccccgctgaggcatctcctgggcacagaccaccacactctaagccggctggcctgggagtt

SEQ ID NO: 369300 - DNA, 120 bp, Artificial Sequence
  ENSG00000141576_37 (sequence is synthesized)
agggtcctgcccacctcacctgggagttggggtcctgcccacctggagtttagcacgctggtcgctcactttgctttggtctgcacacctggtgtgtgcatgtgtatactgcttgtgcca

SEQ ID NO: 369301 - DNA, 120 bp, Artificial Sequence
  ENSG00000141576_38 (sequence is synthesized)
tctgtgtacccctctccctggagtacacttgtggtcacactacagtggggacatcaagaatgcaatatttatggattgctgcatgattcttaaaaatgaataaaactgtttacaagggaa

SEQ ID NO: 369302 - DNA, 120 bp, Artificial Sequence
  ENSG00000141576_39 (sequence is synthesized)
cttttccactggactcctacagatccacttcccaaaactcttccgtgctgcatgaagaggaagatgagcattcctgcagcgagtcggagacacagctctctcagagaccgtcggttcagc

SEQ ID NO: 369303 - DNA, 120 bp, Artificial Sequence
  ENSG00000141576_40 (sequence is synthesized)
cctgccgcagctccggagtcctgccccataaacattgaggaataggtgcctggcaggctgatgacaatgccgtcagtcggaatgcccagcgccggcgcttgtcatccagcagcctggagg

SEQ ID NO: 369304 - DNA, 120 bp, Artificial Sequence
  ENSG00000141576_41 (sequence is synthesized)
tttgaagaccacagactgttagtattagggtccttccttccttttattctttcctttcttcttctctctccctctttttttatttttgttttactttttgctctctccttttcctctttt

SEQ ID NO: 369305 - DNA, 120 bp, Artificial Sequence
  ENSG00000141576_42 (sequence is synthesized)
tttttttttaatcaaagaagaaaagaaaaaaagggagtgcttttgaatgttacaagctattacaaacgacttgggtggcctgaaaggaatgctgatttttgaggtcttcattgttccaga

SEQ ID NO: 369306 - DNA, 120 bp, Artificial Sequence
  ENSG00000141576_43 (sequence is synthesized)
agtgttggtgttgagggagcctttatctgagcaaaggacttgagaaatgaaagaacaagatttatttcccaacattgggtttagggagaactctttttatttaaaatgccagagtgagaa

SEQ ID NO: 369307 - DNA, 120 bp, Artificial Sequence
  ENSG00000141576_44 (sequence is synthesized)
acatttcaagcgaaaggataaagcattagggtccaatttagtgtaattagagtcattggcttaatttatccattccttttctaaaattcaaagttagccatccattctccctcttccaga

SEQ ID NO: 369308 - DNA, 120 bp, Artificial Sequence
  ENSG00000141576_45 (sequence is synthesized)
atgatcagcaccttgtgcatatgtctgctagaaagtcccagcccctaccatgtgccagcacttttctttccactcttgtagaggtaggaggagacatcactgggaggagagagagtggtg

SEQ ID NO: 369309 - DNA, 120 bp, Artificial Sequence
  ENSG00000141576_46 (sequence is synthesized)
ccagtggcattggcaagggagggtgggtgaggggcaggtcatctcacggagggtgtagagcagctgggtaggaggcagggttgggcttcctcgagatgcaaagaaaagccttcctgtaga

SEQ ID NO: 369310 - DNA, 120 bp, Artificial Sequence
  ENSG00000141576_47 (sequence is synthesized)
tgggtgatagatacctgaaattctacactgttcgttcttttaggttaattactcgcctctcttttaatgaggtcaataataagaatatcttaggataaattagttttccaatataatcac

SEQ ID NO: 369311 - DNA, 120 bp, Artificial Sequence
  ENSG00000141576_48 (sequence is synthesized)
ggcactacctgggcaggccaggccttggtgagttgcctcatgggggaaggcctggttctccaggaggcctggatgggatggaaaggctcgtgtagctagaggaagatggtttgtccattt

SEQ ID NO: 369312 - DNA, 120 bp, Artificial Sequence
  ENSG00000141576_49 (sequence is synthesized)
tcctcttgttagattggcattagcaacagactgttaaaacggagagtgggatataaaatcagcgacaggctatgtcttaggggaagggatggctaagaaacagaggtgaggcagaagagt

SEQ ID NO: 369313 - DNA, 120 bp, Artificial Sequence
  ENSG00000141576_50 (sequence is synthesized)
gtgctcctaaaagtaaatggggcagggccaacttagacactgacatggcccaggttaatgggagtgggattgggccttggtagttggggttttaagaaacagggctggccgggcttgatg

SEQ ID NO: 369314 - DNA, 72 bp, Artificial Sequence
  ENSG00000141576_51 (sequence is synthesized)
tagttggggttttaagaaacagggctggccgggcttgatggctcatctctgttatcctagcagttcgggagc

SEQ ID NO: 369315 - DNA, 120 bp, Artificial Sequence
  ENSG00000141576_52 (sequence is synthesized)
tatctcaaaaaaaaaaaaaaaaaaaaggaaacagggccaagaggtgtaattttgctgcatgttggggatggggtggcttcatggtgtggggtacacaccattagcctctccctcaaggtc

SEQ ID NO: 369316 - DNA, 120 bp, Artificial Sequence
  ENSG00000141576_53 (sequence is synthesized)
accattagcctctccctcaaggtcttgctatcgccctttgcatccatattttcccttcccatctttttccttgccaacttcttcttctttttctttctcttttccattcctttatttgta

SEQ ID NO: 369317 - DNA, 120 bp, Artificial Sequence
  ENSG00000141576_54 (sequence is synthesized)
taatgtctgaactcaaattggattatatagcaaatgcctagattttaatgcatgcccttccatcctttttctagtctgtgccttcttaattgtccataatagtatgctgcagtgcaagta

SEQ ID NO: 369318 - DNA, 120 bp, Artificial Sequence
  ENSG00000141576_55 (sequence is synthesized)
ttattattgtatttgtgaaattttatgttccctgttgtatataatgatgggtgaattaaatatttgattttctttcttctctcaaagagaaaacataagtaaataaaagcatcttttact

SEQ ID NO: 369319 - DNA, 120 bp, Artificial Sequence
  ENSG00000141576_56 (sequence is synthesized)
tttttttaacatatgatttgattttttttgtctccatccttaagatttttattttaaggacagcaacgcagagaaaaacacagccagcccctctctaactgcattaactccgttacaggc

SEQ ID NO: 369320 - DNA, 120 bp, Artificial Sequence
  ENSG00000141576_57 (sequence is synthesized)
ggaaaatgacaaagtccaatgtcaatgcagattttgttcgtaattattacttatcttagctcttcagccacgctgccttgtcagtaaagtatgggacaggaagggctttgtgccattggc

SEQ ID NO: 369321 - DNA, 120 bp, Artificial Sequence
  ENSG00000141576_58 (sequence is synthesized)
gaagacaaactgcagcctccttggttgtatgggatctcttgttgctagaggactggaagagctcctggagtcttgtgagggagaggatgagtctcacaaattaagctaggacagatctct

SEQ ID NO: 369322 - DNA, 120 bp, Artificial Sequence
  ENSG00000141576_59 (sequence is synthesized)
ccctgtcacctctttaggcaacccttttccaagggcttaccttttttttttttcttcatggcacttaacaccaaccttttattgatttgtctctttctctgcttattgtctgcctcctcc

SEQ ID NO: 369323 - DNA, 120 bp, Artificial Sequence
  ENSG00000141576_60 (sequence is synthesized)
tctagaacgtaagtttcataaggcaaggactgtttttactgtagtatcccaaacctagaacaaagcctggcacgtaatgttaagcccttaataaatgattgttgaatgaatgactgaaaa

SEQ ID NO: 369324 - DNA, 120 bp, Artificial Sequence
  ENSG00000141577_0 (sequence is synthesized)
ccggccgtccggccgcttcattgtcaccgggcctcggggcagtgttgggggtggcggggcgccaggtcgccgacccgaggtttgggcgcgactggttccgcatcccctccccgccggccg

SEQ ID NO: 369325 - DNA, 120 bp, Artificial Sequence
  ENSG00000141577_1 (sequence is synthesized)
aatctgcaggccccgcgcgccaggcaggcttcgcggctgcgcccccggcccgcgcaggacctgccttgtccaccatgaaaggcacccgggccatcggcagcgtcccggagcgcagcccag

SEQ ID NO: 369326 - DNA, 120 bp, Artificial Sequence
  ENSG00000141577_2 (sequence is synthesized)
caggtgtggacctgagtctgacaggtctccctccgcctgtgtcccggcgtcctggcagtgccgccaccaccaagcccatcgtccgctctgtctccgtggtcacaggcagcgagcagaaga

SEQ ID NO: 369327 - DNA, 120 bp, Artificial Sequence
  ENSG00000141577_3 (sequence is synthesized)
ggaaggtgctggaggccacagggcctgggggctcccaggccatcaacaaccttagaagatccaacagcaccacgcaggtcagccagcctcggagcggctcccccaggccaacggagccca

SEQ ID NO: 369328 - DNA, 120 bp, Artificial Sequence
  ENSG00000141577_4 (sequence is synthesized)
cagacttcctgatgctcttcgagggcagccccagtgggaaaaagaggcctgccagcctgagcacagcccccagcgagaagggagccacctggaacgtcctggatgaccagccccggggct

SEQ ID NO: 369329 - DNA, 120 bp, Artificial Sequence
  ENSG00000141577_5 (sequence is synthesized)
tcaccttgccatccaatgcccggagttccagtgcccttgactcaccagcgggcccgcggaggaaagaatgcaccgtggccctggcccccaacttcactgctaacaacaggagcaacaagg

SEQ ID NO: 369330 - DNA, 120 bp, Artificial Sequence
  ENSG00000141577_6 (sequence is synthesized)
gagcagtgggcaactgcgtcaccaccatggtgcacaaccgctacaccccctcggagagggcgcctccgctcaagagctccaaccagactgccccctccctcaacaacatcatcaaggcag

SEQ ID NO: 369331 - DNA, 120 bp, Artificial Sequence
  ENSG00000141577_7 (sequence is synthesized)
ccacctgtgagggcagtgagagcagcggctttgggaagctgccgaagaatgtctccagtgccacccactcagcccggaacaatactgggggcagcacgggcttgcccaggcggaaggagg

SEQ ID NO: 369332 - DNA, 120 bp, Artificial Sequence
  ENSG00000141577_8 (sequence is synthesized)
tgacggaggaggaggctgagaggtttatccaccaggtgaaccaggccactgtcaccatccagcgctggtaccggcaccaggtgcagcggcgcggagcaggagctgcccgcctggagcact

SEQ ID NO: 369333 - DNA, 120 bp, Artificial Sequence
  ENSG00000141577_9 (sequence is synthesized)
tgcttcaggccaagcgggaggagcagcggcagcggtcaggcgaggggaccctcttggacctgcaccagcagaaagaggcagccaggaggaaggcccgggaggagaaggcacgccaagcca

SEQ ID NO: 369334 - DNA, 120 bp, Artificial Sequence
  ENSG00000141577_10 (sequence is synthesized)
ggcgagcagccattcaggagctgcaacagaaacgagccctgagagcccagaaggcgagcactgccgagcgtgggccacctgagaatcccagggagaccagagtgccaggaatgcggcagc

SEQ ID NO: 369335 - DNA, 120 bp, Artificial Sequence
  ENSG00000141577_11 (sequence is synthesized)
ctgctcaggagctgtcccccacaccaggcggcactgcccaccaggccctcaaggccaacaatactggtggtggcctccctgctgcaggccccggagaccgctgcctgcccacctccgact

SEQ ID NO: 369336 - DNA, 120 bp, Artificial Sequence
  ENSG00000141577_12 (sequence is synthesized)
catccccagaaccacagcagcctccagaggacaggacgcaggacgttcttgcccaggatgcagctggggacaacctggagatgatggccccgagcagggggagcgccaagtccagggggc

SEQ ID NO: 369337 - DNA, 120 bp, Artificial Sequence
  ENSG00000141577_13 (sequence is synthesized)
cactggaggagctgctgcacacactgcagctgctggagaaggagccggacgtgctgccccgccccaggacccatcacaggggcagatacgcctgggccagcgaggaggatgacgccagct

SEQ ID NO: 369338 - DNA, 120 bp, Artificial Sequence
  ENSG00000141577_14 (sequence is synthesized)
atttggaaaactcagtgcgttccccgaacctcctgaggatgggacgctgctatcggaggccaagctacaaagcatcatgagcttcttggacgagatggagaagtctgggcaggaccagct

SEQ ID NO: 369339 - DNA, 120 bp, Artificial Sequence
  ENSG00000141577_15 (sequence is synthesized)
ggactcccagcaggaggggtgggtgccggaggcggggccggggcccctggagctggggtccgaggtgagcacgtctgtgatgcggctgaagctggaggtggaggagaagaagcaggccat

SEQ ID NO: 369340 - DNA, 120 bp, Artificial Sequence
  ENSG00000141577_16 (sequence is synthesized)
gctgctgctgcagagagcgctggcgcagcagcgagacctcacggcccggcgggtcaaggagacagagaaggcgctgagccggcagctgcagcggcagagggagcactacgaggccaccat

SEQ ID NO: 369341 - DNA, 120 bp, Artificial Sequence
  ENSG00000141577_17 (sequence is synthesized)
ccagcggcacttggccttcattgaccagctgattgaggacaagaaggtcctgagtgaaaagtgcgaggctgtggtggccgagctgaagcaggaggaccagagatgcaccgagcgtgtggc

SEQ ID NO: 369342 - DNA, 120 bp, Artificial Sequence
  ENSG00000141577_18 (sequence is synthesized)
ccaggcacaggcgcagcacgagctggagattaaaaaactcaaagaattaatgagcgccaccgagaaagcccgccgggagaagtggatcagtgagaaaaccaagaagatcaaggaggtcac

SEQ ID NO: 369343 - DNA, 120 bp, Artificial Sequence
  ENSG00000141577_19 (sequence is synthesized)
tgtccgaggtctggagcccgagatccagaagctgattgcaaggcacaagcaggaagtgcggaggctcaagagcctgcacgaggcggagctgctgcagtcggatgagcgggcctcgcagcg

SEQ ID NO: 369344 - DNA, 120 bp, Artificial Sequence
  ENSG00000141577_20 (sequence is synthesized)
ctgcctgcgccaggccgaggagctgcgggagcagctggagcgggagaaggaggcgctgggccagcaggagcgcgaacgtgctcggcagcggcagcgggcggagctggaagagctgaggca

SEQ ID NO: 369345 - DNA, 120 bp, Artificial Sequence
  ENSG00000141577_21 (sequence is synthesized)
gcagctggaggagagcagctctgcactgacccgagccctgagggctgagtttgagaagggcagggaggagcaggagcgccggcaccagatggagctgaataccctgaagcagcagctgga

SEQ ID NO: 369346 - DNA, 120 bp, Artificial Sequence
  ENSG00000141577_22 (sequence is synthesized)
gctggagaggcaggcgtgggaggccggccgcaccaggaaggaggaggcgtggctgctgaaccgggaacaggagctgagggaagaaatccggaaaggccgggacaaggagattgagctggt

SEQ ID NO: 369347 - DNA, 120 bp, Artificial Sequence
  ENSG00000141577_23 (sequence is synthesized)
cattcaccggctggaggccgacatggcgctggccaaggaggagagtgagaaggctgccgagagccgcatcaagcgcttacgggacaagtacgaggccgagctctccgagctggagcagtc

SEQ ID NO: 369348 - DNA, 120 bp, Artificial Sequence
  ENSG00000141577_24 (sequence is synthesized)
ggagcggaagcttcaggagcggtgctcggagctgaagggccagcttggggaggccgagggcgagaatctgcgtctgcagggccttgtgcggcagaaggagcgggcgctggaggatgcgca

SEQ ID NO: 369349 - DNA, 120 bp, Artificial Sequence
  ENSG00000141577_25 (sequence is synthesized)
ggcggtgaacgagcagctttctagcgagcgcagcaacctggcccaggtgatccgccaggagttcgaggaccggctggcagcctctgaggaggagacgcggcaggccaaggccgagctggc

SEQ ID NO: 369350 - DNA, 120 bp, Artificial Sequence
  ENSG00000141577_26 (sequence is synthesized)
cacgctgcaggcccgccagcagctggagctggaggaggtgcaccggagggtgaagacagccctcgcgaggaaggaggaggccgtgagcagcctccggacacaacatgaggctgcggtgaa

SEQ ID NO: 369351 - DNA, 120 bp, Artificial Sequence
  ENSG00000141577_27 (sequence is synthesized)
gcgggccgaccacctggaggagctgctggagcagcacaggaggcccacgccaagtaccaagtgaccagggatgccgggaacactgtcgaagaacggaaggcagaggacagaggctggacg

SEQ ID NO: 369352 - DNA, 120 bp, Artificial Sequence
  ENSG00000141577_28 (sequence is synthesized)
tgggcccagaggcccacagggacgcccacctgccccccacagaggctggtggttgagatgcccacggctaagcacctgtggctgcattttaacagtaaaggaggccgttgttttcagcgc

SEQ ID NO: 369353 - DNA, 120 bp, Artificial Sequence
  ENSG00000141577_29 (sequence is synthesized)
ggagcaggagcagtgggcgctgcagcagcaacggcagcggctgtacagtgaggtggctgaggagagggagcggctgggccagcaggcagccaggcagcgggcggagctggaagagctgag

SEQ ID NO: 369354 - DNA, 120 bp, Artificial Sequence
  ENSG00000141577_30 (sequence is synthesized)
gcagatgcccctttcctgcagtctccccatccctcctgtcagcctcggtattggtcctgtcctcccgccttcctgcgggtctgcggaggggcagaggcagagaatgtggcttccatccgt

SEQ ID NO: 369355 - DNA, 120 bp, Artificial Sequence
  ENSG00000141579_0 (sequence is synthesized)
agtttcacccagcaagcgtgagaacaggtactgcttcctgagcaccgccagccaccggcaccaagaccggccacatcccagcactgcccacctctgctcccagccgccagatgacggagg

SEQ ID NO: 369356 - DNA, 120 bp, Artificial Sequence
  ENSG00000141579_1 (sequence is synthesized)
ctctcgccagaccctcagcacgcagagctggcttctgatagaagtgatcgggaaagaaagcaaagcgggaggtgcctctttagaaaccacgaagtgcacgcggcgtcgacagtgatcacg

SEQ ID NO: 369357 - DNA, 120 bp, Artificial Sequence
  ENSG00000141579_2 (sequence is synthesized)
ccacctggacagccagagtccaaggcataaggaggaaaatgagtctcctcaaagagcggaagccaaaaaagccacattacatccccaggcctccaggaaagcccttcaagtataaatgtt

SEQ ID NO: 369358 - DNA, 120 bp, Artificial Sequence
  ENSG00000141579_3 (sequence is synthesized)
tccaatgtccctttacttgcaatgagaagtcacatctttttaatcacatgaagtatggtctttgtaaaaactcgattactttagtatcagagcaggatcgagttcccaagtgccctaaat

SEQ ID NO: 369359 - DNA, 120 bp, Artificial Sequence
  ENSG00000141579_4 (sequence is synthesized)
ctaactcactagaccccaagcaaaccaaccagcccgatgccacggcgaagccagcctcttccaagtctgtcgcaaatggactctctgccttcgactcgaagcttcagcacagctctgcca

SEQ ID NO: 369360 - DNA, 120 bp, Artificial Sequence
  ENSG00000141579_5 (sequence is synthesized)
gggaagacatcaaggaaaacctggagctgcaagcccggggaacccacaggtgcctgggacagaagccagccctccacagggcatcaccctgcaagagcccagctccggaagccgccctcg

SEQ ID NO: 369361 - DNA, 120 bp, Artificial Sequence
  ENSG00000141579_6 (sequence is synthesized)
gtgcccagcctgctctggaaggcgcagctcggccttctgcatttgttccagtcggcgagcacagactcaaggggccagacaacgccgaggcgcccgagacactggctttacacaacccca

SEQ ID NO: 369362 - DNA, 120 bp, Artificial Sequence
  ENSG00000141579_7 (sequence is synthesized)
ctgccaaggccgtgtctttccacaccaagtcggccttccacactcctggctacccctggaaagccggctcacctttccttccaccagagtttccacataaaatctcatctacaaaggggc

SEQ ID NO: 369363 - DNA, 120 bp, Artificial Sequence
  ENSG00000141579_8 (sequence is synthesized)
ttggggccatttccccttacatgcaccccacaatcccagagtacccgcctcacttttacacagagcacgggctggccaccatctactcgccttacctgctggctgggagctcgcctgagt

SEQ ID NO: 369364 - DNA, 120 bp, Artificial Sequence
  ENSG00000141579_9 (sequence is synthesized)
gtgacgcacccctgctgtcagtctacggaacccaagacccgagacacttcctgcctcacccggggccgatccctaagcacctggctccatctccagccacatacgatcactacaggtttt

SEQ ID NO: 369365 - DNA, 120 bp, Artificial Sequence
  ENSG00000141579_10 (sequence is synthesized)
tccagcaatatccctctaacctgccgattccttacggattttacaggccagagtctgcattttcctcctatggtctcagactcccacctgtcactggcctcacccgagatcagagctctc

SEQ ID NO: 369366 - DNA, 120 bp, Artificial Sequence
  ENSG00000141579_11 (sequence is synthesized)
acctgcttgaagaagccaccctggtctatccagcctcgagtccttccaggttaaacccttcggaccccaacagaaaacacgtcgagttcgaaagtccaattcctgaggctaaagactcct

SEQ ID NO: 369367 - DNA, 120 bp, Artificial Sequence
  ENSG00000141579_12 (sequence is synthesized)
ccaaggctgggcagagagacacggaagggtccaaaatgagcccccgcgcagggagtgcagccacgggctccccagggaggccgagccccaccgacttcatgcagacgagccagacctgcg

SEQ ID NO: 369368 - DNA, 120 bp, Artificial Sequence
  ENSG00000141579_13 (sequence is synthesized)
gcactgggaagactctacccgccagagcaaagcctcacagccttcaggcctgttaagaaaagcacagaatgcctacctgcccaggctgctgagaccacagcagagtctccagtaagcctc

SEQ ID NO: 369369 - DNA, 120 bp, Artificial Sequence
  ENSG00000141579_14 (sequence is synthesized)
aatgttgtgaacggagaccctcctgctccgaccggaagcgcctctctcgtctcggaggccgcgccttccagtccggacgacagctccgggatgggccccctcaacctctccaagaaatca

SEQ ID NO: 369370 - DNA, 120 bp, Artificial Sequence
  ENSG00000141579_15 (sequence is synthesized)
gagataaacctggcagccacccacgaacccacgtaccaaggcagcccccaggcggaaaccgccagcttctcagagctgcaggaccttccactcaatctctcggtgaaggacccctgtaac

SEQ ID NO: 369371 - DNA, 120 bp, Artificial Sequence
  ENSG00000141579_16 (sequence is synthesized)
acccaggctccgaggcctgccttccccggtcgaccacgagctgcagaacctgctgctgctgttccacagaagactgggacagaaggttctgaggatgggcccagccaccctgagaccaag

SEQ ID NO: 369372 - DNA, 120 bp, Artificial Sequence
  ENSG00000141579_17 (sequence is synthesized)
ccaggcagcctcgacggtgacggggccccacccacaggccccggcgaggaggctccagacgcatgcgcggtggacagcagcgaggagcagaagcagacggcagccgtggccctgtgccag

SEQ ID NO: 369373 - DNA, 120 bp, Artificial Sequence
  ENSG00000141579_18 (sequence is synthesized)
ctggcggcctacagccccaggaacatccgggtgggcgatggggatgctgcggccccggaacctgcctgccggcaagacacacccacactgagctccatggagagccaagaggcccagtgt

SEQ ID NO: 369374 - DNA, 120 bp, Artificial Sequence
  ENSG00000141579_19 (sequence is synthesized)
gacctcagacccaaaggacaaaagaggacaagtctaagggatgctggaaaatcccagcaaggagctaagaaggcgaagctgcaggacacggccagagtgttcacactacgaaggagggcc

SEQ ID NO: 369375 - DNA, 120 bp, Artificial Sequence
  ENSG00000141579_20 (sequence is synthesized)
cgggtgtcctaacgccgggttcacacgtgtgttcacagagctacggccacacacacgccttccaaggtggcaagctacaacacctctgaactggcactttcacatttttacaaatgcagc

SEQ ID NO: 369376 - DNA, 120 bp, Artificial Sequence
  ENSG00000141579_21 (sequence is synthesized)
aacaaacaaacaaacaaacaaaaaaccctccaattcagtttttataaatattaagcatgaatattaaaaggtgcttctacttttggttgtaaaaacacctgaatgactctaagactgata

SEQ ID NO: 369377 - DNA, 120 bp, Artificial Sequence
  ENSG00000141579_22 (sequence is synthesized)
gactctaagactgatatgtattttcaagtctaagctgtcttacagaagatcttttataaatgtttccttataaatatctcaccattacaacaaattgttttaactgtttttctattagct

SEQ ID NO: 369378 - DNA, 120 bp, Artificial Sequence
  ENSG00000141579_23 (sequence is synthesized)
ctagctgcatatttgatgtaaatgacaattactgaaaaaatgtcagaaaaaacattttcagtactaacattaaagtgccatatgtaaaaaagaaaaatgtgatttgtataactaaataac

SEQ ID NO: 369379 - DNA, 120 bp, Artificial Sequence
  ENSG00000141579_24 (sequence is synthesized)
acacaaacatcaagaggctatttatacaaataatttatttccactagggaaagtgcattactggtgaaggtattatcaatttattctacttgcttataatgttacagtgaatgttctggc

SEQ ID NO: 369380 - DNA, 120 bp, Artificial Sequence
  ENSG00000141579_25 (sequence is synthesized)
ttactctgcctcactttccattccccaaaatgatgtgtatgttgctaattttccaataaactcatatgaaccataaggaaacataaaatgcaaataaacataaatctatgttatccttta

SEQ ID NO: 369381 - DNA, 120 bp, Artificial Sequence
  ENSG00000141579_26 (sequence is synthesized)
agtttcacccagcaagcgtgagaacaggtactgcttcctgagcaccgccagccaccggcaccaagaccggccacatcccagcactgcccacctctggccagagtctgcattttcctccta

SEQ ID NO: 369382 - DNA, 120 bp, Artificial Sequence
  ENSG00000141580_0 (sequence is synthesized)
acttccggccgcggcggcctcagcgccggcccgaagggaccaggccgccgtccccagcgagaggcatgcagcgctgaggagcggcgacccagcacggcggcgccatgaacctcctgccgt

SEQ ID NO: 369383 - DNA, 120 bp, Artificial Sequence
  ENSG00000141580_1 (sequence is synthesized)
gtaaccctcacggcaacgggctgctctacgccggcttcaaccaggaccacggatgctttgcgtgtgggatggaaaatggattccgagtctataacactgatccactaaaagaaaaagaga

SEQ ID NO: 369384 - DNA, 120 bp, Artificial Sequence
  ENSG00000141580_2 (sequence is synthesized)
aacaagaatttctagaaggaggagttggccatgttgaaatgttatttcgctgcaactatttagctttagttggtggtggaaaaaagccgaaataccctcccaacaaagtaatgatctggg

SEQ ID NO: 369385 - DNA, 120 bp, Artificial Sequence
  ENSG00000141580_3 (sequence is synthesized)
atgacctgaagaagaagactgttattgaaatagaattttctacagaagtcaaggcagtcaagctgcggcgagatagaattgtggtggttttggactccatgattaaggtgttcacattca

SEQ ID NO: 369386 - DNA, 120 bp, Artificial Sequence
  ENSG00000141580_4 (sequence is synthesized)
cacacaatccccatcagttgcacgtcttcgaaacctgctataaccccaaaggcctctgtgtcctttgtcccaatagtaacaactccctcctggcctttccgggcacgcacacgggccatg

SEQ ID NO: 369387 - DNA, 120 bp, Artificial Sequence
  ENSG00000141580_5 (sequence is synthesized)
tgcagcttgtggacctggccagcacggagaagccacccgtggacattcctgcacacgagggtgtcctgagctgcattgcactcaacctgcagggaacaagaattgcaactgcatccgaga

SEQ ID NO: 369388 - DNA, 120 bp, Artificial Sequence
  ENSG00000141580_6 (sequence is synthesized)
aagggacgcttataagaatatttgatacttcatcagggcatttaatccaggaactgcgaagaggatctcaagcagccaatatttactgcatcaacttcaatcaggatgcgtccctcatct

SEQ ID NO: 369389 - DNA, 120 bp, Artificial Sequence
  ENSG00000141580_7 (sequence is synthesized)
gcgtatccagcgaccacggcacagtgcatatttttgcagctgaagatccaaaaaggaataaacagtccagtttggcctcagccagtttccttccaaaatacttcagttccaagtggagtt

SEQ ID NO: 369390 - DNA, 120 bp, Artificial Sequence
  ENSG00000141580_8 (sequence is synthesized)
tctccaagtttcaggttccctcaggctctccgtgcatttgtgcctttggaacagagccaaacgccgtcattgcaatttgtgcagacggcagctactacaaattcctgttcaaccccaagg

SEQ ID NO: 369391 - DNA, 120 bp, Artificial Sequence
  ENSG00000141580_9 (sequence is synthesized)
gggagtgcatccgagatgtctacgcgcagtttctagagatgaccgatgacaagctgtgactccagctgggggcgccacagcacccaccacctgccgccttcagactctcggggctggtgc

SEQ ID NO: 369392 - DNA, 120 bp, Artificial Sequence
  ENSG00000141580_10 (sequence is synthesized)
ccatttccagtattaaagagagaatcatcatcaaggcaccgtaggtaactcagtggctgtgaccagctcgactggcggccactggctgttcccatgagttcagctgtgacgttagcttca

SEQ ID NO: 369393 - DNA, 120 bp, Artificial Sequence
  ENSG00000141580_11 (sequence is synthesized)
gtggctccgccgcatcctcacactgacgggggctccatacggacctggggactgggctgagagggtggacgagttcaggtttgtttttgcagcagattccgtcgttcttactgagtctgc

SEQ ID NO: 369394 - DNA, 120 bp, Artificial Sequence
  ENSG00000141580_12 (sequence is synthesized)
agcgggggagtgaacaagtgtgcagatgtaagttcttacatgataagcagattgaatacaacaccagcagcttgccttagaaaaggagaaaggaattccttttcccgcccgaacatgaag

SEQ ID NO: 369395 - DNA, 120 bp, Artificial Sequence
  ENSG00000141580_13 (sequence is synthesized)
aaaaatgacctgaccctgtagagagaacacagtgtgaatgtttcccctcgtgtgagcccagcctgtggtcttctccgtacccgcaacgtggtcatctgtgcccgtgacgtcacctgtgcc

SEQ ID NO: 369396 - DNA, 120 bp, Artificial Sequence
  ENSG00000141580_14 (sequence is synthesized)
cgtgcgtggcgtccccgtctccgttggggccattagaatgaggcagacaccaggccactctagaagccgagccgtcacacctcaggcgtgtgcggggcggggacggggggtctcctggtt

SEQ ID NO: 369397 - DNA, 120 bp, Artificial Sequence
  ENSG00000141580_15 (sequence is synthesized)
acattttggattaaacctgtttcccggttatgtgtagggaacagcagagtgatgcacgaactttgaacattcgttatggggaaaacatcctttaacttcggggtcgtctgccagagcagg

SEQ ID NO: 369398 - DNA, 120 bp, Artificial Sequence
  ENSG00000141580_16 (sequence is synthesized)
gtctgggagggtccatgcagttcccgctggtgtggagggaaatgccctggtctggcctccgagcccccaggtccaccgtctcccctcccctcatttgtaagaatagctacacactaacat

SEQ ID NO: 369399 - DNA, 120 bp, Artificial Sequence
  ENSG00000141580_17 (sequence is synthesized)
tttgggaaggagaggcacataactttttttaacatttggtaactaggttatgggctctacattgtcagctacttgggatatatatttaattttcttaaattcccgttaaactctatttta

SEQ ID NO: 369400 - DNA, 120 bp, Artificial Sequence
  ENSG00000141580_18 (sequence is synthesized)
tggttttgatttcagattgcaaacatgtaaaacctgcatagcagcgagttctcggttttgccggtttctttagttctttactgtcactgtcatgtaatcagctaattctctgtggatgtt

SEQ ID NO: 369401 - DNA, 120 bp, Artificial Sequence
  ENSG00000141580_19 (sequence is synthesized)
gctgtaaagtatgcatgttcctttcatgtgtatttaatcatgatgtttaattttgcacacttatttgtaatgtttcttttaaataaaagtgactaattttgttgtagtctggacctgtaa

SEQ ID NO: 369402 - DNA, 120 bp, Artificial Sequence
  ENSG00000141580_20 (sequence is synthesized)
gtcaagctgcggcgagatagggctccgctggaggtaagtaggtggtggcgtggatgacgtgcgccacagtggaccagccagtgggtctcaccgtggtgagttatgtcccattccgacatg

SEQ ID NO: 369403 - DNA, 120 bp, Artificial Sequence
  ENSG00000141580_21 (sequence is synthesized)
tgcagagctgaggacatgagttttgagccttgaattaccctgggcttttagcccctgctttgccaaatgctgcctctcaataaaggttttcggtttgaaggtaaaggaaaattgaatttt

SEQ ID NO: 369404 - DNA, 120 bp, Artificial Sequence
  ENSG00000141580_22 (sequence is synthesized)
gaattggcacctccagagtgggaatgttgaggtgttccacagtgtcgacaagtgctgtgggttaagtctctggactcctccacatccacacaaggcctgagctgtgctggttttctctgc

SEQ ID NO: 369405 - DNA, 120 bp, Artificial Sequence
  ENSG00000141580_23 (sequence is synthesized)
gcctgagcgacagagtgagactccatctataaaaaaaaagtaataataataataatgcaaacgcttgagccagatcgaggatattctactttcagacttttcttattttttccagacaca

SEQ ID NO: 369406 - DNA, 120 bp, Artificial Sequence
  ENSG00000141580_24 (sequence is synthesized)
cagacttttcttattttttccagacacagtagcataaaaatatcacttctgtctgttttgctcggttctgaacctagatggagtgtttgatgatgtctctctgaacctcagagacgtctc

SEQ ID NO: 369407 - DNA, 120 bp, Artificial Sequence
  ENSG00000141580_25 (sequence is synthesized)
ttaggctgaccttcacccaggcgagaagcactccctcagcagagccagcccacgtgcactcgccgagctccaggcctggcgctggctacctgcctccagagctttttcttcaggaacact

SEQ ID NO: 369408 - DNA, 120 bp, Artificial Sequence
  ENSG00000141582_0 (sequence is synthesized)
cgccggcgggagctagcagcgtctgcagccgcgccggccgccagcgccccggcgcgctccggctcggccatggagctgccagctgttggcgagcacgtcttcgcggtggagagcatcgag

SEQ ID NO: 369409 - DNA, 120 bp, Artificial Sequence
  ENSG00000141582_1 (sequence is synthesized)
aagaagcggatccgcaagggcagagtggagtatctggtgaaatggagaggctggtcgcccaaatataacacgtgggaaccggaggagaacatcctggaccccaggctgctgatcgccttc

SEQ ID NO: 369410 - DNA, 120 bp, Artificial Sequence
  ENSG00000141582_2 (sequence is synthesized)
cagaacagggaacggcaggagcagctgatgggatatcggaagagagggccgaagcccaaaccgctagtggtgcaggtgcctacctttgcccgtcgttccaatgtcctgaccggcctccag

SEQ ID NO: 369411 - DNA, 120 bp, Artificial Sequence
  ENSG00000141582_3 (sequence is synthesized)
gactcctccactgacaaccgtgccaagctggatttgggcgcgcaggggaagggccaggggcatcagtacgagctcaacagcaagaagcaccaccagtaccagccgcacagcaaggagcgg

SEQ ID NO: 369412 - DNA, 120 bp, Artificial Sequence
  ENSG00000141582_4 (sequence is synthesized)
gcgggcaagcccccgccgccgggcaagagcggcaagtactactaccagctcaacagcaagaagcaccacccctaccagcccgaccccaaaatgtacgacctgcagtaccagggcggccac

SEQ ID NO: 369413 - DNA, 120 bp, Artificial Sequence
  ENSG00000141582_5 (sequence is synthesized)
aaggaggcgcccagccccacctgcccggacctgggggccaagagccacccgcccgacaagtgggcgcaaggtgcgggggccaaaggctacctgggggcggtgaagcccctggccggtgcg

SEQ ID NO: 369414 - DNA, 120 bp, Artificial Sequence
  ENSG00000141582_6 (sequence is synthesized)
gcgggtgctccaggcaaaggctccgagaagggcccccccaacggaatgatgccggcccccaaagaggctgtgacgggcaacgggattgggggcaagatgaagatagtcaagaacaagaac

SEQ ID NO: 369415 - DNA, 120 bp, Artificial Sequence
  ENSG00000141582_7 (sequence is synthesized)
aagaacggacgcatcgtgatcgtgatgagcaaatacatggagaacggcatgcaggcggtgaagatcaagtccggcgaggtggcagagggggaggctcgctcccccagccacaagaagcgg

SEQ ID NO: 369416 - DNA, 120 bp, Artificial Sequence
  ENSG00000141582_8 (sequence is synthesized)
gcagccgacgagcgccaccctcctgccgacaggacttttaaaaaggcggcgggcgcagaggagaagaaggtggaggcgccgcccaagaggagggaggaggaggtgtccggggttagcgat

SEQ ID NO: 369417 - DNA, 120 bp, Artificial Sequence
  ENSG00000141582_9 (sequence is synthesized)
ccgcagccccaggatgccggctcccgcaagctgtccccgaccaaggaggcctttggagagcagcccctgcagctcaccaccaagcccgacctgcttgcctgggacccggcccggaacacg

SEQ ID NO: 369418 - DNA, 120 bp, Artificial Sequence
  ENSG00000141582_10 (sequence is synthesized)
accaccaccaccaccaccaccaccacgccgtcggcctgaatctctcccacgtgcgcaagcgctgcctctccgagacccacggcgagcgcgagccctgcaagaagcggctgactgcgcgca

SEQ ID NO: 369419 - DNA, 120 bp, Artificial Sequence
  ENSG00000141582_11 (sequence is synthesized)
tgcgcgcagcatcagcacccccacctgcctggggggcagcccagccgctgagcgcccggccgacctgccaccagccgccgccctcccgcagcccgaggtcatcctgctagactcagacct

SEQ ID NO: 369420 - DNA, 120 bp, Artificial Sequence
  ENSG00000141582_12 (sequence is synthesized)
ggatgaacccatagacttgcgctgcgtcaagacgcgcagcgaggccggggagccgcccagctccctccaggtgaagcccgagacaccggcgtcggcggcggtggcggtggcggcggcagc

SEQ ID NO: 369421 - DNA, 120 bp, Artificial Sequence
  ENSG00000141582_13 (sequence is synthesized)
ggcacccaccacgacggcggagaagcctccagccgaggcccaggacgaacctgcagagtcgctgagcgagttcaagcccttctttgggaatataattatcaccgacgtcaccgcgaactg

SEQ ID NO: 369422 - DNA, 120 bp, Artificial Sequence
  ENSG00000141582_14 (sequence is synthesized)
cctcaccgttactttcaaggagtacgtgacggtgtagccggagggcgtcggaaggggaagcgccattcccgcgggggggcggggagctgagcacctggggcctcggggcgggctcccctc

SEQ ID NO: 369423 - DNA, 120 bp, Artificial Sequence
  ENSG00000141582_15 (sequence is synthesized)
tcgccaacccgccaaccgcgagagacccaggctggcccccagggtgaggacgcccggagcggaggtaaccatgttccccctgcggcggctgtcagacctgggcggaggccccttccacgc

SEQ ID NO: 369424 - DNA, 120 bp, Artificial Sequence
  ENSG00000141582_16 (sequence is synthesized)
ggtgccggcggggctcgccctctcctgcccttccccgctggagatggacccccggaacggacagggcagctctgcgcccggcctcagagttctagtattatattttaaccgtgctaactt

SEQ ID NO: 369425 - DNA, 120 bp, Artificial Sequence
  ENSG00000141582_17 (sequence is synthesized)
gtcaagtgctgactctactcccgtttgtacgtggtgttattattgaaatgtattgtttgagctcaaaaggcccgaccaccccccttcgggctgctatatatatatttatttgtaggtatt

SEQ ID NO: 369426 - DNA, 120 bp, Artificial Sequence
  ENSG00000141582_18 (sequence is synthesized)
tatatattgaaatataaaaacctagatttatggagtttcctctagatcatgttatattctatatcagacaaactattttcttttgacctttcttcccctccatccagtatttcggttgat

SEQ ID NO: 369427 - DNA, 120 bp, Artificial Sequence
  ENSG00000141582_19 (sequence is synthesized)
ttcattttctcccctctcttccccttccacgaactgcaataccagtaaccttggtatatattttttgatactgtacacatggatgtcttgtttctatgtgcaaaaaaaaaaaaaaaaaaa

SEQ ID NO: 369428 - DNA, 120 bp, Artificial Sequence
  ENSG00000141582_20 (sequence is synthesized)
agtttgttaaaaggctacacgagctctctagaaactgctgctactagaaatgtctaaactataagcttccaactattacctgcttgaatgtaaatattaaatggagatgttgaaggtgca

SEQ ID NO: 369429 - DNA, 120 bp, Artificial Sequence
  ENSG00000141582_21 (sequence is synthesized)
ggagaacatcctggaccccaggctgctgatcgccttccagaacagggaacggcaggagcagctgatgggatatcggaagagagggccgaagcccaaaccgctagtggtgcagacctccca

SEQ ID NO: 369430 - DNA, 120 bp, Artificial Sequence
  ENSG00000141582_22 (sequence is synthesized)
cctcctgccccccatgaggcagctgcggacctggtgggggctgggacgctccagaaactcccggcatgcggtggggctgtctcctccctcctctcacccctgcacccgttccctcaggtg

SEQ ID NO: 369431 - DNA, 120 bp, Artificial Sequence
  ENSG00000141622_0 (sequence is synthesized)
attggctgcgcgcgcctttgtgtggcggcagctgcggccccagcgcctttgaatgtcgagaggggccgggaagggagcctttccatgggccatctgtctccccgccagccgccgccccac

SEQ ID NO: 369432 - DNA, 80 bp, Artificial Sequence
  ENSG00000141622_1 (sequence is synthesized)
cccggagccgcgccacaaagggcccgcgcgcagccgccgccgccgccgccgcgcgaggagccaggatggtcctggtccac

SEQ ID NO: 369433 - DNA, 120 bp, Artificial Sequence
  ENSG00000141622_2 (sequence is synthesized)
ccgcgcgaggagccaggatggtcctggtccacgtcggctatctcgtgcttccagtgtttggctctgtgcgaaacagaggtgccccctttcaaaggtctcagcatcctcacgctacctcct

SEQ ID NO: 369434 - DNA, 120 bp, Artificial Sequence
  ENSG00000141622_3 (sequence is synthesized)
gccgccacttccacctgggccccccgcagccgcagcagctcgctcccgacttcccgctggcccaccccgtgcagtcgcagccaggcctcagcgcccacatggccccggcccaccagcaca

SEQ ID NO: 369435 - DNA, 120 bp, Artificial Sequence
  ENSG00000141622_4 (sequence is synthesized)
gcggcgccctgcaccagtcgctgaccccgctgcccaccctgcagttccaggacgtcacaggtccctccttcctacctcaggccctgcaccagcaatacctcctgcagcagcagctcctgg

SEQ ID NO: 369436 - DNA, 120 bp, Artificial Sequence
  ENSG00000141622_5 (sequence is synthesized)
aagcccagcaccgcaggctggtctcgcaccccaggcggagtcaggagcgtgtatctgtccacccccaccgcctccatcccagcttcgacttcggccaactgcagacacctcagcccaggt

SEQ ID NO: 369437 - DNA, 120 bp, Artificial Sequence
  ENSG00000141622_6 (sequence is synthesized)
atttggctgagggcactgactgggatctcagtgtggatgctggcttgagtcctgctcagttccaggtgcggcccatccctcagcactatcagcattacctagccactcctcgaatgcacc

SEQ ID NO: 369438 - DNA, 120 bp, Artificial Sequence
  ENSG00000141622_7 (sequence is synthesized)
actttcccagaaactcctcctccacacagatggtcgtccatgaaatccgaaactacccttaccctcagcttcacttccttgctctccagggactaaatcccagcagacacacctccgccg

SEQ ID NO: 369439 - DNA, 120 bp, Artificial Sequence
  ENSG00000141622_8 (sequence is synthesized)
tacgggagagctatgaggagctgctgcagctcgaggacaggttgggtaatgtgactcggggagctgtacagaacaccattgagaggttcaccttcccccacaagtataagaagcgaagac

SEQ ID NO: 369440 - DNA, 120 bp, Artificial Sequence
  ENSG00000141622_9 (sequence is synthesized)
cccaggatggcaagggcaagaaggatgagggggaggagtcagacacagatgagaaatgcacaatttgtctgtctatgctggaagatggagaagatgtgagacgcctaccctgtatgcatc

SEQ ID NO: 369441 - DNA, 120 bp, Artificial Sequence
  ENSG00000141622_10 (sequence is synthesized)
tctttcaccaactgtgcgtggaccagtggctcgccatgagcaagaaatgccccatctgccgagtggacattgagacacaactgggagccgacagctgagggaggaattagccagtggaca

SEQ ID NO: 369442 - DNA, 120 bp, Artificial Sequence
  ENSG00000141622_11 (sequence is synthesized)
ccccatttccttcaccaggtccccccacggccatagcccttgcagccaaactttgccttctgagccatttgacgtagaggaaaagcctgcaagcacattttgtggaaagaggagttggtg

SEQ ID NO: 369443 - DNA, 120 bp, Artificial Sequence
  ENSG00000141622_12 (sequence is synthesized)
gtatcggtgtcgagggagaggagggggttggggaggacccacctctccagaatggcgactgtccccatccgcctggctgagcaggagagagggagctggcggtgcccagcgcaagggcgg

SEQ ID NO: 369444 - DNA, 120 bp, Artificial Sequence
  ENSG00000141622_13 (sequence is synthesized)
gaaggaggggcccaggctgcggagaacccaggtgggatcctgaaggcactagctgacagacgggcccctcaatcctgtcctctgaaggattgtatatatacctctcgaccacgtaggaac

SEQ ID NO: 369445 - DNA, 120 bp, Artificial Sequence
  ENSG00000141622_14 (sequence is synthesized)
catgtaggggtctctagctatttctgtggatggcagccggagcatgttagcttaagaaaaatgttgtgtgtggtgctctagtcatcttgtggtggacatgtcgctattaccgaattcgca

SEQ ID NO: 369446 - DNA, 120 bp, Artificial Sequence
  ENSG00000141622_15 (sequence is synthesized)
ccaaatatttctcattgagtttcttgttttggtgcctgaccgaaccaacgacagccccaatcttcccgtctttatgagagaaaaggaaaaaggaatcaaaggtggaagaaaaaaaaagcc

SEQ ID NO: 369447 - DNA, 120 bp, Artificial Sequence
  ENSG00000141622_16 (sequence is synthesized)
aaattctgtttacggtgaaaaaggattttgtttttcacccaatttgggaggcgggaggggggggttctcgttttatttttgtttttgtttttaccttggcttttgtttttctcatgttta

SEQ ID NO: 369448 - DNA, 120 bp, Artificial Sequence
  ENSG00000141622_17 (sequence is synthesized)
cagtgcacggagtgtggaagggggtctaggagagggagagctggaaaaggagctgatggggtcttatcctggcctctgagggttcagcggaggtgaggaaggcagcagagctccagcagg

SEQ ID NO: 369449 - DNA, 120 bp, Artificial Sequence
  ENSG00000141622_18 (sequence is synthesized)
tgaagggagagttcatctaggcggggctccccaggcccagggctcaacttcatggccccagctatatccccccagttccacactaaaccagggagggctcggccctcagctactggtacc

SEQ ID NO: 369450 - DNA, 120 bp, Artificial Sequence
  ENSG00000141622_19 (sequence is synthesized)
caatgtgttcctgggagccgagagacccatggtcactccaactccttcctttaggctgtgctcttgcctgtcacaaagaggcaacgtagccactgcctccctatgcaaaaaattaaccag

SEQ ID NO: 369451 - DNA, 120 bp, Artificial Sequence
  ENSG00000141622_20 (sequence is synthesized)
atgatgcagataagacagcataggtgatggctgcttggtcttggccacagtgctctcagccagcactaagggctgaggtcaataccgcagaccttggggaggaagctgagcatcccccgg

SEQ ID NO: 369452 - DNA, 120 bp, Artificial Sequence
  ENSG00000141622_21 (sequence is synthesized)
gatgtctccagtcctgacacagtccctcagagatggccctggctctgaggtcacatcagctaggtttgggaggcccctcagcttggtttgggagtgcccgtgttcctggtctctggctgc

SEQ ID NO: 369453 - DNA, 120 bp, Artificial Sequence
  ENSG00000141622_22 (sequence is synthesized)
ttctctgactctttgataaccttgggcaagtccctttctttctctgtgcctcagtttccttctcctttgaggggggagagagaacagtgcagccccatttccggtcctgctacctcacct

SEQ ID NO: 369454 - DNA, 120 bp, Artificial Sequence
  ENSG00000141622_23 (sequence is synthesized)
agatgttgtgaggattcatattctctgtccagcgtgttctatgctctcttctgagaaccttgtggggtgtcgggatgggggtgctgggagacacagacctgatacagtatgtctttctgc

SEQ ID NO: 369455 - DNA, 120 bp, Artificial Sequence
  ENSG00000141622_24 (sequence is synthesized)
accacctcacaattttcctgaaccccaaagggagcagagagataagaggacagaagaatggagatgggaaaatccaccaaattccaacccaaacccaactttctttctccctatgtggaa

SEQ ID NO: 369456 - DNA, 120 bp, Artificial Sequence
  ENSG00000141622_25 (sequence is synthesized)
gacaccagattagctggaattctgccaccttcctttgtgccccaccccccactgttccctcatttgcactgctctgtaagcctccccctcacctccattcataacccagtctcaatgccc

SEQ ID NO: 369457 - DNA, 120 bp, Artificial Sequence
  ENSG00000141622_26 (sequence is synthesized)
tcgtatcaataagaccggggtaagggggacaggatacttgtcacatatttgaagaaattccatacagtgaaggaaatttgagtctgtattgctgctacaagggtaaaaccaggaccaatg

SEQ ID NO: 369458 - DNA, 120 bp, Artificial Sequence
  ENSG00000141622_27 (sequence is synthesized)
ggtaaaagtaacaggcgggcagattttggcttgaggaagagcttctagcacgactggttcatgcgggaatagctgctctggccacctgcaggcagaaagtgggggaagtggctcctggca

SEQ ID NO: 369459 - DNA, 120 bp, Artificial Sequence
  ENSG00000141622_28 (sequence is synthesized)
ggagatttctcccagcactaatatcctggtgttctataaaatctttattgagtgcctaccggtgcaggcgctgggagagacaatagctttgaggagctcacaatctagctgaggagacaa

SEQ ID NO: 369460 - DNA, 120 bp, Artificial Sequence
  ENSG00000141622_29 (sequence is synthesized)
gacacatccaatgctgcaaaaatggtgaataacctgattcagggttagcagcaatgagtatcacagcgtccaactcagtagctccagtgtatgaaaatgtctccagggctaaaggctgga

SEQ ID NO: 369461 - DNA, 120 bp, Artificial Sequence
  ENSG00000141622_30 (sequence is synthesized)
gatctcaccagtggggaaagtacatctgagtcaggattttgggggaaagctagttactgatagccacaggaagttgagacttctgccccattctctccaatggctgggtgaaaaccaaga

SEQ ID NO: 369462 - DNA, 120 bp, Artificial Sequence
  ENSG00000141622_31 (sequence is synthesized)
attcatcggaagatggctttggcctggaggtagctagggtggtctaggaagctcactcctctcttagtctcagtctttcattctttctgctgagactggcctgaaaggctggcaagtggg

SEQ ID NO: 369463 - DNA, 120 bp, Artificial Sequence
  ENSG00000141622_32 (sequence is synthesized)
ggagtcagtggggaggccaggatagaactagagctggtgtcccaggttccagtctgggctcttcactgacaaagtgggcaacactagaaacttccctttgtctctctgggccttagtttc

SEQ ID NO: 369464 - DNA, 120 bp, Artificial Sequence
  ENSG00000141622_33 (sequence is synthesized)
ctcagttacaacctaaggaggttggattggatgcttgctaatttccttctgacactcacactccctaacatcaacacatcttcaaggcggcagagctgtgcgcccacccagctattgaaa

SEQ ID NO: 369465 - DNA, 120 bp, Artificial Sequence
  ENSG00000141622_34 (sequence is synthesized)
aggactttctgtgggcacacactctgtttcagactgggctgggggcacacgtgctgggtgagacagtgggccctcgtcccctcccccctcccaattctctgccccaggctaatattaggg

SEQ ID NO: 369466 - DNA, 120 bp, Artificial Sequence
  ENSG00000141622_35 (sequence is synthesized)
actggggaggggaccaccagaggggagagggaagctgcttactttgggggtagaccctgaagcccctcctccttcccccacagatggggacaggaggtgatggggtgctcagaaccctgc

SEQ ID NO: 369467 - DNA, 120 bp, Artificial Sequence
  ENSG00000141622_36 (sequence is synthesized)
agctcccacttctttagccgggcagctgtttgggggacaagagagggccagggtctgtgcttctgctcccggcactggtcagggagtctgggaagagtggagaagaggcagggtcaggcc

SEQ ID NO: 369468 - DNA, 120 bp, Artificial Sequence
  ENSG00000141622_37 (sequence is synthesized)
tcagcatctcacatccaccacctccaggaggggagaccactggtaagtcctcctcctgctcaactcaagggactcagaccctttcttgactgagacgcatgagtgccttctggggtgaga

SEQ ID NO: 369469 - DNA, 120 bp, Artificial Sequence
  ENSG00000141622_38 (sequence is synthesized)
gcagccccagggtttaagttgggcgtcctagcagctgcagcagctgtgccgccgcgggtccaccgaggacgccaatcaatcaacccaacaccacaagcttggttgggtgcaagcagaggg

SEQ ID NO: 369470 - DNA, 120 bp, Artificial Sequence
  ENSG00000141622_39 (sequence is synthesized)
tgagcaggggctgcccctccacctggccaggacccccttcggcacccagttgcccttggccaccacctgtggcaggactcaagctcctcttctgcaaatgttcccagcctccgtgcaagt

SEQ ID NO: 369471 - DNA, 120 bp, Artificial Sequence
  ENSG00000141622_40 (sequence is synthesized)
attcttaactctttacgcctaatgaacaagcacagtttttcaatggtgaagaaaaaagcaccagactttttttctttttttcctaaagaaatcccctaagccccccgcctgtaggcggga

SEQ ID NO: 369472 - DNA, 120 bp, Artificial Sequence
  ENSG00000141622_41 (sequence is synthesized)
caaacactccctgcgtggggctgtagcaacgtctgtcaggcccccttgtgtttcatctcctgcgcgcgtagagcaaatgctagagcgatttcagctgatagaaaaacaaaaatgaaaaaa

SEQ ID NO: 369473 - DNA, 120 bp, Artificial Sequence
  ENSG00000141622_42 (sequence is synthesized)
aaaacacaaaaaacaaaaaacatggcacgttgctagtttacagggttttgtgagtttaaatgccttatatttaacaatcataatttatgactaacttgtagatatcgtgggttcttattt

SEQ ID NO: 369474 - DNA, 120 bp, Artificial Sequence
  ENSG00000141622_43 (sequence is synthesized)
aattatttttatagttgttttgcatttttaattataatttatttatttagaaaggatactaattttttttattactcctattacctcattttggcgttgtttctgggagtggaatgcttt

SEQ ID NO: 369475 - DNA, 120 bp, Artificial Sequence
  ENSG00000141622_44 (sequence is synthesized)
gcatgcattggtacgatgacaaacaactacgaatacaaaaaaaaaatttaaataaaattctgcaaactttatttcgtccgaactatcagggtgtgtgattgcaagctgtcctaccgtggt

SEQ ID NO: 369476 - DNA, 120 bp, Artificial Sequence
  ENSG00000141622_45 (sequence is synthesized)
gctggcctctttggatacattccatacgaaatgcaaacctttgattctgtatgctgtgatctagtgaaaaactccaatatagtgactgtatttagcacatatataaatataatttgcact

SEQ ID NO: 369477 - DNA, 120 bp, Artificial Sequence
  ENSG00000141622_46 (sequence is synthesized)
tgtcagcagactggggtaatcctttcacttgctacacttggcacccccccgcccccaccacaaccctgcctctccatcatgaacctgcctttcctcctccctcgctcctcccacaacctc

SEQ ID NO: 369478 - DNA, 120 bp, Artificial Sequence
  ENSG00000141622_47 (sequence is synthesized)
agcccacccagccggtatcctctgaggaaagtcttggggcactagaggccactgtctccacctggcctccaactccagaattggagccctccagacattacaagaggaacatcagagagc

SEQ ID NO: 369479 - DNA, 120 bp, Artificial Sequence
  ENSG00000141622_48 (sequence is synthesized)
caaaaagcctgacttcttagaaggagccctggactggggagccgggaggctcaggttttcaaatctgctccatgacagacgtcccaatgaccttgagcaagtcccttggcccctgagtct

SEQ ID NO: 369480 - DNA, 120 bp, Artificial Sequence
  ENSG00000141622_49 (sequence is synthesized)
cagttttctgggtggggtgagtgaggagaactgggagatctttagggtcccttagattcaagtagaatgtgacacagatcccgtgggaaaccactgtgctgtgctgtctcaccttctgag

SEQ ID NO: 369481 - DNA, 60 bp, Artificial Sequence
  ENSG00000141622_50 (sequence is synthesized)
ccgtgggaaaccactgtgctgtgctgtctcaccttctgaggagagaagaaagagggagaa

SEQ ID NO: 369482 - DNA, 88 bp, Artificial Sequence
  ENSG00000141622_51 (sequence is synthesized)
caggagacggaggttgcagtgagctgggagcgtgcaccactgcactctagcctgggtgataagaacaaaactcagtcgggagaaagga

SEQ ID NO: 369483 - DNA, 120 bp, Artificial Sequence
  ENSG00000141622_52 (sequence is synthesized)
aaggagagcaaagaagaagagaagaatagagagagtgagctgagaatttgagcttgctcagagttgactttcgggagggtttttgtcctataatatgtggcatcctgtgggtgacaggga

SEQ ID NO: 369484 - DNA, 120 bp, Artificial Sequence
  ENSG00000141622_53 (sequence is synthesized)
ggtgagttaggtggacacgtataggacgtgccctttcataaggcttgggcagtcatttggcgagtgagctgaaatccatgtcttgttagagatagggatggggtaggcagaaaggagctc

SEQ ID NO: 369485 - DNA, 120 bp, Artificial Sequence
  ENSG00000141622_54 (sequence is synthesized)
caaactatgggtttgggattggcacccctatcctatcatcacccagagtcttcattgttgagatgctgcccatggaaaacagattgggacatagattttggaatcaaggtctctgctcct

SEQ ID NO: 369486 - DNA, 120 bp, Artificial Sequence
  ENSG00000141622_55 (sequence is synthesized)
ggcatctcctctgtgcgtctccctctgcctttgctccctggggactgtgggcaggaggagcttcttcggaggaccgggagtgggcctccagtccccctgcccctgtagaggaataatgag

SEQ ID NO: 369487 - DNA, 120 bp, Artificial Sequence
  ENSG00000141622_56 (sequence is synthesized)
ggaggacatggggaagtcactgtcaaaggctggcacagctgtgagcccaatgcctctgagcgaaaaggagagagagggagttcacgcccctgagagtagccccctgagccggctgggacc

SEQ ID NO: 369488 - DNA, 120 bp, Artificial Sequence
  ENSG00000141622_57 (sequence is synthesized)
tggactgcctgctttcctcctgcctcttcccctttccctccttcacagcttatcctccttcttccctctttacatcactgcctttacctggtggggatgaggccccatggggaaggtgct

SEQ ID NO: 369489 - DNA, 120 bp, Artificial Sequence
  ENSG00000141622_58 (sequence is synthesized)
gatgtggagggaggaagtggagaccgagattcgccatactgcccagggaggctgtgtgagaactgggctgtgtatggtccctaaagcctcaactctgccccagctgggcgatgggtgccc

SEQ ID NO: 369490 - DNA, 120 bp, Artificial Sequence
  ENSG00000141622_59 (sequence is synthesized)
ctctctgggcttcctgcctagcttccccttctgcctccagcctggagccttgctttccctggagacaagcccgtggagtcccccaccacactggagggagcacgaccaccacactgctgg

SEQ ID NO: 369491 - DNA, 120 bp, Artificial Sequence
  ENSG00000141622_60 (sequence is synthesized)
gcctggcagacaccacatctttggcagggctcctggacgggcatgccttatgctgctctgcagggtcagagtggaaaggggccctttgccctggctggcctgtgccctcacccttgagcc

SEQ ID NO: 369492 - DNA, 120 bp, Artificial Sequence
  ENSG00000141622_61 (sequence is synthesized)
cctccccccactccacccctggcctcggatgcggctaatttctcagccatggagccagctgcaccagccctcgagggggtaattttgttgcccctggcaagtgaaaggattatcctcagt

SEQ ID NO: 369493 - DNA, 120 bp, Artificial Sequence
  ENSG00000141622_62 (sequence is synthesized)
gttgattgtccttttttgtaatcctcctgctgttctgttctgttgtgctgtgcaacattttgctacatagactattttatagcagaaagctagaagaatatttattatgaatattaaagc

SEQ ID NO: 369494 - DNA, 120 bp, Artificial Sequence
  ENSG00000141622_63 (sequence is synthesized)
aatagtgcatcaatgaaaaggcggagacattaggaattgtgtaaatgcttagattcacttttggtggattttttgtactttatttataactaataaaaatgaactgcattgctaactaca

SEQ ID NO: 369495 - DNA, 120 bp, Artificial Sequence
  ENSG00000141622_64 (sequence is synthesized)
gcagctctggcagggtgtcactccaattctactccataggcttgatgtctgaggtcccttctctaacctggctaaatcacaccaccctatggttcactgaggctgtttccctgcagggat

SEQ ID NO: 369496 - DNA, 120 bp, Artificial Sequence
  ENSG00000141622_65 (sequence is synthesized)
acaaagggcccgcgcgcagccgccgccgccgccgccgcgcgaggagccaggatggtcctggtccacgtcggctatctcgtgcttccagtgtttggctctgtgcgaaacagaggtatcgct

SEQ ID NO: 369497 - DNA, 120 bp, Artificial Sequence
  ENSG00000141622_66 (sequence is synthesized)
cgctttttcctttcggggtctgcttcggagcgtggatcgccgcaggcaccggggcgggggcgggcgccgcgggcggccgggggctcagggcacacccgcgaggacgcagggcgagcggtg

SEQ ID NO: 369498 - DNA, 120 bp, Artificial Sequence
  ENSG00000141622_67 (sequence is synthesized)
ccccccaccccattttagggggacccccgagggtgggggcggccgccctcgtgggagcttttgtagtgaagttagggtttggcgaatttgggtcccttcctccccagccccattttttat

SEQ ID NO: 369499 - DNA, 120 bp, Artificial Sequence
  ENSG00000141622_68 (sequence is synthesized)
ttttttattttttgcggcggacgtggttcccccaaatcacagccccttcccctaatacctagccctgtatgatcgaaaggagaaagatacatgaccgtgtgtgtgtgtgtgtgtgtgtgt

SEQ ID NO: 369500 - DNA, 120 bp, Artificial Sequence
  ENSG00000141622_69 (sequence is synthesized)
gtgtgtgtgtgtgagagagagagagagcgcgcgcgcgagagcatgcttggttttctgtggtttgctttttttgaggtatatgtgtgttttgtgttatgtgtgttttgtattcattttttg

SEQ ID NO: 369501 - DNA, 120 bp, Artificial Sequence
  ENSG00000141622_70 (sequence is synthesized)
ttcattagtaccgatggctggctagctgggacctgggtctctgccctatcccatgccccagcccccaccctctcgtgggcacttgcacgattttccatcccatccttttttcgtctttaa

SEQ ID NO: 369502 - DNA, 120 bp, Artificial Sequence
  ENSG00000141622_71 (sequence is synthesized)
ccctttttgtgcatcgcccttgtgctattgccctgctcaccccgccccccgcaactgtctttgtatgacagttgcatacacgggttcaagatgcttgggcgcgtgtgtgtgtgtgtgtgt

SEQ ID NO: 369503 - DNA, 120 bp, Artificial Sequence
  ENSG00000141622_72 (sequence is synthesized)
gtgtctgtatgtgtgtgtgcatgtgtgcgagtgtgcgcgcgcgcctcggagagtcagacctgcgctgctgtgccctccttgggtccggctggagcggggcgtccggcccttgggtgttgt

SEQ ID NO: 369504 - DNA, 120 bp, Artificial Sequence
  ENSG00000141622_73 (sequence is synthesized)
gctgtgtgtgaggatgaggtgggaagctgcccccacgccaggcctttgccccgggcagcggttgacaaagcagcgggccggcgcgggctttgtttttaactgtgataaatggggtgtgtt

SEQ ID NO: 369505 - DNA, 120 bp, Artificial Sequence
  ENSG00000141622_74 (sequence is synthesized)
tgcacggtcccctttccccacatcccctctccctcacattctgctacaacaatagcttgattttcccctcttctccccacctccactccacatttctttcattttcttttaataaaaaat

SEQ ID NO: 369506 - DNA, 120 bp, Artificial Sequence
  ENSG00000141622_75 (sequence is synthesized)
tcccacctcccaagcaaatccgagatgcatttagattcattttttttcttttttgtattctgcctctggactcacatttctcgtcttggaaatgtttcttctatcctctcccactccacg

SEQ ID NO: 369507 - DNA, 120 bp, Artificial Sequence
  ENSG00000141622_76 (sequence is synthesized)
tctgcttaaatccctgctggctcaggccctcctccccctctccccactccctcatacacagaatgatgtcttcccttggccgaccagggctcctctaccaagtcggggtggggggtgggg

SEQ ID NO: 369508 - DNA, 120 bp, Artificial Sequence
  ENSG00000141622_77 (sequence is synthesized)
ccccaggggcccgattgggcaagaaaaggaaagcccagccctattttatccagcccagctgtccccagccccgcgcctctccccagaacctaaaaggcaagcttggcccccttaggcctg

SEQ ID NO: 369509 - DNA, 120 bp, Artificial Sequence
  ENSG00000141622_78 (sequence is synthesized)
tttgaaccgcagttttttgtgtgatgatagaatgatgacattctgcatttatcaaatctttttttttcttcattgtgtagctcagtgaatggtcaactcgctgctgtgtgcgctgtgacc

SEQ ID NO: 369510 - DNA, 120 bp, Artificial Sequence
  ENSG00000141622_79 (sequence is synthesized)
cttctgcctccgcatttagctgtattgtgacaccctcttaaccatttcctgtctccatctgaggaaggcattgctatttaagcggcagtatcccctatctcaggccagcctagccatggg

SEQ ID NO: 369511 - DNA, 120 bp, Artificial Sequence
  ENSG00000141622_80 (sequence is synthesized)
ggtgagggggagtgggtgtgtgaggaagaaagaggggggctggatgcgatctccttgaaatgccaccccctctctcaatacacaattatctcttattacttggcatttcctcttaaaacg

SEQ ID NO: 369512 - DNA, 120 bp, Artificial Sequence
  ENSG00000141622_81 (sequence is synthesized)
ggtgtggaacattacactaggcagaaattcaaaaatgattaagaaggatgttgagcctgaaagtataattatcctgattaaatcattaccatcctcattaataccaccaatctctaaata

SEQ ID NO: 369513 - DNA, 120 bp, Artificial Sequence
  ENSG00000141622_82 (sequence is synthesized)
ccattgcaggatgctgattccatgttttgaaattcaaattgctcagctgcctttaaattttatttttaatactaccttctccctcaccccccccaacaaaaaaaaatccaacaacacaaa

SEQ ID NO: 369514 - DNA, 120 bp, Artificial Sequence
  ENSG00000141622_83 (sequence is synthesized)
ttctgcccatcagttaaagtttactttcacggcaaacatgcccacaggaaattcaagggctgaggggtgagttggtctgtgggtaaaatttcgcagaatgtgataagagttcatgacctt

SEQ ID NO: 369515 - DNA, 120 bp, Artificial Sequence
  ENSG00000141622_84 (sequence is synthesized)
ccgatagaggatactaatgcttaactcaacaaggtcctaaaccacaatcttcttgtaaaactattagagagtttgccagcttaaatctgttctttttagtttccattgtagtagtgtagg

SEQ ID NO: 369516 - DNA, 120 bp, Artificial Sequence
  ENSG00000141622_85 (sequence is synthesized)
atgtaggccatttcagaatagatgtagagaaataaccatttttgtatcttcatcttgtttagccgagtacattgcactgtaaatccctgttaagtggattccttttgccttggcttagag

SEQ ID NO: 369517 - DNA, 120 bp, Artificial Sequence
  ENSG00000141622_86 (sequence is synthesized)
gctgcagcacttcatttttcagttatctgggtgactatcagttagcttcttggcagcacccaggcataactgaagattgcacttagttggaggcaaaaaatgttaaacatatgtattaaa

SEQ ID NO: 369518 - DNA, 120 bp, Artificial Sequence
  ENSG00000141622_87 (sequence is synthesized)
aaaatctttgatgaaatgacagttgctgctatcccatagcctctgaaaacttggtgcaccaaggtccctggcttaagtgggagccatggccatagcgtcttaattgtttaattgtacaat

SEQ ID NO: 369519 - DNA, 120 bp, Artificial Sequence
  ENSG00000141622_88 (sequence is synthesized)
gtcaagagcatctttggacatccgccctggccctcagagctgcccctttaacagccggctcccttctgctgctcgccagccagacctgcttgaaaactgaaacaaaacagcagcaataat

SEQ ID NO: 369520 - DNA, 120 bp, Artificial Sequence
  ENSG00000141622_89 (sequence is synthesized)
gggagaccgtccaaggagggcttcagcggcagaggggagaccgtccaaggagggcttcagcggcagaggggagaccatccaagggagtgagtggggactaaaattcagcctgaagttctg

SEQ ID NO: 369521 - DNA, 120 bp, Artificial Sequence
  ENSG00000141622_90 (sequence is synthesized)
acaaagggcccgcgcgcagccgccgccgccgccgccgcgcgaggagccaggatggtcctggtccacgtcggctatctcgtgcttccagtgtttggctctgtgcgaaacagagggatctca

SEQ ID NO: 369522 - DNA, 120 bp, Artificial Sequence
  ENSG00000141622_91 (sequence is synthesized)
gctgtcccccgcggttccggcgaggccgcgccgcgctgcgctccgctcccattggctgcgcgcgcctttgtgtggcggcagctgcggccccagcgcctttgaatgtcgagaggggccggg

SEQ ID NO: 369523 - DNA, 120 bp, Artificial Sequence
  ENSG00000141622_92 (sequence is synthesized)
aagtcccaaatagcctccccagactgccatttggcaatctgaaaagaaagagaaaaaagaaaagaaaagaaaaaagaatcccagcaaaatggttttccattaaacaggggtagcgtgttc

SEQ ID NO: 369524 - DNA, 120 bp, Artificial Sequence
  ENSG00000141622_93 (sequence is synthesized)
tgctgtgctgaattacttcctgttcttattttgtgggtaattttttctgtatcaaatatccttttggttgtgtatctttttcaccttttcttgtactaaaactaaagcatgatctgtatt

SEQ ID NO: 369525 - DNA, 120 bp, Artificial Sequence
  ENSG00000141622_94 (sequence is synthesized)
tttttacatcccccagttgacaatgtacagcgctcggttagagatgttaccctgctgaaacgtactgtggtcgtgtagcccgggccatctgctcattgtacgctgcttttgttctgttgc

SEQ ID NO: 369526 - DNA, 120 bp, Artificial Sequence
  ENSG00000141622_95 (sequence is synthesized)
ccttccgaagcatggtgggcccagcctttttttttgtatcgtgtgcatgacgacattgttacacacagaatccactaatactaatatacaatctctcaataaagaactagttttcctata

SEQ ID NO: 369527 - DNA, 120 bp, Artificial Sequence
  ENSG00000141627_0 (sequence is synthesized)
gctttgcggtagcccaggaggtactaggagggcggaggcacgaataacacccaaaggactacagtttccagaagcccgcgcgcgccgcgtgccacgtgaccacctggctggcgcgcgcgc

SEQ ID NO: 369528 - DNA, 120 bp, Artificial Sequence
  ENSG00000141627_1 (sequence is synthesized)
ctgggggtctggtccctagccgcgttctcggtcgcttccctcttctctcgccgcctcctggcctccgcaccgacgcggcccgggctggagccgagccggggccgagctgcaggccggacc

SEQ ID NO: 369529 - DNA, 120 bp, Artificial Sequence
  ENSG00000141627_2 (sequence is synthesized)
ggagccggatctgtacccgctgagacgtggaaacatggaggcctgagccggtgtgcgccacctgggctgcggcggcgacagcgacttctcctgacccctctgccaccctcccatccgtcc

SEQ ID NO: 369530 - DNA, 120 bp, Artificial Sequence
  ENSG00000141627_3 (sequence is synthesized)
gcgggtccgtggagctggagcagatcccccagccggctgagacaggttgtcttttggaaatgcaggtttaaggacaaattatctgcttaagctagaagatgggatcgaatagcagcagaa

SEQ ID NO: 369531 - DNA, 120 bp, Artificial Sequence
  ENSG00000141627_4 (sequence is synthesized)
tcggcgatcttcctaaaaatgagtacttgaaaaagttatcaggcacggaatctatctctgagaatgacccgttctggaatcagcttctctcattttctttccctgcaccaactagcagta

SEQ ID NO: 369532 - DNA, 120 bp, Artificial Sequence
  ENSG00000141627_5 (sequence is synthesized)
gtgagttgaaactcttggaggaagcaaccatttcagtctgcaggtcattagttgaaaacaatcctcgaacaggaaatcttggtgcactaattaaggtcttcctttctagaaccaaagaac

SEQ ID NO: 369533 - DNA, 120 bp, Artificial Sequence
  ENSG00000141627_6 (sequence is synthesized)
taaaactttcagcagaatgtcagaaccacatcttcatttggcagacacacaatgctttgtttattatttgctgtttgctgaaagtgttcatctgtcagatgtcagaggaggaattacaac

SEQ ID NO: 369534 - DNA, 120 bp, Artificial Sequence
  ENSG00000141627_7 (sequence is synthesized)
ttcattttacttatgaagaaaaatctcctggcaattacagttctgactcagaagatcttttggaagaattgctgtgctgtttgatgcagttgatcactgatattccactcttagatatta

SEQ ID NO: 369535 - DNA, 120 bp, Artificial Sequence
  ENSG00000141627_8 (sequence is synthesized)
catatgaaatatcagtagaagctatatcaacaatggttgttttcctttcctgccaactcttccacaaagaagttttgcgacagagcatcagccacaagtatttgatgcgaggtccatgtc

SEQ ID NO: 369536 - DNA, 120 bp, Artificial Sequence
  ENSG00000141627_9 (sequence is synthesized)
ttccatacaccagcaaacttgtgaagaccttattatataactttatcagacaagaaaagccacctcctccaggggcccatgttttccctcagcagtcggatgggggaggactgctttatg

SEQ ID NO: 369537 - DNA, 120 bp, Artificial Sequence
  ENSG00000141627_10 (sequence is synthesized)
gacttgcatcaggagtagcaacaggactctggactgtcttcacactaggtggtgtgggcagcaaagcggctgcctctccagagctttcttcccctctggccaaccagagtctcctgcttc

SEQ ID NO: 369538 - DNA, 120 bp, Artificial Sequence
  ENSG00000141627_11 (sequence is synthesized)
tgctggtgttggccaatctgacagatgcctcagatgcgccaaacccctacagacaagccattatgtccttcaagaacacacaagatagcagtcctttcccctcatcaattccacatgcct

SEQ ID NO: 369539 - DNA, 120 bp, Artificial Sequence
  ENSG00000141627_12 (sequence is synthesized)
tccagatcaactttaatagtttgtacacagctctttgtgaacagcagacatctgatcaagcaactctcctcttgtataccttgctccatcaaaatagtaatattagaacatacatgttgg

SEQ ID NO: 369540 - DNA, 120 bp, Artificial Sequence
  ENSG00000141627_13 (sequence is synthesized)
ctcgcacagatatggaaaatcttgttttaccaattcttgagattctgtatcatgttgaagaaaggaattcacaccatgtgtatatggcccttataatattgttgatccttacggaagatg

SEQ ID NO: 369541 - DNA, 120 bp, Artificial Sequence
  ENSG00000141627_14 (sequence is synthesized)
atggcttcaacagatccattcatgaagtgatactaaaaaatattacttggtattcagaacgagttttaactgaaatctccttggggagtctcctgatcctggtggtaataagaaccattc

SEQ ID NO: 369542 - DNA, 120 bp, Artificial Sequence
  ENSG00000141627_15 (sequence is synthesized)
aatacaacatgactaggacacgagacaagtaccttcacacaaattgtttggcagctttagcaaatatgtcggcacagtttcgttctctccatcagtatgctgcccagaggatcatcagtt

SEQ ID NO: 369543 - DNA, 120 bp, Artificial Sequence
  ENSG00000141627_16 (sequence is synthesized)
tattttctttgctgtctaaaaaacacaacaaagttctggaacaagccacacagtccttgagaggttcgctgagttctaatgatgttcctctaccagattatgcacaagacctaaatgtca

SEQ ID NO: 369544 - DNA, 120 bp, Artificial Sequence
  ENSG00000141627_17 (sequence is synthesized)
ttgaagaagtgattcgaatgatgttagagatcatcaactcctgcctgacaaattcccttcaccacaacccaaacttggtatacgccctgctttacaaacgcgatctctttgaacaatttc

SEQ ID NO: 369545 - DNA, 120 bp, Artificial Sequence
  ENSG00000141627_18 (sequence is synthesized)
gaactcatccttcatttcaggatataatgcaaaatattgatctggtgatctccttctttagctcaaggttgctgcaagctggagctgagctgtcagtggaacgggtcctggaaatcatta

SEQ ID NO: 369546 - DNA, 120 bp, Artificial Sequence
  ENSG00000141627_19 (sequence is synthesized)
agcaaggcgtcgttgcgctgcccaaagacagactgaagaaatttccagaattgaaattcaaatatgtggaagaggagcagcccgaggagttttttatcccctatgtctggtctcttgtct

SEQ ID NO: 369547 - DNA, 120 bp, Artificial Sequence
  ENSG00000141627_20 (sequence is synthesized)
acaactcagcagtcggcctgtactggaatccacaggacatccagctgttcaccatggattccgactgagggcaggatgctctcccacccggacccctccagccaagcagcccttcaagtt

SEQ ID NO: 369548 - DNA, 120 bp, Artificial Sequence
  ENSG00000141627_21 (sequence is synthesized)
ctgggtaacagaagtagacagacaggttacttggtgtatcttctgttaaagaggattgcacgagtgtgttttcctcacacactttgatttggagaattggtgctagttggcaatagataa

SEQ ID NO: 369549 - DNA, 120 bp, Artificial Sequence
  ENSG00000141627_22 (sequence is synthesized)
ctcagcgtagatagtattgcaaaaaggggaggaaatacacaacaataataaatgtaaaaacctgctattcaacatgcagttttatttcgaagccaaaaatctagagctttcccaagatcc

SEQ ID NO: 369550 - DNA, 120 bp, Artificial Sequence
  ENSG00000141627_23 (sequence is synthesized)
tgttgccttaggcacatcacacttcaacagtgcacactatccaacagtgcacactattcaacagtgcacactattcaaaagcgtagactatttttttgcatgttcaagatatttgttttg

SEQ ID NO: 369551 - DNA, 120 bp, Artificial Sequence
  ENSG00000141627_24 (sequence is synthesized)
gtcttatgtgtgtgtgagagagagagattcctttgacattaaggagcatcaatgagaaaagatgatgaggcaggaattaataaagaaatgaagtcgtgtgtgtttggttgcctgtcagag

SEQ ID NO: 369552 - DNA, 120 bp, Artificial Sequence
  ENSG00000141627_25 (sequence is synthesized)
ggcacacaatttcataaacaccatgcctggacaatttgatattaatatttaacacctctgcatcttttcttaaaaaagaatatgggccagatacagtggctcacatttgtaatcccagca

SEQ ID NO: 369553 - DNA, 120 bp, Artificial Sequence
  ENSG00000141627_26 (sequence is synthesized)
tatgggccagatacagtggctcacatttgtaatcccagcactttggggagccaagttagcagaatcccttgagcacaggaatctgaaaccagcttgggcaacatagtgagatcccatctc

SEQ ID NO: 369554 - DNA, 87 bp, Artificial Sequence
  ENSG00000141627_27 (sequence is synthesized)
tacaaaaaacttaaaaattagccaggcatgatggcacattcctgtagtcctagctactcaggaggctaaggtaggaggattgcagaa

SEQ ID NO: 369555 - DNA, 120 bp, Artificial Sequence
  ENSG00000141627_28 (sequence is synthesized)
aaaaagaaagaaaagaaaaagaaaatggctacttctcatgaagcccagattaacttttctgtgaatatggcctgtgaactgttgctggaattaaattggagtctagcacaaattaagtta

SEQ ID NO: 369556 - DNA, 120 bp, Artificial Sequence
  ENSG00000141627_29 (sequence is synthesized)
agcacaaattaagttaatctactctgtattaatcattgggaaaaagaaaagcttcatttgaaaacagtctttttccttcacccacactaatagaaaaaggagagtaatttgttcatactg

SEQ ID NO: 369557 - DNA, 120 bp, Artificial Sequence
  ENSG00000141627_30 (sequence is synthesized)
tattccacgtgggatgaaaagcatgttttgctctttgtttctgggccggtgtgatccgtgtgttggtgcctgagctggaggaaggagcttcttgcagggaaacagccactggggccacat

SEQ ID NO: 369558 - DNA, 120 bp, Artificial Sequence
  ENSG00000141627_31 (sequence is synthesized)
tgagggccagttgggaccttcctttccagtcacactctgtgtcctcacgggccccttcacagtctagataaggagcctagtttcattctcaaagaaaaagtatttggtcttcaacataga

SEQ ID NO: 369559 - DNA, 120 bp, Artificial Sequence
  ENSG00000141627_32 (sequence is synthesized)
aagcacaaaagcccagacgagactgagcacactgttcgaatccactgccagctcatctgtgtcagggctggcttctcctgtcctgtgtcccagggctgcaggcccgtgttatttgagtcc

SEQ ID NO: 369560 - DNA, 120 bp, Artificial Sequence
  ENSG00000141627_33 (sequence is synthesized)
atcaaatcttccgagggcctcggaggaaccattctcagtcaccccaagctctgtaaaaggtcaaaacactggcagcctctcagtgcaccactgtgtgggctccacacgggaaggcctggc

SEQ ID NO: 369561 - DNA, 120 bp, Artificial Sequence
  ENSG00000141627_34 (sequence is synthesized)
caagctgtgctcttagaggctgtcgaggtagggcaggaagcttccctatcctcgtctggatggaatgaaacagaggttccctaaggccaagggactcgtggagcgcccatcccgggtggg

SEQ ID NO: 369562 - DNA, 120 bp, Artificial Sequence
  ENSG00000141627_35 (sequence is synthesized)
gtcccagaggtgagtgcagcttgcctcctgtccccaaggggcttgttctgtcaggcctcctccagtcactgctggagtggggactctgactcctgtgttcacctcagagcccatgtacag

SEQ ID NO: 369563 - DNA, 120 bp, Artificial Sequence
  ENSG00000141627_36 (sequence is synthesized)
gctagaggtgaggcttggcaacaacttctactaatacttagctttgtggcagagccagtctgaaggaggagaagcgctctcagccagcagggggagtgatgattatcatttcaggtagca

SEQ ID NO: 369564 - DNA, 120 bp, Artificial Sequence
  ENSG00000141627_37 (sequence is synthesized)
aggatatgtatttactatgtggggaaataatttgcaactttaatttgtttccaaagcattttgattggcttccttttcctttaaaccaaaaaattgtttaaatgtttaagggtcatgtgg

SEQ ID NO: 369565 - DNA, 120 bp, Artificial Sequence
  ENSG00000141627_38 (sequence is synthesized)
aacagctgagcttctggcaggaccacagaactgtcctctgagtctgagggctgggcagtgccacaggacagtccctgggctgcaggactgtcagtgcttgttgtgtgaggaaatgaggcc

SEQ ID NO: 369566 - DNA, 120 bp, Artificial Sequence
  ENSG00000141627_39 (sequence is synthesized)
cttcaaaaacccagtcatcttgacagagggcacactcccaaggaaggcctgactggggaatcatacagcctctcctccaggcctctgggctcactgaggtgcccccagaaccctgattgc

SEQ ID NO: 369567 - DNA, 120 bp, Artificial Sequence
  ENSG00000141627_40 (sequence is synthesized)
cctcccctctttcccttttctcattcatcacacagtagaagcactcactagctaacagctcagctggggcagcagcctccatggaggcctgcaagtgatgctcccagtcctggttcccgc

SEQ ID NO: 369568 - DNA, 120 bp, Artificial Sequence
  ENSG00000141627_41 (sequence is synthesized)
tcaggagggaggccccaccacgtgcatcactgcctcagctctgcaaagtcaccagaggcttcttcctgatttttgtgaaagatttattatatggcaataaatctgaatgataaactttca

SEQ ID NO: 369569 - DNA, 120 bp, Artificial Sequence
  ENSG00000141627_42 (sequence is synthesized)
aggtgcttcggctgccacggcagcaggttctctgctctcttttctctgctggaactgggccctagagactggggcaggcggtaggtagctcaggaggttctgactcagaagatcttttgg

SEQ ID NO: 369570 - DNA, 120 bp, Artificial Sequence
  ENSG00000141627_43 (sequence is synthesized)
ttttgctatttctcaattctccagaatcccacacaatattgcttgactttgggatggttattcagctgcaattaacagaggccttaataaggttaagccgccagaacgagcggtgtagca

SEQ ID NO: 369571 - DNA, 86 bp, Artificial Sequence
  ENSG00000141627_44 (sequence is synthesized)
gcaccaactagcagtagtgagttgaaactcttggaggaagcaaccatttcagtctgcaggtcattaggctgtctaggccggaagag

SEQ ID NO: 369572 - DNA, 120 bp, Artificial Sequence
  ENSG00000141627_45 (sequence is synthesized)
ggttgctgcaagctggagctgagctgtcagtggaacgggtcctggaaatcattaagcaaggcgtcgttgcgctgcccaaagacagactgaagccgctggccgatcgtcaggtggacagag

SEQ ID NO: 369573 - DNA, 120 bp, Artificial Sequence
  ENSG00000141627_46 (sequence is synthesized)
ctcttggaggaagcaaccatttcagtctgcaggtcattagatgctgctagaaggtacccttcagtcaatagcaatatgacacatgcttggctatatctgcagtagtgttgaaaacaatcc

SEQ ID NO: 369574 - DNA, 120 bp, Artificial Sequence
  ENSG00000141627_47 (sequence is synthesized)
agtttcatgtaagtactaaagagctgcagcattaaatcgtatggtaatctttgagagtagaaccaccagattatatgttcacattttcaagcatttttcaaagctgcagatcataatcag

SEQ ID NO: 369575 - DNA, 85 bp, Artificial Sequence
  ENSG00000141627_48 (sequence is synthesized)
acattttcaagcatttttcaaagctgcagatcataatcagaggaatcttgagtgccatcatttacagtgatcacacaagctgatg

SEQ ID NO: 369576 - DNA, 120 bp, Artificial Sequence
  ENSG00000141627_49 (sequence is synthesized)
gtataatttaagaggaaataggaatatatgcaaaccacgaatgctctcacacctgaacatcatcagaagtgctataaacgtttcacatttcacattggtaattcatcctgtgctgcatta

SEQ ID NO: 369577 - DNA, 120 bp, Artificial Sequence
  ENSG00000141627_50 (sequence is synthesized)
atacctgccgccacttgcggagatatgtttatgtgttggacaaactgtatttcccccactctcactgttctacgcttcagcattgcttctcgaccctcagtgacaatggagaggaactct

SEQ ID NO: 369578 - DNA, 120 bp, Artificial Sequence
  ENSG00000141627_51 (sequence is synthesized)
tgtctttaacttgctctcacattctcagatcctatgcttccagtttattttctttgctgtctaaaaaacacaacaaagttctggaacaagccacacagtccttgagaggttcgctgagtt

SEQ ID NO: 369579 - DNA, 120 bp, Artificial Sequence
  ENSG00000141627_52 (sequence is synthesized)
tttttccagatggctcaggtgcttcggctgccacggcagcaggttctctgctctcttttctctgctggaactgggccctagagactggggcaggcggttctgactcagaagatcttttgg

SEQ ID NO: 369580 - DNA, 120 bp, Artificial Sequence
  ENSG00000141627_53 (sequence is synthesized)
attacttggaggactacgaatgaactacaaatacttgatgagaagccatcactttgggcttctccgaatgagagaattcttataactgggcatgtcctttacaaggacgtagaagctgag

SEQ ID NO: 369581 - DNA, 120 bp, Artificial Sequence
  ENSG00000141627_54 (sequence is synthesized)
actgtcacaaggatattggtttctatttgagacatggtttctaaggacacacagaaccatgcaaagaatttaaactacatccatttgaaacacattctcctttggaagaagtgaaaagca

SEQ ID NO: 369582 - DNA, 120 bp, Artificial Sequence
  ENSG00000141627_55 (sequence is synthesized)
cgctgcccaaagacagactgaaggtaagaaggctaaagaaatgtccacttgacactgccgtgtcccttgatgtaaatgttagtgtcttagcagaccctatccagaatcatgctgcttatc

SEQ ID NO: 369583 - DNA, 120 bp, Artificial Sequence
  ENSG00000141627_56 (sequence is synthesized)
cagtacatagactagaagggctcctcagaactgtgacaaaggtttctgacagcttttcaaaagaagcattaatactttcatgccactgcatatcctacaagtagccatggcatgcactat

SEQ ID NO: 369584 - DNA, 120 bp, Artificial Sequence
  ENSG00000141627_57 (sequence is synthesized)
gctgaaagtgttcatctgtcagatgtcagaggaggaattacaacttcattttacttatgaagaaaaatctcctggcaattacaacacatccaggaacagtactttgcatctttcaatccg

SEQ ID NO: 369585 - DNA, 120 bp, Artificial Sequence
  ENSG00000141627_58 (sequence is synthesized)
actgatggcctctttcatgctacaaatagttgaagaatgaattagtttgtatttacaaggaggaatatagaataaagcaatcaattgcagatgaaatcctgggataagtttctgagactt

SEQ ID NO: 369586 - DNA, 120 bp, Artificial Sequence
  ENSG00000141627_59 (sequence is synthesized)
gctacaagtgccatttatttggtgctaatgatttaatctatttttgagactgagttgtaaattgtagaatttaaaaatatttaaaagtgagaatattaaaattgaaattatggaattcta

SEQ ID NO: 369587 - DNA, 80 bp, Artificial Sequence
  ENSG00000141639_0 (sequence is synthesized)
ggagcccgagctggagcagcgagccgggctgtcggggcgaccgcgggagctcgccgtgcgccgtggctgggaccggcctg

SEQ ID NO: 369588 - DNA, 120 bp, Artificial Sequence
  ENSG00000141639_1 (sequence is synthesized)
tcgcgcccgggccgccacgctctcgggctctgcctcgggaaggagacttggtctgaaagatgccacattcctgcagcctctcttggtgcagtggaatacagtcttgggcgaggtggcgtg

SEQ ID NO: 369589 - DNA, 120 bp, Artificial Sequence
  ENSG00000141639_2 (sequence is synthesized)
gatgagctggtgaaagaggatgctgcccacatccaaaggctccagaggatcctggcctggcagctgagctcccctgcatttggaacctcaggcgtaacttggtgtagagctcatgaaagg

SEQ ID NO: 369590 - DNA, 120 bp, Artificial Sequence
  ENSG00000141639_3 (sequence is synthesized)
tgcttgtgtttctccagcttttttcaccagtgcttaccagactggctcaggttttggaatctaaggtgagctggtagaaacaggagaggtagaaagaagcccctggatgcctccagaatt

SEQ ID NO: 369591 - DNA, 120 bp, Artificial Sequence
  ENSG00000141639_4 (sequence is synthesized)
cattgatgggatccctgcatactgcttggaacacagaaagaggctgtgacacagctgagctttggagcatcttaaggagctcagctcagcaaacaactcttgcatttcagccagaaagag

SEQ ID NO: 369592 - DNA, 120 bp, Artificial Sequence
  ENSG00000141639_5 (sequence is synthesized)
cctcttgtaacaaagtattcaaaggggagagtttctgcatcttttactttgcagtccactatggtagaaaacttgacattccatagataatgatactgggttttctttccaagatgccag

SEQ ID NO: 369593 - DNA, 120 bp, Artificial Sequence
  ENSG00000141639_6 (sequence is synthesized)
ctttaaaagaaatatgagccattctaagctttaagaagggttcaggaaacacaggaattagtagacagccctcccaatgcaggttaagacgacagcctgcgcccccaactagcacagctc

SEQ ID NO: 369594 - DNA, 120 bp, Artificial Sequence
  ENSG00000141639_7 (sequence is synthesized)
agcgagcatgaccatatgccattctcgtctccagagagctggtggcagtgacctcactaggagaaaacacatccctcagccgtgggacttgacagaatgaggtgcgcgagggaggccgct

SEQ ID NO: 369595 - DNA, 120 bp, Artificial Sequence
  ENSG00000141639_8 (sequence is synthesized)
agccgagacttggcctttcctgactgcccctgtgttacctgggcagctccagatcactgagcccacaatggctgagaagggtgactgcatcgccagtgtctatgggtatgacctcggtgg

SEQ ID NO: 369596 - DNA, 120 bp, Artificial Sequence
  ENSG00000141639_9 (sequence is synthesized)
gcgctttgttgacttccaacccctgggcttcggtgtcaatggtttggtgctgtcggccgtggacagccgggcctgccggaaggtcgctgtgaagaagattgccctgagcgatgcccgcag

SEQ ID NO: 369597 - DNA, 120 bp, Artificial Sequence
  ENSG00000141639_10 (sequence is synthesized)
catgaagcacgcgctccgagagatcaagatcattcggcgcctggaccacgacaacatcgtcaaagtgtacgaggtgctcggtcccaagggcactgacctgcagggtgagctgttcaagtt

SEQ ID NO: 369598 - DNA, 120 bp, Artificial Sequence
  ENSG00000141639_11 (sequence is synthesized)
cagcgtggcgtacatcgtccaggagtacatggagaccgacctggcacgcctgctggagcagggcacgctggcagaagagcatgccaagctgttcatgtaccagctgctccgcgggctcaa

SEQ ID NO: 369599 - DNA, 120 bp, Artificial Sequence
  ENSG00000141639_12 (sequence is synthesized)
gtacatccactccgccaacgtgctgcacagggacctgaagcccgccaacatcttcatcagcacagaggacctcgtgctcaagattggggatttcgggttggcaaggatcgttgatcagca

SEQ ID NO: 369600 - DNA, 120 bp, Artificial Sequence
  ENSG00000141639_13 (sequence is synthesized)
ttactcccacaagggttatctgtcagaagggttggtaacaaagtggtaccgttccccacgactgctcctttcccccaataactacaccaaagccatcgacatgtgggccgccggctgcat

SEQ ID NO: 369601 - DNA, 120 bp, Artificial Sequence
  ENSG00000141639_14 (sequence is synthesized)
cctggctgagatgcttacggggagaatgctctttgctggggcccatgagctggagcagatgcaactcatcctggagaccatccctgtaatccgggaggaagacaaggacgagctgctcag

SEQ ID NO: 369602 - DNA, 120 bp, Artificial Sequence
  ENSG00000141639_15 (sequence is synthesized)
ggtgatgccttcctttgtcagcagcacctgggaggtgaagaggcctctgcgcaagctgctccctgaagtgaacagtgaagccatcgactttctggagaagatcctgacctttaaccccat

SEQ ID NO: 369603 - DNA, 120 bp, Artificial Sequence
  ENSG00000141639_16 (sequence is synthesized)
ggatcgcctaacagctgagatggggctgcaacacccctacatgagcccatactcgtgccctgaggacgagcccacctcacaacaccccttccgcattgaggatgagatcgacgacatcgt

SEQ ID NO: 369604 - DNA, 120 bp, Artificial Sequence
  ENSG00000141639_17 (sequence is synthesized)
gctgatggccgctaaccagagccagctgtccaactgggacacgtgcagttccaggtaccctgtgagcctgtcgtcggacctggagtggcggcctgaccggtgccaggacgccagcgaggt

SEQ ID NO: 369605 - DNA, 120 bp, Artificial Sequence
  ENSG00000141639_18 (sequence is synthesized)
acagcgcgacccgcgcgcgggttcggcgccactggctgaggacgtgcaggtggacccgcgcaaggactcgcacagcagctccgagcgcttcctagagcagtcgcactcgtccatggagcg

SEQ ID NO: 369606 - DNA, 120 bp, Artificial Sequence
  ENSG00000141639_19 (sequence is synthesized)
acaagccgcaccactactcggagcccaagctcatcctggacctgtcgcactggaagcaggcggccggcgcgccccccacggccacggggctggcggacacgggggcgcgcgaggacgagc

SEQ ID NO: 369607 - DNA, 120 bp, Artificial Sequence
  ENSG00000141639_20 (sequence is synthesized)
cggccagcctcttcctggagatcgcgcagtgggtcaagagcacgcagggcggcccagagcacgccagcccgcccgccgacgaccccgagcgccgcttgtctgcctcgccccccggccgcc

SEQ ID NO: 369608 - DNA, 120 bp, Artificial Sequence
  ENSG00000141639_21 (sequence is synthesized)
cggccccggtggacggcggcgccagcccccagttcgacctggacgtgttcatctcccgcgccctgaagctctgcaccaagcccgaggacctgccggacaataaactgggcgacctcaatg

SEQ ID NO: 369609 - DNA, 120 bp, Artificial Sequence
  ENSG00000141639_22 (sequence is synthesized)
gtgcgtgcatccccgagcaccctggcgacctcgtgcagaccgaggccttctccaaagaaaggtggtgagggcggaggggccgctccaggccccacagagcaggagacccccagagaaagc

SEQ ID NO: 369610 - DNA, 120 bp, Artificial Sequence
  ENSG00000141639_23 (sequence is synthesized)
cggggctggcaggaggcggccgcccttcccgcccctctctgctgccttggggttggcagaacacgtgaaggatccgaggagcgagaggaatgtccatttcttaaactgccttaataacta

SEQ ID NO: 369611 - DNA, 120 bp, Artificial Sequence
  ENSG00000141639_24 (sequence is synthesized)
gcctttaacctgtgggagcgggtttgaacaggaccctggcttaggggttgatcactttcctagcaaaggggagaccacatgtggtgcacagggaagaaacggctttagacagcagtctgc

SEQ ID NO: 369612 - DNA, 120 bp, Artificial Sequence
  ENSG00000141639_25 (sequence is synthesized)
gggccccacctgggtggcaggatgccgagaaatcttgcagaggtagctccgaaaccatctggcccaactagcctcaactgacagctgaggaaaggcaattaggcccagagaggcagagac

SEQ ID NO: 369613 - DNA, 120 bp, Artificial Sequence
  ENSG00000141639_26 (sequence is synthesized)
actcgcttaagatcacaggcttagtgtgaggacgagcttgaaatcccagtctcctggcccccaggccagggtctgtccaccatagaatgtcttcctctactggggtcgttctggcttttt

SEQ ID NO: 369614 - DNA, 120 bp, Artificial Sequence
  ENSG00000141639_27 (sequence is synthesized)
gttagaaacttggtctgagatgtttcttccctgtccattaccattcgatgttcttttattcagagcaatgtttcttgtattctgaaactggaaactgaaccagtttgtttctcctagtca

SEQ ID NO: 369615 - DNA, 120 bp, Artificial Sequence
  ENSG00000141639_28 (sequence is synthesized)
ccaagcatactttcctggctccccaagtacttaaatgttctcatctgtcgcacccctgtatttgcctcacccctgcatggtcggaaatcttcgtttcaggtcagaacagcctggggtctg

SEQ ID NO: 369616 - DNA, 120 bp, Artificial Sequence
  ENSG00000141639_29 (sequence is synthesized)
tgggtaaaatcagcccttctcccaggcctgtgcacacaccccctcagcactccctatgcactttcctgacacgcaaagacacagccctctttccccactgggcgtcctaccccagtgagg

SEQ ID NO: 369617 - DNA, 120 bp, Artificial Sequence
  ENSG00000141639_30 (sequence is synthesized)
ttgaaggcaccaattccaagaatccctccaacctccctgccagcactcccccttcaccccacacccggcccccccacctaaccacagcgcctctccagacctacctcgggacctaatgtt

SEQ ID NO: 369618 - DNA, 120 bp, Artificial Sequence
  ENSG00000141639_31 (sequence is synthesized)
ctctacatgaactgctcatttggaggacagcagtgaggtcctgccatagagcaaatgtgttaggagagaaggtttcacatgggacccaacatccttcatcaatactttcctgagtttgat

SEQ ID NO: 369619 - DNA, 120 bp, Artificial Sequence
  ENSG00000141639_32 (sequence is synthesized)
catccatttagccttgacaaacagcagaccctacagagatgtgttggagagcacgtcgtgaccttgggggcaaggaatccagaaaggtaggaagatatgaaaagagaggtgtcaacagca

SEQ ID NO: 369620 - DNA, 120 bp, Artificial Sequence
  ENSG00000141639_33 (sequence is synthesized)
agggctcttaggggtcaggcaccagcatggagacctcatgacaaaggaagggactcaaagcagcaatgcccctcatagtgtaggctaaggtgagtttggtgcatgcaaacctgtgtgctc

SEQ ID NO: 369621 - DNA, 120 bp, Artificial Sequence
  ENSG00000141639_34 (sequence is synthesized)
acccacagagcatggggtaatggtgtgtagacacaggccctctgcagaagcgtggggtggggacactgacagcccctatctggtccccaggaacattctaccatttctgccactggtgtt

SEQ ID NO: 369622 - DNA, 120 bp, Artificial Sequence
  ENSG00000141639_35 (sequence is synthesized)
cagctccttctcttcccccaacactcccaaagatacccacaggaagtccagccagtttccaggtagaggattccaccagttggtcttgggctgcgttcaccctcacatcacagcacctta

SEQ ID NO: 369623 - DNA, 120 bp, Artificial Sequence
  ENSG00000141639_36 (sequence is synthesized)
aatctaatcagcaaactataatttgtacgttgaaacctgcaacacattagaaacttatatttaaaaacagaattaatcacactgaccaacttttaaatggaaaatatgtaaataggaagt

SEQ ID NO: 369624 - DNA, 120 bp, Artificial Sequence
  ENSG00000141639_37 (sequence is synthesized)
gtttgggttttgttttttctttaagaaaaagaaatgtacaccactcctcatgtgccattttgtcctcagagggcggctttacttttttggtaaaggaacaagctgctggccttgaccagg

SEQ ID NO: 369625 - DNA, 120 bp, Artificial Sequence
  ENSG00000141639_38 (sequence is synthesized)
agttcatatataactgttattacagaggaattgttataactactaatgtttttaaaaaatttattaaacattattaaacttgatcaggtcaggccaaataaagttttattggaacacaga

SEQ ID NO: 369626 - DNA, 120 bp, Artificial Sequence
  ENSG00000141639_39 (sequence is synthesized)
gagttcagattcggatcgcagtcccgattatcctcccctccagcctctccctttctcgttgaagggttaatacagcgtcctctcccctcgccacccgacagaggcgcctacactggcggg

SEQ ID NO: 369627 - DNA, 120 bp, Artificial Sequence
  ENSG00000141639_40 (sequence is synthesized)
gaagggagaagtcagggaagttccttttgttcttctgagcgttctctgcaagtcaaactggggagagttccagtcctgtggggtgggagcagctgtgaagaggctggaatcggagggaac

SEQ ID NO: 369628 - DNA, 120 bp, Artificial Sequence
  ENSG00000141639_41 (sequence is synthesized)
tttggggcctggaggcctaatggaggactctgtgatgttggactatgttgtgtcgttaccctccctgcctctgcatcctcttctgtggagcagggacaatgacagcagccatcctgggag

SEQ ID NO: 369629 - DNA, 120 bp, Artificial Sequence
  ENSG00000141639_42 (sequence is synthesized)
agcatcatgatgaccaaatggaaggaaacagagggtgaggagcaccccaagcacatggtcagcacctggcaggtggctgttattattacccactcctcaaaagtgcttttggactcacat

SEQ ID NO: 369630 - DNA, 120 bp, Artificial Sequence
  ENSG00000141639_43 (sequence is synthesized)
tttctttctttctttttgagggtggaggtgtagagaggtgaaataaagctctgagtctgacctccaggttggtcccaggcaagattagcagcctgaggggtccggcttccacacggtagc

SEQ ID NO: 369631 - DNA, 120 bp, Artificial Sequence
  ENSG00000141639_44 (sequence is synthesized)
atgaatagcatgttcaatagaaaaccggacccataccccacacggcagagggctaggcttgagcacagacactacctttgtcctgagatttctacatggcaatgaaacttcgagctaatt

SEQ ID NO: 369632 - DNA, 120 bp, Artificial Sequence
  ENSG00000141639_45 (sequence is synthesized)
ttctcctgactggtggtcagttcctgaatttcatgggcatatcaatcattcctttagctcaacgtttttactccattcattcacccgattgtaagtgagcgcctatcttgtacagaggtg

SEQ ID NO: 369633 - DNA, 120 bp, Artificial Sequence
  ENSG00000141639_46 (sequence is synthesized)
cactgcagacagagggaaaacaactggctcttgccttcaggagccctcgctgcctcccctgctatagagttaatgaagttagatgaaggggtccaggaggctgtgtgaacacaaagcctt

SEQ ID NO: 369634 - DNA, 120 bp, Artificial Sequence
  ENSG00000141639_47 (sequence is synthesized)
gccagctaagtcagagaggagggtcctgcagtaatatccccaaatgtaaaatgaaaaataaataccttcaacagggttctcaggaggtgagctgagctactgctggcaaaatcccttgta

SEQ ID NO: 369635 - DNA, 120 bp, Artificial Sequence
  ENSG00000141639_48 (sequence is synthesized)
cagagtggatgtcaacaaatattccctcccctccctaatgtgctctcagttatgtacctggatgttaataagggagctgagagaaaagtttgctaggagggcggagaaagtttccaccct

SEQ ID NO: 369636 - DNA, 120 bp, Artificial Sequence
  ENSG00000141639_49 (sequence is synthesized)
cctcgggggaagaggtcggggacagaaaggggaggcctggggctcagagaccaacgtctcatgtcttctaccacatggccacgtggctcgccccttgactcactctggtctctgctcgaa

SEQ ID NO: 369637 - DNA, 120 bp, Artificial Sequence
  ENSG00000141639_50 (sequence is synthesized)
tgtccccttacatgagaggcctttctggaccacccaccccatcactctctatctccttaccctgctttatttccattccttgcacttatctccactagacatatcatccatttgtttgtt

SEQ ID NO: 369638 - DNA, 120 bp, Artificial Sequence
  ENSG00000141639_51 (sequence is synthesized)
cagctgtctttccatccaaagtgtgcacctcatgattacagggactttgttttgctcactgctgggatcagatctcagctctgccaattattagttaatttgatcttgctcaagttagcc

SEQ ID NO: 369639 - DNA, 120 bp, Artificial Sequence
  ENSG00000141639_52 (sequence is synthesized)
ccatctctctacctgtttcacagggtcattttgataattaaatgcactattaataaagcagtacttggcacggtgcctggcacatcataatttctcaataaacgatagctattattatga

SEQ ID NO: 369640 - DNA, 120 bp, Artificial Sequence
  ENSG00000141639_53 (sequence is synthesized)
cgtgcgccgtggctgggaccggcctggccgagcgcgccggcgccgcggccgcagacaaagggcggctcgcgcccgggccgccacgctctcgggctctgcctcgggttatctgtcagaagg

SEQ ID NO: 369641 - DNA, 120 bp, Artificial Sequence
  ENSG00000141639_54 (sequence is synthesized)
aagaggcagctgaaggattggagtgtgctttcttctgaatttatcccattaggaagcagactatctcaaaagagaaaaaaaatgtcattaagacttcactgagcactgtgtaaggcttaa

SEQ ID NO: 369642 - DNA, 120 bp, Artificial Sequence
  ENSG00000141639_55 (sequence is synthesized)
aggaaccacctcaagagtatgcggaggtcctgaggagcacgatgacagcttgactcacggtgagagtgtgttgctccaggaagggccacctctcctcctaccatagagtcctcgctgggg

SEQ ID NO: 369643 - DNA, 120 bp, Artificial Sequence
  ENSG00000141639_56 (sequence is synthesized)
ctgctggggggaccacccactacccttgcttgtagcacttattttaccctgggctcactaaacctgctcatctccactacaacattcaagaaccgtcaaactcctgatccagtaaccttc

SEQ ID NO: 369644 - DNA, 120 bp, Artificial Sequence
  ENSG00000141639_57 (sequence is synthesized)
tatgactagcgtgcatcatggcatttacagtaaagctagccctctacagctcacacctctgactgccaaaggcacatatagaggccccattgccgggtctatcgttcttgcagcagtact

SEQ ID NO: 369645 - DNA, 120 bp, Artificial Sequence
  ENSG00000141639_58 (sequence is synthesized)
tctaaaattaggtgggtatggtataatacaagttactttaattctaatcccctggcagaatttatagcatatccattcctcattctatctctctaagggataatcataacaagttctatt

SEQ ID NO: 369646 - DNA, 120 bp, Artificial Sequence
  ENSG00000141639_59 (sequence is synthesized)
acttgctacttgcacagacttgtctctggtcctcaagtttggccaacagtggagcactctgtgggagaggaagtcagagagttggaggcaggtccaggaacataatttgcagggcacaag

SEQ ID NO: 369647 - DNA, 120 bp, Artificial Sequence
  ENSG00000141639_60 (sequence is synthesized)
tgcaagatgaaaattcatgctccttgttcacaaatgatgaagaaattcaagacagcgacagcagagcatcagctaaatgcatggtccttttgagcttcgtggggcactgtgaccccatgg

SEQ ID NO: 369648 - DNA, 120 bp, Artificial Sequence
  ENSG00000141639_61 (sequence is synthesized)
ccaaatgccactcagctggaagatcagcgatggaaatcagttaacatttaagaaatcacctggaggcccaggctctgttccaagccattagggattcggcagtgagcaagcaagggctgc

SEQ ID NO: 369649 - DNA, 120 bp, Artificial Sequence
  ENSG00000141639_62 (sequence is synthesized)
tgtgagtagggaaggagacttggtctgaaagatgccacattcctgcagcctctcttggtgcagtggaatacagtcttgggcgaggtggcgtggatgagctggtgaaagaggatgctgccc

SEQ ID NO: 369650 - DNA, 120 bp, Artificial Sequence
  ENSG00000141642_0 (sequence is synthesized)
gtagccccgcggacagctgggccagggtgcgggcctgcgcctccctcggctcctggcgcgggcctcggggagaggggtggaagatgtctatggatgtgacattcctggggacgggtgcag

SEQ ID NO: 369651 - DNA, 120 bp, Artificial Sequence
  ENSG00000141642_1 (sequence is synthesized)
catacccatctccaacccggggtgcctctgctgtggtccttcggtgtgaaggcgagtgctggctctttgactgtggggagggaacacagacacagcttatgaaaagccaacttaaagcag

SEQ ID NO: 369652 - DNA, 120 bp, Artificial Sequence
  ENSG00000141642_2 (sequence is synthesized)
ggagaattaccaagatcttcatcacacaccttcatggagaccatttctttggccttcctgggctcctctgcacaatcagcctgcagagtggctccatggtgtccaaacagcctattgaaa

SEQ ID NO: 369653 - DNA, 120 bp, Artificial Sequence
  ENSG00000141642_3 (sequence is synthesized)
tctatggccctgtagggcttcgggactttatctggcgaaccatggaactctctcacacggagctggtcttccattatgtggttcatgaactggttcctacagcagatcaatgtcctgcag

SEQ ID NO: 369654 - DNA, 120 bp, Artificial Sequence
  ENSG00000141642_4 (sequence is synthesized)
aagaactaaaagaatttgcgcatgtgaatagagcagacagtcctcccaaagaggaacaaggaagaactatcctgttagactcagaagaaaactcataccttctgtttgatgatgaacaat

SEQ ID NO: 369655 - DNA, 120 bp, Artificial Sequence
  ENSG00000141642_5 (sequence is synthesized)
ttgttgtaaaagcatttcgcctctttcacagaattccctcatttgggttttcagtcgtggaaaagaaacgcccaggtaaactcaatgcacagaaacttaaagaccttggtgttccaccag

SEQ ID NO: 369656 - DNA, 120 bp, Artificial Sequence
  ENSG00000141642_6 (sequence is synthesized)
gtcctgcctatgggaagctgaaaaatggaatttctgttgttctggaaaatggggttacaatttctccccaagatgtcttaaaaaagcctattgttggaagaaaaatctgcatattgggtg

SEQ ID NO: 369657 - DNA, 120 bp, Artificial Sequence
  ENSG00000141642_7 (sequence is synthesized)
actgctctggggttgtgggtgatggaggagtaaaactgtgctttgaagcagacctgttgatccacgaagcaaccctggatgatgcccagatggacaaagcaaaggagcatggccacagca

SEQ ID NO: 369658 - DNA, 120 bp, Artificial Sequence
  ENSG00000141642_8 (sequence is synthesized)
caccacagatggcagcaacatttgcaaagttgtgccgtgcaaagaggctggttctgactcacttcagtcagaggtacaaaccagttgccttggccagagaaggagaaacagatggcattg

SEQ ID NO: 369659 - DNA, 120 bp, Artificial Sequence
  ENSG00000141642_9 (sequence is synthesized)
tagcagaagattttatggtgataagcattccaatcaagaaatgaaaccagtgttcctgagtgcacactgacatgtctgtgaatatgttactgaacctatagtccagtttttttatttctt

SEQ ID NO: 369660 - DNA, 120 bp, Artificial Sequence
  ENSG00000141642_10 (sequence is synthesized)
gttttagtctgaaattatttgggccctaataatcctaaaaagaatggagctgcattgatgaattggctcagtatttaaagggagcaaactttttgataataaatctttttaagagaaaaa

SEQ ID NO: 369661 - DNA, 120 bp, Artificial Sequence
  ENSG00000141642_11 (sequence is synthesized)
aaacccagcatcctttttgaagtccagatttgtcaaaatgatagactattcagttatacatcttattttgtgctactaccacagatagccaatattccatgcagtcctgggcttagcttc

SEQ ID NO: 369662 - DNA, 120 bp, Artificial Sequence
  ENSG00000141642_12 (sequence is synthesized)
tgcccagctttattgctgctattggcaaagagcacaggactcagccctcgtggctaaaaatggtattttggcagtttgtattgaatctgtttgtgttattaacagaagagggagaaatgt

SEQ ID NO: 369663 - DNA, 120 bp, Artificial Sequence
  ENSG00000141642_13 (sequence is synthesized)
catgagacgttggacaggcaggattgatgatagcatgaccatagctttgctggaatactgaatgcagggtttggctaggtgtttattttaacattttattaaactttctatttgggtctt

SEQ ID NO: 369664 - DNA, 120 bp, Artificial Sequence
  ENSG00000141642_14 (sequence is synthesized)
aacccatggttctcagctggggtgacactgctcctctagaagcaggtttgaaattatgggtatgttttcttgtcacagtgactgagtacggtggtggtagtggtggtactactactactg

SEQ ID NO: 369665 - DNA, 120 bp, Artificial Sequence
  ENSG00000141642_15 (sequence is synthesized)
gtatttagtcagcagggataagggatgttagctgtcctgcaaagttttggtcagtcatatacaataaagaatcatctcaccccgaaatgcaaattgcaggcccattgagatacacagcaa

SEQ ID NO: 369666 - DNA, 120 bp, Artificial Sequence
  ENSG00000141642_16 (sequence is synthesized)
gttagtttatactcttgatgtgaatatagtttaccaaaattagtgacataatgagtggaattactaggtaagtcaaatcctaaagagtgaatgtgttagaattgcagtgtcataccaaat

SEQ ID NO: 369667 - DNA, 120 bp, Artificial Sequence
  ENSG00000141642_17 (sequence is synthesized)
aacattcaaaagaaatgagccattaagtgaagcttatgaacctggaggtaaaaaatgcttatctgttaaactgaggtttcattgacgtgtccctattaataaacgttatttgccccacaa

SEQ ID NO: 369668 - DNA, 120 bp, Artificial Sequence
  ENSG00000141642_18 (sequence is synthesized)
cccgcggacagctgggccagggtgcgggcctgcgcctccctcggctcctggcgcgggcctcggggagaggctctaagatggaggacagcgatatctgccctaggcacaccacagggtgat

SEQ ID NO: 369669 - DNA, 120 bp, Artificial Sequence
  ENSG00000141642_19 (sequence is synthesized)
tgcagggttgacactgcctgcctgaaaacgaaggagcgccggttctcaacccggcaaccagtagaatcgcttgggaagcctccaaatgctgatgccccatcatcaccggggaattgtgat

SEQ ID NO: 369670 - DNA, 120 bp, Artificial Sequence
  ENSG00000141642_20 (sequence is synthesized)
ctgcggccaggaccgagatccacgggcccagagtgaaatgacagtactgtgatcacgactggaatatgcacttcgccgaacgtggatcacagtcttgagaaagcaagcagctgggttttt

SEQ ID NO: 369671 - DNA, 120 bp, Artificial Sequence
  ENSG00000141642_21 (sequence is synthesized)
gttttgttttttttccaagaagacagggacctaatctggtttgctcgcatttaattcctagtgcctagaatggtgcatgtcccaaaacatgcaccattgattaaataatttctgattact

SEQ ID NO: 369672 - DNA, 120 bp, Artificial Sequence
  ENSG00000141642_22 (sequence is synthesized)
tcccgacctatttggagggttttcattatatttgttttaaaattattatggaaaccttcaagtcatatatgaaaattgaatagtaactgaactcccaattcatgatcaattctgtttcat

SEQ ID NO: 369673 - DNA, 120 bp, Artificial Sequence
  ENSG00000141642_23 (sequence is synthesized)
ctgttaccctctcccccactgtagtattttgaagcaaatctgaaatgtaccattccatctgttaccttgttcatgtttataaaacacaataacacctttttaaaacataaagccattatc

SEQ ID NO: 369674 - DNA, 120 bp, Artificial Sequence
  ENSG00000141642_24 (sequence is synthesized)
ctttcctcttacccagtttgtccaaatcagtatccaaacaatctacacacgttatatttggttgatgtctcttagatctctcttaatctttttctcttgctctttattttgttccctgta

SEQ ID NO: 369675 - DNA, 120 bp, Artificial Sequence
  ENSG00000141642_25 (sequence is synthesized)
ttttacttgaacaagtcatttgtacggttcacgttttctacaaccaggattttgctttttccatctctggtatcctttaataagcaggtatttagacctgcagacttgttcaggtcaggt

SEQ ID NO: 369676 - DNA, 120 bp, Artificial Sequence
  ENSG00000141642_26 (sequence is synthesized)
tcgattttttggcaagagaacttaatgggggattactgtgtttttcacattgtatcataccaggagttagatagcatcttgcctctctttgtggaccttttatgtacaagtagcaccgta

SEQ ID NO: 369677 - DNA, 120 bp, Artificial Sequence
  ENSG00000141642_27 (sequence is synthesized)
gggtaacaattgaccagggaatgccagcaaatacatgcaaaagaaatgagagaatatcaccttttggcaacccctaatgaaataatggatcctggcaatgatcactagcggctgttaacg

SEQ ID NO: 369678 - DNA, 120 bp, Artificial Sequence
  ENSG00000141642_28 (sequence is synthesized)
tcagaaagagagacagctagacaatgcgtgctgcctaatggggtactcccatcagacagcacaccgtttgtcttatcaagtattcttggagtaatgggggtggtgtgtatagatgaaaca

SEQ ID NO: 369679 - DNA, 120 bp, Artificial Sequence
  ENSG00000141642_29 (sequence is synthesized)
tgattgcctatgagttaacagttgttgaagttcaatgatgggtgtatggcattgcattatgctaatctctacttctgtatgtgtctgaagtttttcagaataaaactttttttaaaaaga

SEQ ID NO: 369680 - DNA, 120 bp, Artificial Sequence
  ENSG00000141642_30 (sequence is synthesized)
agtgtttttttgttttttgttttttcccgccttctcatcaatagggctcctgttgactgaagctataagaaatgtcatagtaaggccaggagttgtggctcacgcctgtaatcctagcac

SEQ ID NO: 369681 - DNA, 120 bp, Artificial Sequence
  ENSG00000141644_0 (sequence is synthesized)
aaagcgcatgcgccagctagatgggcagcgaggagagccgcaactgccagtccctcgaaggggttagctgtcgttgaacgtcagcacgcagatgcaactggctctcggcaggggggcgcg

SEQ ID NO: 369682 - DNA, 120 bp, Artificial Sequence
  ENSG00000141644_1 (sequence is synthesized)
cgcaccgctgcggagcgccggcccgtaggcgcgggagcctccctattaagggcacgcgacatcgaggcaatagtgcgcaggtgcttagccagaggcggagcccgagaggcaggcagcgga

SEQ ID NO: 369683 - DNA, 120 bp, Artificial Sequence
  ENSG00000141644_2 (sequence is synthesized)
cttccggttccgggagcaacgaacagccgcggaggcgacagctaccgcttcagaggaggcggccgcggaggaggaggaaggggaggagggcgaggcgggaggtgcaggagggaccctcgc

SEQ ID NO: 369684 - DNA, 120 bp, Artificial Sequence
  ENSG00000141644_3 (sequence is synthesized)
catgggtccacgggcctagagtggcggaagataccggcctggtgccaaactggctactgctgcttcctgtggcctccatggctgaggactggctggactgcccggccctgggccctggct

SEQ ID NO: 369685 - DNA, 120 bp, Artificial Sequence
  ENSG00000141644_4 (sequence is synthesized)
ggaagcgccgcgaagtctttcgcaagtcaggggccacctgtggacgctcagacacctattaccagagccccacaggagacaggatccgaagcaaagttgagctgactcgatacctgggcc

SEQ ID NO: 369686 - DNA, 120 bp, Artificial Sequence
  ENSG00000141644_5 (sequence is synthesized)
ctgcgtgtgatctcaccctcttcgacttcaaacaaggcatcttgtgctatccagcccccaaggcccatcccgtggcggttgccagcaagaagcgaaagaagccttcaaggccagccaaga

SEQ ID NO: 369687 - DNA, 120 bp, Artificial Sequence
  ENSG00000141644_6 (sequence is synthesized)
ctcggaaacgtcaggttggaccccagagtggtgaggtcaggaaggaggccccgagggatgagaccaaggctgacactgacacagccccagcttcattccctgctcctgggtgctgtgaga

SEQ ID NO: 369688 - DNA, 120 bp, Artificial Sequence
  ENSG00000141644_7 (sequence is synthesized)
actgtggaatcagcttctcaggggatggcacccaaaggcagcggctcaaaacgttgtgcaaagactgtcgagcacagagaattgccttcaaccgggaacagagaatgtttaagcgtgtgg

SEQ ID NO: 369689 - DNA, 120 bp, Artificial Sequence
  ENSG00000141644_8 (sequence is synthesized)
gctgtggggagtgtgcagcctgccaggtaacagaagactgtggggcctgctccacctgcctcctgcagctgccccatgatgtggcatcggggctgttctgcaagtgtgaacggagacgct

SEQ ID NO: 369690 - DNA, 120 bp, Artificial Sequence
  ENSG00000141644_9 (sequence is synthesized)
gcctccggattgtggaaaggagccgagggtgtggagtatgccggggctgtcagacccaagaggattgtggccattgccccatctgccttcgccctccccgccctggtctcaggcgccagt

SEQ ID NO: 369691 - DNA, 120 bp, Artificial Sequence
  ENSG00000141644_10 (sequence is synthesized)
ggaaatgtgtccagcgacgttgcctacggggtaaacatgcccgccgcaagggaggctgtgactccaagatggctgccaggcggcgccccggagcccagccactgcctccaccacccccat

SEQ ID NO: 369692 - DNA, 120 bp, Artificial Sequence
  ENSG00000141644_11 (sequence is synthesized)
cacagtccccagagcccacagagccgcaccccagagccctggccccctcgccacctgccgagttcatctattactgtgtagacgaggacgagctacagccctacacgaaccgccggcaga

SEQ ID NO: 369693 - DNA, 120 bp, Artificial Sequence
  ENSG00000141644_12 (sequence is synthesized)
accgcaagtgcggggcctgtgcagcctgcctacggcggatggactgtggccgctgcgacttctgctgcgacaagcccaaattcgggggcagcaaccagaagcgccagaagtgtcgttggc

SEQ ID NO: 369694 - DNA, 120 bp, Artificial Sequence
  ENSG00000141644_13 (sequence is synthesized)
catgaagcggctgctgcccagtgtctggtcagagtctgaggatggggcaggatcgcccccaccttaccgtcgtcgaaagaggcccagctctgcccgacggcaccatcttggccctacctt

SEQ ID NO: 369695 - DNA, 120 bp, Artificial Sequence
  ENSG00000141644_14 (sequence is synthesized)
gaagcccaccttggctacacgcacagcccaaccagaccatacccaggctccaacgaagcaggaagcaggtggtggctttgtgctgcccccgcctggcactgaccttgtgtttttacggga

SEQ ID NO: 369696 - DNA, 120 bp, Artificial Sequence
  ENSG00000141644_15 (sequence is synthesized)
aggcgcaagcagtcctgtgcaggtgccgggccctgttgcagcttccacagaagccctgttgcaggaggcccagtgctctggcctgagttgggttgtggccttaccccaggtgaagcaaga

SEQ ID NO: 369697 - DNA, 120 bp, Artificial Sequence
  ENSG00000141644_16 (sequence is synthesized)
gaaggcggatacccaggacgagtggacaccaggcacagctgtcctgacttctcccgtattggtgcctggctgccctagcaaggcagtagacccaggcctgccttctgtgaagcaagagcc

SEQ ID NO: 369698 - DNA, 120 bp, Artificial Sequence
  ENSG00000141644_17 (sequence is synthesized)
acctgacccagaggaggacaaggaggagaacaaggatgattctgcctccaaattggccccagaggaagaggcaggaggggctggcacacccgtgatcacggagattttcagcctgggtgg

SEQ ID NO: 369699 - DNA, 120 bp, Artificial Sequence
  ENSG00000141644_18 (sequence is synthesized)
aacccgcttccgagatacagcagtctggttgccaaggtccaaagaccttaaaaaacctggagctagaaagcagtagactggaggcttctacagactgtaggattcaagtctgcagggcag

SEQ ID NO: 369700 - DNA, 120 bp, Artificial Sequence
  ENSG00000141644_19 (sequence is synthesized)
gcactcgggaagggaagatggatgtaaagtgtgggagaccgaggacacagtggagcccacgagcacgagctggaacccacgaggatggcctggaacccatgtcagtctctcaccacctcc

SEQ ID NO: 369701 - DNA, 120 bp, Artificial Sequence
  ENSG00000141644_20 (sequence is synthesized)
agcttcgatgatgtgggtgtcctgcagaagaagctggtgcccttcctcacagagttaaatatgcatctggcccaggaattagagaagctgaaaggatgatcctggggaaggtggagcagc

SEQ ID NO: 369702 - DNA, 120 bp, Artificial Sequence
  ENSG00000141644_21 (sequence is synthesized)
tgcaggcctggctgcaggcctgactactgcccacaccaacgaggtgatctagcagatacatggcaacgtgtgaactgcaacaacgcctggtgccccagcaccaaccttccaagtgtaaaa

SEQ ID NO: 369703 - DNA, 120 bp, Artificial Sequence
  ENSG00000141644_22 (sequence is synthesized)
acaatgtgctgctgcttcacttccgccctccggttatcaagcaaaatgtctcttgtggcccatcttactggaagagagttccgggaaacatagcctcaccaaggtgacacattacaaagc

SEQ ID NO: 369704 - DNA, 120 bp, Artificial Sequence
  ENSG00000141644_23 (sequence is synthesized)
caccctaccatgaatccgctcccaagggtctcactgctcacctgaggataactcaatataactatgtggctgaaaatgcaaagctgaagaccatggatttcatggtgattccagcaagta

SEQ ID NO: 369705 - DNA, 120 bp, Artificial Sequence
  ENSG00000141644_24 (sequence is synthesized)
cagagattctatgaagcccacccagaaaaaacttgctggtcctggctatttttgtgtcatttattcaagtattgagaacctggcctgtggtaggcactgtacttaatactaggatacaga

SEQ ID NO: 369706 - DNA, 120 bp, Artificial Sequence
  ENSG00000141644_25 (sequence is synthesized)
aatgcaaaagatacggcccatgcaattttattaaatgcatcaatatgtattacaaatggtgaatggatttccaactttatcatggaatttaatgctgaatatatagaattcagaaaattg

SEQ ID NO: 369707 - DNA, 120 bp, Artificial Sequence
  ENSG00000141644_26 (sequence is synthesized)
ttgggaggacagcccttttgtgaaccttgtttggggcacagtaggaattggaaataatttagtttctatctctaagctgttctattttaaaattatttttaaatttttattgtcccactt

SEQ ID NO: 369708 - DNA, 120 bp, Artificial Sequence
  ENSG00000141644_27 (sequence is synthesized)
atgcaactgtggttaccacctgtgctgcaggtccgtcctggttccctgatttgtgtttcctgttctgcctggatcctgattctcagaaaccagttactggacttctgatccacatcctga

SEQ ID NO: 369709 - DNA, 120 bp, Artificial Sequence
  ENSG00000141644_28 (sequence is synthesized)
aggtgatatttgcagactggctttatgagagacaacactgatctactaggggctggaccctagattggttgccagggcttgtgtgtgaatcaaccctaggaggaaaaacctactaccaaa

SEQ ID NO: 369710 - DNA, 120 bp, Artificial Sequence
  ENSG00000141644_29 (sequence is synthesized)
gtataagaagttggattttaagggtgggggagctgggttggagaaaggtaatataattaaagccaccacaaaacaacctaaacaagccatgttcatgagtaattgtaagtggcttctgga

SEQ ID NO: 369711 - DNA, 120 bp, Artificial Sequence
  ENSG00000141644_30 (sequence is synthesized)
tgagacctggcagtgtctctacatacttcctcagggagatagcaattgaaaatgtaattgaataaataaggaaaggaactgctatttggtgtgttcctctgtggacccagtttatttaat

SEQ ID NO: 369712 - DNA, 120 bp, Artificial Sequence
  ENSG00000141644_31 (sequence is synthesized)
ccttaaaataatatttttgggaagacattgattttgtccatttatgtggatgggaaaactgagactcattaatttgtccaatgtcgaacagctggtgttagtagagcctagactcaaacc

SEQ ID NO: 369713 - DNA, 120 bp, Artificial Sequence
  ENSG00000141644_32 (sequence is synthesized)
cagcttttaaagcccttgttctttactccactaaactgtaacctgtaatcctgtatgcactaacaggagttttcggtgaccttgaaaacacagattactataattactataataaatccc

SEQ ID NO: 369714 - DNA, 120 bp, Artificial Sequence
  ENSG00000141644_33 (sequence is synthesized)
ttacattcctgtctctagcatggtttagggagtgccaaggctcaatgtagatggggtcaccttgtcagagcatctgttcatacagaaactgggtttcctgcagaccccaggtgctgcata

SEQ ID NO: 369715 - DNA, 120 bp, Artificial Sequence
  ENSG00000141644_34 (sequence is synthesized)
ggattcctcaaaccctacaggatatatctccccactggctgctgtccattttgcttgttaccctgactccccctcttcagccagagcagtctttgtaactaaagctgccagcctggctca

SEQ ID NO: 369716 - DNA, 120 bp, Artificial Sequence
  ENSG00000141644_35 (sequence is synthesized)
tctttcctgacaacgtgcatctcctgccctgtgatcacctttgtgcttggctcctgccctcagcctgaatgtgttctaggaggctgaattcctgcttcgagtcctgcccaagagccagtc

SEQ ID NO: 369717 - DNA, 120 bp, Artificial Sequence
  ENSG00000141644_36 (sequence is synthesized)
ttggctcagccctacctcactctctcccaattcttcattcataaagtgccaaaaagattagacctgtaatttgttagccagctttacagggccaggactgagtgagtgcctccttaaact

SEQ ID NO: 369718 - DNA, 120 bp, Artificial Sequence
  ENSG00000141644_37 (sequence is synthesized)
ttgtatcctgtgtgcctcccttgccttaccctagtcccagccctgcagctttaagtaattcagacatggattagccatttcccagttctgtctcatacagtccagcctctgccaccttcc

SEQ ID NO: 369719 - DNA, 120 bp, Artificial Sequence
  ENSG00000141644_38 (sequence is synthesized)
ccaccccttcctttattccatcctaactagttcagccctagtcaagactggatagactgatactgctttgtttcccccaggaaccaaccacccaaccccagtattctggtaattttgaca

SEQ ID NO: 369720 - DNA, 120 bp, Artificial Sequence
  ENSG00000141644_39 (sequence is synthesized)
atgatctatatgaaatttatttgattgacatttagactcatgagttaagcttctgctgaccatttatgttagggtacaatcagaggagcagaaccactaagataaagattatgtatatat

SEQ ID NO: 369721 - DNA, 120 bp, Artificial Sequence
  ENSG00000141644_40 (sequence is synthesized)
attgtggctcagaacgctgacggggaggaatgaagggccctcaggccgataagggggaggaatggcggcgtcggaatactgacgaggagaaatggggggatttaggctgaggacgggaag

SEQ ID NO: 369722 - DNA, 120 bp, Artificial Sequence
  ENSG00000141644_41 (sequence is synthesized)
ggcagagtcaggagtggggtagagcctgattctggtaaaatcaaatggtgtggttaaatttatggatgaagtttaaattatgcacatacagttaatccttattagcggattttatgtttg

SEQ ID NO: 369723 - DNA, 120 bp, Artificial Sequence
  ENSG00000141644_42 (sequence is synthesized)
tactaatggcctcagtgatggtgactaaccagaccttctcagatacggtgatgaggctaatgggggactaaaattcatggtgatgccagctgatgtagggtcagtagacatgggaggacc

SEQ ID NO: 369724 - DNA, 120 bp, Artificial Sequence
  ENSG00000141644_43 (sequence is synthesized)
ttatgctccaccaggtcgtgccactgccccactagtccatttgatctgcccccatcctaggatatcctgagtctaagccctggtttctgccaatggcaaataggaagattttattaacag

SEQ ID NO: 369725 - DNA, 120 bp, Artificial Sequence
  ENSG00000141644_44 (sequence is synthesized)
gttttaaaaaattattattattactggttatttggtttgacaaggcacttaggctccctgagctttgccttagctggaaaataaggatagtattacttgctattctatcaaccctgtaag

SEQ ID NO: 369726 - DNA, 120 bp, Artificial Sequence
  ENSG00000141644_45 (sequence is synthesized)
atatttgcggccacgcgcggtagcgcaccctgtaattccaacactttgggaggccggcgggaggggcagtggggaggatcgcttgaacccaggagcaggagttccagcctgagcaacata

SEQ ID NO: 369727 - DNA, 120 bp, Artificial Sequence
  ENSG00000141644_46 (sequence is synthesized)
gcgggaccccctgtctcttcaaaatttgtttttaaattagcagggcgtggtggcgcaggctttgtagtcccagatactctggaggctgaggcccaggaggacgaggctgcagggagccat

SEQ ID NO: 369728 - DNA, 90 bp, Artificial Sequence
  ENSG00000141644_47 (sequence is synthesized)
gatcacgagaccttgtctcagaaaaaatctgtgaggttaaaaggctgtgtgtgtgaaaatatcttggaaattgtaaagaactacacaaat

SEQ ID NO: 369729 - DNA, 120 bp, Artificial Sequence
  ENSG00000141644_48 (sequence is synthesized)
aatgtgatggaagtaggatttgtcagcacagtgaggggttggctgatagagactttcctcaggtgaactctgcccttctaatggttgcctgtttcctacttctcccaggcagtagaccca

SEQ ID NO: 369730 - DNA, 120 bp, Artificial Sequence
  ENSG00000141644_49 (sequence is synthesized)
tccgagatacagcagtctggttgccaaggtgtgccccacacagtgaggggtggggaaggagtgggtgttggccagatgtgggccctgagttttgaaagtatagccggcagtttggcatgg

SEQ ID NO: 369731 - DNA, 120 bp, Artificial Sequence
  ENSG00000141644_50 (sequence is synthesized)
tgtggtgggaggtaaaggcccatacccactatgctggtcacaattaatgaggggcgtgtgtgtaggaccctagagatttctcctgagatccagcccaatagcattccaggttaggactct

SEQ ID NO: 369732 - DNA, 120 bp, Artificial Sequence
  ENSG00000141644_51 (sequence is synthesized)
tgtggaaagggtgagttgggcaagtggaaagagcccaaggctcacctcggcccctggcccccatgggcttggccccatgcttcatgcctctgctcccacctgccccccgccaacagagcc

SEQ ID NO: 369733 - DNA, 120 bp, Artificial Sequence
  ENSG00000141646_0 (sequence is synthesized)
atgctcagtggcttctcgacaagttggcagcaacaacacggccctggtcgtcgtcgccgctgcggtaacggagcggtttgggtggcggagcctgcgttcgcgccttcccgctctcctcgg

SEQ ID NO: 369734 - DNA, 120 bp, Artificial Sequence
  ENSG00000141646_1 (sequence is synthesized)
cgccttcccgctctcctcgggaggcccttcctgctctcccctaggctccgcggccgcccagggggtgggagcgggtgaggggagccaggcgcccagcgagagaggccccccgccgcaggg

SEQ ID NO: 369735 - DNA, 80 bp, Artificial Sequence
  ENSG00000141646_2 (sequence is synthesized)
cggcctggccgggacgcctcggggcgggggccgaggagctctccgggccgccggggaaagctacgggcccggtgcgtccg

SEQ ID NO: 369736 - DNA, 120 bp, Artificial Sequence
  ENSG00000141646_3 (sequence is synthesized)
cggaccagcagcgcgggagagcggactcccctcgccaccgcccgagcccaggttatcctgaatacatgtctaacaattttccttgcaacgttagctgttgtttttcactgtttccaaagg

SEQ ID NO: 369737 - DNA, 120 bp, Artificial Sequence
  ENSG00000141646_4 (sequence is synthesized)
atcaaaattgcttcagaaattggagacatatttgatttaaaaggaaaaacttgaacaaatggacaatatgtctattacgaatacaccaacaagtaatgatgcctgtctgagcattgtgca

SEQ ID NO: 369738 - DNA, 120 bp, Artificial Sequence
  ENSG00000141646_5 (sequence is synthesized)
tagtttgatgtgccatagacaaggtggagagagtgaaacatttgcaaaaagagcaattgaaagtttggtaaagaagctgaaggagaaaaaagatgaattggattctttaataacagctat

SEQ ID NO: 369739 - DNA, 120 bp, Artificial Sequence
  ENSG00000141646_6 (sequence is synthesized)
aactacaaatggagctcatcctagtaaatgtgttaccatacagagaacattggatgggaggcttcaggtggctggtcggaaaggatttcctcatgtgatctatgcccgtctctggaggtg

SEQ ID NO: 369740 - DNA, 120 bp, Artificial Sequence
  ENSG00000141646_7 (sequence is synthesized)
gcctgatcttcacaaaaatgaactaaaacatgttaaatattgtcagtatgcgtttgacttaaaatgtgatagtgtctgtgtgaatccatatcactacgaacgagttgtatcacctggaat

SEQ ID NO: 369741 - DNA, 120 bp, Artificial Sequence
  ENSG00000141646_8 (sequence is synthesized)
tgatctctcaggattaacactgcagagtaatgctccatcaagtatgatggtgaaggatgaatatgtgcatgactttgagggacagccatcgttgtccactgaaggacattcaattcaaac

SEQ ID NO: 369742 - DNA, 120 bp, Artificial Sequence
  ENSG00000141646_9 (sequence is synthesized)
catccagcatccaccaagtaatcgtgcatcgacagagacatacagcaccccagctctgttagccccatctgagtctaatgctaccagcactgccaactttcccaacattcctgtggcttc

SEQ ID NO: 369743 - DNA, 120 bp, Artificial Sequence
  ENSG00000141646_10 (sequence is synthesized)
cacaagtcagcctgccagtatactggggggcagccatagtgaaggactgttgcagatagcatcagggcctcagccaggacagcagcagaatggatttactggtcagccagctacttacca

SEQ ID NO: 369744 - DNA, 120 bp, Artificial Sequence
  ENSG00000141646_11 (sequence is synthesized)
tcataacagcactaccacctggactggaagtaggactgcaccatacacacctaatttgcctcaccaccaaaacggccatcttcagcaccacccgcctatgccgccccatcccggacatta

SEQ ID NO: 369745 - DNA, 120 bp, Artificial Sequence
  ENSG00000141646_12 (sequence is synthesized)
ctggcctgttcacaatgagcttgcattccagcctcccatttccaatcatcctgctcctgagtattggtgttccattgcttactttgaaatggatgttcaggtaggagagacatttaaggt

SEQ ID NO: 369746 - DNA, 120 bp, Artificial Sequence
  ENSG00000141646_13 (sequence is synthesized)
tccttcaagctgccctattgttactgttgatggatacgtggacccttctggaggagatcgcttttgtttgggtcaactctccaatgtccacaggacagaagccattgagagagcaaggtt

SEQ ID NO: 369747 - DNA, 120 bp, Artificial Sequence
  ENSG00000141646_14 (sequence is synthesized)
gcacataggcaaaggtgtgcagttggaatgtaaaggtgaaggtgatgtttgggtcaggtgccttagtgaccacgcggtctttgtacagagttactacttagacagagaagctgggcgtgc

SEQ ID NO: 369748 - DNA, 120 bp, Artificial Sequence
  ENSG00000141646_15 (sequence is synthesized)
acctggagatgctgttcataagatctacccaagtgcatatataaaggtctttgatttgcgtcagtgtcatcgacagatgcagcagcaggcggctactgcacaagctgcagcagctgccca

SEQ ID NO: 369749 - DNA, 120 bp, Artificial Sequence
  ENSG00000141646_16 (sequence is synthesized)
ggcagcagccgtggcaggaaacatccctggcccaggatcagtaggtggaatagctccagctatcagtctgtcagctgctgctggaattggtgttgatgaccttcgtcgcttatgcatact

SEQ ID NO: 369750 - DNA, 120 bp, Artificial Sequence
  ENSG00000141646_17 (sequence is synthesized)
caggatgagttttgtgaaaggctggggaccggattacccaagacagagcatcaaagaaacaccttgctggattgaaattcacttacaccgggccctccagctcctagacgaagtacttca

SEQ ID NO: 369751 - DNA, 120 bp, Artificial Sequence
  ENSG00000141646_18 (sequence is synthesized)
taccatgccgattgcagacccacaacctttagactgaggtcttttaccgttggggcccttaaccttatcaggatggtggactacaaaatacaatcctgtttataatctgaagatatattt

SEQ ID NO: 369752 - DNA, 120 bp, Artificial Sequence
  ENSG00000141646_19 (sequence is synthesized)
cacttttgttctgctttatcttttcataaagggttgaaaatgtgtttgctgccttgctcctagcagacagaaactggattaaaacaattttttttttcctcttcagaacttgtcaggcat

SEQ ID NO: 369753 - DNA, 120 bp, Artificial Sequence
  ENSG00000141646_20 (sequence is synthesized)
ggctcagagcttgaagattaggagaaacacattcttattaattcttcacctgttatgtatgaaggaatcattccagtgctagaaaatttagccctttaaaacgtcttagagccttttatc

SEQ ID NO: 369754 - DNA, 120 bp, Artificial Sequence
  ENSG00000141646_21 (sequence is synthesized)
tgcagaacatcgatatgtatatcattctacagaataatccagtattgctgattttaaaggcagagaagttctcaaagttaattcacctatgttattttgtgtacaagttgttattgttga

SEQ ID NO: 369755 - DNA, 120 bp, Artificial Sequence
  ENSG00000141646_22 (sequence is synthesized)
acatacttcaaaaataatgtgccatgtgggtgagttaattttaccaagagtaactttactctgtgtttaaaaagtaagttaataatgtattgtaatctttcatccaaaatattttttgca

SEQ ID NO: 369756 - DNA, 120 bp, Artificial Sequence
  ENSG00000141646_23 (sequence is synthesized)
agttatattagtgaagatggtttcaattcagattgtcttgcaacttcagttttatttttgccaaggcaaaaaactcttaatctgtgtgtatattgagaatcccttaaaattaccagacaa

SEQ ID NO: 369757 - DNA, 120 bp, Artificial Sequence
  ENSG00000141646_24 (sequence is synthesized)
aaaaatttaaaattacgtttgttattcctagtggatgactgttgatgaagtatacttttcccctgttaaacagtagttgtattcttctgtatttctaggcacaaggttggttgctaagaa

SEQ ID NO: 369758 - DNA, 120 bp, Artificial Sequence
  ENSG00000141646_25 (sequence is synthesized)
gcctataagaggaatttcttttccttcattcatagggaaaggttttgtattttttaaaacactaaaagcagcgtcactctacctaatgtctcactgttctgcaaaggtggcaatgcttaa

SEQ ID NO: 369759 - DNA, 120 bp, Artificial Sequence
  ENSG00000141646_26 (sequence is synthesized)
actaaataatgaataaactgaatattttggaaactgctaaattctatgttaaatactgtgcagaataatggaaacattacagttcataataggtagtttggatatttttgtacttgattt

SEQ ID NO: 369760 - DNA, 120 bp, Artificial Sequence
  ENSG00000141646_27 (sequence is synthesized)
gatgtgactttttttggtataatgtttaaatcatgtatgttatgatattgtttaaaattcagtttttgtatcttggggcaagactgcaaacttttttatatcttttggttattctaagcc

SEQ ID NO: 369761 - DNA, 120 bp, Artificial Sequence
  ENSG00000141646_28 (sequence is synthesized)
ctttgccatcaatgatcatatcaattggcagtgactttgtatagagaatttaagtagaaaagttgcagatgtattgactgtaccacagacacaatatgtatgctttttacctagctggta

SEQ ID NO: 369762 - DNA, 120 bp, Artificial Sequence
  ENSG00000141646_29 (sequence is synthesized)
gcataaataaaactgaatctcaacatacaaagttgaattctaggtttgatttttaagattttttttttcttttgcacttttgagtccaatctcagtgatgaggtaccttctactaaatga

SEQ ID NO: 369763 - DNA, 120 bp, Artificial Sequence
  ENSG00000141646_30 (sequence is synthesized)
caggcaacagccagttctattgggcagctttgtttttttccctcacactctaccgggacttccccatggacattgtgtatcatgtgtagagttggttttttttttttttaatttttattt

SEQ ID NO: 369764 - DNA, 120 bp, Artificial Sequence
  ENSG00000141646_31 (sequence is synthesized)
tactatagcagaaatagacctgattatctacaagatgataaatagattgtctacaggataaatagtatgaaataaaatcaaggattatctttcagatgtgtttacttttgcctggagaac

SEQ ID NO: 369765 - DNA, 120 bp, Artificial Sequence
  ENSG00000141646_32 (sequence is synthesized)
ttttagctatagaaacacttgtgtgatgatagtcctccttatatcacctggaatgaacacagcttctactgccttgctcagaaggtcttttaaatagaccatcctagaaaccactgagtt

SEQ ID NO: 369766 - DNA, 120 bp, Artificial Sequence
  ENSG00000141646_33 (sequence is synthesized)
tgcttatttctgtgatttaaacatagatcttgatccaagctacatgacttttgtctttaaataacttatctaccacctcatttgtactcttgattacttacaaattctttcagtaaacac

SEQ ID NO: 369767 - DNA, 120 bp, Artificial Sequence
  ENSG00000141646_34 (sequence is synthesized)
ctaattttcttctgtaaaagtttggtgatttaagttttattggcagttttataaaaagacatcttctctagaaattgctaactttaggtccattttactgtgaatgaggaataggagtga

SEQ ID NO: 369768 - DNA, 120 bp, Artificial Sequence
  ENSG00000141646_35 (sequence is synthesized)
gttttagaataacagatttttaaaaatccagatgatttgattaaaaccttaatcatacattgacataattcattgcttcttttttttgagatatggagtcttgctgtgttgcccaggcag

SEQ ID NO: 369769 - DNA, 120 bp, Artificial Sequence
  ENSG00000141646_36 (sequence is synthesized)
ctcattgttcccttttctactttaaggaaagttttcatgtttaatcatctggggaaagtatgtgaaaaatatttgttaagaagtatctctttggagccaagccacctgtcttggtttctt

SEQ ID NO: 369770 - DNA, 120 bp, Artificial Sequence
  ENSG00000141646_37 (sequence is synthesized)
tctactaagagccataaagtatagaaatacttctagttgttaagtgcttatatttgtacctagatttagtcacacgcttttgagaaaacatctagtatgttatgatcagctattcctgag

SEQ ID NO: 369771 - DNA, 120 bp, Artificial Sequence
  ENSG00000141646_38 (sequence is synthesized)
agcttggttgttaatctatatttctatttcttagtggtagtcatctttgatgaataagactaaagattctcacaggtttaaaattttatgtctactttaagggtaaaattatgaggttat

SEQ ID NO: 369772 - DNA, 120 bp, Artificial Sequence
  ENSG00000141646_39 (sequence is synthesized)
ggttctgggtgggttttctctagctaattcatatctcaaagagtctcaaaatgttgaatttcagtgcaagctgaatgagagatgagccatgtacacccaccgtaagacctcattccatgt

SEQ ID NO: 369773 - DNA, 120 bp, Artificial Sequence
  ENSG00000141646_40 (sequence is synthesized)
ttgtccagtgcctttcagtgcattatcaaagggaatccttcatggtgttgcctttattttccggggagtagatcgtgggatatagtctatctcatttttaatagtttaccgcccctggta

SEQ ID NO: 369774 - DNA, 120 bp, Artificial Sequence
  ENSG00000141646_41 (sequence is synthesized)
tacaaagataatgacaataaatcactgccatataaccttgctttttccagaaacatggctgttttgtattgctgtaaccactaaataggttgcctataccattcctcctgtgaacagtgc

SEQ ID NO: 369775 - DNA, 120 bp, Artificial Sequence
  ENSG00000141646_42 (sequence is synthesized)
agatttacaggttgcatggtctggcttaaggagagccatacttgagacatgtgagtaaactgaactcatattagctgtgctgcatttcagacttaaaatccatttttgtggggcagggtg

SEQ ID NO: 369776 - DNA, 120 bp, Artificial Sequence
  ENSG00000141646_43 (sequence is synthesized)
tggtgtgtaaaggggggtgtttgtaatacaagttgaaggcaaaataaaatgtcctgtctcccagatgatatacatcttattatttttaaagtttattgctaattgtaggaaggtgagttg

SEQ ID NO: 369777 - DNA, 120 bp, Artificial Sequence
  ENSG00000141646_44 (sequence is synthesized)
caggtatctttgactatggtcatctggggaaggaaaattttacattttactattaatgctccttaagtgtctatggaggttaaagaataaaatggtaaatgtttctgtgcctggtttgat

SEQ ID NO: 369778 - DNA, 120 bp, Artificial Sequence
  ENSG00000141646_45 (sequence is synthesized)
ggtaactggttaatagttactcaccattttatgcagagtcacattagttcacaccctttctgagagccttttgggagaagcagttttattctctgagtggaacagagttctttttgttga

SEQ ID NO: 369779 - DNA, 120 bp, Artificial Sequence
  ENSG00000141646_46 (sequence is synthesized)
taatttctagtttgctcccttcgttattgccaactttactggcattttatttaatgatagcagattgggaaaatggcaaatttaggttacggaggtaaatgagtatatgaaagcaattac

SEQ ID NO: 369780 - DNA, 120 bp, Artificial Sequence
  ENSG00000141646_47 (sequence is synthesized)
ctctaaagccagttaacaattattttgtaggtggggtacactcagcttaaagtaatgcatttttttttcccgtaaaggcagaatccatcttgttgcagatagctatctaaataatctcat

SEQ ID NO: 369781 - DNA, 120 bp, Artificial Sequence
  ENSG00000141646_48 (sequence is synthesized)
atcctcttttgcaaagactacagagaataggctatgacaatcttgttcaagcctttccatttttttccctgataactaagtaatttctttgaacataccaagaagtatgtaaaaagtcca

SEQ ID NO: 369782 - DNA, 120 bp, Artificial Sequence
  ENSG00000141646_49 (sequence is synthesized)
tggccttattcatccacaaagtggcatcctaggcccagccttatccctagcagttgtcccagtgctgctaggttgcttatcttgtttatctggaatcactgtggagtgaaattttccaca

SEQ ID NO: 369783 - DNA, 120 bp, Artificial Sequence
  ENSG00000141646_50 (sequence is synthesized)
tcatccagaattgccttatttaagaagtaaaacgttttaatttttagcctttttttggtggagttatttaatatgtatatcagaggatatactagatggtaacatttctttctgtgcttg

SEQ ID NO: 369784 - DNA, 120 bp, Artificial Sequence
  ENSG00000141646_51 (sequence is synthesized)
gctatctttgtggacttcaggggcttctaaaacagacaggactgtgttgcctttactaaatggtctgagacagctatggttttgaatttttagttttttttttttaacccacttcccctc

SEQ ID NO: 369785 - DNA, 120 bp, Artificial Sequence
  ENSG00000141646_52 (sequence is synthesized)
ctggtctcttccctctctgataattaccattcatatgtgagtgttagtgtgcctccttttagcattttcttcttctctttctgattcttcatttctgactgcctaggcaaggaaaccaga

SEQ ID NO: 369786 - DNA, 120 bp, Artificial Sequence
  ENSG00000141646_53 (sequence is synthesized)
taaccaaacttactagaacgttctttaaaacacaagtacaaactctgggacaggacccaagacactttcctgtgaagtgctgaaaaagacctcattgtattggcatttgatatcagtttg

SEQ ID NO: 369787 - DNA, 120 bp, Artificial Sequence
  ENSG00000141646_54 (sequence is synthesized)
atgtagcttagagtgcttcctgattcttgctgagtttcaggtagttgagatagagagaagtgagtcatattcatattttcccccttagaataatattttgaaaggtttcattgcttccac

SEQ ID NO: 369788 - DNA, 120 bp, Artificial Sequence
  ENSG00000141646_55 (sequence is synthesized)
ttgaatgctgctcttacaaaaactggggttacaagggttactaaattagcatcagtagccagaggcaataccgttgtctggaggacaccagcaaacaacacacaacaaagcaaaacaaac

SEQ ID NO: 369789 - DNA, 120 bp, Artificial Sequence
  ENSG00000141646_56 (sequence is synthesized)
cttgggaaactaaggccatttgttttgttttggtgtcccctttgaagccctgccttctggccttactcctgtacagatatttttgacctataggtgcctttatgagaattgagggtctga

SEQ ID NO: 369790 - DNA, 120 bp, Artificial Sequence
  ENSG00000141646_57 (sequence is synthesized)
ttgagggtctgacatcctgccccaaggagtagctaaagtaattgctagtgttttcagggattttaacatcagactggaatgaatgaatgaaactttttgtcctttttttttctgtttttt

SEQ ID NO: 369791 - DNA, 120 bp, Artificial Sequence
  ENSG00000141646_58 (sequence is synthesized)
agtaaggactaaggaaaacctttggtgaagacaatcatttctctctgttgatgtggatacttttcacaccgtttatttaaatgctttctcaataggtccagagccagtgttcttgttcaa

SEQ ID NO: 369792 - DNA, 120 bp, Artificial Sequence
  ENSG00000141646_59 (sequence is synthesized)
cctgaaagtaatggctctgggttgggccagacagttgcactctctagtttgccctctgccacaaatttgatgtgtgacctttgggcaagtcatttatcttctctgggccttagttgcctc

SEQ ID NO: 369793 - DNA, 120 bp, Artificial Sequence
  ENSG00000141646_60 (sequence is synthesized)
atctgtaaaatgagggagttggagtagattaattattccagctctgaaattctaagtgaccttggctaccttgcagcagttttggatttcttccttatctttgttctgctgtttgagggg

SEQ ID NO: 369794 - DNA, 120 bp, Artificial Sequence
  ENSG00000141646_61 (sequence is synthesized)
gctttttacttatttccatgttattcaaaggagactaggcttgatattttattactgttcttttatggacaaaaggttacatagtatgcccttaagacttaattttaaccaaaggcctag

SEQ ID NO: 369795 - DNA, 77 bp, Artificial Sequence
  ENSG00000141646_62 (sequence is synthesized)
atagtatgcccttaagacttaattttaaccaaaggcctagcaccaccttaggggctgcaataaacacttaacgcgcg

SEQ ID NO: 369796 - DNA, 120 bp, Artificial Sequence
  ENSG00000141646_63 (sequence is synthesized)
agcttttgaattgcgtgcacacacacacgcacgcacacactctggtcagagtttattaaggctttcgagtcatgacattatagcttttgagttggtgtgtgtgacaccaccctcctaagt

SEQ ID NO: 369797 - DNA, 120 bp, Artificial Sequence
  ENSG00000141646_64 (sequence is synthesized)
ggtgtgtgcttgtaattttttttttcagtgaaaatggattgaaaacctgttgttaatgcttagtgatattatgctcaaaacaaggaaattcccttgaaccgtgtcaattaaactggttta

SEQ ID NO: 369798 - DNA, 120 bp, Artificial Sequence
  ENSG00000141646_65 (sequence is synthesized)
tatgactcaagaaaacaataccagtagatgattattaactttattcttggctctttttaggtccattttgattaagtgacttttggctggatcattcagagctctcttctagcctaccct

SEQ ID NO: 369799 - DNA, 120 bp, Artificial Sequence
  ENSG00000141646_66 (sequence is synthesized)
tggatgagtacaattaatgaaattcatattttcaaggacctgggagccttccttggggctgggttgagggtggggggttggggagtcctggtagaggccagctttgtggtagctggagag

SEQ ID NO: 369800 - DNA, 120 bp, Artificial Sequence
  ENSG00000141646_67 (sequence is synthesized)
gaagggatgaaaccagctgctgttgcaaaggctgcttgtcattgatagaaggactcacgggcttggattgattaagactaaacatggagttggcaaactttcttcaagtattgagttctg

SEQ ID NO: 369801 - DNA, 120 bp, Artificial Sequence
  ENSG00000141646_68 (sequence is synthesized)
ttcaatgcattggacatgtgatttaagggaaaagtgtgaatgcttatagatgatgaaaacctggtgggctgcagagcccagtttagaagaagtgagttgggggttggggacagatttggt

SEQ ID NO: 369802 - DNA, 120 bp, Artificial Sequence
  ENSG00000141646_69 (sequence is synthesized)
ggtggtatttcccaactgtttcctcccctaaattcagaggaatgcagctatgccagaagccagagaagagccactcgtagcttctgctttggggacaactggtcagttgaaagtcccagg

SEQ ID NO: 369803 - DNA, 120 bp, Artificial Sequence
  ENSG00000141646_70 (sequence is synthesized)
agttcctttgtggctttctgtatacttttgcctggttaaagtctgtggctaaaaaatagtcgaacctttcttgagaactctgtaacaaagtatgtttttgattaaaagagaaagccaact

SEQ ID NO: 369804 - DNA, 120 bp, Artificial Sequence
  ENSG00000141646_71 (sequence is synthesized)
aacaaaatccactcacacttgcaacgcctggcaaggctcttcaatatgtgattccttgactgtcctgtgcgtctctcgagtgtaaacacctctggggctcgtgattcggggctgccagaa

SEQ ID NO: 369805 - DNA, 79 bp, Artificial Sequence
  ENSG00000141646_72 (sequence is synthesized)
ttctcctgcctcagcctccctcttttgtagttttagtagagacggggttttgcctgttggccaggctggtcttgaactc

SEQ ID NO: 369806 - DNA, 120 bp, Artificial Sequence
  ENSG00000141646_73 (sequence is synthesized)
aaaccagtgtcttgctgagactcttcccgttgctggcttcgaagaggcaagctgccatattgttagcttccctatggagagcaccacatggcaaggaacagagggggtctccagccaaca

SEQ ID NO: 369807 - DNA, 120 bp, Artificial Sequence
  ENSG00000141646_74 (sequence is synthesized)
gcctgcaaaggactaaggccctcagtcctgtagcctgcaaggaactgaatggtgccaacaaccacatgaacttggaagcagatcctttgttccagcctcactttgtagaggacccagcta

SEQ ID NO: 369808 - DNA, 120 bp, Artificial Sequence
  ENSG00000141646_75 (sequence is synthesized)
gtttgtctcagtgggtattaaaggttgggagactgcaatgataagtgtgtctgaatctctctatggggctgtttgtgagggggttcaaattctgagtgctcatcacacacctcccctatt

SEQ ID NO: 369809 - DNA, 120 bp, Artificial Sequence
  ENSG00000141646_76 (sequence is synthesized)
ggtggttttgtaaaggctgtcttcagtgtcttatttcctcagaaaacaactggtatttctcacagctccttctagatttggacaaaggaatgatacaagagcagctccatcaagtatgat

SEQ ID NO: 369810 - DNA, 120 bp, Artificial Sequence
  ENSG00000141646_77 (sequence is synthesized)
ggatgatgacatttttgaattggtaaaatctgttcttctgtaatagttgctttttgcctatgaccctgtttgcattctttttgtatcaaaaatggagtatgggatgaaggagaaagggga

SEQ ID NO: 369811 - DNA, 120 bp, Artificial Sequence
  ENSG00000141646_78 (sequence is synthesized)
tgattattatattatactgttctatctcctccttttttgttgatgcttattataattctgcctcaccagccagggtgggttgtaatcactgaagtgcttggctttattctagtaaggaaa

SEQ ID NO: 369812 - DNA, 120 bp, Artificial Sequence
  ENSG00000141646_79 (sequence is synthesized)
taggtaatctgtttcttactactttctctttgttttgtcctatcctctctgtttttttgttgacctagaattagtttgtgtgagcggcaggcagtaacattaacaagaaaataacttact

SEQ ID NO: 369813 - DNA, 120 bp, Artificial Sequence
  ENSG00000141646_80 (sequence is synthesized)
gctttggaaatgtagattttgaggttaggggcatttaaaactggatttaaaactggatttaaattggctattgctctttgtatttgaactgcaatttatgaactaaagtactgtaaaaaa

SEQ ID NO: 369814 - DNA, 120 bp, Artificial Sequence
  ENSG00000141646_81 (sequence is synthesized)
aaatatgtgcatcattattagatatgaacaggaaaagaaaaaaggaaatatacaaaaatgttaatagctatcttttggttttatgtgatctttatttttaatttttcaatattaagcatg

SEQ ID NO: 369815 - DNA, 120 bp, Artificial Sequence
  ENSG00000141646_82 (sequence is synthesized)
gagcgaccctccccgtcactcggagcgggaggcgggggcagccgggagaaaggaaagctgcgggggaaaagggccaaaccctgaaattacccggatgtggtccccgcgcgcgcatgctca

SEQ ID NO: 369816 - DNA, 120 bp, Artificial Sequence
  ENSG00000141646_83 (sequence is synthesized)
gggtaaaattgaactgtgtgccaggtttcacactgatggggaattttttactgcagagttaaactcctgactatagacttttatgatggaaacacgtggcacccatcttccacgtctgaa

SEQ ID NO: 369817 - DNA, 120 bp, Artificial Sequence
  ENSG00000141646_84 (sequence is synthesized)
aacttgcccaagaataggcaactaggaggagccggagtaatgtgtgcttgctattagatatttaaacaatggaaaaatattacaaaagactgcaaactccatgacagcagggatatttgt

SEQ ID NO: 369818 - DNA, 120 bp, Artificial Sequence
  ENSG00000141646_85 (sequence is synthesized)
tttgtttatggatatatcccaagtactagaacagtacctggaacagaagtgctcaagaaatattttttcagtgaatgaatttgttgaatgctagcccataaagagaaatatttaacagtt

SEQ ID NO: 369819 - DNA, 120 bp, Artificial Sequence
  ENSG00000141646_86 (sequence is synthesized)
tggtatctgtttttctggactttaaaaaatatatactatatgtttttttaattttatttttttgaataggcaatacatggtccataaatcaaaatactataaaaaggtatacagtgaaaa

SEQ ID NO: 369820 - DNA, 120 bp, Artificial Sequence
  ENSG00000141646_87 (sequence is synthesized)
gaagtgctcccacccctgcccccattcccccctacctcaggtaatcactttttttagtttctggtgtttccttccagggtttctatatgcaaaaaatacatacctcctttcttacacaaa

SEQ ID NO: 369821 - DNA, 120 bp, Artificial Sequence
  ENSG00000141646_88 (sequence is synthesized)
acgtatactatgcatactgttctggaccttggttttttacttacagtatatgattttttaaacatgcatatgatcatagtgtacaatagtgctttgtaacttgctttgattctcttggca

SEQ ID NO: 369822 - DNA, 120 bp, Artificial Sequence
  ENSG00000141646_89 (sequence is synthesized)
aaaatatattgcagacttctatccttgttgatacctttagttttacctgagaaacatttattatggattatctggggttaaagagatctgtagaccagtagaagtttcaaacttacattt

SEQ ID NO: 369823 - DNA, 120 bp, Artificial Sequence
  ENSG00000141646_90 (sequence is synthesized)
gggaagtttagccagcatatttagggcaagaaagatttatgggtcataactgtttaaaagcagaatacagttggtacataaagatgttatgattgctgattaaactgaagagtcatctga

SEQ ID NO: 369824 - DNA, 120 bp, Artificial Sequence
  ENSG00000141646_91 (sequence is synthesized)
aaagcaaaagcagtgagtaccaagttgaccagttgtatcctcaaatcagctagcaaaaccagtaagttggtaaaaagatcccagtcattataacaacaaaaaaaacctaagatgtccagg

SEQ ID NO: 369825 - DNA, 120 bp, Artificial Sequence
  ENSG00000141646_92 (sequence is synthesized)
aattaattagagatgtcaggatttatatgaagaaaatcattgaactttgttgaagggtgtaatataaggctgaataagtgtagacataccaattttgtgccccaaacaatttttttcttt

SEQ ID NO: 369826 - DNA, 120 bp, Artificial Sequence
  ENSG00000141646_93 (sequence is synthesized)
ttattatttttataacttggccaatgttgatgagtggttgtgttcagttttttttattgatacataatttgttacgcatccttttgattatctttttgtttccataaaatttctaaagag

SEQ ID NO: 369827 - DNA, 120 bp, Artificial Sequence
  ENSG00000141646_94 (sequence is synthesized)
gaactttggaatgggatttataggtcttcagaatatcatcttcatgacttttgatgcatgaacatacttcttaagaggtttttaagaggttgtacatagaaacttgcacaatggatgatt

SEQ ID NO: 369828 - DNA, 120 bp, Artificial Sequence
  ENSG00000141646_95 (sequence is synthesized)
attactgccttaaactagtctcaatttaataaaaagtacccatgtaacttaactgatatttacatgtagtagattttttttcaaaggttgacatagggaaagataagggaaatgatatgc

SEQ ID NO: 369829 - DNA, 120 bp, Artificial Sequence
  ENSG00000141646_96 (sequence is synthesized)
tggttcttaatgaaaaagggaatgtctttttgtggtctactaattgactgctttaagaagagaacctactgttagttcagtggattgttaagttctggagtagtgttagtttagaagcaa

SEQ ID NO: 369830 - DNA, 120 bp, Artificial Sequence
  ENSG00000141646_97 (sequence is synthesized)
taaaggattggttgctaaaggtaaaaagcaaaccttaaaacaataacctaaaaacaaatgggaaggttctgggcagagaattaacattgttaatgcagttcagtttcagttttctttttg

SEQ ID NO: 369831 - DNA, 120 bp, Artificial Sequence
  ENSG00000141646_98 (sequence is synthesized)
tcatacagcagagctaactatttcctggttggttaatggaaagatgttatgctgtatcagctggaatctagctttgcttatgaaggtgtaatcacataggtgaaagatgttgattactga

SEQ ID NO: 369832 - DNA, 120 bp, Artificial Sequence
  ENSG00000141646_99 (sequence is synthesized)
gttttctcacaccatatattaatcaaatactcttatttgggttgggtttctagagggaaatttcagtttgacttttcatttataatttttccgtttggttctaaacctataggggacatt

SEQ ID NO: 369833 - DNA, 120 bp, Artificial Sequence
  ENSG00000141646_100 (sequence is synthesized)
acattcagtacacttcatttttaaagaatatgttgcttaacaataattctagatcctgggattggatatctatcagatcccactcatatctccacagtgtgaaattaacaaaaagatata

SEQ ID NO: 369834 - DNA, 120 bp, Artificial Sequence
  ENSG00000141646_101 (sequence is synthesized)
gttaaatactcagtctctatttagaccgaataattgtttttctcagctggacacattttccagccattcggtttttgcctgccttatgtatttaggtgattattcttctaggtttatcaa

SEQ ID NO: 369835 - DNA, 120 bp, Artificial Sequence
  ENSG00000141646_102 (sequence is synthesized)
gaaactgaggagtacctttttaggattgttgctggaggctgttgaaacatagactagcttcaaatttgagagtcagattgattgataaaatatatctcatgctgttaccgctgaataaat

SEQ ID NO: 369836 - DNA, 120 bp, Artificial Sequence
  ENSG00000141646_103 (sequence is synthesized)
gacttttgctggtaaagtagtatgcttttaaaataatatgaaaaaattctgaattaaggttagtaatttacactgtaattgattttaggtgttattatattacttgctaataagattttt

SEQ ID NO: 369837 - DNA, 120 bp, Artificial Sequence
  ENSG00000141646_104 (sequence is synthesized)
aaaaactgcttctctgcatggggtttatgagttgagacagacatttatgtgaaagagataacaacagagggaggagcaagtcttcaatatcaggttatcctgaatacatgtctaacaatt

SEQ ID NO: 369838 - DNA, 120 bp, Artificial Sequence
  ENSG00000141655_0 (sequence is synthesized)
cgccagcctgtcccgcgccatggccccgcgcgcccggcggcgccgcccgctgttcgcgctgctgctgctctgcgcgctgctcgcccggctgcaggtggctttgcagatcgctcctccatg

SEQ ID NO: 369839 - DNA, 120 bp, Artificial Sequence
  ENSG00000141655_1 (sequence is synthesized)
ggctttgcagatcgctcctccatgtaccagtgagaagcattatgagcatctgggacggtgctgtaacaaatgtgaaccaggaaagtacatgtcttctaaatgcactactacctctgacag

SEQ ID NO: 369840 - DNA, 120 bp, Artificial Sequence
  ENSG00000141655_2 (sequence is synthesized)
tgtatgtctgccctgtggcccggatgaatacttggatagctggaatgaagaagataaatgcttgctgcataaagtttgtgatacaggcaaggccctggtggccgtggtcgccggcaacag

SEQ ID NO: 369841 - DNA, 120 bp, Artificial Sequence
  ENSG00000141655_3 (sequence is synthesized)
cacgaccccccggcgctgcgcgtgcacggctgggtaccactggagccaggactgcgagtgctgccgccgcaacaccgagtgcgcgccgggcctgggcgcccagcacccgttgcagctcaa

SEQ ID NO: 369842 - DNA, 120 bp, Artificial Sequence
  ENSG00000141655_4 (sequence is synthesized)
caaggacacagtgtgcaaaccttgccttgcaggctacttctctgatgccttttcctccacggacaaatgcagaccctggaccaactgtaccttccttggaaagagagtagaacatcatgg

SEQ ID NO: 369843 - DNA, 120 bp, Artificial Sequence
  ENSG00000141655_5 (sequence is synthesized)
gacagagaaatccgatgcggtttgcagttcttctctgccagctagaaaaccaccaaatgaaccccatgtttacttgcccggtttaataattctgcttctcttcgcgtctgtggccctggt

SEQ ID NO: 369844 - DNA, 120 bp, Artificial Sequence
  ENSG00000141655_6 (sequence is synthesized)
ggctgccatcatctttggcgtttgctataggaaaaaagggaaagcactcacagctaatttgtggcactggatcaatgaggcttgtggccgcctaagtggagataaggagtcctcaggtga

SEQ ID NO: 369845 - DNA, 120 bp, Artificial Sequence
  ENSG00000141655_7 (sequence is synthesized)
cagttgtgtcagtacacacacggcaaactttggtcagcagggagcatgtgaaggtgtcttactgctgactctggaggagaagacatttccagaagatatgtgctacccagatcaaggtgg

SEQ ID NO: 369846 - DNA, 120 bp, Artificial Sequence
  ENSG00000141655_8 (sequence is synthesized)
tgtctgtcagggcacatgtgtaggaggtggtccctacgcacaaggcgaagatgccaggatgctctcattggtcagcaagaccgagatagaggaagacagcttcagacagatgcccacaga

SEQ ID NO: 369847 - DNA, 120 bp, Artificial Sequence
  ENSG00000141655_9 (sequence is synthesized)
agatgaatacatggacaggccctcccagcccacagaccagttactgttcctcactgagcctggaagcaaatccacacctcctttctctgaacccctggaggtgggggagaatgacagttt

SEQ ID NO: 369848 - DNA, 120 bp, Artificial Sequence
  ENSG00000141655_10 (sequence is synthesized)
aagccagtgcttcacggggacacagagcacagtgggttcagaaagctgcaactgcactgagcccctgtgcaggactgattggactcccatgtcctctgaaaactacttgcaaaaagaggt

SEQ ID NO: 369849 - DNA, 120 bp, Artificial Sequence
  ENSG00000141655_11 (sequence is synthesized)
ggacagtggccattgcccgcactgggcagccagccccagccccaactgggcagatgtctgcacaggctgccggaaccctcctggggaggactgtgaacccctcgtgggttccccaaaacg

SEQ ID NO: 369850 - DNA, 120 bp, Artificial Sequence
  ENSG00000141655_12 (sequence is synthesized)
tggacccttgccccagtgcgcctatggcatgggccttccccctgaagaagaagccagcaggacggaggccagagaccagcccgaggatggggctgatgggaggctcccaagctcagcgag

SEQ ID NO: 369851 - DNA, 120 bp, Artificial Sequence
  ENSG00000141655_13 (sequence is synthesized)
ggcaggtgccgggtctggaagctcccctggtggccagtcccctgcatctggaaatgtgactggaaacagtaactccacgttcatctccagcgggcaggtgatgaacttcaagggcgacat

SEQ ID NO: 369852 - DNA, 120 bp, Artificial Sequence
  ENSG00000141655_14 (sequence is synthesized)
catcgtggtctacgtcagccagacctcgcaggagggcgcggcggcggctgcggagcccatgggccgcccggtgcaggaggagaccctggcgcgccgagactccttcgcggggaacggccc

SEQ ID NO: 369853 - DNA, 120 bp, Artificial Sequence
  ENSG00000141655_15 (sequence is synthesized)
ttcccggacccgtgcggcggccccgaggggctgcgggagccggagaaggcctcgaggccggtgcaggagcaaggcggggccaaggcttgagcgccccccatggctgggagcccgaagctc

SEQ ID NO: 369854 - DNA, 120 bp, Artificial Sequence
  ENSG00000141655_16 (sequence is synthesized)
gctcggagccagggctcgcgagggcagcaccgcagcctctgccccagccccggccacccagggatcgatcggtacagtcgaggaagaccacccggcattctctgcccactttgccttcca

SEQ ID NO: 369855 - DNA, 120 bp, Artificial Sequence
  ENSG00000141655_17 (sequence is synthesized)
ggaaatgggcttttcaggaagtgaattgatgaggactgtccccatgcccacggatgctcagcagcccgccgcactggggcagatgtctcccctgccactcctcaaactcgcagcagtaat

SEQ ID NO: 369856 - DNA, 120 bp, Artificial Sequence
  ENSG00000141655_18 (sequence is synthesized)
ttgtggcactatgacagctatttttatgactatcctgttctgtgggggggggggtctgttttccccccatatttgtattccttttcataacttttcttgatatctttcctccctcttttt

SEQ ID NO: 369857 - DNA, 89 bp, Artificial Sequence
  ENSG00000141655_19 (sequence is synthesized)
cttttcataacttttcttgatatctttcctccctcttttttaatgtaaaggttttctcaaaaattctcctaaaggtgagggtctctttc

SEQ ID NO: 369858 - DNA, 120 bp, Artificial Sequence
  ENSG00000141655_20 (sequence is synthesized)
gcctctaactcctgggctcaagcaatccaagtgatcctcccacctcaaccttcggagtagctgggatcacagctgcaggccacgcccagcttcctccccccgactccccccccagagaca

SEQ ID NO: 369859 - DNA, 120 bp, Artificial Sequence
  ENSG00000141655_21 (sequence is synthesized)
cccagcttcctccccccgactccccccccagagacacggtcccaccatgttacccagcctggtctcaaactccccagctaaagcagtcctccagcctcggcctcccaaagtactgggatt

SEQ ID NO: 369860 - DNA, 120 bp, Artificial Sequence
  ENSG00000141655_22 (sequence is synthesized)
tggcctgctttacgtattttcttttgtgcccctgctcacagtgttttagagatggctttcccagtgtgtgttcattgtaaacacttttgggaaagggctaaacatgtgaggcctggagat

SEQ ID NO: 369861 - DNA, 120 bp, Artificial Sequence
  ENSG00000141655_23 (sequence is synthesized)
agttgctaagttgctaggaacatgtggtgggactttcatattctgaaaaatgttctatattctcatttttctaaaagaaagaaaaaaggaaacccgatttatttctcctgaatcttttta

SEQ ID NO: 369862 - DNA, 120 bp, Artificial Sequence
  ENSG00000141655_24 (sequence is synthesized)
agtttgtgtcgttccttaagcagaactaagctcagtatgtgaccttacccgctaggtggttaatttatccatgctggcagaggcactcaggtacttggtaagcaaatttctaaaactcca

SEQ ID NO: 369863 - DNA, 120 bp, Artificial Sequence
  ENSG00000141655_25 (sequence is synthesized)
agttgctgcagcttggcattcttcttattctagaggtctctctggaaaagatggagaaaatgaacaggacatggggctcctggaaagaaagggcccgggaagttcaaggaagaataaagt

SEQ ID NO: 369864 - DNA, 120 bp, Artificial Sequence
  ENSG00000141655_26 (sequence is synthesized)
tgaaattttaatttgcattttttttgtctagataagaatagcgtgaatagatcctcttttattcgtaaataatcgtgcatctgtgggttagccttgtagaagtggaaaacattccatttt

SEQ ID NO: 369865 - DNA, 120 bp, Artificial Sequence
  ENSG00000141655_27 (sequence is synthesized)
ccaatgcatttaaatgtaaagccaaatctgcatgttgtgaatttaagaaaacttattatcctaaaggtgcctttctcttggcatcatcccgcttgtgagaagcctagaggacgctccagg

SEQ ID NO: 369866 - DNA, 120 bp, Artificial Sequence
  ENSG00000141655_28 (sequence is synthesized)
tggaaggaaatcccctgggtggttttatcttttgttacccagtgagcactggttccccgcaaatactggggaaaagcaaaaatacacaagcaagttaaaattaattttgcacatctggga

SEQ ID NO: 369867 - DNA, 120 bp, Artificial Sequence
  ENSG00000141655_29 (sequence is synthesized)
ggttataaaagaaagcactaatagtagtcactgcccagactttactggccacaaatgcccagctgaagagcatgactgtggatcactggtttttccctcctgctggaaatgctggggtgg

SEQ ID NO: 369868 - DNA, 120 bp, Artificial Sequence
  ENSG00000141655_30 (sequence is synthesized)
tagcggtcgattaggattttcagtggagaagcacaggacagttctgtaatttatgggactccttagccaacataaagaactgcaggaaataactgcacagccaggaggatccgttggtgg

SEQ ID NO: 369869 - DNA, 120 bp, Artificial Sequence
  ENSG00000141655_31 (sequence is synthesized)
gaatttaccgtcattcctgcccttttatttaacatcatccacagagagatgttatacaaatggaggaaaccattataccttttgatatggaatatattacagagttacagttcacaaagt

SEQ ID NO: 369870 - DNA, 120 bp, Artificial Sequence
  ENSG00000141655_32 (sequence is synthesized)
agaatgctgagctgaaaacccgagtttctgctgtgactgtcatctcactgagcacttcgcttttctttgcttttattttttccttctataaaaaggcaataatgataatttataatagtt

SEQ ID NO: 369871 - DNA, 120 bp, Artificial Sequence
  ENSG00000141655_33 (sequence is synthesized)
gtaatattatttcctgcactgatccctactaattctatattgatccaaaggcaactcaatgctaaaaaatgtatagaaaatataagtctgtgtctgtgtactgtagagatgtatgtgaca

SEQ ID NO: 369872 - DNA, 120 bp, Artificial Sequence
  ENSG00000141655_34 (sequence is synthesized)
agtgtaaacaaaatgaactgaagcagtaatgaacagttattagggggaacatgataaagagattatattaagcttatgtttcaccataaaatcctttttatggcttactaaaaccgagct

SEQ ID NO: 369873 - DNA, 120 bp, Artificial Sequence
  ENSG00000141655_35 (sequence is synthesized)
cactgtaaaatcatgatccaacttattgctaatctttatgatatgcttattcctaatctttatggtatggtgtcaaccgttcatttgtatcttattgctcattccctggaccacagacta

SEQ ID NO: 369874 - DNA, 120 bp, Artificial Sequence
  ENSG00000141655_36 (sequence is synthesized)
gggacagaaaatacttgctttaataatatatatgctgttgatttcacaaaaatttattaaaatacagcctgggtacccagtgaaagagctgaaatggaaatggagtatcatgtttcctac

SEQ ID NO: 369875 - DNA, 120 bp, Artificial Sequence
  ENSG00000141655_37 (sequence is synthesized)
tcacattttactcagctgtcggaaggaagaatgaatttctcaagagcagtttgaatgtgttagatcagaaccttcatgtggtggggaaaatgggattatttcagtgtaacaaaccaccca

SEQ ID NO: 369876 - DNA, 120 bp, Artificial Sequence
  ENSG00000141655_38 (sequence is synthesized)
gtggggaaaatgggattatttcagtgtaacaaaccacccaaagacttagtggcttaaaatagtcaccattggccaggcacagcggttcatgcctcccagtgctttgggaggccaaggcag

SEQ ID NO: 369877 - DNA, 120 bp, Artificial Sequence
  ENSG00000141655_39 (sequence is synthesized)
cagtagttagagatcaaactgggcaatggagtgagacctcgtctctacaaaaaatacaaaacttatctgggcacggtggtgtgcacctgcagtcctggctactcaggaggctgaggcagg

SEQ ID NO: 369878 - DNA, 120 bp, Artificial Sequence
  ENSG00000141655_40 (sequence is synthesized)
aggttactgtgagctttgattgggtcagtgcactccagtgtaaaaaaacaaaaataaaaaccaccacttatttagctcccaattctatgggttggatcagcttgggtggttcttcaggcc

SEQ ID NO: 369879 - DNA, 120 bp, Artificial Sequence
  ENSG00000141655_41 (sequence is synthesized)
tggtccctcctggcctggtttgcttacccatttacaatgacccggctagttggccgggccaggctgtgtgctctccacctgtctcccatccttccagccacctagctgggcatgctctca

SEQ ID NO: 369880 - DNA, 120 bp, Artificial Sequence
  ENSG00000141655_42 (sequence is synthesized)
tggtggtgtcgagcctgagaacaagcagaaacctgccaggcttcttgaggcctaggctctaactggcatgctgtcacttctgccacattctgtgggccaaagcaggtcacaaaggcagcc

SEQ ID NO: 369881 - DNA, 120 bp, Artificial Sequence
  ENSG00000141655_43 (sequence is synthesized)
cagatccaagggatgggggagcagcatatccccccatgggaagagttgcggaatgagagggtagggggtggacacacagaggggaagatggcccccttgccatctgtccaccacagggca

SEQ ID NO: 369882 - DNA, 120 bp, Artificial Sequence
  ENSG00000141655_44 (sequence is synthesized)
ctgcgtggagtaaaatgctgcagagaagagtgcattctgggaaaaaaagaggaacatatcccagcccctaaccagtgagtagctccttctctggtgattgaattcccttaatgcacagca

SEQ ID NO: 369883 - DNA, 120 bp, Artificial Sequence
  ENSG00000141655_45 (sequence is synthesized)
ctatagattcccacaatgaaagggacacccacgttcatatttaagtgctgtgtcaaaattctttccagagccaaatataggtgatttgggaattgagcctactgtactgcttccacattc

SEQ ID NO: 369884 - DNA, 120 bp, Artificial Sequence
  ENSG00000141655_46 (sequence is synthesized)
ctttggcacagaaaactgaaaagtcacaacttctaaaatcaagaaaactggtgagataccttggggtagagaaacctgcatataaacagataaaagatcgagtgttcacccttcacctca

SEQ ID NO: 369885 - DNA, 120 bp, Artificial Sequence
  ENSG00000141655_47 (sequence is synthesized)
gctcaacaaacaaactcttgttacgattatacaagggtgagcttgagcaaaggtgctgtctttggtggaagaaacgtagttttgagttgtttgctctttgacagtctctgatggcatgtg

SEQ ID NO: 369886 - DNA, 120 bp, Artificial Sequence
  ENSG00000141655_48 (sequence is synthesized)
agtctggtgcattgctgtgggctgcgctgggcacaagttgcataacccgcttttggaagaggagacaaagcattcaaagccctaaacactctgttggtgaatcatcatgtttattgagtg

SEQ ID NO: 369887 - DNA, 120 bp, Artificial Sequence
  ENSG00000141655_49 (sequence is synthesized)
tgcttttagtggcagggccctgagcacctgggaaaggagatgaggagcgctggagggttcggagcagagaagacgagacaatgctctgctccaagcgccagaggaggcttctgggaaggg

SEQ ID NO: 369888 - DNA, 120 bp, Artificial Sequence
  ENSG00000141655_50 (sequence is synthesized)
gctgtctgtggaatttctgacccccagagccctgctggtgaagtcttgcaaccactaaagctttgccagagaagaggagggacctgacactgggcagtggcggtgccagcagtgagcaca

SEQ ID NO: 369889 - DNA, 120 bp, Artificial Sequence
  ENSG00000141655_51 (sequence is synthesized)
ggcggggtctaggtgggatcactgaagccaagccaagtggtgcagggggagccgccctggaccaacacccccatggctgccccactgcggaactgcctactgcggcaaaacaatcctatg

SEQ ID NO: 369890 - DNA, 120 bp, Artificial Sequence
  ENSG00000141655_52 (sequence is synthesized)
tcccccaaggtttcaacaaagaggaggaccgaataaatgtcccagtgggcaggcacacccacaagacttgctgctcctcctgacccacccgcatggctctgcacagctgtgagtccagtt

SEQ ID NO: 369891 - DNA, 120 bp, Artificial Sequence
  ENSG00000141655_53 (sequence is synthesized)
ttctctcttcctacctccctcttacccagttatcctgaccccagggtgaggttgaaactcatgctaggctaacatctctttccttcatcccattcataaaactggcatacaggaatgttt

SEQ ID NO: 369892 - DNA, 120 bp, Artificial Sequence
  ENSG00000141655_54 (sequence is synthesized)
taaaaaaatctttaagattaccaggagtataaaagttaaaatgacaaaattacaggcctgttaccagatcttcgtactaaccaaggagctggtgacactaccctcttccctgtgtgatag

SEQ ID NO: 369893 - DNA, 120 bp, Artificial Sequence
  ENSG00000141655_55 (sequence is synthesized)
aaaatgcagacgttttgcaggcagacctggttcatgactcagcgctgtgacttgtggacttatcttgtgcagctacatcacttcttagccttgttttcaacatgcgtaagcagaaggtac

SEQ ID NO: 369894 - DNA, 120 bp, Artificial Sequence
  ENSG00000141655_56 (sequence is synthesized)
taatattagtctttagggctggtttgaggatgacgtgagatgagagacaaccaagcactcactggcagttcctagaagattccagtagtagagatctgactgtcctacactactttccct

SEQ ID NO: 369895 - DNA, 120 bp, Artificial Sequence
  ENSG00000141655_57 (sequence is synthesized)
ccctgtctctgacacttgttcattcctgggctcaggagccatctcagtcatcatgtcggaccacgtaactataaccaagctctgctgcccacctgggacaccttcccactctttgcaact

SEQ ID NO: 369896 - DNA, 120 bp, Artificial Sequence
  ENSG00000141655_58 (sequence is synthesized)
aggtcggagggacgcaccttctccacagttgacaggactgttatggttgacccaaaagttgtcatcttctgacatgacacactgagggaagtagacttacccaatataacttcacattat

SEQ ID NO: 369897 - DNA, 120 bp, Artificial Sequence
  ENSG00000141655_59 (sequence is synthesized)
actgtcttaaaagactatgattaaaatgggcatcagtgtaggcaacatgtagggcgcaaagaatagccagatgtgaaggttgaaaggctatgtgggctagtttgtcatggtattcctggt

SEQ ID NO: 369898 - DNA, 120 bp, Artificial Sequence
  ENSG00000141655_60 (sequence is synthesized)
gcctctccccgtttgggaagaataacacattgaccaccggctcagaggaggtggcattataggtccaggccccttcaggagggcactggagtcaatgaaagcttttgctctcacccaggc

SEQ ID NO: 369899 - DNA, 120 bp, Artificial Sequence
  ENSG00000141655_61 (sequence is synthesized)
tcttggtttctcacgggcaggggtagcccaggaaacaaaggctgtatagactttaagtcgtgagaaaaacgacattcttatggtgaggctcttagagactgtctccatttaagcagcagc

SEQ ID NO: 369900 - DNA, 120 bp, Artificial Sequence
  ENSG00000141655_62 (sequence is synthesized)
agtaaaacatcttaccctaaaatgaagaagcaaatccatttttattggcttttatagcctctctctttcaatgacaaagaaaccattaaaatgaatgtttaaagttcttagaagagcttt

SEQ ID NO: 369901 - DNA, 120 bp, Artificial Sequence
  ENSG00000141655_63 (sequence is synthesized)
ctctaaatatttactctgtcagtggaaaaataaacattttttacatcgggtctattgagtttgttatatacagtaaaattcaccctttttagatatatagttttatgagttttaacaaaa

SEQ ID NO: 369902 - DNA, 120 bp, Artificial Sequence
  ENSG00000141655_64 (sequence is synthesized)
atacatagttgtgtaaccaccaccatcacaatcaagatatagaatatttcaacatcccaaagttcccatttcccttttcagtcaatcccttccccactacccctagcccctggcaaccat

SEQ ID NO: 369903 - DNA, 120 bp, Artificial Sequence
  ENSG00000141655_65 (sequence is synthesized)
tatctgttctctcttcccatagtttcaccttttccaatttgtcgtgtagagttacacagctcatagccatttgagtctggcttctttccacataatgtccttgagatccatcggtgggta

SEQ ID NO: 369904 - DNA, 120 bp, Artificial Sequence
  ENSG00000141655_66 (sequence is synthesized)
caccagtagttccattttttttctgagtagtagtccattgtatggatgtactgcggtttattcaccaacatatgggttctttcctgtttggggagattacaaataaagctactataaaaa

SEQ ID NO: 369905 - DNA, 120 bp, Artificial Sequence
  ENSG00000141655_67 (sequence is synthesized)
cgcccgccagcctgtcccgcgccatggccccgcgcgcccggcggcgccgcccgctgttcgcgctgctgctgctctgcgcgctgctcgcccggctgcaggtgattctgcgcacattggaga

SEQ ID NO: 369906 - DNA, 120 bp, Artificial Sequence
  ENSG00000141655_68 (sequence is synthesized)
gagaagcactggatttcaccctgaaggctgggcagtgaaggaagggagggcagcaggtaaggggaatgcttcctccttccgtcactttggggactcctggcctgagcagttcgtgcagcc

SEQ ID NO: 369907 - DNA, 120 bp, Artificial Sequence
  ENSG00000141655_69 (sequence is synthesized)
gaagagaaagcagttcttatctgaaatgaatacaaagttaaagaaaaaaacaaaccccaagaatgacaatgtaaaaaggctttcacactgggagaataaaggggcattcactggagcctg

SEQ ID NO: 369908 - DNA, 120 bp, Artificial Sequence
  ENSG00000141655_70 (sequence is synthesized)
tggaaataggggtgcatcgtaacataaggacaagtcaaagccatcctaattactgtattgaggaaacaaccggccttgcccttggattccaggtagcccagggctgcagactcttcactc

SEQ ID NO: 369909 - DNA, 120 bp, Artificial Sequence
  ENSG00000141655_71 (sequence is synthesized)
aagtgtcggtgaccaggggagtggctcagaacaacaaagggtcatgaccagagctagcctgacctggacatcacataccagtgttagtggcctgacatcaagtcagttacctttctgagc

SEQ ID NO: 369910 - DNA, 120 bp, Artificial Sequence
  ENSG00000141655_72 (sequence is synthesized)
gtggttccataactcactgctggggtcagaactgctctgtgggcccaagcctgtgggagctgaagaagttagacacaggggtgggcacaggggtgggaggtgagggcagagaggggcagc

SEQ ID NO: 369911 - DNA, 120 bp, Artificial Sequence
  ENSG00000141664_0 (sequence is synthesized)
acctcctcacccagccgctccgtcctcaccggctcgcgagggaacagctcaggcaccgccgccccggctcagcgcggacggcggagagagggaggcggaaggaggacaccctcgctcgct

SEQ ID NO: 369912 - DNA, 120 bp, Artificial Sequence
  ENSG00000141664_1 (sequence is synthesized)
gacaccctcgctcgcttgctcccacccgcacccgggctcccagaaccggcgaggagcccagggggaggagccgtcgcgggcacgccccgcccccagcccgggaagacgacgccagcgacc

SEQ ID NO: 369913 - DNA, 120 bp, Artificial Sequence
  ENSG00000141664_2 (sequence is synthesized)
gcccgcccccgctcgcatgtctgcgccgccctagccgaggatgctgaggatgaagctgccgctgaagccaacgcaccccgcggagccgccgcccgaggcggaggagcccgaggcggacgc

SEQ ID NO: 369914 - DNA, 120 bp, Artificial Sequence
  ENSG00000141664_3 (sequence is synthesized)
gcgggggcgggtatgccgggcggcggcggggggccctcggcggcgctgcgcgagcaggagcgggtatacgagtggttcgggctggtgctgggctcggcgcagcgcctggagttcatgtgc

SEQ ID NO: 369915 - DNA, 120 bp, Artificial Sequence
  ENSG00000141664_4 (sequence is synthesized)
ctcggcgcagcgcctggagttcatgtgcgggctgctggacctgtgcaacccgctggagctgcgcttccttggctcgtgcctggaggacctggcgcgcaaggactaccactacctgcgcga

SEQ ID NO: 369916 - DNA, 120 bp, Artificial Sequence
  ENSG00000141664_5 (sequence is synthesized)
ctcggaggccaaggccaacggcctctcggacccggggccgctggccgacttccgagagcccgcggtgcgctcgcgcctcatcgtctacctggcgctgctgggctcggagaaccgggaggc

SEQ ID NO: 369917 - DNA, 120 bp, Artificial Sequence
  ENSG00000141664_6 (sequence is synthesized)
cgctggccgtctgcaccgcctgctaccccaggtggactcggtgctcaaaagcctgcgcgcggcccggggcgagggctcgcggggcggcgcggaggacgagcgcggcgaggacggcgacgg

SEQ ID NO: 369918 - DNA, 120 bp, Artificial Sequence
  ENSG00000141664_7 (sequence is synthesized)
cgagcaggacgccgagaaggacggctcaggcccggaaggcggcattgtggagccccgggtcggcggcgggcttggctccagggcccaggaggaactgctgctgctcttcaccatggcctc

SEQ ID NO: 369919 - DNA, 120 bp, Artificial Sequence
  ENSG00000141664_8 (sequence is synthesized)
gctgcacccggctttctccttccaccagcgggtcaccctgagggaacacttggagaggctccgcgccgcgctccgcgggggccccgaggacgcggaggtggaggtagagccgtgcaagtt

SEQ ID NO: 369920 - DNA, 120 bp, Artificial Sequence
  ENSG00000141664_9 (sequence is synthesized)
tgccggccccagggcccagaacaactctgctcatggtgattacatgcaaaataacgagagcagcttaatagagcaagctccaatacctcaggacggacttaccgtggcacctcacagagc

SEQ ID NO: 369921 - DNA, 120 bp, Artificial Sequence
  ENSG00000141664_10 (sequence is synthesized)
tcagcgagaagctgtacacattgagaagataatgttgaaaggagtccagagaaaaagagctgacaaatactgggagtacactttcaaagtaaattggtctgatctttcagtcacaacagt

SEQ ID NO: 369922 - DNA, 120 bp, Artificial Sequence
  ENSG00000141664_11 (sequence is synthesized)
aacaaaaacccaccaagaactacaggaatttctactgaagcttccaaaggaactgtcttcagagacttttgacaagaccatcttaagagccctgaatcagggttccttgaaaagggagga

SEQ ID NO: 369923 - DNA, 120 bp, Artificial Sequence
  ENSG00000141664_12 (sequence is synthesized)
acggcgacatcctgacctagagcccatcctaaggcagctattttcaagttcatcacaagcttttctacaaagtcagaaagtacacagcttctttcagtccatatcatcagactccctaca

SEQ ID NO: 369924 - DNA, 120 bp, Artificial Sequence
  ENSG00000141664_13 (sequence is synthesized)
cagtatcaataacttacaatcctctctgaagacttctaagatattagaacacttaaaagaagacagctctgaagcttcaagtcaagaagaagatgtgttgcagcatgccataatccacaa

SEQ ID NO: 369925 - DNA, 120 bp, Artificial Sequence
  ENSG00000141664_14 (sequence is synthesized)
gaagcatactgggaaaagtcccattgtgaacaatattggtacaagttgttctccattggatgggcttaccatgcaatattctgaacagaatggaattgtggattggaggaagcaaagctg

SEQ ID NO: 369926 - DNA, 120 bp, Artificial Sequence
  ENSG00000141664_15 (sequence is synthesized)
taccaccattcaacacccagagcactgtgtgacctcggctgaccagcattctgctgaaaaacggagtttatcttcaataaataagaagaaaggaaagccacaaacagaaaaggagaaaat

SEQ ID NO: 369927 - DNA, 120 bp, Artificial Sequence
  ENSG00000141664_16 (sequence is synthesized)
taagaaaactgacaacagattgaatagtagaataaatggtattagactctccactcctcagcatgcccatggtggtactgtgaaagatgtgaatttggacattggctctggacatgacac

SEQ ID NO: 369928 - DNA, 120 bp, Artificial Sequence
  ENSG00000141664_17 (sequence is synthesized)
atgtggagaaacatcttcagagagttacagttctccatctagtccccgacatgatggaagagaaagttttgaaagtgaagaagagaaagacagagacacagacagcaattctgaggattc

SEQ ID NO: 369929 - DNA, 120 bp, Artificial Sequence
  ENSG00000141664_18 (sequence is synthesized)
tgggaatccatcaacaactaggtttacaggttacggttctgtcaaccagactgtcactgtcaagccacctgttcaaattgcttcactaggaaatgagaatggaaaccttttagaagatcc

SEQ ID NO: 369930 - DNA, 120 bp, Artificial Sequence
  ENSG00000141664_19 (sequence is synthesized)
cttaaactcacccaagtatcagcatatttcttttatgccaacgttacactgtgtcatgcacaatggtgcccagaagtctgaagttgtcgttcctgcacccaaacccgctgatggcaaaac

SEQ ID NO: 369931 - DNA, 120 bp, Artificial Sequence
  ENSG00000141664_20 (sequence is synthesized)
catagggatgcttgttcctagtcctgttgctatttctgcaataagggagtctgcaaattcaacccctgttggaatactagggccaacagcttgcactggagaatcggaaaagcaccttga

SEQ ID NO: 369932 - DNA, 120 bp, Artificial Sequence
  ENSG00000141664_21 (sequence is synthesized)
gttactggcttcccctttacctattccatcaaccttccttccacacagtagtactcccgctttgcatcttacagttcagaggctaaagttgccaccaccacagggatcttctgagagctg

SEQ ID NO: 369933 - DNA, 120 bp, Artificial Sequence
  ENSG00000141664_22 (sequence is synthesized)
tgcctttattcctatccataacccaggtagtttcccaggctctcctgttgctaccacggaccccatcacaaaatctgcatcccaagtggtaggactcaatcaaatggtgcctcaaattga

SEQ ID NO: 369934 - DNA, 120 bp, Artificial Sequence
  ENSG00000141664_23 (sequence is synthesized)
gggaaacacagggacagtccctcagcctaccaatgtgaaggtagttcttccagcagctggcctctcagctgctcagccaccagcttcctaccccttaccaggctctccccttgctgccgg

SEQ ID NO: 369935 - DNA, 120 bp, Artificial Sequence
  ENSG00000141664_24 (sequence is synthesized)
cgtgttacccagccagaactccagtgtgctcagcacagcagcaacttctccccagccagcgagcgcaggtatcagccaggcccaggcaactgttcctcctgcagttcctacccacacccc

SEQ ID NO: 369936 - DNA, 120 bp, Artificial Sequence
  ENSG00000141664_25 (sequence is synthesized)
aggccctgccccgagcccaagccctgccttgacacacagtaccgcgcagagtgacagcacctcttacatcagtgctgtggggaacacgaacgctaatgggacagtagtgccaccgcagca

SEQ ID NO: 369937 - DNA, 120 bp, Artificial Sequence
  ENSG00000141664_26 (sequence is synthesized)
gatgggctcaggtccttgtggttcttgtgggcgaaggtgcagctgtgggaccaatggaaaccttcagctaaatagttactattatcctaatccaatgcctggaccaatgtaccgagtccc

SEQ ID NO: 369938 - DNA, 120 bp, Artificial Sequence
  ENSG00000141664_27 (sequence is synthesized)
ttcattctttactctgccatccatttgcaatggcagctacctcaaccaagcacatcagagcaatggaaaccaacttcctttttttctgcctcagactccatatgcaaatggactggtaca

SEQ ID NO: 369939 - DNA, 120 bp, Artificial Sequence
  ENSG00000141664_28 (sequence is synthesized)
tgacccagtcatggggagccaagccaactatggcatgcagcagatggcaggatttgggagattctatcctgtatatccagcacctaacgtagttgccaacaccagtggttcggggcccaa

SEQ ID NO: 369940 - DNA, 120 bp, Artificial Sequence
  ENSG00000141664_29 (sequence is synthesized)
gaagaatgggaatgtctcatgttacaattgtggtgtaagcggacactatgcacaggactgtaagcagtcgtccatggaggccaatcaacaaggcacttacagactgagatacgcacctcc

SEQ ID NO: 369941 - DNA, 120 bp, Artificial Sequence
  ENSG00000141664_30 (sequence is synthesized)
cctccccccttctaatgatacgttggattctgcagactgaaacgagtaaagcttgcctacttaatacactcaagtgtggggagtcatggggtgtggaggggaggaaaggaaaggtatttt

SEQ ID NO: 369942 - DNA, 120 bp, Artificial Sequence
  ENSG00000141664_31 (sequence is synthesized)
gtttctttgtctatacatttcctagatttctatgcagttgggatttttcatttctcttgtaccaatgtccaaaacaagaaagaatgcaatgcttttgagcctctggtctcctggttcaac

SEQ ID NO: 369943 - DNA, 120 bp, Artificial Sequence
  ENSG00000141664_32 (sequence is synthesized)
aacaggcttatatgtatgatacatgtaatttaaaccttcagacaaacttaaatgttggtgcgtgcttttttttttttttttacactgaatacttgctgtgtgcaatgtttactgaatctt

SEQ ID NO: 369944 - DNA, 120 bp, Artificial Sequence
  ENSG00000141664_33 (sequence is synthesized)
taaaactgtgtatttgaccttttttttacaacactggtgacagtcatatggttttgaaaaaaaaaagaaattttgcttcttcccagcttttctcactttcaccctaaacgacacttcctc

SEQ ID NO: 369945 - DNA, 120 bp, Artificial Sequence
  ENSG00000141664_34 (sequence is synthesized)
cccagccagcctcactctgtctccggcccgcagcaggagcagccagcagtgcattcaccccacttttgtaaactgctctgcatataaaccaagggcagaatgtttcaccctgatcttatg

SEQ ID NO: 369946 - DNA, 120 bp, Artificial Sequence
  ENSG00000141664_35 (sequence is synthesized)
ggaggaatcaaactcccaaaatagtgtgtatatatgtaataaacagcgtcacgtaaatacatatatgcagtgcttgttgtccaaatagaaatgaaaataagtggaagagagaggaagaag

SEQ ID NO: 369947 - DNA, 120 bp, Artificial Sequence
  ENSG00000141664_36 (sequence is synthesized)
tcaaaccatatgaaactgaaaaaatatgacgtacgaaatggacaaaaagctttttctgaaaccaactttttacttccatcatccttttttagcctgttgcttcagagagacacaaagtga

SEQ ID NO: 369948 - DNA, 120 bp, Artificial Sequence
  ENSG00000141664_37 (sequence is synthesized)
acacactggtgtgaatgtcgctctctgtgtgcttgtgtttgtaatgaaagtctacagccaattttacttgtctaccaccgtgttgtgctcaaagagacactacttgagtgaagatttctt

SEQ ID NO: 369949 - DNA, 120 bp, Artificial Sequence
  ENSG00000141664_38 (sequence is synthesized)
ctttccctgtaccagctgttacagtgttacgttgtgtttaaaatgtgtatggtttattgcaatctgaacagagctatgggtttctaccataagtcaggttgtttgttccctaacctgtct

SEQ ID NO: 369950 - DNA, 120 bp, Artificial Sequence
  ENSG00000141664_39 (sequence is synthesized)
ctcatagcaaagtcacttttataacagtttaccactatgcttgattataatgtgaaaggcggaattctgagtgtgttaagatggtattaatcatgtcggtgtcatgtcactaagtttaat

SEQ ID NO: 369951 - DNA, 120 bp, Artificial Sequence
  ENSG00000141664_40 (sequence is synthesized)
gctgctgtttttaaaaaaaaaaaaaagtttttttaaaaagccaatctatgtactaaattgcttccaggtaatttttgatttcctaaagtgcactgaggttatctggaagattgggtgtat

SEQ ID NO: 369952 - DNA, 120 bp, Artificial Sequence
  ENSG00000141664_41 (sequence is synthesized)
tttttggtgactgctgcattcatcagcaatgaacagtttccactgtatagtcctaggggtcagggggtgggggtttcattttccattcctcagcacagagcagaaatgatagatttttat

SEQ ID NO: 369953 - DNA, 120 bp, Artificial Sequence
  ENSG00000141664_42 (sequence is synthesized)
tgtttggagtaacgttggtatgcagcagaggaacgtaaacatttggtcttggttcagaagcctaacagattgctagacaagagaaaaaacttgaagaaaaaagaagcttaatttcatgct

SEQ ID NO: 369954 - DNA, 120 bp, Artificial Sequence
  ENSG00000141664_43 (sequence is synthesized)
tcataagtagcatttatatttatagcaccaatgtacattttgaaactttctttcaggggtgggagttatggggaaggggtgggtgtgaaggggtagatgaaagctttaatttagaaagaa

SEQ ID NO: 369955 - DNA, 120 bp, Artificial Sequence
  ENSG00000141664_44 (sequence is synthesized)
agttcaagtaaaggaaattattttgattaaatatattttatttgatctgggtatttttggaccacattattaaattaattgttaagctgcagttgagttgttcaagtgagagttttgata

SEQ ID NO: 369956 - DNA, 120 bp, Artificial Sequence
  ENSG00000141664_45 (sequence is synthesized)
agccacttatgggccgcgttgtgaatcacttgccagttgtactttatggagcttattttatgatttaaaatactgtactgtacataggaggtatgttaccttctccttatttgtatgttt

SEQ ID NO: 369957 - DNA, 120 bp, Artificial Sequence
  ENSG00000141664_46 (sequence is synthesized)
accatatactttgatatttgaaatgttatgtactggaaaggccacttatatttctagaacagattggattttatgcaaccttttttccttgaattaacagcaataaaaaaatgaaaaaca

SEQ ID NO: 369958 - DNA, 120 bp, Artificial Sequence
  ENSG00000141664_47 (sequence is synthesized)
gcttgcggctctcacactgtgcctttgtgcccatagtgtgcagtcacctattggacctctaaaaattgccactaaaatggttgttagtaaaatgagaagacctaaatctgtgattattac

SEQ ID NO: 369959 - DNA, 120 bp, Artificial Sequence
  ENSG00000141664_48 (sequence is synthesized)
tgtcatcttgccttctcactagtagccatgttttcttcaccactcaccctccattcattttccttaggtaaaaaaacaattattatatttgttttctttattttaattttcctaaaaagt

SEQ ID NO: 369960 - DNA, 79 bp, Artificial Sequence
  ENSG00000141664_49 (sequence is synthesized)
tggaaggccagttccaatttgagccgctgtgaaaaaggcctccaccagcctctcaccagaagagattgctcattggaac

SEQ ID NO: 369961 - DNA, 120 bp, Artificial Sequence
  ENSG00000141664_50 (sequence is synthesized)
ctccaccagcctctcaccagaagagattgctcattggaacgcaatgccacctggtgggggacgaggacagtgcgagcaagcagatgttatttcctactgacctaatttagagaacattaa

SEQ ID NO: 369962 - DNA, 120 bp, Artificial Sequence
  ENSG00000141664_51 (sequence is synthesized)
acgtaagagagggaacatttggggttggaagcctgtgcccaaaaccttaaagagtgcaggcagctggccataaaagcagcttgagcaaacccctcattcagccgttgaaatgtgtgtgtg

SEQ ID NO: 369963 - DNA, 120 bp, Artificial Sequence
  ENSG00000141664_52 (sequence is synthesized)
aacactttaaaggtttcctctgtgcttttcctgcgtgcatttggtcatcacagctgtgaagtggggtgggaatgtttcccctcgttttctaggagagaaattttgggttcagtgagacga

SEQ ID NO: 369964 - DNA, 120 bp, Artificial Sequence
  ENSG00000141664_53 (sequence is synthesized)
agtgctgcagacaggcccatggtgatgctcaggcctctgcttgaagttggtgctcacttcctggcaccacttcctgcccccaccagtgcttctggcagagcccagggcagtggctttatg

SEQ ID NO: 369965 - DNA, 120 bp, Artificial Sequence
  ENSG00000141664_54 (sequence is synthesized)
gaactgtgtaaggtgataggaacccacaggtggaatggccgtgtggcctctggactgaggagggctggaccaggttgtgggcacgcctggaacacacgccacatcctatcccatagcgag

SEQ ID NO: 369966 - DNA, 120 bp, Artificial Sequence
  ENSG00000141664_55 (sequence is synthesized)
gcctcttccttgtggctctcgaaggatttgaggacgcgggagggtgaaatgtttccagagaaatatccaggacttttagaactaggctttcaaaagcatttacctgtcagataaattcaa

SEQ ID NO: 369967 - DNA, 120 bp, Artificial Sequence
  ENSG00000141664_56 (sequence is synthesized)
gtggcatcaatgcagattttaaatgtgtacagatatctccactcgcacgctgagttgtgcttcacacaagttttgcgcacggagtattccattaaatctactgaagcagtggggcaagga

SEQ ID NO: 369968 - DNA, 120 bp, Artificial Sequence
  ENSG00000141664_57 (sequence is synthesized)
gaaaggagaggtgactgctgatgtttttaaagctctgacagtcacatatagattgtcccaggtacccctgctgcccccaagacactccaaaggcaaagatggatggtgacaaagtaacct

SEQ ID NO: 369969 - DNA, 120 bp, Artificial Sequence
  ENSG00000141664_58 (sequence is synthesized)
gctagcctattggagtcacgtcatatttgttacatggtaacttaattgtgccttccacgccttcacaaaatcagttgtacaagagaaggcacccaccacagtccatgtgacctttctcgg

SEQ ID NO: 369970 - DNA, 120 bp, Artificial Sequence
  ENSG00000141664_59 (sequence is synthesized)
tctgatttacatagtggggatgatgacactcgcgttgtagagtagttgcacgattaaacctggcacacagacataaagcactcaatgtctgacacatagtggactctcaagaagtttgtc

SEQ ID NO: 369971 - DNA, 120 bp, Artificial Sequence
  ENSG00000141664_60 (sequence is synthesized)
atgcaggggacacttgaatgcccagtatgggccagacagcatcagctcatttcagtcccacagccctgtgagggaggaactctgccctgttttacagttagggaaattgaggcacaaagg

SEQ ID NO: 369972 - DNA, 120 bp, Artificial Sequence
  ENSG00000141664_61 (sequence is synthesized)
ctaagaagtcgatatccaagggcacagaatgattgggtgacggtgagcccaggcagtgtgacaacaaggttgctgccccacgccacctctgtctttcgtgggtatgtcggtgtgaggtgt

SEQ ID NO: 369973 - DNA, 120 bp, Artificial Sequence
  ENSG00000141664_62 (sequence is synthesized)
aggcagccctgcactggcattcagcaggcgggactcccgggcaggctcttctgcgaacactcatgggccaccagccctttctggaacttgccttttttttttttttttacctgaaagcta

SEQ ID NO: 369974 - DNA, 120 bp, Artificial Sequence
  ENSG00000141664_63 (sequence is synthesized)
cgtgaatcgttggtaaattggtgtaaaaatggaactgagtcatctcaaaagttcctttcagttctaaaattctgtgaattgaagcctactttttcactttaaatgatttattgggtttac

SEQ ID NO: 369975 - DNA, 120 bp, Artificial Sequence
  ENSG00000141664_64 (sequence is synthesized)
agttctttacgctttctgattgaactgatttgaagttcttatttcgtgtgttggggaacacacccccaacccgtcacagcgtggccgtgggtgggagatggacgttaggctggccagtca

SEQ ID NO: 369976 - DNA, 120 bp, Artificial Sequence
  ENSG00000141664_65 (sequence is synthesized)
ctagggggcagcatcagcacgggtctggctgtccctggccttagggagcagtttctgcccctcctgccccgtcagaaagtctcggactcctctctgcttgcatgtgtaaagttttcattt

SEQ ID NO: 369977 - DNA, 120 bp, Artificial Sequence
  ENSG00000141664_66 (sequence is synthesized)
tcaggggccttttagtcaaaaaaaataaagctgtatgacttagtgctgaaggatatgaattaggcgtagctcttgggttggcagcataaaccaaggggcatcaacccaccaccgacaagc

SEQ ID NO: 369978 - DNA, 120 bp, Artificial Sequence
  ENSG00000141664_67 (sequence is synthesized)
taagaatggtttttacatctttaaatggttgaaaaaggaaaaagaatgtttagtgacacgtgaaaaatacatgaaattcaaacttcagtgtctacaaataaagtgcattagcacacggtc

SEQ ID NO: 369979 - DNA, 120 bp, Artificial Sequence
  ENSG00000141664_68 (sequence is synthesized)
ccgttccactcccccaccccaccccacaccccggcagacacagccacccgccatcacagaatgctctagaagtcccttccgtgccacggtgttgccacggaagacgtggagctccccgcc

SEQ ID NO: 369980 - DNA, 120 bp, Artificial Sequence
  ENSG00000141664_69 (sequence is synthesized)
cggggcccctctcggaggaaaagtgtcgggacgtttttggctctgagcatctcagcgctcggtgcgggagccgccgggcgctggaggaacctgtgtgagagccagccgcagtgagcccca

SEQ ID NO: 369981 - DNA, 120 bp, Artificial Sequence
  ENSG00000141664_70 (sequence is synthesized)
ggcagcgccgtccttccccgcctgcctggccggggctccgcctcccgtctccgggctctgccgggccctcggcggggtgtcctgaaggtgcgctcccggcgagctgcccttgtctttggc

SEQ ID NO: 369982 - DNA, 120 bp, Artificial Sequence
  ENSG00000141664_71 (sequence is synthesized)
acagagggactttttttgcccagtgtgtgcctgagttaaaaggggtcgtacgggtccttgtggcttctgctctgagggcttgtgttcccagcagacatctgacgtagagacctgcgaatg

SEQ ID NO: 369983 - DNA, 120 bp, Artificial Sequence
  ENSG00000141664_72 (sequence is synthesized)
gatctgagatgagtagtaacgcaggttgtccggggagagaaaccttttctagcgcggcctgggatgctttttccctccggcacacgcgctttctcacgggcttgattcctgcctacagat

SEQ ID NO: 369984 - DNA, 120 bp, Artificial Sequence
  ENSG00000141664_73 (sequence is synthesized)
tggggttccgggatatttgttgagcgtttacgataggcgttaatgttgcccaaaagaatcacttaaacaccaaaatgtagtagacgagaatccagatgagacacttgtcgcaaacattaa

SEQ ID NO: 369985 - DNA, 120 bp, Artificial Sequence
  ENSG00000141664_74 (sequence is synthesized)
agatgaattttttttacagccatgaaagcaatttaatgataattagggtccagtgagtctttgaggaggacttttccatgggaaggtggggagtaggtttcagtaagagtgagaactgta

SEQ ID NO: 369986 - DNA, 120 bp, Artificial Sequence
  ENSG00000141664_75 (sequence is synthesized)
aagtgagattatttgtggggtcacaggcttttgaaaggtgttgatttggatgccatgtttttcagcttaggtgatctctaggagataatggaaaaggggattttctcctctccttgcttg

SEQ ID NO: 369987 - DNA, 120 bp, Artificial Sequence
  ENSG00000141664_76 (sequence is synthesized)
tacactttcaaacttccaaaggaactgtcttcagagacttttgacaagaccatcttaagagccctgaatcagggttccttgaaaagggaggaacggcgacatcctgacctagagcccatc

SEQ ID NO: 369988 - DNA, 120 bp, Artificial Sequence
  ENSG00000141664_77 (sequence is synthesized)
ctaagatgtgttgcagcatgccataatccacaagaagcatactgggaaaagtcccattgtgaacaatattggtacaagttgttctccattggatgggcttaccatgcaatattctgaaca

SEQ ID NO: 369989 - DNA, 120 bp, Artificial Sequence
  ENSG00000141664_78 (sequence is synthesized)
ttgaacaagattgatttgctgttaggtggaagacatttgagagaacataaaaggtaattcagagtttactgtgtttttgaaaaattgcttaagatgtcttctatgttgagaaatgcttag

SEQ ID NO: 369990 - DNA, 120 bp, Artificial Sequence
  ENSG00000141664_79 (sequence is synthesized)
aagtgcttcataccatctgtcaccagtggttatgatcatacaaactagtagcatcctactgttggtttttgctgcagcatttagtgtaataagttactttttcctctcttctagatgtgt

SEQ ID NO: 369991 - DNA, 120 bp, Artificial Sequence
  ENSG00000141664_80 (sequence is synthesized)
ttccagagaaaacagccatcaaagaaggttgagagtgagaattaagagacactggagaagatcaagagaatgtgccctgaagacaacaacaaaaatcaataaaagatttcaagaatgaaa

SEQ ID NO: 369992 - DNA, 120 bp, Artificial Sequence
  ENSG00000141665_0 (sequence is synthesized)
actcttcgtttcagccctggcgcggtcctgtggtgaactccttgtctctatggcgactggacgcggtcggatcttgcagcagcactggctcggcctccagacgctgcgcgggcccagcag

SEQ ID NO: 369993 - DNA, 120 bp, Artificial Sequence
  ENSG00000141665_1 (sequence is synthesized)
gggcggtggcgcggcccgggggcgcgccagggcctttgggtgcagaaaggggccaggggtcaagctttctgcaggctctgctgccctgaggtgccatgccggaggtggacagcactggga

SEQ ID NO: 369994 - DNA, 120 bp, Artificial Sequence
  ENSG00000141665_2 (sequence is synthesized)
gagctctttctcctgctgttctgggttcctggatggaatgccttcagaaatcttgctgaagatattttcctacttggatgctgtgagccttctgtgtactggatgtgtgagcaggcgctt

SEQ ID NO: 369995 - DNA, 120 bp, Artificial Sequence
  ENSG00000141665_3 (sequence is synthesized)
ttatcatctagccaatgacaattttatttggatcggaatctactcaactgctttttcacctgcaagatcaaattggaaatttaattcagtagagaagatagctatgtctatgagctttct

SEQ ID NO: 369996 - DNA, 120 bp, Artificial Sequence
  ENSG00000141665_4 (sequence is synthesized)
gtcagttcaggataaagaagctggttattggaagaaagaatatatcacaaaacaaatagcatctgtaaaagccgcactagctgacattctcaaacctgtcaacccttacacaggccttcc

SEQ ID NO: 369997 - DNA, 120 bp, Artificial Sequence
  ENSG00000141665_5 (sequence is synthesized)
agttaagaccaaagaggccctcagaatatttggtttaggttgggcaattatactgaaagaaaaaggtggaaaagaatatatcatggagcatgttgatctttccataaatgacacatcagt

SEQ ID NO: 369998 - DNA, 120 bp, Artificial Sequence
  ENSG00000141665_6 (sequence is synthesized)
ctccgatggcattctttaattgcaaagtacaatctgagtcatttgaccatatctaccatgattggctgtgacagactcattcggatcttctgcctgcaccctggcctcctggtgggagtg

SEQ ID NO: 369999 - DNA, 120 bp, Artificial Sequence
  ENSG00000141665_7 (sequence is synthesized)
tggaagaaggaggaagaactggcttttgttatggcaaatcttcattttcatcaccttgtggagaggagcacattaggctcggctactatcccctatgaactgcctccacatagccccttt

SEQ ID NO: 370000 - DNA, 120 bp, Artificial Sequence
  ENSG00000141665_8 (sequence is synthesized)
ttggatgatagccccgagtatggactgcacggctaccaactccatgttgatctgcacagcggtggggttttctacctatgtggtacatttcgcaatctcttcaccaagagaggaaatatt

SEQ ID NO: 370001 - DNA, 120 bp, Artificial Sequence
  ENSG00000141665_9 (sequence is synthesized)
gaaaatggacatgtgaagctcattgttatacatttaaaaaataacagagaacacctacctcttattggaaaagttggcctctcgtggaaaactgatatttttgatggctgtataaagagt

SEQ ID NO: 370002 - DNA, 120 bp, Artificial Sequence
  ENSG00000141665_10 (sequence is synthesized)
tgttccatgatggacgtaactcttttggatgaacatgggaaacccttttggtgtttcagttccccggtgtgcctgagatcgcctgccacaccctctgacagctctagcttcttgggacag

SEQ ID NO: 370003 - DNA, 120 bp, Artificial Sequence
  ENSG00000141665_11 (sequence is synthesized)
acatacaacgtggactacgttgatgcggaaggaagagtgcacgtggagctggtgtggatcagagagaccgaagaataccttattgtcaacctggtcctttatcttagtatcgcaaaaatc

SEQ ID NO: 370004 - DNA, 120 bp, Artificial Sequence
  ENSG00000141665_12 (sequence is synthesized)
aaccattggtttgggactgaatattagcagtaggtggcaaattattgttgttatttagttgtttatttttgactggctttgttcttggtgttgaaaattaaaataaagcaaatctgcaga

SEQ ID NO: 370005 - DNA, 120 bp, Artificial Sequence
  ENSG00000141665_13 (sequence is synthesized)
agcccgtcactgcgcggccccgctctcttcaccgtgtattttattcgtccagcttggcgcaaggcccgtggccgtcttcaacgtgagaaggcctacagtgagagtgtatatttctaaacc

SEQ ID NO: 370006 - DNA, 120 bp, Artificial Sequence
  ENSG00000141665_14 (sequence is synthesized)
tgattgagtttttatttcattatgaaattaaaggttgaggtgagggaaccaattttgatgtccgagttaagaattgccctcactggtcactttataatcttttggcaccagtatcctccc

SEQ ID NO: 370007 - DNA, 120 bp, Artificial Sequence
  ENSG00000141665_15 (sequence is synthesized)
ctcttcagaactggctctgtctccttcaccaccatcactctcaatgccaccttctgggggtagcccctactcatcttctctactgatgcttccttattatttttccatgctctctgcttt

SEQ ID NO: 370008 - DNA, 120 bp, Artificial Sequence
  ENSG00000141665_16 (sequence is synthesized)
ccccagacttcttcccttctttcttaaaggaatgtggtaaatttgccagcagggcccgtgccgctccaggatgagagtaaagagaaaccagcctttctcctctacgtactgcatcactgt

SEQ ID NO: 370009 - DNA, 120 bp, Artificial Sequence
  ENSG00000141665_17 (sequence is synthesized)
ttgccacacctaccaaagccaggacagaggctggggcagacagaggaaaggagggagcttacgccaagcaggaaaaacgagggagtggagaatgccccattctcacttatctgattattt

SEQ ID NO: 370010 - DNA, 120 bp, Artificial Sequence
  ENSG00000141665_18 (sequence is synthesized)
ccttttggtttcattctactgtagcctgtaaacttggagtttcatgtaaggacttgcttagattcaagtttaacatttctggtaaaaatattttaaaagggaagttatgtacttcatttt

SEQ ID NO: 370011 - DNA, 120 bp, Artificial Sequence
  ENSG00000141665_19 (sequence is synthesized)
gcattatattgagaggtatataatgtcaggttgtcccattattagtaatgcctggttttatcatctggttaagatggtgaccactagatatcttcattattaaaagtattcttttccaaa

SEQ ID NO: 370012 - DNA, 120 bp, Artificial Sequence
  ENSG00000141665_20 (sequence is synthesized)
aggagacattgcgttcagctggagttgttacaaagtttagctggaggtttccttttccttttggtcttttcccagttcctctggcaaccctccccaaggatccttcctaggcaaggcaga

SEQ ID NO: 370013 - DNA, 120 bp, Artificial Sequence
  ENSG00000141665_21 (sequence is synthesized)
gatgattgaaaacaagttctgtgaggagaaagaggaaaggggccagtgggaggaaggctcatgagaggttctgacatgcatccccccccagaaggttgggagtgatttattctggagaag

SEQ ID NO: 370014 - DNA, 120 bp, Artificial Sequence
  ENSG00000141665_22 (sequence is synthesized)
gaacccagtggagaaagagatgcttcggacaggatgggaaataaggagcgagcttctagagttctggaggctggaagcaccaaggtcaaagcaccagcagatgggtgtctggtgagggcc

SEQ ID NO: 370015 - DNA, 120 bp, Artificial Sequence
  ENSG00000141665_23 (sequence is synthesized)
ctcttcctagttcctagaggcaccttctagcagtgtcctcacctggtaaaaggagtgagacagctctgtgggcctcttttataaggacctcagtcctattcatgagagctctgcccccgt

SEQ ID NO: 370016 - DNA, 120 bp, Artificial Sequence
  ENSG00000141665_24 (sequence is synthesized)
actgcctaaacagtcacattggtgatcagattttaagacacggattttgggacgcacaaacattcagaccatagcacttggactagggcagtggcaatggagatggacaaaattaaagcg

SEQ ID NO: 370017 - DNA, 120 bp, Artificial Sequence
  ENSG00000141665_25 (sequence is synthesized)
gctcatctgctttccagaagcatcttcagcgtgaagaagtaaaatgagccagtgcatcagaagtatcagcatgcataatgaaaggggccaggggtcaagctttctgcaggctctgctgcc

SEQ ID NO: 370018 - DNA, 120 bp, Artificial Sequence
  ENSG00000141665_26 (sequence is synthesized)
atggcgactggacgcggtcggatcttgcagcagcactggctcggcctccagacgctgcgcgggcccagcaggggcggtggcgcggcccgggggcgcgccagggcctttgggtgcaggtct

SEQ ID NO: 370019 - DNA, 120 bp, Artificial Sequence
  ENSG00000141665_27 (sequence is synthesized)
tgctcatctgctttccagaagcatcttcagcgtgaagaagtaaaatgagccagtgcatcagaagtatcagcatgcataatgcctacagtgagagtgtatatttctaaacctttgggtgaa

SEQ ID NO: 370020 - DNA, 120 bp, Artificial Sequence
  ENSG00000141665_28 (sequence is synthesized)
aatgccttcagaaatcttgctgaagatattttcctacttggatgctgtgagccttctgtgtactggatgtgtgagcaggcgcttttatcatctagccaatgacaaatgaacgttcaactg

SEQ ID NO: 370021 - DNA, 120 bp, Artificial Sequence
  ENSG00000141665_29 (sequence is synthesized)
agcttggcgcaaggcccgtggccgtcttcaacgtgagaagggtatggaagaacgaccggaggaaatcctttctaccctgcaacgtgggaaaggggccaggggtcaagctttctgcaggct

SEQ ID NO: 370022 - DNA, 74 bp, Artificial Sequence
  ENSG00000141665_30 (sequence is synthesized)
agctgtcagtggagtattgaagtttcccactgttattgtgttgctgtgtatctcatttcttaggtctagtagta

SEQ ID NO: 370023 - DNA, 89 bp, Artificial Sequence
  ENSG00000141665_31 (sequence is synthesized)
ttttaggactgtgatattttcctgttggacaaagcgttttatcattacataatgtccccctttgtctttttaaactgctgttgctgtaa

SEQ ID NO: 370024 - DNA, 120 bp, Artificial Sequence
  ENSG00000141665_32 (sequence is synthesized)
taatgtccccctttgtctttttaaactgctgttgctgtaaagtttgttttaatgatataagaatagctacttttgcttgctgttggtgtccatttgcatggaatgtattttcccacccct

SEQ ID NO: 370025 - DNA, 120 bp, Artificial Sequence
  ENSG00000141665_33 (sequence is synthesized)
tatgtgagtccttatgtgttaggtgagtttcttgaaagcagcaactagtaggttggtgaattatctattctgccattctgtatcttttaaatggagcatttaggccacattcaatgttag

SEQ ID NO: 370026 - DNA, 120 bp, Artificial Sequence
  ENSG00000141665_34 (sequence is synthesized)
aaatggagcatttaggccacattcaatgttagtattgggatgtaaggtactattccattcattgtgctatttgttgcctgtatacctttttttaattgtatttttgttttataggtcctg

SEQ ID NO: 370027 - DNA, 120 bp, Artificial Sequence
  ENSG00000141665_35 (sequence is synthesized)
gttttgttttatgtgtttccaggatttgtttcaagatttagccctccttttggccgttcttgtagtgctggcttgatagtggcaaattctctcagtgttagtttatctgaagaagactgt

SEQ ID NO: 370028 - DNA, 120 bp, Artificial Sequence
  ENSG00000141665_36 (sequence is synthesized)
atctttctttcatttatgaagcttaatttcactggatacaaaatttttggctgatagttgttttgtttaaggaggcttaacatagggccccaatcccttctagcttgtagaatttctgct

SEQ ID NO: 370029 - DNA, 67 bp, Artificial Sequence
  ENSG00000141665_37 (sequence is synthesized)
catagggccccaatcccttctagcttgtagaatttctgctgagaaatctgttgttaatctgatagat

SEQ ID NO: 370030 - DNA, 72 bp, Artificial Sequence
  ENSG00000141665_38 (sequence is synthesized)
tttttctttgagatggagtctcgctctttgcccatactggagtgcagtggcgtaatcttggctcagtgcaac

SEQ ID NO: 370031 - DNA, 70 bp, Artificial Sequence
  ENSG00000141665_39 (sequence is synthesized)
gcctcctgaatagctgggactaaagttctgctatgttggccaagctagtcttgaactcctggcctcaagt

SEQ ID NO: 370032 - DNA, 120 bp, Artificial Sequence
  ENSG00000141665_40 (sequence is synthesized)
acagatgtgagccaccgcgccttgcctactttgtcttaactttagataacctgatgacagtgtgcctagatggtgatctttttgtgatgaatctcccaggtgttctttgtgcttcttata

SEQ ID NO: 370033 - DNA, 120 bp, Artificial Sequence
  ENSG00000141665_41 (sequence is synthesized)
aggtttggtcatttaacatatcttcaaacttcttggaggctttgttcattttttcttattcttttttctgtgtctttgttagactgggttaattcaaaaaccttgtctttgagctctgaa

SEQ ID NO: 370034 - DNA, 120 bp, Artificial Sequence
  ENSG00000141665_42 (sequence is synthesized)
ttcctgaagttttaattgttttttatttatgctctcaatttcactgaagatttcccccctcatttcttatatctttttttggtttccttaaattggactttacctttctctggtgcctcc

SEQ ID NO: 370035 - DNA, 120 bp, Artificial Sequence
  ENSG00000141665_43 (sequence is synthesized)
ttgattagcttattaactgaccttctggattctttttcaggtaaatcaaggattttttcttggtttggatttattgctggtaagctagtgtgatttttgggggatattagccttgttttg

SEQ ID NO: 370036 - DNA, 120 bp, Artificial Sequence
  ENSG00000141665_44 (sequence is synthesized)
agccttgttttgtcgtattacctgaattgtttttctggttctttctcatttgggtaggctatgttagaaggaaggtctagggttcaaggctgctgttcagattcttttgtcccatggggt

SEQ ID NO: 370037 - DNA, 120 bp, Artificial Sequence
  ENSG00000141665_45 (sequence is synthesized)
tagtactctctgtgttttcctagggatgtggtttcctgagggctaagttgtagtgattgttatctctcttctggatctagccatctggtaggtctacctgctccaggctggtactggggg

SEQ ID NO: 370038 - DNA, 120 bp, Artificial Sequence
  ENSG00000141665_46 (sequence is synthesized)
aaggagggggtgtctgcacagagtcctgtgatgtgaactgtctgcaggtctctcagccatggataccagctcctgttccagtggaggtggcaagggagtgaagtggactctgcaagggtc

SEQ ID NO: 370039 - DNA, 120 bp, Artificial Sequence
  ENSG00000141665_47 (sequence is synthesized)
cttagttgtaattttgtttattgcactatttttgtgctagttggcctcctgccaggaggttgtgcttttaagagagcatcggctgtagtagtatagggaggatcaggtggtaggtggggc

SEQ ID NO: 370040 - DNA, 67 bp, Artificial Sequence
  ENSG00000141665_48 (sequence is synthesized)
gcagggaaggaccatcaggtggagacagggctaggcgtatctgagctcagactctccttgggtgggt

SEQ ID NO: 370041 - DNA, 120 bp, Artificial Sequence
  ENSG00000141665_49 (sequence is synthesized)
ctgtggctgctgtgggggatggaggtgtggttcccacatcaatggagctgtgttcccaggaagactatggctgcctctgctgtgtcatgcagttcctctggcaaccctccccaaggatcc

SEQ ID NO: 370042 - DNA, 120 bp, Artificial Sequence
  ENSG00000141668_0 (sequence is synthesized)
agtccgaggtccagaggagcagacacacagacccgggccggaggcccctcttctagccctgcgggaaccggacagttccccaactgggactctggaaccacagctcctaaatcatcaaat

SEQ ID NO: 370043 - DNA, 120 bp, Artificial Sequence
  ENSG00000141668_1 (sequence is synthesized)
caactgggactctggaaccacagctcctaaatcatcaaattctcaagctttttttttccctctcttcgtcccagccatcccagtcttcttcttcttttttttttttttaacttattgttt

SEQ ID NO: 370044 - DNA, 120 bp, Artificial Sequence
  ENSG00000141668_2 (sequence is synthesized)
tattaagacttggagggaattggggaaagaaaagaaagaatctaaaagaagagaagcgaccggtgcttttaagggtgtctaattttcaaaagagacgtctgggagtattttgctctgggc

SEQ ID NO: 370045 - DNA, 120 bp, Artificial Sequence
  ENSG00000141668_3 (sequence is synthesized)
gtttggagcaacttcgcggacagcggagctcgcccagcatggatgttccaggttcacaggcgcctttcttctgagaacgaccctggccttgaacgtcagagccggggacgaaggcccccg

SEQ ID NO: 370046 - DNA, 80 bp, Artificial Sequence
  ENSG00000141668_4 (sequence is synthesized)
cccggaggctgctgcgagctccgcgcgttccttcgcgcccttccgcgccgctcgcgccggcgccggcctccacccccgcg

SEQ ID NO: 370047 - DNA, 120 bp, Artificial Sequence
  ENSG00000141668_5 (sequence is synthesized)
ggggggcgctgcgcgagccgggcggctgcggatcctgcctgggggtggcgctggccctgctgttgctgctactgcccgcctgctgccccgtgcgggcgcagaacgacacggagcccatcg

SEQ ID NO: 370048 - DNA, 120 bp, Artificial Sequence
  ENSG00000141668_6 (sequence is synthesized)
cgtgcgggcgcagaacgacacggagcccatcgtgctggagggcaagtgcctggtggtgtgcgactccagcccgtcggcggacggcgccgtcacctcctccctaggcatctccgtgcgctc

SEQ ID NO: 370049 - DNA, 120 bp, Artificial Sequence
  ENSG00000141668_7 (sequence is synthesized)
cggcagcgccaaggtggccttctccgccacgcggagcaccaaccacgagccgtccgagatgagcaaccgcaccatgaccatctatttcgaccaggtattagtaaatattggcaaccactt

SEQ ID NO: 370050 - DNA, 120 bp, Artificial Sequence
  ENSG00000141668_8 (sequence is synthesized)
tgatcttgcttccagtatatttgtagcaccgagaaaagggatttatagcttcagcttccacgtggtcaaagtgtataacagacaaaccatccaggtcagtttaatgcagaatggctaccc

SEQ ID NO: 370051 - DNA, 120 bp, Artificial Sequence
  ENSG00000141668_9 (sequence is synthesized)
agtgatctcggcctttgcaggagaccaggatgtcaccagagaagctgctagcaatggcgtgctgctgctcatggaaagggaagacaaagtgcatctcaaacttgagagaggcaacctcat

SEQ ID NO: 370052 - DNA, 120 bp, Artificial Sequence
  ENSG00000141668_10 (sequence is synthesized)
ggggggctggaaatactccacattctcgggcttcttggtgtttcctctataaacacagagccccctagatggtgggggaatggcaaactggacccaggactccgccctttaaaacaccct

SEQ ID NO: 370053 - DNA, 120 bp, Artificial Sequence
  ENSG00000141668_11 (sequence is synthesized)
actgacaattcctcgggaacctggcctctaattagttttagatgacaaggtcttaaggagaaatgaaattatcgatttgagcaatttgtacctgtgattgtaaagtcaatatcggatttt

SEQ ID NO: 370054 - DNA, 120 bp, Artificial Sequence
  ENSG00000141668_12 (sequence is synthesized)
attgttgggaccatggacctcttttgtttgtatgttgtattgtcgtcccaacggaaggagagctcctgactccaggatgggctgcaggttgcagtcagggcttgaagtaggagcccagca

SEQ ID NO: 370055 - DNA, 120 bp, Artificial Sequence
  ENSG00000141668_13 (sequence is synthesized)
aagaaccacctgctggacagtccttgacatgtgttctgtgtgtgtctgtatagccttaagaaaaagaatggcttcactttcattctgtattcttccccccaccatgtggctgggaggact

SEQ ID NO: 370056 - DNA, 120 bp, Artificial Sequence
  ENSG00000141668_14 (sequence is synthesized)
tgggagggggatggggacattgggaacctgtcaagaagtgctttatccagagaagcaaattttgcacgattggactgcaatttttgttttgtattgtttgtgttttttcttgaaaagctt

SEQ ID NO: 370057 - DNA, 120 bp, Artificial Sequence
  ENSG00000141668_15 (sequence is synthesized)
tacttttctttccacactcagctctccctcctcaaccccacttttatttttcttgctggggttgaggagagaaaatatagaattcctggataagaccaaacaaaacaaaacattaaaata

SEQ ID NO: 370058 - DNA, 120 bp, Artificial Sequence
  ENSG00000141668_16 (sequence is synthesized)
cctgtatgttttgttttagacgagaccaaactaaacaaaaagtatctgtttatcaaagtaaaagtaacacaatggacaattctgcttattctctcaaagagattctaagatgcaccttta

SEQ ID NO: 370059 - DNA, 120 bp, Artificial Sequence
  ENSG00000141668_17 (sequence is synthesized)
gaactattaatagcaacctgcatttttttttaatttatacttcagaatcctttaagaacctggtgttcctgagtggtcctgaatcatataagttggtaatggaagctgtaatgaccaagt

SEQ ID NO: 370060 - DNA, 120 bp, Artificial Sequence
  ENSG00000141668_18 (sequence is synthesized)
cccctaaacatactatgtctttgccacgtgtgctgtgacttctctgtgggtgatttaatttatttggatccacctctgagtgagcgcacagtgatcaggtgcttcaaagccaacagacca

SEQ ID NO: 370061 - DNA, 120 bp, Artificial Sequence
  ENSG00000141668_19 (sequence is synthesized)
gctcctcttcctccggatcctcttttgatctgcccaggaaagggatgcattgacactctcctgcatgcacctggcgagaagccacctgaaagtcactgtggttaaagatattggtggagg

SEQ ID NO: 370062 - DNA, 120 bp, Artificial Sequence
  ENSG00000141668_20 (sequence is synthesized)
taccccaggagcactgttacaaatccttcttgttttggcatctcgtacaacattattaagacacagctgagagttgatgggtgtgtaatgcatatgccaaggaaatgtcactaatcccaa

SEQ ID NO: 370063 - DNA, 120 bp, Artificial Sequence
  ENSG00000141668_21 (sequence is synthesized)
agcaatcaaaaaggagacctcaaaccagatgttaatttgttctttgtgtaacaatgtaaccaaaatattgatgataaaagtcataatttaagattcagaataaatgggtttgatgtctgg

SEQ ID NO: 370064 - DNA, 120 bp, Artificial Sequence
  ENSG00000141668_22 (sequence is synthesized)
ataagcataaatgttctaagagtgtacaacaggactttgcgtccgtcagtgaggataacaagtctgtcattggatagatcctaagtgaaattagatataaaagagaaatgaattgaattt

SEQ ID NO: 370065 - DNA, 120 bp, Artificial Sequence
  ENSG00000141668_23 (sequence is synthesized)
tctgtcattggatagatcctaagtgaaattagatataaaagagaaatgaattgaatttactggacaacattcttcagatctgctgggacatattttcattttcttgagcatctcaacatc

SEQ ID NO: 370066 - DNA, 120 bp, Artificial Sequence
  ENSG00000141668_24 (sequence is synthesized)
agcaaacctcagccttgcggccaggactcccccgtcttctgtcggagtccgccggtccgcagcctgcggcagggaggcccgggcacccgcaggtggcgccccacgtccgtgtttgcgccc

SEQ ID NO: 370067 - DNA, 120 bp, Artificial Sequence
  ENSG00000141668_25 (sequence is synthesized)
tcatctacagcagggctaaattctacctgaatttatcagtttccagaatgtaaaattgaggtgaaggagttgaggtgaaaggaagaagcagctccagaggcttaaatggagaatgcttta

SEQ ID NO: 370068 - DNA, 120 bp, Artificial Sequence
  ENSG00000141668_26 (sequence is synthesized)
ttcttttctaaaagctttgtaaggaagacagcgagcatagccttgtgagactgagaataggcatcccgaggtgtttgtcttaacaatggaacccagagtgtctgtctcagtcctgccctt

SEQ ID NO: 370069 - DNA, 120 bp, Artificial Sequence
  ENSG00000141668_27 (sequence is synthesized)
gagtggagctgaagtggtgctcacagctgggttgaagaagctgaaacaggcatatttcacaagtcatttcggcgattgtcattggcagcatttcacattgcgctgggaactgcatgttat

SEQ ID NO: 370070 - DNA, 120 bp, Artificial Sequence
  ENSG00000141668_28 (sequence is synthesized)
tcatctataatgagtgtgtaagaaataacagcaaaggtattccagttgaagtttgtattcccattaggtaacaaaatcttaaacccaggattttgatgttgttgttggctgtttgtttta

SEQ ID NO: 370071 - DNA, 120 bp, Artificial Sequence
  ENSG00000141668_29 (sequence is synthesized)
aaaggcaggccatcttattataaagcagttgtgcatttatggatgaggaggatggagacagcatccagacaaagtggccagagtctgtgttgagcatctgaaagaaattgggtcatcacg

SEQ ID NO: 370072 - DNA, 120 bp, Artificial Sequence
  ENSG00000141668_30 (sequence is synthesized)
ggggtcccgccactcttgaaattctgcttatgaaacactcacccctgcccttttatctgaggaaagccatctgcagggtcatgcgcacattccaggtggctaattttgtcattgttttgc

SEQ ID NO: 370073 - DNA, 120 bp, Artificial Sequence
  ENSG00000141668_31 (sequence is synthesized)
atgttgtagagttcccattagcttaagctaaggatgtccaagctgccggttctctatttattcaagctcatttacagggcaccatggctcaggcaagggagcagcacattgctcagggaa

SEQ ID NO: 370074 - DNA, 120 bp, Artificial Sequence
  ENSG00000141668_32 (sequence is synthesized)
aattaaggaaaaacaggagtagcaaatgtttttctacaaaggtctttcattcaccacccatcatcaaccacctactgtgtgagtccagagtgtgccaggaactgagaaacactggagatc

SEQ ID NO: 370075 - DNA, 120 bp, Artificial Sequence
  ENSG00000141668_33 (sequence is synthesized)
caaacctcacagagaccattgtctctgggagcacgtgaagttaggtcccaagcttgaacttacagaagtgatctcctttaattggcctcttgccccatagccgcttctctacccattcag

SEQ ID NO: 370076 - DNA, 120 bp, Artificial Sequence
  ENSG00000141668_34 (sequence is synthesized)
aatggaacttttttgtttgtttgtttgtttgtttgttcgtttttttgtcaaacaaggcatcatgctgatgcccccatattcccacagacctccctggactcaatttaggatttgtttaac

SEQ ID NO: 370077 - DNA, 120 bp, Artificial Sequence
  ENSG00000141668_35 (sequence is synthesized)
aagcttaccatcttcgattcctttctctctgccctgcccctcaacttacaaaattcacagccagtttttgaatgcataattaaaatatgctttagaaatcttgattagttacaatttatt

SEQ ID NO: 370078 - DNA, 120 bp, Artificial Sequence
  ENSG00000141668_36 (sequence is synthesized)
aaaatacctttgagattacttcctgctataggatcttttaacttcagcactgcctccttcctggggaagccagaatgctgaggatgctgaatttgtgttcccagccgctgatgaaggagg

SEQ ID NO: 370079 - DNA, 120 bp, Artificial Sequence
  ENSG00000141668_37 (sequence is synthesized)
gaaatggcctgtctgctttcctgggaggagcggggacggggcaaaagtgcagacgggcgcgtaagttcgcagaaacctgcaggggctgccgccccgctgagaaagagagaatccccgtgg

SEQ ID NO: 370080 - DNA, 120 bp, Artificial Sequence
  ENSG00000141668_38 (sequence is synthesized)
tctggaaaccagagctggagaataacccaagcctgggattccgtcgttggaatcggtccttcgcctaagagaggaatcccaggggtttcacccaagggggctcgctagtggctgcaggga

SEQ ID NO: 370081 - DNA, 120 bp, Artificial Sequence
  ENSG00000141668_39 (sequence is synthesized)
cagagatggccagacttgaggggaagattacctgcccatcccatttcctttccagctccccttcctgctgagagccactttttcatcgttcaatgaaattgtctacattcaccatccttc

SEQ ID NO: 370082 - DNA, 120 bp, Artificial Sequence
  ENSG00000141668_40 (sequence is synthesized)
aatttgttcctgctacctcatttttcctggatgacagacaagagctcgggagccacaagtgcagatactcaaaaaaaaaggctgtcacactggccctttgccctcagtagtggaaggcag

SEQ ID NO: 370083 - DNA, 120 bp, Artificial Sequence
  ENSG00000141668_41 (sequence is synthesized)
gtcctccacagcaaagtgtattccacccattttcttagagagagagaggcaagcatcctattattagacagattctcaatgtgcctctcacccctctgacattcagactcctggctgtta

SEQ ID NO: 370084 - DNA, 120 bp, Artificial Sequence
  ENSG00000141668_42 (sequence is synthesized)
actctgcccctcatcctgtgcctatgaagaccccagactcagtcagagagaaagggagaagcagctggacttctgaaagaagaaacttgacttcagagggaagacttgatggcttgattt

SEQ ID NO: 370085 - DNA, 120 bp, Artificial Sequence
  ENSG00000141682_0 (sequence is synthesized)
agggaagttctcactggacaaaagcgtggtctctggcgcggggatctcagagtttcccgggcactcaccgtgtgtagttggcatctccgcgcgtccggacacccgatcccagcatccctg

SEQ ID NO: 370086 - DNA, 120 bp, Artificial Sequence
  ENSG00000141682_1 (sequence is synthesized)
cctgcaggactgttcgtgttcagctcgcgtcctgcagctgtccgaggtgctccagttggaggctgaggttcccgggctctgtagctgagtgggcggcggcaccggcggagatgcctggga

SEQ ID NO: 370087 - DNA, 120 bp, Artificial Sequence
  ENSG00000141682_2 (sequence is synthesized)
agaaggcgcgcaagaacgctcaaccgagccccgcgcgggctccagcagagctggaagtcgagtgtgctactcaactcaggagatttggagacaaactgaacttccggcagaaacttctga

SEQ ID NO: 370088 - DNA, 120 bp, Artificial Sequence
  ENSG00000141682_3 (sequence is synthesized)
atctgatatccaaactcttctgctcaggaacctgactgcatcaaaaacttgcatgaggggactccttcaaaagagttttctcaggaggtgcacgtttcatcaatttgaagaaagactgca

SEQ ID NO: 370089 - DNA, 120 bp, Artificial Sequence
  ENSG00000141682_4 (sequence is synthesized)
ttgtaattgagaggaatgtgaaggtgcattcatgggtgcccttggaaacggaagatggaatacatcaaagtgaatttctgttcaagttttcccagattatcattctttgggatgagagaa

SEQ ID NO: 370090 - DNA, 120 bp, Artificial Sequence
  ENSG00000141682_5 (sequence is synthesized)
cattataaaaccactttgtttattttaaagcaagaatggaagacccttgaaaataaagaagtaattattgacacatttcttttttacttagagaatcgttctagtgtttttgccgaagat

SEQ ID NO: 370091 - DNA, 120 bp, Artificial Sequence
  ENSG00000141682_6 (sequence is synthesized)
taccgctggcctactgtgaagggagatgacctgtgattagactgggcggctggggagaaacagttcagtgcattgttgttgttgctgtttttggtgttttgcttttcagtgccaactcag

SEQ ID NO: 370092 - DNA, 120 bp, Artificial Sequence
  ENSG00000141682_7 (sequence is synthesized)
cacattgtatatgattcggtttatacatattaccttgttataatgaaaaaactcattctgagaacactgaaatgttatactcagtgttgatttcttcggtcactacacaacgtaaaatca

SEQ ID NO: 370093 - DNA, 120 bp, Artificial Sequence
  ENSG00000141682_8 (sequence is synthesized)
cttctgttcagatgatctttcattcaatgtgttcctgttgggcgttactagaaactatggaaaactggaaaataactttgaaaaaattggataaagtataggagggttacttggggccag

SEQ ID NO: 370094 - DNA, 120 bp, Artificial Sequence
  ENSG00000141682_9 (sequence is synthesized)
taaatcagtagactgaacattcaatataataaaagaacatggggattttgtataaccagggataataaaaagaaaaaagaagttaatttttaattgatgtttttgaaacttagtagaaca

SEQ ID NO: 370095 - DNA, 120 bp, Artificial Sequence
  ENSG00000141682_10 (sequence is synthesized)
aatattcagaagtaacttgataagatatgaatgtttctaaagaagtttctaaaggttcggaaaatgctccttgtcacattagtgtgcatcctacaaaaagtgatctcttaatgtaaatta

SEQ ID NO: 370096 - DNA, 120 bp, Artificial Sequence
  ENSG00000141682_11 (sequence is synthesized)
agaatattttcataattggaatatacttttcttaaaaaaaaggaacagttagttctcatctagaatgaaagttccatatatgcattggtgaatatatatgtatacacatacttacatact

SEQ ID NO: 370097 - DNA, 120 bp, Artificial Sequence
  ENSG00000141682_12 (sequence is synthesized)
tatatgggtatctgtatagataatttgtattagagtattatatagcttcttagtagggtctcaagtaagtttcattttttttatctgggctatatacagtcctcaaataaataatgtctt

SEQ ID NO: 370098 - DNA, 120 bp, Artificial Sequence
  ENSG00000141682_13 (sequence is synthesized)
aatgtcttgattttatttcagcaggaataattttatttattttgcctatttataattaaagtatttttctttagtttgaaaatgtgtattaaagttacatttttgagttacaagagtctt

SEQ ID NO: 370099 - DNA, 120 bp, Artificial Sequence
  ENSG00000141682_14 (sequence is synthesized)
ttgaatttttagttaaaatgtcttaatgtaggttgtagtcactttagatggaaaattacctcacatctgttttcttcagtattacttaagattgtttatttagtggtagagagttttttt

SEQ ID NO: 370100 - DNA, 120 bp, Artificial Sequence
  ENSG00000141682_15 (sequence is synthesized)
tttcagcctagaggcagctattttaccatctggtatttatggtctaatttgtatttaaacatatgcacacatataaaagttgatactgtggcagtaaactattaaaagttttcactgttc

SEQ ID NO: 370101 - DNA, 120 bp, Artificial Sequence
  ENSG00000141682_16 (sequence is synthesized)
acggcgagggaccaagccggatttgcgattgggatgcagctgcgtttcaccaggggcaaaaagctcctttcctcctctctttcctcctcgccacttgcccttccccggggccacgaggaa

SEQ ID NO: 370102 - DNA, 120 bp, Artificial Sequence
  ENSG00000141696_0 (sequence is synthesized)
tctttcgcgggcacttcgaattctagtcccctccaggtgggtggtgaagccgcggagtgtgagaggcatctccgtgctcatccgtgaccccagctgtactccaagggaaggcatctccag

SEQ ID NO: 370103 - DNA, 120 bp, Artificial Sequence
  ENSG00000141696_1 (sequence is synthesized)
ggaagagcagcttggtcccgcaaaagctggactgaaagaaggactttgtgacttgggatgtgacgggcacggagatggagtggggggtggtggcagcgcaaggtgtgcaggtgacagcag

SEQ ID NO: 370104 - DNA, 120 bp, Artificial Sequence
  ENSG00000141696_2 (sequence is synthesized)
gggacacccccaaggcaggagcccgggccgacggagaggacttaacgacactatcggaccctctgggaaaagaggggagacgtcgtgacccaggccccgccccaccttgccgcctcgtgc

SEQ ID NO: 370105 - DNA, 80 bp, Artificial Sequence
  ENSG00000141696_3 (sequence is synthesized)
ccggccctgtccccttccgtccgcggggcagccagctcagctccggagagccggcggcgcggcgggcatggctcgggtgg

SEQ ID NO: 370106 - DNA, 120 bp, Artificial Sequence
  ENSG00000141696_4 (sequence is synthesized)
cgtgggggctgctgtggttgctgctgggcagcgccggggcgcagtacgagaagtacagcttccggggcttcccgcccgaggacctgatgccgctggccgcggcgtacgggcacgctctgg

SEQ ID NO: 370107 - DNA, 120 bp, Artificial Sequence
  ENSG00000141696_5 (sequence is synthesized)
agcagtacgagggagagagctggcgcgagagcgcgcgctacctggaggcggcgctgcggctgcaccggctcctgcgcgacagcgaggccttctgccacgccaactgcagcggccccgcgc

SEQ ID NO: 370108 - DNA, 120 bp, Artificial Sequence
  ENSG00000141696_6 (sequence is synthesized)
ccgcggccaagcccgatcccgacggcggccgcgcagacgagtgggcctgcgagctgcggctcttcggccgcgtcctggagcgagccgcctgcctgcggcgctgcaagcggacgctgcccg

SEQ ID NO: 370109 - DNA, 120 bp, Artificial Sequence
  ENSG00000141696_7 (sequence is synthesized)
ccttccaggtgccctacccgccgcggcagctgctgcgtgacttccagagccgcctgccctaccagtacctgcactacgcgctgttcaaggctaaccggctggagaaggcggtggcggcgg

SEQ ID NO: 370110 - DNA, 120 bp, Artificial Sequence
  ENSG00000141696_8 (sequence is synthesized)
cctacaccttcctccagaggaacccgaagcacgagctgaccgccaagtatctcaactactatcaggggatgctggacgtcgccgacgagtccctcacggacctagaggcccagccctacg

SEQ ID NO: 370111 - DNA, 120 bp, Artificial Sequence
  ENSG00000141696_9 (sequence is synthesized)
aggccgtgttcctccgggctgtgaagctctacaacagcggggatttccgcagcagcacggaggacatggagcgggccttgtcagagtacctggcagtctttgcccggtgcctggccggct

SEQ ID NO: 370112 - DNA, 120 bp, Artificial Sequence
  ENSG00000141696_10 (sequence is synthesized)
gtgaaggggcccatgagcaggtggacttcaaggacttctacccggccatagcagatctctttgcagagtccctgcagtgcaaggtggactgtgaggccaatttgacccccaatgtgggtg

SEQ ID NO: 370113 - DNA, 120 bp, Artificial Sequence
  ENSG00000141696_11 (sequence is synthesized)
gtaccactacctgcagtttgcctactataagttgaatgatgtgcgccaggctgcccgcagcgccgccagctacatgctcttcgaccccaaggacagcgtcatgcagcagaacctggtgta

SEQ ID NO: 370114 - DNA, 120 bp, Artificial Sequence
  ENSG00000141696_12 (sequence is synthesized)
ttaccggttccaccgggctcgctggggcctggaagaggaggacttccagccccgggaggaggccatgctctaccacaaccagaccgccgagctgcgggagctgctggagttcacccacat

SEQ ID NO: 370115 - DNA, 120 bp, Artificial Sequence
  ENSG00000141696_13 (sequence is synthesized)
gtacctgcagtcagatgatgagatggagctggaggagacagaaccgcccctggagcctgaggatgccctatctgacgccgagtttgagggggagggtgactacgaggagggcatgtatgc

SEQ ID NO: 370116 - DNA, 120 bp, Artificial Sequence
  ENSG00000141696_14 (sequence is synthesized)
tgactggtggcaggagccggatgccaagggtgacgaggccgaggctgagccagagcctgaactcgcatgagaaggggacaccccacaccgctcaagcttgggaagcctggtgccgatggc

SEQ ID NO: 370117 - DNA, 120 bp, Artificial Sequence
  ENSG00000141696_15 (sequence is synthesized)
ccccacaccgctcaagcttgggaagcctggtgccgatggccccaccctcaccagcctgggcagcagcaagaactatttattaaaaacttaagatgggccaggtgcggtggctcacacctg

SEQ ID NO: 370118 - DNA, 65 bp, Artificial Sequence
  ENSG00000141696_16 (sequence is synthesized)
ctgggaggcaaaggttgcagtgaaaaaaaaaacaagacgggccggcacggtggctcacgcctgta

SEQ ID NO: 370119 - DNA, 120 bp, Artificial Sequence
  ENSG00000141696_17 (sequence is synthesized)
tccatctcaaaaaaaaaaaaaaaaacttaagatggacacagctgactggacccccatcctgcctcacccatgggtgctgcaccccagacccatcctgccacttctatgtctctggaccac

SEQ ID NO: 370120 - DNA, 120 bp, Artificial Sequence
  ENSG00000141696_18 (sequence is synthesized)
ccacaggatggtggtggcattgcaggttggcaagtgggctgatggggtccgccctcctcactgctgagctcctcacctggacagtctcctggacaaggagtttccagctgctggctggag

SEQ ID NO: 370121 - DNA, 120 bp, Artificial Sequence
  ENSG00000141696_19 (sequence is synthesized)
tctcaggccaaattgcagagggtcctccagggtcctgaagagcactggactaagagtctagtggttccagggccctgaccagtaggtgctcaataaatgtttgttgttgaatgagtcata

SEQ ID NO: 370122 - DNA, 120 bp, Artificial Sequence
  ENSG00000141696_20 (sequence is synthesized)
taaaaaataaactcctggcttccatggaaggcaggatgggaaatggaaagaaagaatatgagttgaggttagagtcctggcttcagagcccagccccactgctgtgtggtcctgggaaga

SEQ ID NO: 370123 - DNA, 120 bp, Artificial Sequence
  ENSG00000141696_21 (sequence is synthesized)
ccatggccctttcctaatctattgcctcacctgcaaaatggcagtgatactgccacctcaccagcagtgtccagacgagggaggtatgaaggtacacatccactcctacctgctcccctc

SEQ ID NO: 370124 - DNA, 120 bp, Artificial Sequence
  ENSG00000141696_22 (sequence is synthesized)
cctaccttcattaccctcactgctgacctttgtccctctttcccaggaacaccctaggtaaccaatggaggaaatctgttggagttgagggccaggctggcaaatatggggcacatggtg

SEQ ID NO: 370125 - DNA, 120 bp, Artificial Sequence
  ENSG00000141696_23 (sequence is synthesized)
ccactcctgccttccttgtcagtggcagacattgctaatcgattgagggactctttgtcaccaaactctcagaatccttaacccagtgttccaagcagccacgatgatctgatgagcttg

SEQ ID NO: 370126 - DNA, 120 bp, Artificial Sequence
  ENSG00000141696_24 (sequence is synthesized)
tgagctgatacctattctctgatccttgagctagaagagggccagtgggcccagatcctaggagccctggcttcttgccatctggcaacagggtatggctcaccccccaccccgtccttc

SEQ ID NO: 370127 - DNA, 120 bp, Artificial Sequence
  ENSG00000141696_25 (sequence is synthesized)
tcacggacctagaggcccagccctacgaggtggggtggagggtcaggaggaggcttgtagaggagggctagtagaggaggggagatgttgggggcgccctgactccccctgccacgcccc

SEQ ID NO: 370128 - DNA, 120 bp, Artificial Sequence
  ENSG00000141696_26 (sequence is synthesized)
aggtatctgccacccagaccacggtgggcggtcctctcacccacagggcccggtaaggcagatgtccccttcatgcacgtggagcactgcgaatgcggaggagccagccgggaggaaggc

SEQ ID NO: 370129 - DNA, 120 bp, Artificial Sequence
  ENSG00000141696_27 (sequence is synthesized)
cttgtctgttgagaaagacgctgggtgcaggggccccagctgggagtgtccaaggggctggatcagaggccatgctctaccacaaccagaccgccgagctgcgggagctgctggagttca

SEQ ID NO: 370130 - DNA, 120 bp, Artificial Sequence
  ENSG00000141698_0 (sequence is synthesized)
gtcgttgtcccgcgagccgccgaccaggcctcgaacgggatggcagaggaggtgagcaccctgatgaaggccacggtcctgatgcggcagcctgggcgggtgcaggagatcgtgggcgcc

SEQ ID NO: 370131 - DNA, 120 bp, Artificial Sequence
  ENSG00000141698_1 (sequence is synthesized)
ctccgcaagggcggcggagaccggttacaggtgatttctgattttgacatgaccttgagcaggtttgcatataatggaaagcgatgcccttcttcttacaatattctggataatagcaag

SEQ ID NO: 370132 - DNA, 120 bp, Artificial Sequence
  ENSG00000141698_2 (sequence is synthesized)
atcatcagtgaggagtgtcggaaagagctcacagcgctccttcaccactattacccaattgagatcgacccacaccggaccgtcaaggagaagctacctcatatggtggaatggtggacc

SEQ ID NO: 370133 - DNA, 120 bp, Artificial Sequence
  ENSG00000141698_3 (sequence is synthesized)
aaagcacacaatctcctatgtcagcagaagattcagaagtttcagatagcccaggtggttagagagtccaatgcaatgctcagggagggatataagaccttcttcaacacactctaccat

SEQ ID NO: 370134 - DNA, 120 bp, Artificial Sequence
  ENSG00000141698_4 (sequence is synthesized)
aacaacattccccttttcatcttttctgcgggcattggtgatatcctggaagaaattatccgacagatgaaagtgttccaccccaacatccacatcgtgtctaactacatggattttaat

SEQ ID NO: 370135 - DNA, 120 bp, Artificial Sequence
  ENSG00000141698_5 (sequence is synthesized)
agcaacttgagggcaaaaccaatgtcatcctgctgggagactctatcggggacctcaccatggccgatggggttcctggtgtgcagaacattctcaaaattggcttcctgaatgacaagg

SEQ ID NO: 370136 - DNA, 120 bp, Artificial Sequence
  ENSG00000141698_6 (sequence is synthesized)
tggaggagcggcgggagcgctacatggactcctatgacatcgtgctggagaaggacgagactctggatgtggtcaacgggctactgcagcacatcctgtgccagggggtccagctggaga

SEQ ID NO: 370137 - DNA, 120 bp, Artificial Sequence
  ENSG00000141698_7 (sequence is synthesized)
tgcaaggcccctgaaggcgcaggctccagcccggcctgcaggccgtggtgaggaggggcgcctccccagagtctgctcccccgtgaacacagagcagaggccagggtggccagcagtggc

SEQ ID NO: 370138 - DNA, 120 bp, Artificial Sequence
  ENSG00000141698_8 (sequence is synthesized)
tgggtccttccgcgcccctccgtcctcctttccctgagcaccttcatcaccagaggcttgaaggaaccccgccatgtggcagggcacaggcactgttcctggtgaaccttggaccacagc

SEQ ID NO: 370139 - DNA, 120 bp, Artificial Sequence
  ENSG00000141698_9 (sequence is synthesized)
atgtcagtgctctagggattgtctactccagggattttcttcaaaatttttaaacatgggaagttcaaacaaatataatgtgtgaaacagatcaaaatttttaaaatgaaaaaaaagctg

SEQ ID NO: 370140 - DNA, 120 bp, Artificial Sequence
  ENSG00000141698_10 (sequence is synthesized)
ctctgattcaggggatgtgggtgggggtagaacctggacctcttggccctgggggcacatgggatgcttctaggaacacagtttgagaaccaccacaaattggcctgagaccccatccga

SEQ ID NO: 370141 - DNA, 120 bp, Artificial Sequence
  ENSG00000141698_11 (sequence is synthesized)
cgggatggcagaggaggtgaggagggaggaagcgtccggagtggggcgggcccggactccgacccccggggcgcttcgagccccccagctggtcaccgaggcaccgccgcttcacccagg

SEQ ID NO: 370142 - DNA, 120 bp, Artificial Sequence
  ENSG00000141698_12 (sequence is synthesized)
ccagtagccgccccctcgcgcaccccggccccgcctcacacgcgcgcccgagcgagccccgggctcccctcgggcccagcgtggcgcaggggtcagtggttctctcgggtctcgggacag

SEQ ID NO: 370143 - DNA, 120 bp, Artificial Sequence
  ENSG00000141698_13 (sequence is synthesized)
agatcgtgggcgccctccgcaagggcggcggagaccggttacagatttctcaatatggtcatgctgcttcctctaattggacagaaggcgcccacaccagtacctagggccttatcctcc

SEQ ID NO: 370144 - DNA, 120 bp, Artificial Sequence
  ENSG00000141698_14 (sequence is synthesized)
ggcggcggagaccggttacaggtacctctggggcgtgcgggggccggccgggctgggggcggctggagaggcttcctgcccattgggccttcccgctttgctctgccgcggacccctcct

SEQ ID NO: 370145 - DNA, 120 bp, Artificial Sequence
  ENSG00000141698_15 (sequence is synthesized)
cacccttgcccccacactaggagactgcgttttcctcagggttaacgggtactaattaggatcacttcccctctatccctctgtgtcactcggtaactcccctagggctttgcctacatc

SEQ ID NO: 370146 - DNA, 120 bp, Artificial Sequence
  ENSG00000141698_16 (sequence is synthesized)
tcttttgccttataggtgatttctgattttgacatgaccttgagcaggtttgcatataatggaaagcgatgcccttcttcttacaatattctggataatagcaagatcatcagtgaggag

SEQ ID NO: 370147 - DNA, 120 bp, Artificial Sequence
  ENSG00000141698_17 (sequence is synthesized)
agtgatccacctgcctcagcctcctaaagcactgggattgcaggtgtgagccaccgcccctggccatgaagttgcctcttctaggtgacttttttctcatactaagctgtaggacgttgc

SEQ ID NO: 370148 - DNA, 120 bp, Artificial Sequence
  ENSG00000141698_18 (sequence is synthesized)
aacctggggaagaaggggagggaagccactctagcttcttcaccctcaggcagttgtttatgggttactttttggccaggcgcggtggctcagacctgtaatcctagcactttgggaggc

SEQ ID NO: 370149 - DNA, 120 bp, Artificial Sequence
  ENSG00000141698_19 (sequence is synthesized)
accagcctggccaacatggtgaaagtccatctgtactaaaaatacagaaataagccgggcgtggtggtgtgtggctgtaatcccagctccttcgaggctgaggcaggagaattgcctgaa

SEQ ID NO: 370150 - DNA, 120 bp, Artificial Sequence
  ENSG00000141699_0 (sequence is synthesized)
attgtgacttgtcgggccacggccccggatgttgtggctgccgcggggagatggctgaggccgaaggggttcccacgaccccaggcccggcttcggggtcgactttcaggggccgccgag

SEQ ID NO: 370151 - DNA, 120 bp, Artificial Sequence
  ENSG00000141699_1 (sequence is synthesized)
atgtgtcaggctcctgggagcgggaccagcaggttgaggcggcgcagcgggccctggtggaggtgctggggccttacgagcctctgctgagtcgggtgcaggcagccctggtgtgggagc

SEQ ID NO: 370152 - DNA, 120 bp, Artificial Sequence
  ENSG00000141699_2 (sequence is synthesized)
ggccagctaggagcgctctgtggtgcctggggctgaacgcggctttctggttttttgccctgacatctcttcgtcttgtgtttttacttgcatttggcttgatgatcattgtgtgtattg

SEQ ID NO: 370153 - DNA, 120 bp, Artificial Sequence
  ENSG00000141699_3 (sequence is synthesized)
atcaatggaagaacaaaatctggcctgaaataaaagtgccaagacccgacgcattagacaatgagagctggggctttgtgcaccctcggttgctcagcgtgcccgagctctgccaccatg

SEQ ID NO: 370154 - DNA, 120 bp, Artificial Sequence
  ENSG00000141699_4 (sequence is synthesized)
tagctgaagtctgggttagtgggaccattttcataaggaatgttttgcttttcaaaaagcaaaacccaggcaagttctgcttgctgagctgtgggatactgacctttttggctgtcttgg

SEQ ID NO: 370155 - DNA, 120 bp, Artificial Sequence
  ENSG00000141699_5 (sequence is synthesized)
gccgctacgtccctgggcttctgctgtcctacttgatgcttgtcactgtcatgatgtggccccttgctgtgtaccaccgactgtgggatcgagcatatgtgcggctgaagccagctctgc

SEQ ID NO: 370156 - DNA, 120 bp, Artificial Sequence
  ENSG00000141699_6 (sequence is synthesized)
agcggctagacttcagtgtccgtggctacatgatgtccaagcagagagagagacaattacgccgcagagctctccacccagaacgagccatggacaaccacagtgacagcgaagaggagc

SEQ ID NO: 370157 - DNA, 120 bp, Artificial Sequence
  ENSG00000141699_7 (sequence is synthesized)
ttgctgccttctgtcctcagctggacgattctactgttgccagggaattggccatcacagactctgagcactcagacgctgaagtctcctgtacagacaatggcacattcaatctttcaa

SEQ ID NO: 370158 - DNA, 120 bp, Artificial Sequence
  ENSG00000141699_8 (sequence is synthesized)
ggggccaaacacctctaacggaaggctctgaagacctagatggtcacagtgatccagaggaatcctttgccagagaccttccagacttcccttccattaatatggatcctgctggcctgg

SEQ ID NO: 370159 - DNA, 120 bp, Artificial Sequence
  ENSG00000141699_9 (sequence is synthesized)
atgatgaggacgacactagcattggcatgcccagcttgatgtaccgttctccgccaggggctgaggagccccaggccccacctgccagccgggacgaggctgcgctgccggagctcctgc

SEQ ID NO: 370160 - DNA, 120 bp, Artificial Sequence
  ENSG00000141699_10 (sequence is synthesized)
ttggtgctcttcctgtaggatccaacctcaccagcaaccttgccagcctggtctcccagggtatgattcagctggccttgtcaggggcctcccaaccaggcccttctggagcacctgccc

SEQ ID NO: 370161 - DNA, 120 bp, Artificial Sequence
  ENSG00000141699_11 (sequence is synthesized)
agagagcaacgagaggcttcctccggtcccccagttcagacctggacactgatgctgagggggatgactttgaacttctggaccagtcggagctgagtcagctggaccctgccagttcta

SEQ ID NO: 370162 - DNA, 120 bp, Artificial Sequence
  ENSG00000141699_12 (sequence is synthesized)
ggagccactgaggcagagactccttttgggagtcactgtggtttaggtttttttctccccatcccacttaaggtgatggggcaagggaagaactcagctcccctcccctgaattatattt

SEQ ID NO: 370163 - DNA, 120 bp, Artificial Sequence
  ENSG00000141699_13 (sequence is synthesized)
gtatgctgggtggcctggctgatgctcagaggcctccttagagaggacactcactcccctcccaccagctggatgcccatttctgagctcagtcactgaagtgagagtgtgctcccccaa

SEQ ID NO: 370164 - DNA, 120 bp, Artificial Sequence
  ENSG00000141699_14 (sequence is synthesized)
gggaggcttctctccatcaggatggtactttgggggaacaaaatagtcagggatattggttcccctttgaggaggtgctgctgtttgcttttaggtatgagtgctcaggggccctcactg

SEQ ID NO: 370165 - DNA, 120 bp, Artificial Sequence
  ENSG00000141699_15 (sequence is synthesized)
atgcctgccttcctcctttcatcgcctctctagagcccccaaagtcaggcagcagctggagtagttacattgtcatcatctttttttttgagacagtttcgctctgttgcccaggctgga

SEQ ID NO: 370166 - DNA, 120 bp, Artificial Sequence
  ENSG00000141699_16 (sequence is synthesized)
ctttctgcaacgtctgccttccaggttgaagaggttctcctgcctcagcctccttagtagtgggattacaggtgcccgctactatgcccggctaatttttcttttggtatttttagtaga

SEQ ID NO: 370167 - DNA, 82 bp, Artificial Sequence
  ENSG00000141699_17 (sequence is synthesized)
gtgatttttttttttttttaaagcaaacttgtcctttggttttgcagaacaggcctgctccctctcatctagcccatcattt

SEQ ID NO: 370168 - DNA, 120 bp, Artificial Sequence
  ENSG00000141699_18 (sequence is synthesized)
tgcagaacaggcctgctccctctcatctagcccatcatttcttggggcctgaaccccagtggtccaaagtattgcttgtgaaatttaaaaaatgtgaatatgatgtggggatgggcctct

SEQ ID NO: 370169 - DNA, 120 bp, Artificial Sequence
  ENSG00000141699_19 (sequence is synthesized)
tctacattaccttggcccagggggatcagctggctgggaggattagtgagcacctctgtattttgaggtctgagtcttctggagctgtgtagttaatcttcggtttctgataacccctgg

SEQ ID NO: 370170 - DNA, 120 bp, Artificial Sequence
  ENSG00000141699_20 (sequence is synthesized)
gtccatctggccatcagcctcagcagtgagcaaagcaataccatactcatttctatgttcctgttccttcctctgctcctcctttggagaagcaataattcatgggggatgatacagtag

SEQ ID NO: 370171 - DNA, 120 bp, Artificial Sequence
  ENSG00000141699_21 (sequence is synthesized)
cactttacaaatggctccatgtcattcatcccaggggccataatctcttgcaccacctattcttacttcctgttcagctcctttacagcttttattttcaactgcttcccaacttggtgg

SEQ ID NO: 370172 - DNA, 120 bp, Artificial Sequence
  ENSG00000141699_22 (sequence is synthesized)
ggcctcctttaaggatgagccaatagtaagaatgtggctgtaatcagcagagacccctctgaggggtatctgttctgcagcccctagtgaaatcatgtgatgtgagacagaaacctaaac

SEQ ID NO: 370173 - DNA, 120 bp, Artificial Sequence
  ENSG00000141699_23 (sequence is synthesized)
atggtacttgattctaaacctgtgccagtctatagcctctgcctccccaagcagagctcaagccaaacgcttctgtcctctttccttctgcattaaccctttgctgatcctcaggggcca

SEQ ID NO: 370174 - DNA, 120 bp, Artificial Sequence
  ENSG00000141699_24 (sequence is synthesized)
ctcccccaacacccctgtacttgggtgagggatgttggacagagcctgttttcatgtactgcaggtgggggtgtgctgacatgtttgctcttggttgatggagaaggtacagaggccagg

SEQ ID NO: 370175 - DNA, 120 bp, Artificial Sequence
  ENSG00000141699_25 (sequence is synthesized)
gagtgaaaatggttgacagaagagggaagagttaggtgtctcatagtcactcatagtggggtggtcaggggtaatggcatctccccactttaggcttctcaaacagacttttgacacctc

SEQ ID NO: 370176 - DNA, 120 bp, Artificial Sequence
  ENSG00000141699_26 (sequence is synthesized)
tcaagttcagagctctgatgtggaaagacaggaggtgtggggaaggagggggatttcgtgtgtttgcatgagtgtgcgcttcaggccttgggagttggcaagagggagggaaggaaggag

SEQ ID NO: 370177 - DNA, 120 bp, Artificial Sequence
  ENSG00000141699_27 (sequence is synthesized)
agcaaaatcttcggaaggtgtttcttgtacctgagggatcctgccctgaatctccatagtctccactgtgaactgaggaggggaggggtgtgctggggaataaatcttgtatgagaacaa

SEQ ID NO: 370178 - DNA, 120 bp, Artificial Sequence
  ENSG00000141699_28 (sequence is synthesized)
aataggaaacgacctgggagaatccgctggcccagttgttgccagctcctcctccatgttccgacaggcaccggcgttgcagccgctcccgcccgcaacggcgccgcacgccagcccgct

SEQ ID NO: 370179 - DNA, 120 bp, Artificial Sequence
  ENSG00000141699_29 (sequence is synthesized)
cgccgcaagacgcaggcgccaaacaaccagctccacccacgaacttcctccgctccaatgagaatcgagttctggcaatgaatggcacgtctttaagcactggccttcgttcatgcagat

SEQ ID NO: 370180 - DNA, 120 bp, Artificial Sequence
  ENSG00000141699_30 (sequence is synthesized)
tccctttttgttgctctgattcattctcttgtaatattctggttacatgttgttaaccccatgttctggacacacagtgtaaactgagaacctaggctgttccaaatgatcattttaaca

SEQ ID NO: 370181 - DNA, 120 bp, Artificial Sequence
  ENSG00000141699_31 (sequence is synthesized)
agttgtgggccctgccagggaataggaaacgacctgggagaatccgctggcccagttgttgccagctcctcctccatgttccgacaggttttttgccctgacatctcttcgtcttgtgtt

SEQ ID NO: 370182 - DNA, 120 bp, Artificial Sequence
  ENSG00000141699_32 (sequence is synthesized)
aacctagaagtcaagcggtaaaacaagctttgcaactatgtggatggacaagatgtaattgaagatgaagtactttagagatggtatgggttttttgccctgacatctcttcgtcttgtg

SEQ ID NO: 370183 - DNA, 120 bp, Artificial Sequence
  ENSG00000141699_33 (sequence is synthesized)
tcgcctgccctgttttcttcgctgcactggctccttcctgtacttgcctaattttgcctcacctccttccactccatcccgcctgcaggcttcggcaccctagttcttcccagggccgtc

SEQ ID NO: 370184 - DNA, 120 bp, Artificial Sequence
  ENSG00000141699_34 (sequence is synthesized)
cacccatcttctctgccttacctgtgcccgcacccccgccccgcacatctggcgggagcttctggtaacatcttgagccgctcaagagtgagcgagggctcctcttttgagcccgacaaa

SEQ ID NO: 370185 - DNA, 120 bp, Artificial Sequence
  ENSG00000141699_35 (sequence is synthesized)
gctgcgtccctttaaagccatcacttcctttctcttgtctgctcaagtgcaagttctagattgtttccagaggttttagtagtttattgttggagtagaggcgtgaagtcttgcaaaggt

SEQ ID NO: 370186 - DNA, 120 bp, Artificial Sequence
  ENSG00000141699_36 (sequence is synthesized)
ttaaaaaaccaccaccaacattgctttcagagagaatttttggctaagtcctattcaaaccaatttcttggcaggaaaggtgcagccctatggggttagccatgtaaaaggagtttgaat

SEQ ID NO: 370187 - DNA, 120 bp, Artificial Sequence
  ENSG00000141699_37 (sequence is synthesized)
agaaggggacatgctccttttcttcccaaacagaatcacctttggatgcaacagtggctgcacgtccatgcttgacttacagagtctttctgtcatatctctaccctaacccttcacacc

SEQ ID NO: 370188 - DNA, 80 bp, Artificial Sequence
  ENSG00000141736_0 (sequence is synthesized)
cccacccctcgcagcaccccgcgccccgcgccctcccagccgggtccagccggagccatggggccggagccgcagtgagc

SEQ ID NO: 370189 - DNA, 120 bp, Artificial Sequence
  ENSG00000141736_1 (sequence is synthesized)
tccagccggagccatggggccggagccgcagtgagcaccatggagctggcggccttgtgccgctgggggctcctcctcgccctcttgccccccggagccgcgagcacccaagtgtgcacc

SEQ ID NO: 370190 - DNA, 120 bp, Artificial Sequence
  ENSG00000141736_2 (sequence is synthesized)
ggcacagacatgaagctgcggctccctgccagtcccgagacccacctggacatgctccgccacctctaccagggctgccaggtggtgcagggaaacctggaactcacctacctgcccacc

SEQ ID NO: 370191 - DNA, 120 bp, Artificial Sequence
  ENSG00000141736_3 (sequence is synthesized)
aatgccagcctgtccttcctgcaggatatccaggaggtgcagggctacgtgctcatcgctcacaaccaagtgaggcaggtcccactgcagaggctgcggattgtgcgaggcacccagctc

SEQ ID NO: 370192 - DNA, 120 bp, Artificial Sequence
  ENSG00000141736_4 (sequence is synthesized)
tttgaggacaactatgccctggccgtgctagacaatggagacccgctgaacaataccacccctgtcacaggggcctccccaggaggcctgcgggagctgcagcttcgaagcctcacagag

SEQ ID NO: 370193 - DNA, 120 bp, Artificial Sequence
  ENSG00000141736_5 (sequence is synthesized)
atcttgaaaggaggggtcttgatccagcggaacccccagctctgctaccaggacacgattttgtggaaggacatcttccacaagaacaaccagctggctctcacactgatagacaccaac

SEQ ID NO: 370194 - DNA, 120 bp, Artificial Sequence
  ENSG00000141736_6 (sequence is synthesized)
cgctctcgggcctgccacccctgttctccgatgtgtaagggctcccgctgctggggagagagttctgaggattgtcagagcctgacgcgcactgtctgtgccggtggctgtgcccgctgc

SEQ ID NO: 370195 - DNA, 120 bp, Artificial Sequence
  ENSG00000141736_7 (sequence is synthesized)
aaggggccactgcccactgactgctgccatgagcagtgtgctgccggctgcacgggccccaagcactctgactgcctggcctgcctccacttcaaccacagtggcatctgtgagctgcac

SEQ ID NO: 370196 - DNA, 120 bp, Artificial Sequence
  ENSG00000141736_8 (sequence is synthesized)
tgcccagccctggtcacctacaacacagacacgtttgagtccatgcccaatcccgagggccggtatacattcggcgccagctgtgtgactgcctgtccctacaactacctttctacggac

SEQ ID NO: 370197 - DNA, 120 bp, Artificial Sequence
  ENSG00000141736_9 (sequence is synthesized)
gtgggatcctgcaccctcgtctgccccctgcacaaccaagaggtgacagcagaggatggaacacagcggtgtgagaagtgcagcaagccctgtgcccgagtgtgctatggtctgggcatg

SEQ ID NO: 370198 - DNA, 120 bp, Artificial Sequence
  ENSG00000141736_10 (sequence is synthesized)
gagcacttgcgagaggtgagggcagttaccagtgccaatatccaggagtttgctggctgcaagaagatctttgggagcctggcatttctgccggagagctttgatggggacccagcctcc

SEQ ID NO: 370199 - DNA, 120 bp, Artificial Sequence
  ENSG00000141736_11 (sequence is synthesized)
aacactgccccgctccagccagagcagctccaagtgtttgagactctggaagagatcacaggttacctatacatctcagcatggccggacagcctgcctgacctcagcgtcttccagaac

SEQ ID NO: 370200 - DNA, 120 bp, Artificial Sequence
  ENSG00000141736_12 (sequence is synthesized)
ctgcaagtaatccggggacgaattctgcacaatggcgcctactcgctgaccctgcaagggctgggcatcagctggctggggctgcgctcactgagggaactgggcagtggactggccctc

SEQ ID NO: 370201 - DNA, 120 bp, Artificial Sequence
  ENSG00000141736_13 (sequence is synthesized)
atccaccataacacccacctctgcttcgtgcacacggtgccctgggaccagctctttcggaacccgcaccaagctctgctccacactgccaaccggccagaggacgagtgtgtgggcgag

SEQ ID NO: 370202 - DNA, 120 bp, Artificial Sequence
  ENSG00000141736_14 (sequence is synthesized)
ggcctggcctgccaccagctgtgcgcccgagggcactgctggggtccagggcccacccagtgtgtcaactgcagccagttccttcggggccaggagtgcgtggaggaatgccgagtactg

SEQ ID NO: 370203 - DNA, 120 bp, Artificial Sequence
  ENSG00000141736_15 (sequence is synthesized)
caggggctccccagggagtatgtgaatgccaggcactgtttgccgtgccaccctgagtgtcagccccagaatggctcagtgacctgttttggaccggaggctgaccagtgtgtggcctgt

SEQ ID NO: 370204 - DNA, 120 bp, Artificial Sequence
  ENSG00000141736_16 (sequence is synthesized)
gcccactataaggaccctcccttctgcgtggcccgctgccccagcggtgtgaaacctgacctctcctacatgcccatctggaagtttccagatgaggagggcgcatgccagccttgcccc

SEQ ID NO: 370205 - DNA, 120 bp, Artificial Sequence
  ENSG00000141736_17 (sequence is synthesized)
atcaactgcacccactcctgtgtggacctggatgacaagggctgccccgccgagcagagagccagccctctgacgtccatcatctctgcggtggttggcattctgctggtcgtggtcttg

SEQ ID NO: 370206 - DNA, 120 bp, Artificial Sequence
  ENSG00000141736_18 (sequence is synthesized)
agcggagcgatgcccaaccaggcgcagatgcggatcctgaaagagacggagctgaggaaggtgaaggtgcttggatctggcgcttttggcacagtctacaagggcatctggatccctgat

SEQ ID NO: 370207 - DNA, 120 bp, Artificial Sequence
  ENSG00000141736_19 (sequence is synthesized)
ggggagaatgtgaaaattccagtggccatcaaagtgttgagggaaaacacatcccccaaagccaacaaagaaatcttagacgaagcatacgtgatggctggtgtgggctccccatatgtc

SEQ ID NO: 370208 - DNA, 120 bp, Artificial Sequence
  ENSG00000141736_20 (sequence is synthesized)
tcccgccttctgggcatctgcctgacatccacggtgcagctggtgacacagcttatgccctatggctgcctcttagaccatgtccgggaaaaccgcggacgcctgggctcccaggacctg

SEQ ID NO: 370209 - DNA, 120 bp, Artificial Sequence
  ENSG00000141736_21 (sequence is synthesized)
ctgaactggtgtatgcagattgccaaggggatgagctacctggaggatgtgcggctcgtacacagggacttggccgctcggaacgtgctggtcaagagtcccaaccatgtcaaaattaca

SEQ ID NO: 370210 - DNA, 120 bp, Artificial Sequence
  ENSG00000141736_22 (sequence is synthesized)
gacttcgggctggctcggctgctggacattgacgagacagagtaccatgcagatgggggcaaggtgcccatcaagtggatggcgctggagtccattctccgccggcggttcacccaccag

SEQ ID NO: 370211 - DNA, 120 bp, Artificial Sequence
  ENSG00000141736_23 (sequence is synthesized)
agtgatgtgtggagttatggtgtgactgtgtgggagctgatgacttttggggccaaaccttacgatgggatcccagcccgggagatccctgacctgctggaaaagggggagcggctgccc

SEQ ID NO: 370212 - DNA, 120 bp, Artificial Sequence
  ENSG00000141736_24 (sequence is synthesized)
cagccccccatctgcaccattgatgtctacatgatcatggtcaaatgttggatgattgactctgaatgtcggccaagattccgggagttggtgtctgaattctcccgcatggccagggac

SEQ ID NO: 370213 - DNA, 120 bp, Artificial Sequence
  ENSG00000141736_25 (sequence is synthesized)
ccccagcgctttgtggtcatccagaatgaggacttgggcccagccagtcccttggacagcaccttctaccgctcactgctggaggacgatgacatgggggacctggtggatgctgaggag

SEQ ID NO: 370214 - DNA, 120 bp, Artificial Sequence
  ENSG00000141736_26 (sequence is synthesized)
tatctggtaccccagcagggcttcttctgtccagaccctgccccgggcgctgggggcatggtccaccacaggcaccgcagctcatctaccaggagtggcggtggggacctgacactaggg

SEQ ID NO: 370215 - DNA, 120 bp, Artificial Sequence
  ENSG00000141736_27 (sequence is synthesized)
ctggagccctctgaagaggaggcccccaggtctccactggcaccctccgaaggggctggctccgatgtatttgatggtgacctgggaatgggggcagccaaggggctgcaaagcctcccc

SEQ ID NO: 370216 - DNA, 120 bp, Artificial Sequence
  ENSG00000141736_28 (sequence is synthesized)
acacatgaccccagccctctacagcggtacagtgaggaccccacagtacccctgccctctgagactgatggctacgttgcccccctgacctgcagcccccagcctgaatatgtgaaccag

SEQ ID NO: 370217 - DNA, 120 bp, Artificial Sequence
  ENSG00000141736_29 (sequence is synthesized)
ccagatgttcggccccagcccccttcgccccgagagggccctctgcctgctgcccgacctgctggtgccactctggaaaggcccaagactctctccccagggaagaatggggtcgtcaaa

SEQ ID NO: 370218 - DNA, 120 bp, Artificial Sequence
  ENSG00000141736_30 (sequence is synthesized)
gacgtttttgcctttgggggtgccgtggagaaccccgagtacttgacaccccagggaggagctgcccctcagccccaccctcctcctgccttcagcccagccttcgacaacctctattac

SEQ ID NO: 370219 - DNA, 120 bp, Artificial Sequence
  ENSG00000141736_31 (sequence is synthesized)
tgggaccaggacccaccagagcggggggctccacccagcaccttcaaagggacacctacggcagagaacccagagtacctgggtctggacgtgccagtgtgaaccagaaggccaagtccg

SEQ ID NO: 370220 - DNA, 120 bp, Artificial Sequence
  ENSG00000141736_32 (sequence is synthesized)
cagaagccctgatgtgtcctcagggagcagggaaggcctgacttctgctggcatcaagaggtgggagggccctccgaccacttccaggggaacctgccatgccaggaacctgtcctaagg

SEQ ID NO: 370221 - DNA, 120 bp, Artificial Sequence
  ENSG00000141736_33 (sequence is synthesized)
aaccttccttcctgcttgagttcccagatggctggaaggggtccagcctcgttggaagaggaacagcactggggagtctttgtggattctgaggccctgcccaatgagactctagggtcc

SEQ ID NO: 370222 - DNA, 120 bp, Artificial Sequence
  ENSG00000141736_34 (sequence is synthesized)
agtggatgccacagcccagcttggccctttccttccagatcctgggtactgaaagccttagggaagctggcctgagaggggaagcggccctaagggagtgtctaagaacaaaagcgaccc

SEQ ID NO: 370223 - DNA, 120 bp, Artificial Sequence
  ENSG00000141736_35 (sequence is synthesized)
attcagagactgtccctgaaacctagtactgccccccatgaggaaggaacagcaatggtgtcagtatccaggctttgtacagagtgcttttctgtttagtttttactttttttgttttgt

SEQ ID NO: 370224 - DNA, 120 bp, Artificial Sequence
  ENSG00000141736_36 (sequence is synthesized)
ttttttaaagatgaaataaagacccagggggagaatgggtgttgtatggggaggcaagtgtggggggtccttctccacacccactttgtccatttgcaaatatattttggaaaacagcta

SEQ ID NO: 370225 - DNA, 120 bp, Artificial Sequence
  ENSG00000141736_37 (sequence is synthesized)
acacagcagtgcccagggggccctggcagcagcgttcttggacttgtgcagactgcccgtctctgtgcacccttcttgactcagcacagctctggctggcttggcctcttggcatggctt

SEQ ID NO: 370226 - DNA, 120 bp, Artificial Sequence
  ENSG00000141736_38 (sequence is synthesized)
ctctagctgggtcctacctgccttggcatccttccctccccctctgtttctgaaatctcagaactcttcctctccctacatcggccccacctgtccccacccctccagcccacagccatg

SEQ ID NO: 370227 - DNA, 120 bp, Artificial Sequence
  ENSG00000141736_39 (sequence is synthesized)
tggggctcttactataaaaggggaccaactctccctttgtcatatcttgtttctgatgacaaaaataacacattgttaaaattgtaaaattaaaacatgaaatataaattaatgccctag

SEQ ID NO: 370228 - DNA, 120 bp, Artificial Sequence
  ENSG00000141736_40 (sequence is synthesized)
gcaagaatgaaattaaacagggcttggcacagtgaagcacgggaaaggctttctacagagcagtgactgttgttactcgctgttacaccttaggtaatgcgttttcctctctgggtgcct

SEQ ID NO: 370229 - DNA, 120 bp, Artificial Sequence
  ENSG00000141736_41 (sequence is synthesized)
cccattttctggctcaagtccctgcccaggatcaagcttggaggagggccccgagggaggggccacagagactgggtgaagagcaagggtgtttgtcccaggagcatggcgaaaattgct

SEQ ID NO: 370230 - DNA, 120 bp, Artificial Sequence
  ENSG00000141736_42 (sequence is synthesized)
gctgggtggccttgggaagcacaaaggggacccaactaagggcctgatcctactgccctgggggtgtcagtgccagccccccacaaatcttttctgccccccccaggaggctgaccagtg

SEQ ID NO: 370231 - DNA, 120 bp, Artificial Sequence
  ENSG00000141736_43 (sequence is synthesized)
acacagggctgtgggtgagagagacagctgaagtgtcagcgtgaggggccagtgtggggctgcggctgggagggctggggtggggcccagggtagttgtgcctgtccttgggtgatggaa

SEQ ID NO: 370232 - DNA, 120 bp, Artificial Sequence
  ENSG00000141736_44 (sequence is synthesized)
tgatctggaaagagattccttccctgccctccacctgtgagaagcccctctagagtgacatctccatcttatgtttggccacccatcctccccctgggaagagagccgaggtgggtgtgc

SEQ ID NO: 370233 - DNA, 120 bp, Artificial Sequence
  ENSG00000141736_45 (sequence is synthesized)
attctactctccgctgaagtccacacagtttaaattaaagttcccggatttttgtgggcgcctgccccgcccctcgtccccctgctgtgtccatatatcgaggcgatagggttaagggaa

SEQ ID NO: 370234 - DNA, 120 bp, Artificial Sequence
  ENSG00000141736_46 (sequence is synthesized)
ggcggacgcctgatgggttaatgagcaaactgaagtgttttccatgatcttttttgagtcgcaattgaagtaccacctcccgagggtgattgcttccccatgcggggtagaacctttgct

SEQ ID NO: 370235 - DNA, 120 bp, Artificial Sequence
  ENSG00000141736_47 (sequence is synthesized)
gtcctgttcaccactctacctccagcacagaatttggcttatgcctactcaatgtgaagatgatgaggatgaaaacctttgtgatgatccacttccacttaatgaatggttcctcgtctc

SEQ ID NO: 370236 - DNA, 120 bp, Artificial Sequence
  ENSG00000141736_48 (sequence is synthesized)
ggaccaaaagtcagaggcaagaatgccctcattcataccccagtggtctatacctccagcagcaagtcgagtgagcaagtgatgtcctgaaaggcccagtggatcagtggaatgaagcgg

SEQ ID NO: 370237 - DNA, 120 bp, Artificial Sequence
  ENSG00000141736_49 (sequence is synthesized)
gcaggaagacttagtgctcctgaaacaaggaatccagaatccaggagaaggatggctcagtggggctttcaagggacaagtatgggggttgaaggggtcactgtccctataccaaatccg

SEQ ID NO: 370238 - DNA, 120 bp, Artificial Sequence
  ENSG00000141736_50 (sequence is synthesized)
aaaatattgtgaccaggaaccattctgtccaactcttctatttcaggtggcaaagcaaagctatattcaagaccacatgcaaagctactccctgagcaaagagtcacagataaaacgggg

SEQ ID NO: 370239 - DNA, 120 bp, Artificial Sequence
  ENSG00000141736_51 (sequence is synthesized)
gcaccagtagaatggccaggacaaacgcagtgcagcacagagactcagaccctggcagccatgcctgcgcaggcagtgatgagagtgacatgtactgttgtggacatgcacaaaagtgag

SEQ ID NO: 370240 - DNA, 120 bp, Artificial Sequence
  ENSG00000141736_52 (sequence is synthesized)
gcggccctaagggagtgtctaagaacaaaagcgacccattcagagactgtccctgaaacctagtactgccccccatgaggaaggaacagcaatggtgcctctgtgacaccccctgaccta

SEQ ID NO: 370241 - DNA, 120 bp, Artificial Sequence
  ENSG00000141736_53 (sequence is synthesized)
tggaagggaactcatgttggccggacattttaccatgtgccaggcactgcgggcactttacataaagcagccaatgtcagaactagaaagcgggagagctgggattcagagcacagactg

SEQ ID NO: 370242 - DNA, 120 bp, Artificial Sequence
  ENSG00000141736_54 (sequence is synthesized)
gcctcacctgtgcccccgaggcgcgactcgatctcgatgcccggatactgctccttcacagcactggccagctccaggtaggtcgcctcgaagccgcagggttcactggggagtcaagag

SEQ ID NO: 370243 - DNA, 120 bp, Artificial Sequence
  ENSG00000141736_55 (sequence is synthesized)
atggggctgggctggggattcgggggtggggcctcccgtggacccacctccgtccggcccgcgggaccagggtgcgggtcctccagccggggccgctcaccagtactccaccacgatgcg

SEQ ID NO: 370244 - DNA, 120 bp, Artificial Sequence
  ENSG00000141736_56 (sequence is synthesized)
cccacccactcttccactgtggaacctcctgtcattttccacttcaccaagtgacagaggacctgctcagatgctgaggggaggggactgcaaggaaagatggctaggaaacccagtccc

SEQ ID NO: 370245 - DNA, 120 bp, Artificial Sequence
  ENSG00000141736_57 (sequence is synthesized)
tccacaccctagagtaacttgatgccttgtgagggacacaggcaaagttcaattccttggaagtcaagggagactgagaagagtacagctgcagcactgagggagtgatgaattcttaac

SEQ ID NO: 370246 - DNA, 120 bp, Artificial Sequence
  ENSG00000141736_58 (sequence is synthesized)
tggggatggtgggaggcttcgagtgggaggtggcatttgagctaggctttgagagaggagcaggtattgcacttgcatttaggtagaaagcattggggtgcaaggtgacactggaggggg

SEQ ID NO: 370247 - DNA, 120 bp, Artificial Sequence
  ENSG00000141736_59 (sequence is synthesized)
agtacgcagtcgcggtacaccggctcacggtcgccctgggagccgctcgccagcgccgctgccccagctagcaggaccaaccgcgccgccaggccggccatcctttctccctggctcgcc

SEQ ID NO: 370248 - DNA, 120 bp, Artificial Sequence
  ENSG00000141736_60 (sequence is synthesized)
gaatgcacagggtgggcctagtcagaagaagcctttcccctgaaatccctctacttcccaagcacgcaagctttctcctgctgttaaacctgcagtgtgcaagggacatgggcggagggg

SEQ ID NO: 370249 - DNA, 120 bp, Artificial Sequence
  ENSG00000141736_61 (sequence is synthesized)
tctgcgcatgcagcctggcccagcccaccctgtcctatccttcctcagaccctcttgggacctagtctctgccttctactctctacccctggcccccctcagccctacaagtgtccctat

SEQ ID NO: 370250 - DNA, 120 bp, Artificial Sequence
  ENSG00000141736_62 (sequence is synthesized)
atcccctgtcagtgtggggaggggcccggaccctgatgctcatgtggctgttgacctgtcccggtatgaaggctgagacggccccttccccacccacccccacctcctcagtgtgctatg

SEQ ID NO: 370251 - DNA, 120 bp, Artificial Sequence
  ENSG00000141736_63 (sequence is synthesized)
atgatcatgtcccctgtccacctgctccagccactatccctctcccacttacagcagaagaaagggctggtgagaaaggtggattacaggcccacttctgccactgacgagccctatgaa

SEQ ID NO: 370252 - DNA, 120 bp, Artificial Sequence
  ENSG00000141736_64 (sequence is synthesized)
tgtggcctacacccccttagcttcactgggtctcagtttccctatctgtatattgggagcagttgtgaagctcagaagagaaatgtctgtgaaaaggttatgaacaggagggagagtgga

SEQ ID NO: 370253 - DNA, 120 bp, Artificial Sequence
  ENSG00000141736_65 (sequence is synthesized)
tgaacaggagggagagtggaaaccaacctgctggatcgtgtccacagaccctggaatggggccacatgcttggtttgtcaaattgcagacgccggccgggtgcgatggctcatgcctgta

SEQ ID NO: 370254 - DNA, 120 bp, Artificial Sequence
  ENSG00000141736_66 (sequence is synthesized)
aaaaaaaatttgcagacgccatcccatccaggcctttgctttcactgatgaagaaactgagatacagagagggcagggcacctgttcggagtttatgaaatgcccccccaccattatctt

SEQ ID NO: 370255 - DNA, 120 bp, Artificial Sequence
  ENSG00000141736_67 (sequence is synthesized)
tcttgatcatataagaatctggtgaggcaaggtagggcgtgatctttatctctattttatcgttttatttaagcgggaacaggactgctcagtggctgggggccttgcccaagatctcca

SEQ ID NO: 370256 - DNA, 120 bp, Artificial Sequence
  ENSG00000141736_68 (sequence is synthesized)
tggctcggctgctggacattgacgagacagagtaccatgcagatgggggcaaggttaggtgaaggaccaaggagcagaggaggctgggtggagtggtgtctagcccatgggagaactctg

SEQ ID NO: 370257 - DNA, 120 bp, Artificial Sequence
  ENSG00000141736_69 (sequence is synthesized)
agtggccacctccccacaacacacagttggaggacttcctcttctgccctcccaggtgcccatcaagtggatggcgctggagtccattctccgccggcggttcacccaccagagtgatgt

SEQ ID NO: 370258 - DNA, 120 bp, Artificial Sequence
  ENSG00000141736_70 (sequence is synthesized)
gtggagttatggtgtgtgatggggggtgttgggaggggtgggtgaggagccatggctggagggaggatgagagctgggatggggagaattacggggccacctcagcatgtgaagggaggg

SEQ ID NO: 370259 - DNA, 120 bp, Artificial Sequence
  ENSG00000141736_71 (sequence is synthesized)
aaggggctgcctgtgccccaccttgcagggtctgtgcacttcccaggattagggaaagaccgggtagggtctgtctcctggcatcacatctccccctgctacctgccatgatgctagact

SEQ ID NO: 370260 - DNA, 120 bp, Artificial Sequence
  ENSG00000141736_72 (sequence is synthesized)
ctggctgcctggaggagggtgggaggtcctgggtggaggagcccacaaggggcatgaaaggggaccaggatgtatgtagacccaggagccctagtatgttaggagcctcaaaaccttctt

SEQ ID NO: 370261 - DNA, 120 bp, Artificial Sequence
  ENSG00000141736_73 (sequence is synthesized)
ccctagtatgttaggagcctcaaaaccttcttgtatcccttttacagtcaaagtccaaagccactcttgaggaacactcttgtacaaaattaagctgggcacagtggctcatgcctgtaa

SEQ ID NO: 370262 - DNA, 120 bp, Artificial Sequence
  ENSG00000141736_74 (sequence is synthesized)
acatagtgagatcctatctctacaaaaaataaaaaaattatctgggtgtggtggtgtgtgccagtagtcccagctactcaggagaggctgaggcaggaagatcacttgagcctagtttaa

SEQ ID NO: 370263 - DNA, 120 bp, Artificial Sequence
  ENSG00000141736_75 (sequence is synthesized)
aggctgaggcaggaagatcacttgagcctagtttaaggttgcagtaagctatgattgcaccactgaaatccagcctgggtgacagagcgaaacctcatctcaaaaaaataaaaaagcaaa

SEQ ID NO: 370264 - DNA, 120 bp, Artificial Sequence
  ENSG00000141738_0 (sequence is synthesized)
agtttccttgggcctggaatctggacacacagggctcccccccgcctctgacttctctgtccgaagtcgggacaccctcctaccacctgtagagaagcgggagtggatctgaaataaaat

SEQ ID NO: 370265 - DNA, 120 bp, Artificial Sequence
  ENSG00000141738_1 (sequence is synthesized)
ccaggaatctgggggttcctagacggagccagacttcggaacgggtgtcctgctactcctgctggggctcctccaggacaagggcacacaactggttccgttaagcccctctcttgctca

SEQ ID NO: 370266 - DNA, 120 bp, Artificial Sequence
  ENSG00000141738_2 (sequence is synthesized)
gacgccatggagctggatctgtctccacctcatcttagcagctctccggaagacctttgcccagcccctgggacccctcctgggactccccggccccctgatacccctctgcctgaggag

SEQ ID NO: 370267 - DNA, 120 bp, Artificial Sequence
  ENSG00000141738_3 (sequence is synthesized)
gtaaagaggtcccagcctctcctcatcccaaccaccggcaggaaacttcgagaggaggagaggcgtgccacctccctcccctctatccccaaccccttccctgagctctgcagtcctccc

SEQ ID NO: 370268 - DNA, 120 bp, Artificial Sequence
  ENSG00000141738_4 (sequence is synthesized)
tcacagagcccaattctcgggggcccctccagtgcaagggggctgctcccccgcgatgccagccgcccccatgtagtaaaggtgtacagtgaggatggggcctgcaggtctgtggaggtg

SEQ ID NO: 370269 - DNA, 120 bp, Artificial Sequence
  ENSG00000141738_5 (sequence is synthesized)
gcagcaggtgccacagctcgccacgtgtgtgaaatgctggtgcagcgagctcacgccttgagcgacgagacctgggggctggtggagtgccacccccacctagcactggagcggggtttg

SEQ ID NO: 370270 - DNA, 120 bp, Artificial Sequence
  ENSG00000141738_6 (sequence is synthesized)
gaggaccacgagtccgtggtggaagtgcaggctgcctggcccgtgggcggagatagccgcttcgtcttccggaaaaacttcgccaagtacgaactgttcaagagctccccacactccctg

SEQ ID NO: 370271 - DNA, 120 bp, Artificial Sequence
  ENSG00000141738_7 (sequence is synthesized)
ttcccagaaaaaatggtctccagctgtctcgatgcacacactggtatatcccatgaagacctcatccagaacttcctgaatgctggcagctttcctgagatccagggctttctgcagctg

SEQ ID NO: 370272 - DNA, 120 bp, Artificial Sequence
  ENSG00000141738_8 (sequence is synthesized)
cggggttcaggacggaagctttggaaacgctttttctgcttcttgcgccgatctggcctctattactccaccaagggcacctctaaggatccgaggcacctgcagtacgtggcagatgtg

SEQ ID NO: 370273 - DNA, 120 bp, Artificial Sequence
  ENSG00000141738_9 (sequence is synthesized)
tcaagcccaacaagcttcgaaatggccacaaggggcttcggatcttctgcagtgaagatgagcagagccgcacctgctggctggctgccttccgcctcttcaagtacggggtgcagctgt

SEQ ID NO: 370274 - DNA, 120 bp, Artificial Sequence
  ENSG00000141738_10 (sequence is synthesized)
acaagaattaccagcaggcacagtctcgccatctgcatccatcttgtttgggctccccacccttgagaagtgcctcagataataccctggtggccatggacttctctggccatgctgggc

SEQ ID NO: 370275 - DNA, 120 bp, Artificial Sequence
  ENSG00000141738_11 (sequence is synthesized)
gtgtcattgagaacccccgggaggctctgagtgtggccctggaggaggcccaggcctggaggaagaagacaaaccaccgcctcagcctgcccatgccagcctccggcacgagcctcagtg

SEQ ID NO: 370276 - DNA, 120 bp, Artificial Sequence
  ENSG00000141738_12 (sequence is synthesized)
cagccatccaccgcacccaactctggttccacgggcgcatttcccgtgaggagagccagcggcttattggacagcagggcttggtagacggcctgttcctggtccgggagagtcagcgga

SEQ ID NO: 370277 - DNA, 120 bp, Artificial Sequence
  ENSG00000141738_13 (sequence is synthesized)
acccccagggctttgtcctctctttgtgccacctgcagaaagtgaagcattatctcatcctgccgagcgaggaggagggccgcctgtacttcagcatggatgatggccagacccgcttca

SEQ ID NO: 370278 - DNA, 120 bp, Artificial Sequence
  ENSG00000141738_14 (sequence is synthesized)
ctgacctgctgcagctcgtggagttccaccagctgaaccgcggcatcctgccgtgcttgctgcgccattgctgcacgcgggtggccctctgaccaggccgtggactggctcatgcctcag

SEQ ID NO: 370279 - DNA, 120 bp, Artificial Sequence
  ENSG00000141738_15 (sequence is synthesized)
cccgccttcaggctgcccgccgcccctccacccatccagtggactctggggcgcggccacaggggacgggatgaggagcgggagggttccgccactccagttttctcctctgcttctttg

SEQ ID NO: 370280 - DNA, 120 bp, Artificial Sequence
  ENSG00000141738_16 (sequence is synthesized)
cctccctcagatagaaaacagcccccactccagtccactcctgacccctctcctcaagggaaggccttgggtggccccctctccttctcctagctctggaggtgctgctctagggcaggg

SEQ ID NO: 370281 - DNA, 120 bp, Artificial Sequence
  ENSG00000141738_17 (sequence is synthesized)
aattatgggagaagtgggggcagcccaggcggtttcacgccccacactttgtacagaccgagaggccagttgatctgctctgttttatactagtgacaataaagattattttttgataca

SEQ ID NO: 370282 - DNA, 120 bp, Artificial Sequence
  ENSG00000141738_18 (sequence is synthesized)
aggcaaaccccagccttggactggccctctctgatctctgaggccaggctctaatgtgatttgaatctacttctaaccccttccaagcactgccctcccgaattctctgctcctctcccc

SEQ ID NO: 370283 - DNA, 120 bp, Artificial Sequence
  ENSG00000141738_19 (sequence is synthesized)
accccactgttggtctgtgatttcgaggcaggcgtggccccctgcagcctggaatgaagtcactggggctgtttggagaccggggctgtttggaggacaagggcacacaactggttccgt

SEQ ID NO: 370284 - DNA, 120 bp, Artificial Sequence
  ENSG00000141738_20 (sequence is synthesized)
ccgcgatgccagccgcccccatgtgagttgtccctcagaagggaagggagggatgcacgggttctgggtctgtgggagatacacagccgcttccatggaggcaggggatcttggttagga

SEQ ID NO: 370285 - DNA, 120 bp, Artificial Sequence
  ENSG00000141738_21 (sequence is synthesized)
gtccctgagggtctagcaggtgcggaaagggaatgaatcaccctttgcctcccctcaagtcgtgtgcaattcctggggcgcaggtagtaaaggtgtacagtgaggatggggcctgcaggt

SEQ ID NO: 370286 - DNA, 120 bp, Artificial Sequence
  ENSG00000141738_22 (sequence is synthesized)
tgcgggctgcggggagatgtggggagggccccctccactttggagggcagtgaaggagagggatcctctaaattgtcgaggcttcatctctccagattgtatgcccttctcagcaacacc

SEQ ID NO: 370287 - DNA, 120 bp, Artificial Sequence
  ENSG00000141738_23 (sequence is synthesized)
caccaagggcacctctaaggtaaggtcttgagggtaccagccccagcccctccagtccctggtccttttagaagttgccccttctctgctggaacctctgagcccttctccccctgggcc

SEQ ID NO: 370288 - DNA, 120 bp, Artificial Sequence
  ENSG00000141738_24 (sequence is synthesized)
ccccaggccagccacctccagtttaccatctctccctacatccttgcctagctcacctgcccagggaggtagcaggagaaaagatgatcttagtttaagtcctggctctacttctatttg

SEQ ID NO: 370289 - DNA, 120 bp, Artificial Sequence
  ENSG00000141738_25 (sequence is synthesized)
gctggagggggacaggtagttaagggcctggcgtctccctccctgaagacgtggtcccagccgggtgtcctgacgctcggggttcaggacaagggcacacaactggttccgttaagcccc

SEQ ID NO: 370290 - DNA, 120 bp, Artificial Sequence
  ENSG00000141738_26 (sequence is synthesized)
cggaacgggtgtcctgctactcctgctggggctcctccagcgctccttgttccctccctgtacacctccctgcaggcagcagctgagaatgggaaggaagacctgattctctcctccgac

SEQ ID NO: 370291 - DNA, 120 bp, Artificial Sequence
  ENSG00000141738_27 (sequence is synthesized)
tgacacttgtctacccacagcactccctgttcccagaaaaaatggtctccagctgtctcgatgcacacactggtatatcccatgaagacctcatccaggtggggggaccccccatttcac

SEQ ID NO: 370292 - DNA, 120 bp, Artificial Sequence
  ENSG00000141738_28 (sequence is synthesized)
tgcagattcacgactccccagcattggccagtgcttctccacccttaagtcctgtgcctcccctctatgttgtagaaagagccaaatcacagtcctgtgtgactggggacagtcactttc

SEQ ID NO: 370293 - DNA, 120 bp, Artificial Sequence
  ENSG00000141741_0 (sequence is synthesized)
acacccggaagcaggggcccgagcggagccggccgcgatgagcggggagccggggcagacgtccgtagcgccccctcccgaggaggtcgagccgggcagtggggtccgcatcgtggtgga

SEQ ID NO: 370294 - DNA, 120 bp, Artificial Sequence
  ENSG00000141741_1 (sequence is synthesized)
gtactgtgaaccctgcggcttcgaggcgacctacctggagctggccagtgctgtgaaggagcagtatccgggcatcgagatcgagtcgcgcctcgggggcacaggtgcctttgagataga

SEQ ID NO: 370295 - DNA, 120 bp, Artificial Sequence
  ENSG00000141741_2 (sequence is synthesized)
gataaatggacagctggtgttctccaagctggagaatgggggctttccctatgagaaagatctcattgaggccatccgaagagccagtaatggagaaaccctagaaaagatcaccaacag

SEQ ID NO: 370296 - DNA, 120 bp, Artificial Sequence
  ENSG00000141741_3 (sequence is synthesized)
ccgtcctccctgcgtcatcctgtgactgcacaggactctgggttcctgctctgttctggggtccaaaccttggtctccctttggtcctgctgggagctccccctgcctctttcccctact

SEQ ID NO: 370297 - DNA, 120 bp, Artificial Sequence
  ENSG00000141741_4 (sequence is synthesized)
tagctccttagcaaagagaccctggcctccactttgccctttgggtacaaagaaggaatagaagattccgtggccttgggggcaggagagagacactctccatgaacacttctccagcca

SEQ ID NO: 370298 - DNA, 120 bp, Artificial Sequence
  ENSG00000141741_5 (sequence is synthesized)
acagattttatttattctcccctaacccagggcaatgtcagctattggcagtaaagtggcgctacaaacactaatgctaactagtgtgtgtttttatacgtccagtctgggaatgtgggg

SEQ ID NO: 370299 - DNA, 120 bp, Artificial Sequence
  ENSG00000141741_6 (sequence is synthesized)
ggcacagaagtccggtcagcccagcctttgcaccgccagggtggctgtgctggctgggtgggctttctggacagctactccttaggtcagtgagctcctctggcatagccaaggcaagga

SEQ ID NO: 370300 - DNA, 120 bp, Artificial Sequence
  ENSG00000141741_7 (sequence is synthesized)
aaatgagtcccacagtagaccctgcctcgtctttcccccaccctacccaccactctcctcactcacaaggaggaaataaccccattctggtgagtggccttaggaattagttcgttctaa

SEQ ID NO: 370301 - DNA, 120 bp, Artificial Sequence
  ENSG00000141741_8 (sequence is synthesized)
ataagaatgatctggtcgtcaaagggctctcagatctgaatccagcttcccgatctcccccaaccctgaagctggagaactggatgtctggctcctcatccaagctttctgaagattccc

SEQ ID NO: 370302 - DNA, 120 bp, Artificial Sequence
  ENSG00000141741_9 (sequence is synthesized)
agccactccctccaggaaaagaggaattgagtgtaaggtgagcaggaagggatggcacagagccacccccagacataggccggtgcctagctgttttccaaaatatatttgcaaatggac

SEQ ID NO: 370303 - DNA, 120 bp, Artificial Sequence
  ENSG00000141741_10 (sequence is synthesized)
aaagtgggtgtggagaaggaccccccacacttgcctccccatacaacacccattctccccctgggtctttatttcatctttaaaaaaacaaaacaaaaaaagtaaaaactaaacagaaaa

SEQ ID NO: 370304 - DNA, 120 bp, Artificial Sequence
  ENSG00000141741_11 (sequence is synthesized)
ttctagttctgacattggctgctttatgtaaagtgcccgcagtgcctggcacatggtaaaatgtccggccaacatgagttcccttccataggtcagggggtgtcacagaggcctgtgggg

SEQ ID NO: 370305 - DNA, 120 bp, Artificial Sequence
  ENSG00000141741_12 (sequence is synthesized)
aaaaacctattagactgcaatcgtgtagggttggaggggagggagtcctttattgagtgttgcgaggggcacacaggcgaggcctccctcaggttccctggagttgacccagggttgggg

SEQ ID NO: 370306 - DNA, 120 bp, Artificial Sequence
  ENSG00000141741_13 (sequence is synthesized)
aattgcttaaggagctacaaatgggtctccagtgggattgatgggggacttgaaggcgggggacccctttggaggaactcctgacttctgcctatgttctcagtgtaccatttatctgtt

SEQ ID NO: 370307 - DNA, 120 bp, Artificial Sequence
  ENSG00000141741_14 (sequence is synthesized)
tccaagctggagaatgggggctttccctatgagaaagatgtgagtatttacagcgttgggaggacctcttggtcaccctaccccaacagtgcatcatcctgtcattccactcctctagct

SEQ ID NO: 370308 - DNA, 120 bp, Artificial Sequence
  ENSG00000141744_0 (sequence is synthesized)
actgggcggaccgcggcggcagcatgagcggcgcagaccgtagccccaatgcgggcgcagcccctgactcggccccgggccaggcggcggtggcttcggcctaccagcgcttcgagccgc

SEQ ID NO: 370309 - DNA, 120 bp, Artificial Sequence
  ENSG00000141744_1 (sequence is synthesized)
gcgcctacctccgcaacaactacgcgccccctcgcggggacctgtgcaacccgaacggcgtcgggccgtggaagctgcgctgcttggcgcagaccttcgccaccggtgaagtgtccggac

SEQ ID NO: 370310 - DNA, 120 bp, Artificial Sequence
  ENSG00000141744_2 (sequence is synthesized)
gcaccctcatcgacattggttcaggccccaccgtgtaccagctgctcagtgcctgcagccactttgaggacatcaccatgacagatttcctggaggtcaaccgccaggagctggggcgct

SEQ ID NO: 370311 - DNA, 120 bp, Artificial Sequence
  ENSG00000141744_3 (sequence is synthesized)
acgggtcctgcccatcgacgtgcaccagccccagcccctgggtgctgggagcccagctcccctgcctgctgacgccctggtctctgccttctgcttggaggctgtgagcccagatcttgc

SEQ ID NO: 370312 - DNA, 120 bp, Artificial Sequence
  ENSG00000141744_4 (sequence is synthesized)
cagctttcagcgggccctggaccacatcaccacgctgctgaggcctggggggcacctcctcctcatcggggccctggaggagtcgtggtacctggctggggaggccaggctgacggtggt

SEQ ID NO: 370313 - DNA, 120 bp, Artificial Sequence
  ENSG00000141744_5 (sequence is synthesized)
gccagtgtctgaggaggaggtgagggaggccctggtgcgtagtggctacaaggtccgggacctccgcacctatatcatgcctgcccaccttcagacaggcgtagatgatgtcaagggcgt

SEQ ID NO: 370314 - DNA, 120 bp, Artificial Sequence
  ENSG00000141744_6 (sequence is synthesized)
cttcttcgcctgggctcagaaggttgggctgtgagggctgtacctggtgccctgtggcccccacccacctggattccctgttctttgaagtggcacctaataaagaaataataccctgcc

SEQ ID NO: 370315 - DNA, 120 bp, Artificial Sequence
  ENSG00000141744_7 (sequence is synthesized)
gtgagggttggggaggaggcttcccatagagtggctggttggggcaacagaggcctgagcgtagaacagccttgagccctgccttgtgcctcctgcacagggaatgctggcaggataagg

SEQ ID NO: 370316 - DNA, 120 bp, Artificial Sequence
  ENSG00000141748_0 (sequence is synthesized)
agtctagtgccctagacatggcactcagaggagggagagctgggatccggttccgcgcgcagtgctgagtctcccctgatttgcggtagtggagcagtccacccggagaactcaggagtt

SEQ ID NO: 370317 - DNA, 120 bp, Artificial Sequence
  ENSG00000141748_1 (sequence is synthesized)
ttcgcagggcgagggggagggctggagcctggaacccccatattccttgcacctcttgggcccgggacaggcagcccttagtcactggggtgtccatagtgcccacgaagggccagcgtc

SEQ ID NO: 370318 - DNA, 120 bp, Artificial Sequence
  ENSG00000141748_2 (sequence is synthesized)
ccagagggttcccaggtcaggttggtgacgtgtggggcttccctaacttcgtaggcaaaatctgccagaccctcccgggggagcggagctccgaataccagggccgactccgctcctgag

SEQ ID NO: 370319 - DNA, 120 bp, Artificial Sequence
  ENSG00000141748_3 (sequence is synthesized)
atcgtgggactggacaatgaaggaaagaccaccattctctaccggttcttgaccaatgaggtggtccatatgtgtcccaccattggcagcaacgtggaggagatcattctgccgaagacc

SEQ ID NO: 370320 - DNA, 120 bp, Artificial Sequence
  ENSG00000141748_4 (sequence is synthesized)
cacttcttcatgtgggacatagtgagacctgaggctctgagctttatctggaacacatactactccaacactgagtttatcatccttgtgattgacagcacggaccgggatcggctgctg

SEQ ID NO: 370321 - DNA, 120 bp, Artificial Sequence
  ENSG00000141748_5 (sequence is synthesized)
accactcgggaggagctatataaaatgctggcccatgaggctctacaggatgcttcagtcctgatatttgccaataagcaggacgtgaaggactccatgaggatggtggagatctcccat

SEQ ID NO: 370322 - DNA, 120 bp, Artificial Sequence
  ENSG00000141748_6 (sequence is synthesized)
ttccttactctcagcaccatcaaagaccactcgtggcatatacaaggctgctgtgccctcaccagggaagggctgcctgccagacttcagtggatggaatctcaggccgctgctaactga

SEQ ID NO: 370323 - DNA, 120 bp, Artificial Sequence
  ENSG00000141748_7 (sequence is synthesized)
ccattctctaccggttgtaagtgactctcgggcggggagggtagagagctgggcctcccaccagactgacaggcagggggaccaatcactggagctcttccctgggttcccgggctcctc

SEQ ID NO: 370324 - DNA, 120 bp, Artificial Sequence
  ENSG00000141748_8 (sequence is synthesized)
agaaagagccaggcatgtataggcaggaaccagtagatacagagcctgggagataaacctgtgaaggcaggtgggggctgttcgtggaagctcttgaatgtcaagtggagactgatctga

SEQ ID NO: 370325 - DNA, 120 bp, Artificial Sequence
  ENSG00000141748_9 (sequence is synthesized)
atccacttaagcaaagaaagaaattcacaagcaacagcaggaaactccaccttccattccctcctcaggcctggcctcctggttctctgttggcccatgtactcctctgccaggcaaaat

SEQ ID NO: 370326 - DNA, 120 bp, Artificial Sequence
  ENSG00000141748_10 (sequence is synthesized)
gaaggaaagaccaccattctctaccggtttgtggtctacagaccagtcacacaggcatcacctgaaagcttattaggaatgcaaaaccatggccgggcgctgttgctctcaaagtgcctg

SEQ ID NO: 370327 - DNA, 120 bp, Artificial Sequence
  ENSG00000141748_11 (sequence is synthesized)
cccgcaaacttcccagccttcctcaatcctcttaaacttgtgttcacattccttttttaatactccaagtgccatttctcaggctgtagcttaactcattctacatcagtctgacagcaa

SEQ ID NO: 370328 - DNA, 120 bp, Artificial Sequence
  ENSG00000141748_12 (sequence is synthesized)
cacattcctcctgtgtgcagggttctggaccaggcagggagtgattgggctggcgggggaggtcatatgctggttaacaatatatgaatcccaccctggtactcacagttgatgggagga

SEQ ID NO: 370329 - DNA, 120 bp, Artificial Sequence
  ENSG00000141748_13 (sequence is synthesized)
aacagacttgcccgtctataagcccagtgtagggagaagccccatgtggctggagaaccaagtcagggctggggaagcaggtggcttttatggcagggcagctaatgggtctcaggcatt

SEQ ID NO: 370330 - DNA, 120 bp, Artificial Sequence
  ENSG00000141748_14 (sequence is synthesized)
ctgtgctttaggaaggttaataggggccatggagaggatgccttgggaaaggagaggaagatgcagggagaccagttagaaagttgttaccttaatggagggttgttaccttagtggagg

SEQ ID NO: 370331 - DNA, 120 bp, Artificial Sequence
  ENSG00000141748_15 (sequence is synthesized)
ctgcaggaaggcagtacagtcgggtggaaggagctggctccctggtgtgttggctggatctcctgctaaccattcctgcagcctgagggcacgttgccttttggacttctccttttgtta

SEQ ID NO: 370332 - DNA, 120 bp, Artificial Sequence
  ENSG00000141748_16 (sequence is synthesized)
tctgattttttgtttttttccccccagcttaagcaaagaaagaaattcacaagcaacagcaggaaactccaccttccattccctcctcaggcctggcctcctggttctctgttggcccat

SEQ ID NO: 370333 - DNA, 120 bp, Artificial Sequence
  ENSG00000141748_17 (sequence is synthesized)
gtactcctctgccaggtatctggggcctctctgcagggtctccagccggaggatctctcttcatgctccatccttgtcttcaggcgcccacttttggggatcaggaagctgtgcctgggc

SEQ ID NO: 370334 - DNA, 120 bp, Artificial Sequence
  ENSG00000141748_18 (sequence is synthesized)
agtaggtttgtccgtgaattgtaggagtactgatttatcctagaagttgccaagcatcaaggggagaccctgcccttccccaggggaatgcaatttgagtgggcccacaagacccacgct

SEQ ID NO: 370335 - DNA, 120 bp, Artificial Sequence
  ENSG00000141748_19 (sequence is synthesized)
ccctcctgcacctgtccggcccgggaagtgccatgggacagctgatcgccaagttaatgagcatcttcgggaaccagggtaaggggcgcacagggcatccaagcgagcgctttgatctcg

SEQ ID NO: 370336 - DNA, 120 bp, Artificial Sequence
  ENSG00000141748_20 (sequence is synthesized)
ccctcttctgggactcctctgatctgtggtcggacgcacggggggacctcgggctccgagggtcgtatatgggcgctcctcgactgccccgcggcctcccctgcccccgtccctgcctgc

SEQ ID NO: 370337 - DNA, 120 bp, Artificial Sequence
  ENSG00000141748_21 (sequence is synthesized)
tcctcttgggtcccggcgcttcggtgcgccccaggacgcaaagctgggcgaccctcctttctccccgctaaacggagccagcggcggggatggggggctgctgcgagtttcctgcgattg

SEQ ID NO: 370338 - DNA, 120 bp, Artificial Sequence
  ENSG00000141748_22 (sequence is synthesized)
tgacttcgcgttatgctctttctctaaacaccgtctcttggcaagccccgaagcgccccgggcctttcagacacttttctggaatgtgaagggaggtgggggctcagctgtcttttccac

SEQ ID NO: 370339 - DNA, 120 bp, Artificial Sequence
  ENSG00000141748_23 (sequence is synthesized)
cgtcccggagtggggcaggtgtcggagctgggtgggaagcagacgcggtacggtgggcagaggtccccagcctgcggggagcgctatctccttcctgggaggtctggtgggggcacacag

SEQ ID NO: 370340 - DNA, 120 bp, Artificial Sequence
  ENSG00000141748_24 (sequence is synthesized)
tcccttggtcttcgggtttggccctgacgctgcccttcctccgacgcttccagagcacacggtcatcatcgtgggactggacaatgaaggaaagaccaccattctctaccggttgtaagt

SEQ ID NO: 370341 - DNA, 120 bp, Artificial Sequence
  ENSG00000141748_25 (sequence is synthesized)
tctagggcctggctgaaccaatggatgactgaccatcagaacccttctcctgcctctctcctgtgagaatctggttcacagttggctcctgggccaagccaatttggcatctccccacag

SEQ ID NO: 370342 - DNA, 80 bp, Artificial Sequence
  ENSG00000141750_0 (sequence is synthesized)
tggggccggcgggggaggggaggggatggggggcgggcgcagcggacggcggagccggctggacacggacagctccttgg

SEQ ID NO: 370343 - DNA, 120 bp, Artificial Sequence
  ENSG00000141750_1 (sequence is synthesized)
ctccttggctccctccctcggctcatccccgcggccccacttccctcctccccgcgctgcgagcagcatcctctgcagaccctcggtcctcgcgcccggggtcgtcccgctcctgcggct

SEQ ID NO: 370344 - DNA, 120 bp, Artificial Sequence
  ENSG00000141750_2 (sequence is synthesized)
cagcgtggtggcctcccctcgcccgccaccccggcaactttctctgcccgctcccgcgggttgggggctgccgtgccgggggctaactgggggcagcctctggagaacggcttcagagtc

SEQ ID NO: 370345 - DNA, 120 bp, Artificial Sequence
  ENSG00000141750_3 (sequence is synthesized)
ccggagacgcccgccacccgcagcctgcccgcggtgggcctgccgtcggatctcggcaccctctcctcccctctccccgaaccatgaccgagatgagcgagaaggagaacgaaccggatg

SEQ ID NO: 370346 - DNA, 120 bp, Artificial Sequence
  ENSG00000141750_4 (sequence is synthesized)
acgcggccacccacagccccccagggaccgtctccgccctccaggaaaccaagctccagcgattcaagcgctccctctccctcaagaccatcctccgaagtaagagcttggagaacttct

SEQ ID NO: 370347 - DNA, 120 bp, Artificial Sequence
  ENSG00000141750_5 (sequence is synthesized)
tccttcgctcgggctctgagctcaagtgccccaccgaggtgctgctgacgcccccaaccccactgccccctccctccccaccacccacagcctcggacaggggcctggctaccccatccc

SEQ ID NO: 370348 - DNA, 120 bp, Artificial Sequence
  ENSG00000141750_6 (sequence is synthesized)
cctccccatgcccagtcccacgccccctggcagcgctcaaaccagtgaggctgcacagcttccaggaacatgtcttcaagcgagctagcccttgtgagctgtgccaccagctcatcgtag

SEQ ID NO: 370349 - DNA, 120 bp, Artificial Sequence
  ENSG00000141750_7 (sequence is synthesized)
gaaactccaaacagggcttgcgatgtaagatgtgcaaagtcagcgtccacctctggtgctctgaggagatctcccaccagcaatgcccaggcaagacgtccacctccttccgccgcaact

SEQ ID NO: 370350 - DNA, 120 bp, Artificial Sequence
  ENSG00000141750_8 (sequence is synthesized)
tcagttcccctctcctggtgcatgagccgccaccagtctgtgccacaagcaaagagtccccacccactggggacagtgggaaggtggaccctgtctacgagaccctgcgctatggcacct

SEQ ID NO: 370351 - DNA, 120 bp, Artificial Sequence
  ENSG00000141750_9 (sequence is synthesized)
ccctggcactgatgaaccgctccagtttcagcagcacctctgagtccccgacaaggagcctgagtgagcgggatgagctgaccgaggatggggaaggcagcatccgcagctctgaggagg

SEQ ID NO: 370352 - DNA, 120 bp, Artificial Sequence
  ENSG00000141750_10 (sequence is synthesized)
ggcctggtgacagtgcatctccagtattcacagccccagcagagagtgaagggccaggaccagaggagaagagtcctggacagcagctccccaaagccaccctgcggaaggatgtggggc

SEQ ID NO: 370353 - DNA, 120 bp, Artificial Sequence
  ENSG00000141750_11 (sequence is synthesized)
ccatgtactcctacgttgcactctacaagtttctgccccaggagaacaatgatctggctctgcagcctggagatcggatcatgctggtggatgactctaacgaggactggtggaagggca

SEQ ID NO: 370354 - DNA, 120 bp, Artificial Sequence
  ENSG00000141750_12 (sequence is synthesized)
agatcggcgaccgggttggcttcttcccagctaattttgtgcaacgggtgaggccaggcgagaatgtttggcgctgctgccaacccttctccgggaacaaggaacagggttacatgagcc

SEQ ID NO: 370355 - DNA, 120 bp, Artificial Sequence
  ENSG00000141750_13 (sequence is synthesized)
tcaaggagaaccagatctgcgtgggcgtgggcagaagcaaggatgctgacggcttcatccgcgtcagcagtggcaagaagcggggcctggtgccagtcgacgccctgactgagatctgag

SEQ ID NO: 370356 - DNA, 120 bp, Artificial Sequence
  ENSG00000141750_14 (sequence is synthesized)
ggcccccttgtccactccatacccttcctccctctgtccctctcctaggtgccacttaccgtggcttaggagccttttgtactggggaagattttatttcttgggtggggtgccctgagt

SEQ ID NO: 370357 - DNA, 120 bp, Artificial Sequence
  ENSG00000141750_15 (sequence is synthesized)
gggttgatcctctgggacttggcggggatggggtggggtgggagggaatgaggaagctacaggtaggtccacccaacgcccaggcaccccagtctacttgctgggctgagtccagccctg

SEQ ID NO: 370358 - DNA, 120 bp, Artificial Sequence
  ENSG00000141750_16 (sequence is synthesized)
gggaagattcctggggaatttatttgctgcttctcccagccttcccctgcccacaccacctgcgcatgcctggcacacccctctccccacagagcctctgcttgggtctatgtgtgtgtg

SEQ ID NO: 370359 - DNA, 120 bp, Artificial Sequence
  ENSG00000141750_17 (sequence is synthesized)
accgtgcatctgctcctttgcaagtggggtcttgggagcaggcctttttgtgtcctcggccctccacccttggtggggaggggacccaggaccataggaaggtcctgagtccacctcctg

SEQ ID NO: 370360 - DNA, 120 bp, Artificial Sequence
  ENSG00000141750_18 (sequence is synthesized)
gtctccacctctgtcattccgtcaattctcaggaaagttttgcaggaatctctcccgttacttgaaacctgggcggacagatgaggggaaggctgaggtccctggaaggtgtaacaaatc

SEQ ID NO: 370361 - DNA, 71 bp, Artificial Sequence
  ENSG00000141750_19 (sequence is synthesized)
atgaggggaaggctgaggtccctggaaggtgtaacaaatcagagactatctgttcaagtagaaaacccaag

SEQ ID NO: 370362 - DNA, 65 bp, Artificial Sequence
  ENSG00000141750_20 (sequence is synthesized)
gaaacttagccaggcatgatgggggtctgcctgtaatgccagctactccagaggctgaggcaaga

SEQ ID NO: 370363 - DNA, 120 bp, Artificial Sequence
  ENSG00000141750_21 (sequence is synthesized)
cctggacacacggaaacccaactgagaacaaaatcctggcccgtgcttggtcaaagcaaacccatttcactgtcaggacccccggtcacacaggaaccacccgccaggggagcctgtgac

SEQ ID NO: 370364 - DNA, 120 bp, Artificial Sequence
  ENSG00000141750_22 (sequence is synthesized)
tgtcagttcctgtcccaggctttgcccggccgccccaggaacccaaccctctgggctgacctttctcctgcttctctccaggctctgcaggggacagggcaggtgctgcaggagcccctt

SEQ ID NO: 370365 - DNA, 120 bp, Artificial Sequence
  ENSG00000141750_23 (sequence is synthesized)
tgctggctttatctgctcccttgttctggacacagagccctgggaaaaagagggggtggaagacagacaaggaaggtggaatgttctgttttggccaccaggaaatggggtggggtgggc

SEQ ID NO: 370366 - DNA, 120 bp, Artificial Sequence
  ENSG00000141750_24 (sequence is synthesized)
atacacagagaggacccctctcttaatacagctgcttttctcggtgccaacctccctcccccaagctcagatcctcctcttatgcccttgattgtgccagcccatgccacccccatcctg

SEQ ID NO: 370367 - DNA, 120 bp, Artificial Sequence
  ENSG00000141750_25 (sequence is synthesized)
ggcacagttacaccctcccatgcagtgggagaaacacagaccctcgtacccaaaggcccctgccccacttctcccccacaaagcggggtctcaagccacactgccctgtttgctgccatg

SEQ ID NO: 370368 - DNA, 120 bp, Artificial Sequence
  ENSG00000141750_26 (sequence is synthesized)
aggcccccccccccagcaatatcccaggggcgggcccaatgcccactgtacatgaggctgcatgatgggtctggggccttgctgattccccagacccctaattaaatgtttcttgtccca

SEQ ID NO: 370369 - DNA, 80 bp, Artificial Sequence
  ENSG00000141753_0 (sequence is synthesized)
tgggccgggccgaggatgcggcgcagcgcctcggcggccaggcttgctcccctccggcacgcctgctaacttcccccgct

SEQ ID NO: 370370 - DNA, 120 bp, Artificial Sequence
  ENSG00000141753_1 (sequence is synthesized)
ggcttgctcccctccggcacgcctgctaacttcccccgctacgtccccgttcgcccgccgggccgccccgtctccccgcgccctccgggtcgggtcctccaggagcgccaggcgctgccg

SEQ ID NO: 370371 - DNA, 120 bp, Artificial Sequence
  ENSG00000141753_2 (sequence is synthesized)
cccagtcctcgggcggtcatgctgcccctctgcctcgtggccgccctgctgctggccgccgggcccgggccgagcctgggcgacgaagccatccactgcccgccctgctccgaggagaag

SEQ ID NO: 370372 - DNA, 120 bp, Artificial Sequence
  ENSG00000141753_3 (sequence is synthesized)
ccactgcccgccctgctccgaggagaagctggcgcgctgccgcccccccgtgggctgcgaggagctggtgcgagagccgggctgcggctgttgcgccacttgcgccctgggcttggggat

SEQ ID NO: 370373 - DNA, 120 bp, Artificial Sequence
  ENSG00000141753_4 (sequence is synthesized)
gccctgcggggtgtacaccccccgttgcggctcgggcctgcgctgctacccgccccgaggggtggagaagcccctgcacacactgatgcacgggcaaggcgtgtgcatggagctggcgga

SEQ ID NO: 370374 - DNA, 120 bp, Artificial Sequence
  ENSG00000141753_5 (sequence is synthesized)
gatcgaggccatccaggaaagcctgcagccctctgacaaggacgagggtgaccaccccaacaacagcttcagcccctgtagcgcccatgaccgcaggtgcctgcagaagcacttcgccaa

SEQ ID NO: 370375 - DNA, 120 bp, Artificial Sequence
  ENSG00000141753_6 (sequence is synthesized)
aattcgagaccggagcaccagtgggggcaagatgaaggtcaatggggcgccccgggaggatgcccggcctgtgccccagggctcctgccagagcgagctgcaccgggcgctggagcggct

SEQ ID NO: 370376 - DNA, 120 bp, Artificial Sequence
  ENSG00000141753_7 (sequence is synthesized)
ggccgcttcacagagccgcacccacgaggacctctacatcatccccatccccaactgcgaccgcaacggcaacttccaccccaagcagtgtcacccagctctggatgggcagcgtggcaa

SEQ ID NO: 370377 - DNA, 120 bp, Artificial Sequence
  ENSG00000141753_8 (sequence is synthesized)
gtgctggtgtgtggaccggaagacgggggtgaagcttccggggggcctggagccaaagggggagctggactgccaccagctggctgacagctttcgagagtgaggcctgccagcaggcca

SEQ ID NO: 370378 - DNA, 120 bp, Artificial Sequence
  ENSG00000141753_9 (sequence is synthesized)
gctgacccagagtggagtctgagtctgagtcctgtctctgcctgcggcccagaagtttccctcaaatgcgcgtgtgcacgtgtgcgtgtgcgtgcgtgtgtgtgtgtttgtgagcatggg

SEQ ID NO: 370379 - DNA, 120 bp, Artificial Sequence
  ENSG00000141753_10 (sequence is synthesized)
tgtgcccttggggtaagccagagcctggggtgttctctttggtgttacacagcccaagaggactgagactggcacttagcccaagaggtctgagccctggtgtgtttccagatcgatcct

SEQ ID NO: 370380 - DNA, 120 bp, Artificial Sequence
  ENSG00000141753_11 (sequence is synthesized)
ggattcactcactcactcattccttcactcatccagccacctaaaaacatttactgaccatgtactacgtgccagctctagttttcagccttgggaggttttattctgacttcctctgat

SEQ ID NO: 370381 - DNA, 120 bp, Artificial Sequence
  ENSG00000141753_12 (sequence is synthesized)
tttggcatgtggagacactcctataaggagagttcaagcctgtgggagtagaaaaatctcattcccagagtcagaggagaagagacatgtaccttgaccatcgtccttcctctcaagcta

SEQ ID NO: 370382 - DNA, 120 bp, Artificial Sequence
  ENSG00000141753_13 (sequence is synthesized)
gccagagggtgggagcctaaggaagcgtggggtagcagatggagtaatggtcacgaggtccagacccactcccaaagctcagacttgccaggctccctttctcttcttccccaggtcctt

SEQ ID NO: 370383 - DNA, 120 bp, Artificial Sequence
  ENSG00000141753_14 (sequence is synthesized)
cctttaggtctggttgttgcaccatctgcttggttggctggcagctgagagccctgctgtgggagagcgaagggggtcaaaggaagacttgaagcacagagggctagggaggtggggtac

SEQ ID NO: 370384 - DNA, 120 bp, Artificial Sequence
  ENSG00000141753_15 (sequence is synthesized)
atttctctgagcagtcagggtgggaagaaagaatgcaagagtggactgaatgtgcctaatggagaagacccacgtgctaggggatgaggggcttcctgggtcctgttccctaccccattt

SEQ ID NO: 370385 - DNA, 120 bp, Artificial Sequence
  ENSG00000141753_16 (sequence is synthesized)
gtggtcacagccatgaagtcaccgggatgaacctatccttccagtggctcgctccctgtagctctgcctccctctccatatctccttcccctacacctccctccccacacctccctactc

SEQ ID NO: 370386 - DNA, 120 bp, Artificial Sequence
  ENSG00000141753_17 (sequence is synthesized)
ccctgggcatcttctggcttgactggatggaaggagacttaggaacctaccagttggccatgatgtcttttcttctttttcttttttttaacaaaacagaacaaaaccaaaaaatgtcca

SEQ ID NO: 370387 - DNA, 120 bp, Artificial Sequence
  ENSG00000141756_0 (sequence is synthesized)
agaggacaggaagagggggagccagttctgggaggcggggggaaggaggttggtggcgactccctcgctcgccctcactgccggcggtcccaactccaggcaccatgttccccgcgggcc

SEQ ID NO: 370388 - DNA, 120 bp, Artificial Sequence
  ENSG00000141756_1 (sequence is synthesized)
cccccagccacagcctcctccggctccccctgctgcagttgctgctactggtggtgcaggccgtggggagggggctgggccgcgccagcccggccgggggccccctggaagatgtggtca

SEQ ID NO: 370389 - DNA, 120 bp, Artificial Sequence
  ENSG00000141756_2 (sequence is synthesized)
tcgagaggtaccacatccccagggcctgtccccgggaagtgcagatgggggattttgtgcgctaccactacaacggcacttttgaagatggcaagaagtttgattcaagctatgatcgca

SEQ ID NO: 370390 - DNA, 120 bp, Artificial Sequence
  ENSG00000141756_3 (sequence is synthesized)
acaccttggtggccatcgtggtgggtgtggggcgcctcatcactggcatggaccgaggcctcatgggcatgtgtgtcaacgagcggcgacgcctcattgtgcctccccacctgggctatg

SEQ ID NO: 370391 - DNA, 120 bp, Artificial Sequence
  ENSG00000141756_4 (sequence is synthesized)
ggagcatcggcctggcggggctcattccaccggatgccaccctctacttcgatgtggttctgctggatgtgtggaacaaggaagacaccgtgcaggtgagcacattgctgcgcccgcccc

SEQ ID NO: 370392 - DNA, 120 bp, Artificial Sequence
  ENSG00000141756_5 (sequence is synthesized)
actgcccccgcatggtccaggacggcgactttgtccgctaccactacaatggcaccctgctggacggcacctccttcgacaccagctacagtaagggcggcacttatgacacctacgtcg

SEQ ID NO: 370393 - DNA, 120 bp, Artificial Sequence
  ENSG00000141756_6 (sequence is synthesized)
gctctggttggctgatcaagggcatggaccaggggctgctgggcatgtgtcctggagagagaaggaagattatcatccctccattcctggcctatggcgagaaaggctatgggacagtga

SEQ ID NO: 370394 - DNA, 120 bp, Artificial Sequence
  ENSG00000141756_7 (sequence is synthesized)
tccccccacaggcctcgctggtctttcacgtcctcctgattgacgtgcacaacccgaaggacgctgtccagctagagacgctggagctcccccccggctgtgtccgcagagccggggccg

SEQ ID NO: 370395 - DNA, 120 bp, Artificial Sequence
  ENSG00000141756_8 (sequence is synthesized)
gggacttcatgcgctaccactacaatggctccttgatggacggcaccctcttcgattccagctactcccgcaaccacacctacaatacctatatcgggcagggttacatcatccccggga

SEQ ID NO: 370396 - DNA, 120 bp, Artificial Sequence
  ENSG00000141756_9 (sequence is synthesized)
tggaccaggggctgcagggtgcctgcatgggggaacgccggagaattaccatccccccgcacctcgcctatggggagaatggaactggagacaagatccctggctctgccgtgctaatct

SEQ ID NO: 370397 - DNA, 120 bp, Artificial Sequence
  ENSG00000141756_10 (sequence is synthesized)
tcaacgtccatgtcattgacttccacaaccctgcggatgtggtggaaatcaggacactgtcccggccatctgagacctgcaatgagaccaccaagcttggggactttgttcgataccatt

SEQ ID NO: 370398 - DNA, 120 bp, Artificial Sequence
  ENSG00000141756_11 (sequence is synthesized)
cacccagctgttcacctcgcatgactacggggccccccaggaggcgactctcggggccaacaaggtgatcgaaggcctggacacgggcctgcagggcatgtgtgtgggagagaggcggca

SEQ ID NO: 370399 - DNA, 120 bp, Artificial Sequence
  ENSG00000141756_12 (sequence is synthesized)
gctcatcgtgcccccgcacctggcccacggggagagtggagcccggggagtcccaggcagtgctgtgctgctgtttgaggtggagctggtgtcccgggaggatgggctgcccacaggcta

SEQ ID NO: 370400 - DNA, 120 bp, Artificial Sequence
  ENSG00000141756_13 (sequence is synthesized)
cctgtttgtgtggcacaaggaccctcctgccaacctgtttgaagacatggacctcaacaaggatggcgaggtccctccggaggagttctccaccttcatcaaggctcaagtgagtgaggg

SEQ ID NO: 370401 - DNA, 120 bp, Artificial Sequence
  ENSG00000141756_14 (sequence is synthesized)
caaaggacgcctcatgcctgggcaggaccctgagaaaaccataggagacatgttccagaaccaggaccgcaaccaggacggcaagatcacagtcgacgagctcaagctgaagtcagatga

SEQ ID NO: 370402 - DNA, 120 bp, Artificial Sequence
  ENSG00000141756_15 (sequence is synthesized)
ggacgaggagcgggtccacgaggagctctgaggggcagggagcctggccaggcctgagacacagaggcccactgcgagggggacagtggcggtgggactgacctgctgacagtcaccctc

SEQ ID NO: 370403 - DNA, 120 bp, Artificial Sequence
  ENSG00000141756_16 (sequence is synthesized)
cctctgctgggatgaggtccaggagccaactaaaacaatggcagaggagacatctctggtgttcccaccaccctagatgaaaatccacagcacagacctctaccgtgtttctcttccatc

SEQ ID NO: 370404 - DNA, 120 bp, Artificial Sequence
  ENSG00000141756_17 (sequence is synthesized)
cctaaaccacttccttaaaatgtttggatttgcaaagccaatttggggcctgtggagcctggggttggatagggccatggctggtcccccaccatacctcccctccacatcactgacaca

SEQ ID NO: 370405 - DNA, 120 bp, Artificial Sequence
  ENSG00000141756_18 (sequence is synthesized)
gctgagcttgttatccatctccccaaactttctctttctttgtacttcttgtcatccccactcccagccccttttcctctatgtgacagctccctaggacccctctgccttcctccccaa

SEQ ID NO: 370406 - DNA, 120 bp, Artificial Sequence
  ENSG00000141756_19 (sequence is synthesized)
tcctgactggctcctagggaaggggaaggctcctggagggcagccctacctctcccatgccctttgccctcctccctcgcctccagtggaggctgagctgaccctgggctgctggaggcc

SEQ ID NO: 370407 - DNA, 120 bp, Artificial Sequence
  ENSG00000141756_20 (sequence is synthesized)
agactgggctgtagttagcttttcatccctaaagaaggctcctttccctaaggaaccatagaagagaggaagaaaacaaagggcatgtgtgagggaagctgcttgggtgggtgttagggc

SEQ ID NO: 370408 - DNA, 120 bp, Artificial Sequence
  ENSG00000141756_21 (sequence is synthesized)
tatgaaatcttggatttggggctgaggggtgggagggagggcagagctctgcacactcaaaggctaaactggtgtcagtccttttttcctttgttccaaataaaagattaaaccaatggc

SEQ ID NO: 370409 - DNA, 120 bp, Artificial Sequence
  ENSG00000141756_22 (sequence is synthesized)
gtagtgcctccctcagactctaacacactcagcctggccccctcctcctattgcaaccccctcccccgctcctcccggccaggccagctcagtcttcccagcccccattccacgtggacc

SEQ ID NO: 370410 - DNA, 120 bp, Artificial Sequence
  ENSG00000141756_23 (sequence is synthesized)
tggggagggagggtggttatggaaaaacagaaccagcatacccccaggacccagctgtgctgggagcctcagtgtcctcacctgtcaagtgggcaagccatgctgatccgcagggagaca

SEQ ID NO: 370411 - DNA, 120 bp, Artificial Sequence
  ENSG00000141756_24 (sequence is synthesized)
caagccatgctgatccgcagggtaagttactgggagtttgcaagacggtgagtggaaaagggctttcttactggaaagctgccttcccctgccccctgccccagtgaaagtttgttagaa

SEQ ID NO: 370412 - DNA, 120 bp, Artificial Sequence
  ENSG00000141756_25 (sequence is synthesized)
ttgactctggacaaacatcccgtcccatcctcctttggatcctcagggtcgggaaggggtatcaggtctggggacctccatggagagacctcaagtagcctctcctagtgctctgagctg

SEQ ID NO: 370413 - DNA, 120 bp, Artificial Sequence
  ENSG00000141756_26 (sequence is synthesized)
tctgattcacacgaaggctcagtatgagccggtggtggccctggggaaaacccagctcaggtcttactggaggagcaagaagcagggctgctgatgggcgggaaagggctctggagagtg

SEQ ID NO: 370414 - DNA, 120 bp, Artificial Sequence
  ENSG00000141756_27 (sequence is synthesized)
gcacccagctgttcacctcgtgggtccgggggggggccgggactgggcaggtgggtgggcacaggcatggggagtcctcctcagtgcacccccgacgcctgctcctccctcttggtcctc

SEQ ID NO: 370415 - DNA, 120 bp, Artificial Sequence
  ENSG00000141756_28 (sequence is synthesized)
gagcgccaggggagcattcaacctcttgctgctttctgtaagtccccatctcggagcatgtcgaggagatgaaattctctgcttcgcaggggaagggaaggtgaagccaacagttggggg

SEQ ID NO: 370416 - DNA, 120 bp, Artificial Sequence
  ENSG00000141756_29 (sequence is synthesized)
agaactgctctttctatttcacagaggggaaactgacgcagggagccatgagccctcgaggccacactttagggggcagaggcaagatgagaagggaaccccacgtctgcacagctgggc

SEQ ID NO: 370417 - DNA, 120 bp, Artificial Sequence
  ENSG00000141756_30 (sequence is synthesized)
ccctgcactctgctgcgtggcccaagtcaccagtgggagtaactccggaactgagggcttgttctgggcccacctcagagggagaggggtgtgcgctggcaggggacagggtggctgctg

SEQ ID NO: 370418 - DNA, 120 bp, Artificial Sequence
  ENSG00000141756_31 (sequence is synthesized)
ctggtaggggcgttccccagccaccacctcagctcctcctccgaactgcccattgtgtctaggccaccccctcccacagtgggattccaggcaccgctcggcccctctcatcacaaaaac

SEQ ID NO: 370419 - DNA, 120 bp, Artificial Sequence
  ENSG00000141759_0 (sequence is synthesized)
agacgttctgccgggtggcagtcccagcggagtttgcgtgtgcgggcgggaccggatttcgtccgtgggcccgggggcggcgggggccggggagtgaggggccggctgagcccacctcgc

SEQ ID NO: 370420 - DNA, 120 bp, Artificial Sequence
  ENSG00000141759_1 (sequence is synthesized)
tgggccctccctggcgccccgccttgggcggcggcgagcgcgcgggccgccatgtcgtacatgctcccgcacctgcacaacggctggcaggtggaccaggccatcctctcggaggaggac

SEQ ID NO: 370421 - DNA, 120 bp, Artificial Sequence
  ENSG00000141759_2 (sequence is synthesized)
cgcgtggtcgtcatccgcttcggccacgactgggatcctacgtgcatgaagatggacgaggtcctgtacagcatcgccgagaaggttaaaaattttgcagttatttatcttgtggatatt

SEQ ID NO: 370422 - DNA, 120 bp, Artificial Sequence
  ENSG00000141759_3 (sequence is synthesized)
acagaagtgcctgacttcaacaaaatgtatgagttatacgatccatgtactgtcatgtttttcttcaggaacaagcacatcatgattgacttggggactggcaacaacaacaagattaac

SEQ ID NO: 370423 - DNA, 120 bp, Artificial Sequence
  ENSG00000141759_4 (sequence is synthesized)
tgggccatggaggacaagcaggagatggtggacatcatcgagacggtgtaccgcggggcccgcaaaggccgcggcctggtggtgtcccccaaggactactccaccaagtaccgctactga

SEQ ID NO: 370424 - DNA, 120 bp, Artificial Sequence
  ENSG00000141759_5 (sequence is synthesized)
ggcgccctcagtctgcgcggataaatgtcgtggagccctttttgtatggaaacgttttaagctatttaaagcctttggaaaatacaggaagctccagggctggagcacctctgagatgga

SEQ ID NO: 370425 - DNA, 120 bp, Artificial Sequence
  ENSG00000141759_6 (sequence is synthesized)
attgataacatggtcttaactcaccgaaataaacaagcacgtggtgagaggagcaggcctacttgtttgttctcaggaaacttaatgaatagattactgattttcctagtcaaagttaat

SEQ ID NO: 370426 - DNA, 120 bp, Artificial Sequence
  ENSG00000141759_7 (sequence is synthesized)
tcttacccttggagtaaaacgaaggtgtttatcctgtgagcctgtgcgttttgcatactgggttggtttgctggggctgcggtgacagcatatgccgcgagctgggctttaacagagatg

SEQ ID NO: 370427 - DNA, 120 bp, Artificial Sequence
  ENSG00000141759_8 (sequence is synthesized)
tgtgctctcacagctttgcaggcgggggtctgagatcagggtgtcgcgggtggggggtcactgctgaggccgtgaggggaatctgctcaggcctgtccctggcttctgggggctgctggt

SEQ ID NO: 370428 - DNA, 120 bp, Artificial Sequence
  ENSG00000141759_9 (sequence is synthesized)
ggtattttcagttccttggtgtgtggatacttcgccccatctctgccttcacctgtgtcctccctgtgtgggtgctggtgtccaaaatttccccttttcgtagtgacaccagctgtgttg

SEQ ID NO: 370429 - DNA, 120 bp, Artificial Sequence
  ENSG00000141759_10 (sequence is synthesized)
gattggggcccaccctgctccagcatggcctaatcttaactaattacatttgcaaggatcttatgtccacaaaagtcacagtctgaggtgctgggggttaggacttcaatatataaattt

SEQ ID NO: 370430 - DNA, 120 bp, Artificial Sequence
  ENSG00000141759_11 (sequence is synthesized)
tgcggttacacaattcaatccatgacagaatccaaaggtttactctggttataaaaacagtacaataaaatattgtttatagccttccctgtaaggaataggagagctattttttattct

SEQ ID NO: 370431 - DNA, 120 bp, Artificial Sequence
  ENSG00000141759_12 (sequence is synthesized)
agctattttttattcttcccaagattgtatttgatgtaaacatattttctgtagaagccatggcccttcagttcatatagttagaaaatttccttattggccaggcacggtggctcacac

SEQ ID NO: 370432 - DNA, 120 bp, Artificial Sequence
  ENSG00000141759_13 (sequence is synthesized)
actccgtctcaaaaaaagaaaagaaaatgtccttattacagtctcaggtttctcttgccctctgtcatcctagcagtgtggatggttggttgggatcttcgtgtcccgtctcagcacact

SEQ ID NO: 370433 - DNA, 120 bp, Artificial Sequence
  ENSG00000141759_14 (sequence is synthesized)
cgagctctgaagtgaaagtgaggaagggcagggatgggggcacttgagcacaccgtgggccctctgacctcagacccaggctctgccccaccaagtgaccttgggcagggtaccttctct

SEQ ID NO: 370434 - DNA, 120 bp, Artificial Sequence
  ENSG00000141759_15 (sequence is synthesized)
gagctttgtttcctccttggtaaaggcggataatagtgtctgccctgcacacagatgtggacgcagaagcacgtggtgcctgccgggcacaggagtggtgcacagggctcgctgctgtcg

SEQ ID NO: 370435 - DNA, 120 bp, Artificial Sequence
  ENSG00000141759_16 (sequence is synthesized)
ggagattgattgctgttgtggaaacgggagggtacttacagaatgaagcacattttttacatacagtacaaatgagtgtgtgctttttaaatggatttaaaattcaaatgcaaatctgca

SEQ ID NO: 370436 - DNA, 120 bp, Artificial Sequence
  ENSG00000141759_17 (sequence is synthesized)
gtttaatctcccaagtgctgatttttctatgtataaagtaggagagtgcaacagcgtatcggaatgaggggctagggagaacgtgtatgtgacctcgagtacctggcatgtaacagacac

SEQ ID NO: 370437 - DNA, 120 bp, Artificial Sequence
  ENSG00000141759_18 (sequence is synthesized)
tcagtattacactcctgctatttctccagagcaggtgaaacagacggccaggaagcacacgaagagacactcagcatcactgcttgttaaggaaggtgcaaatcaaaaccacagtgagac

SEQ ID NO: 370438 - DNA, 120 bp, Artificial Sequence
  ENSG00000141759_19 (sequence is synthesized)
gccacttcacacctacaagttcggctagatacaaaaagatcgcaacaagcgtttgcaaggatgtggagaaattggagccctcacacactgctggtggcaaagtggtaacacaggcaggca

SEQ ID NO: 370439 - DNA, 82 bp, Artificial Sequence
  ENSG00000141759_20 (sequence is synthesized)
tcacacactgctggtggcaaagtggtaacacaggcaggcaggtcgtcaaaaagttaaacatgggccgggtgcaggtgtctca

SEQ ID NO: 370440 - DNA, 120 bp, Artificial Sequence
  ENSG00000141759_21 (sequence is synthesized)
agctgggcatggtggtgcgtgcctgtgggcccagctactcggcgggctgaggcaggaggatcacttaagccccagaggtcaaggctgcagtaagccatggttgtgccactgcactccagc

SEQ ID NO: 370441 - DNA, 89 bp, Artificial Sequence
  ENSG00000141759_22 (sequence is synthesized)
ctgggcaactagataaacatggtgttaccatttgacccagcagtttcatacccaggagaattgaacgcatatgtccacatagaaactcg

SEQ ID NO: 370442 - DNA, 120 bp, Artificial Sequence
  ENSG00000141759_23 (sequence is synthesized)
acccaggagaattgaacgcatatgtccacatagaaactcgtacacagaagccaaaatgtggaaacccacgtgtccatcaacagatgaacggttaaacaaaatgtccatccatagaacgga

SEQ ID NO: 370443 - DNA, 120 bp, Artificial Sequence
  ENSG00000141759_24 (sequence is synthesized)
atattattcagtcataaacagaatgaagtactgtaagtgaaaagccagttactacatattgtgtgattccatttatacggaatttctagaataggcacatccatagagacggattagtgg

SEQ ID NO: 370444 - DNA, 120 bp, Artificial Sequence
  ENSG00000141759_25 (sequence is synthesized)
ttgcttaagactgggagggagggggaaataggaggtgacagctaatgggcagttttatttttgatgtaatgaaaatgtgcttacataagccgagcaggcataaacagaaaaagtgcccta

SEQ ID NO: 370445 - DNA, 120 bp, Artificial Sequence
  ENSG00000141759_26 (sequence is synthesized)
agattgtgataatggtacaattctgtcaattgcataattggtggatgatgtgtgaattatgtctcttaggataacagctttactggcgttaccagaaaaagataaaataattacattcca

SEQ ID NO: 370446 - DNA, 120 bp, Artificial Sequence
  ENSG00000141759_27 (sequence is synthesized)
ggtggtgttcagatcctgctgccggcagctcgaggctaggatggctggagatgtgagggcctttgtctcatcacatccgagcacagctcagcaagatgctcttagctagaaaacagattt

SEQ ID NO: 370447 - DNA, 120 bp, Artificial Sequence
  ENSG00000141759_28 (sequence is synthesized)
ttccagctgttttaaagttaaaaattttgcagttatttatcttgtggatattacagaagtgcctgacttcaacaaaatgtatgagttatacgatccatgtactgtcatgtttttcttcag

SEQ ID NO: 370448 - DNA, 120 bp, Artificial Sequence
  ENSG00000141759_29 (sequence is synthesized)
gggtgggcagggcgaagactgaagcgagaagggcagcgcgaggtgggcgactaccagagcgaagcgagcggcgtgtaagcggggtgaagacaacgccaggttaaaaattttgcagttatt

SEQ ID NO: 370449 - DNA, 120 bp, Artificial Sequence
  ENSG00000141759_30 (sequence is synthesized)
agagcgaagcgagcggcgtgtaagcggggtgaagacaacgccagcattgctggattttcctccaatccacgaccctccgggacactgaaggaatgctatttaacagaacagtcatcgttc

SEQ ID NO: 370450 - DNA, 120 bp, Artificial Sequence
  ENSG00000141759_31 (sequence is synthesized)
acgagcatctctgcgtctgtcttcaggatttggggctggctgatttggccttcctgggcctttagagatcaggtctgctacaatgtctgaccactgtgccttttccagccacttagcttt

SEQ ID NO: 370451 - DNA, 120 bp, Artificial Sequence
  ENSG00000141759_32 (sequence is synthesized)
tagattctgataatgagctcaaactcttgagcaaacccaattggatctttacgggaggcaggaaattctttatgcctcgcaactcagccattaaccagggttgacagacaatcacagggg

SEQ ID NO: 370452 - DNA, 120 bp, Artificial Sequence
  ENSG00000141759_33 (sequence is synthesized)
ttcccctaactgttaacagttgttcccgaaacgggttgatcatgagaggagtccctatggtgtccccttttccatgtcttccagatgagaggctgccactggcgataccagagaatcggc

SEQ ID NO: 370453 - DNA, 120 bp, Artificial Sequence
  ENSG00000141759_34 (sequence is synthesized)
gcgaagcgagcggcgtgtaagcggggtgaagacaacgccagtcctgaccttggaaggaggatacccaccactggaggctggagccactggaaagaggcgttaaaaattttgcagttattt

SEQ ID NO: 370454 - DNA, 120 bp, Artificial Sequence
  ENSG00000141759_35 (sequence is synthesized)
attgaatattgtcagtttggaagcttaatgtaatcaagatctctttagattattttattttgaaggaagttggttgtacagtcatgtcccaaaatcgtttgtatcaccaggcaatcagtg

SEQ ID NO: 370455 - DNA, 120 bp, Artificial Sequence
  ENSG00000141759_36 (sequence is synthesized)
tgaatctttgaaataattttcaaagtaacaattctagttttagcatttactcagtaacaaattacccttttgaaataactttgcggggaaacctaggtgaagtgtaattcaatgaaagat

SEQ ID NO: 370456 - DNA, 83 bp, Artificial Sequence
  ENSG00000141759_37 (sequence is synthesized)
gagctgattgcaccattgcactctacaaaaattgccctgatccacacaaattcttggttttgtttttataaatgtgcttctat

SEQ ID NO: 370457 - DNA, 120 bp, Artificial Sequence
  ENSG00000141759_38 (sequence is synthesized)
acacaaattcttggttttgtttttataaatgtgcttctataaaatgaaagccaaagtgttctgttatttcagtttttttttttaatctccttttaggttaaaaattttgcagttatttat

SEQ ID NO: 370458 - DNA, 120 bp, Artificial Sequence
  ENSG00000141759_39 (sequence is synthesized)
ggcctcaggaccttccaatcatggcagaaggcaaaggggaacaggcacgtcgcacggtgaaagctggggcggagtgtcacacacttggaacaacctcagctcactaccccgaggacagca

SEQ ID NO: 370459 - DNA, 120 bp, Artificial Sequence
  ENSG00000141759_40 (sequence is synthesized)
ccaagaggatgacgctcaaccattgatgagaaattcatcccatgatccagtcgcctcccaccaggcctcacctgcaacgctgggagttacgtttcaacctgagatttgggcagggacaaa

SEQ ID NO: 370460 - DNA, 120 bp, Artificial Sequence
  ENSG00000141759_41 (sequence is synthesized)
tatccaaactatatcaaatggttaaaaattttgcagttatttatcttgtggatattacagaagtgcctgacttcaacaaaatgtatgagttatacgatccatgtactgtcatgtttttct

SEQ ID NO: 370461 - DNA, 120 bp, Artificial Sequence
  ENSG00000141837_0 (sequence is synthesized)
atgtcccgagctgctatccccggctcggcccgggcagccgccttctgagcccccgacccgaggcgccgagccgccgccgcccgatgggctgggccgtggagcgtctccgcagtcgtagct

SEQ ID NO: 370462 - DNA, 120 bp, Artificial Sequence
  ENSG00000141837_1 (sequence is synthesized)
ccagccgccgcgctcccagccccggcagcctcagcatcagcggcggcggcggcggcggcggcgtcttccgcatcgttcgccgcagcgtaacccggagccctttgctctttgcagaatggc

SEQ ID NO: 370463 - DNA, 120 bp, Artificial Sequence
  ENSG00000141837_2 (sequence is synthesized)
ctctttgcagaatggcccgcttcggagacgagatgccggcccgctacgggggaggaggctccggggcagccgccggggtggtcgtgggcagcggaggcgggcgaggagccgggggcagcc

SEQ ID NO: 370464 - DNA, 120 bp, Artificial Sequence
  ENSG00000141837_3 (sequence is synthesized)
cggggcgcaaaggatgtacaagcagtcaatggcgcagagagcgcggaccatggcactctacaaccccatccccgtccgacagaactgcctcacggttaaccggtctctcttcctcttcag

SEQ ID NO: 370465 - DNA, 120 bp, Artificial Sequence
  ENSG00000141837_4 (sequence is synthesized)
cgaagacaacgtggtgagaaaatacgccaaaaagatcaccgaatggcctccctttgaatatatgattttagccaccatcatagcgaattgcatcgtcctcgcactggagcagcatctgcc

SEQ ID NO: 370466 - DNA, 120 bp, Artificial Sequence
  ENSG00000141837_5 (sequence is synthesized)
tgatgatgacaagaccccgatgtctgaacggctggatgacacagaaccatacttcattggaattttttgtttcgaggctggaattaaaatcattgcccttgggtttgccttccacaaagg

SEQ ID NO: 370467 - DNA, 120 bp, Artificial Sequence
  ENSG00000141837_6 (sequence is synthesized)
ctcctacttgaggaatggctggaatgtcatggactttgtggtggtgctaacgggcatcttggcgacagttgggacggagtttgacctacggacgctgagggcagttcgagtgctgcggcc

SEQ ID NO: 370468 - DNA, 120 bp, Artificial Sequence
  ENSG00000141837_7 (sequence is synthesized)
gctcaagctggtgtctggaatcccaagtttacaagtcgtcctgaagtcgatcatgaaggcgatgatccctttgctgcagatcggcctcctcctattttttgcaatccttatttttgcaat

SEQ ID NO: 370469 - DNA, 120 bp, Artificial Sequence
  ENSG00000141837_8 (sequence is synthesized)
catagggttagaattttatatgggaaaatttcataccacctgctttgaagaggggacagatgacattcagggtgagtctccggctccatgtgggacagaagagcccgcccgcacctgccc

SEQ ID NO: 370470 - DNA, 120 bp, Artificial Sequence
  ENSG00000141837_9 (sequence is synthesized)
caatgggaccaaatgtcagccctactgggaagggcccaacaacgggatcactcagttcgacaacatcctgtttgcagtgctgactgttttccagtgcataaccatggaagggtggactga

SEQ ID NO: 370471 - DNA, 120 bp, Artificial Sequence
  ENSG00000141837_10 (sequence is synthesized)
tctcctctacaatagcaacgatgcctcagggaacacttggaactggttgtacttcatccccctcatcatcatcggctccttttttatgctgaaccttgtgctgggtgtgctgtcagggga

SEQ ID NO: 370472 - DNA, 120 bp, Artificial Sequence
  ENSG00000141837_11 (sequence is synthesized)
gtttgccaaagaaagggaacgggtggagaaccggcgggcttttctgaagctgaggcggcaacaacagattgaacgtgagctcaatgggtacatggagtggatctcaaaagcagaagaggt

SEQ ID NO: 370473 - DNA, 120 bp, Artificial Sequence
  ENSG00000141837_12 (sequence is synthesized)
gatcctcgccgaggatgaaactgacggggagcagaggcatccctttgatgctctgcggagaaccaccataaagaaaagcaagacagatttgctcaaccccgaagaggctgaggatcagct

SEQ ID NO: 370474 - DNA, 120 bp, Artificial Sequence
  ENSG00000141837_13 (sequence is synthesized)
ggctgatatagcctctgtgggttctcccttcgcccgagccagcattaaaagtgccaagctggagaactcgaccttttttcacaaaaaggagaggaggatgcgtttctacatccgccgcat

SEQ ID NO: 370475 - DNA, 120 bp, Artificial Sequence
  ENSG00000141837_14 (sequence is synthesized)
ggtcaaaactcaggccttctactggactgtactcagtttggtagctctcaacacgctgtgtgttgctattgttcactacaaccagcccgagtggctctccgacttcctttactatgcaga

SEQ ID NO: 370476 - DNA, 120 bp, Artificial Sequence
  ENSG00000141837_15 (sequence is synthesized)
attcattttcttaggactctttatgtccgaaatgtttataaaaatgtacgggcttgggacgcggccttacttccactcttccttcaactgctttgactgtggggttatcattgggagcat

SEQ ID NO: 370477 - DNA, 120 bp, Artificial Sequence
  ENSG00000141837_16 (sequence is synthesized)
cttcgaggtcatctgggctgtcataaaacctggcacatcctttggaatcagcgtgttacgagccctcaggttattgcgtattttcaaagtcacaaagtactgggcatctctcagaaacct

SEQ ID NO: 370478 - DNA, 120 bp, Artificial Sequence
  ENSG00000141837_17 (sequence is synthesized)
ggtcgtctctctcctcaactccatgaagtccatcatcagcctgttgtttctccttttcctgttcattgtcgtcttcgcccttttgggaatgcaactcttcggcggccagtttaatttcga

SEQ ID NO: 370479 - DNA, 120 bp, Artificial Sequence
  ENSG00000141837_18 (sequence is synthesized)
tgaagggactcctcccaccaacttcgatacttttccagcagcaataatgacggtgtttcagatcctgacgggcgaagactggaacgaggtcatgtacgacgggatcaagtctcagggggg

SEQ ID NO: 370480 - DNA, 120 bp, Artificial Sequence
  ENSG00000141837_19 (sequence is synthesized)
cgtgcagggcggcatggtgttctccatctatttcattgtactgacgctctttgggaactacaccctcctgaatgtgttcttggccatcgctgtggacaatctggccaacgcccaggagct

SEQ ID NO: 370481 - DNA, 120 bp, Artificial Sequence
  ENSG00000141837_20 (sequence is synthesized)
caccaaggacgagcaagaggaagaagaagcagcgaaccagaaacttgccctacagaaagccaaggaggtggcagaagtgagtcctctgtccgcggccaacatgtctatagctgtgaaaga

SEQ ID NO: 370482 - DNA, 120 bp, Artificial Sequence
  ENSG00000141837_21 (sequence is synthesized)
gcaacagaagaatcaaaagccagccaagtccgtgtgggagcagcggaccagtgagatgcgaaagcagaacttgctggccagccgggaggccctgtataacgaaatggacccggacgagcg

SEQ ID NO: 370483 - DNA, 120 bp, Artificial Sequence
  ENSG00000141837_22 (sequence is synthesized)
ctggaaggctgcctacacgcggcacctgcggccagacatgaagacgcacttggaccggccgctggtggtggacccgcaggagaaccgcaacaacaacaccaacaagagccgggcggccga

SEQ ID NO: 370484 - DNA, 120 bp, Artificial Sequence
  ENSG00000141837_23 (sequence is synthesized)
gcccaccgtggaccagcgcctcggccagcagcgcgccgaggacttcctcaggaaacaggcccgctaccacgatcgggcccgggaccccagcggctcggcgggcctggacgcacggaggcc

SEQ ID NO: 370485 - DNA, 120 bp, Artificial Sequence
  ENSG00000141837_24 (sequence is synthesized)
ctgggcgggaagccaggaggccgagctgagccgggagggaccctacggccgcgagtcggaccaccacgcccgggagggcagcctggagcaacccgggttctgggagggcgaggccgagcg

SEQ ID NO: 370486 - DNA, 120 bp, Artificial Sequence
  ENSG00000141837_25 (sequence is synthesized)
cacgtgcaccggcaggggggcagcagggagagccgcagcgggtccccgcgcacgggcgcggacggggagcatcgacgtcatcgcgcgcaccgcaggcccggggaggagggtccggaggac

SEQ ID NO: 370487 - DNA, 80 bp, Artificial Sequence
  ENSG00000141837_26 (sequence is synthesized)
tcgcgcgcaccgcaggcccggggaggagggtccggaggacaaggcggagcggagggcgcggcaccgcgagggcagccggc

SEQ ID NO: 370488 - DNA, 120 bp, Artificial Sequence
  ENSG00000141837_27 (sequence is synthesized)
gagaaggcaccggcatggcgctccagccacgtacgagggggacgcgcggagggaggacaaggagcggaggcatcggaggaggaaagagaaccagggctccggggtccctgtgtcgggccc

SEQ ID NO: 370489 - DNA, 120 bp, Artificial Sequence
  ENSG00000141837_28 (sequence is synthesized)
caacctgtcaaccacccggccaatccagcaggacctgggccgccaagacccacccctggcagaggatattgacaacatgaagaacaacaagctggccaccgcggagtcggccgctcccca

SEQ ID NO: 370490 - DNA, 120 bp, Artificial Sequence
  ENSG00000141837_29 (sequence is synthesized)
cggcagccttggccacgccggcctgccccagagcccagccaagatgggaaacagcaccgaccccggccccatgctggccatccctgccatggccaccaacccccagaacgccgccagccg

SEQ ID NO: 370491 - DNA, 120 bp, Artificial Sequence
  ENSG00000141837_30 (sequence is synthesized)
ccggacgcccaacaacccggggaacccatccaatcccggcccccccaagacccccgagaatagccttatcgtcaccaaccccagcggcacccagaccaattcagctaagactgccaggaa

SEQ ID NO: 370492 - DNA, 120 bp, Artificial Sequence
  ENSG00000141837_31 (sequence is synthesized)
acccgaccacaccacagtggacatccccccagcctgcccaccccccctcaaccacaccgtcgtacaagtgaacaaaaacgccaacccagacccactgccaaaaaaagaggaagagaagaa

SEQ ID NO: 370493 - DNA, 120 bp, Artificial Sequence
  ENSG00000141837_32 (sequence is synthesized)
ggaggaggaggaagacgaccgtggggaagacggccctaagccaatgcctccctatagctccatgttcatcctgtccacgaccaacccccttcgccgcctgtgccattacatcctgaacct

SEQ ID NO: 370494 - DNA, 120 bp, Artificial Sequence
  ENSG00000141837_33 (sequence is synthesized)
gcgctactttgagatgtgcatcctcatggtcattgccatgagcagcatcgccctggccgccgaggaccctgtgcagcccaacgcacctcggaacaacgtgctgcgatactttgactacgt

SEQ ID NO: 370495 - DNA, 120 bp, Artificial Sequence
  ENSG00000141837_34 (sequence is synthesized)
ttttacaggcgtctttacctttgagatggtgatcaagatgattgacctggggctcgtcctgcatcagggtgcctacttccgtgacctctggaatattctcgacttcatagtggtcagtgg

SEQ ID NO: 370496 - DNA, 120 bp, Artificial Sequence
  ENSG00000141837_35 (sequence is synthesized)
ggctgccaaagctcaaggctgtgtttgactgtgtggtgaactcacttaaaaacgtcttcaacatcctcatcgtctacatgctattcatgttcatcttcgccgtggtggctgtgcagctct

SEQ ID NO: 370497 - DNA, 120 bp, Artificial Sequence
  ENSG00000141837_36 (sequence is synthesized)
tcaaggggaaattcttccactgcactgacgagtccaaagagtttgagaaagattgtcgaggcaaatacctcctctacgagaagaatgaggtgaaggcgcgagaccgggagtggaagaagt

SEQ ID NO: 370498 - DNA, 120 bp, Artificial Sequence
  ENSG00000141837_37 (sequence is synthesized)
atgaattccattacgacaatgtgctgtgggctctgctgaccctcttcaccgtgtccacgggagaaggctggccacaggtcctcaagcattcggtggacgccacctttgagaaccagggcc

SEQ ID NO: 370499 - DNA, 120 bp, Artificial Sequence
  ENSG00000141837_38 (sequence is synthesized)
ccagccccgggtaccgcatggagatgtccattttctacgtcgtctactttgtggtgttccccttcttctttgtcaatatctttgtggccttgatcatcatcaccttccaggagcaagggg

SEQ ID NO: 370500 - DNA, 120 bp, Artificial Sequence
  ENSG00000141837_39 (sequence is synthesized)
acaagatgatggaggaatacagcctggagaaaaatgagagggcctgcattgatttcgccatcagcgccaagccgctgacccgacacatgccgcagaacaagcagagcttccagtaccgca

SEQ ID NO: 370501 - DNA, 120 bp, Artificial Sequence
  ENSG00000141837_40 (sequence is synthesized)
tgtggcagttcgtggtgtctccgcctttcgagtacacgatcatggccatgatcgccctcaacaccatcgtgcttatgatgaagttctatggggcttctgttgcttatgaaaatgccctgc

SEQ ID NO: 370502 - DNA, 120 bp, Artificial Sequence
  ENSG00000141837_41 (sequence is synthesized)
gggtgttcaacatcgtcttcacctccctcttctctctggaatgtgtgctgaaagtcatggcttttgggattctgaattatttccgcgatgcctggaacatcttcgactttgtgactgttc

SEQ ID NO: 370503 - DNA, 120 bp, Artificial Sequence
  ENSG00000141837_42 (sequence is synthesized)
tgggcagcatcaccgatatcctcgtgactgagtttgggaataacttcatcaacctgagctttctccgcctcttccgagctgcccggctcatcaaacttctccgtcagggttacaccatcc

SEQ ID NO: 370504 - DNA, 120 bp, Artificial Sequence
  ENSG00000141837_43 (sequence is synthesized)
gcattcttctctggacctttgtgcagtccttcaaggccctgccttatgtctgtctgctgatcgccatgctcttcttcatctatgccatcattgggatgcaggtgtttggtaacattggca

SEQ ID NO: 370505 - DNA, 120 bp, Artificial Sequence
  ENSG00000141837_44 (sequence is synthesized)
tcgacgtggaggacgaggacagtgatgaagatgagttccaaatcactgagcacaataacttccggaccttcttccaggccctcatgcttctcttccggagtgccaccggggaagcttggc

SEQ ID NO: 370506 - DNA, 120 bp, Artificial Sequence
  ENSG00000141837_45 (sequence is synthesized)
acaacatcatgctttcctgcctcagcgggaaaccgtgtgataagaactctggcatcctgactcgagagtgtggcaatgaatttgcttatttttactttgtttccttcatcttcctctgct

SEQ ID NO: 370507 - DNA, 120 bp, Artificial Sequence
  ENSG00000141837_46 (sequence is synthesized)
cgtttctgatgctgaatctctttgtcgccgtcatcatggacaactttgagtacctcacccgagactcctccatcctgggcccccaccacctggatgagtacgtgcgtgtctgggccgagt

SEQ ID NO: 370508 - DNA, 120 bp, Artificial Sequence
  ENSG00000141837_47 (sequence is synthesized)
atgaccccgcagcttggggccgcatgccttacctggacatgtatcagatgctgagacacatgtctccgcccctgggtctggggaagaagtgtccggccagagtggcttacaagcggcttc

SEQ ID NO: 370509 - DNA, 120 bp, Artificial Sequence
  ENSG00000141837_48 (sequence is synthesized)
tgcggatggacctgcccgtcgcagatgacaacaccgtccacttcaattccaccctcatggctctgatccgcacagccctggacatcaagattgccaagggaggagccgacaaacagcaga

SEQ ID NO: 370510 - DNA, 120 bp, Artificial Sequence
  ENSG00000141837_49 (sequence is synthesized)
tggacgctgagctgcggaaggagatgatggcgatttggcccaatctgtcccagaagacgctagacctgctggtcacacctcacaagtccacggacctcaccgtggggaagatctacgcag

SEQ ID NO: 370511 - DNA, 120 bp, Artificial Sequence
  ENSG00000141837_50 (sequence is synthesized)
ccatgatgatcatggagtactaccggcagagcaaggccaagaagctgcaggccatgcgcgaggagcaggaccggacacccctcatgttccagcgcatggagcccccgtccccaacgcagg

SEQ ID NO: 370512 - DNA, 120 bp, Artificial Sequence
  ENSG00000141837_51 (sequence is synthesized)
aagggggacctggccagaacgccctcccctccacccagctggacccaggaggagccctgatggctcacgaaagcggcctcaaggagagcccgtcctgggtgacccagcgtgcccaggaga

SEQ ID NO: 370513 - DNA, 120 bp, Artificial Sequence
  ENSG00000141837_52 (sequence is synthesized)
tgttccagaagacgggcacatggagtccggaacaaggcccccctaccgacatgcccaacagccagcctaactctcagtccgtggagatgcgagagatgggcagagatggctactccgaca

SEQ ID NO: 370514 - DNA, 120 bp, Artificial Sequence
  ENSG00000141837_53 (sequence is synthesized)
gcgagcactacctccccatggaaggccagggccgggctgcctccatgccccgcctccctgcagagaaccagaggagaaggggccggccacgtgggaataacctcagtaccatctcagaca

SEQ ID NO: 370515 - DNA, 120 bp, Artificial Sequence
  ENSG00000141837_54 (sequence is synthesized)
ccagccccatgaagcgttcagcctccgtgctgggccccaaggcccgacgcctggacgattactcgctggagcgggtcccgcccgaggagaaccagcggcaccaccagcggcgccgcgacc

SEQ ID NO: 370516 - DNA, 120 bp, Artificial Sequence
  ENSG00000141837_55 (sequence is synthesized)
gcagccaccgcgcctctgagcgctccctgggccgctacaccgatgtggacacaggcttggggacagacctgagcatgaccacccaatccggggacctgccgtcgaaggagcgggaccagg

SEQ ID NO: 370517 - DNA, 120 bp, Artificial Sequence
  ENSG00000141837_56 (sequence is synthesized)
agcggggccggcccaaggatcggaagcatcgacagcaccaccaccaccaccaccaccaccaccatcccccgccccccgacaaggaccgctatgcccaggaacggccggaccacggccggg

SEQ ID NO: 370518 - DNA, 120 bp, Artificial Sequence
  ENSG00000141837_57 (sequence is synthesized)
cacgggctcgggaccagcgctggtcccgctcgcccagcgagggccgagagcacatggcgcaccggcagggcagtagttccgtaagtggaagcccagccccctcaacatctggtaccagca

SEQ ID NO: 370519 - DNA, 120 bp, Artificial Sequence
  ENSG00000141837_58 (sequence is synthesized)
ctccgcggcggggccgccgccagctcccccagaccccctccaccccccggccacacgtgtcctattcccctgtgatccgtaaggccggcggctcggggcccccgcagcagcagcagcagc

SEQ ID NO: 370520 - DNA, 80 bp, Artificial Sequence
  ENSG00000141837_59 (sequence is synthesized)
agcagcagcagcagcagcagcaggcggtggccaggccgggccgggcggccaccagcggccctcggaggtacccaggcccc

SEQ ID NO: 370521 - DNA, 120 bp, Artificial Sequence
  ENSG00000141837_60 (sequence is synthesized)
ccgagcctctggccggagatcggccgcccacggggggccacagcagcggccgctcgcccaggatggagaggcgggtcccaggcccggcccggagcgagtcccccagggcctgtcgacacg

SEQ ID NO: 370522 - DNA, 120 bp, Artificial Sequence
  ENSG00000141837_61 (sequence is synthesized)
ccgaggggcccccgggtccccggcaccatggctactaccggggctccgactacgacgaggccgatggcccgggcagcgggggcggcgaggaggccatggccggggcctacgacgcgccac

SEQ ID NO: 370523 - DNA, 120 bp, Artificial Sequence
  ENSG00000141837_62 (sequence is synthesized)
cccccgtacgacacgcgtcctcgggcgccaccgggcgctcgcccaggactccccgggcctcgggcccggcctgcgcctcgccttctcggcacggccggcgactccccaacggctactacc

SEQ ID NO: 370524 - DNA, 120 bp, Artificial Sequence
  ENSG00000141837_63 (sequence is synthesized)
cggcgcacggactggccaggccccgcgggccgggctccaggaagggcctgcacgaaccctacagcgagagtgacgatgattggtgctaagcccgggcgaggtggcgcccgcccggccccc

SEQ ID NO: 370525 - DNA, 120 bp, Artificial Sequence
  ENSG00000141837_64 (sequence is synthesized)
cacgcaccccacgcacacaccccacccgaggagccgcgcagaggccgcgggggcccagcacagagggcccgggagagggccagccgggagaccccagactctggagaggccagggctggg

SEQ ID NO: 370526 - DNA, 120 bp, Artificial Sequence
  ENSG00000141837_65 (sequence is synthesized)
ccacaagggtgtcccgcagagaccctcggccaaaagagaccctcctgggcagccacggcgccccccaaccagccccgatccccccacccacgacaggggctctcgggtgggaggcaggga

SEQ ID NO: 370527 - DNA, 120 bp, Artificial Sequence
  ENSG00000141837_66 (sequence is synthesized)
cacgacaggggctctcgggtgggaggcagggagcagacaaaccacacagccaagggatttgaattaactcagccatttttggagaactttggggaacatgaaaaaaaaaaaaaaaaaaaa

SEQ ID NO: 370528 - DNA, 120 bp, Artificial Sequence
  ENSG00000141837_67 (sequence is synthesized)
agaaaaaaatagcttctattgatgagttttatcatctcaattgaatctttcctttccctgatgaagacagctggtggccgagtgcggcaaagaagccagaaggaaccagaatcccagtgc

SEQ ID NO: 370529 - DNA, 120 bp, Artificial Sequence
  ENSG00000141837_68 (sequence is synthesized)
cctacacccaccaccagacacactcacacccacacacgttctcagacacacacaagagtgcttgccggttataccaaaccctactattactgcctgcagaaatcaatttaaaaaaataat

SEQ ID NO: 370530 - DNA, 120 bp, Artificial Sequence
  ENSG00000141837_69 (sequence is synthesized)
aataacaataaacaattttaaaaaggacaaaaaaattaatgattgagaaaagaggcatttttttctgacatttggtcctgcttgaaacaacaaaagaagaagaaaaacccaccatcacca

SEQ ID NO: 370531 - DNA, 120 bp, Artificial Sequence
  ENSG00000141837_70 (sequence is synthesized)
ccgattcctttgcttcttttttccttttttcctaccttgtttgaaaaccgtgggcttgggactgtgaattattgcatgacattcaaaaagaaaaaaaaaataaaaaaaagttgaatcaaa

SEQ ID NO: 370532 - DNA, 120 bp, Artificial Sequence
  ENSG00000141837_71 (sequence is synthesized)
tatttccgcgatgcctggaacatcttcgactttgtgactgttctgggcagcatcaccgatatcctcgtgactgagtttgggaatccgaataacttcatcaacctgagctttctccgcctc

SEQ ID NO: 370533 - DNA, 120 bp, Artificial Sequence
  ENSG00000141837_72 (sequence is synthesized)
gggggggactgtcagggttatcatgtacagctgagcaggttgtacactgctcaaggacaacacattaaaggaggtgctgataacatcctagccatcgtgtatggatatttgtattattac

SEQ ID NO: 370534 - DNA, 120 bp, Artificial Sequence
  ENSG00000141837_73 (sequence is synthesized)
aacttcccagcagatggcagtaaagtgagctgacctaaaataatctgtgtattatggcagtttttctttagatgaagtgtcttggggttaagatcctttttcctaattcgcatgaaggca

SEQ ID NO: 370535 - DNA, 120 bp, Artificial Sequence
  ENSG00000141837_74 (sequence is synthesized)
tcatatggatttaaaagggtataaccgtgatctgggaagcaggaactagatttcttgttccataaaattttgacttttcatctacctattctaggctctagtatctcccattccaaaata

SEQ ID NO: 370536 - DNA, 120 bp, Artificial Sequence
  ENSG00000141837_75 (sequence is synthesized)
gcatgaaccagcatttcccaaaagcctgtcattcaaaaacatatatatatattaagggaaataaaatccagtcattagagcacccactttcactctatgcttcacctgggggtccccagt

SEQ ID NO: 370537 - DNA, 120 bp, Artificial Sequence
  ENSG00000141837_76 (sequence is synthesized)
attatctcttatgtaatatgtttctttaaatcaagtcacacccgtaatccctgcattttgaaagaccaaggcaggagtgttgcttgagcccaggagaatgagaccagcctgggcaacata

SEQ ID NO: 370538 - DNA, 120 bp, Artificial Sequence
  ENSG00000141837_77 (sequence is synthesized)
gttagactctgtctctactaaaaattaaagacagaaaacagatactgttatggaaatctaaccaaatatggctgcctgcctaaggctttgtgcattgacaactgctctttcttggttaaa

SEQ ID NO: 370539 - DNA, 120 bp, Artificial Sequence
  ENSG00000141837_78 (sequence is synthesized)
gagggaaaatgtcaatggtaggtgttaacatggtagcaactaagtaaaaatttctccttcactcaaaaggattgagagagttggaaaggaagtaactttgttaccttgtttttctgtgtt

SEQ ID NO: 370540 - DNA, 120 bp, Artificial Sequence
  ENSG00000141837_79 (sequence is synthesized)
gggctcctgtatcacttaaaagcatctctggtatcccatctgggagttttagatccatagaatgccaggattgagtccaactcctccaacgcttatttctgaaagctggggggaccttac

SEQ ID NO: 370541 - DNA, 120 bp, Artificial Sequence
  ENSG00000141837_80 (sequence is synthesized)
cctagtgacttgacttatgaccttgcctgtaaaatgggaatgatcatggcagtattttggtatgatgggccactggaggcagaaggttgggcaggtccccagcccctcatgctctctgtc

SEQ ID NO: 370542 - DNA, 120 bp, Artificial Sequence
  ENSG00000141837_81 (sequence is synthesized)
aaggggaaattcttccactgcactgacgagtccaaagagtttgagaaagattgtcggtgggtctccactttccagcacattcccattggaaccagcaggtgggcaggggggaagtggcta

SEQ ID NO: 370543 - DNA, 120 bp, Artificial Sequence
  ENSG00000141837_82 (sequence is synthesized)
gaggcattggccacttgggctcagagactggagaagtgatgagccttggaagtgactcagttgcaaccagcttggatcttgggtagaaagaaaaccggttttagaatttgagtcaccacc

SEQ ID NO: 370544 - DNA, 120 bp, Artificial Sequence
  ENSG00000141837_83 (sequence is synthesized)
cagagccacagaatgagtcataagcaaattgattgacctttcagccaccgcctttgtcatgtgagggatattaatacacatccacagttccttacttgaaatcgttacaggcagatgtgt

SEQ ID NO: 370545 - DNA, 120 bp, Artificial Sequence
  ENSG00000141837_84 (sequence is synthesized)
tgtgtaactatttacatcaaatggggtaaataacaagtataaagagcttcatgtccaatcagatcaggtttcattaccaaataagttaggtaagaggccaggtgcagtggctcacacctg

SEQ ID NO: 370546 - DNA, 86 bp, Artificial Sequence
  ENSG00000141837_85 (sequence is synthesized)
cacttgaggccaggagttggagaccaggttgggcaacataatgagagcccatcctacaaaataaattttaaaagttagcgccggga

SEQ ID NO: 370547 - DNA, 120 bp, Artificial Sequence
  ENSG00000141837_86 (sequence is synthesized)
gtagtcccagctacccgggaggctgaggcgggaggattgtttaaacacaggagttcaaggctgcaatgcactatgatggtaccactgcactccagcctgcgtgacagagtgagaccctgc

SEQ ID NO: 370548 - DNA, 120 bp, Artificial Sequence
  ENSG00000141837_87 (sequence is synthesized)
accactgcactccagcctgcgtgacagagtgagaccctgcctctcaaaaatatatacatataggccgggcgcagtggctcatgcttataatctcagcactttaggaggccgaggcgggcg

SEQ ID NO: 370549 - DNA, 86 bp, Artificial Sequence
  ENSG00000141837_88 (sequence is synthesized)
ggcggagcttgcagtgagcccagattgggccactgtactccagtctgggcaacagagcccaacaacaaaaatatatatatatatat

SEQ ID NO: 370550 - DNA, 120 bp, Artificial Sequence
  ENSG00000141837_89 (sequence is synthesized)
atatatatatgtatatatatatatgtacacgcacacacacatatgtattatatgtgtgtgtgtatatatatgtatgtgtatatatagtgatattgttaccagtgtaaagtggcattttgc

SEQ ID NO: 370551 - DNA, 120 bp, Artificial Sequence
  ENSG00000141837_90 (sequence is synthesized)
aacacatggtagcctgttgttatcttgatggctatttattgaaattaggaggatgccagatgtctggataggagtctggaactaacccttgtttcctgccttgaaaaggagtagcaacct

SEQ ID NO: 370552 - DNA, 120 bp, Artificial Sequence
  ENSG00000141837_91 (sequence is synthesized)
cccttagcctgatgaacctctaaatgtcccctatgtctctctgcctcctcctaaactccctccaccccacccccagcaagcctgaggctctcaccctgaggactagaagttatcacgttg

SEQ ID NO: 370553 - DNA, 120 bp, Artificial Sequence
  ENSG00000141837_92 (sequence is synthesized)
gaagagggtgctggaccctgggtcagctctcccaccaggagtaaggttgtgccatcacccatggatttatctcaaagtagatgcacacgtcatcccctatgaagcacaggaacacatggt

SEQ ID NO: 370554 - DNA, 120 bp, Artificial Sequence
  ENSG00000141837_93 (sequence is synthesized)
ggcaggatggggagtcactgcttcccaagcagtctaggctggtggaccactcttcctttccctccccctgtctctgataaccaaagacaagtgcaagacagcccctctttcccatttact

SEQ ID NO: 370555 - DNA, 120 bp, Artificial Sequence
  ENSG00000141837_94 (sequence is synthesized)
gctgaccctcttcaccgtgtccacgggagaaggctggccacagtaagtggcccgactggaaatctatccaggaggagccctggggagcaggaggataaagggcctgagagcttagcaata

SEQ ID NO: 370556 - DNA, 63 bp, Artificial Sequence
  ENSG00000141837_95 (sequence is synthesized)
tggggagcaggaggataaagggcctgagagcttagcaataagaaaggtcttgatgtatcactt

SEQ ID NO: 370557 - DNA, 120 bp, Artificial Sequence
  ENSG00000141837_96 (sequence is synthesized)
ttctgaattatttccgcgatgcctggaacatcttcgactttgtgactgttctgggcagcatcaccgatatcctcgtgactgagtttgggaatccggcctggtcccgtgctactccaccca

SEQ ID NO: 370558 - DNA, 120 bp, Artificial Sequence
  ENSG00000141837_97 (sequence is synthesized)
gccccagaagctgagaagccatccctgagaggggggaaaagggccccaaatgcatcttctccgactcagcgggcagcgaggactcaccctgcagccgaacagtcccagctccctcccgtc

SEQ ID NO: 370559 - DNA, 120 bp, Artificial Sequence
  ENSG00000141837_98 (sequence is synthesized)
gcttaggcaagaaatgtcctcatagggttgcttgcaaggtttgacttccactaaaacctgctagcatccatggaatgagtgtggcttggggttcttcaatatatatatttcatatatata

SEQ ID NO: 370560 - DNA, 120 bp, Artificial Sequence
  ENSG00000141837_99 (sequence is synthesized)
gcccagccggtgtccaccccatgtctagcaccagccagacactgtgccggcgcaccctcatcttcaggcctgggtgacaccagaggtgtgctatggtgtgtcctggacaggggctgggcc

SEQ ID NO: 370561 - DNA, 120 bp, Artificial Sequence
  ENSG00000141837_100 (sequence is synthesized)
agaggacattgctcgtccaggcagaaacatcaggcctggggaggggcacaggaaaaatcaacctaccctggcaggggcctggccttgaagcaggaagagatgccgtggcaggaagttggc

SEQ ID NO: 370562 - DNA, 120 bp, Artificial Sequence
  ENSG00000141837_101 (sequence is synthesized)
cccagtgtttaaaaaaaccacgtagcaactatttctcgcccaggatgcccaggaaagcaagggtactgggggattagatccatcaccaagaaggatacagtcagccctgaacttctctgg

SEQ ID NO: 370563 - DNA, 120 bp, Artificial Sequence
  ENSG00000141837_102 (sequence is synthesized)
ggccgcttctaatccactacagggcttggggcaaattttaaaaggtacccttcccgtgggttagcgaactggcctagtacagtgatttttttgttaggatttgctgccatctgctggaca

SEQ ID NO: 370564 - DNA, 120 bp, Artificial Sequence
  ENSG00000141837_103 (sequence is synthesized)
atttcattcacaacatacaaatctgcagtatgaaaagagatgggaggggcccttgtgcagtgcacgccctgcgcaactgtatatagcagctgtgtttcctcttctgggtagaaactctgc

SEQ ID NO: 370565 - DNA, 120 bp, Artificial Sequence
  ENSG00000141837_104 (sequence is synthesized)
ctttgccttcacgtaagtctcctcgcaagggttcctcttgcctcttttcccccaacccccagcctgggccacacatcggattacaggacatgttctcagggtctagggatggggtgtgtg

SEQ ID NO: 370566 - DNA, 120 bp, Artificial Sequence
  ENSG00000141837_105 (sequence is synthesized)
ggctccggggacgtgggagatatcagcatgccaccaggaagagcttcgatggctttttgcatgatgtccatggaggaagaaggagaagggaccccccctcctgccaaccttctacctcct

SEQ ID NO: 370567 - DNA, 120 bp, Artificial Sequence
  ENSG00000141837_106 (sequence is synthesized)
cacacagcaacgggcctcagccacatcactggccccttgctgtgcagcttcctgtagactagcctcgccggaacatctcatccccctactactccacaagcgccgcccaaaccgctgtct

SEQ ID NO: 370568 - DNA, 120 bp, Artificial Sequence
  ENSG00000141837_107 (sequence is synthesized)
ctttggaaagtccctaaagagacaatcaggaaacgaatgtgcatgagaattctgaccccctccctatgcctgaaggccccgtagttgtagacctggtgactccctttgtgtgtctttcac

SEQ ID NO: 370569 - DNA, 120 bp, Artificial Sequence
  ENSG00000141837_108 (sequence is synthesized)
ttctcctggcagtcctaggattctctgccctctgaaaggccatgtgtcatcctgcagctccaagatggcgccccagttgtaggcagccatttcaggatggcacccaagctcttagtagtc

SEQ ID NO: 370570 - DNA, 120 bp, Artificial Sequence
  ENSG00000141837_109 (sequence is synthesized)
atcccaagatggcatccaagttctgggtggccattccaagatggcccctgagttctgagctatcattccaagatggcctctgaatttggggtggtcattcttagatggtccctgagttcc

SEQ ID NO: 370571 - DNA, 120 bp, Artificial Sequence
  ENSG00000141837_110 (sequence is synthesized)
aaggtgaccttcaagttctgggtagccattccaggatggtccccaagctctgggtggctattccaagatggccccaagttctaggcagccattgcaagatggcccctgagttccagggtg

SEQ ID NO: 370572 - DNA, 120 bp, Artificial Sequence
  ENSG00000141837_111 (sequence is synthesized)
gcccccaagttctgggcaaccattccaaggtggcatccaagttctgggtggctattccaagatggcctctgatttctgggctaccatgctaagatggcctctggattcttggtggccatt

SEQ ID NO: 370573 - DNA, 120 bp, Artificial Sequence
  ENSG00000141837_112 (sequence is synthesized)
cttacatggtccctgagttccaaggtggccttcaagttctgggtagccattccaagacggtccccaagtcttggatggctactcgaaggtgacccccaagttctgggcagccatctcaag

SEQ ID NO: 370574 - DNA, 120 bp, Artificial Sequence
  ENSG00000141837_113 (sequence is synthesized)
gtggcaccctagttctgggtaaccattccaaaatggcacccaagttctagggcaaccatttcaaaatggcccccaagttctgggtgactatttcaagatggtacccaacaggtgagtggc

SEQ ID NO: 370575 - DNA, 120 bp, Artificial Sequence
  ENSG00000141837_114 (sequence is synthesized)
cattagcccttagggccctgatagcagacttagcagtacattcctgaagttgtagacatttggagcgggatgaaaaatatctaatcagtctttaatcaagaaacaaatcttggggaccct

SEQ ID NO: 370576 - DNA, 120 bp, Artificial Sequence
  ENSG00000141837_115 (sequence is synthesized)
ggctgtgcccatcatggtgaatgattccctgacaggttttgaaaggatcttgacacattcactcccatcgtgagagaatcaggggcttcctcctgtgcctctgcctctaggctccctcct

SEQ ID NO: 370577 - DNA, 120 bp, Artificial Sequence
  ENSG00000141837_116 (sequence is synthesized)
gagccaatctggaggggcccttgaatggtctccctcaccaaacaatgaggacttggtttgtcaggagggccaaaatagtggcccatttccagtagaagggctgttaagtaggccacactt

SEQ ID NO: 370578 - DNA, 120 bp, Artificial Sequence
  ENSG00000141837_117 (sequence is synthesized)
agattcttctctgggaacacaatgaggtcaagttgtgttagaacaaaaaatctccagagtttttggatgcctcagagctggagatgtatcatgaaggttgggaggctgattatacttctt

SEQ ID NO: 370579 - DNA, 120 bp, Artificial Sequence
  ENSG00000141837_118 (sequence is synthesized)
tttttctcttctcctctccctccccacatccttccctctcctcaaagcttttcagtgtctatttgactactagagcaatgcacggtggcttacacctgcaatcccagcactttgggaggc

SEQ ID NO: 370580 - DNA, 120 bp, Artificial Sequence
  ENSG00000141837_119 (sequence is synthesized)
agcccaggaggccaagaccagcctgggtaacatagggagaccccatctctaaaaaaaaaaaaaaacaattagccaggcatggtagtatgcctgcactagcagctacacgggaggctgagg

SEQ ID NO: 370581 - DNA, 120 bp, Artificial Sequence
  ENSG00000141837_120 (sequence is synthesized)
tgggagaattgcttgagcccaggaggttcaaggctgcagtgagccgaaatcgcaccactgcaccccagtctggggaacacaggaagaacttgtctcaaaaaaataaaaagtttaaaaaat

SEQ ID NO: 370582 - DNA, 120 bp, Artificial Sequence
  ENSG00000141837_121 (sequence is synthesized)
taaaaatcaatgaatttgctatttagaatattatgctttatatggttactgaataattttaatagtgatgagtacaaaaaaaacaggtttagcaagctgttctgtaggttaaaaagtaaa

SEQ ID NO: 370583 - DNA, 120 bp, Artificial Sequence
  ENSG00000141837_122 (sequence is synthesized)
taaataaataattaattaaacaaaatacaatgcacatcaaattaggggacaaagattgtgacgaataagacaaggagtccatgtctttaaaatatgaaaagcagttacaaatcaataaga

SEQ ID NO: 370584 - DNA, 120 bp, Artificial Sequence
  ENSG00000141837_123 (sequence is synthesized)
aacactacttctcaatggataaatgggcaaaggacataaacagaaatctgatagaatgctggcaactagtaaaaatggaggtaaatcaacccttggaattcagagaaatgtaaaataaaa

SEQ ID NO: 370585 - DNA, 120 bp, Artificial Sequence
  ENSG00000141837_124 (sequence is synthesized)
acgagatacaattcattccctatcaagttagcactgttcccgccgcacccccacacacacacaaaaaatgatttttttagctaataaacagcatatataagaatgtattataataggctg

SEQ ID NO: 370586 - DNA, 85 bp, Artificial Sequence
  ENSG00000141837_125 (sequence is synthesized)
ctaataaacagcatatataagaatgtattattagcattttgggaggccaagggagggggatcacctgaggtcagcagttcgagac

SEQ ID NO: 370587 - DNA, 69 bp, Artificial Sequence
  ENSG00000141837_126 (sequence is synthesized)
gatgcctgtaatcccagctactcaggtgggtaaggcaggagaattgcttggacccaggagataagcaag

SEQ ID NO: 370588 - DNA, 120 bp, Artificial Sequence
  ENSG00000141837_127 (sequence is synthesized)
tgcactccagcctgggtgagaaagcaagattttgtctcaaaaataaaaaaaggaatgtattataataaaatatacttttctccccctctatcacctatttaagcaggtccttcaagttgt

SEQ ID NO: 370589 - DNA, 120 bp, Artificial Sequence
  ENSG00000141837_128 (sequence is synthesized)
caggtagacatcatgctatgagaaaatttaaatcctgaaaagccagaatgttttaccaccctcagcctggaatgaatccttctcctatggaaataacctacgggtttctccacccctctc

SEQ ID NO: 370590 - DNA, 120 bp, Artificial Sequence
  ENSG00000141837_129 (sequence is synthesized)
tgcctttcagccccttccctccctctcccctccttttctttctccctctttctcttcctcctttcccctctcttccctctctcttcttccctctctctgtctctttctgttcgtctttct

SEQ ID NO: 370591 - DNA, 120 bp, Artificial Sequence
  ENSG00000141837_130 (sequence is synthesized)
ccttttaccccctctcagtttctatctttttattttcctctttctctctctctctccctctctttctctctcactccctgcactgttgatgacctatgtccttgggtgatgtgggcctcc

SEQ ID NO: 370592 - DNA, 120 bp, Artificial Sequence
  ENSG00000141837_131 (sequence is synthesized)
cctggaccgtgtagcttggagaaagctgaccctctgtcatcggtctggcaacagggacttggcccccctaccctgcattctgatgaggaatggtattcagacaaaggcagatcccaggac

SEQ ID NO: 370593 - DNA, 120 bp, Artificial Sequence
  ENSG00000141837_132 (sequence is synthesized)
acaggaggacatgctcaggcagggacccccgcccctttcctctggggcaaggtctgctcagcagcctccaagattcctagggctcaagaggtggcaggtagctcagggcactagggcagg

SEQ ID NO: 370594 - DNA, 120 bp, Artificial Sequence
  ENSG00000141837_133 (sequence is synthesized)
cagtggggtgaatatgtcactcatatccacctgtccacacacaatgcttaccttggccacctgtgcccaggggaatgggttttatcctgtgaatcctcccagtgaccaccactgagtgtg

SEQ ID NO: 370595 - DNA, 120 bp, Artificial Sequence
  ENSG00000141837_134 (sequence is synthesized)
gcacagataaatggtaccaagcccaagctgttcaggtctccaatgtcactttcctctcagacctctgttgtagctgacatactgtaatgctgaggagggccgggcacagtggctcatgcc

SEQ ID NO: 370596 - DNA, 64 bp, Artificial Sequence
  ENSG00000141837_135 (sequence is synthesized)
cacagtggctcatgcctgtaatcctagctctttcggaggccaaggcagaggcaacatggtaaaa

SEQ ID NO: 370597 - DNA, 120 bp, Artificial Sequence
  ENSG00000141837_136 (sequence is synthesized)
gactctgtctcaaaaaaaaaaaaaaatgctgaggaggtgactgtcccacctccatcctccgagttgaccatcacaatttagggaggggaatgacctacaaaggacccagaagcaagcctt

SEQ ID NO: 370598 - DNA, 120 bp, Artificial Sequence
  ENSG00000141837_137 (sequence is synthesized)
acctacaaaggacccagaagcaagcctttcaattgttgagcttttgccattatgggccatcgtttacaacatgctgtttctaggttctctggaggtaaaattagcctcctcttttaaaca

SEQ ID NO: 370599 - DNA, 120 bp, Artificial Sequence
  ENSG00000141837_138 (sequence is synthesized)
aggtaaaattagcctcctcttttaaacaaagctaatctgcaaaagcgaaccaaaaattcttttccaccagagatcaattagcagaatgagctgggtgcgatggctcacacctgtaatccc

SEQ ID NO: 370600 - DNA, 120 bp, Artificial Sequence
  ENSG00000141837_139 (sequence is synthesized)
actcacctctccctggaactggaacacgggctaggtcaggccccagactctggagcactgaactcctggggtcctagcaggggtctcacaggttcagtcaggagagaagatataagaatc

SEQ ID NO: 370601 - DNA, 120 bp, Artificial Sequence
  ENSG00000141837_140 (sequence is synthesized)
atcacccttgcataccccagattaaacacgtagggtgccaaccctgcccaaaccctggactttctgggaaatgagggagggcgtcaaccatgagatgtcctgaagagccctctcctccta

SEQ ID NO: 370602 - DNA, 120 bp, Artificial Sequence
  ENSG00000141837_141 (sequence is synthesized)
cgagtctctcctgtctctcactgtgaagtctccagatggtgaggatgcattagccaggctccagggagaaaaccaacagcatcccagcctcagttctcttgagagtgtggggaggagggc

SEQ ID NO: 370603 - DNA, 120 bp, Artificial Sequence
  ENSG00000141837_142 (sequence is synthesized)
attgcattaatagtgctttctctctccctccttatttggggtctggcttgcttttttcctgttggttggcttcatgtaggggcctctgtgagtggtgacagctctgagccttttggggtg

SEQ ID NO: 370604 - DNA, 120 bp, Artificial Sequence
  ENSG00000141837_143 (sequence is synthesized)
tcttccggtgagaaggggacctgctctgataattctgtttccgtggggtggggtgcctgccttcatccttctgttcccatagaggatgtaccctcctcttccaatgcaagacgtgccctc

SEQ ID NO: 370605 - DNA, 120 bp, Artificial Sequence
  ENSG00000141837_144 (sequence is synthesized)
acaaccaggtgaggcaagtactcttgctatcatctccatttcacagatggagaaactgagttactaagtggtagagtaacctaagtcatgcagccgataactgggagacaagattgggac

SEQ ID NO: 370606 - DNA, 120 bp, Artificial Sequence
  ENSG00000141837_145 (sequence is synthesized)
ccaggtcgcccagctgttctccatgccgggctgtctcctgcacagctgctccatggtcctggccccaccgaaaaccagagcccacaaggtcattccagcagcactgcccagggcctcctc

SEQ ID NO: 370607 - DNA, 120 bp, Artificial Sequence
  ENSG00000141837_146 (sequence is synthesized)
tgggccaggccgttggggaactggagaccccatggggaccagaaagattggggtctcgttctcgggagcctatggctttgcagctgacccagagtccagctgacacccaggcaggcagtc

SEQ ID NO: 370608 - DNA, 120 bp, Artificial Sequence
  ENSG00000141837_147 (sequence is synthesized)
ggaggcctggggagagtgttggcctgggctggtatacacagggacccaggacaagggccccaaagaggcctgcccttggtgagctcaccgtgtgtgtgcccccagccacggacctcaccg

SEQ ID NO: 370609 - DNA, 120 bp, Artificial Sequence
  ENSG00000141837_148 (sequence is synthesized)
ggggacagtggcttgcatgtcaccacgggaaccaactggaatatgagggtggctgagccccagggcaggtccctgaaaagtaggggctgtgcacagcagctcacacctgcaatctcagtg

SEQ ID NO: 370610 - DNA, 120 bp, Artificial Sequence
  ENSG00000141837_149 (sequence is synthesized)
agtgctttgagaggccagggcagagggatcgtttgagaccaggatgagaccaccctgggcaacacagtgagactccatctctacaaaataaaacattagccaggcatggtggtgcacacc

SEQ ID NO: 370611 - DNA, 120 bp, Artificial Sequence
  ENSG00000141837_150 (sequence is synthesized)
atgggaggatcacttgaggccaggagtgggagaccagtctgggcaacatagaaagacccatatctctacaaaaaaaaaataaaattagctgcatgtggcgccatgcacctgtggtcccag

SEQ ID NO: 370612 - DNA, 120 bp, Artificial Sequence
  ENSG00000141837_151 (sequence is synthesized)
tgctcacgggccccaggagccctcagtttcccctatgcagagcatctcaggaggccacatcctgccaccagcctgtgtgagggcagtctcttctttgggactccctatagggaaccccct

SEQ ID NO: 370613 - DNA, 120 bp, Artificial Sequence
  ENSG00000141837_152 (sequence is synthesized)
gctcctgaaagcaaactaggagccacacccatttattgagcacctactgtctatcgggagccatgctaagcaccacgtgtgatctcattcagtactcacagccctatgaagttgatagga

SEQ ID NO: 370614 - DNA, 120 bp, Artificial Sequence
  ENSG00000141837_153 (sequence is synthesized)
ctgatgtctctattttatggagggggaaactgaggctcagagtggctgaaacattggagcagggttttgtggctgagaagtggcagaactaggagtgagcaagtgtgactccaagcctgg

SEQ ID NO: 370615 - DNA, 120 bp, Artificial Sequence
  ENSG00000141837_154 (sequence is synthesized)
gccgtaccactggtggcaatgaccattcccatttaatgagtgcctgctgcgtgcagggcactacagaaggactttacatgaattaccttatttcatcctcacagtcacccagcgaacacc

SEQ ID NO: 370616 - DNA, 120 bp, Artificial Sequence
  ENSG00000141837_155 (sequence is synthesized)
cattttacagatgagacggttgaggcttaaggaggttaaattactcacctgaattcttagagtggacagtaatgagctctaaaattcatactcattccttgctgctttctcattctccac

SEQ ID NO: 370617 - DNA, 120 bp, Artificial Sequence
  ENSG00000141837_156 (sequence is synthesized)
agatacatctagtccccgtttaagggtggctgccatatgcagggtcaagattaagtgtaggttgagccaaaaaaaaatgtaaaaagcaaaaataaaacagggctgtcctttttctatctt

SEQ ID NO: 370618 - DNA, 70 bp, Artificial Sequence
  ENSG00000141837_157 (sequence is synthesized)
aaaaagcaaaaataaaacagggctgtcctttttctatcttcttgtcttggttaataataataatcacttg

SEQ ID NO: 370619 - DNA, 120 bp, Artificial Sequence
  ENSG00000141837_158 (sequence is synthesized)
ccccgtcagtggggggctgcctgcctgctgcttctcagaggaatgatgtggtctgtgcccatctgctctgtcctggtctgggccaagccagggattgggtgtggggagccagtggcaccc

SEQ ID NO: 370620 - DNA, 120 bp, Artificial Sequence
  ENSG00000141837_159 (sequence is synthesized)
cccaccagcggctgtggtcctggccccctcagccttggctgttgcatgcactgctcaaatccagcttgtgctctttttctttggggtcagactgaaacggggccatccagaagaactctg

SEQ ID NO: 370621 - DNA, 120 bp, Artificial Sequence
  ENSG00000141837_160 (sequence is synthesized)
gggcagggcgggggtggggcaagggttgaggcaaaccctggaaatgccagctctcaggtcaagcaggtgggggaaaaaaggagagggcaggggaccagaagtacaagagagccttttgtg

SEQ ID NO: 370622 - DNA, 120 bp, Artificial Sequence
  ENSG00000141837_161 (sequence is synthesized)
ccctccctgcgggccaccaagagaaactgagtactgggacaggtaacctaagtaagagacacctcagccgccacagctttcagagttcttcctgggactccctgggtaggggcgggcgcg

SEQ ID NO: 370623 - DNA, 120 bp, Artificial Sequence
  ENSG00000141837_162 (sequence is synthesized)
gcctccctgcagagaaccaggtgagggctttcaccactgccctggggctggacccctcactctgcactgggtagggccaggcccccccacaagcagcccagtgcatcccctccctgccgg

SEQ ID NO: 370624 - DNA, 120 bp, Artificial Sequence
  ENSG00000141837_163 (sequence is synthesized)
actcaggcctgggtagggactccttcagtctctgaagcagtctgcaggccccacccaccacctggtcacacctggagcacctgcagaccctcctccctcacagaggacagagaggaaagt

SEQ ID NO: 370625 - DNA, 120 bp, Artificial Sequence
  ENSG00000141837_164 (sequence is synthesized)
ggcagagggcagtggccactgcaaaatggtctctggctgccctggttggaggctgcagacaggggaggttgtggaagatttgtgggtgcagcagggttcaacagggccagctgagacctg

SEQ ID NO: 370626 - DNA, 120 bp, Artificial Sequence
  ENSG00000141837_165 (sequence is synthesized)
ccacgaagatcacccctacacaaacacacacacacatgctcaacatacatgcacacacatgtgcagctgtgcgcctactcagatgcttgcatacacacacgtgtgtgcacgtgggcatat

SEQ ID NO: 370627 - DNA, 120 bp, Artificial Sequence
  ENSG00000141837_166 (sequence is synthesized)
acacactgcacatgtactcacacatgcacacatgtacgtgcacacgtgtctgcatatgggaacttggcaggtcctaggatacagtagcagagtctggggtgggtctgggggcagctgggc

SEQ ID NO: 370628 - DNA, 120 bp, Artificial Sequence
  ENSG00000141837_167 (sequence is synthesized)
tcgtattttctgtctggtctctgtgggagtcattggggggcacaggggtgtgtgcttgatgtgtgtctgtgtgtggccgcttcacccagctgccaggcccacctgcaggtgatcccgttg

SEQ ID NO: 370629 - DNA, 120 bp, Artificial Sequence
  ENSG00000141837_168 (sequence is synthesized)
ccttggactcatgggacagagggcccagaggcatagctggctgcccacccggcctgaacagcgggggcccatgcacgcagcccgcctctggaggagaacagggcatggctgtgagagcct

SEQ ID NO: 370630 - DNA, 120 bp, Artificial Sequence
  ENSG00000141837_169 (sequence is synthesized)
ggcccgggtgcgtggcatgtgtggctgtggcgagctttccgtgtgccgtgtgtggcgtctgcacggggcaggaggctgtgctgtgcctggctggaccagggtcacctgagggcctggcct

SEQ ID NO: 370631 - DNA, 120 bp, Artificial Sequence
  ENSG00000141837_170 (sequence is synthesized)
ctggctgctgggaacgtgggttggggagcacccagcgtgcatgctgctgctccctcaggaccgagctgctgggccccaggagagggttgggacaagcccagctgacggccaccacatgga

SEQ ID NO: 370632 - DNA, 120 bp, Artificial Sequence
  ENSG00000141837_171 (sequence is synthesized)
agctttgagcatcggccggagccaggggttggggtgtgcatcgcatgaggcagagcccagggccaggggctcgaggctgcgccgtcctgtctttcggtcccatgcctctgccatttgtct

SEQ ID NO: 370633 - DNA, 120 bp, Artificial Sequence
  ENSG00000141837_172 (sequence is synthesized)
gtctgcatctcctgtctgtctcctctgtacccatgggaatagaggacgcccagccccgggggcctgggacacccacccgccaggactttaacttttcttttcctccctgccttctccctc

SEQ ID NO: 370634 - DNA, 120 bp, Artificial Sequence
  ENSG00000141837_173 (sequence is synthesized)
cgatttctcttgatgccagtgccactcccctccttggcttcttctccatgcaccacctcctcactctccctcttgccttttatatttattttcttctttctgttttttctgtgtgcacca

SEQ ID NO: 370635 - DNA, 120 bp, Artificial Sequence
  ENSG00000141837_174 (sequence is synthesized)
atgacgccctgcacaaccgcagctcggggcacgcccagcgccctgcaggacactcggcctccccggctcagcatctgcttcgagggcccccctctgaggcggcggggcggcgtggtggat

SEQ ID NO: 370636 - DNA, 120 bp, Artificial Sequence
  ENSG00000141837_175 (sequence is synthesized)
gtggagctgaagcagggtctggaggccccctctggggccaggccaatcatgggaaggcccccaggagttcccagggagggagactcagcacagatgatgtcgaacagcctttaccgcagc

SEQ ID NO: 370637 - DNA, 120 bp, Artificial Sequence
  ENSG00000141837_176 (sequence is synthesized)
ccttcgaacaaccataactgtcccgggcactccgctgatgggcaactgtgcctctaacatgcacccggccagcctagggggccgggaaccaagccctctgttggcatctctgtcttgtgg

SEQ ID NO: 370638 - DNA, 61 bp, Artificial Sequence
  ENSG00000141837_177 (sequence is synthesized)
ggtgggaggatcacttaagcccaggaggacagggtctctatagataaatgaatggatgaat

SEQ ID NO: 370639 - DNA, 120 bp, Artificial Sequence
  ENSG00000141837_178 (sequence is synthesized)
cagtgagacccggtctctatagataaatgaatggatgaatgagggggtcaaggatcctcacccggcttccatttggagggaggagtttggttgagttcttgcaaggttggtacctaggaa

SEQ ID NO: 370640 - DNA, 120 bp, Artificial Sequence
  ENSG00000141837_179 (sequence is synthesized)
gggccaacacctctcagtgtcacagatgaaagtgcctgctccacatccaaggggcttccctgaactcctccttctctacctggccttttcacaccactttgaaacacagattttatggtt

SEQ ID NO: 370641 - DNA, 120 bp, Artificial Sequence
  ENSG00000141837_180 (sequence is synthesized)
gaaacacagattttatggttatcattattcaattatggtgaggccaacagatcaggagatgaatgtcattggaaagatagtttgtggctgggcacggtggctcacacccataatcccagc

SEQ ID NO: 370642 - DNA, 82 bp, Artificial Sequence
  ENSG00000141837_181 (sequence is synthesized)
ctcacacccataatcccagcactttggccaggtacggtggctcacacctgtaatcccaacgctttgggaagcccaggtgggc

SEQ ID NO: 370643 - DNA, 89 bp, Artificial Sequence
  ENSG00000141837_182 (sequence is synthesized)
cctccccgccttcaaaaaaaaaaaaaagtgaggctgaatcatggacttagtctttatttaaaattttgagccacttgtggtggctcata

SEQ ID NO: 370644 - DNA, 120 bp, Artificial Sequence
  ENSG00000141837_183 (sequence is synthesized)
gcccaagagttcaaggctgcagtgagctgtgattatgccattgtactccagcctagacaacagaaggagacccctatccctgaaaaaaaaaaagaagaagaaattgatatttgttcatca

SEQ ID NO: 370645 - DNA, 120 bp, Artificial Sequence
  ENSG00000141837_184 (sequence is synthesized)
tgatatttgttcatcatggactttttgcattaattttgattttttaaaatattggagcaaaagattatcttgattactgagattttcagtacccccttaatttgcacccaaaacaaatgc

SEQ ID NO: 370646 - DNA, 120 bp, Artificial Sequence
  ENSG00000141837_185 (sequence is synthesized)
ctccctccctcacctcgtccaagtaatggtctttctctcagaggtcttggaaatgccaggctggaagcttggtagattccagcatgtgccctcagcatcctcacctccctccctctctca

SEQ ID NO: 370647 - DNA, 120 bp, Artificial Sequence
  ENSG00000141837_186 (sequence is synthesized)
gcaaatatgccaacctgaacatgccctactacccactctcagacacatccagtactcacacatgtgggaataatgctaacccacaaggcacctttgagcaaagtttttttaaacaccttt

SEQ ID NO: 370648 - DNA, 120 bp, Artificial Sequence
  ENSG00000141837_187 (sequence is synthesized)
ctcaacagacttcatttccatctgtctgaaaatcatcgcaatagacttaaatgattttgttcaaacaaggcactgaaggaccacctgccaaaaaattgtcatcatgaatacacaaatcta

SEQ ID NO: 370649 - DNA, 120 bp, Artificial Sequence
  ENSG00000141837_188 (sequence is synthesized)
tcatgcctatcatgtgaaggtatcgcttagacacagagcctttgagcagtgtgcaacctgcactactgtacagagctgctgtgcacttacccactctcatatatatccccattgtacctc

SEQ ID NO: 370650 - DNA, 120 bp, Artificial Sequence
  ENSG00000141837_189 (sequence is synthesized)
ctgagcacccagcaccacctgtgctcaaatacccactctacatgcatacacccacctctactccctccattgccacaacctgtctttaaatcccaacttggccacttataagtgggtggt

SEQ ID NO: 370651 - DNA, 120 bp, Artificial Sequence
  ENSG00000141837_190 (sequence is synthesized)
cttcagcacgtccctttaaattgctgaacctcaagttcctcatgtgcaaagtggagccagtaataacctccctgggagggttgctgagccggtggggatgaattgttgaatattgtttcc

SEQ ID NO: 370652 - DNA, 84 bp, Artificial Sequence
  ENSG00000141837_191 (sequence is synthesized)
ttgctgagccggtggggatgaattgttgaatattgtttccagcacacagcaagcccttcatgcacagcagtagaaatgactgac

SEQ ID NO: 370653 - DNA, 62 bp, Artificial Sequence
  ENSG00000141837_192 (sequence is synthesized)
ttaaaattaaaattaagaaataactgacattgttgtcagcctttcaaaaaacagcgactact

SEQ ID NO: 370654 - DNA, 120 bp, Artificial Sequence
  ENSG00000141837_193 (sequence is synthesized)
caccttcctcatcaccccttgggtccctgtctctctccttcctgccccttccctctccctgccccattccttgcagggtcctcaagcattcggtggacgccacctttgagaaccagggcc

SEQ ID NO: 370655 - DNA, 120 bp, Artificial Sequence
  ENSG00000141837_194 (sequence is synthesized)
acaagatgatggaggaatacagcctggagaaaaatgaggtgccacttccaattccatctgtcctttaaaaactggggacacacacaaactttaaaacacacacaacacccaggaacccct

SEQ ID NO: 370656 - DNA, 120 bp, Artificial Sequence
  ENSG00000141837_195 (sequence is synthesized)
ttctaggggtacctgggggagggaacagaagcattgtcccaaccgaatccagtcttcagggcagcccttcatggagtttccagaggaaacacatcatatagtgtatgtatcagtcagttt

SEQ ID NO: 370657 - DNA, 120 bp, Artificial Sequence
  ENSG00000141837_196 (sequence is synthesized)
agactaggttatgccgcagtaacaagcaaccccagatttcattgccaaatatccacaaagggacttattttttgctcacactgcatgtcaacatcagttgtggatcttgccatctttatt

SEQ ID NO: 370658 - DNA, 120 bp, Artificial Sequence
  ENSG00000141837_197 (sequence is synthesized)
ctggttcccaggctggcagagcagcagagcagcctccctctgagatgctccagatgaaaaagagagtatgtcagactgaggttcagttcttcaggcttgtgctcaaaaattacacatgtc

SEQ ID NO: 370659 - DNA, 120 bp, Artificial Sequence
  ENSG00000141837_198 (sequence is synthesized)
acttctgctcacatttcatcagccaaagcaagtcacacatccattctgacatcagtggagtgggcaaatacaatctcccctagcgaagggtggtgaatatttatgaatgaaaagccaagc

SEQ ID NO: 370660 - DNA, 120 bp, Artificial Sequence
  ENSG00000141837_199 (sequence is synthesized)
aatcaaaaaaattagccaggcaggatggtgcacacctttagccccagtaacatgggaggctgaggtgggaggatgcttgagcttgggagttcgaggctgcagtgagctatcattatgcca

SEQ ID NO: 370661 - DNA, 120 bp, Artificial Sequence
  ENSG00000141837_200 (sequence is synthesized)
actacagcctgggcaacagagcaagaccctctctcaaaaaaagaaaaggaaagaaaatccagtcccctgtctaccagagagtatagacatgactctttgcctctctggcatcatccaagc

SEQ ID NO: 370662 - DNA, 120 bp, Artificial Sequence
  ENSG00000141837_201 (sequence is synthesized)
aagctaaatagaggacctagaatatatcctctgctcccttgacccttaagacttaataaccactattcctccttctctctccctcaaagagaaggagaagacgcagcaaagtattcagta

SEQ ID NO: 370663 - DNA, 120 bp, Artificial Sequence
  ENSG00000141837_202 (sequence is synthesized)
tctctgcatctttctctctctattttttcggctcgtgtggatttcttttttctttcttctgtttctccccacctctcttcctttggttctctgttcccattcccgttttgtttttttgtt

SEQ ID NO: 370664 - DNA, 120 bp, Artificial Sequence
  ENSG00000141837_203 (sequence is synthesized)
tttgtttttgtttttttcattttcggtgctgccaggggccgcatgccttacctggacatgtatcagatgctgagacacatgtctccgcccctgggtctggggaagaagtgtccggccaga

SEQ ID NO: 370665 - DNA, 120 bp, Artificial Sequence
  ENSG00000141837_204 (sequence is synthesized)
gtctccgcccctgggtctggggaagaagtgtccggccagagtggcttacaaggtagactacccttgccgaccaccgacgtccaggcactgggtttttttttcttcttcttcttctttttt

SEQ ID NO: 370666 - DNA, 120 bp, Artificial Sequence
  ENSG00000141837_205 (sequence is synthesized)
gtttttgattcttttttttcttttctcgagtcaactgatcatgaccatcccttgattctaagcagcacactgtgtccgtcctttctgatgagtgtcttcgtgttttgagactccattatg

SEQ ID NO: 370667 - DNA, 120 bp, Artificial Sequence
  ENSG00000141837_206 (sequence is synthesized)
gccgacatgccggggggagggggaggggagcgcccaggtccccttgcacctggtctcccaggtaccaaattggaaacaaacacgcttcttcagggagtcaaaacccatgcttcccacttc

SEQ ID NO: 370668 - DNA, 120 bp, Artificial Sequence
  ENSG00000141837_207 (sequence is synthesized)
tgcccacccagagcggcccccatgcccaggctggggcaggcgccttgcagagaggggctttagcccccgaaagcaggcgaggtcccgggtccccgcccctgccacgcacacctgaagctg

SEQ ID NO: 370669 - DNA, 75 bp, Artificial Sequence
  ENSG00000141837_208 (sequence is synthesized)
ccactaaactcctagaccaagggcttttttgaaaatagctgtggtgaggagggcagattgcttgagctcaggagt

SEQ ID NO: 370670 - DNA, 64 bp, Artificial Sequence
  ENSG00000141837_209 (sequence is synthesized)
atggtgaaacctcatctctacaaaaagacaaaacaattagccaggcgctagcccaggaggcgga

SEQ ID NO: 370671 - DNA, 69 bp, Artificial Sequence
  ENSG00000141837_210 (sequence is synthesized)
gaaaaaagaaaagctgtgcagaaatgggggtggggaatcagccaacccccttgtgctgggtctcaggga

SEQ ID NO: 370672 - DNA, 120 bp, Artificial Sequence
  ENSG00000141837_211 (sequence is synthesized)
gtggggaatcagccaacccccttgtgctgggtctcagggacacccaatacagctgctcaggcccagccagatggcaaagggccctcaaccaaccctgggaccagaaccacaaaaagccac

SEQ ID NO: 370673 - DNA, 120 bp, Artificial Sequence
  ENSG00000141837_212 (sequence is synthesized)
gtacttactggctcccgagcccaagcttaacaggtgaaatggaccactcttcaccaggaagggcagggctgtgccaagctcaccccagacttctaggcctgggagggtagggtcccatgg

SEQ ID NO: 370674 - DNA, 120 bp, Artificial Sequence
  ENSG00000141837_213 (sequence is synthesized)
agctgtgggctgccccctacccaacctgacctctgcttcctctcttcccttcttcccacctaaacattcctccacagtggcaatagcaaaggaaaagacatcaacacgattaaatccctc

SEQ ID NO: 370675 - DNA, 120 bp, Artificial Sequence
  ENSG00000141837_214 (sequence is synthesized)
tggatgatggtctcccaacgtggccccaagaaccccaacctcaagggtggcttcagtatcctgccagtggccacagatcctacttaggcattcttgtgtttgccaaggagtcccagggag

SEQ ID NO: 370676 - DNA, 120 bp, Artificial Sequence
  ENSG00000141837_215 (sequence is synthesized)
acccaacctgtgagtgttaccatatggctgcttatgtatccagttcctcaaaatgatgggagtcatcatggctgggagtctttagcatccattttagagataagaaaactgaaatcaggc

SEQ ID NO: 370677 - DNA, 120 bp, Artificial Sequence
  ENSG00000141837_216 (sequence is synthesized)
caagctcttgggaggattaggcaggggtgtgcttctttctcctggcagctgggaggaccgtctccttcagagagcactacaggagaggcagtgagtgaaatagcctctgagatcttagct

SEQ ID NO: 370678 - DNA, 120 bp, Artificial Sequence
  ENSG00000141837_217 (sequence is synthesized)
gttgaaaggggtggggttccacagaaggtgacccagcagagaaagagtttatttgggaatgatcccaggaagcaccatcgggggaatgaggaagtgagcagagaaagaagggatctttta

SEQ ID NO: 370679 - DNA, 120 bp, Artificial Sequence
  ENSG00000141837_218 (sequence is synthesized)
tttaaagagtgtgctatcaagcgggttaccacttaaaactgggactggatccccctgggcacctctgggagacagcaaagaacacacaactcagctggtcacggtggctcacgcctgtaa

SEQ ID NO: 370680 - DNA, 120 bp, Artificial Sequence
  ENSG00000141837_219 (sequence is synthesized)
actccatctcaaataaataaataaataaaaatataaataaaaaaagaacacacacctcagagccgtcccagccaaggggcaagggagctggggtatttatacactggcttctttttgaca

SEQ ID NO: 370681 - DNA, 120 bp, Artificial Sequence
  ENSG00000141837_220 (sequence is synthesized)
ttggtgaggactgctcctagagtgggaattaatgcctggcacatctggctgagtggaacaggtattctgggtgctttcagacctcgaccagtcctgacttctaaagcaagcaagaagtgg

SEQ ID NO: 370682 - DNA, 120 bp, Artificial Sequence
  ENSG00000141837_221 (sequence is synthesized)
ggagagttgggccagaaaagggttattgcctcaatgcattgtgagtggtaccttgtggaaggtgagagacagagaagattccaggcacaggtgccatgctaaacgatagttctcatttat

SEQ ID NO: 370683 - DNA, 120 bp, Artificial Sequence
  ENSG00000141837_222 (sequence is synthesized)
tataggaacccatggatttattttgttctctgccctgagtgctgggtgagagtactggatgagtcctcctggtctcccccaacccccaggatgtaccagagataccccaattgggagtcc

SEQ ID NO: 370684 - DNA, 120 bp, Artificial Sequence
  ENSG00000141837_223 (sequence is synthesized)
tggcaccaaccaatcagaacctagcactcagcagcattctgcccctccctgactatgcccacattaacccttcagtggctgggtctgggggtagggtgagccccggaaaagccaggcagc

SEQ ID NO: 370685 - DNA, 120 bp, Artificial Sequence
  ENSG00000141837_224 (sequence is synthesized)
ttttcagttaaatctttgccatccaaactctagctgcttgctctctaaagctccagaatgaaatggaatcaagtaggaagggatgccttcagtatttcagtatttggaccactggccatc

SEQ ID NO: 370686 - DNA, 120 bp, Artificial Sequence
  ENSG00000141837_225 (sequence is synthesized)
tgggtgcagacagactgaatagcagttctggttctgatgatttgggtcaagggagctgtgaattgaaggagtggatagaaggaatcaagaagcccaaaggggaacccaggtgggcagaga

SEQ ID NO: 370687 - DNA, 120 bp, Artificial Sequence
  ENSG00000141837_226 (sequence is synthesized)
aagaggtttcaggccccttatttgggaaaggcagccacagaagaagattctgtctgggagtggatttccacccaccctctccacccagtgacccccaagtggatccgcagaggcagcccc

SEQ ID NO: 370688 - DNA, 120 bp, Artificial Sequence
  ENSG00000141837_227 (sequence is synthesized)
tgagccctccctccccactcctccccacggggagggaaaacccactggggaaggtttatttgcaatggttggaggtttgggtttttttgtgggttttggtttgttggttttttttttcct

SEQ ID NO: 370689 - DNA, 120 bp, Artificial Sequence
  ENSG00000141837_228 (sequence is synthesized)
ctttttctcttgctcctcctgtctctttctctcctgggcttgtgaagtttgctcaatatggaatgtcctaattatttctttccccgatgaagaaggtgttaattgaggcagagctatttc

SEQ ID NO: 370690 - DNA, 120 bp, Artificial Sequence
  ENSG00000141837_229 (sequence is synthesized)
gagagagagagagagagagagaatgaatatggggcagggcctcttggaaaaatcagccgtgagcagagaaaccaggactcctggatcctaggtttctgtgaagttttattttatgttttt

SEQ ID NO: 370691 - DNA, 120 bp, Artificial Sequence
  ENSG00000141837_230 (sequence is synthesized)
atcctaggtttctgtgaagttttattttatgtttttctaccctagactagctaaaggagaagaggccatggggttggcttgggtccgagtggggttttgaggggacagatgtgggtggtg

SEQ ID NO: 370692 - DNA, 120 bp, Artificial Sequence
  ENSG00000141837_231 (sequence is synthesized)
ccaccagaggggaggaagcctcgatttaggagaaagactgaaaagctagctcacgattaaaaatataagacgtgtgagtaagagacagatatatacagacacccaggcagtgggttaatt

SEQ ID NO: 370693 - DNA, 120 bp, Artificial Sequence
  ENSG00000141837_232 (sequence is synthesized)
ttaaaatgtatttataaccgaattcctcagacactctggacgcttgtttttctagaagcaacgctcagagtgtttcgtgtcggtggttggggggttgagggggattgcaaagctgctaaa

SEQ ID NO: 370694 - DNA, 120 bp, Artificial Sequence
  ENSG00000141837_233 (sequence is synthesized)
gatagacccgttttcagtagcattcctcagtgtcgggagcccagttcctgtgtgcccagcaccgtgccaatcgcttagaaggaagcaaagataaagtggaaggcttcctgctttctaaga

SEQ ID NO: 370695 - DNA, 120 bp, Artificial Sequence
  ENSG00000141837_234 (sequence is synthesized)
gcttccaaaatagttagaggaaacaagacccctcatttgcagccatttttaacagtgaaggctaatgtgtgattatacccacgcccccctaaatatgaaaattcagtagctattgtatgc

SEQ ID NO: 370696 - DNA, 120 bp, Artificial Sequence
  ENSG00000141837_235 (sequence is synthesized)
agcactttgagaggctgaggtgggagtatcccttgaggccgttagtttgagaccagcctaggcaacatagccagaccctgtctctgctaaaataaaaatttaaaaattggccgggtgcag

SEQ ID NO: 370697 - DNA, 61 bp, Artificial Sequence
  ENSG00000141837_236 (sequence is synthesized)
gttagtttgagaccagcctaggcaacatagccagaccctgtctctgctaaaataaaaattt

SEQ ID NO: 370698 - DNA, 88 bp, Artificial Sequence
  ENSG00000141837_237 (sequence is synthesized)
agccgagatcacgcttttgtctcaaaataaaaaaatttaaaaattagccatgagtggtggtacatgcctatagtcctagctactcagg

SEQ ID NO: 370699 - DNA, 120 bp, Artificial Sequence
  ENSG00000141837_238 (sequence is synthesized)
tatagtcctagctactcaggaggctgaggaagaaggatcacttgagcccaggaattggaggctgcaaggctgcagtaagctatgatggtgcccgcactccagcctgggtgacaaagtgag

SEQ ID NO: 370700 - DNA, 120 bp, Artificial Sequence
  ENSG00000141837_239 (sequence is synthesized)
gataacccttccctccaggatcttcatgaggagctcagtgatgtcatttataaagcccctggggtctcgggagccctcaaaaatgctggagagacaggccacagctctgaagagcagccc

SEQ ID NO: 370701 - DNA, 120 bp, Artificial Sequence
  ENSG00000141837_240 (sequence is synthesized)
cttctctctgggtgactctgggctggacgaggcaggcggcagggggcgggggagcggtcccagaggcagtgtgtcccggaagccatagctgcttgagccagcacttggccatgaccagag

SEQ ID NO: 370702 - DNA, 120 bp, Artificial Sequence
  ENSG00000141837_241 (sequence is synthesized)
agggagaactggggccccggggacaagggcagcccctcaggagggcattgtggggagatgggggtaaccaaagcttggctgtagggccagcactgaggggtgggctttcctgcatcctgg

SEQ ID NO: 370703 - DNA, 120 bp, Artificial Sequence
  ENSG00000141837_242 (sequence is synthesized)
cctaggaattaataatgcagatgagtacactgagggaactgagacactcaaaagctctgaaagctgagccggctcccaaacaccaccctatgtcaggagcccagaaagaatgggtttcaa

SEQ ID NO: 370704 - DNA, 120 bp, Artificial Sequence
  ENSG00000141837_243 (sequence is synthesized)
gtcaattctgtttgaaccaaccctctcctagttagtgggcaggagagagccacagccctcaggccagtgtggggacaccactcccagggccatagaggggtccccagggtgtcttccctc

SEQ ID NO: 370705 - DNA, 120 bp, Artificial Sequence
  ENSG00000141837_244 (sequence is synthesized)
gtggccccacaggccacattgcccttctccttttctggaagactcagggccccagaggtcctgtcctagaccctctccttggccatctgccaatgagcccaggcttggggtccctcagga

SEQ ID NO: 370706 - DNA, 120 bp, Artificial Sequence
  ENSG00000141837_245 (sequence is synthesized)
gattggggggagggtagaagatccttgcagggggaagcaatggtcaaaaaagggtgtcaaagccaagggtcaagggtgataccaatgtcatcttactaacaataaaaataacaatagctc

SEQ ID NO: 370707 - DNA, 120 bp, Artificial Sequence
  ENSG00000141837_246 (sequence is synthesized)
acgagaatcgcagccttgctgtgtgccagggaactgtgccaagtggtttacgtggattggctcagggtagaggtcttggtctcagctcgtaagagaattccctcggagggttcaactgaa

SEQ ID NO: 370708 - DNA, 120 bp, Artificial Sequence
  ENSG00000141837_247 (sequence is synthesized)
ggcacccaaatgcagacctcactggtggaggggaagggaagggtacccacaagggtggcaaggtgtccagcgaccacccaccgtggggagctgtcacctgcccaggtgctgaagtgggga

SEQ ID NO: 370709 - DNA, 120 bp, Artificial Sequence
  ENSG00000141837_248 (sequence is synthesized)
gggaacctgagccggaggccaggagaagccaccaagtgggagctgtcctgtcaatgtggagagacagagaccagggcccaagcaggcagagagcaataggggagaaacaccccaaccttt

SEQ ID NO: 370710 - DNA, 120 bp, Artificial Sequence
  ENSG00000141837_249 (sequence is synthesized)
ctctcccctcatcccttatctcctgccagagcctcccatggcccaaagtaaaccggaagcaagctgaatatgatgctcagagcaggcagggaagtcaggagaatagatctgggtgtggtc

SEQ ID NO: 370711 - DNA, 89 bp, Artificial Sequence
  ENSG00000141837_250 (sequence is synthesized)
agcaggcagggaagtcaggagaatagatctgggtgtggtcgggcctgaggaagagggtgttgcctcatttcacagatgggaaaactgac

SEQ ID NO: 370712 - DNA, 120 bp, Artificial Sequence
  ENSG00000141837_251 (sequence is synthesized)
cttttggttggtgtggtccgggccaggctcaggaaggctgagcccttgtgttctccctccccttgttatgcgcctgcctcctttctgccaacaccccacctccatgtctcagctgtatat

SEQ ID NO: 370713 - DNA, 120 bp, Artificial Sequence
  ENSG00000141837_252 (sequence is synthesized)
tacagcagatgctttctgttacaattaaaataatagctcattattgttggctgcttccagagtgctttatgcccattctctaatttaatccttgcaacaacccactgaattaggaaatat

SEQ ID NO: 370714 - DNA, 120 bp, Artificial Sequence
  ENSG00000141837_253 (sequence is synthesized)
taatattcccatctgaccactgaggaatcagaaactcagagtgtaacttgcttaaggccacccagcaagtaagtgatggaactgggagatgaacagaagattatgcattccagaactcaa

SEQ ID NO: 370715 - DNA, 120 bp, Artificial Sequence
  ENSG00000141837_254 (sequence is synthesized)
ggttttaagtgttgtacgtgcatgggtctcttgatttgcttgaggatatcttgcttttatttcaacttggtgaatgttttttgagaatgtctgggtgcaagggattgtgattatgacaaa

SEQ ID NO: 370716 - DNA, 120 bp, Artificial Sequence
  ENSG00000141837_255 (sequence is synthesized)
ggagaaaagcaagctaaataaggtacagttactgtcttcaaggagttttcagatccatatatgatgaactgtggttgaaatgtgtatatgctttcctctaagcaccctgtatgaggtagc

SEQ ID NO: 370717 - DNA, 120 bp, Artificial Sequence
  ENSG00000141837_256 (sequence is synthesized)
tagcacttgctggtataacaaaagatccaaagctaggaaatgacttaaacacggcagaagtttatttgtcactcatagaaaattcaaaattgagctgggtgtggtggtgcatgcctgtaa

SEQ ID NO: 370718 - DNA, 120 bp, Artificial Sequence
  ENSG00000141837_257 (sequence is synthesized)
aggagttcaagaccagcttgggcaacacagtgagaccacccccccatctgtaaaacataaaataaaataaaaattaaccaggcatggtggtacatgcctgggagaattgcttgagctcag

SEQ ID NO: 370719 - DNA, 120 bp, Artificial Sequence
  ENSG00000141837_258 (sequence is synthesized)
cctgggcaacagagcaagaccccatctcgaaaaaaaaaagtccaaaataattgttcctagttgacaggctcatctcctccaatgactgacggaccctgacccttgccatattgtggctct

SEQ ID NO: 370720 - DNA, 120 bp, Artificial Sequence
  ENSG00000141837_259 (sequence is synthesized)
ctcttcattgtcagcccacatcatccaataactccatgcttgtctgtatcaaaccaggaaggagaagtgagcatagaaggtgatacttggaaaggtttatgagtttggaaggggtgtgac

SEQ ID NO: 370721 - DNA, 120 bp, Artificial Sequence
  ENSG00000141837_260 (sequence is synthesized)
ccatacctgttccattcatatcctattggctagaactcggtcacatgaccacacatcactgcaagggaagctgggaagtatcagattgtgcttagaagaaaagggaaatggatttggaga

SEQ ID NO: 370722 - DNA, 120 bp, Artificial Sequence
  ENSG00000141837_261 (sequence is synthesized)
atgacctactagtctgtcagggaccttaaaaacttttattagattccagtagggacattagtatctggtaccaatggctggttcctcctcttcccactctctactctcctctcagctaag

SEQ ID NO: 370723 - DNA, 120 bp, Artificial Sequence
  ENSG00000141837_262 (sequence is synthesized)
tctgggctcttctattctaagacccttcttcactggacacctttttcatagtaatcatttacaggatcatagctttccatgttttgttgctgctccaggttctgtctctcttggcggatg

SEQ ID NO: 370724 - DNA, 120 bp, Artificial Sequence
  ENSG00000141837_263 (sequence is synthesized)
tgatgggttgcagcacccacactgtgctggccgggctctcacaatgcagatttgtttcagagcaatgttgcctctcacagaaggagctgtggcctattgggctgtttctgtagaggcctt

SEQ ID NO: 370725 - DNA, 120 bp, Artificial Sequence
  ENSG00000141837_264 (sequence is synthesized)
cagatgtcagcagtctgttgtaaggactctgggctagctctcatgggcttgggtgttcacagagggatctttgttggctgtgctcacagttcggtggcttgggaccttggtgggttccaa

SEQ ID NO: 370726 - DNA, 120 bp, Artificial Sequence
  ENSG00000141837_265 (sequence is synthesized)
gggcatattatggtactgggcacttttctcttagtctactaggaaactcatctagaaacagcctagtggctaacttttttattgtttaaaaaatgtaaagctgggcagggtggctcatgc

SEQ ID NO: 370727 - DNA, 120 bp, Artificial Sequence
  ENSG00000141837_266 (sequence is synthesized)
ctgtatcccagcacattgggaggccaaggtgggaggattgcttgggcccaggagtttgagacgagcctgagcaacatagcaagaccacatctccacaaaataaaaattaaaagtgtataa

SEQ ID NO: 370728 - DNA, 120 bp, Artificial Sequence
  ENSG00000141837_267 (sequence is synthesized)
agctgggtacagtggcacatgcctgtaaccccaattactcaggaggctggagagagaggattgcttgagcctaactagtttgagaccagcttgggtaacctagcaagatcccatgcaaaa

SEQ ID NO: 370729 - DNA, 120 bp, Artificial Sequence
  ENSG00000141837_268 (sequence is synthesized)
ctaagtagagaataatagagcaaacacctgtgtatacattcatttattcaatgactatttattgaacacttctgtgtgccaggtcctgttctaggctctgggacacagcagtaaacaaaa

SEQ ID NO: 370730 - DNA, 120 bp, Artificial Sequence
  ENSG00000141837_269 (sequence is synthesized)
tagaaaaatcccctgtcctcatggagctgagagtctactgatggagatggacacaattgatgaatgaatctagtgtgtcagatggcggtgaggggtacagaggaaaaataaagcagggga

SEQ ID NO: 370731 - DNA, 120 bp, Artificial Sequence
  ENSG00000141837_270 (sequence is synthesized)
gggatgggatgtgtggcaggcaggggtgaggggtgctggaagccagggaagacttcactgggcatgtgacatctgaatgaaaacctaagggaggtgagtgagtgagccatgaggagagct

SEQ ID NO: 370732 - DNA, 120 bp, Artificial Sequence
  ENSG00000141837_271 (sequence is synthesized)
atatacaagaaatcaggagtaagaatgcttcaaacttcccaacagcaatactggaattgagaatacgttggagcaatacttcacatttttgaagtaaaatgatctccaaaccagaattct

SEQ ID NO: 370733 - DNA, 120 bp, Artificial Sequence
  ENSG00000141837_272 (sequence is synthesized)
atacccagccaaactaccaatgaggaagctaccagaggatgtgcttcacccaaacaagggagtaaaccaagaagagggaaacagagaacactggacttaagaaatccaacaatgagaagc

SEQ ID NO: 370734 - DNA, 120 bp, Artificial Sequence
  ENSG00000141837_273 (sequence is synthesized)
gaccatgtgacaagtcttcaggaaagactgcttctggatgataaaatgaactgaatacctgttaagagacttggggggtcaaatttgcaataagtaccaaacaaagaagattaaaaaatg

SEQ ID NO: 370735 - DNA, 120 bp, Artificial Sequence
  ENSG00000141837_274 (sequence is synthesized)
ataagtcccaagggaaacaatatgttgtaaagaaaaagtagctatagtttgttcatgacataactgtaacttgccttgtacatgataatataaacaccgaatcttcctcactttgtgaaa

SEQ ID NO: 370736 - DNA, 120 bp, Artificial Sequence
  ENSG00000141837_275 (sequence is synthesized)
gaacaatattgggcaaatgcgcaggttttggaaagttccatgtgtagggggatggagggagaaattagcaaaatcctccttttctatagctaatacctataaagtgctacaacacccaga

SEQ ID NO: 370737 - DNA, 120 bp, Artificial Sequence
  ENSG00000141837_276 (sequence is synthesized)
gtggaagagagagaatactcttcttaccaccgttcctctgctctttaagggaagcccgaacggggggaaaaagtctcctttttgagacaacagttttgccctgtgctgggaggtcccagt

SEQ ID NO: 370738 - DNA, 120 bp, Artificial Sequence
  ENSG00000141837_277 (sequence is synthesized)
gcggtgttaaggggcatagagaagagagcaagaaatcgtgaattatttttccccctgaggagcagtggcctggcttgttctcagcttctgccttgcctggattgatctccccaggctggg

SEQ ID NO: 370739 - DNA, 120 bp, Artificial Sequence
  ENSG00000141837_278 (sequence is synthesized)
tccccgtgtagcacttagctaaagatgatcagcagctgagaacgatcggtcctcctttccctcctcccagcatcagggaaacctcctcctcctctttttttttttcccttggcagctgat

SEQ ID NO: 370740 - DNA, 120 bp, Artificial Sequence
  ENSG00000141837_279 (sequence is synthesized)
acagcaaccccgttcagtgtctgcttttgtggggagccctctgctcagaaaactgctcttcttggcacccacttttctccctcctgtctctgggccacccttcttctttccactgggtgg

SEQ ID NO: 370741 - DNA, 120 bp, Artificial Sequence
  ENSG00000141837_280 (sequence is synthesized)
gccatggatgcatggacttcagatagctcggacccctgggtgctgacgagatgggaccctcgggacccctggaggactcgcagtgctgaccactagccgcgtcgcctgagccccagcgct

SEQ ID NO: 370742 - DNA, 120 bp, Artificial Sequence
  ENSG00000141837_281 (sequence is synthesized)
gatgcgatacagtttccccctcactgtgctggagggagaagaccctgggatttctgagcgaggcccgtggatgttgaagtcttcctgggtccccgactccatgctctcgcgccccagtta

SEQ ID NO: 370743 - DNA, 120 bp, Artificial Sequence
  ENSG00000141837_282 (sequence is synthesized)
cttaatactacttaaatattcacaagtgtacgacttgttttcccaacctaactataagctctttgatagttaatgcttctctatattatctgtagtggctggcatagtatgctacgcata

SEQ ID NO: 370744 - DNA, 120 bp, Artificial Sequence
  ENSG00000141837_283 (sequence is synthesized)
aagaagttcagggatgacctttaaagattctccccacccaaaaagtattaccccatcatcctattctcccatccaccttgatcttccctgcgtccctatccatcaatgctatttgtacct

SEQ ID NO: 370745 - DNA, 120 bp, Artificial Sequence
  ENSG00000141837_284 (sequence is synthesized)
gccccgtgttgccacctcattcctttccttcctctgtgcacccctcctcacctaacctatatgtctcccctccttctcaatcaaagccggggacaaggttgtcccaccagcatctcagac

SEQ ID NO: 370746 - DNA, 120 bp, Artificial Sequence
  ENSG00000141837_285 (sequence is synthesized)
tccctgccgcccccccccccccccccggttttcctcaagtcgcttctctcagtctctgcttagatgaatgtgtgcgcatgtgcaagagagggagggcgagcccttcctctcctggtcttt

SEQ ID NO: 370747 - DNA, 120 bp, Artificial Sequence
  ENSG00000141837_286 (sequence is synthesized)
agagagggagggcgagcccttcctctcctggtctttgtgcaggaccaccatgggtccataagacaactttgtgcaaatttgaaaaaggcaccctttccacagaacatgcctgttggaaaa

SEQ ID NO: 370748 - DNA, 120 bp, Artificial Sequence
  ENSG00000141837_287 (sequence is synthesized)
cctgttggaaaattgttgcaatctaccaatgtggtgagaacaagacactttttttctatcacctgggaagctgttatatttaatatacaaatcgggggctgggcgtggtggctcatgcct

SEQ ID NO: 370749 - DNA, 83 bp, Artificial Sequence
  ENSG00000141837_288 (sequence is synthesized)
cgagactagaaaaaatattttaattaataaataagtacataaatctatcatttccaagatgggagccctttgtgcggtgtaca

SEQ ID NO: 370750 - DNA, 120 bp, Artificial Sequence
  ENSG00000141837_289 (sequence is synthesized)
tctatcatttccaagatgggagccctttgtgcggtgtacaacctgcacaactgtgcacagtggcccagtctatgtgtgtttctctatttcccacctccttccccaccctacccccagtgt

SEQ ID NO: 370751 - DNA, 120 bp, Artificial Sequence
  ENSG00000141837_290 (sequence is synthesized)
cccctccagtgtcctgctctggatttaccatacccctccccatcttcaactctgtgtttcctgcccacttgtgtctgaatccccacccaagttgccctcaccccccttctctgtgccact

SEQ ID NO: 370752 - DNA, 120 bp, Artificial Sequence
  ENSG00000141837_291 (sequence is synthesized)
tcagcctgggctggtgcacaccagcccagcatcctctcccatgccaccaagcatggtggacagagcccctgcctgggacatggggaatcttttcttccctgggctggaagggagtgcccc

SEQ ID NO: 370753 - DNA, 120 bp, Artificial Sequence
  ENSG00000141837_292 (sequence is synthesized)
tcaccccttccccctgccattgcacagagagccaagatctggacatgcccctgagatacacttcccacggagctatgaatgagtctcgagattccgtctgcatgcgcccctgtctgtgct

SEQ ID NO: 370754 - DNA, 120 bp, Artificial Sequence
  ENSG00000141837_293 (sequence is synthesized)
tggatagactatttaggggagaaatttatcccatgaatgtcgtagtggctcggaggttgttttagaattgaatgtctcccagggatatttcttgaaagcctgaccgctcaaaatgcttct

SEQ ID NO: 370755 - DNA, 120 bp, Artificial Sequence
  ENSG00000141837_294 (sequence is synthesized)
tgacaatgaaggatcatgtcagataagatgggggagaagctgctttctataatctgcctcttggcaactcaccctgggtagtaataaataaaagtacctttaaagtacttttttatttag

SEQ ID NO: 370756 - DNA, 120 bp, Artificial Sequence
  ENSG00000141837_295 (sequence is synthesized)
ttgacttatcgattttactaaggaaacacttatgtggtatctactcagtgccaggcactgttctgagtgccttaaaattttttttaatttctctgaggttgttactatgcttagctccat

SEQ ID NO: 370757 - DNA, 120 bp, Artificial Sequence
  ENSG00000141837_296 (sequence is synthesized)
ttgacagatgaaaaaactgaggtccagagacgtgaattcacctgcccaaggtcacacagcaagccagtgggagagctggagtttgagcccagacactggctctagcctccttgttcttaa

SEQ ID NO: 370758 - DNA, 120 bp, Artificial Sequence
  ENSG00000141837_297 (sequence is synthesized)
ccactcagctctgctgccattcacacaaccttatgaactatttattattggctccacttattaagaggttaactggcacatcccattggcacattcaaggctctgataaggcctgcaatt

SEQ ID NO: 370759 - DNA, 120 bp, Artificial Sequence
  ENSG00000141837_298 (sequence is synthesized)
cataatttcaataactaactttttggagcccctatcatgagccaggcataaattaagtcttgggtctcatgattttgtgaagtaagcactagtattacggctattttacagatgagggca

SEQ ID NO: 370760 - DNA, 120 bp, Artificial Sequence
  ENSG00000141837_299 (sequence is synthesized)
ccaaggcacagaggggacaagtaacttgcccaaggtcacacagctaatttttaaaaagaaagaaagaaatctacttaacccatagattcacaatattgtttggccctgggacatttaata

SEQ ID NO: 370761 - DNA, 120 bp, Artificial Sequence
  ENSG00000141837_300 (sequence is synthesized)
tcgaaaagcctttttatctcctacagaattaaggaccgtatttcttcaacctagcttggggatcaagatacttcaagagggtcgtttgggagtgataggaactttgctaaacagggcatg

SEQ ID NO: 370762 - DNA, 120 bp, Artificial Sequence
  ENSG00000141837_301 (sequence is synthesized)
tgaatgtcttctctcaccgaggtcccctctgccttcttggggttccaggacccagagagggcccccacctggaggagtttaatagtttgttgtgtaggaggccttgggggttggagatct

SEQ ID NO: 370763 - DNA, 120 bp, Artificial Sequence
  ENSG00000141837_302 (sequence is synthesized)
cagtagtggtaggtaacatgagattatggaagaaaagggtttgtgagcctgtggtctgagtggacctctgcacgcccatctgtctccaacagccttcgccgcctgtgccattacatcctg

SEQ ID NO: 370764 - DNA, 120 bp, Artificial Sequence
  ENSG00000141837_303 (sequence is synthesized)
ctctccgacttcctttgtgagtatcacccagccccacccctgccaactccctgatccctccctcacaccctttttccacttctctttctctggtagtatgtgtatcttctttggtcctca

SEQ ID NO: 370765 - DNA, 120 bp, Artificial Sequence
  ENSG00000141837_304 (sequence is synthesized)
ttgaatctgccctttcctttagccatttctataactgtcactggggccaatgttactgttgctatgacaatggaacccatctcccttagacctgagagctggaagctggaattcagacca

SEQ ID NO: 370766 - DNA, 120 bp, Artificial Sequence
  ENSG00000141837_305 (sequence is synthesized)
acaaatgctcctgtgattcctttctaagagagagggacagaggggtgctggtgaaggggatgttggaagagagacagagaaagacggagctcataagatagacagatagaaacagaaaca

SEQ ID NO: 370767 - DNA, 120 bp, Artificial Sequence
  ENSG00000141837_306 (sequence is synthesized)
tacatgtattaataatttttatgtacatctctggaaatgttcataacttatggttaagagaggatgccttagaaataaggagtggcttatatgttgccctcattttctctacttatttct

SEQ ID NO: 370768 - DNA, 120 bp, Artificial Sequence
  ENSG00000141837_307 (sequence is synthesized)
gactctacttctctcttctttcaaaccttctgcttctttcctgttaggttggtgcaaaattaattgcgttttttgccttttttttttttttttttaaccacagttacttttgcaccaacc

SEQ ID NO: 370769 - DNA, 120 bp, Artificial Sequence
  ENSG00000141837_308 (sequence is synthesized)
taatacttcctcccctgccctttttggcttccttattcattcatagaacatcccctccagtatctgcgagagcgttttgctccctcaaggtacaaggcccactaaggctttgccctctgg

SEQ ID NO: 370770 - DNA, 120 bp, Artificial Sequence
  ENSG00000141837_309 (sequence is synthesized)
gcctattcccagattctatgtgagttagcatgagatagtatcaaaattgagggccaagtgagggtgaggaaaagcagcaaaagatggggagatgtctgagcaggatttaaaaagtaaaga

SEQ ID NO: 370771 - DNA, 72 bp, Artificial Sequence
  ENSG00000141837_310 (sequence is synthesized)
agagtgtctgtctcaaaaaataaagtaaaataaaataaaataaaataaagagtagtgattgggcagtgaggg

SEQ ID NO: 370772 - DNA, 120 bp, Artificial Sequence
  ENSG00000141837_311 (sequence is synthesized)
aaataaaataaaataaagagtagtgattgggcagtgaggggggcaggtggatgccctggctttggctcacaggccccaagtaaggacttctcaaaacgtcttttgcctactggctgtcta

SEQ ID NO: 370773 - DNA, 120 bp, Artificial Sequence
  ENSG00000141837_312 (sequence is synthesized)
atttattcactgaccttctgacctggttcagaattgacttaggacagcaagaagagacagtctagtctttgacctagaaaggcccgtgagcctagtccaggccattgtcttcttataacc

SEQ ID NO: 370774 - DNA, 120 bp, Artificial Sequence
  ENSG00000141837_313 (sequence is synthesized)
ctccttgttcccagtcacgttggctgaccccccaggacacccctcaggaaccagttctccttcccagggccctgacctagtttcaaacttagtaattgtttttagtccctctggagtctc

SEQ ID NO: 370775 - DNA, 120 bp, Artificial Sequence
  ENSG00000141837_314 (sequence is synthesized)
ttataaatgaggactctacttcgtgttttaacttcctctaatactctatttttaatctcctatattctctctactaatcatcttgtacagtctgtcctggttcaggaacaagggactgag

SEQ ID NO: 370776 - DNA, 120 bp, Artificial Sequence
  ENSG00000141837_315 (sequence is synthesized)
acttcctgcctgggtcctcagtgtctataaaggtcctttactcattcccactttccctttgagaaaactgagacacagagaggttaagtagattgcccaggatcacacattagcttggca

SEQ ID NO: 370777 - DNA, 120 bp, Artificial Sequence
  ENSG00000141837_316 (sequence is synthesized)
ggggcccagggatggagatcccaggccacggagtacaaagagagtcatgcagtttggagaaggctaagctgggagggttatgatgggaggagaaagagaacctgaattggtagtcccaaa

SEQ ID NO: 370778 - DNA, 120 bp, Artificial Sequence
  ENSG00000141837_317 (sequence is synthesized)
ttttatcaacaagaatccagagtctgatatgaagaagtctaagatgaagccaggatctgacatcacgtaacttgaattctgaaatcagacgctggtttacatcccggccctgccactttt

SEQ ID NO: 370779 - DNA, 120 bp, Artificial Sequence
  ENSG00000141837_318 (sequence is synthesized)
tacccatgcaccacacatccctgtacctccgtttcctcagctgttacatggaggcgatggtagtgcctaagtcatagtactattggagtatttagtaaaataatctcagctgagtcactt

SEQ ID NO: 370780 - DNA, 120 bp, Artificial Sequence
  ENSG00000141837_319 (sequence is synthesized)
ggggagagaagtgcctgatacacggtaggcacatatttatttgttcagccatttaacaaacatttagggagcacctgctgtgtgccaggcactgatctaagcactgaggatatgggagta

SEQ ID NO: 370781 - DNA, 120 bp, Artificial Sequence
  ENSG00000141837_320 (sequence is synthesized)
aacaatacacaccaaatccctgccctcagagctctgatattctaatgagagagataaagcaaacaaatacatgtcatgttgggaactcccaaattcagagaaggaagataaaacagacta

SEQ ID NO: 370782 - DNA, 79 bp, Artificial Sequence
  ENSG00000141837_321 (sequence is synthesized)
tactttaaagttaaaagtgctttttaaaaaataataaggccaggcgtggagactcacgtctgtaatcccagaactttgg

SEQ ID NO: 370783 - DNA, 89 bp, Artificial Sequence
  ENSG00000141837_322 (sequence is synthesized)
agactctgtctcaaaaaaaataaataaaataaataataataataataggggccaggtaaggaggctgaggagtttgagtccttggagac

SEQ ID NO: 370784 - DNA, 79 bp, Artificial Sequence
  ENSG00000141837_323 (sequence is synthesized)
gtggctcacacctataatcctagcactttaggaggctgaggagtttgagtccttggagaccaggggtttccaagtttta

SEQ ID NO: 370785 - DNA, 120 bp, Artificial Sequence
  ENSG00000141837_324 (sequence is synthesized)
aaaaccctgtctcaaaggaaaaaaaaaacctaggaagtgttgttcccatgataaggatcagcctccgtgtggtgcttccttcaccattgcccaatccccaggctcctgggtgcttaatgt

SEQ ID NO: 370786 - DNA, 120 bp, Artificial Sequence
  ENSG00000141837_325 (sequence is synthesized)
tccctcaggaacacacctgctttgtctgggagagacctgggcgtcttggtggcggggtttgggggtacttgctcatgggcttatggggcctctctctgtgtccccccaggtttacaagtc

SEQ ID NO: 370787 - DNA, 120 bp, Artificial Sequence
  ENSG00000141854_0 (sequence is synthesized)
gggcgacgccttggaacccacggccgccactgccgccacaggtgcctcacagtgccctctgtcctcgctctgggaatcaaaaccccggttgggaactgaggcttccgaactgcttccaac

SEQ ID NO: 370788 - DNA, 120 bp, Artificial Sequence
  ENSG00000141854_1 (sequence is synthesized)
cctggacacgaaggcccccaccggccggagaacgaaaccctggggtcgtctgaagaggagggccaggagtccccagggccagacagcgaagccccagagctgctgcggagctgaacaccg

SEQ ID NO: 370789 - DNA, 120 bp, Artificial Sequence
  ENSG00000141854_2 (sequence is synthesized)
aggtccccaagccctccgcaaaggacgtggagatcctggagcaagagagcgaagtcctcgagccatcagtcgagcaggacgcagagagccccgggctgtccacagctgcgggctttgaga

SEQ ID NO: 370790 - DNA, 120 bp, Artificial Sequence
  ENSG00000141854_3 (sequence is synthesized)
gtcctgagccaggcagagacgaccctgggccgtccgaagcgcaaagggcggaggtccaggggcagcatccccctccaggccctaagacctcctcctccaggtcaggctcggaagcccccc

SEQ ID NO: 370791 - DNA, 120 bp, Artificial Sequence
  ENSG00000141854_4 (sequence is synthesized)
acctgcgttttccgccgtgccccgaggctccccagcgtcccccggaggagcggttcatggagacgcccatcgagcgcgaaatccgccgcagctgcgaacgcgaggagagcctgcgccgga

SEQ ID NO: 370792 - DNA, 120 bp, Artificial Sequence
  ENSG00000141854_5 (sequence is synthesized)
caggccgtgaactcgtcgagctgcgcgtgcggccggtgctcaacctgccgggtcctggccccgcgctcccgcgcgccctggagcgggcgcgggcgggcgcgcagatgcagcgggacatcg

SEQ ID NO: 370793 - DNA, 80 bp, Artificial Sequence
  ENSG00000141854_6 (sequence is synthesized)
cagccgctgggcgaactcaagcgcttcttcgaggccgcggcggggagcggctcctcggcgggggcgggggacggcgcggg

SEQ ID NO: 370794 - DNA, 120 bp, Artificial Sequence
  ENSG00000141854_7 (sequence is synthesized)
gccgtgcagggcgggtgccgggtgctgggcagcgccccgccgcctttcactccgtcactgctggagcaggaggtgcgcgccgtgcgcgagcgcgagcaggaactgcagcgccagcggcgc

SEQ ID NO: 370795 - DNA, 120 bp, Artificial Sequence
  ENSG00000141854_8 (sequence is synthesized)
agcgtctatggcaccgcggagttcaaggagcctacgccgagcctcaccgcgagcaggggcgacggaaagttggtggtgatctggcccccccgcagaaaggtctcggagaacggcctggag

SEQ ID NO: 370796 - DNA, 120 bp, Artificial Sequence
  ENSG00000141854_9 (sequence is synthesized)
caggaggagcgcaaaccttgaggtttgaaaaggctgggacccccggccggaagtaacgtacgcgtcagaggaacagggcggggggcgtctagcattaggcctggagaagggtcggctctc

SEQ ID NO: 370797 - DNA, 120 bp, Artificial Sequence
  ENSG00000141854_10 (sequence is synthesized)
tgcattggggaagatgaaatcgacttgcctttgtgaaattgaccagccccctctataaaacttacagtcccccattgggaaactgaccaccacccacaactccgccagtgaaactgccca

SEQ ID NO: 370798 - DNA, 120 bp, Artificial Sequence
  ENSG00000141854_11 (sequence is synthesized)
gcccttctctgcctaattgcaaactgaactaccctctcccttgactgttaagagggccggagttaccgcctcgattgccccactccccccacccccaataaagcctcttctttcagggca

SEQ ID NO: 370799 - DNA, 120 bp, Artificial Sequence
  ENSG00000141854_12 (sequence is synthesized)
atggcaccgcggagttcaaggagcctacgccgagcctcaccggtaagccgcgggcgtagcaacgccgggacccccagggttccagccgcccccaccgattgcccaacttcagtggcccct

SEQ ID NO: 370800 - DNA, 120 bp, Artificial Sequence
  ENSG00000141854_13 (sequence is synthesized)
ctccctccaagctcccagaccccctctcaattttgtctcttgcctaccccttctggagctccattactcgctgtgatccacccctccaccgggagtgatggactctctgatccacaccac

SEQ ID NO: 370801 - DNA, 120 bp, Artificial Sequence
  ENSG00000141854_14 (sequence is synthesized)
ccaggctgcgcgggggtgggggcattccagatgtcttcctttttgtcgggttccagggaaccctgactgggttctggcactcctgggtcctccctctgaattttcgggctcctgcttctc

SEQ ID NO: 370802 - DNA, 120 bp, Artificial Sequence
  ENSG00000141854_15 (sequence is synthesized)
cattctgggttcacctccctcctccctcgggttcctgggtgcctggagttgaatggaggctttcatggggaggcggagggtgaacgcctgtgtgtgtttaaggggtgcggccggcctttc

SEQ ID NO: 370803 - DNA, 120 bp, Artificial Sequence
  ENSG00000141854_16 (sequence is synthesized)
ggtgggagcccccttacccgtgtgcctctagcgcttgtcggtccccccacccctccggtgccaggacgcttggtggggaaaagtgcatcctccctggagggccactctggtcagaactca

SEQ ID NO: 370804 - DNA, 120 bp, Artificial Sequence
  ENSG00000141854_17 (sequence is synthesized)
gtctgggacgcatccccggggtgaagaggagacggtggtcttgaggcccaaaccgccaccccgagcctggatgcagtgcgcaggtccctgaggccggccttccttctggtcctctgtccc

SEQ ID NO: 370805 - DNA, 120 bp, Artificial Sequence
  ENSG00000141858_0 (sequence is synthesized)
ctccccctcgcatccccggccccgcgcgcgcccagcagaagcgggtctgtgtgtgcgtgcgtgcgagtgagtgagtgtgtgcatatttttttctctcttttctttctctctcactgtttt

SEQ ID NO: 370806 - DNA, 120 bp, Artificial Sequence
  ENSG00000141858_1 (sequence is synthesized)
tctctcttttttttttttttttttttgcaaagaaacagcagcgccgccgccgctccgccgaggcgctgcgccccccggggggggaggcggaggaggcgggcagcggcggagggaggggag

SEQ ID NO: 370807 - DNA, 120 bp, Artificial Sequence
  ENSG00000141858_2 (sequence is synthesized)
ggagacggcggcggccgccaccacggcggccgccgcctcgtcgtccgccgcttccccgcactaccaagagtggatcctggacaccatcgactcgctgcgctcgcgcaaggcgcggccgga

SEQ ID NO: 370808 - DNA, 120 bp, Artificial Sequence
  ENSG00000141858_3 (sequence is synthesized)
cctggagcgcatctgccggatggtgcggcggcggcacggcccggagccggagcgcacgcgcgccgagctcgagaaactgatccagcagcgcgccgtgctccgggtcagctacaaggggag

SEQ ID NO: 370809 - DNA, 80 bp, Artificial Sequence
  ENSG00000141858_4 (sequence is synthesized)
ctacaaggggagcatctcgtaccgcaacgcggcgcgcgtccagccgccccggcgcggagccaccccgccggccccgccgg

SEQ ID NO: 370810 - DNA, 120 bp, Artificial Sequence
  ENSG00000141858_5 (sequence is synthesized)
cgtgagcctgcgggaagtcgtgcgctacctcgggggcagcggcggcgccggcggtcgcctaacccgcggccgcgtgcaggggctgctggaggaggaggcggcggctcgaggccgtctgga

SEQ ID NO: 370811 - DNA, 120 bp, Artificial Sequence
  ENSG00000141858_6 (sequence is synthesized)
ctcgaggccgtctggagcgcacccgtctcggagcgcttgcgctgccccgcggggacaggcccggacgggcgccgccggccgccagcgcccgcccgtctcgcagcaagagaggtggagaag

SEQ ID NO: 370812 - DNA, 120 bp, Artificial Sequence
  ENSG00000141858_7 (sequence is synthesized)
cagcaagagaggtggagaagagcgagtacttgagaaagaagaggaagaagatgatgatgaagatgaagatgaagaagatgatgtgtcagagggctctgaagtgcccgagagtgaccgtcc

SEQ ID NO: 370813 - DNA, 120 bp, Artificial Sequence
  ENSG00000141858_8 (sequence is synthesized)
gggacctcagagtgccaaggagagggtcaaggagtggaccccctgcggaccgcaccagggccaggatgaagggcgggggccagccccgggcagcggcacccgccaggtgttctccatggc

SEQ ID NO: 370814 - DNA, 120 bp, Artificial Sequence
  ENSG00000141858_9 (sequence is synthesized)
agccatgaacaaggaagggggaacagcttctgttgccaccgggccagactccccgtcccccgtgcctttgcccccaggcaaaccagccctacctggggccgacgggaccccctttggctg

SEQ ID NO: 370815 - DNA, 120 bp, Artificial Sequence
  ENSG00000141858_10 (sequence is synthesized)
tcctcccgggcgcaaagagaagccatctgatcccgtcgagtggaccgtgatggatgtcgtcgaatattttactgaggctggattcccggagcaggcgacagctttccaagagcaggaaat

SEQ ID NO: 370816 - DNA, 120 bp, Artificial Sequence
  ENSG00000141858_11 (sequence is synthesized)
tgatggcaaatctttgctgctcatgcagcgcacagatgtgctcaccggcctgtccatccgcctcgggccagccctgaaaatctacgagcaccacatcaaggtgcttcagcaaggccactt

SEQ ID NO: 370817 - DNA, 120 bp, Artificial Sequence
  ENSG00000141858_12 (sequence is synthesized)
tgaggatgatgaccccgatggcttcttaggctgagcgcccagcctcacccctgccccagcccattccggcccccatctcacccaagatcccccagagtccaggagctggacggggacacc

SEQ ID NO: 370818 - DNA, 120 bp, Artificial Sequence
  ENSG00000141858_13 (sequence is synthesized)
ctcagccctcataacagattccaaggagagggcaccctcttgtccttatctttgccccttgtgtctgtctcacacacatctgctcctcagcacgtcggtgtggggaggggattgctcctt

SEQ ID NO: 370819 - DNA, 120 bp, Artificial Sequence
  ENSG00000141858_14 (sequence is synthesized)
aaaccccaggtggctgaccctccccacccagtccaggacattttaggaaaaaaaaaatgaaatgtggggggcttctcatctccccaagatcctcttccgttcagccagatgtttcctgta

SEQ ID NO: 370820 - DNA, 120 bp, Artificial Sequence
  ENSG00000141858_15 (sequence is synthesized)
taaatgtttggatctgcctgtttattttggtgggtggtctttcctccctcccctaccacccatgccccccttctcagtctgcccctggcctccagcccctaggggactagctgggttggg

SEQ ID NO: 370821 - DNA, 120 bp, Artificial Sequence
  ENSG00000141858_16 (sequence is synthesized)
gttcctcgggccttttctctcctccctcttttctttctgttgattgtcgctccagctggctgtattgctttttaatattgcaccgaaggttttttaaataaaattttaaaaaaagaaaaa

SEQ ID NO: 370822 - DNA, 120 bp, Artificial Sequence
  ENSG00000141858_17 (sequence is synthesized)
aaaagcgcgcgggagttgtaagggggggccggagcgagccggagtgagcgagagcgcaggaaacagcagcgccgccgccgctccgccgaggcgctgcgccccccggggggggaggcggag

SEQ ID NO: 370823 - DNA, 120 bp, Artificial Sequence
  ENSG00000141867_0 (sequence is synthesized)
attctttggaatactactgctagaagtctgacttaagacccagcttatgggccacatggcacccagctgcttctgcagagaaggcaggccactgatgggtacagcaaagtgtggtgctgc

SEQ ID NO: 370824 - DNA, 120 bp, Artificial Sequence
  ENSG00000141867_1 (sequence is synthesized)
tggccaagccaaagacccgtgtaggatgactgggcctctgccccttgtgggtgttgccactgtgcttgagtgcctggtgaagaatgtgatgggatcactagcatgtctgcggagagcggc

SEQ ID NO: 370825 - DNA, 120 bp, Artificial Sequence
  ENSG00000141867_2 (sequence is synthesized)
cctgggacgagattgagaaatctgccagtaatgggggatggactagaaacttcccaaatgtctacaacacaggcccaggcccaaccccagccagccaacgcagccagcaccaaccccccg

SEQ ID NO: 370826 - DNA, 120 bp, Artificial Sequence
  ENSG00000141867_3 (sequence is synthesized)
cccccagagacctccaaccctaacaagcccaagaggcagaccaaccaactgcaatacctgctcagagtggtgctcaagacactatggaaacaccagtttgcatggcctttccagcagcct

SEQ ID NO: 370827 - DNA, 120 bp, Artificial Sequence
  ENSG00000141867_4 (sequence is synthesized)
gtggatgccgtcaagctgaacctccctgattactataagatcattaaaacgcctatggatatgggaacaataaagaagcgcttggaaaacaactattactggaatgctcaggaatgtatc

SEQ ID NO: 370828 - DNA, 120 bp, Artificial Sequence
  ENSG00000141867_5 (sequence is synthesized)
caggacttcaacactatgtttacaaattgttacatctacaacaagcctggagatgacatagtcttaatggcagaagctctggaaaagctcttcttgcaaaaaataaatgagctacccaca

SEQ ID NO: 370829 - DNA, 120 bp, Artificial Sequence
  ENSG00000141867_6 (sequence is synthesized)
gaagaaaccgagatcatgatagtccaggcaaaaggaagaggacgtgggaggaaagaaacagggacagcaaaacctggcgtttccacggtaccaaacacaactcaagcatcgactcctccg

SEQ ID NO: 370830 - DNA, 120 bp, Artificial Sequence
  ENSG00000141867_7 (sequence is synthesized)
cagacccagacccctcagccgaatcctcctcctgtgcaggccacgcctcaccccttccctgccgtcaccccggacctcatcgtccagacccctgtcatgacagtggtgcctccccagcca

SEQ ID NO: 370831 - DNA, 120 bp, Artificial Sequence
  ENSG00000141867_8 (sequence is synthesized)
ctgcagacgcccccgccagtgcccccccagccacaacccccacccgctccagctccccagcccgtacagagccacccacccatcatcgcggccaccccacagcctgtgaagacaaagaag

SEQ ID NO: 370832 - DNA, 120 bp, Artificial Sequence
  ENSG00000141867_9 (sequence is synthesized)
ggagtgaagaggaaagcagacaccaccacccccaccaccattgaccccattcacgagccaccctcgctgcccccggagcccaagaccaccaagctgggccagcggcgggagagcagccgg

SEQ ID NO: 370833 - DNA, 120 bp, Artificial Sequence
  ENSG00000141867_10 (sequence is synthesized)
cctgtgaaacctccaaagaaggacgtgcccgactctcagcagcacccagcaccagagaagagcagcaaggtctcggagcagctcaagtgctgcagcggcatcctcaaggagatgtttgcc

SEQ ID NO: 370834 - DNA, 120 bp, Artificial Sequence
  ENSG00000141867_11 (sequence is synthesized)
aagaagcacgccgcctacgcctggcccttctacaagcctgtggacgtggaggcactgggcctacacgactactgtgacatcatcaagcaccccatggacatgagcacaatcaagtctaaa

SEQ ID NO: 370835 - DNA, 120 bp, Artificial Sequence
  ENSG00000141867_12 (sequence is synthesized)
ctggaggcccgtgagtaccgtgatgctcaggagtttggtgctgacgtccgattgatgttctccaactgctataagtacaaccctcctgaccatgaggtggtggccatggcccgcaagctc

SEQ ID NO: 370836 - DNA, 120 bp, Artificial Sequence
  ENSG00000141867_13 (sequence is synthesized)
caggatgtgttcgaaatgcgctttgccaagatgccggacgagcctgaggagccagtggtggccgtgtcctccccggcagtgccccctcccaccaaggttgtggccccgccctcatccagc

SEQ ID NO: 370837 - DNA, 120 bp, Artificial Sequence
  ENSG00000141867_14 (sequence is synthesized)
gacagcagcagcgatagctcctcggacagtgacagttcgactgatgactctgaggaggagcgagcccagcggctggctgagctccaggagcagctcaaagccgtgcacgagcagcttgca

SEQ ID NO: 370838 - DNA, 120 bp, Artificial Sequence
  ENSG00000141867_15 (sequence is synthesized)
gccctctctcagccccagcagaacaaaccaaagaaaaaggagaaagacaagaaggaaaagaaaaaagaaaagcacaaaaggaaagaggaagtggaagagaataaaaaaagcaaagccaag

SEQ ID NO: 370839 - DNA, 120 bp, Artificial Sequence
  ENSG00000141867_16 (sequence is synthesized)
gaacctcctcctaaaaagacgaagaaaaataatagcagcaacagcaatgtgagcaagaaggagccagcgcccatgaagagcaagccccctcccacgtatgagtcggaggaagaggacaag

SEQ ID NO: 370840 - DNA, 120 bp, Artificial Sequence
  ENSG00000141867_17 (sequence is synthesized)
tgcaagcctatgtcctatgaggagaagcggcagctcagcttggacatcaacaagctccccggcgagaagctgggccgcgtggtgcacatcatccagtcacgggagccctccctgaagaat

SEQ ID NO: 370841 - DNA, 120 bp, Artificial Sequence
  ENSG00000141867_18 (sequence is synthesized)
tccaaccccgacgagattgaaatcgactttgagaccctgaagccgtccacactgcgtgagctggagcgctatgtcacctcctgtttgcggaagaaaaggaaacctcaagctgagaaagtt

SEQ ID NO: 370842 - DNA, 120 bp, Artificial Sequence
  ENSG00000141867_19 (sequence is synthesized)
gatgtgattgccggctcctccaagatgaagggcttctcgtcctcagagtcggagagctccagtgagtccagctcctctgacagcgaagactccgaaacagagatggctccgaagtcaaaa

SEQ ID NO: 370843 - DNA, 120 bp, Artificial Sequence
  ENSG00000141867_20 (sequence is synthesized)
aagaaggggcaccccgggagggagcagaagaagcaccatcatcaccaccatcagcagatgcagcaggccccggctcctgtgccccagcagccgcccccgcctccccagcagcccccaccg

SEQ ID NO: 370844 - DNA, 120 bp, Artificial Sequence
  ENSG00000141867_21 (sequence is synthesized)
cctccacctccgcagcagcaacagcagccgccacccccgcctcccccaccctccatgccgcagcaggcagccccggcgatgaagtcctcgcccccacccttcattgccacccaggtgccc

SEQ ID NO: 370845 - DNA, 120 bp, Artificial Sequence
  ENSG00000141867_22 (sequence is synthesized)
gtcctggagccccagctcccaggcagcgtctttgaccccatcggccacttcacccagcccatcctgcacctgccgcagcctgagctgccccctcacctgccccagccgcctgagcacagc

SEQ ID NO: 370846 - DNA, 120 bp, Artificial Sequence
  ENSG00000141867_23 (sequence is synthesized)
actccaccccatctcaaccagcacgcagtggtctctcctccagctttgcacaacgcactaccccagcagccatcacggcccagcaaccgagccgctgccctgcctcccaagcccgcccgg

SEQ ID NO: 370847 - DNA, 120 bp, Artificial Sequence
  ENSG00000141867_24 (sequence is synthesized)
cccccagccgtgtcaccagccttgacccaaacacccctgctcccacagccccccatggcccaacccccccaagtgctgctggaggatgaagagccacctgccccacccctcacctccatg

SEQ ID NO: 370848 - DNA, 120 bp, Artificial Sequence
  ENSG00000141867_25 (sequence is synthesized)
cagatgcagctgtacctgcagcagctgcagaaggtgcagccccctacgccgctactcccttccgtgaaggtgcagtcccagcccccaccccccctgccgcccccaccccacccctctgtg

SEQ ID NO: 370849 - DNA, 120 bp, Artificial Sequence
  ENSG00000141867_26 (sequence is synthesized)
cagcagcagctgcagcagcagccgccaccacccccaccaccccagccccagcctccaccccagcagcagcatcagccccctccacggcccgtgcacttgcagcccatgcagttttccacc

SEQ ID NO: 370850 - DNA, 120 bp, Artificial Sequence
  ENSG00000141867_27 (sequence is synthesized)
cacatccaacagcccccgccaccccagggccagcagcccccccatccgcccccaggccagcagccacccccgccgcagcctgccaagcctcagcaagtcatccagcaccaccattcaccc

SEQ ID NO: 370851 - DNA, 120 bp, Artificial Sequence
  ENSG00000141867_28 (sequence is synthesized)
cggcaccacaagtcggacccctactcaaccggtcacctccgcgaagccccctccccgcttatgatacattccccccagatgtcacagttccagagcctgacccaccagtctccaccccag

SEQ ID NO: 370852 - DNA, 120 bp, Artificial Sequence
  ENSG00000141867_29 (sequence is synthesized)
ctcacccatcatccgcagcgagcccttcagcccctcgctgcggccggagccccccaagcacccggagagcatcaaggcccccgtccacctgccccagcggccggaaatgaagcctgtgga

SEQ ID NO: 370853 - DNA, 120 bp, Artificial Sequence
  ENSG00000141867_30 (sequence is synthesized)
tgtcgggaggcctgtgatccggcccccagagcagaacgcaccgccaccaggggcccctgacaaggacaaacagaaacaggagccgaagactccagttgcgcccaaaaaggacctgaaaat

SEQ ID NO: 370854 - DNA, 120 bp, Artificial Sequence
  ENSG00000141867_31 (sequence is synthesized)
caagaacatgggctcctgggccagcctagtgcagaagcatccgaccaccccctcctccacagccaagtcatccagcgacagcttcgagcagttccgccgcgccgctcgggagaaagagga

SEQ ID NO: 370855 - DNA, 120 bp, Artificial Sequence
  ENSG00000141867_32 (sequence is synthesized)
gcgtgagaaggccctgaaggctcaggccgagcacgctgagaaggagaaggagcggctgcggcaggagcgcatgaggagccgagaggacgaggatgcgctggagcaggcccggcgggccca

SEQ ID NO: 370856 - DNA, 120 bp, Artificial Sequence
  ENSG00000141867_33 (sequence is synthesized)
tgaggaggcacgtcggcgccaggagcagcagcagcagcagcgccaggagcaacagcagcagcagcaacagcaagcagctgcggtggctgccgccgccaccccacaggcccagagctccca

SEQ ID NO: 370857 - DNA, 120 bp, Artificial Sequence
  ENSG00000141867_34 (sequence is synthesized)
gccccagtccatgctggaccagcagagggagttggcccggaagcgggagcaggagcgaagacgccgggaagccatggcagctaccattgacatgaatttccagagtgatctattgtcaat

SEQ ID NO: 370858 - DNA, 120 bp, Artificial Sequence
  ENSG00000141867_35 (sequence is synthesized)
atttgaagaaaatcttttctgagcgcacctaggtggcttctgactttgattttctggcaaaacattgactttccatagtgttaggggcggtggtggaggtgggatcagcggccaggggat

SEQ ID NO: 370859 - DNA, 120 bp, Artificial Sequence
  ENSG00000141867_36 (sequence is synthesized)
gcctcagggcctggccctcctgcatgctatgcccggggcaggcctgacgggcagctgaggattgcagagcctgtctgccttacggccagtcggacagacgtcccgccacccaccacccct

SEQ ID NO: 370860 - DNA, 120 bp, Artificial Sequence
  ENSG00000141867_37 (sequence is synthesized)
cacaggacgtccgctcagcacacgccttgttacgagcaagtgccggctggacccaagccctgcatccccacatgcggggcagaggcccttctctccgccaaatgtctacacagtatacac

SEQ ID NO: 370861 - DNA, 120 bp, Artificial Sequence
  ENSG00000141867_38 (sequence is synthesized)
aggacatcgttgctgccgccgtgactggttttctgtccccaagaacgtgacgttcgtgatgtcctgcccgccgggagtctttccccacaccccagccatcgccgcccgctcccaggaggc

SEQ ID NO: 370862 - DNA, 120 bp, Artificial Sequence
  ENSG00000141867_39 (sequence is synthesized)
cagggcaggcctgcgtgggctggaggcgggcgaggccggcccaccccctcgctggcactgactttgccttgaacagaccccccgaccctcccccacaagcctttaattgagagccgctct

SEQ ID NO: 370863 - DNA, 120 bp, Artificial Sequence
  ENSG00000141867_40 (sequence is synthesized)
ctgtaagtgtttgcttgtgcaaaagggaatagtgccgtggaggtgtgtgtgtccatggcatccggagcgaggcgactgtcctgcgtgggtagccctcggccggggagtgaggccaccaac

SEQ ID NO: 370864 - DNA, 120 bp, Artificial Sequence
  ENSG00000141867_41 (sequence is synthesized)
ctgtttcgtttttttttttcttttttttctatatatattttttgttgaattctattttatttttaattctctcttctcctccagacacaatggcactgcttatctccgaaatggtgtgat

SEQ ID NO: 370865 - DNA, 120 bp, Artificial Sequence
  ENSG00000141867_42 (sequence is synthesized)
gcactgcttatctccgaaatggtgtgatcgtctcctcattgagcagcggctgccaccgcgctgtgggtagtgtgtgaccgtggctgtactgtatagtgaacatagttggcatatctttgt

SEQ ID NO: 370866 - DNA, 120 bp, Artificial Sequence
  ENSG00000141867_43 (sequence is synthesized)
ttgaagtttgttggtgactccaccaaactggtgtgaaaaaagaaaaaagctcaaaaaaatccacaaaaagacaaaacacacaaaaaaaatcctgcctatattttactcagtttcaaactt

SEQ ID NO: 370867 - DNA, 120 bp, Artificial Sequence
  ENSG00000141867_44 (sequence is synthesized)
tattagtctatttttaattataaaaccagaaagctacaatttcttttctttcccctccaccccccccccccccacccatttgttggcttttttgttttttaatgtcagatctgttgagtt

SEQ ID NO: 370868 - DNA, 120 bp, Artificial Sequence
  ENSG00000141867_45 (sequence is synthesized)
tttggtttttgtttttgtttttgttttttactgagaaaggaagggccaagggatgaggtgggaaccgggccctgggggcgccacagactaaggcagagactcccctacctggcgcccagc

SEQ ID NO: 370869 - DNA, 86 bp, Artificial Sequence
  ENSG00000141867_46 (sequence is synthesized)
ggagcccctggtgaggttacgcgtgccatgagaacccactctacaccacgacgctggtgcctcagtgttggccaaactctggagtc

SEQ ID NO: 370870 - DNA, 120 bp, Artificial Sequence
  ENSG00000141867_47 (sequence is synthesized)
cacgacgctggtgcctcagtgttggccaaactctggagtcactgactggtttgactttcatacggtgaatatgcatttggtctgtactgatcatggaataaacacatctctcttttttta

SEQ ID NO: 370871 - DNA, 120 bp, Artificial Sequence
  ENSG00000141867_48 (sequence is synthesized)
atgctggcgtctccctgacatttctttgtgaaccaactgttgcctaggctaggcccaggggaccccctggaccccagaccacctctgtacaggaactactgccagggattacctagcccc

SEQ ID NO: 370872 - DNA, 120 bp, Artificial Sequence
  ENSG00000141867_49 (sequence is synthesized)
tctcctgtgacctgtccctgtctgccctgggcgggagccacgcagactcatagcaaccaccccaagctgaagctgtgacgcagagcccggtacccatccttgtggaccctggctgaggtg

SEQ ID NO: 370873 - DNA, 120 bp, Artificial Sequence
  ENSG00000141867_50 (sequence is synthesized)
gagggtgtgctctagcagaaccctggccagactccagacagtattcttcccctccaccctactccatcctgtcccccctactccatcctgtccccccactcaccaaaggacttgggccac

SEQ ID NO: 370874 - DNA, 120 bp, Artificial Sequence
  ENSG00000141867_51 (sequence is synthesized)
ttctcccaccttgcctgcctcaacctaactcctcctttcatttaagctcagggttaaccagatactcttagatataagtctacatcccccaaaataggatcctcaccccccatgcacata

SEQ ID NO: 370875 - DNA, 120 bp, Artificial Sequence
  ENSG00000141867_52 (sequence is synthesized)
cacacacattcctgtccaagaaagcccacaggtggctgctctgcctgtgtgtccacttgtgtatgtacatgccccagccacaaggcacgggtgacgcccaagaagagcccctaagatgta

SEQ ID NO: 370876 - DNA, 120 bp, Artificial Sequence
  ENSG00000141867_53 (sequence is synthesized)
agatacaagtatataatttatatgtatgcagagacaaactgattgaaacatttctagcactgtttattctcctacatcccctctttttgacctgaaaggtcctttattgtctttggatct

SEQ ID NO: 370877 - DNA, 120 bp, Artificial Sequence
  ENSG00000141867_54 (sequence is synthesized)
gccaaacctccctgtgagggtgtggttcaggcatccagccagaggtccccccacttcttcgatgtccatgcccactcaggcactttctcatataccactgtgccacttcaagtgtgacgt

SEQ ID NO: 370878 - DNA, 120 bp, Artificial Sequence
  ENSG00000141867_55 (sequence is synthesized)
atttaggttctttggggtttcttccatctcatcccacccactcatttttgttccttgttttgttcagacacttccccagcctgggtccaactgctgagctggatagttttctctgcagct

SEQ ID NO: 370879 - DNA, 120 bp, Artificial Sequence
  ENSG00000141867_56 (sequence is synthesized)
tcctgctgaagatttaactcagccatggccttctccacacctccctgatgggtgtctctctacctgggttgtaattagaactgggatctatttaatttctccagccatttcccaaccctt

SEQ ID NO: 370880 - DNA, 120 bp, Artificial Sequence
  ENSG00000141867_57 (sequence is synthesized)
cccacagtactagaaatcttagtcctataccagagtaagaggtgtgtacaagcccccactgtactgtatgcacggatcgcttggccaataattatgtcagtgaatctgagacttgtatta

SEQ ID NO: 370881 - DNA, 120 bp, Artificial Sequence
  ENSG00000141867_58 (sequence is synthesized)
aacactttagacatttgtagaagggaattcgtagacttttcacttacatacgaaaggtttttttttttttttgtgcagttctcattgcaaaaataaacatttgtactgagtataaagtta

SEQ ID NO: 370882 - DNA, 120 bp, Artificial Sequence
  ENSG00000141867_59 (sequence is synthesized)
agcgggatgtgcctgagggaagggacaaggtgggcaggctgtccctccacatcagaaccttcctagaccttttagtccaagaggaagcccaggccctggaacggtggctgcgtggatttt

SEQ ID NO: 370883 - DNA, 120 bp, Artificial Sequence
  ENSG00000141867_60 (sequence is synthesized)
tcccgccaactcgaagaaactcagcgccccctgctgtctgctgtgggacgtgctctgagacctggtgcttggccattgtggctacagatgcctgtgctgccccttcccctagtctgagga

SEQ ID NO: 370884 - DNA, 120 bp, Artificial Sequence
  ENSG00000141867_61 (sequence is synthesized)
attttgttaagtgaggaggaggaggaggaggaggaagcggccgccgcggggtccgcggcgcgcccggcccggagatggggttccatcatgttgtccaggctcatctccaattcctgacct

SEQ ID NO: 370885 - DNA, 120 bp, Artificial Sequence
  ENSG00000141867_62 (sequence is synthesized)
tacagacgtgagccaccgtgcccggccagatgtcactttcattggttatcttcagagcctccttaaagaaactttggggtactggtagctaccagagtgcctggtgaagaatgtgatggg

SEQ ID NO: 370886 - DNA, 120 bp, Artificial Sequence
  ENSG00000141867_63 (sequence is synthesized)
cggcggctgggctgtttgttctggtctcccgcagccgaggagccgaagcagtggcggcggcagcggctgcggcggctgccggcggtgcccgcgggcgagcgcggcctgtgagctcggcag

SEQ ID NO: 370887 - DNA, 80 bp, Artificial Sequence
  ENSG00000141867_64 (sequence is synthesized)
gctcggggagggggcggcggcagcgggcggacggccggcgggggcggcgtgcggcctagcgtctcagagtgcctggtgaa

SEQ ID NO: 370888 - DNA, 120 bp, Artificial Sequence
  ENSG00000141867_65 (sequence is synthesized)
catgaatagccctgcactctgtgcagtagtgtccattctctcggcctggccgttatgctctccctgccagggtctggtcatggaggatgaatggccaagggcgttgacactgcggagccc

SEQ ID NO: 370889 - DNA, 120 bp, Artificial Sequence
  ENSG00000141867_66 (sequence is synthesized)
tggatggtgggcggggaagctgggccatgaggactgtgggcgtgggggtccaggctgtgctgttgaccttgatgtgaccacacccagctttctgcaccagtggagacttcgtgtccccag

SEQ ID NO: 370890 - DNA, 120 bp, Artificial Sequence
  ENSG00000141867_67 (sequence is synthesized)
aacgactctggagggagacactatacagaactcagcttttgacctctgctggtgtagtgggtaaaaatgcccagaagagatgggtagcctggagatgacatagtcttaatggcagaagct

SEQ ID NO: 370891 - DNA, 120 bp, Artificial Sequence
  ENSG00000141867_68 (sequence is synthesized)
attttcttccgtgaaagggacaggactccatcaagttatggaattcctcagagccctgggcctgtcccccggggtggattagtcatgtccagcagcacacgcctagtcccgccttcggga

SEQ ID NO: 370892 - DNA, 120 bp, Artificial Sequence
  ENSG00000141867_69 (sequence is synthesized)
aggctgcctgcctggccagccgcccaggcctctctgtgtaaagactgcctggctgtcctgcccagccttcctggttctctggggtcctctgggtgggtggcatctcctggagggtgatga

SEQ ID NO: 370893 - DNA, 120 bp, Artificial Sequence
  ENSG00000141867_70 (sequence is synthesized)
caatccccaacacatgcattcatgtggtgctactctgtgtgcaaagccagaccccaagtatgttttctctctttgtcccatccctctttttctgggactttggaccctaactacttccct

SEQ ID NO: 370894 - DNA, 120 bp, Artificial Sequence
  ENSG00000141867_71 (sequence is synthesized)
cctgaaccttgcagtgacatcagtccaggagagctctcgttcagtgtgcggaagaacactctgacctctagagctgtcctagataaggagtgggagctttagaggcaaggcctctagacc

SEQ ID NO: 370895 - DNA, 120 bp, Artificial Sequence
  ENSG00000141867_72 (sequence is synthesized)
ctggaaggctcagtgaggctcttcccacagcatgcttctcactggtgccctgtaaggctcgagccaccgctgactctgagccttttggagtctttcctccttcgtctccattgttcccgt

SEQ ID NO: 370896 - DNA, 120 bp, Artificial Sequence
  ENSG00000141867_73 (sequence is synthesized)
gcatttccaaaagcttaagttgcctggtgggcatttccccagtttctttggcctccgtcttctcaagtcacatagggaaagtacctcctggaaccaggctgcagtatgcaggacctgcca

SEQ ID NO: 370897 - DNA, 120 bp, Artificial Sequence
  ENSG00000141867_74 (sequence is synthesized)
ggcaggcactggtgaagggccttgggcctatcatccccccaaccccacctcaccccacccgcctcctctagtggggtgagtctgggctggtggaccagagagggtgtcacagaccctcag

SEQ ID NO: 370898 - DNA, 120 bp, Artificial Sequence
  ENSG00000141867_75 (sequence is synthesized)
ggactgccccatggacacctctgactggtgttaacagtgtgaacattttccccgtcttcagtcccttagaatgacgacagcccctggggttggggcaggcgagtgtggccacatcatcca

SEQ ID NO: 370899 - DNA, 120 bp, Artificial Sequence
  ENSG00000141867_76 (sequence is synthesized)
agccctcccagagacacaaataggcttttttgctctaaaaataaataccagcccttttttggtcacaaatccagcatctcagcagaaaactgcctgacatgaaaagtcccctgaggaact

SEQ ID NO: 370900 - DNA, 120 bp, Artificial Sequence
  ENSG00000141867_77 (sequence is synthesized)
gcatctgcgtttcaggggcttttcattttttctccttttttaaagtgtagattgtgggtgcttcctagaggcctgccttcttctggaactggaagtgggctatcaccatgggcaagccct

SEQ ID NO: 370901 - DNA, 120 bp, Artificial Sequence
  ENSG00000141867_78 (sequence is synthesized)
tgggtgcaggctccccacctgcctgggaactctggcagctctcctcagctccttgggcttgagcagctgcaactgccccagatttgctgtggaagcaggggctagccctggcctcaccag

SEQ ID NO: 370902 - DNA, 120 bp, Artificial Sequence
  ENSG00000141867_79 (sequence is synthesized)
ggcctcccggggccctgcattgatgctcaggagttcctgggctgctcttgatcctttctgggcatccagcttccagttaagctctgtttgccaaacaaactattctcagctgccctttgg

SEQ ID NO: 370903 - DNA, 120 bp, Artificial Sequence
  ENSG00000141867_80 (sequence is synthesized)
cctgcgcctgatgtgttcctgttgcagtcccgcctgcctgagacaggagcaggcaggagagccttcatgcccagattcccacaggacaattggggagctgctggcattgtctttctggga

SEQ ID NO: 370904 - DNA, 120 bp, Artificial Sequence
  ENSG00000141867_81 (sequence is synthesized)
agattctgctttcttggaccaaatggcagcctgattaccagtgtcgggcctgcatgctgcccccgacacacgcacgcacgcgcacacacgtgtgcacatgggccatagccacaagccagc

SEQ ID NO: 370905 - DNA, 120 bp, Artificial Sequence
  ENSG00000141867_82 (sequence is synthesized)
tctcctccagggtcctttcaacctcgctgtccagggaccctgtccttcttgcccgtggggcttccatctggcagagaacgttcagggcttgttgaacttgaaagctcattagacttaagc

SEQ ID NO: 370906 - DNA, 120 bp, Artificial Sequence
  ENSG00000141867_83 (sequence is synthesized)
tgtcacctgtgcttggtgccccaggaacagccagagaggacagtgcccactcacttcttgttggcagcctcctgtgcaggaagtgccagccgggcctcgacgcaccagctggctgtgggt

SEQ ID NO: 370907 - DNA, 120 bp, Artificial Sequence
  ENSG00000141867_84 (sequence is synthesized)
cctgaggaggggcgggaggcggccgctcagtgcagatggggactcctctcctctgccctgaccttaccctccattacctccttcactggagtggggctggggggtgggtggaatcagtgt

SEQ ID NO: 370908 - DNA, 120 bp, Artificial Sequence
  ENSG00000141867_85 (sequence is synthesized)
tttaatcggatttttaaaaaacattttatttctttgtacaattaccatcctatgtaaagatgaaatttgtgttgagttgaagattgtcatggaataaagatcacaccgtacttgaggcca

SEQ ID NO: 370909 - DNA, 120 bp, Artificial Sequence
  ENSG00000141867_86 (sequence is synthesized)
tcagggagatgcttcgctggtttctggtggatgtggagcagactgcagctggccagccgcatcgccagtctgctgctggccctgccatcacctgggccccagccattgcctacccctccc

SEQ ID NO: 370910 - DNA, 120 bp, Artificial Sequence
  ENSG00000141867_87 (sequence is synthesized)
cagagtgtgctcgttgctgtgttggctgctcctgaatctgccctaactccacacgcacctggacttgcgtgtccctcctgcagttctaactaacagtcccttcttttcaagccccgtggg

SEQ ID NO: 370911 - DNA, 120 bp, Artificial Sequence
  ENSG00000141867_88 (sequence is synthesized)
tctgcacgttggaccctgggttccccattagagcccaccttctgagcagcagcctcagtgggaggtggaggcaggtagtgatgctgggtgccaggtgggagtggagaggggactgctctc

SEQ ID NO: 370912 - DNA, 120 bp, Artificial Sequence
  ENSG00000141867_89 (sequence is synthesized)
ctccaagtgtgcactttcctcattattctcaggggcgcagatgctcaggctggcgcaggggagaggctagggagggagccatggtgcccagaaggcctggcgaccagcccctgctgagag

SEQ ID NO: 370913 - DNA, 120 bp, Artificial Sequence
  ENSG00000141867_90 (sequence is synthesized)
atggagctaacatcctgtgtttacggccaacggggttgccgctaggctggtgcagctgtcagtgagctggcgtgctgcagaccacctgagagctggccctagggtctcaggcagactggg

SEQ ID NO: 370914 - DNA, 120 bp, Artificial Sequence
  ENSG00000141867_91 (sequence is synthesized)
gagtggggatccacagtgggaaacctgtgttttggcagtagactcctgcatgttctcccacgggcctgtcccatccctgggattttattctaactagaaataaatgctaaccctcaataa

SEQ ID NO: 370915 - DNA, 120 bp, Artificial Sequence
  ENSG00000141867_92 (sequence is synthesized)
ttttgttaagtgaggaggaggaggaggaggaggaagcggccgccgcggggtccgcggcgcgcccggcccggagtgcctggtgaagaatgtgatgggatcactagcatgtctgcggagagc

SEQ ID NO: 370916 - DNA, 120 bp, Artificial Sequence
  ENSG00000141867_93 (sequence is synthesized)
caaaaaaacaaggtttcttccaaggccacgagacaacaggcgagccccagcatatccttcccttgcacacacactttttccctcaactctatatctggacacatccctgaggctttttca

SEQ ID NO: 370917 - DNA, 120 bp, Artificial Sequence
  ENSG00000141867_94 (sequence is synthesized)
ggcacagtccctgctaggaaaagcagcaggcaagtgggtaggtgatgcctcgcatgtctctccctctcccgtgatgaccaactcatccctcattgaactcggctgccctttctcagggtc

SEQ ID NO: 370918 - DNA, 120 bp, Artificial Sequence
  ENSG00000141867_95 (sequence is synthesized)
agatggctccgaagtcaaaaaagaaggggcaccccgggagggagcagaagaaggtacatgggctcaggggcatccttcattaggtgggacgttgggtctggcccgggccagttctgcctg

SEQ ID NO: 370919 - DNA, 120 bp, Artificial Sequence
  ENSG00000141867_96 (sequence is synthesized)
cctgacatcagcctgtctgtctgtctgtctctctgtctgcagcaccatcatcaccaccatcagcagatgcagcaggccccggctcctgtgccccagcagccgcccccgcctccccagcag

SEQ ID NO: 370920 - DNA, 120 bp, Artificial Sequence
  ENSG00000141867_97 (sequence is synthesized)
gcagcaaagagacaggatcaccatcctctttcgccctcggttgctttctgttgagttggccccagcagccaatgagggcaggtgatgctaggccgcggcctgggtacccagcagccgtca

SEQ ID NO: 370921 - DNA, 120 bp, Artificial Sequence
  ENSG00000141873_0 (sequence is synthesized)
gtctgtggggtcgagactgcgcggccgttgggcgtgcagcggcgccagtcggcggacgaggggcccccgggagttgctggactgagacatgagcctccaactgtgtggttgggctcggta

SEQ ID NO: 370922 - DNA, 120 bp, Artificial Sequence
  ENSG00000141873_1 (sequence is synthesized)
gcacatcgtgggacttgggtgtgcgcccacagatggtttggccctgcagtgaccagagcagcccaagccgccaccatggtgaaattgctagtggccaaaatcctgtgcatggtgggcgtg

SEQ ID NO: 370923 - DNA, 120 bp, Artificial Sequence
  ENSG00000141873_2 (sequence is synthesized)
ttcttcttcatgctgctcggctccctgctccccgtgaagatcatcgagacagattttgagaaggcccatcgctcgaaaaagatcctctctctctgcaacacctttggaggaggggtgttt

SEQ ID NO: 370924 - DNA, 120 bp, Artificial Sequence
  ENSG00000141873_3 (sequence is synthesized)
ctggccacgtgcttcaacgctctgctgcccgctgtgagggaaaagctccagaaggtcctgagcctcggccacatcagcaccgactacccgctggccgaaaccatcctcctgctgggcttc

SEQ ID NO: 370925 - DNA, 120 bp, Artificial Sequence
  ENSG00000141873_4 (sequence is synthesized)
ttcatgaccgtcttcctggagcagctgatcctgaccttccgcaaggagaagccgtccttcatcgacctggagaccttcaacgccggatcggacgtgggcagcgactcggagtatgagagc

SEQ ID NO: 370926 - DNA, 120 bp, Artificial Sequence
  ENSG00000141873_5 (sequence is synthesized)
cggccacggccccagcctgagcgtgcagggcctctcgcgcgccagccccgtgcgcctgctcagcctggccttcgcgctgtcggcccactcggtctttgagggcctggccctgggcctgca

SEQ ID NO: 370927 - DNA, 120 bp, Artificial Sequence
  ENSG00000141873_6 (sequence is synthesized)
ggaggagggggagaaagtggtgagcctgttcgtgggggtggccgtccacgagacactggtggccgtggccctgggcatcagcatggcccggagtgccatgcccctgcgggacgcggccaa

SEQ ID NO: 370928 - DNA, 120 bp, Artificial Sequence
  ENSG00000141873_7 (sequence is synthesized)
gctggcggtcaccgtaagcgccatgatccccctgggcatcggcctgggcctgggcattgagagcgcccagggcgtgccgggcagcgtggcgtccgtgctgctgcagggcctggcgggcgg

SEQ ID NO: 370929 - DNA, 120 bp, Artificial Sequence
  ENSG00000141873_8 (sequence is synthesized)
caccttcctcttcatcaccttcctggagatcctggccaaggagctggaggagaagagtgaccgtctgctcaaggtcctcttcctggtgctgggctacaccgtcctggccgggatggtctt

SEQ ID NO: 370930 - DNA, 120 bp, Artificial Sequence
  ENSG00000141873_9 (sequence is synthesized)
cctcaagtggtgagcggcctcgccattgtccctgccgccggagcccgccgggagccccgggccggacacaggccgcgtcccccggccgcgcgtcccccaagagcgagcactgtggccctg

SEQ ID NO: 370931 - DNA, 120 bp, Artificial Sequence
  ENSG00000141873_10 (sequence is synthesized)
ggccaccacctgtgcacaaggggcctcccgggaccaggctgtgcccccgatcctacaccctgagcctcagagcactgctactttttaaaatacttctttctcttaaaagtctttaccaaa

SEQ ID NO: 370932 - DNA, 120 bp, Artificial Sequence
  ENSG00000141873_11 (sequence is synthesized)
gtctgtggggtcgagactgcgcggccgttgggcgtgcagcggcgccagtcggcggacgaggggcccccgggagggtctcacaatacattgtctgcagattgaggagcaaagagagccagt

SEQ ID NO: 370933 - DNA, 62 bp, Artificial Sequence
  ENSG00000141873_12 (sequence is synthesized)
caatacattgtctgcagattgaggagcaaagagagccagtccgagttccaaaactgaagaac

SEQ ID NO: 370934 - DNA, 120 bp, Artificial Sequence
  ENSG00000141873_13 (sequence is synthesized)
tgcccctgatgttcacagttgctggactgagacatgagcctccaactgtgtggttgggctcggtagcacatcgtgggacttgggtgtgcgcccacagatggtttggccctgcagtgacca

SEQ ID NO: 370935 - DNA, 120 bp, Artificial Sequence
  ENSG00000141873_14 (sequence is synthesized)
tttcaacactgatgccaagttcagtgaaggccttgatgctgtaagggtgacggaaagtaggaagtgaatttgctgtgtgattgtgaactggttactttctgtctctgtgctctaccggcc

SEQ ID NO: 370936 - DNA, 120 bp, Artificial Sequence
  ENSG00000141873_15 (sequence is synthesized)
aaacaaggggtttggaccagacctgggattcccaacaggtggacttgtcggttgtcacctgataatcagaccagactacccacctaggtagggcacactctgtcctgaagctggaaagca

SEQ ID NO: 370937 - DNA, 120 bp, Artificial Sequence
  ENSG00000141873_16 (sequence is synthesized)
tggcctctcttcggttcctatatcagtcagctactgttgcgtaacaaattatagcaaactgagcaccttaggactacagacgtttatcatctcacagtttctgtgagtcaggggtctggg

SEQ ID NO: 370938 - DNA, 120 bp, Artificial Sequence
  ENSG00000141873_17 (sequence is synthesized)
cactgcttcaggagctcacaaggcagcagtcacagtgtctcctgggctgtggtctcatctcaacgttcaaccggggatgggtcggcctctaagctcatgtggttgtaagccaggttcagt

SEQ ID NO: 370939 - DNA, 120 bp, Artificial Sequence
  ENSG00000141873_18 (sequence is synthesized)
tcctcattggttgtcagaccgaaggtgtctgtttgtcagtgtctgttggctggggcagccctcagagcctggccacgtggacctccccagcatgatcagttccttcatcagcaaatggag

SEQ ID NO: 370940 - DNA, 120 bp, Artificial Sequence
  ENSG00000141873_19 (sequence is synthesized)
aagatggccatgactctgtgtaagacagagggcacagtcccatgtcatgcagaggtgacagggtatcccttcccctctgccccagtgtcctgctggttagaagcaagttcaagtccttcc

SEQ ID NO: 370941 - DNA, 120 bp, Artificial Sequence
  ENSG00000141873_20 (sequence is synthesized)
catactcaagtggccaggacctcacagggtatggctgtcaagaggcaggggcttctggggccatcttggagtctgtccaccccaactcctgacagcatcatcctctgctgacctgttcct

SEQ ID NO: 370942 - DNA, 120 bp, Artificial Sequence
  ENSG00000141873_21 (sequence is synthesized)
tgagctcccccatatcagcagcccagagtgtgggtcccctgtcaggccacagtgtgaccagccctggccatgcttgctgggtgaccctgggtgagtggcttcctctctctgggccagtgc

SEQ ID NO: 370943 - DNA, 120 bp, Artificial Sequence
  ENSG00000141873_22 (sequence is synthesized)
tcttcctcccaacgaaagcatggaagccctaagcttatcccccaacccctggccctgcttttcctcgtgcctagtgtccagaaaggaggagaagggctgttgtctgggattaaatcatct

SEQ ID NO: 370944 - DNA, 120 bp, Artificial Sequence
  ENSG00000141873_23 (sequence is synthesized)
gagcctgttagtgtggcagagtagagttccagggtggctccctgagcttccagcccctgctccgcacgccccatgctcttccctcccctcgagtgtgggtagggctgggactgccgtgcg

SEQ ID NO: 370945 - DNA, 120 bp, Artificial Sequence
  ENSG00000141873_24 (sequence is synthesized)
tgtcactcctgccattatgtcagaatcccagcagaggggatgttgcagctgtgatgaccgccccagatcggttagcgctgagttcatcaaaagggagggggtgggcctggcctaatcagg

SEQ ID NO: 370946 - DNA, 120 bp, Artificial Sequence
  ENSG00000141873_25 (sequence is synthesized)
tgagccactcaccctcctgctggccttggagaagcaaaaagccagggtgtgccaggagaagggcatgaagcgaggacccgagggcagcctctcggtgccaagagccatccccgccaacag

SEQ ID NO: 370947 - DNA, 120 bp, Artificial Sequence
  ENSG00000141873_26 (sequence is synthesized)
ccagccaggacacggggcctcagtccacagccaccaggaggtggactcttccgacctccagtgagcttggaagaggaccctgggtgtcagtgagatctcagccctgatgacaccctgcga

SEQ ID NO: 370948 - DNA, 120 bp, Artificial Sequence
  ENSG00000141873_27 (sequence is synthesized)
gacctggagcgtagggcccagctagcccgcacctggatttccaccgttcagagccgagacaccgcattcctgctgttccgcgtggctgagtctgcattcgttcgttacgcggtgtgtgaa

SEQ ID NO: 370949 - DNA, 120 bp, Artificial Sequence
  ENSG00000141873_28 (sequence is synthesized)
gactgacatctgcactgcgaggatggagatcttggtcatctctgacatctcctgcatcgcagaggccactgccagccccccttttcccccatggtcatggtgtcacccccgtcaccctct

SEQ ID NO: 370950 - DNA, 120 bp, Artificial Sequence
  ENSG00000141873_29 (sequence is synthesized)
gactgcaggcctgggcgactgcggggagcttgctcttccctccccctcatcacagtggccttctcatggcacccaaacctttcccgccgttctcctgtcctcgggctggtcaggcggatg

SEQ ID NO: 370951 - DNA, 120 bp, Artificial Sequence
  ENSG00000141873_30 (sequence is synthesized)
aggtccctactcccgagcccccagcctcacccactgcagggccaggctctcagtcacccctggaaaatggtgcctggttcacagctcccgtgcatctgcctcatctctcctgatcaacgt

SEQ ID NO: 370952 - DNA, 120 bp, Artificial Sequence
  ENSG00000141873_31 (sequence is synthesized)
ctgtctcttgggagtagctagagttcctcatgagcttgtcctcaagcgaggcatgcatgaggcctccagccggtggtcagtgagggagttaagtggcttctccgtggaaacacagccttc

SEQ ID NO: 370953 - DNA, 120 bp, Artificial Sequence
  ENSG00000141873_32 (sequence is synthesized)
tgctgcagcagaggctcacccagcgtgaactgcccccagggaacactgggcgatgcctggggacattgtggttgtcacgatggggggtgctcctggcctggagtgggtggaggccagaga

SEQ ID NO: 370954 - DNA, 120 bp, Artificial Sequence
  ENSG00000141873_33 (sequence is synthesized)
cactgctcagcagcaccctgcagtgcccaggacggccccgtcccagagaacaatccagccccgaatgtcagcaccttccccctacccgagttgtgaaaataaaaaatgtttccagacatt

SEQ ID NO: 370955 - DNA, 120 bp, Artificial Sequence
  ENSG00000141905_0 (sequence is synthesized)
gggggggcgggggggtggtttggaaaaatgactcagtaagttcagcgcgcccgctccggccggccctgcgcctcccgccgcgcccgggatgtattcgtccccgctctgcctcacccagga

SEQ ID NO: 370956 - DNA, 120 bp, Artificial Sequence
  ENSG00000141905_1 (sequence is synthesized)
tgagttccacccgttcatcgaggccctgctgcctcacgtccgcgccttcgcctacacctggttcaacctgcaggcgcggaagcgcaagtacttcaagaagcacgagaagcggatgtcgaa

SEQ ID NO: 370957 - DNA, 120 bp, Artificial Sequence
  ENSG00000141905_2 (sequence is synthesized)
ggacgaggagcgtgcggtcaaggacgagctgctgggcgagaagcccgaggtcaagcagaagtgggcgtcgcggctgctggccaagctgcgcaaggacatccggcccgagtgccgcgagga

SEQ ID NO: 370958 - DNA, 120 bp, Artificial Sequence
  ENSG00000141905_3 (sequence is synthesized)
cttcgtgctgagcatcaccggcaagaaggcgccgggctgcgtgctctccaaccccgaccagaagggcaagatgcggcgcatcgactgtctccggcaggcggacaaggtgtggcggctgga

SEQ ID NO: 370959 - DNA, 120 bp, Artificial Sequence
  ENSG00000141905_4 (sequence is synthesized)
cctggtcatggtcatcctgttcaagggcatcccgctggagagcaccgacggcgagcgcctggtcaaggctgcgcagtgcggtcacccggtcctgtgcgtgcagccgcaccacattggcgt

SEQ ID NO: 370960 - DNA, 120 bp, Artificial Sequence
  ENSG00000141905_5 (sequence is synthesized)
ggccgtcaaggagctggacctctacctggcctacttcgtgcgtgagcgagatgcagagcaaagcggcagtccccggacagggatgggctctgaccaggaggacagcaagcccatcacgct

SEQ ID NO: 370961 - DNA, 120 bp, Artificial Sequence
  ENSG00000141905_6 (sequence is synthesized)
ttccaggagagctttgtcacctccggcgtgttcagcgtcactgagctcatccaagtgtcccggacacccgtggtgactggaacaggacccaacttctccctgggggagctgcaggggcac

SEQ ID NO: 370962 - DNA, 120 bp, Artificial Sequence
  ENSG00000141905_7 (sequence is synthesized)
ctggcatacgacctgaacccagccagcactggcctcagaagaacgctgcccagcacctcctccagtgggagcaagcggcacaaatcgggctcgatggaggaagacgtggacacgagccct

SEQ ID NO: 370963 - DNA, 120 bp, Artificial Sequence
  ENSG00000141905_8 (sequence is synthesized)
ggcggcgattactacacttcgcccagctcgcccacgagtagcagccgcaactggacggaggacatggaaggaggcatctcgtccccggtgaagaagacagagatggacaagtcaccattc

SEQ ID NO: 370964 - DNA, 120 bp, Artificial Sequence
  ENSG00000141905_9 (sequence is synthesized)
aacagcccgtccccccaggactctccccgcctctccagcttcacccagcaccaccggcccgtcatcgccgtgcacagcgggatcgcccggagcccacacccgtcctccgctctgcatttc

SEQ ID NO: 370965 - DNA, 120 bp, Artificial Sequence
  ENSG00000141905_10 (sequence is synthesized)
cctacgacgtccatcctaccccagacggcctccacctacttcccccacacggccatccgctacccacctcatctcaacccccaggacccgctcaaagatcttgtctcgctggcctgcgac

SEQ ID NO: 370966 - DNA, 120 bp, Artificial Sequence
  ENSG00000141905_11 (sequence is synthesized)
ccagccagccagcaacctggaccgtcctggtatctgggatagcaaaggtcttcttccctcgccccttctccatcgtcccaggaatcccagggggcagcacagccggcccccggcccacgt

SEQ ID NO: 370967 - DNA, 120 bp, Artificial Sequence
  ENSG00000141905_12 (sequence is synthesized)
tttcggtggaaaattagagtgaacaagaacacccctgccgactcccagcccggccaaaaagacaaaacacatagacgcacacactcaggaggaaaagaaaaaacaaaggcagaagaagaa

SEQ ID NO: 370968 - DNA, 120 bp, Artificial Sequence
  ENSG00000141905_13 (sequence is synthesized)
ccgttaaatggaagtggtcagctcaaaatgcccagccactgcctttctgctcagatgctggcacctccgcccccggggctgccacggctggcgctcccccctgccaccaaacccgccacc

SEQ ID NO: 370969 - DNA, 120 bp, Artificial Sequence
  ENSG00000141905_14 (sequence is synthesized)
acctccgagggaggagccacgtcgccgacctcgccttcctactctccgcccgacacgtcccctgcaaaccgttcctttgtgggattaggaccaagggatcctgcgggcatttatcaggca

SEQ ID NO: 370970 - DNA, 120 bp, Artificial Sequence
  ENSG00000141905_15 (sequence is synthesized)
ccaagcaagaagacaaaaggtaaagacgcaacgtttccaactctcgggacgccaaggccgcaggactggagggccaggccccgccacccccacgggagacccgggacagggcgtcttcct

SEQ ID NO: 370971 - DNA, 120 bp, Artificial Sequence
  ENSG00000141905_16 (sequence is synthesized)
aagttattcatctcctctccgcctgctgctcgggaaggacagacgccggccgcccgcccgcgccccggaggccctggctctgtccggagaccaggtgagcacagcctggagcctgtgccc

SEQ ID NO: 370972 - DNA, 120 bp, Artificial Sequence
  ENSG00000141905_17 (sequence is synthesized)
agggccgacaggcgcgacacccagcaaggccacctctccccgggcccccgcgcctctgccggacacggaccggcccctcagcccccaccgaggacgcagccactggggggaaagggagac

SEQ ID NO: 370973 - DNA, 120 bp, Artificial Sequence
  ENSG00000141905_18 (sequence is synthesized)
acagcggaccccggccgggcagcggagaccgcagaggcgggcagggtggggcaggcgagtggtgtcgcgggggtgcgtggcgcttgcgagccctggccaggggaggaagtgaggcccagg

SEQ ID NO: 370974 - DNA, 120 bp, Artificial Sequence
  ENSG00000141905_19 (sequence is synthesized)
cacctgctgcccctcgagggggccctgcctgccgcggggcctccccacaagcccctcccaaagcgccggccgactcgctgtctcgctggggactctttcagccctcgcgcccgcccgttt

SEQ ID NO: 370975 - DNA, 120 bp, Artificial Sequence
  ENSG00000141905_20 (sequence is synthesized)
gggaggagaagtctctatgcaattggccccggcccctccaccccccacccccggcataggaggcccccccacctcgcccggctcacacccccaaagggagggacccacattgcacacact

SEQ ID NO: 370976 - DNA, 120 bp, Artificial Sequence
  ENSG00000141905_21 (sequence is synthesized)
gtaagaaatgcactttccgaggaaggggatgggggagcccggacacccagagctccccgagttgggggtgcccgtctggagcgcccccgtcagcccctggcggtgggaggtgagagcgag

SEQ ID NO: 370977 - DNA, 120 bp, Artificial Sequence
  ENSG00000141905_22 (sequence is synthesized)
tggtttaagtgcctgattaccaccacccgcccccccctttgtccagctgggacacggaatggccgcgggcctcctccccctcccctccagcctctccaccagcccctccagtcaaccctc

SEQ ID NO: 370978 - DNA, 120 bp, Artificial Sequence
  ENSG00000141905_23 (sequence is synthesized)
atcgccgtgcccccccagagctagagagatggggcccctgcgtggcccgaggggcagagctgggcgtcacttcgcaagcgtcctgccctgccggggcgcgggggtgggctctggggaagc

SEQ ID NO: 370979 - DNA, 120 bp, Artificial Sequence
  ENSG00000141905_24 (sequence is synthesized)
cggtgcgccccccacgcctccgctgccagtgccttacattctggagcgacccccctccctggtgcctcccagcgaagggggaccgccgtttgcactttcatcgcctaccccgacgcgggg

SEQ ID NO: 370980 - DNA, 120 bp, Artificial Sequence
  ENSG00000141905_25 (sequence is synthesized)
cccagctgcgggacgtgcatcacggctgggcccccagaggagagaggaggccgacgccagcggtccccgctcggaacggggagggttttcggggggttcggcgtcgcaccttggggcccc

SEQ ID NO: 370981 - DNA, 120 bp, Artificial Sequence
  ENSG00000141905_26 (sequence is synthesized)
ccgcagccgtgtagggggcctcccatctgctaagcgtttttccgttgagccgctccaaaaacactaagctggggacgccaggtgcccccccaccccggctccctggccctatccacacct

SEQ ID NO: 370982 - DNA, 120 bp, Artificial Sequence
  ENSG00000141905_27 (sequence is synthesized)
ccacccccaccccaggatcgccatctttaggggaggcctgggagggggtgttaggtgttttagggccaccgagctcaaacacaaggacccctccccggcccacccagcccagccccaact

SEQ ID NO: 370983 - DNA, 120 bp, Artificial Sequence
  ENSG00000141905_28 (sequence is synthesized)
gacctccatgcctagggaaaaactccccccaccactgccccctcccccgacccaggccaaagccagggcaggtctccgggtctcacctgctcctagcctcacccccctgcccccgaaaac

SEQ ID NO: 370984 - DNA, 120 bp, Artificial Sequence
  ENSG00000141905_29 (sequence is synthesized)
cagactctcctcccaaactagcctcaggagcttggcgaacccgctcgctcctaaagagaaagacccaggaccctcccccatcacccccaagagaggttcgccatcctctggcctcgagcc

SEQ ID NO: 370985 - DNA, 120 bp, Artificial Sequence
  ENSG00000141905_30 (sequence is synthesized)
cttggtccctccgtccgtctgtcctcggggcccgctcccccggtggcccttggggatcaaagcgtgggccgctctccgggagggcgggcgggggagggggtggtcgggttgtgccattgg

SEQ ID NO: 370986 - DNA, 120 bp, Artificial Sequence
  ENSG00000141905_31 (sequence is synthesized)
ggtgtccggaagcttctcagccagggtgggggtcgtggagtgggggagggaggccagccgggctccagaggggtcagggcgcgacgagaaccaactctttacctaactttgcatggtgct

SEQ ID NO: 370987 - DNA, 120 bp, Artificial Sequence
  ENSG00000141905_32 (sequence is synthesized)
tagtcaaggactcctgcgacctggctcccgaggtcagctggcggcgctgacacacatgcatggcagactatccctggctctatctccctgttcctcgccccctccaccccccacttcctc

SEQ ID NO: 370988 - DNA, 120 bp, Artificial Sequence
  ENSG00000141905_33 (sequence is synthesized)
gaataagtattacctttaaacaatatcagcgcacacacatagctgcatgttctgctcgtgtagtttaaaaaaaaaaagacaaaacagtgacatgaaataaaaaataaaaattgaaaaggg

SEQ ID NO: 370989 - DNA, 75 bp, Artificial Sequence
  ENSG00000141905_34 (sequence is synthesized)
aaagtcgctaaaaatcaagccactgaaaacaattgcccccaggtctacccagcccctggctgtccttggtcctgt

SEQ ID NO: 370990 - DNA, 120 bp, Artificial Sequence
  ENSG00000141905_35 (sequence is synthesized)
cccccaggtctacccagcccctggctgtccttggtcctgtctcccctcctgctgtattcaggggtgccccctggtgctcagcctctaccacccccaaccctgctcttgggtacccagagg

SEQ ID NO: 370991 - DNA, 120 bp, Artificial Sequence
  ENSG00000141905_36 (sequence is synthesized)
ggtcatttctgaatcccttgcccagaggacagacctccggggcccatcttggccctgggaaagggctctcctctctgattggtccctaggccacgggccggcccccagacaccattcacc

SEQ ID NO: 370992 - DNA, 120 bp, Artificial Sequence
  ENSG00000141905_37 (sequence is synthesized)
gacccactgcaggctgtcctccaaccatggggtggccactccacccgcagccagactccccgctccccacttttcatgcaggctggcatacccctggctcagggtcaaatgctgttccac

SEQ ID NO: 370993 - DNA, 120 bp, Artificial Sequence
  ENSG00000141905_38 (sequence is synthesized)
acccacctcagaggcaccccctctcccctgccccgtgcatccccacccttcttgccaaaggacctcttttcccctatccagagaccaccccaggtggcattctctcccaccttctccttt

SEQ ID NO: 370994 - DNA, 120 bp, Artificial Sequence
  ENSG00000141905_39 (sequence is synthesized)
gtcccccatcccctgtctctgtcttccagctgtgaatatgaagggtatcctgtatgaaacaaaaacaaaacctgatatatgcaatatctgtctgtctgtctgtacccatgggcctggctc

SEQ ID NO: 370995 - DNA, 120 bp, Artificial Sequence
  ENSG00000141905_40 (sequence is synthesized)
agccattggaggcccagccgagggtccggcagggcacagggacagccaggtggcaccgagtcacaggctgtggtccggtggctgagcatgctgttgtcttgtccttgattttattttctt

SEQ ID NO: 370996 - DNA, 120 bp, Artificial Sequence
  ENSG00000141905_41 (sequence is synthesized)
tttttttttcttttctttttgtttttaactccagcttcctttgctttttacttgaccaaagctaagacaatagccagatggttagtggggcagccaggcagggaggacccagggctggga

SEQ ID NO: 370997 - DNA, 120 bp, Artificial Sequence
  ENSG00000141905_42 (sequence is synthesized)
ggctgggattctccaaccttaggccattcctgcagccctcaccacctccagcccctccaagcatctcgtgtagggacccacgcagatggtcccattcattcactattgcccccaaccccg

SEQ ID NO: 370998 - DNA, 120 bp, Artificial Sequence
  ENSG00000141905_43 (sequence is synthesized)
ggattttgggtggtctccacagccaccatcatacactcatcccgtgttttcttccaaaaagtcacctcagcagcctccccaggcgatacagagggagagcccagaccaccacagctggcc

SEQ ID NO: 370999 - DNA, 120 bp, Artificial Sequence
  ENSG00000141905_44 (sequence is synthesized)
acgacattgcccttaagtaatatgcattggccagagagcccgggctggctgtgcacagcattcatgtagctgatttctagctttttttttttttctgccccactcctgagcaaatctgtc

SEQ ID NO: 371000 - DNA, 120 bp, Artificial Sequence
  ENSG00000141905_45 (sequence is synthesized)
ttgccaaggaactaggagcaaccggaggcaaagggagtgggtggccccatcactattgggaccatcgcgtccctgcacagcccacacccgggggcccagagtcctgggctggacgccacc

SEQ ID NO: 371001 - DNA, 120 bp, Artificial Sequence
  ENSG00000141905_46 (sequence is synthesized)
cttctcaccccgagcttgcctccttggctcacttggcaccttggctgagtacagcaggcaaaagcccataccaggcagcatgttgtggatggtttagttctccccgcctccctgtttctt

SEQ ID NO: 371002 - DNA, 120 bp, Artificial Sequence
  ENSG00000141905_47 (sequence is synthesized)
ggaaaagctacagggtccctgtagggcaaaattcccaggcgccttgctgcagacagagtaagacaaaaacaccaggaagcaggattccgtgcccatctctgcagtttgggttcacaaaag

SEQ ID NO: 371003 - DNA, 120 bp, Artificial Sequence
  ENSG00000141905_48 (sequence is synthesized)
ggggtgccgtcatccctgggtggaggagggagtgttggttttttgtttttgtttttttaacatgtatgaaactgacatcttctcaaatcttgttccacccccctctggaagcccccatca

SEQ ID NO: 371004 - DNA, 120 bp, Artificial Sequence
  ENSG00000141905_49 (sequence is synthesized)
cccacccctgctatggacaccacacctatgccaggcccccccccccaccccagtctcattctggggtctgcccatgctgtgggaaagaatagggaggcctcccaaatatatgcaaattgt

SEQ ID NO: 371005 - DNA, 120 bp, Artificial Sequence
  ENSG00000141905_50 (sequence is synthesized)
ccccattccgtgggggcacctgacaatgacccgggtggagatggggcatggaggagtaggaagacccagccctatttgactggggagaggaggatctggagtccttcatgcccaggtctg

SEQ ID NO: 371006 - DNA, 120 bp, Artificial Sequence
  ENSG00000141905_51 (sequence is synthesized)
gaacccaggttctgaccccagggccccaccctgggctggacaatcagatcccaaaggaatgccaaaggggactcggttgggagagccgcttaggggccagacctgggtccccctgcaggt

SEQ ID NO: 371007 - DNA, 120 bp, Artificial Sequence
  ENSG00000141905_52 (sequence is synthesized)
ccccaggcagcagacaattccaccttccctgccccaggaccttgagagacagcagcattccaggcacagacagacttggctgcaccccactgtcccttgcaagacaggttctggagccag

SEQ ID NO: 371008 - DNA, 120 bp, Artificial Sequence
  ENSG00000141905_53 (sequence is synthesized)
gagcaactgtccagccctccagaagagacagcaagcagcccccctacccactctggcctccccaatggtactttgacctccagtgtagggctatactatacatatatatatatatatata

SEQ ID NO: 371009 - DNA, 120 bp, Artificial Sequence
  ENSG00000141905_54 (sequence is synthesized)
tatatatatataattttggaatttgtttctcataatacagaatatatagtggctaccttgtatcttggtctggattctctctctgagaccccggattttactttctctttggagggcgct

SEQ ID NO: 371010 - DNA, 120 bp, Artificial Sequence
  ENSG00000141905_55 (sequence is synthesized)
gggacatacatctctcaatccagcttcctccgcatcctcccatcttgccccatttctgccacgtcagacacttcctgagagtctcaccttcaaaatgacaccgctgcccatccattgctc

SEQ ID NO: 371011 - DNA, 120 bp, Artificial Sequence
  ENSG00000141905_56 (sequence is synthesized)
aatggtacagagtgtggggtcagtccaccacccttgacctcccggcagggcaaggtgaggaggcggacccaaagcagtaccagcaggacttgttgccagtgataccaaaacagacttttc

SEQ ID NO: 371012 - DNA, 120 bp, Artificial Sequence
  ENSG00000141905_57 (sequence is synthesized)
ccaagcagtgcctcacatgtctgctggtgtggctttgggattctcctgccccacccccccgtccatggcagccccctccccaaggctttgctcacacctgagacaggaaggaggaagggg

SEQ ID NO: 371013 - DNA, 120 bp, Artificial Sequence
  ENSG00000141905_58 (sequence is synthesized)
atccaataggaatatgggccccggaggggaagtcatgcacccccaagccaccaccccccagccttccacgcacatctcctggctggaagagagccctccaaaaaggggacacaggctgcc

SEQ ID NO: 371014 - DNA, 120 bp, Artificial Sequence
  ENSG00000141905_59 (sequence is synthesized)
ccggcccctcaactgcatccacaccccatcctctcatcttgggtcccagccaggcccccccaaaaccaaagccccctcaagtcctggggtcccagcctgtgcccccagcttcctgcccac

SEQ ID NO: 371015 - DNA, 120 bp, Artificial Sequence
  ENSG00000141905_60 (sequence is synthesized)
ccagccctgagcattctcacacagagaaagaacaagcaagggctccagggggacaggatggggcagggcatacagtggggggtgggggggcagctgggaggagggagggacaaaacaaaa

SEQ ID NO: 371016 - DNA, 120 bp, Artificial Sequence
  ENSG00000141905_61 (sequence is synthesized)
cattttcctttgggttttttttttctttcttttttctcccctttactctttgggtggtgttgcttttcctttccttttccctttgagatttttttgttgttgtttcctttttgtatttta

SEQ ID NO: 371017 - DNA, 120 bp, Artificial Sequence
  ENSG00000141905_62 (sequence is synthesized)
ctgatatcaccaggatagtttactctccttctagctttctgcttaccgcacactggataacacacacatacacacccacaaaaatgctcatgaacccaatccggagaaggttccagcagg

SEQ ID NO: 371018 - DNA, 120 bp, Artificial Sequence
  ENSG00000141905_63 (sequence is synthesized)
tcccccaccctcccctcctcctcctacttctcctcttgacagcgaggacaggagggggacaaggggacacctgggcagacccgccggctctccccccaccccaccccgcccctcacatca

SEQ ID NO: 371019 - DNA, 120 bp, Artificial Sequence
  ENSG00000141905_64 (sequence is synthesized)
tactccaatcataaccttgtatattacgcagtcattttggttttcgcggacgcgcctacctaagtaccatttacagaaagtgactctggctgtcattattttgtttatttgttccctatg

SEQ ID NO: 371020 - DNA, 86 bp, Artificial Sequence
  ENSG00000141905_65 (sequence is synthesized)
tgactctggctgtcattattttgtttatttgttccctatgcaaaaaaaaaatgaaaatgaaaaaagggggattccataaaagattc

SEQ ID NO: 371021 - DNA, 120 bp, Artificial Sequence
  ENSG00000141905_66 (sequence is synthesized)
tccctcgccgcctcctcccgccgcctgcggcccccccctcgccggggaccgagcgcgctcgctccggcgccggcctcgcctcctcgcagcagcgccatggatgagttccacccgttcatc

SEQ ID NO: 371022 - DNA, 120 bp, Artificial Sequence
  ENSG00000141905_67 (sequence is synthesized)
cacacacacacacacacggcctgtgacagcctcgccgggctgtgggtggtcacttagttgagagtggcctggtgtgtctcacattaacgcatcccaagccctcctgcctctctctcttct

SEQ ID NO: 371023 - DNA, 120 bp, Artificial Sequence
  ENSG00000141905_68 (sequence is synthesized)
ctctttctctctctctctctctctctcactctctcgtctatgctctccagctcccagtgtccccggcaccctcctccgactccccagagaaaagctgcttgtgtgacggcatcatggaag

SEQ ID NO: 371024 - DNA, 120 bp, Artificial Sequence
  ENSG00000141905_69 (sequence is synthesized)
gcttgtgtgacggcatcatggaagccgggtgcccggacctgcctcccaggcggccggcccagcccgcactccggtccccataaggcgattcggggccgccctcgccgtccgccccagcat

SEQ ID NO: 371025 - DNA, 120 bp, Artificial Sequence
  ENSG00000141905_70 (sequence is synthesized)
ccaggtcagaggtcaggcccgaccctgcagggcctggcgagtttggtgggtctccggaaaacagcccagtggccacgtggttgggcccatgtagggctgaggcagccttaggggctggcc

SEQ ID NO: 371026 - DNA, 120 bp, Artificial Sequence
  ENSG00000141905_71 (sequence is synthesized)
ggaccaagcctcgggccagggtgagagtccagggtctgtccccttcgccgagtcacctgggggaccccggtgcccgccgtgggccgtcagaaaccctccctggtatgtcaggcagctgac

SEQ ID NO: 371027 - DNA, 120 bp, Artificial Sequence
  ENSG00000141905_72 (sequence is synthesized)
agtggacacggatctcacagtggcggcccgagggccagactcgacccccagactggtcttttgtttgtggagaaagagaatcggttgttatcattttaaaatcaggacgttttacataaa

SEQ ID NO: 371028 - DNA, 120 bp, Artificial Sequence
  ENSG00000141905_73 (sequence is synthesized)
cgggaagaaggtgggcttttccccgcaaagaaggtgggagctatggagggctgcgggcagaggaggggtaatgttcatttaactcctggagtttgacaaaatgctatcatcaaaacagac

SEQ ID NO: 371029 - DNA, 120 bp, Artificial Sequence
  ENSG00000141905_74 (sequence is synthesized)
tttatcacagaacctctagctatccccgtcccctccgtaagctcctctgagcatagcaacagaacgggaaggtaaggcagcgattggaaacgcccgcgttatagatgagcggagagccgc

SEQ ID NO: 371030 - DNA, 120 bp, Artificial Sequence
  ENSG00000141905_75 (sequence is synthesized)
aggtgactggtccagagccacatggccaggttgtgctggggctggaactccatcgaacgcaggtttcagggtgcagcccttgtttccataagataccccaaaatcagacaagcctgggac

SEQ ID NO: 371031 - DNA, 120 bp, Artificial Sequence
  ENSG00000141905_76 (sequence is synthesized)
tgtttccataagataccccaaaatcagacaagcctgggacttgccacctcttctttaaaaaccccagtgctgtttttgttgttttttttgagatagggtctccctctgttgcccaggctg

SEQ ID NO: 371032 - DNA, 83 bp, Artificial Sequence
  ENSG00000141905_77 (sequence is synthesized)
gatgagtagctgatactacaggtgtgcatcaccacagccagatgcagagcaaagcggcagtccccggacagggatgggctctg

SEQ ID NO: 371033 - DNA, 120 bp, Artificial Sequence
  ENSG00000141933_0 (sequence is synthesized)
ctcagcgaagatggcggcagtggagaagcggcggcaagcggtaccaccgccggccggtttcacggacagcggccgccagtcggtatcccgggcggcgggggcggccgagagcgaggagga

SEQ ID NO: 371034 - DNA, 120 bp, Artificial Sequence
  ENSG00000141933_1 (sequence is synthesized)
cttcctgcggcaggtcggcgtgacggaaatgctacgtgcggccctgctgaaggtgctggaggcgcggcccgaggagccgatcgccttcctggctcactacttcgagaacatgggcctgcg

SEQ ID NO: 371035 - DNA, 120 bp, Artificial Sequence
  ENSG00000141933_2 (sequence is synthesized)
ctcgcctgtaaacggcggcgccggggagcccccgggccagctcctgctgcagcagcagcgcctgggccgcgcgctatggcaccttcgcctggcccaccactcccagagggccgccttcaa

SEQ ID NO: 371036 - DNA, 120 bp, Artificial Sequence
  ENSG00000141933_3 (sequence is synthesized)
caacaacgtgagcgtggcctacgagtgcctgagcgccggcgggcgcaggaagaggccggggctggacgggcgcacctacagcgagctgctcaggcgcatctgccgggacggccaagcccc

SEQ ID NO: 371037 - DNA, 120 bp, Artificial Sequence
  ENSG00000141933_4 (sequence is synthesized)
cagtgccgtgaccacgaggcggtgccgctgagcgtcttccgcgcgggcacactcacctgcttcgtgctgctggagttcgtggcgcgcgccggcgcgctcttccagctgctggaggactcg

SEQ ID NO: 371038 - DNA, 80 bp, Artificial Sequence
  ENSG00000141933_5 (sequence is synthesized)
tggacaccctggagggcgcgctgcaggccagcgacgccgccgcgcccgcgcgcttcctggaggccggctcgcgcttgggg

SEQ ID NO: 371039 - DNA, 120 bp, Artificial Sequence
  ENSG00000141933_6 (sequence is synthesized)
cccgacagcctggcgctggcgctggaccgcgccgtcggggggcggcggcccagcgcgcccatgacccgcgaggagtttctggagagggccgccgcgctcttcatcgcgaaggtcaagccg

SEQ ID NO: 371040 - DNA, 120 bp, Artificial Sequence
  ENSG00000141933_7 (sequence is synthesized)
tcaagccggtgggctgaggcccgtgggccgcgcggatccgggatctgcgctggggggtccccgcgtgcggggcgcgcggagccttcccttcgccctggtgaggccctgccataaccaggc

SEQ ID NO: 371041 - DNA, 120 bp, Artificial Sequence
  ENSG00000141933_8 (sequence is synthesized)
ctgcggaggaggccggggctcccaggaagcggacgcccggtccccacacagcgccgcggccgcccctccacccccgcgggagcccctgccccacgctaataaaatgtgttgcgaggctga

SEQ ID NO: 371042 - DNA, 120 bp, Artificial Sequence
  ENSG00000141933_9 (sequence is synthesized)
gcttgggcgggtggggcagcgatggacttcaactcccagcatgccgcgcgcggctccctacccgcagcgccggcgcaggggcccggggcttgctgggagttgtagtgcgcgatgccttct

SEQ ID NO: 371043 - DNA, 120 bp, Artificial Sequence
  ENSG00000141933_10 (sequence is synthesized)
tgggtgggatggatcggacaaggtgggctggagggtccgggcttcggtccggcgctaggcagcgcgctgcatgcggcgcgagtccttctggccggcttcgccttctgtgatgcctttttg

SEQ ID NO: 371044 - DNA, 120 bp, Artificial Sequence
  ENSG00000141933_11 (sequence is synthesized)
caggtgctgagtttccccttgcagttcatgattttcaaaatcgtgcagctcaagaggacttggcccgaggtcgcagagccagcccccgagccaggtcctcctagtcgcctccttagcagc

SEQ ID NO: 371045 - DNA, 120 bp, Artificial Sequence
  ENSG00000141933_12 (sequence is synthesized)
ctcatgttatccccgtccattcagccagaacgtgaatatttacagagagcagcgcagtcacccagggcccccatcttaggggacaggctcccagcgggcaggtggggattcctggaagag

SEQ ID NO: 371046 - DNA, 120 bp, Artificial Sequence
  ENSG00000141933_13 (sequence is synthesized)
cctggcgatgtgcgggcgggttgcagggaagaggcccagcaggtgcaaatttagaccccgagtgtggggcacacgggaggcgggaaagccacggaatttggctgaagcatgcgaggctgc

SEQ ID NO: 371047 - DNA, 120 bp, Artificial Sequence
  ENSG00000141933_14 (sequence is synthesized)
aggtgcctacgcgcggtgtcccctggctggggccagttctgagcccagggaaggtggttggggactatctgttggcgttggggatggatgggctgatgtcttttgttggggggggggtcc

SEQ ID NO: 371048 - DNA, 120 bp, Artificial Sequence
  ENSG00000141933_15 (sequence is synthesized)
ccagaagcggagcctgaggtaggcattgtgtgtgcaggtgattttacaagggggtgcgcccaagagaacccaggaagggggtgggaagagcaggcagggaaggatgccaagcaaaggtgc

SEQ ID NO: 371049 - DNA, 120 bp, Artificial Sequence
  ENSG00000141933_16 (sequence is synthesized)
cctttcagcctcataaccagggcataagcgcccaccatggcagccctcgccagagtcccagagaagttcggggggagaagagagatggggagtgtcccccctaccacgttcagggtgcac

SEQ ID NO: 371050 - DNA, 120 bp, Artificial Sequence
  ENSG00000141933_17 (sequence is synthesized)
gagccaggtgggaggggagcgggcaagggcaggcccagagggtcagtggagccgtttactgcgatggaaggcccctggtttgaagaagctgccagagccacttgcggattaagttggagg

SEQ ID NO: 371051 - DNA, 120 bp, Artificial Sequence
  ENSG00000141933_18 (sequence is synthesized)
ctgggaggagcctggagacaggaaggtagaaagaagcgtctgcaactgacgtggggccaggacagaagactgaactggaggggtcctgaagtcttcaggagagatgagaagagctcagga

SEQ ID NO: 371052 - DNA, 120 bp, Artificial Sequence
  ENSG00000141933_19 (sequence is synthesized)
ccccactctgagggcacctagcccagagagcccaccagagagggtgagaacgtgagaccagaggtgaacggggagcaggaggaagatggcctcccaggacatccggaagagaatctccca

SEQ ID NO: 371053 - DNA, 120 bp, Artificial Sequence
  ENSG00000141933_20 (sequence is synthesized)
aggaggaaaaggggtcaacagcaggcccaccacgtatggttgttcaggttgagcactgcacaagccactcaccccgtagacactgcagatgaggatatttatatttatattaatttccga

SEQ ID NO: 371054 - DNA, 87 bp, Artificial Sequence
  ENSG00000141933_21 (sequence is synthesized)
ggcagaagtctgaaatcggagtgtcaggaggaccacactccctctggaggctccagggaaggagccttccttgcctccccagcctcc

SEQ ID NO: 371055 - DNA, 120 bp, Artificial Sequence
  ENSG00000141933_22 (sequence is synthesized)
aggctccagggaaggagccttccttgcctccccagcctccagtggcggccagcagtctttggcttgtggccacattgctgcagtctctgcctccgtcgtcacgtggcctcctgtgtgtct

SEQ ID NO: 371056 - DNA, 120 bp, Artificial Sequence
  ENSG00000141933_23 (sequence is synthesized)
ctgttctgtgttccctcataaggacaccactaggccccaccctactccagtgtgacctcaaccgcctacatctgcaaagctgctgtctcaaataagctctcagtctgaggttctggatgg

SEQ ID NO: 371057 - DNA, 120 bp, Artificial Sequence
  ENSG00000141933_24 (sequence is synthesized)
gcgtgagtttggtgggcaccagtcaccccaggacaggagtggagccattggctggaagagttctcatagcagggactcagggcaagggtggtgctggtggcagatgcatcccggccctgg

SEQ ID NO: 371058 - DNA, 120 bp, Artificial Sequence
  ENSG00000141933_25 (sequence is synthesized)
gctcgcctgggctccccagagacacagccagtggggaatgcagaagacaggtgcacagacctgcgtggcatctgattctgtgctcatggagccaggcctgctcccgtcctcccagcaggc

SEQ ID NO: 371059 - DNA, 120 bp, Artificial Sequence
  ENSG00000141933_26 (sequence is synthesized)
cgtcctcccagcaggcagctccggccgcccctccatccttggaccgtcaggaacccctgaggtcacctgaccagtcaggaagagaagcccagagcagccgggcgcggtggctcacgcctg

SEQ ID NO: 371060 - DNA, 120 bp, Artificial Sequence
  ENSG00000141934_0 (sequence is synthesized)
gtgactccgcggccgggccgggacgcgacgggacgcgctgggaccggcgtcgggggtcgcggggaccatgcagcggaggtgggtcttcgtgctgctcgacgtgctgtgcttactggtcgc

SEQ ID NO: 371061 - DNA, 120 bp, Artificial Sequence
  ENSG00000141934_1 (sequence is synthesized)
ctccctgcccttcgctatcctgacgctggtgaacgccccgtacaagcgaggattttactgcggggatgactccatccggtacccctaccgtccagataccatcacccacgggctcatggc

SEQ ID NO: 371062 - DNA, 120 bp, Artificial Sequence
  ENSG00000141934_2 (sequence is synthesized)
tggggtcaccatcacggccaccgtcatccttgtctcggccggggaagcctacctggtgtacacagaccggctctattctcgctcggacttcaacaactacgtggctgctgtatacaaggt

SEQ ID NO: 371063 - DNA, 120 bp, Artificial Sequence
  ENSG00000141934_3 (sequence is synthesized)
gctggggaccttcctgtttggggctgccgtgagccagtctctgacagacctggccaagtacatgattgggcgtctgaggcccaacttcctagccgtctgcgaccccgactggagccgggt

SEQ ID NO: 371064 - DNA, 120 bp, Artificial Sequence
  ENSG00000141934_4 (sequence is synthesized)
caactgctcggtctatgtgcagctggagaaggtgtgcaggggaaaccctgctgatgtcaccgaggccaggttgtctttctactcgggacactcttcctttgggatgtactgcatggtgtt

SEQ ID NO: 371065 - DNA, 120 bp, Artificial Sequence
  ENSG00000141934_5 (sequence is synthesized)
gcctttgccctctacgtgggctacacccgcgtgtctgattacaaacaccactggagcgatgtccttgttggcctcctgcagggggcactggtggctgccctcactgtctgctacatctca

SEQ ID NO: 371066 - DNA, 120 bp, Artificial Sequence
  ENSG00000141934_6 (sequence is synthesized)
gacttcttcaaagcccgacccccacagcactgtctgaaggaggaggagctggaacggaagcccagcctgtcactgacgttgaccctgggcgaggctgaccacaaccactatggatacccg

SEQ ID NO: 371067 - DNA, 120 bp, Artificial Sequence
  ENSG00000141934_7 (sequence is synthesized)
cactcctcctcctgaggccggaccccgcccaggcagggagctgctgtgagtccagctgaggcccacccaggtggtccctccagccctggttaggcactgagggctctggacgggctccag

SEQ ID NO: 371068 - DNA, 120 bp, Artificial Sequence
  ENSG00000141934_8 (sequence is synthesized)
gaaccctgggctgatgggagcagtgagcgggctccgctgccccctgccctgcactggaccaggagtctggagatgcctgggtagccctcagcatttggaggggaacctgttcccgtcggt

SEQ ID NO: 371069 - DNA, 120 bp, Artificial Sequence
  ENSG00000141934_9 (sequence is synthesized)
ccccaaatatccccttctttttatggggttaaggaagggaccgagagatcagatagttgctgttttgtaaaatgtaatgtatatgtggtttttagtaaaatagggcacctgtttcacaaa

SEQ ID NO: 371070 - DNA, 120 bp, Artificial Sequence
  ENSG00000141934_10 (sequence is synthesized)
gatcgctccagcccaggagtttgtgaccagcctggtcaacatgagacccctgtctctacttttaaaaatttaaaaaaaaaagatattttgggcagagagaagtggctgtgcaaaggtggg

SEQ ID NO: 371071 - DNA, 120 bp, Artificial Sequence
  ENSG00000141934_11 (sequence is synthesized)
tgtttgctgagttagttcaaggagcagaaaggaggctgccaggatgtgaggggcagagcgcctgaggagtttgtgtttgtctgaggggatgcgaaagggagtgttatttgggctgtgaaa

SEQ ID NO: 371072 - DNA, 120 bp, Artificial Sequence
  ENSG00000141934_12 (sequence is synthesized)
aaagctcttccttgctgtctggtgagagtagaggtgggaggcctccaggccaaggcaggtgtgtggggccccaaggcccagctggtgagagaacctcacagctcccaggcttttcttccc

SEQ ID NO: 371073 - DNA, 120 bp, Artificial Sequence
  ENSG00000141934_13 (sequence is synthesized)
cacagccctgccctggaggtctgtgtggggccgggggacacagccttgccctgagtggtacctgtgggtaatagggcccccttcagagtccccagctctccagcagccttggggaggccc

SEQ ID NO: 371074 - DNA, 120 bp, Artificial Sequence
  ENSG00000141934_14 (sequence is synthesized)
gtgggtgtggaccagcagccttcactcttgtggggaatgggagctgaagaaggccctggagccaaatcatgaagagccagcaggcagctgagactacaggcgtgcgccaccacgcccggc

SEQ ID NO: 371075 - DNA, 120 bp, Artificial Sequence
  ENSG00000141934_15 (sequence is synthesized)
tagtgcattcttgtatgtttttgaagttcatccatgttgtaacattctgtcagtttttgctttaagtattttggggttctgttgtttagtacatttacctttgtaattgttatatatttt

SEQ ID NO: 371076 - DNA, 120 bp, Artificial Sequence
  ENSG00000141934_16 (sequence is synthesized)
tgaaagattgaccatttcatcatcatagaatgagatatatgagttttgtctcaacaatttttgtcttgatgtctgttttgtctgatattaacatagctattctggttctctttttgttat

SEQ ID NO: 371077 - DNA, 120 bp, Artificial Sequence
  ENSG00000141934_17 (sequence is synthesized)
tgtttgcatggaatattttttttttccattcttggactttcaacctgtttatgtctctgactgtaaagtaagtgtcttatacctagcatgaaattgggccatgtttcttaatgtattgtc

SEQ ID NO: 371078 - DNA, 120 bp, Artificial Sequence
  ENSG00000141934_18 (sequence is synthesized)
ctctgtcacccaggctggagtgcaatgatctgagctcactgcagcctcggactcccaggctcaagccatcttcccacctgagcctcccgagtagctaggactacaggaacgtgccaccac

SEQ ID NO: 371079 - DNA, 120 bp, Artificial Sequence
  ENSG00000141934_19 (sequence is synthesized)
tcaagccatcttcccacctgagcctcccgagtagctaggactacaggaacgtgccaccacatccagctactgtttattttttttttggtagaaacggggttttgccatattgcccaggct

SEQ ID NO: 371080 - DNA, 120 bp, Artificial Sequence
  ENSG00000141934_20 (sequence is synthesized)
cctcctaaagtgctgggattacaggtgtatgccaccacatccagccagatctctgactttttttttaatgttttttaaattatatattaatctttttattgaattaaggcatttaatgaa

SEQ ID NO: 371081 - DNA, 120 bp, Artificial Sequence
  ENSG00000141934_21 (sequence is synthesized)
gcatttaatgaaactttgacttttaattggagtgtttatttatattcaatgtaattactgataaggaaggacctctgtcatttcgttgaggtttgcttaggttatatcttcttttttcaa

SEQ ID NO: 371082 - DNA, 120 bp, Artificial Sequence
  ENSG00000141934_22 (sequence is synthesized)
ttcctcattactgtctttttttgtttgtttgttttgcttttaattttttttttcttttagagatgggggtcttgctatcttgcccaggacttgaactcctgggctcaaaccatcctccca

SEQ ID NO: 371083 - DNA, 120 bp, Artificial Sequence
  ENSG00000141934_23 (sequence is synthesized)
tcaaaccatcctcccacctctgccttccaagtagctggtactacgggcatacaccaccaaatccagctggtttttaaatttttttgtagaaatagggtctcaccatgttgcccaggctgg

SEQ ID NO: 371084 - DNA, 73 bp, Artificial Sequence
  ENSG00000141934_24 (sequence is synthesized)
caccatgttgcccaggctggtctcgaatgcctgggctcaagcaatcctagcccgttcagggtaaataatcttt

SEQ ID NO: 371085 - DNA, 62 bp, Artificial Sequence
  ENSG00000141934_25 (sequence is synthesized)
tttacttttattaattttattttttgagacagaatgttgttctgtcacccaggctggagtgc

SEQ ID NO: 371086 - DNA, 73 bp, Artificial Sequence
  ENSG00000141934_26 (sequence is synthesized)
attcctgagtagctaggactacaggcgtgcaccaccacgcccgactaactttttgtatttttagtagagatgg

SEQ ID NO: 371087 - DNA, 60 bp, Artificial Sequence
  ENSG00000141934_27 (sequence is synthesized)
ctgaataatcttttttttttttctttttttcggccaggctgaataatgttttttttctcc

SEQ ID NO: 371088 - DNA, 86 bp, Artificial Sequence
  ENSG00000141934_28 (sequence is synthesized)
agccaccatgcctggccaggctgaataatcttttttttttttctttttttcggccaggctgaataaagaaagagtctcactgtgtc

SEQ ID NO: 371089 - DNA, 120 bp, Artificial Sequence
  ENSG00000141934_29 (sequence is synthesized)
ctcctgcctcagcctcctgagtagcaggcgtgagccaccacacctggccccagccgaataatctttttttttttctttgaaacgaagtctctctcttgtcccccaggctggagagcagtg

SEQ ID NO: 371090 - DNA, 89 bp, Artificial Sequence
  ENSG00000141934_30 (sequence is synthesized)
gcctcccgggttcaagagattctctgcctcagcctgccgagtaactgggattacaagtgtgtaccactatgcccagctaattttttgta

SEQ ID NO: 371091 - DNA, 74 bp, Artificial Sequence
  ENSG00000141934_31 (sequence is synthesized)
aggccaaataatcttaattgacctattttctttgtttttttgagttggagtcttgctctgtctcccaggctgga

SEQ ID NO: 371092 - DNA, 86 bp, Artificial Sequence
  ENSG00000141934_32 (sequence is synthesized)
ccaggctggtctcgaactcccgacctttgtgatctgcccgtctctgctgtgcccggccaattgacctattttcaagttcattgtct

SEQ ID NO: 371093 - DNA, 120 bp, Artificial Sequence
  ENSG00000141934_33 (sequence is synthesized)
gcccggccaattgacctattttcaagttcattgtcttttttcttctgcttcctcagacctgctattgagcctccctcaagtgatttttcatttcagataaccaaatctttatttggttcc

SEQ ID NO: 371094 - DNA, 120 bp, Artificial Sequence
  ENSG00000141934_34 (sequence is synthesized)
tttttataacttctttctctttattgatattctctgtttggtgagacattgttctcatattcctttggctctttgaacatagtatttatttatttttacttttttctttgaacatatttt

SEQ ID NO: 371095 - DNA, 120 bp, Artificial Sequence
  ENSG00000141934_35 (sequence is synthesized)
aaatggctaactaaaagtgtttgtctagaacccaggcttggtggcacacaactgttgtcacagctatttgggagggtgaggcaggaggatcgctggagcccagaagttcaagtcaggccc

SEQ ID NO: 371096 - DNA, 120 bp, Artificial Sequence
  ENSG00000141934_36 (sequence is synthesized)
tctcttagaaagtgtctagtaagtccaacatctgggtgtcctgagggacaatttctattattacatttttttccctgtgtattggccacacctgtgtttttctacatgccttgtaatttt

SEQ ID NO: 371097 - DNA, 81 bp, Artificial Sequence
  ENSG00000141934_37 (sequence is synthesized)
attggccacacctgtgtttttctacatgcctattgccaggttggagtgcagtggcgatctcggctcactgcaacctccacc

SEQ ID NO: 371098 - DNA, 65 bp, Artificial Sequence
  ENSG00000141934_38 (sequence is synthesized)
cagacggcgtttcaccgtgtgggccaggatggtctcggtctcttgacctcgtgatccgcctgcct

SEQ ID NO: 371099 - DNA, 120 bp, Artificial Sequence
  ENSG00000141934_39 (sequence is synthesized)
tgggattacaggagtgagccaccgcacccccggcctgttttgctttgttttaaactgggtgtttagaatattataatgtagcaactctggaaatatgatcctacgccctctcccgggttt

SEQ ID NO: 371100 - DNA, 120 bp, Artificial Sequence
  ENSG00000141934_40 (sequence is synthesized)
gccctctcccgggtttgttcttgctgtttgttgcagtagttatttgtttaatgacttttctggttgtaaagtctgtattttttgtcacgtatggccgtttcttcctattcttttagccca

SEQ ID NO: 371101 - DNA, 120 bp, Artificial Sequence
  ENSG00000141934_41 (sequence is synthesized)
gtggtcagtgataggacagagatttccttaaacatctggaatcaaaaaaacccataaaaccctcccagagtttgtagaagggtctgtgtgcatgtggggtcagcccttccgcggttaaac

SEQ ID NO: 371102 - DNA, 120 bp, Artificial Sequence
  ENSG00000141934_42 (sequence is synthesized)
acattttcaactctgccttagcttttgcttcctgtgtgtgcggagcctgaaggcggccagacgtgagagcttagcttcggccctcgcaggcctctcctgagctcctgcacagctctgtct

SEQ ID NO: 371103 - DNA, 120 bp, Artificial Sequence
  ENSG00000141934_43 (sequence is synthesized)
gcgttccaggcccccatcgcccagagcattttattccctggcctgtttggttagtctgttgtttgcctcatctgctgtctgtggccccaggcagcagagaataataaatttgttgtgaat

SEQ ID NO: 371104 - DNA, 120 bp, Artificial Sequence
  ENSG00000141934_44 (sequence is synthesized)
gtttcctacaaatatcccccaggtagcacctcagcactgggagaatgtccagtcaggtgagatcaaggccagcccttgagccatactcccgtccacagttgcaaataaagtctgttcttg

SEQ ID NO: 371105 - DNA, 120 bp, Artificial Sequence
  ENSG00000141934_45 (sequence is synthesized)
gaatcctcaggccaccaccagtctaggcagtgggagagggaccaggatgagttaaaatgcgacaaggccgtttgttctgagattcagctggtttatcttgataagtcttctggtggctgc

SEQ ID NO: 371106 - DNA, 120 bp, Artificial Sequence
  ENSG00000141934_46 (sequence is synthesized)
aagcttttgagtagttccaaaaaagttgattgtgacttttttgccatttttaaaaattgcttttgaagtttcttgctctgctattttcttgatgtccttcaccgaatcttgaatttatat

SEQ ID NO: 371107 - DNA, 120 bp, Artificial Sequence
  ENSG00000141934_47 (sequence is synthesized)
aaaaataagtcttccctcagttccgcagatgggagaaaatcctgaaaagaaacatggtgaaaatgaaactgtggtgttgcctgcttgccagacatgattgtctgccctgggttttgggtt

SEQ ID NO: 371108 - DNA, 120 bp, Artificial Sequence
  ENSG00000141934_48 (sequence is synthesized)
caggcctcagagtcttcacggatgaggcatctcatgccacagccccagtcagagactcttattccattatcagatgactggaacagaaaaggggaacagtttctgctactgggatttgag

SEQ ID NO: 371109 - DNA, 120 bp, Artificial Sequence
  ENSG00000141934_49 (sequence is synthesized)
tgcatctaacagcagcagcctccgtgtcgagccctcccttctgtgggcggggcggggacaagggggaggttggaaggcgctgagtgagccacctgccccttctccttcctcaggttgtct

SEQ ID NO: 371110 - DNA, 120 bp, Artificial Sequence
  ENSG00000141934_50 (sequence is synthesized)
ctcgtccctccgaggaccctggaggcggggacctcgcgtgaggaccagacctccctccgcgccccgcactgcgcgcgccctcccaggctcgggggtccccgcgtcccaggcccaggggga

SEQ ID NO: 371111 - DNA, 120 bp, Artificial Sequence
  ENSG00000141934_51 (sequence is synthesized)
tcccctgtgttgtccagagaccactccccagccaaccctagtgctgccctgggtacccttgccccactgagtccttccttgggcctcctccctgtcagtcctccctgggaccccttcccc

SEQ ID NO: 371112 - DNA, 120 bp, Artificial Sequence
  ENSG00000141946_0 (sequence is synthesized)
ttccattggaaactgattgggcagatttgaaaattaagctttcacaatcacaatttttatgagagttcattcagttttggagaagtcgaggaaagaattgggaattgaaattttgatgtg

SEQ ID NO: 371113 - DNA, 120 bp, Artificial Sequence
  ENSG00000141946_1 (sequence is synthesized)
gcctgataggatcaggtggggcttttgataggaagtgagtgttttgggttgtttcttgactggattatgatgcggaatacagcgggtagagggccgattaagttttagtcattagtgtag

SEQ ID NO: 371114 - DNA, 120 bp, Artificial Sequence
  ENSG00000141946_2 (sequence is synthesized)
cttttcagtatacacgccttttcattttcagtccctttcagaagaaaagaccacaggcatcagaaatcaatcaacttgctaatttatgccagattccactggagatctgccttcccaaga

SEQ ID NO: 371115 - DNA, 120 bp, Artificial Sequence
  ENSG00000141946_3 (sequence is synthesized)
ctttactgactggtgaagaacaggaaatgaacaattcccagggaagagtgaccttcgaggatgtcactgtgaacttcacccagggggagtggcagcggctgaatcccgaacagagaaact

SEQ ID NO: 371116 - DNA, 120 bp, Artificial Sequence
  ENSG00000141946_4 (sequence is synthesized)
tgtacagggatgtgatgctggagaattacagcaaccttgtctctgtgggacaaggggaaaccaccaaacccgatgtgatcttgaggttggaacaaggaaaggagccatggttggaggaag

SEQ ID NO: 371117 - DNA, 120 bp, Artificial Sequence
  ENSG00000141946_5 (sequence is synthesized)
aggaagtgctgggaagtggccgtgcagaaaaaaatggggacattggagggcagatttggaagccaaaggatgtgaaagagagtctcgcaagagaagtcccatcaatcaataaggaaacgc

SEQ ID NO: 371118 - DNA, 120 bp, Artificial Sequence
  ENSG00000141946_6 (sequence is synthesized)
tgactacgcagaaaggtgtagaatgtgacggatctaagaaaatacttccactgggcatagatgatgtatcttccttgcaacactatgtacaaaataattctcacgatgataatggataca

SEQ ID NO: 371119 - DNA, 120 bp, Artificial Sequence
  ENSG00000141946_7 (sequence is synthesized)
gaaaattagttggcaataatccatccaaatttgtaggacaacaactgaaatgtaatgcctgtagaaagttattcagttcaaagtcacgccttcaaagtcacctgaggaggcatgcctgtc

SEQ ID NO: 371120 - DNA, 120 bp, Artificial Sequence
  ENSG00000141946_8 (sequence is synthesized)
aaaaaccctttgaatgtcatagctgtggaagagcattcggggagaagtggaagcttgataaacatcagaaaactcacgcagaggaaaggccctataaatgtgagaactgtggaaatgcct

SEQ ID NO: 371121 - DNA, 120 bp, Artificial Sequence
  ENSG00000141946_9 (sequence is synthesized)
acaagcagaagtcaaatctctttcaacatcagaaaatgcatactaaagagaaaccctatcagtgtaagacatgtggaaaagccttttcctggaaatcatcctgcattaatcatgagaaaa

SEQ ID NO: 371122 - DNA, 120 bp, Artificial Sequence
  ENSG00000141946_10 (sequence is synthesized)
caatgtacggactgtggaaaggctttcatttacaagtcagatcttgtgaaacaccagagaatacacacgggagagaaaccctataaatgtagcatatgtgagaaggccttttcccagaaa

SEQ ID NO: 371123 - DNA, 120 bp, Artificial Sequence
  ENSG00000141946_11 (sequence is synthesized)
tccaatgtcatcgatcatgagaaaattcacactgggaagagagcttatgagtgtgatctatgtggaaatacctttatccagaagaaaaacctcattcaacataaaaaaatccatactggg

SEQ ID NO: 371124 - DNA, 120 bp, Artificial Sequence
  ENSG00000141946_12 (sequence is synthesized)
gaaaagccctatgaatgtaacagatgtggaaaagccttctttcagaagtcaaaccttcatagccatcagaaaactcatagcggagagaggacctatagatgtagtgaatgtggaaaaacc

SEQ ID NO: 371125 - DNA, 120 bp, Artificial Sequence
  ENSG00000141946_13 (sequence is synthesized)
ttcatccggaaattaaaccttagtttgcataaaaaaacccatactggacaaaaaccttatggatgttctgaatgcggtaaagccttcgctgacaggtcataccttgttaggcaccagaaa

SEQ ID NO: 371126 - DNA, 120 bp, Artificial Sequence
  ENSG00000141946_14 (sequence is synthesized)
agaattcactccagataggagccccatgcacttaaaaaaacatgggaagatatggttgcctggaattgtcaccccagaattccatgttgaaatggcctctaatttggaggctatttttga

SEQ ID NO: 371127 - DNA, 120 bp, Artificial Sequence
  ENSG00000141946_15 (sequence is synthesized)
aggtagcgaggacttattatcacagtatcctttgaaaacccattcggcatactcactcagcaaatgtttattaagtataaatatttattagatgccttttgtgtaccaggaactcttaaa

SEQ ID NO: 371128 - DNA, 120 bp, Artificial Sequence
  ENSG00000141946_16 (sequence is synthesized)
cactgaagatgtagcaataaaccaaatgtgctaaaaccctgatggagttttattccagtgaataatgaccagtggtatccatatctttaaaaacgtttaaaagactatacttttggccag

SEQ ID NO: 371129 - DNA, 120 bp, Artificial Sequence
  ENSG00000141946_17 (sequence is synthesized)
tgcactcctgcctgggcaacaagagcaaaatttcatctcaaaaataagataaaataaaataaacaaataagacagcactttatacttttagggatgatttctataattcatgagtggaga

SEQ ID NO: 371130 - DNA, 120 bp, Artificial Sequence
  ENSG00000141946_18 (sequence is synthesized)
ggtttctctagaggtgtaggggactggaaaccacatccaggaagtacagctttctctcctgagcatgaaggtatcttggcatttcttcactgcaattgccatttgccttttttgtttttc

SEQ ID NO: 371131 - DNA, 80 bp, Artificial Sequence
  ENSG00000141956_0 (sequence is synthesized)
cgcagtcccacccgcaggacccccggccgcgccagggtctcgcctgcgccccccgcgcccgcccgcggactacaagtccc

SEQ ID NO: 371132 - DNA, 120 bp, Artificial Sequence
  ENSG00000141956_1 (sequence is synthesized)
cgccgccccccggcttccggtgctgcgcagtttccggagcggatcgcaacccggagtccggatccgatcccgctctgcacattccaaaggcagccgcgcgccgccccggtccagccgcca

SEQ ID NO: 371133 - DNA, 120 bp, Artificial Sequence
  ENSG00000141956_2 (sequence is synthesized)
tgccgactgttctttgttacattcgccggctgcgggcaccgttggcgatcggagtcaaaacccggctggatttcccggagccgctccgggatcgccctgcgcgccgcccgcccgccgggg

SEQ ID NO: 371134 - DNA, 120 bp, Artificial Sequence
  ENSG00000141956_3 (sequence is synthesized)
ggcccccgccgccgggcggcgtcgtcgccgaggccccaggggatgtcgttatcccccgccctcgggtacagcccatgcgggtcgcacgggggggtccctggacccccaaccccgcgttta

SEQ ID NO: 371135 - DNA, 120 bp, Artificial Sequence
  ENSG00000141956_4 (sequence is synthesized)
ggtccctggacccccaaccccgcgtttagagaagctgagtcctggtcccagattgggaaccagagggtcagtgagcagctcttggaaacatctctagggaatgaggtgtccgacactgag

SEQ ID NO: 371136 - DNA, 120 bp, Artificial Sequence
  ENSG00000141956_5 (sequence is synthesized)
ccactgagccctgcgagtgcaggcctgcgacgcaatcctgccctacctcctggaccctttgcacaaaacttttcctgggggaaccaggaaaatctgcccccagccctggggaagattgcg

SEQ ID NO: 371137 - DNA, 120 bp, Artificial Sequence
  ENSG00000141956_6 (sequence is synthesized)
aacggaggaggaactggggcaggcaaggccgaatgcggctatgaaactgagtcacacttgctagagccgcacgagatacctttgaacgtgaatacacacaagttcagtgactgtgagttt

SEQ ID NO: 371138 - DNA, 120 bp, Artificial Sequence
  ENSG00000141956_7 (sequence is synthesized)
ccatatgagttttgcacggtctgcttttcacccttcaagctgctggggatgagcggggtggagggcgtgtggaatcagcattcaagaagtgccagcatgcacactttcctaaaccactca

SEQ ID NO: 371139 - DNA, 120 bp, Artificial Sequence
  ENSG00000141956_8 (sequence is synthesized)
gcaacgggcatcagagaagcaggttgcaggaaggacatgccggtgtcagagatggctgaagatgggagcgaagagatcatgttcatctggtgtgaagactgcagccagtaccacgactcc

SEQ ID NO: 371140 - DNA, 120 bp, Artificial Sequence
  ENSG00000141956_9 (sequence is synthesized)
gaatgtcccgagctgggcccagtggtcatggtcaaagactcctttgtgttaagcagggcaaggtcttggcctgccagcggacacgtgcacacccaggcggggcaggggatgcggggttat

SEQ ID NO: 371141 - DNA, 120 bp, Artificial Sequence
  ENSG00000141956_10 (sequence is synthesized)
gaggacagggacagggctgacccacagcagcttccagaagcagtccctgcaggcctggtgaggcggctcagtgggcagcagctgccctgccgttccaccctcacctgggggaggctgtgc

SEQ ID NO: 371142 - DNA, 120 bp, Artificial Sequence
  ENSG00000141956_11 (sequence is synthesized)
cacctggtggcccagggcaggtcatcccttcctcccaacttggagatcagacgactggaagatggagccgagggggtgttcgccatcactcagctcgtcaagcggacacagttcggtccc

SEQ ID NO: 371143 - DNA, 120 bp, Artificial Sequence
  ENSG00000141956_12 (sequence is synthesized)
tttgagtccaggagggtcgccaaatgggaaaaggagtctgcatttcccctgaaggtgttccagaaggacgggcaccccgtgtgcttcgacacctccaacgaggatgactgcaactggatg

SEQ ID NO: 371144 - DNA, 120 bp, Artificial Sequence
  ENSG00000141956_13 (sequence is synthesized)
atgctggtgcggccagcggcggaggccgagcaccagaacctgacggcctaccagcacggcagcgacgtgtacttcaccacctccagagacatccccccgggtaccgagctgcgcgtgtgg

SEQ ID NO: 371145 - DNA, 120 bp, Artificial Sequence
  ENSG00000141956_14 (sequence is synthesized)
tatgcggccttctatgccaagaagatggacaagcccatgctgaagcaggccggctctggcgtccacgctgcaggcaccccagaaaacagcgcccccgtggagtcggagcccagccagtgg

SEQ ID NO: 371146 - DNA, 120 bp, Artificial Sequence
  ENSG00000141956_15 (sequence is synthesized)
gcgtgtaaagtgtgttctgccaccttcctggagctgcagctcctcaatgaacatctgttgggccacttagaacaagccaaaagccttcctccaggcagccaaagcgaggcagcagctccc

SEQ ID NO: 371147 - DNA, 120 bp, Artificial Sequence
  ENSG00000141956_16 (sequence is synthesized)
gagaaggagcaggacacaccccggggggaaccccctgcagtgcccgagagcgagaatgttgccaccaaagaacagaagaaaaagcctcgaagggggagaaaacccaaagtgtccaaagct

SEQ ID NO: 371148 - DNA, 120 bp, Artificial Sequence
  ENSG00000141956_17 (sequence is synthesized)
gagcagcctctagtcatcgtggaagacaaggaacccacagagcaagtggcagagatcattaccgaggtccctccggatgagcctgtgagtgcaacgccagatgagcggatcatggagctg

SEQ ID NO: 371149 - DNA, 120 bp, Artificial Sequence
  ENSG00000141956_18 (sequence is synthesized)
gttctggggaagctggccaccaccaccactgacaccagctcggttccaaagttcacccatcatcagaataacaccatcacgctcaagaggagcttaattctctcaagcagacacggcatc

SEQ ID NO: 371150 - DNA, 120 bp, Artificial Sequence
  ENSG00000141956_19 (sequence is synthesized)
cggcgcaagctcatcaaacagctcggggagcacaagcgggtttaccagtgcaatatctgcagcaagatcttccagaacagcagcaacctgagcaggcacgtgcgctcgcatggtgacaag

SEQ ID NO: 371151 - DNA, 120 bp, Artificial Sequence
  ENSG00000141956_20 (sequence is synthesized)
aacgaggtggacggcgagtacaggtaccgctgcggcacttgtgagaagaccttccgcatcgagagcgcgctggagttccacaactgcaggacagatgacaagacgttccaatgtgagatg

SEQ ID NO: 371152 - DNA, 120 bp, Artificial Sequence
  ENSG00000141956_21 (sequence is synthesized)
tgtttcagattcttctccaccaacagcaacctctccaagcacaagaagaagcacggcgacaagaagtttgcctgtgaggtctgcagcaagatgttctaccgcaaggacgtcatgctggac

SEQ ID NO: 371153 - DNA, 120 bp, Artificial Sequence
  ENSG00000141956_22 (sequence is synthesized)
caccagcgccggcacctggaaggagtgcggcgagtgaagcgagaggacctggaggccggtggggagaacctggtccgttacaagaaggagccttccgggtgcccggtgtgtggcaaggtg

SEQ ID NO: 371154 - DNA, 120 bp, Artificial Sequence
  ENSG00000141956_23 (sequence is synthesized)
ttctcctgccggagcaatatgaacaagcacctgctcacccacggcgacaagaagtacacctgcgagatctgcgggcgcaagttcttccgcgtggatgtgctcagggaccacatccatgtc

SEQ ID NO: 371155 - DNA, 120 bp, Artificial Sequence
  ENSG00000141956_24 (sequence is synthesized)
cacttcaaggacatcgcgttgatggatgaccaccagagggaagagtttatcggcaagatcgggatctcctcggaagaaaacgatgacaattctgacgagagcgcagactcggagcctcac

SEQ ID NO: 371156 - DNA, 120 bp, Artificial Sequence
  ENSG00000141956_25 (sequence is synthesized)
aagtacagctgcaagcggtgccagctcaccttcggccgggggaaggagtacctgaagcacatcatggaggtgcacaaggagaagggctatggctgcagcatctgcaaccggcgctttgca

SEQ ID NO: 371157 - DNA, 120 bp, Artificial Sequence
  ENSG00000141956_26 (sequence is synthesized)
ctgaaggccacctaccacgcccacatggtcatccaccgtgaaaacctgccggaccccaacgtgcagaagtacatccacccctgcgagatctgcgggcggatcttcaacagcatcgggaac

SEQ ID NO: 371158 - DNA, 120 bp, Artificial Sequence
  ENSG00000141956_27 (sequence is synthesized)
ctggagcgccacaagctcatccacacaggtgtgaagagccacgcctgcgagcagtgtgggaagtcctttgccaggaaggacatgctgaaggagcacatgcgtgtgcacgacaatgtccgc

SEQ ID NO: 371159 - DNA, 120 bp, Artificial Sequence
  ENSG00000141956_28 (sequence is synthesized)
gagtacctgtgtgccgagtgtgggaaaggcatgaagaccaagcacgcgctgcgccaccacatgaagctgcacaagggcatcaaggagtacgagtgcaaggagtgccaccgcaggttcgcg

SEQ ID NO: 371160 - DNA, 120 bp, Artificial Sequence
  ENSG00000141956_29 (sequence is synthesized)
cagaaggtcaacatgctcaagcactgcaagcggcacacggggattaaagatttcatgtgtgaattgtgtgggaagacattcagcgagaggaacaccatggagacccacaagctcatccac

SEQ ID NO: 371161 - DNA, 120 bp, Artificial Sequence
  ENSG00000141956_30 (sequence is synthesized)
acagtgggcaagcagtggacgtgctccgtgtgcgacaagaagtacgtgaccgagtacatgctgcagaagcacgttcagctcacacacgacaaggtggaggcgcagagctgccagctgtgc

SEQ ID NO: 371162 - DNA, 120 bp, Artificial Sequence
  ENSG00000141956_31 (sequence is synthesized)
gggaccaaggtgtccaccagggcctccatgagccgacacatgcggcgcaagcaccccgaggtgctcgcggtgaggatcgatgacctggaccacctcccggagaccaccaccatcgacgcc

SEQ ID NO: 371163 - DNA, 120 bp, Artificial Sequence
  ENSG00000141956_32 (sequence is synthesized)
tcctccattggcatcgtccagcctgagctgactctggagcaggaggatttggccgaagggaagcacgggaaagctgccaagcgaagtcacaagagaaagcagaagccagaagaggaggcg

SEQ ID NO: 371164 - DNA, 120 bp, Artificial Sequence
  ENSG00000141956_33 (sequence is synthesized)
ggtgctccggtgcccgaggacgccaccttcagcgaatactcagagaaagagacggagttcacaggcagtgtaggcgacgagaccaattccgcagtacagagcattcagcaggtagtggtg

SEQ ID NO: 371165 - DNA, 120 bp, Artificial Sequence
  ENSG00000141956_34 (sequence is synthesized)
accctgggtgacccaaatgtgaccacaccatcgagctcagtcggcttaaccaacatcaccgtgacccccatcaccactgcggccgcgactcagtttaccaatctccagccggtggccgtg

SEQ ID NO: 371166 - DNA, 120 bp, Artificial Sequence
  ENSG00000141956_35 (sequence is synthesized)
gggcaccttaccacccctgaacgccagttacagctggacaactcaatcctgaccgtgacctttgataccgtcagcggctctgccatgttgcacaaccgccaaaatgacgtccagatccac

SEQ ID NO: 371167 - DNA, 120 bp, Artificial Sequence
  ENSG00000141956_36 (sequence is synthesized)
ccccagccggaagcctcgaacccacagtctgtggcccatttcatcaacctgacgaccctggtcaactccatcacgcccctggggagccagcttagtgaccagcacccgctcacgtggcgg

SEQ ID NO: 371168 - DNA, 120 bp, Artificial Sequence
  ENSG00000141956_37 (sequence is synthesized)
gcagtgccccagactgacgtcttgccaccctcgcagccgcaggcacccccacagcaggcggcccagccccaggtgcaggcggagcagcagcagcagcagatgtacagctactgagctgcg

SEQ ID NO: 371169 - DNA, 120 bp, Artificial Sequence
  ENSG00000141956_38 (sequence is synthesized)
ttccgggagactcggggcaagaactgcagagggatgtttgggatttgtttagatgtgtttgctggataccaaacaaacaaaaagtcatacattgcaatgtaaggttgacttagctttgca

SEQ ID NO: 371170 - DNA, 120 bp, Artificial Sequence
  ENSG00000141956_39 (sequence is synthesized)
gagtatctccagatcccccgccagcaaccattacggtctgtcagcttaactctagaagggacctctggcaggccagagttttaaactggatggggctccacaccatgccttaccaaggca

SEQ ID NO: 371171 - DNA, 120 bp, Artificial Sequence
  ENSG00000141956_40 (sequence is synthesized)
gggccggggccgcatctgcctccccttacagaaccagtgttcgcccgacacagggttcgggaaagtgaagctgagagagaagcaggattttaagaggcaggagataagttattaggaaca

SEQ ID NO: 371172 - DNA, 120 bp, Artificial Sequence
  ENSG00000141956_41 (sequence is synthesized)
caaatggttcattttcttttttcttttagagctcggttcctatgagaacacagacagtattcacaggtggcagcaggcagcagggaacattttctcctcacttctggatttttttgcaag

SEQ ID NO: 371173 - DNA, 120 bp, Artificial Sequence
  ENSG00000141956_42 (sequence is synthesized)
cgagcacatagaagttaaagtaacgtgtattctctttgaactaggagtggagtcggttcttatacaactatgggctgaaaccatgaggcgtgctgagccgcacctgatcctgcaaccttc

SEQ ID NO: 371174 - DNA, 120 bp, Artificial Sequence
  ENSG00000141956_43 (sequence is synthesized)
gaggtcatcacggtcatcatgtgcaaggggtcacgtgaggtcactgactccagctcaaaacgcatcttagtaatatccatgaatcgatttccaatagagtttttttcctttttttttttt

SEQ ID NO: 371175 - DNA, 120 bp, Artificial Sequence
  ENSG00000141956_44 (sequence is synthesized)
aactttatttcaaacatacattatgtgttcaagactgttatggccaatattgtgttttagttttatgttaacatgataaagtcatgtgcactgtaggaccatctgtccctgtccaccctt

SEQ ID NO: 371176 - DNA, 120 bp, Artificial Sequence
  ENSG00000141956_45 (sequence is synthesized)
cacagctgcccagatgcagagggtcgcgcggctgtgtgtgaggagtgagcctccctgctgcccccaggggctcctccgggttgtctcaggattctctgcaatccaaatgtatccattctg

SEQ ID NO: 371177 - DNA, 120 bp, Artificial Sequence
  ENSG00000141956_46 (sequence is synthesized)
gctgaagcccagccagaatcccgagtggaagaaacgggggaaaagtcatattttccttctgtttaaacttcaattccaaaggttggtgtatttcatgaccagttttctataaaaatattg

SEQ ID NO: 371178 - DNA, 120 bp, Artificial Sequence
  ENSG00000141956_47 (sequence is synthesized)
aatgagtttggctctttacaatggaaaagtgtaggtatttctgaaacacagagaaaatgctatttcctgccaggtggtaatgaaagcagagaggttagttcactaatagaagcattaatt

SEQ ID NO: 371179 - DNA, 120 bp, Artificial Sequence
  ENSG00000141956_48 (sequence is synthesized)
gcccctaaaactgaatgtgcggtgaacagccaggtctgcgtgtgcggggacacgtgctgtcacgtctgtgtaccagtttcgggggcaggggccagggttgggggaggcacccagccctcc

SEQ ID NO: 371180 - DNA, 120 bp, Artificial Sequence
  ENSG00000141956_49 (sequence is synthesized)
tgctgcccacgacaagaaacactgagaggtgtggggagaagtttgctcttaactttcctggtactctgtttgtggccacagtgagaggacaaacctgccttaaggtgtcctgctttgcca

SEQ ID NO: 371181 - DNA, 120 bp, Artificial Sequence
  ENSG00000141956_50 (sequence is synthesized)
gttatcccagatcctgcactcactgggagtccatcttgaggaaacactggcatggctgagtaattgatcaggagcagtcctgatgttgccagcagaacaaaggatgattgtgtttttcaa

SEQ ID NO: 371182 - DNA, 120 bp, Artificial Sequence
  ENSG00000141956_51 (sequence is synthesized)
aacgcaactttctcagcacttcactccaaacagcagacttttgaggacagggctggaatttgttttgtgcaatatatgccttcatgaactaaggaatgttcatccccaggcagcatgcag

SEQ ID NO: 371183 - DNA, 120 bp, Artificial Sequence
  ENSG00000141956_52 (sequence is synthesized)
gagggtctgtggggctcacctcctcaccttacccaccatcactcgcgcctagctctcacctctcagttgaatgaatagtgggagatcatttgacttttaatttatgagaattattttatg

SEQ ID NO: 371184 - DNA, 120 bp, Artificial Sequence
  ENSG00000141956_53 (sequence is synthesized)
ttatttatgtatataattaactgttttatacatagtagtctcatcaaatgaattcgggcttggggtgatattgtctccattctccagatacaagtgctccaggcatccatggaatcagca

SEQ ID NO: 371185 - DNA, 120 bp, Artificial Sequence
  ENSG00000141956_54 (sequence is synthesized)
ggagaccagggctcctaagatatatttttaaaaatcagtatcgatttctttttgcctttgcagaatctaaagggcaaatgacctcgcagagactcccaacgggctttgggctcatgacga

SEQ ID NO: 371186 - DNA, 120 bp, Artificial Sequence
  ENSG00000141956_55 (sequence is synthesized)
aacacccactagcattgatcttttattcctcttccctataaaataaaggccttggaaatcacaattttatttttttaaagaagttgttttagtgcctagagtaagaccgcatcaaatgtt

SEQ ID NO: 371187 - DNA, 120 bp, Artificial Sequence
  ENSG00000141956_56 (sequence is synthesized)
gttaaagaacctaatttagattgtgtggtatataccactgtttatctcaatacacagacacctcttacttcttgttataagtgagaactctaaagaaaaatcaaactcccaagttttctg

SEQ ID NO: 371188 - DNA, 120 bp, Artificial Sequence
  ENSG00000141956_57 (sequence is synthesized)
taaacatacgtggtcttaatagggtcactgtctgaggcaaaatgggttgtcttaaagcaattgctacaaatttgcatcaaagaaactagatagcaaaatacaacaaccatgtaccaccca

SEQ ID NO: 371189 - DNA, 120 bp, Artificial Sequence
  ENSG00000141956_58 (sequence is synthesized)
ggcagaagagtcctcacctatacgcagttctgcatattgatcatcatgacaggaagtatttcgttttttaactgatcccaggtgcacagatgtattcataaaggaagacattagatccag

SEQ ID NO: 371190 - DNA, 120 bp, Artificial Sequence
  ENSG00000141956_59 (sequence is synthesized)
ccattgtggccaccaggctctgtggacccatctcagtggagaattcgttttggacccgtggctccgtgcagctgtggactcgagtgccatccactggtgtgagtcttgcggggaggccac

SEQ ID NO: 371191 - DNA, 120 bp, Artificial Sequence
  ENSG00000141956_60 (sequence is synthesized)
aggtacagctgctccccgtgaatcctggtctgtgggttgagaaggggctcgggcctctggaatgctctagcgtgtgacgtgttctcaggaaaacgttctgtgccaagtgccgcctcgctg

SEQ ID NO: 371192 - DNA, 120 bp, Artificial Sequence
  ENSG00000141956_61 (sequence is synthesized)
tgtccggcatgggactgcgctggagggtccggcgtggaaggcagacctcctgtacctctatcgttcccatttgtggcatccaaaggcggaaggctcatggcttccccactagaggcggcg

SEQ ID NO: 371193 - DNA, 120 bp, Artificial Sequence
  ENSG00000141956_62 (sequence is synthesized)
tcttgggctttcccattggattgtgaaaggcattaagactgtttggagatgttggctgtatttcctgtcacatcaggttgtatgatgacgaataaaaggtgctgtgacccgtgttttcaa

SEQ ID NO: 371194 - DNA, 120 bp, Artificial Sequence
  ENSG00000141956_63 (sequence is synthesized)
agggaagggcaggagtggtggaggtggtcccaaggcgtgtgtggcttctgggttcccacctgcatcagcagcaccctgacccccagctcatgccctgtgctcctcataggtgctcgcggt

SEQ ID NO: 371195 - DNA, 120 bp, Artificial Sequence
  ENSG00000141956_64 (sequence is synthesized)
ccggccctctcaggatgggcggggcgtgacaggcttcttgcctcgtccagcaggccagggtcattgggatggctgcactagtgacctgcgtgtctcttcctttccacgcgcatgtgtgtc

SEQ ID NO: 371196 - DNA, 120 bp, Artificial Sequence
  ENSG00000141956_65 (sequence is synthesized)
aaaacactagagcaccctgcgcaatcactaacacaaggccaagatcttataaaacactagagcaccctgcgcaatcactaacacaaggcattctcataaaacactagagcaccgtgcgca

SEQ ID NO: 371197 - DNA, 120 bp, Artificial Sequence
  ENSG00000141956_66 (sequence is synthesized)
atcactaacacacagccattctcataaaacactagagcacgctgcgcaatcactaacatgaggcattctcataaaacactagagcaccctgcgcaatcactaacacaagtcgttctcata

SEQ ID NO: 371198 - DNA, 120 bp, Artificial Sequence
  ENSG00000141956_67 (sequence is synthesized)
aaacactagagcaccctgcgcaatcactaacacaaggcattctcataaaacactagagcaccctgcgcaatcactaacacaaggcattctcataaaacactagagcaccctgcgcaatca

SEQ ID NO: 371199 - DNA, 120 bp, Artificial Sequence
  ENSG00000141956_68 (sequence is synthesized)
gtaacacgaggcattctcataaaacactagagcacgctgcgcaatcactaacacaagtcgttctcataaaacactagagcaccctgcgcaatcactaacacgaggcattctcataacaca

SEQ ID NO: 371200 - DNA, 120 bp, Artificial Sequence
  ENSG00000141956_69 (sequence is synthesized)
ctagagcaccctgcgcaatcactaacacaagtcgttctcataaaacactagagcaccctgtgcaatcactaacacaaggcattctcaaaacactagagcaccctgcgcaatcactaacac

SEQ ID NO: 371201 - DNA, 120 bp, Artificial Sequence
  ENSG00000141956_70 (sequence is synthesized)
gaggcattctcataacacactagagcaccctgcgcaatcactaacacgaggcattctcataaaacactagagcaccctgcgcaatcagtaacacgaggcattctcataaaacactagggc

SEQ ID NO: 371202 - DNA, 120 bp, Artificial Sequence
  ENSG00000141956_71 (sequence is synthesized)
accctgcgcaatcactaacacgaggcattctcataaaacactagagcaccctgcgcaatcactaacacgaggcattctcataaaacactagagcaccctgcgcaatcactaacacgaggc

SEQ ID NO: 371203 - DNA, 120 bp, Artificial Sequence
  ENSG00000141956_72 (sequence is synthesized)
attctcataacacactagagcaccctgcgcaatcactaacacgaggcattctcataacacactagagcaccctgcgcaatcactaacacgaggcattctcataaaacactagagcaccct

SEQ ID NO: 371204 - DNA, 120 bp, Artificial Sequence
  ENSG00000141956_73 (sequence is synthesized)
gcgcaatcactaacacaagtcgttctcataaaacactagagcaccctgcgcaatcactaacacgaggccaagatcttataaaacactagagcaccctgcacaatcactaacacaaggcat

SEQ ID NO: 371205 - DNA, 120 bp, Artificial Sequence
  ENSG00000141956_74 (sequence is synthesized)
tctcataaaacactagagcaccctgcacaatcactaacacaaggcgttctcataaaactctagagcagcctgcgcaatcactaacacaaggccaagatcttagaaaacactagagcaccc

SEQ ID NO: 371206 - DNA, 120 bp, Artificial Sequence
  ENSG00000141956_75 (sequence is synthesized)
tgcgcaatcactaacacaaagcattgttataaaacactaaagcaccctgcgcaatgccaatacaaggccattctcataaaacccttctgtatgggcgagtgtttttgtgcttgtggagag

SEQ ID NO: 371207 - DNA, 120 bp, Artificial Sequence
  ENSG00000141956_76 (sequence is synthesized)
aaaattgagacatcagaattgagaggttgtccctgagtggtggagttgtgtctcagcgtgaagttccctggcgtgagcctgttcagtgccccctgggggcccctcaactgcacgttgggt

SEQ ID NO: 371208 - DNA, 120 bp, Artificial Sequence
  ENSG00000141956_77 (sequence is synthesized)
cctgcctttatccagcccacgtcacctgcctaccttcctcccctgctccccagagtggcgcgggttgccacacgggtctgctttgggttggccgggcgtgccagcctcctctgcccctgg

SEQ ID NO: 371209 - DNA, 120 bp, Artificial Sequence
  ENSG00000141956_78 (sequence is synthesized)
actgcagaagtgtactgtccatctctttcctggggaatctctgtccagtatatgctttaccatttttgggatactcttgctccccaagactgggccacatgccctcatctgggttctcag

SEQ ID NO: 371210 - DNA, 120 bp, Artificial Sequence
  ENSG00000141956_79 (sequence is synthesized)
aacaccccacactctgcctgccgcccaccaactcgctgggctgtggtggcctctgtcccatgctccacagtgagccctcaggactgagttaagtgcctttaaaaattacttgtcttgttc

SEQ ID NO: 371211 - DNA, 120 bp, Artificial Sequence
  ENSG00000141956_80 (sequence is synthesized)
ccattttgaggggcaacctttgtttaaagggcattcatagggtccacctccccatcagtttttggggtgaaacagaccgtggactctattcttgcttgcccctgaccccccagagccccc

SEQ ID NO: 371212 - DNA, 120 bp, Artificial Sequence
  ENSG00000141956_81 (sequence is synthesized)
cagacgtgagctgatgtgagcacttgcaccaggaggaagctggtccccctttggcctcctccctgtctccctctctgtggaccacatacataattacgtgccacacgtttcccttcgctc

SEQ ID NO: 371213 - DNA, 120 bp, Artificial Sequence
  ENSG00000141956_82 (sequence is synthesized)
cggggaacacgggtcctgtgccgcctggtggggcgctgacagccgtcagagcaaggtgtctgggctggtgaaacaaacacactccccagttctcccctggcgatcatcccccacagtggc

SEQ ID NO: 371214 - DNA, 120 bp, Artificial Sequence
  ENSG00000141956_83 (sequence is synthesized)
cgttccctagggcagtggctgttcccaaggcggtggccgttcctcagggcagtggcccacagcttgtcttatttctctaagcattttggggtcctttagcttctgaggaatgtcctctca

SEQ ID NO: 371215 - DNA, 120 bp, Artificial Sequence
  ENSG00000141956_84 (sequence is synthesized)
actttcctcacgtggccgtctgttggggatgcttgctcttggatgtcctgaatcatctgagaggctttgtctaaagaccaggcttgggttttctttcccagactctctcaatcagagtcg

SEQ ID NO: 371216 - DNA, 120 bp, Artificial Sequence
  ENSG00000141956_85 (sequence is synthesized)
ctaagggccggccttttcgtcttcaccctctcaagttccacagactgtcctgggagattcagcctcctcatacataaaataacagattttaacaggattatctgtacgcctccccccggg

SEQ ID NO: 371217 - DNA, 120 bp, Artificial Sequence
  ENSG00000141956_86 (sequence is synthesized)
ctctaattaaacctgtttccaccacaaggccacctaccgtgcacctcctgatcctgggaatgtcacgatgatggctatgctggttctttttccctagtaatcagggaactggttattttg

SEQ ID NO: 371218 - DNA, 120 bp, Artificial Sequence
  ENSG00000141956_87 (sequence is synthesized)
ttcatgcactttgtggaaatttgttgagcccgcactcacttacaatttgtgtttttctgtctatgagtttgatgtcaatcaaaagtgtccttaaaataagcaacaaaacagtgacacttc

SEQ ID NO: 371219 - DNA, 120 bp, Artificial Sequence
  ENSG00000141956_88 (sequence is synthesized)
ctggtcttgtccctggacctggggagggaccctccctactctgggaggctctggggggttaaggcccctcccttggaaggtggagtcttagaatccgtgggcacgagtggccgtgcggga

SEQ ID NO: 371220 - DNA, 120 bp, Artificial Sequence
  ENSG00000141956_89 (sequence is synthesized)
gcaattgccacctctggtgttggtctattaaagcatccgcttctggctcccgtgaggccaatccatgagccaggactgactgagtacttatcaaatattttaaaaagtcaaggccggtcg

SEQ ID NO: 371221 - DNA, 90 bp, Artificial Sequence
  ENSG00000141956_90 (sequence is synthesized)
gtctcaaaaaaaaaaaaaaaaaaaaagtcaggtaagctctaatttacctttctgttgttagagatggggtctctctgttgctcatttgcg

SEQ ID NO: 371222 - DNA, 120 bp, Artificial Sequence
  ENSG00000141956_91 (sequence is synthesized)
atgagccaccgtgcctggcatcagctctcatttgaattagtcaagttttgaagaatcacactcattttgtccgagcacggcagttctgttgtcttttacgcttggctcgtctgtgtcctc

SEQ ID NO: 371223 - DNA, 120 bp, Artificial Sequence
  ENSG00000141956_92 (sequence is synthesized)
cttgccattggtcctgatttcagttaccatttcctctctcattgtaatatcacatgtgctgcctaagagcttcctggactaagggaggtgtggatacattaatgctttaaagaaattcct

SEQ ID NO: 371224 - DNA, 120 bp, Artificial Sequence
  ENSG00000141956_93 (sequence is synthesized)
atcgtttttctgcttgtccacatgtgggttccactttctgtctgtgttttcagacagcctttcccacatctcatgtttttttgatatgaaatgtcactatggaagcataaactttccaag

SEQ ID NO: 371225 - DNA, 120 bp, Artificial Sequence
  ENSG00000141956_94 (sequence is synthesized)
ccacactttgctggccgaggctggggatgagcgttcattgtctgctgtcttcttgcaattcaccttctcctgaaggccctacagtgcctggaacgtgtcagggagaagacatgccctgat

SEQ ID NO: 371226 - DNA, 120 bp, Artificial Sequence
  ENSG00000141956_95 (sequence is synthesized)
gtggacttacaacactcattaaacgtaggaagttatgtgcgcctttctctgcagggattaaagatttcatgtgtgaattgtgtgggaagacattcagcgagaggaacaccatggagaccc

SEQ ID NO: 371227 - DNA, 120 bp, Artificial Sequence
  ENSG00000141956_96 (sequence is synthesized)
acaagctcatccacacaggtgagcggcgcagcctgaaggagccttcggggcgcacgcggcaggctgccggggctgtctgagtgcctgctggggtggaaacgactattctattatctagac

SEQ ID NO: 371228 - DNA, 120 bp, Artificial Sequence
  ENSG00000141956_97 (sequence is synthesized)
ggttccagcacatttagtgttgtcttggcttcatggtggccccttggcctctgaaggtcaacccgccacagctttcaagtatcccttcttgaattttctcatattggttccgtgatgcag

SEQ ID NO: 371229 - DNA, 120 bp, Artificial Sequence
  ENSG00000141956_98 (sequence is synthesized)
agagttagaacagagtcaggtgtgtggctgttgcagctaaagctgcctaatgtcattatatattcaaggtgtccctttcagatgccctggaagctgggagtgacgcccgggcgcattccc

SEQ ID NO: 371230 - DNA, 120 bp, Artificial Sequence
  ENSG00000141956_99 (sequence is synthesized)
tcctttctcgcatacaggctcgggattagctgggaagttttggaaggaggccgttttcatgctgcttgtaacctggaacttttttcccacctgtcttttcccaacttattgacgtccctg

SEQ ID NO: 371231 - DNA, 120 bp, Artificial Sequence
  ENSG00000141956_100 (sequence is synthesized)
tctgcaactaaaggaacttgccccgatccttagaaatacaagacccagctgtggtcactgtttcttgtggcagctcggtggcccacaagcgtccccactgattggagagtgtgtccaggg

SEQ ID NO: 371232 - DNA, 120 bp, Artificial Sequence
  ENSG00000141959_0 (sequence is synthesized)
gacgcggcgcaggcggcgggagtgcgagctgggcccgtgtttcggccgccgccatggccgcggtggacctggagaagctgcgggcgtcgggcgcgggcaaggccatcggcgtcctgacca

SEQ ID NO: 371233 - DNA, 120 bp, Artificial Sequence
  ENSG00000141959_1 (sequence is synthesized)
gcggcggcgacgcgcaaggcatgaacgctgctgtccgggctgtgacgcgcatgggcatttatgtgggtgccaaagtcttcctcatctacgagggctatgagggcctcgtggagggaggtg

SEQ ID NO: 371234 - DNA, 120 bp, Artificial Sequence
  ENSG00000141959_2 (sequence is synthesized)
agaacatcaagcaggccaactggctgagcgtctccaacatcatccagctgggcggcactatcattggcagcgctcgctgcaaggcctttaccaccagggaggggcgccgggcagcggcct

SEQ ID NO: 371235 - DNA, 120 bp, Artificial Sequence
  ENSG00000141959_3 (sequence is synthesized)
acaacctggtccagcacggcatcaccaacctgtgcgtcatcggcggggatggcagcctcacaggtgccaacatcttccgcagcgagtggggcagcctgctggaggagctggtggcggaag

SEQ ID NO: 371236 - DNA, 120 bp, Artificial Sequence
  ENSG00000141959_4 (sequence is synthesized)
gtaagatctcagagactacagcccggacctactcgcacctgaacatcgcgggcctagtgggctccatcgataacgacttctgcggcaccgacatgaccatcggcacggactcggccctcc

SEQ ID NO: 371237 - DNA, 120 bp, Artificial Sequence
  ENSG00000141959_5 (sequence is synthesized)
accgcatcatggaggtcatcgatgccatcaccaccactgcccagagccaccagaggaccttcgtgctggaagtgatgggccggcactgcgggtacctggcgctggtatctgcactggcct

SEQ ID NO: 371238 - DNA, 120 bp, Artificial Sequence
  ENSG00000141959_6 (sequence is synthesized)
caggggccgactggctgttcatccccgaggctccacccgaggacggctgggagaacttcatgtgtgagaggctgggtgagactcggagccgtgggtcccgactgaacatcatcatcatcg

SEQ ID NO: 371239 - DNA, 120 bp, Artificial Sequence
  ENSG00000141959_7 (sequence is synthesized)
ctgagggtgccattgaccgcaacgggaagcccatctcgtccagctacgtgaaggacctggtggttcagaggctgggcttcgacacccgtgtaactgtgctgggccacgtgcagcggggag

SEQ ID NO: 371240 - DNA, 120 bp, Artificial Sequence
  ENSG00000141959_8 (sequence is synthesized)
ggacgccctctgccttcgaccggatcctgagcagcaagatgggcatggaggcggtgatggcgctgctggaagccacgcctgacacgccggcctgcgtggtcaccctctcggggaaccagt

SEQ ID NO: 371241 - DNA, 120 bp, Artificial Sequence
  ENSG00000141959_9 (sequence is synthesized)
cagtgcggctgcccctcatggagtgcgtgcagatgaccaaggaagtgcagaaagccatggatgacaagaggtttgacgaggccacccagctccgtggtgggagcttcgagaacaactgga

SEQ ID NO: 371242 - DNA, 120 bp, Artificial Sequence
  ENSG00000141959_10 (sequence is synthesized)
acatttacaagctcctcgcccaccagaagccccccaaggagaagtctaacttctccctggccatcctgaatgtgggggccccggcggctggcatgaatgcggccgtgcgctcggcggtgc

SEQ ID NO: 371243 - DNA, 120 bp, Artificial Sequence
  ENSG00000141959_11 (sequence is synthesized)
ggaccggcatctcccatggacacacagtatacgtggtgcacgatggcttcgaaggcctagccaagggtcaggtgcaagaagtaggctggcacgacgtggccggctggttggggcgtggtg

SEQ ID NO: 371244 - DNA, 120 bp, Artificial Sequence
  ENSG00000141959_12 (sequence is synthesized)
tgcccaagggccagctggagtccattgtggagaacatccgcatctatggtattcacgccctgctggtggtcggtgggtttgaggcctatgaaggggtgctgcagctggtggaggctcgcg

SEQ ID NO: 371245 - DNA, 120 bp, Artificial Sequence
  ENSG00000141959_13 (sequence is synthesized)
ggcgctacgaggagctctgcatcgtcatgtgtgtcatcccagccaccatcagcaacaacgtccctggcaccgacttcagcctgggctccgacactgctgtaaatgccgccatggagagct

SEQ ID NO: 371246 - DNA, 120 bp, Artificial Sequence
  ENSG00000141959_14 (sequence is synthesized)
gtgaccgcatcaaacagtctgcctcggggaccaagcgccgtgtgttcatcgtggagaccatggggggttactgtggctacctggccaccgtgactggcattgctgtgggggccgacgccg

SEQ ID NO: 371247 - DNA, 120 bp, Artificial Sequence
  ENSG00000141959_15 (sequence is synthesized)
cctacgtcttcgaggaccctttcaacatccacgacttaaaggtcaacgtggagcacatgacggagaagatgaagacagacattcagaggggcctggtgctgcggaacgagaagtgccatg

SEQ ID NO: 371248 - DNA, 120 bp, Artificial Sequence
  ENSG00000141959_16 (sequence is synthesized)
actactacaccacggagttcctgtacaacctgtactcatcagagggcaagggcgtcttcgactgcaggaccaatgtcctgggccacctgcagcagggtggcgctccaaccccctttgacc

SEQ ID NO: 371249 - DNA, 120 bp, Artificial Sequence
  ENSG00000141959_17 (sequence is synthesized)
ggaactatgggaccaagctgggggtgaaggccatgctgtggttgtcggagaagctgcgcgaggtttaccgcaagggacgggtgttcgccaatgccccagactcggcctgcgtgatcggcc

SEQ ID NO: 371250 - DNA, 120 bp, Artificial Sequence
  ENSG00000141959_18 (sequence is synthesized)
tgaagaagaaggcggtggccttcagccccgtcactgagctcaagaaagacactgatttcgagcaccgcatgccacgggagcagtggtggctgagcctgcggctcatgctgaagatgctgg

SEQ ID NO: 371251 - DNA, 120 bp, Artificial Sequence
  ENSG00000141959_19 (sequence is synthesized)
cacaataccgcatcagtatggccgcctacgtgtcaggggagctggagcacgtgacccgccgcaccctgagcatggacaagggcttctgaggccagccatgcccacgcccctccccagccc

SEQ ID NO: 371252 - DNA, 120 bp, Artificial Sequence
  ENSG00000141959_20 (sequence is synthesized)
ccacccatgccagcgcagcgccagggctcagatggggcctgggctgttgtgtctggagcctgcaggcaggtgggggctgcgtccctgctcagcccatcccctgcctctatccctggccac

SEQ ID NO: 371253 - DNA, 120 bp, Artificial Sequence
  ENSG00000141959_21 (sequence is synthesized)
ctgccaggcctccctcgggctggtgtcttgagaccagcctgccaggccctccagcaggaggacagagtgccctggggcatccaccttcctgcccaggggacgtggcgctgtcggtgtttg

SEQ ID NO: 371254 - DNA, 120 bp, Artificial Sequence
  ENSG00000141959_22 (sequence is synthesized)
gaggctgctgccccctggctttggcgccccatgggccctcagcgtctccccatgctgggctcactacatgggccagcccttgctctacctggccggtaggctgctggcgcctaggttgtg

SEQ ID NO: 371255 - DNA, 120 bp, Artificial Sequence
  ENSG00000141959_23 (sequence is synthesized)
ttgagagggggatgcccctggccctgcctcactgtgacctgctcctgcccacgtgcagcacctgtcaccttttctagaaataaaatcaccctgactgtggggtgcatcggtctccggaga

SEQ ID NO: 371256 - DNA, 120 bp, Artificial Sequence
  ENSG00000141959_24 (sequence is synthesized)
cagggcccagtgcacagggatctgggcatggcgaggggatgagaagctgtggatacaagcccaggacatggggtggccccgcgggggctgggaaggctggcagatgttgggtgtgggtac

SEQ ID NO: 371257 - DNA, 120 bp, Artificial Sequence
  ENSG00000141959_25 (sequence is synthesized)
cacccccctgcaggcgtcctggcggccgggtcaggctggattggacgtctgggttcccatgcgtgcctccacccgctaccaaggtggccaaccctcccttgagctggatgccggccacgt

SEQ ID NO: 371258 - DNA, 120 bp, Artificial Sequence
  ENSG00000141959_26 (sequence is synthesized)
gctttgctgcacgggctggcgtggcctcgtgttgtgttgggggtctcgcaccttctgtggaaggtgccctgcctggcatgcgcggtgtctgctgcctcatggctgagcttccatcgggcc

SEQ ID NO: 371259 - DNA, 120 bp, Artificial Sequence
  ENSG00000141959_27 (sequence is synthesized)
gtgtgcctgtgaccagcctcctgggctctgtcacggctgcgctgtggctgtacgccgtggcgctgcagggctgtgcatggtgtgacccgaatcccttccaggagcttcgagaacaactgg

SEQ ID NO: 371260 - DNA, 120 bp, Artificial Sequence
  ENSG00000141959_28 (sequence is synthesized)
ctggtgctgcggtgaggctgccgtgggtccctggccacagctgcgcgtccaactctcggggctggggtggggctgctgaggagcggctgggcaggagaaggcaggaggggtccttggaga

SEQ ID NO: 371261 - DNA, 120 bp, Artificial Sequence
  ENSG00000141959_29 (sequence is synthesized)
gggtgggccagggcggctttcctgggagctgccactccctctcccaggcctggcccagcggggactcaggatcggggggagacctgaactcgttcccgccgactcaggccctgctgcccc

SEQ ID NO: 371262 - DNA, 120 bp, Artificial Sequence
  ENSG00000141959_30 (sequence is synthesized)
ggggcaggggtgaggctctgagaggcctgcccctctttcctgccaccatctgtccccggccccaggggtcccagccctcacgggcacccacgggcactcccggcaggccctcgggcacgt

SEQ ID NO: 371263 - DNA, 120 bp, Artificial Sequence
  ENSG00000141959_31 (sequence is synthesized)
gtgcccttccccagtgaggggaccgaggcctgtatctaggtgaggtctcatttcaagaaggggtggggctggggctggagccggggcccgagccagggcattcacatgctgagccgagct

SEQ ID NO: 371264 - DNA, 120 bp, Artificial Sequence
  ENSG00000141959_32 (sequence is synthesized)
ccccacccctgccaggcctcccgcggccacttccgccgaacccctcacctagatccccgcatgctccctgccttatggtggccctgcaggaagcccgcgtcctggggttttctgagccag

SEQ ID NO: 371265 - DNA, 120 bp, Artificial Sequence
  ENSG00000141959_33 (sequence is synthesized)
ggaggggagtcagggtggctgggcatggggcccgaggtgatggggcccgaggtggggccgctggctgccgatgcagggcccaggagtcacttgacttggccaggggcagccgactgccgg

SEQ ID NO: 371266 - DNA, 120 bp, Artificial Sequence
  ENSG00000141959_34 (sequence is synthesized)
cctcgggaggcagcttctggcctggacttggagctggagagagcaggcagggtcctcgatcgggaacagacgggaacggtgcacgggttggaaggaatgggtgttcacaagctgcctggg

SEQ ID NO: 371267 - DNA, 120 bp, Artificial Sequence
  ENSG00000141959_35 (sequence is synthesized)
caaggtcccctgacaagcccaccaggccccctgctgagatggctgtgaccctgggctgacccgcccagtggcacattgactccgcctggagctggggagaccagagaggccctgtggttg

SEQ ID NO: 371268 - DNA, 120 bp, Artificial Sequence
  ENSG00000141959_36 (sequence is synthesized)
cggctgggagaacttcatgtgtgagaggctgggtgaggtgggtgccgtccagcctgctgggggccgcaggtgtcctggtgcactgggtagcgcccctggggttttgggaccagccttgac

SEQ ID NO: 371269 - DNA, 120 bp, Artificial Sequence
  ENSG00000141959_37 (sequence is synthesized)
caactcatctatcactcatgggttcatcagcagctgcaggtgccccttgggggcgggacacgcaaggagtggggggctacggggctgacctcagtgaggcacctgtggtcctgcccccag

SEQ ID NO: 371270 - DNA, 120 bp, Artificial Sequence
  ENSG00000141959_38 (sequence is synthesized)
tgggcaggaggcggagagggtcactcaggctgccgccgccccaggctcagccccgtggtcagtgtggggagcttggtgaggctgcttactggggtgggactgctgagcctggggcggtgg

SEQ ID NO: 371271 - DNA, 120 bp, Artificial Sequence
  ENSG00000141959_39 (sequence is synthesized)
gaggtggttggttgtgagggagtggccccagcaaggtccagacggcagggctgtgggggtggcgaggccaggagctgggccagtggggagcagggccttcccctgagggcggtcggggcc

SEQ ID NO: 371272 - DNA, 120 bp, Artificial Sequence
  ENSG00000141959_40 (sequence is synthesized)
cgggggtgggttctaggctggaaagatgtgtcggaacgtggctgtagccacagggtggacaggaggtcccggaagcaggagagggtggggaggctgctgggaggccgagaccgcctctgg

SEQ ID NO: 371273 - DNA, 120 bp, Artificial Sequence
  ENSG00000141959_41 (sequence is synthesized)
gagggatgggggggtgcctggtggggaggggtgtgtctggagtgggggtgcctggaatgccgccctctggttcccttggggtggagttgggggctctggcctagaacaggctgacactgc

SEQ ID NO: 371274 - DNA, 120 bp, Artificial Sequence
  ENSG00000141959_42 (sequence is synthesized)
cctgtggaccctgagacccctcaactgggacaggtcggccccttggtggggtggggctcaatggtggaccagaggcacgggccattcaggctgtccttcgcccacacccgaccatgcagg

SEQ ID NO: 371275 - DNA, 120 bp, Artificial Sequence
  ENSG00000141959_43 (sequence is synthesized)
gcaaggccaggggcccccgtggctctagctctgtcctctgtgcgctgaggctgaggcaggaccactggaaccagccctgggggcagagggtgggtttgggactgacacggtatccctgtc

SEQ ID NO: 371276 - DNA, 120 bp, Artificial Sequence
  ENSG00000141959_44 (sequence is synthesized)
cccgtgtgaaggtggcagcgtcactcccatctgtgtggacactggttccacctccgcgtggctgtacagtgctgccgagggcagtgggagaggccgtgggtaatgacctggcttctagaa

SEQ ID NO: 371277 - DNA, 120 bp, Artificial Sequence
  ENSG00000141959_45 (sequence is synthesized)
ccttccccagtggagcctaggggccgggcggagatggagcccaacaggcgaggctggcccaaggtgcgggtcctatgaggggcttgctctcctagggcagggacttcccgggggttccgg

SEQ ID NO: 371278 - DNA, 120 bp, Artificial Sequence
  ENSG00000141959_46 (sequence is synthesized)
ctccagtggtgaccttggccttagcttatgtctgtgactcacattgggccctcctggaagtggcctggatgcaaggtcggcccacctggttccttcctgctctgtgtgagcagctcaggc

SEQ ID NO: 371279 - DNA, 120 bp, Artificial Sequence
  ENSG00000141959_47 (sequence is synthesized)
cctcactgagagtctgtttccccctgtaacatgcgggttcccgccttgcccaccacccagggtgcactggggcagggagggtggcacagctctcctgctggacctgcagcccatcttccg

SEQ ID NO: 371280 - DNA, 120 bp, Artificial Sequence
  ENSG00000141959_48 (sequence is synthesized)
ggtgtctgacctcacctgcactggcgccacctcctccaggtagccctccactcccaccacacccgggccctgtctgagctgctccaaccctgtccctgtaggaggcattgtggcccgtgg

SEQ ID NO: 371281 - DNA, 120 bp, Artificial Sequence
  ENSG00000141959_49 (sequence is synthesized)
tgggcaaacatggggcttgtggctcagagcgagtcccacaaatgttggctgggtcattgaagtggacggccgaaaagctctttcagttcccagagagctgggccgcggctggtgtgtggt

SEQ ID NO: 371282 - DNA, 120 bp, Artificial Sequence
  ENSG00000141959_50 (sequence is synthesized)
gctgaggcagcagcctgaggctggcagaggggatggtgtgtcctatgtgcaccagtgtggacccacagtggcttcagggtgcagggtgtccggggagccctggctggtgccagcgatgcg

SEQ ID NO: 371283 - DNA, 120 bp, Artificial Sequence
  ENSG00000141959_51 (sequence is synthesized)
gggcccctggttataaggatgagcagatggaagctcacaggggccccaggtacctggcccaggctagcccgggcaggcccctctgccctgtgccccgtggagctgcagccctgtgcgtct

SEQ ID NO: 371284 - DNA, 120 bp, Artificial Sequence
  ENSG00000141959_52 (sequence is synthesized)
tcccgcctggaaggcttcaccagacacaagggcccagccccagctgtgtgtgtgctgggcccagccccgagggcccccttcctcccctgctgcccttcccaggctttcgggcagagccct

SEQ ID NO: 371285 - DNA, 120 bp, Artificial Sequence
  ENSG00000141959_53 (sequence is synthesized)
cttgttcaccgcctccaggagggcggggcgtcctagtgggcccagcctcatctctgccctcgcgctccaggcctgctttcctcctgctgggtggggattgtgccctggcccatgtgggtt

SEQ ID NO: 371286 - DNA, 120 bp, Artificial Sequence
  ENSG00000141959_54 (sequence is synthesized)
agctccgtggtgggtaagccccctcagcagacccctgcactcttacatggctgggtcccggtgccaggcagcatgtgctgcagtggcgctatgcacgcctggcctgggtcatccttctag

SEQ ID NO: 371287 - DNA, 120 bp, Artificial Sequence
  ENSG00000141959_55 (sequence is synthesized)
ccagcccgggcggcaagagtgaaactctgaaaataaaatgttcccaaacagctgaaaacctcaggaaatgggatctctccaaaataaggatgaaatggcttgtttctaaagtcctggggg

SEQ ID NO: 371288 - DNA, 120 bp, Artificial Sequence
  ENSG00000141959_56 (sequence is synthesized)
acgagggtcctgtagagagagtcacggccagtgaggtcctggctcccaagccccttgagccacagccggagctgcaggccggggcagacagcgtggcccagcctgagtctggtcctccct

SEQ ID NO: 371289 - DNA, 120 bp, Artificial Sequence
  ENSG00000141959_57 (sequence is synthesized)
tccatggacatctttgggtgtccctgctgctccagcctcctgcttatccccagagctagtcagcgggctctaccctccgtggtggggcaacctggtctccacgaacccagaacctggcag

SEQ ID NO: 371290 - DNA, 120 bp, Artificial Sequence
  ENSG00000141959_58 (sequence is synthesized)
gggcgtgactggctttgtgggcagcagggctggctcgtaccaggacccagtggggccatgtggctatggagcccttgggtgtggctgctgccaagtgggatgtgctgcacgtgacaggtg

SEQ ID NO: 371291 - DNA, 120 bp, Artificial Sequence
  ENSG00000141959_59 (sequence is synthesized)
cacgccaggttcagagcctcagcacggtgggtggaggggaggtggtggcggccgtcactggattcacatggatgtggtggggttttgggtccatcaggttaaattaactgtagtcctgat

SEQ ID NO: 371292 - DNA, 120 bp, Artificial Sequence
  ENSG00000141959_60 (sequence is synthesized)
gggactgtctccatgtcttttcccttcccttaacgtggctactagaaaacaggatagccagggccccttccttactcgtggctgtgcaccccccaccctcccgcccgctgccagcccctt

SEQ ID NO: 371293 - DNA, 120 bp, Artificial Sequence
  ENSG00000141959_61 (sequence is synthesized)
gtgtgggcactgacctgtgttcccgcccgcaagcctggcttcacaacagtgctcgccccttctgcctcctctgttgcctgcgtgccagggggccaggcttgcaccgtgtctcttttggtc

SEQ ID NO: 371294 - DNA, 120 bp, Artificial Sequence
  ENSG00000141959_62 (sequence is synthesized)
ttcaccagaatcttctggaattagaacagataccgtattcccagggcagttgggcggtgtgctgggcagcgtccaggctgctggcagggcctggcccctttttccagaacctgccggcct

SEQ ID NO: 371295 - DNA, 120 bp, Artificial Sequence
  ENSG00000141959_63 (sequence is synthesized)
gatggtggcagatactctggctgctacgtgagaacagtgtgccgatccctggggtttctcaaggcgtggcacctcacctcacacctgctccctgctgctgagccccacgccaagctggag

SEQ ID NO: 371296 - DNA, 120 bp, Artificial Sequence
  ENSG00000141959_64 (sequence is synthesized)
aggaaactggctttgccaaggcccccgctgggacagactgtttctttcactgcagtcctgggagccgagggcaaggggacaggaaagaggaagtgacctcagagcctggtggcaccagca

SEQ ID NO: 371297 - DNA, 120 bp, Artificial Sequence
  ENSG00000141959_65 (sequence is synthesized)
tcgcccaccagaagccccccaaggagaaggtgaggcagggagcggcgcccacagagggaggaacgggctcagttattctgcagcctcttcacgctggccccgtggctgggcctgcctgcc

SEQ ID NO: 371298 - DNA, 120 bp, Artificial Sequence
  ENSG00000141959_66 (sequence is synthesized)
cccaccttccctcctgctggggtccgagctgtgagctgggagggtgggcctgacctctgcctgggctcaggcaccactgtggctggcaggtcccgggtgctgggaccctggctgcagggc

SEQ ID NO: 371299 - DNA, 120 bp, Artificial Sequence
  ENSG00000141959_67 (sequence is synthesized)
tggctgttgcttctcagtggtggatggaaatgaagtcaggccacaggcttaactcaggagaggagaagccattgtgtagaaaatgtcccccggggccaggctcacacctgtaatcccagc

SEQ ID NO: 371300 - DNA, 120 bp, Artificial Sequence
  ENSG00000141959_68 (sequence is synthesized)
gccatgccgacggcctacagggaagggtgggcacgtggaggacccccgacccccccttgtcccccagagctgtgaccgcatcaaacagtctgcctcggggaccaagcgccgtgtgttcat

SEQ ID NO: 371301 - DNA, 120 bp, Artificial Sequence
  ENSG00000141965_0 (sequence is synthesized)
gaggagaccctaagatggcggcgagggggacggtgaaggttgcctcccgcccgtccgggctctgatcctccgtctccccgtcccccggcggccggcccatggcctggcggaggcccgaac

SEQ ID NO: 371302 - DNA, 120 bp, Artificial Sequence
  ENSG00000141965_1 (sequence is synthesized)
catggacctccgcaccgccgtgtacaacgccgcccgtgatggcaagctgcagctgctccagaagctgctcagcggccggagccgggaggaactggacgagctgacgggcgaggtggccgg

SEQ ID NO: 371303 - DNA, 120 bp, Artificial Sequence
  ENSG00000141965_2 (sequence is synthesized)
cgggggaacgccgctactcatcgccgcccgctacggccacctggacgtggtggagtacctggtggaccggtgcggcgcgagcgtggaggccggtggctcggtgcacttcgatggcgagac

SEQ ID NO: 371304 - DNA, 120 bp, Artificial Sequence
  ENSG00000141965_3 (sequence is synthesized)
catcgagggcgcgccgccgctgtgggccgcctccgcagccggccacctggacgtggtgcggagcctgctgcgccgcggggcctcggtgaaccgcaccacgcgcaccaactccacgcctct

SEQ ID NO: 371305 - DNA, 120 bp, Artificial Sequence
  ENSG00000141965_4 (sequence is synthesized)
ccgcgccgcctgcttcgacggccacctggaggtggtgcgctacctggtcggcgagcaccaggccgacctggaggtggccaaccggcacggccacacgtgcctcatgatctcgtgctacaa

SEQ ID NO: 371306 - DNA, 120 bp, Artificial Sequence
  ENSG00000141965_5 (sequence is synthesized)
gggccaccgtgagatcgcccgctacctgctggagcagggcgcccaggtgaaccggcgcagcgccaagggcaacacggccctgcatgactgcgccgagtccggcagcctggagatcctgca

SEQ ID NO: 371307 - DNA, 120 bp, Artificial Sequence
  ENSG00000141965_6 (sequence is synthesized)
gctgctgctggggtgcaaggcccgcatggaacgtgacggctacggcatgaccccgctgctcgcggccagcgtgacgggccacaccaacatcgtggagtacctcatccaggagcagcccgg

SEQ ID NO: 371308 - DNA, 120 bp, Artificial Sequence
  ENSG00000141965_7 (sequence is synthesized)
ccaggagcaggtcgcagggggagaggctcagcctgggctgccccaagaagacccctccaccagccaggggtgtgcgcagcctcagggggctccgtgctgcagctcctccccagaggaacc

SEQ ID NO: 371309 - DNA, 120 bp, Artificial Sequence
  ENSG00000141965_8 (sequence is synthesized)
actgaacggggaatcttacgaaagctgctgtcccaccagccgggaagctgccgtggaagccttggaattgctgggagctacgtatgtggataagaaacgagatctgcttggggcccttaa

SEQ ID NO: 371310 - DNA, 120 bp, Artificial Sequence
  ENSG00000141965_9 (sequence is synthesized)
acactggaggcgggccatggagctgcgtcaccaggggggcgagtacctgcccaaaccggagcccccacagctggtcctggcctatgactattccagggaggtcaacaccaccgaggagct

SEQ ID NO: 371311 - DNA, 120 bp, Artificial Sequence
  ENSG00000141965_10 (sequence is synthesized)
ggaggcgctgatcaccgacccggatgagatgcgcatgcaggccctgttgatccgggagcgcatcctcggtccctcgcacccggacacttcctattacatccgttacaggggtgccgtgta

SEQ ID NO: 371312 - DNA, 120 bp, Artificial Sequence
  ENSG00000141965_11 (sequence is synthesized)
cgccgactcgggcaatttcgagcgctgcatccgcttgtggaagtacgccctggacatgcaacagagcaacctggagcctctgagccccatgaccgccagcagcttcctctccttcgcgga

SEQ ID NO: 371313 - DNA, 120 bp, Artificial Sequence
  ENSG00000141965_12 (sequence is synthesized)
actcttctcctacgtgcttcaggaccgggccgccaaaggcagcctgggcacccagatcggctttgcagacctcatgggggttctcaccaaaggggtccgggaagtggaacgggccctgca

SEQ ID NO: 371314 - DNA, 120 bp, Artificial Sequence
  ENSG00000141965_13 (sequence is synthesized)
gctgcccagggagcccggagactcagcccagttcaccaaggcgctggccatcatcctccacctgctctacctgctggagaaagtggagtgcacccccagccaggagcacctgaagcacca

SEQ ID NO: 371315 - DNA, 120 bp, Artificial Sequence
  ENSG00000141965_14 (sequence is synthesized)
gaccgtctaccgcctgctcaagtgcgcgcccaggggcaagaacggcttcacccctctgcacatggctgtggacaaggacaccacaaacgtgggccgctatcccgtgggcagattcccctc

SEQ ID NO: 371316 - DNA, 120 bp, Artificial Sequence
  ENSG00000141965_15 (sequence is synthesized)
cctgcacgtggtcaaagtgctgctcgactgcggggccgacccggacagcagggattttgacaacaacaccccgctacacatagcagcccagaacaactgcccggccatcatgaatgccct

SEQ ID NO: 371317 - DNA, 120 bp, Artificial Sequence
  ENSG00000141965_16 (sequence is synthesized)
gatcgaagcaggggcccacatggacgccaccaatgccttcaagaagacggcctacgagctgctggacgagaagctgctggccaggggtaccatgcagcccttcaactacgtgaccctgca

SEQ ID NO: 371318 - DNA, 120 bp, Artificial Sequence
  ENSG00000141965_17 (sequence is synthesized)
gtgccttgcggcccgggccctggataagaacaagatcccttacaagggcttcatcccggaagatctggaggcgttcatcgaactgcactgacctgcccagaacgcctgcaccctcacctc

SEQ ID NO: 371319 - DNA, 120 bp, Artificial Sequence
  ENSG00000141965_18 (sequence is synthesized)
tcccctctcctgctgagatgggggaaatccggctgcggcatagcagatgctcgttcttgcctccttcaggcaccaatcaggagaagggttctgcctcccatcccctctacctgcagacag

SEQ ID NO: 371320 - DNA, 120 bp, Artificial Sequence
  ENSG00000141965_19 (sequence is synthesized)
ggtcggaggtgttagcgagcctttggtgctagaagcctgcggggtcatgtgctaagaggacagtctttctccgggagcccgctcactcattctgagttaggaaaagacacaagaccttcc

SEQ ID NO: 371321 - DNA, 120 bp, Artificial Sequence
  ENSG00000141965_20 (sequence is synthesized)
ccacatcctgtctgcctgggttagggaggcctttgccttgttacctagaggcggagggactgaagccattgcgttccttccctgctagaaacacaggaagaagttgaggactgtctgcct

SEQ ID NO: 371322 - DNA, 120 bp, Artificial Sequence
  ENSG00000141965_21 (sequence is synthesized)
tccctcgtccctttacctggccagataactccagccgctgaatacagtgttaggactgggggctcctgagatgagagtttgagattcagggaatgagaccacctctcatttcttccagca

SEQ ID NO: 371323 - DNA, 120 bp, Artificial Sequence
  ENSG00000141965_22 (sequence is synthesized)
tgatcgcgccctgctcccgtgccaccgtagtccctggcagacaggcagggctctgcccagggcagcctgccacttgcatagctttcggttggtttggtgttctgtttatttaataagtgg

SEQ ID NO: 371324 - DNA, 120 bp, Artificial Sequence
  ENSG00000141965_23 (sequence is synthesized)
gcaggttgcaagcgttgcacagaaattctgagattttactgcctttttttttttttttaagaaagttgtttgttggactccataagtgaatttcaagcagtgaggattttgtggtgcctg

SEQ ID NO: 371325 - DNA, 120 bp, Artificial Sequence
  ENSG00000141965_24 (sequence is synthesized)
agatggccgagggcacagggagtgagctgtatgtgtgaggaatttggtgagcgagataaaagtccacggtgtcaacccctaaaacatgggtgaccgtacatttttatacatctccactct

SEQ ID NO: 371326 - DNA, 120 bp, Artificial Sequence
  ENSG00000141965_25 (sequence is synthesized)
acggccttttacaggctttccgattttacaggcctttccaagtttccattctccttagagagagaactgtgcttccaaacagaaatcaggagtgaccacaaagcctgaaaacactttgcc

SEQ ID NO: 371327 - DNA, 120 bp, Artificial Sequence
  ENSG00000141965_26 (sequence is synthesized)
acccagcaaagaactggcacaattggtttgggtctgcattgccatagtgcccgagttaaaactgcaggccactctgccttgcagtggcctctgatttcattgtgggtgcatccacaggtg

SEQ ID NO: 371328 - DNA, 120 bp, Artificial Sequence
  ENSG00000141965_27 (sequence is synthesized)
gcccgagctgttctttcagctgctccaaggattgagacccaagtcatcatgaaaaaggcccaagtacagtcttaatgcgataaatccactagctaagacgtcgagtgccaagaccagcct

SEQ ID NO: 371329 - DNA, 120 bp, Artificial Sequence
  ENSG00000141965_28 (sequence is synthesized)
tccagccgaggtttggacaaagtctcaggttcccgtgactcagggtaaggtgctggggctgccagaggacctgccccagcaagatttttgtcaagagcgagactccatcagcccaggcag

SEQ ID NO: 371330 - DNA, 120 bp, Artificial Sequence
  ENSG00000141965_29 (sequence is synthesized)
acgggagcaggttcttggccagcgtagacagcagcaaacagcagcagggaagccattctcactgcatcctccctgcagtagccacggccaggcccttaggaggagcagtgaccgggggtg

SEQ ID NO: 371331 - DNA, 120 bp, Artificial Sequence
  ENSG00000141965_30 (sequence is synthesized)
tccagaaatatcctgtccctggatggaaactaggtctcgtttggatttttttttttttttgccgtgttaggaaattatttattaatttacaagacaggttttaactcagccgaggtggga

SEQ ID NO: 371332 - DNA, 120 bp, Artificial Sequence
  ENSG00000141965_31 (sequence is synthesized)
aatggtgtccctgtccctcccaaagcacagagcacagaaatgaggccgtttacatggcgagtctccgtgctggtgtttaagtcattaaaaagatactcaaagagaatggcctgcctgatg

SEQ ID NO: 371333 - DNA, 120 bp, Artificial Sequence
  ENSG00000141965_32 (sequence is synthesized)
cgtccttggcgtgggttaactggggaagtcggaggtgggtgagtcagtccatggcattggtgtgagtgaacagagagccctagggccacctcccctagccagaggggtttctgtgttaca

SEQ ID NO: 371334 - DNA, 120 bp, Artificial Sequence
  ENSG00000141965_33 (sequence is synthesized)
ccaaagtgctggaattacaagcatgaaccactgcacctggcctctatgttacatactggggctttgtgtaaaatttcatttgaaaaacagtatgttgctctttgaaaaaaagcctgggca

SEQ ID NO: 371335 - DNA, 120 bp, Artificial Sequence
  ENSG00000141965_34 (sequence is synthesized)
tttgaaaaaaagcctgggcaacatagtgagagcctgtctttacaaaaataaaaaataggctgggtacggtggctcacatctgtaatctcagcaccttgggaagcctgggcaacatagtaa

SEQ ID NO: 371336 - DNA, 73 bp, Artificial Sequence
  ENSG00000141965_35 (sequence is synthesized)
caacctctgggactacaggcatacaccaccatgcctggctaattgtgtatttttagcagagacggggtttcac

SEQ ID NO: 371337 - DNA, 120 bp, Artificial Sequence
  ENSG00000141965_36 (sequence is synthesized)
ccaccacgcctggcccttttttgttttcctttatctgccatctcatctcacctccttgtgtaaacttgttccattctaaaattctggttttctccatatcagaacagtcaaacccccacc

SEQ ID NO: 371338 - DNA, 120 bp, Artificial Sequence
  ENSG00000141965_37 (sequence is synthesized)
agaaagcaccaccccgttagctgggtccatgggattttgctgagcccctgccatgtgccaggcaggtttcaggcccccttggggataaggattgagctgtcgatatgaacgtccggttaa

SEQ ID NO: 371339 - DNA, 120 bp, Artificial Sequence
  ENSG00000141965_38 (sequence is synthesized)
tccctgtgcgcccgcctcacgtggcagtggggagaggccctgctgtggggcaccgcatgctgcttccatggtgcattgggttggagggctcttctcccgagggtgggtgtctcccatctc

SEQ ID NO: 371340 - DNA, 120 bp, Artificial Sequence
  ENSG00000141965_39 (sequence is synthesized)
ttgccttcacacacctgctgtcttgtttcatttgggactggacagtcccacaggtgacagctgttgggctgttgtatgcctgtttggtgttgcatcaaaggagtgggtttgaatcagcag

SEQ ID NO: 371341 - DNA, 120 bp, Artificial Sequence
  ENSG00000141965_40 (sequence is synthesized)
gtgctctcaaagctgtctcctgggagacacagtactagtgagcatttattgagcacctactgtatgccaggcaccattttctgtggttaaatgcactgcctgtttacacaacagccctct

SEQ ID NO: 371342 - DNA, 120 bp, Artificial Sequence
  ENSG00000141965_41 (sequence is synthesized)
tacacaacagccctctaaaggaggaaaaacatatcagagtcccatggatggaagaaaaataatgaagtaggaaaaacggccctcttaagatgaaggtcatcttttttttttttttttttt

SEQ ID NO: 371343 - DNA, 120 bp, Artificial Sequence
  ENSG00000141965_42 (sequence is synthesized)
ggcatgagccaccgcacccgaccagatgaaggccatcttaaagctcaaccagtttcaggtgagggctgatccagcagatcccaattattcctaaagacctggttgatagctcccttgaga

SEQ ID NO: 371344 - DNA, 120 bp, Artificial Sequence
  ENSG00000141965_43 (sequence is synthesized)
ctggggtggggtgggtgtcccaagatgaccgccagcagaaaagagagcatctttctcccagtcaaaagccaaagtaggacctatctaaagtaagtcctggccgggcacggtggctcacac

SEQ ID NO: 371345 - DNA, 82 bp, Artificial Sequence
  ENSG00000141965_44 (sequence is synthesized)
gaggctgaggctggaggatcgcttgagcctgggagtttgagaccatcatgggcagcaaagtgagatatgtgtagtgatatgt

SEQ ID NO: 371346 - DNA, 88 bp, Artificial Sequence
  ENSG00000141965_45 (sequence is synthesized)
caaaaaaaaaaaaaaaaaaaaattagccatgtgtagtgatatgtagtcccagctgctactggggaggctgaagcaggaggattgatta

SEQ ID NO: 371347 - DNA, 75 bp, Artificial Sequence
  ENSG00000141965_46 (sequence is synthesized)
gctgcagtgagccttaatggcaccatcaaagcagggccgggcgcaggggctcacgccagtaatcccagcactttg

SEQ ID NO: 371348 - DNA, 120 bp, Artificial Sequence
  ENSG00000141965_47 (sequence is synthesized)
acaaacaaaacaaagcaggtccggtatggcaggcgggggaactgaggctactaagagacattaagatgcttaaggacagccgggcgcggtggcagacgcctgtaatcccagcactttggg

SEQ ID NO: 371349 - DNA, 120 bp, Artificial Sequence
  ENSG00000141965_48 (sequence is synthesized)
aatgcctaaggacacagcgcatgaaggaagggtcgagattggaacccaggaccgtcagagttcataccttgtgctgattctccatccgggacgccagacacatggatccctttcccctgc

SEQ ID NO: 371350 - DNA, 120 bp, Artificial Sequence
  ENSG00000141965_49 (sequence is synthesized)
tttctggtgttgttttggcacaagctctcccatccctggggcaggtggccatcctgcctccgcatcctgagcgtctgtttccctcggggatctgccagactcagccccctaaccccaaga

SEQ ID NO: 371351 - DNA, 120 bp, Artificial Sequence
  ENSG00000141965_50 (sequence is synthesized)
aaatcactcacaaaaatcatctgagctaaatgcttgctttgaaagctcagacctggggattgtaactttagcctcataccttctaatgaaggccatcttaaagctctaccagtttcagct

SEQ ID NO: 371352 - DNA, 120 bp, Artificial Sequence
  ENSG00000141965_51 (sequence is synthesized)
gagggccgatccagcagatcccagttgttcctaaagacctggttgctagctcctctgagactggggtggggtgggtgtcccaaggtgatgaccaggagaaaagagagcgtcttcctccca

SEQ ID NO: 371353 - DNA, 64 bp, Artificial Sequence
  ENSG00000141965_52 (sequence is synthesized)
caaggtgatgaccaggagaaaagagagcgtcttcctcccagtcacatcccaagattcgtgaccg

SEQ ID NO: 371354 - DNA, 120 bp, Artificial Sequence
  ENSG00000141965_53 (sequence is synthesized)
ctctgattggaccagcctgggtcccatgttcttccatgacccaatcctagtagcccaggagtgggatgtgccaattggcttggcctgaggagggcccccagagggtctgtaatccatgtg

SEQ ID NO: 371355 - DNA, 68 bp, Artificial Sequence
  ENSG00000141965_54 (sequence is synthesized)
tggcctgaggagggcccccagagggtctgtaatccatgtgtaactggagttgctgtaaaatggggcca

SEQ ID NO: 371356 - DNA, 120 bp, Artificial Sequence
  ENSG00000141965_55 (sequence is synthesized)
agggtagcaaaaaatgttcacaatagtaaaatgactacctgccgttgatcagtgaagaaaaaagctcagagagctcaagtggagtacctaaggccacacagccaagagggagagccaagt

SEQ ID NO: 371357 - DNA, 120 bp, Artificial Sequence
  ENSG00000141965_56 (sequence is synthesized)
cgtttgtggttaaatgtcctgcctgtttacacagcagccctctaaaggcggaaaaacatgtcagagtcccatggacgggagaaaaataagaataataataaagtaggaaaaacagccctc

SEQ ID NO: 371358 - DNA, 120 bp, Artificial Sequence
  ENSG00000141965_57 (sequence is synthesized)
ttaagaggaaggccatcttaaagctctaccagcttcaggtgagggctgatccagcagatcccagagaaacaggctcacagagaggggagggggcttgtctaagcttacccagcccggaag

SEQ ID NO: 371359 - DNA, 120 bp, Artificial Sequence
  ENSG00000141965_58 (sequence is synthesized)
catcggggtcaaagcttaaccccctgctggaaggtgtcgagagccaggcagccaagcctgacctgggagatggggaagtgggggcccccccaagctcgccgactgcccttcccagcctgc

SEQ ID NO: 371360 - DNA, 120 bp, Artificial Sequence
  ENSG00000141965_59 (sequence is synthesized)
tgccagtctgattccacagaactgaagtcgggacctggagttctgctcattcgctcatctactcagtgactttcttagaccctccccagcactttgagggtgtcagtcactgctgcgtcc

SEQ ID NO: 371361 - DNA, 120 bp, Artificial Sequence
  ENSG00000141965_60 (sequence is synthesized)
tcagcacccacgccagggtctgtcccacgccaggtggcctgtaaatatgggctgagcaagcgaacagtgaacgagttgggaattcacatcctcctctgactacttggggcagcagcaggg

SEQ ID NO: 371362 - DNA, 120 bp, Artificial Sequence
  ENSG00000141965_61 (sequence is synthesized)
gacacaagcaggcccctatggctttgccagaccccgggtgccgccgcccccatggaattgcaggactgttatctgagcaacgtcgacgggggagaacacccctgcccgaggttaaagata

SEQ ID NO: 371363 - DNA, 120 bp, Artificial Sequence
  ENSG00000141965_62 (sequence is synthesized)
gcaccgctcgaatcacatcacaggccgaaaaggccagatgacccaccagggacattgaatccgtgtcccgagaggggtggggcgggggtgtggattcctgcggggagcttcgggactgga

SEQ ID NO: 371364 - DNA, 120 bp, Artificial Sequence
  ENSG00000141965_63 (sequence is synthesized)
aaaaacagagggtgctctgaccgagtgtttaccaaaacatgtattaggcaagacccgggccgaatgtgggtggcaccgcccctgtgctgggccaggagaatgtgcccgcaccggtcccag

SEQ ID NO: 371365 - DNA, 120 bp, Artificial Sequence
  ENSG00000141965_64 (sequence is synthesized)
atcctgtttccccagtgggttgtacaagacaccttgaacttctgcatgaactgggacattcagaattccctggagcaaccccctccctccaccctgtgccttgatatctcctattaaagc

SEQ ID NO: 371366 - DNA, 120 bp, Artificial Sequence
  ENSG00000141965_65 (sequence is synthesized)
ttgtgtttgaatgtctgttaatagacatgatttaattattgatattaattcaaatgtattaatttgaattattaacttattaatcatttgatgtcgattaaagcaatgatcttgatccaa

SEQ ID NO: 371367 - DNA, 120 bp, Artificial Sequence
  ENSG00000141968_0 (sequence is synthesized)
agcactagctgtcgctccacaggcgagcagggcaggcgtgcgggcgggtgggtggtggaggctgcgagggtgcacggccggccctgggcaggcggtagccatggagctgtggcgccaatg

SEQ ID NO: 371368 - DNA, 120 bp, Artificial Sequence
  ENSG00000141968_1 (sequence is synthesized)
cacccactggctcatccagtgccgggtgctgccgcccagccaccgcgtgacctgggatggggctcaggtgtgtgaactggcccaggccctccgggatggtgtccttctgtgtcagctgct

SEQ ID NO: 371369 - DNA, 120 bp, Artificial Sequence
  ENSG00000141968_2 (sequence is synthesized)
taacaacctgctaccccatgccatcaacctgcgtgaggtcaacctgcgcccccagatgtcccagttcctgtgccttaagaacattagaaccttcctgtccacctgctgtgagaagttcgg

SEQ ID NO: 371370 - DNA, 120 bp, Artificial Sequence
  ENSG00000141968_3 (sequence is synthesized)
cctcaagcggagcgagctcttcgaagcctttgacctcttcgatgtgcaggattttggcaaggtcatctacaccctgtctgctctgtcctggaccccgatcgcccagaacagggggatcat

SEQ ID NO: 371371 - DNA, 120 bp, Artificial Sequence
  ENSG00000141968_4 (sequence is synthesized)
gcccttccccaccgaggaggagagtgtaggtgatgaagacatctacagtggcctgtccgaccagatcgacgacacggtggaggaggatgaggacctgtatgactgcgtggagaatgagga

SEQ ID NO: 371372 - DNA, 120 bp, Artificial Sequence
  ENSG00000141968_5 (sequence is synthesized)
ggcggaaggcgacgagatctatgaggacctcatgcgctcggagcccgtgtccatgccgcccaagatgacagagtatgacaagcgctgctgctgcctgcgggagatccagcagacggagga

SEQ ID NO: 371373 - DNA, 120 bp, Artificial Sequence
  ENSG00000141968_6 (sequence is synthesized)
gaagtacactgacacgctgggctccatccagcagcatttcttgaagcccctgcaacggttcctgaaacctcaagacattgagatcatctttatcaacattgaggacctgcttcgtgttca

SEQ ID NO: 371374 - DNA, 120 bp, Artificial Sequence
  ENSG00000141968_7 (sequence is synthesized)
tactcacttcctaaaggagatgaaggaagccctgggcacccctggcgcagccaatctctaccaggtcttcatcaaatacaaggagaggttcctcgtctatggccgctactgcagccaggt

SEQ ID NO: 371375 - DNA, 120 bp, Artificial Sequence
  ENSG00000141968_8 (sequence is synthesized)
ggagtcagccagcaaacacctggaccgtgtggccgcagcccgggaggacgtgcagatgaagctggaggaatgttctcagagagccaacaacgggaggttcaccctgcgggacctgctgat

SEQ ID NO: 371376 - DNA, 120 bp, Artificial Sequence
  ENSG00000141968_9 (sequence is synthesized)
ggtgcctatgcagcgagttctcaaatatcacctccttctccaggagctggtgaaacacacgcaggaggcgatggagaaggagaacctgcggctggccctggatgccatgagggacctggc

SEQ ID NO: 371377 - DNA, 120 bp, Artificial Sequence
  ENSG00000141968_10 (sequence is synthesized)
tcagtgcgtgaacgaggtcaagcgagacaacgagacactgcgacagatcaccaatttccagctgtccattgagaacctggaccagtctctggctcactatggccggcccaagatcgacgg

SEQ ID NO: 371378 - DNA, 120 bp, Artificial Sequence
  ENSG00000141968_11 (sequence is synthesized)
ggaactcaagatcacctcggtggaacggcgctccaagatggacaggtatgccttcctgctcgacaaagctctactcatctgtaagcgcaggggagactcctatgacctcaaggactttgt

SEQ ID NO: 371379 - DNA, 120 bp, Artificial Sequence
  ENSG00000141968_12 (sequence is synthesized)
cttccaggttcgggatgactcttcaggagaccgagacaacaagaagtggagccacatgttcctcctgatcgaggaccaaggtgcccagggctatgagctgttcttcaagacaagagaatt

SEQ ID NO: 371380 - DNA, 120 bp, Artificial Sequence
  ENSG00000141968_13 (sequence is synthesized)
gaagaagaagtggatggagcagtttgagatggccatctccaacatctatccggagaatgccaccgccaacgggcatgacttccagatgttctcctttgaggagaccacatcctgcaaggc

SEQ ID NO: 371381 - DNA, 120 bp, Artificial Sequence
  ENSG00000141968_14 (sequence is synthesized)
ctgtcagatgctgcttagaggtaccttctatcagggctaccgctgccatcggtgccgggcatctgcacacaaggagtgtctggggagggtccctccatgtggccgacatgggcaagattt

SEQ ID NO: 371382 - DNA, 120 bp, Artificial Sequence
  ENSG00000141968_15 (sequence is synthesized)
cccaggaactatgaagaaggacaaactacatcgcagggctcaggacaaaaagaggaatgagctgggtctgcccaagatggaggtgtttcaggaatactacgggcttcctccaccccctgg

SEQ ID NO: 371383 - DNA, 120 bp, Artificial Sequence
  ENSG00000141968_16 (sequence is synthesized)
agccattggaccctttctacggctcaaccctggagacattgtggagctcacgaaggctgaggctgaacagaactggtgggagggcagaaatacatctactaatgaaattggctggtttcc

SEQ ID NO: 371384 - DNA, 120 bp, Artificial Sequence
  ENSG00000141968_17 (sequence is synthesized)
ttgtaacagggtgaagccctatgtccatggccctcctcaggacctgtctgttcatctctggtacgcaggccccatggagcgggcaggggcagagagcatcctggccaaccgctcggacgg

SEQ ID NO: 371385 - DNA, 120 bp, Artificial Sequence
  ENSG00000141968_18 (sequence is synthesized)
gactttcttggtgcggcagagggtgaaggatgcagcagaatttgccatcagcattaaatataacgtcgaggtcaagcacattaaaatcatgacagcagaaggactgtaccggatcacaga

SEQ ID NO: 371386 - DNA, 120 bp, Artificial Sequence
  ENSG00000141968_19 (sequence is synthesized)
gaaaaaggctttccgggggcttacggagctggtggagttttaccagcagaactctctaaaggattgcttcaagtctctggacaccaccttgcagttccccttcaaggagcctgaaaagag

SEQ ID NO: 371387 - DNA, 120 bp, Artificial Sequence
  ENSG00000141968_20 (sequence is synthesized)
aaccatcagcaggccagcagtgggaagcacaaagtattttggcacagccaaagcccgctatgacttctgcgcccgagaccgatcagagctgtcgctcaaggagggtgacatcatcaagat

SEQ ID NO: 371388 - DNA, 120 bp, Artificial Sequence
  ENSG00000141968_21 (sequence is synthesized)
ccttaacaagaagggacagcaaggctggtggcgaggggagatctatggccgggttggctggttccctgccaactacgtggaggaagattattctgaatactgctgagccctggtgccttg

SEQ ID NO: 371389 - DNA, 120 bp, Artificial Sequence
  ENSG00000141968_22 (sequence is synthesized)
gcagagagacgagaaactccaggctctgagcccggcgtgggcaggcagcggagccaggggctgtgacagctcccggcgggtggagactttgggatggactggaggaggccagcgtccagc

SEQ ID NO: 371390 - DNA, 120 bp, Artificial Sequence
  ENSG00000141968_23 (sequence is synthesized)
tggcggtgctcccgggatgtgccctgacatggttaatttataacaccccgatttcctcttgggtcccctcaagcagacggggctcaagggggttacatttaataaaaggatgaagatgga

SEQ ID NO: 371391 - DNA, 120 bp, Artificial Sequence
  ENSG00000141968_24 (sequence is synthesized)
tgcggctggccctggatgccatgagggtgagtgggtgtagggtgctggtgactcacctgctgcagacaccctcctggtaggggctgatcctctagccgggattaggtaggagcctgggtc

SEQ ID NO: 371392 - DNA, 120 bp, Artificial Sequence
  ENSG00000141968_25 (sequence is synthesized)
aatagttttacaaagagtatccccaccagcaatgagtgaaaattccagtttctccacgtccttgtcaacacttagtattgccagtctaaaaagaaaaattttagccattctcgtgggtgg

SEQ ID NO: 371393 - DNA, 89 bp, Artificial Sequence
  ENSG00000141968_26 (sequence is synthesized)
tgctgcagtgagctatgattgtgctaccactgtactccagactggacaaaagattcctgtgccttaagaacattagaaccttcctgtcc

SEQ ID NO: 371394 - DNA, 120 bp, Artificial Sequence
  ENSG00000141968_27 (sequence is synthesized)
agcagtacgatggaggagctggtgagctagcattgtttggaaggccctccccgcagggagaaggggaggggcccaggtgacgtctgacgtcttggttctctcaggagctggtgaaacaca

SEQ ID NO: 371395 - DNA, 120 bp, Artificial Sequence
  ENSG00000141968_28 (sequence is synthesized)
cgctcctccccaggccctgggggcagcagggaggacactgagttgcagatggtccactttctgctgcagcccagccagagatccaccaaaggactagggagggaggtactagccagccaa

SEQ ID NO: 371396 - DNA, 120 bp, Artificial Sequence
  ENSG00000141968_29 (sequence is synthesized)
gcagaggaaatggagaagaacagaaatgggctggccctgggtctgggctgacccctgatatcagggtgaagtcctgaccctgaactgagctctgatctcacactcaaccccagccctggg

SEQ ID NO: 371397 - DNA, 120 bp, Artificial Sequence
  ENSG00000141968_30 (sequence is synthesized)
ctgagccctagcactgattgtaccccaagtcgggctgagctcccacttctcactgaaccccaattccaaccaacccctgatcccaggctgaacttgatcttgaactgaacttcaacctgg

SEQ ID NO: 371398 - DNA, 120 bp, Artificial Sequence
  ENSG00000141971_0 (sequence is synthesized)
gtagttcggtcgcgagcgctgccgtcgggaggcgctccgaggttcgaggctgtgccccgcgaccccgccttcggcgctcggctcgcaggatggatcccgtacccgggacagactcggcgc

SEQ ID NO: 371399 - DNA, 120 bp, Artificial Sequence
  ENSG00000141971_1 (sequence is synthesized)
cgctggctggcctggcctggtcgtcggcctctgcacccccgccgcgggggttcagcgcgatctcctgcaccgtcgagggggcacccgccagctttggcaagagcttcgcgcagaaatctg

SEQ ID NO: 371400 - DNA, 120 bp, Artificial Sequence
  ENSG00000141971_2 (sequence is synthesized)
gctacttcctgtgccttagttctctgggcagcctagagaacccgcaggagaacgtggtggccgatatccagatcgtggtggacaagagccccctgccgctgggcttctcccccgtctgcg

SEQ ID NO: 371401 - DNA, 120 bp, Artificial Sequence
  ENSG00000141971_3 (sequence is synthesized)
accccatggattccaaggcctctgtgtccaagaagaaacgcatgtgtgtgaagctgttgcccctgggagccacggacacggctgtgtttgatgtccggctgagtgggaagaccaagacag

SEQ ID NO: 371402 - DNA, 120 bp, Artificial Sequence
  ENSG00000141971_4 (sequence is synthesized)
tgcctggataccttcgaataggggacatgggcggctttgccatctggtgcaagaaggccaaggccccgaggccagtgcccaagccccgaggtctcagccgggacatgcagggcctctctc

SEQ ID NO: 371403 - DNA, 120 bp, Artificial Sequence
  ENSG00000141971_5 (sequence is synthesized)
tcaaggctgggctctcgggcatccactctgcggaggaatgactccatctacgaggcctccagcctctatggcatctcagccatggatggggttcccttcacactccacccacgatttgag

SEQ ID NO: 371404 - DNA, 120 bp, Artificial Sequence
  ENSG00000141971_6 (sequence is synthesized)
ggcaagagctgcagccccctggccttctctgcttttggggacctgaccatcaagtctctggcggacattgaggaggagtataactacggcttcgtggtggagaagaccgcggctgcccgc

SEQ ID NO: 371405 - DNA, 120 bp, Artificial Sequence
  ENSG00000141971_7 (sequence is synthesized)
ctgccccccagcgtctcatagtccctcacccttccgcggaaagagcccccttactccacctccccgccagcctggggccaccccccctcactgcatcctggggccacccccactcactgc

SEQ ID NO: 371406 - DNA, 120 bp, Artificial Sequence
  ENSG00000141971_8 (sequence is synthesized)
atcctgggaaccttcgccctgcaaggcgtttgctatcttcagccactgggcggagctgcagccctggaggagggggcgggtcgaggctgcgtggtgatggggtctccgcccccacgccct

SEQ ID NO: 371407 - DNA, 120 bp, Artificial Sequence
  ENSG00000141971_9 (sequence is synthesized)
gccgggcagggctggagctggacagaagccagtgcctttaagtcatttgtgtcaaaaccctctggggtccggaggctgtgcgggtgtcctcctggcaataaacactacccggttctcgcc

SEQ ID NO: 371408 - DNA, 120 bp, Artificial Sequence
  ENSG00000141971_10 (sequence is synthesized)
gccccaggaccagccttgccctgcgcctcacctgattctggctgagataggaagatgctcggtaactcagctccccttccaggcagtgcagacgagggggcggttttcagccgggcctcc

SEQ ID NO: 371409 - DNA, 120 bp, Artificial Sequence
  ENSG00000141971_11 (sequence is synthesized)
caagttggaaccttatcatttccaaggttcaagtttgaggtatcaggaggaagagcagggaccagcctagggtgaggttgctgaggtgcccagggtgcaattttttatttatttttattt

SEQ ID NO: 371410 - DNA, 120 bp, Artificial Sequence
  ENSG00000141971_12 (sequence is synthesized)
aggttttcagtttcagtttcccagaaaggaggtgtctctgtggtgacgagcagggcttcatccagtgcctctgtccccaccgaggggactatgggagacatggagggtgtgtgagcaaca

SEQ ID NO: 371411 - DNA, 120 bp, Artificial Sequence
  ENSG00000141971_13 (sequence is synthesized)
ggtgagactggagccagctgaaaactgggagaccgacccagccaacaaacaatgtcggtctctgtcttggcacctgcaggaaacaagctcctacttccagaaaaagtgctcctgggactc

SEQ ID NO: 371412 - DNA, 120 bp, Artificial Sequence
  ENSG00000141971_14 (sequence is synthesized)
ttcctctgcctggggcactttttctctcctttttgtagctcattctccgtcctccgtcagatgtcaccttcacccttccctacccctcctcttctgggcccacaaccctagtgcagccct

SEQ ID NO: 371413 - DNA, 120 bp, Artificial Sequence
  ENSG00000141971_15 (sequence is synthesized)
ttttttccgccatcatcgctcacgcgcgcaaccctggcgacgcgtggtggcgaggctccgcctccccacgccattggccagcagctcctcgggcacgcgtatactgcgcttccgggcaat

SEQ ID NO: 371414 - DNA, 120 bp, Artificial Sequence
  ENSG00000141971_16 (sequence is synthesized)
ctccgccccccccccccgcatggccttctgggagttgtagttcggtcgcgagcgctgccgtcgggaggcgctccgaggttcgaggctgtgccccgcgaccccgccttcggcgctcggctc

SEQ ID NO: 371415 - DNA, 120 bp, Artificial Sequence
  ENSG00000141971_17 (sequence is synthesized)
gggggaggagggacgacgggcgcgcggtatctgagcctcggctgccccctggcacacggggtgatgacagggttggctgaggactcagagccctgccctagggtggaccgacatcccctg

SEQ ID NO: 371416 - DNA, 120 bp, Artificial Sequence
  ENSG00000141971_18 (sequence is synthesized)
tcctgattcaaaatgtgtgatatgattggcacagcctgcatcctcgagttaagtgttcagtccacgccacctgtttcactactgttgtgctacttgtgtctttttacaccatagccaagc

SEQ ID NO: 371417 - DNA, 120 bp, Artificial Sequence
  ENSG00000141971_19 (sequence is synthesized)
aaaaccactgcgcagttttctttttcatttccaggctttgcacacgccgcttcctctgcctggggcactttttctctcctttttgtagctcattctccgtcctccgtcagatgtcacctt

SEQ ID NO: 371418 - DNA, 120 bp, Artificial Sequence
  ENSG00000141971_20 (sequence is synthesized)
ccttccctgccctcccaactcatgatctcaccaatctgaccctcaaggacacccctgaggtctcctgttccttcttctaccttctgagcctcagattctgcatgttaaaaccgggacata

SEQ ID NO: 371419 - DNA, 120 bp, Artificial Sequence
  ENSG00000141971_21 (sequence is synthesized)
cctcagattctgcatgttaaaaccgggacatatatatcatcttgtaggactgtcattaggagtcagtgacttggtgtctaaagtagacataacaggactgggcgcggtggctcacgcctg

SEQ ID NO: 371420 - DNA, 120 bp, Artificial Sequence
  ENSG00000141977_0 (sequence is synthesized)
agctgggagcctttggggtgcatccccaagtctgggctgtggttcacaccatgggcaacaagcagacagtcttcacacacgagcagctggaagcgtatcaggactgcacatttttcacaa

SEQ ID NO: 371421 - DNA, 120 bp, Artificial Sequence
  ENSG00000141977_1 (sequence is synthesized)
ggaaggagatcatgaggctcttctatcgctaccaggacctggccccacagctcgtgcccctcgactataccacctgccccgatgtgaaggtgccctacgagctcattggcagcatgcccg

SEQ ID NO: 371422 - DNA, 120 bp, Artificial Sequence
  ENSG00000141977_2 (sequence is synthesized)
tggctccccgcgacctcaaggcttactatgcttttaaaatttatgattttaacaacgacgactacatttgtgcgtgggacctggagcagacggtgaccaaactgacgcggggggggctga

SEQ ID NO: 371423 - DNA, 120 bp, Artificial Sequence
  ENSG00000141977_3 (sequence is synthesized)
gtgccgaggaggtgagcctggtatgtgagaaggtgctggatgaggctgatggagaccatgatgggcggctgtccctggaagatttccagaacatgatcctccgggcaccagacttcctca

SEQ ID NO: 371424 - DNA, 120 bp, Artificial Sequence
  ENSG00000141977_4 (sequence is synthesized)
gcaccttccacatccgaatctgatggcaccacagaggagccgagctataggagggcggggtgacccctcacccgctgtggactctggtttctgagaataaacacaagtcactgagtcaca

SEQ ID NO: 371425 - DNA, 120 bp, Artificial Sequence
  ENSG00000141977_5 (sequence is synthesized)
atgggcaacaagcagacagtcttcacacacgagcagctggaagcgtatcaggacaaccccttccgccagaggattgcccaggtattctctgaggatggggatggccacatgaccctggac

SEQ ID NO: 371426 - DNA, 120 bp, Artificial Sequence
  ENSG00000141977_6 (sequence is synthesized)
atgggcaacaagcagacagtcttcacacacgagcagctggaagcgtatcaggactgcacatttttcacaaggaaggagatcatgagattttaacaacgacgactacatttgtgcgtggga

SEQ ID NO: 371427 - DNA, 80 bp, Artificial Sequence
  ENSG00000141985_0 (sequence is synthesized)
gcggagctggcaagcgggtggcggaggcggcgccgacggggactgctgaggcgcgcagagggtcggcggcgcccgggagc

SEQ ID NO: 371428 - DNA, 120 bp, Artificial Sequence
  ENSG00000141985_1 (sequence is synthesized)
gcgcccgggagcctgtcgctggcgcggtccgggcgggaggctcggcggcgggcggcagcatgtcggtggcggggctgaagaagcagttctacaaggcgagccagctggtcagtgagaagg

SEQ ID NO: 371429 - DNA, 120 bp, Artificial Sequence
  ENSG00000141985_2 (sequence is synthesized)
tcggaggggccgaggggaccaagctggatgatgacttcaaagagatggagaagaaggtggatgtcaccagcaaggcggtgacagaagtgctggccaggaccatcgagtacctgcagccca

SEQ ID NO: 371430 - DNA, 120 bp, Artificial Sequence
  ENSG00000141985_3 (sequence is synthesized)
acccagcctcgcgggctaagctgaccatgctcaacacggtgtccaagatccggggccaggtgaagaaccccggctacccgcagtcggaggggcttctgggcgagtgcatgatccgccacg

SEQ ID NO: 371431 - DNA, 120 bp, Artificial Sequence
  ENSG00000141985_4 (sequence is synthesized)
ggaaggagctgggcggcgagtccaactttggtgacgcattgctggatgccggcgagtccatgaagcgcctggcagaggtgaaggactccctggacatcgaggtcaagcagaacttcattg

SEQ ID NO: 371432 - DNA, 120 bp, Artificial Sequence
  ENSG00000141985_5 (sequence is synthesized)
accccctccagaacctgtgcgagaaagacctgaaggagatccagcaccacctgaagaaactggagggccgccgcctggactttgactacaagaagaagcggcagggcaagatccccgatg

SEQ ID NO: 371433 - DNA, 120 bp, Artificial Sequence
  ENSG00000141985_6 (sequence is synthesized)
aggagctacgccaggcgctggagaagttcgaggagtccaaggaggtggcagaaaccagcatgcacaacctcctggagactgacatcgagcaggtgagtcagctctcggccctggtggatg

SEQ ID NO: 371434 - DNA, 120 bp, Artificial Sequence
  ENSG00000141985_7 (sequence is synthesized)
cacagctggactaccaccggcaggccgtgcagatcctggacgagctggcggagaagctcaagcgcaggatgcgggaagcttcctcacgccctaagcgggagtataagcccaagccccggg

SEQ ID NO: 371435 - DNA, 120 bp, Artificial Sequence
  ENSG00000141985_8 (sequence is synthesized)
agccctttgaccttggagagcctgagcagtccaacgggggcttcccctgcaccacagcccccaagatcgcagcttcatcgtctttccgatcttccgacaagcccatccggacccctagcc

SEQ ID NO: 371436 - DNA, 120 bp, Artificial Sequence
  ENSG00000141985_9 (sequence is synthesized)
ggagcatgccgcccctggaccagccgagctgcaaggcgctgtacgacttcgagcccgagaacgacggggagctgggcttccatgagggcgacgtcatcacgctgaccaaccagatcgatg

SEQ ID NO: 371437 - DNA, 120 bp, Artificial Sequence
  ENSG00000141985_10 (sequence is synthesized)
ccacactggccggcaccccctgctgggtctcctgcattccacggagcccctgctgccagggcggtgtctgagcctgccggcgccacctgggccccggcccttgaggtactccctgagcag

SEQ ID NO: 371438 - DNA, 120 bp, Artificial Sequence
  ENSG00000141985_11 (sequence is synthesized)
gaccccacacttgggtgggggggcttatctgggtgggtggggatgcctgtttacactagcgctgactcccaacggtgacggctcccttccccactccatggcgccagcctcctcccccgc

SEQ ID NO: 371439 - DNA, 120 bp, Artificial Sequence
  ENSG00000141985_12 (sequence is synthesized)
tccccaacttctcgcccagctggccgaggcggggcaacactaaggtgctcttagaaacactaatgttcctctggggcagcccccacctccgtcctgacccgacgggggcccggcccactg

SEQ ID NO: 371440 - DNA, 120 bp, Artificial Sequence
  ENSG00000141985_13 (sequence is synthesized)
cctaccctcgagtcccgcagccttaacaggatgggatcgagggtccccatggggtggctcagagataggaccctggttttaaatccctcccagcctggtgctggtgatgggccctggccc

SEQ ID NO: 371441 - DNA, 120 bp, Artificial Sequence
  ENSG00000141985_14 (sequence is synthesized)
tactccagggccaatgcacccccgcctcacacacgcactccttctcctcaaggccagggcagagggcctcaccgcctcccgggcctgctgtcagcttgcagcccggggacagaggccagc

SEQ ID NO: 371442 - DNA, 120 bp, Artificial Sequence
  ENSG00000141985_15 (sequence is synthesized)
tgggatctgcctgaggacagagaacatggtctcctgcagggccctgcctcccaagccccgccctcagaaagccaagtaccttttcagctttttaactgcccccatcccaacccagggagg

SEQ ID NO: 371443 - DNA, 120 bp, Artificial Sequence
  ENSG00000141985_16 (sequence is synthesized)
cctgtgtcactctggcacaagctgccaccaccagccacccacacccaccccagcacacctcacacgggaccacagccgcgctgccgagggccaagcacaaaggttccagtgagcgcatgt

SEQ ID NO: 371444 - DNA, 120 bp, Artificial Sequence
  ENSG00000141985_17 (sequence is synthesized)
cccagcccctggtggccaggctccccttgctgagccgctgccacttcaccctgtgggaagtggccccagccatctcctctagaccaaggcaggcagccccgacatctgcttcctctatcg

SEQ ID NO: 371445 - DNA, 120 bp, Artificial Sequence
  ENSG00000141985_18 (sequence is synthesized)
cccaatgcaaaatcgatgaaatggggagttctctgggccaggccacattcacattcccctccccctgtggtccagtgaagcctccggaccccaggctctgctctgccctgccctgcaccc

SEQ ID NO: 371446 - DNA, 120 bp, Artificial Sequence
  ENSG00000141985_19 (sequence is synthesized)
ccctcgtcagaagtacatgaggggcgcagagatgagcacacagctttgggcacggtccagggcaaactgaaatgtacgcctgaattttgtaaacagaagtattaaatgtctctttctaca

SEQ ID NO: 371447 - DNA, 120 bp, Artificial Sequence
  ENSG00000141985_20 (sequence is synthesized)
ctggaaagcggatgaaagaatgtggtggccagggctgcagcgggtttccctctctcccttctctcccctcctctccctatctctcccccctcttcttcctctctttctgttctcactctt

SEQ ID NO: 371448 - DNA, 120 bp, Artificial Sequence
  ENSG00000141985_21 (sequence is synthesized)
cccttgtctttctctctgtctctcccttcttttgccctctcacctcttcttcctctctctctgtctgtcctctccacaccttcttcctgtctgtctgcctgcctgtctctctctttctct

SEQ ID NO: 371449 - DNA, 120 bp, Artificial Sequence
  ENSG00000141985_22 (sequence is synthesized)
atctctcgccttttgcagggctggatttggcaagcacttttcctgagcactgcagcttggtgcgtttctgctcatttcctgttaagcagtacccagggctccctgaactcaggctctggg

SEQ ID NO: 371450 - DNA, 120 bp, Artificial Sequence
  ENSG00000141985_23 (sequence is synthesized)
aggacggccctgtcttccttttcctctccactcctagaaaaacctgctgaccaggccctgagagcagggtcacggggagacctcctcaccacagcaggaagatagacggacagtttcctc

SEQ ID NO: 371451 - DNA, 120 bp, Artificial Sequence
  ENSG00000141985_24 (sequence is synthesized)
atctgggcttcttttttaggggggagctagatccaccataaacattttatgtgtatatgtacaccgtttatcatatacatattgtgacaactgtatatatatatatatattttgagacag

SEQ ID NO: 371452 - DNA, 120 bp, Artificial Sequence
  ENSG00000141985_25 (sequence is synthesized)
ccactgtacctggcacaggtaaatactcattcagcctgacttggacctcagtgatggctccagaccgtggctttgaagaatgggcagaatttggatgtaggaagaagcaaggaaaggagg

SEQ ID NO: 371453 - DNA, 120 bp, Artificial Sequence
  ENSG00000141994_0 (sequence is synthesized)
agagcggatgtgaggggcgccgatggcggagggaacggcggaggctcctctagagaatggtggtggtggcgactcgggagccggagctttggaacgaggagtggcgcccattaagcgtca

SEQ ID NO: 371454 - DNA, 120 bp, Artificial Sequence
  ENSG00000141994_1 (sequence is synthesized)
atacctcaccaccaaggagcagtttcaccaattcctggaagccaaagggcaggagaagacttgccgggaaaccgaggtaggagaccctgctggcaatgagctggctgagcctgaggctaa

SEQ ID NO: 371455 - DNA, 120 bp, Artificial Sequence
  ENSG00000141994_2 (sequence is synthesized)
gcggatccgactggaggatggacagacggcggacgggcagacggaggaggcagcagagcccggggagcagctacagactcagaagagggcccggggacaaaacaagggccggccccatgt

SEQ ID NO: 371456 - DNA, 120 bp, Artificial Sequence
  ENSG00000141994_3 (sequence is synthesized)
gaagcccacgaactacgacaagaacaggctgtgtccctccctaatccaggagtcggctgctaagtgtttcttcggtgatcgctgccgctttctgcacgacgtggggcgctacctggagac

SEQ ID NO: 371457 - DNA, 120 bp, Artificial Sequence
  ENSG00000141994_4 (sequence is synthesized)
caagccggccgacctgggcccccgctgcgtgctcttcgagaccttcggccggtgcccctacggcgtgacctgccgcttcgctggggcccacctgaggcccgagggacagaacctggtgca

SEQ ID NO: 371458 - DNA, 120 bp, Artificial Sequence
  ENSG00000141994_5 (sequence is synthesized)
ggaggagttggcggcccgcgggacccagcccccgtccatccgcaacggcctggacaaagccctgcagcagcagctgcggaagcgcgaggtccgcttcgagcgagctgagcaggccctgcg

SEQ ID NO: 371459 - DNA, 120 bp, Artificial Sequence
  ENSG00000141994_6 (sequence is synthesized)
ccggttcagccagggccccacacccgctgccgctgtccccgagggcacggcagccgagggcgctcccaggcaggaaaactgtggtgcccagcaggtccccgcagggccgggcactagcac

SEQ ID NO: 371460 - DNA, 120 bp, Artificial Sequence
  ENSG00000141994_7 (sequence is synthesized)
ccctcccagcagccccgtgcggacctgcgggcccctgacggatgaggacgtggtcaggctgcggccctgtgagaagaagcggctggacatccgtggcaaactttacctggcccccctcac

SEQ ID NO: 371461 - DNA, 120 bp, Artificial Sequence
  ENSG00000141994_8 (sequence is synthesized)
ctcaaacgccaccagtgtgaggacatctttggcgtccagctggagggcgccttccccgacaccatgaccaagtgtgccgagctgctgagccgcaccgtggaggtggactttgtggacatc

SEQ ID NO: 371462 - DNA, 120 bp, Artificial Sequence
  ENSG00000141994_9 (sequence is synthesized)
aacgtcggctgccccatcgacctcgtgtacaagaagggtgggggctgtgccctcatgaatcgctccaccaagttccagcagatcgtccgtggcatgaaccaggtgctggatgtgccgctg

SEQ ID NO: 371463 - DNA, 120 bp, Artificial Sequence
  ENSG00000141994_10 (sequence is synthesized)
actgtgaagatccgcacaggcgtccaggagcgtgtgaacctggcgcaccgcctgctgcccgagctgcgggactggggcgtggcactcgtcacgctccacggccgctctcgggagcagcgc

SEQ ID NO: 371464 - DNA, 120 bp, Artificial Sequence
  ENSG00000141994_11 (sequence is synthesized)
tacaccaagctagccgactggcagtacatcgaggagtgcgtgcaggccgccagccccatgcccctgttcggaaatggggacatcttgtcatttgaggatgccaaccgcgccatgcagact

SEQ ID NO: 371465 - DNA, 120 bp, Artificial Sequence
  ENSG00000141994_12 (sequence is synthesized)
ggtgtcaccgggatcatgattgcccgtggcgccctgctcaagccgtggctcttcacggagatcaaggagcagcggcactgggacatctcgtcgtccgagcgcctggacatcctgcgggac

SEQ ID NO: 371466 - DNA, 120 bp, Artificial Sequence
  ENSG00000141994_13 (sequence is synthesized)
ttcaccaactacggcctggagcactggggctcggacacgcagggcgtggagaagacccggcgctttctgctcgagtggctgtccttcctgtgccggtacgtgcccgtggggctgctggag

SEQ ID NO: 371467 - DNA, 120 bp, Artificial Sequence
  ENSG00000141994_14 (sequence is synthesized)
cggctcccacagaggatcaacgagcggccgccctactacctgggccgcgactacctggagacgctgatggccagccagaaggcagccgactggatccgcatcagcgagatgctccttggg

SEQ ID NO: 371468 - DNA, 120 bp, Artificial Sequence
  ENSG00000141994_15 (sequence is synthesized)
ccagtgccccccagcttcgccttcttgccgaagcacaaggccaacgcgtacaagtagcctcaggctttcccaggggcaccctggggcgaggagagtacaataaattttattcttttaaaa

SEQ ID NO: 371469 - DNA, 120 bp, Artificial Sequence
  ENSG00000141994_16 (sequence is synthesized)
cctgggcgacagagccagactccgtctcagaaaaaacaaaagaaagtcctgtgctttgaaggttgtgtgcatgcagctgggaggcttactaggcttgtaggttttgtggtctgggctccg

SEQ ID NO: 371470 - DNA, 120 bp, Artificial Sequence
  ENSG00000141994_17 (sequence is synthesized)
cctaatccaggcaagtgcggccacgtgagcattcctgccggggcaggcaggagcagggtgtgtttcctggcagcgggtaattgttagaaagctcctgggccttcagcaacgagcagtgag

SEQ ID NO: 371471 - DNA, 120 bp, Artificial Sequence
  ENSG00000141994_18 (sequence is synthesized)
ggctgagggcgagaagccaccggctcttcattccgggccgttcttccgcctgcagggtggtcagcggaggtacctgagatcgtgcacgttggggcctgtcacatgcgcgaaggacaccac

SEQ ID NO: 371472 - DNA, 120 bp, Artificial Sequence
  ENSG00000141994_19 (sequence is synthesized)
tcgccggggcaggagggaagctgaagggccttttccggcacccatagcgcggtccgagctgtgcatgccgggagattaggcagcggctgagggcgagaagccaccggctcttcattccgg

SEQ ID NO: 371473 - DNA, 120 bp, Artificial Sequence
  ENSG00000141994_20 (sequence is synthesized)
ctccatgggccctgccccaagctgggtgctgctggtgcccagagaggccttgacccccaagaaggtagcgggttgaggacccggggggcctcagcctgtgtgggtgtggatcagggcagc

SEQ ID NO: 371474 - DNA, 120 bp, Artificial Sequence
  ENSG00000141994_21 (sequence is synthesized)
ctgcctggaggaggcggcctcaaagctgttaggggggtgttgctggaagaggcaaaggcctggcccagaatcctccctcccatggtgatgaccatgtctgccaacgtctgcccctgcttg

SEQ ID NO: 371475 - DNA, 120 bp, Artificial Sequence
  ENSG00000141994_22 (sequence is synthesized)
gggtcttgggacgcctcgggcattggggcctcgcggtcgaccccgcgtcccttcctaatggctcctctcctcccatccctccctcttcacctccacacctccctctgtctccgcctgtgt

SEQ ID NO: 371476 - DNA, 120 bp, Artificial Sequence
  ENSG00000141994_23 (sequence is synthesized)
ctctctctgtctctctcagcctggctctcttggtctcttcctctctgcgtctcactctctgcctcctaccctgcgtggcggcttctcccccagctccacggccgctctcgggagcagcgc

SEQ ID NO: 371477 - DNA, 120 bp, Artificial Sequence
  ENSG00000142002_0 (sequence is synthesized)
aggccgccgcctgggtcgctcaacttccgggtcaaaggtgcctgagccggcgggtcccctgtgtccgccgcggctgtcgtcccccgctcccgccacttccggggtcgcagtcccgggcat

SEQ ID NO: 371478 - DNA, 120 bp, Artificial Sequence
  ENSG00000142002_1 (sequence is synthesized)
ggagccgcgaccgtgaggcgccgctggacccgggacgacctgcccagtccggccgccgccccacgtcccggtctgtgtcccacgcctgcagctggaatggaggctctctggaccctttag

SEQ ID NO: 371479 - DNA, 120 bp, Artificial Sequence
  ENSG00000142002_2 (sequence is synthesized)
aaggcacccctgccctcctgaggtcagctgagcggttaatgcggaaggttaagaaactgcgcctggacaaggagaacaccggaagttggagaagcttctcgctgaattccgagggggctg

SEQ ID NO: 371480 - DNA, 120 bp, Artificial Sequence
  ENSG00000142002_3 (sequence is synthesized)
agaggatggccaccaccgggaccccaacggccgaccgaggcgacgcagccgccacagatgacccggccgcccgcttccaggtgcagaagcactcgtgggacgggctccggagcatcatcc

SEQ ID NO: 371481 - DNA, 120 bp, Artificial Sequence
  ENSG00000142002_4 (sequence is synthesized)
acggcagccgcaagtactcgggcctcattgtcaacaaggcgccccacgacttccagtttgtgcagaagacggatgagtctgggccccactcccaccgcctctactacctgggaatgccat

SEQ ID NO: 371482 - DNA, 120 bp, Artificial Sequence
  ENSG00000142002_5 (sequence is synthesized)
atggcagccgagagaactccctcctctactctgagattcccaagaaggtccggaaagaggctctgctgctcctgtcctggaagcagatgctggatcatttccaggccacgccccaccatg

SEQ ID NO: 371483 - DNA, 120 bp, Artificial Sequence
  ENSG00000142002_6 (sequence is synthesized)
gggtctactctcgggaggaggagctgctgagggagcggaaacgcctgggggtcttcggcatcacctcctacgacttccacagcgagagtggcctcttcctcttccaggccagcaacagcc

SEQ ID NO: 371484 - DNA, 120 bp, Artificial Sequence
  ENSG00000142002_7 (sequence is synthesized)
tcttccactgccgcgacggcggcaagaacggcttcatggtgtcccctatgaaaccgctggaaatcaagacccagtgctcagggccccggatggaccccaaaatctgccctgccgaccctg

SEQ ID NO: 371485 - DNA, 120 bp, Artificial Sequence
  ENSG00000142002_8 (sequence is synthesized)
ccttcttctccttcatcaataacagcgacctgtgggtggccaacatcgagacaggcgaggagcggcggctgaccttctgccaccaaggtttatccaatgtcctggatgaccccaagtctg

SEQ ID NO: 371486 - DNA, 120 bp, Artificial Sequence
  ENSG00000142002_9 (sequence is synthesized)
cgggtgtggccaccttcgtcatacaggaagagttcgaccgcttcactgggtactggtggtgccccacagcctcctgggaaggttcagagggcctcaagacgctgcgaatcctgtatgagg

SEQ ID NO: 371487 - DNA, 120 bp, Artificial Sequence
  ENSG00000142002_10 (sequence is synthesized)
aagtcgatgagtccgaggtggaggtcattcacgtcccctctcctgcgctagaagaaaggaagacggactcgtatcggtaccccaggacaggcagcaagaatcccaagattgccttgaaac

SEQ ID NO: 371488 - DNA, 120 bp, Artificial Sequence
  ENSG00000142002_11 (sequence is synthesized)
tggctgagttccagactgacagccagggcaagatcgtctcgacccaggagaaggagctggtgcagcccttcagctcgctgttcccgaaggtggagtacatcgccagggccgggtggaccc

SEQ ID NO: 371489 - DNA, 120 bp, Artificial Sequence
  ENSG00000142002_12 (sequence is synthesized)
gggatggcaaatacgcctgggccatgttcctggaccggccccagcagtggctccagctcgtcctcctccccccggccctgttcatcccgagcacagagaatgaggagcagcggctagcct

SEQ ID NO: 371490 - DNA, 120 bp, Artificial Sequence
  ENSG00000142002_13 (sequence is synthesized)
ctgccagagctgtccccaggaatgtccagccgtatgtggtgtacgaggaggtcaccaacgtctggatcaatgttcatgacatcttctatcccttcccccaatcagagggagaggacgagc

SEQ ID NO: 371491 - DNA, 120 bp, Artificial Sequence
  ENSG00000142002_14 (sequence is synthesized)
tctgctttctccgcgccaatgaatgcaagaccggcttctgccatttgtacaaagtcaccgccgttttaaaatcccagggctacgattggagtgagcccttcagccccggggaagatgaat

SEQ ID NO: 371492 - DNA, 120 bp, Artificial Sequence
  ENSG00000142002_15 (sequence is synthesized)
ttaagtgccccattaaggaagagattgctctgaccagcggtgaatgggaggttttggcgaggcacggctccaagatctgggtcaatgaggagaccaagctggtgtacttccagggcacca

SEQ ID NO: 371493 - DNA, 120 bp, Artificial Sequence
  ENSG00000142002_16 (sequence is synthesized)
aggacacgccgctggagcaccacctctacgtggtcagctatgaggcggccggcgagatcgtacgcctcaccacgcccggcttctcccatagctgctccatgagccagaacttcgacatgt

SEQ ID NO: 371494 - DNA, 120 bp, Artificial Sequence
  ENSG00000142002_17 (sequence is synthesized)
ttctgggctagcatgatggaggcagccagctgccccccggattatgttcctccagagatcttccatttccacacgcgctcggatgtgcggctctacggcatgatctacaagccccacgcc

SEQ ID NO: 371495 - DNA, 120 bp, Artificial Sequence
  ENSG00000142002_18 (sequence is synthesized)
ttgcagccagggaagaagcaccccaccgtcctctttgtatatggaggcccccaggtgcagctggtgaataactccttcaaaggcatcaagtacttgcggctcaacacactggcctccctg

SEQ ID NO: 371496 - DNA, 120 bp, Artificial Sequence
  ENSG00000142002_19 (sequence is synthesized)
ggctacgccgtggttgtgattgacggcaggggctcctgtcagcgagggcttcggttcgaaggggccctgaaaaaccaaatgggccaggtggagatcgaggaccaggtggagggcctgcag

SEQ ID NO: 371497 - DNA, 120 bp, Artificial Sequence
  ENSG00000142002_20 (sequence is synthesized)
ttcgtggccgagaagtatggcttcatcgacctgagccgagttgccatccatggctggtcctacgggggcttcctctcgctcatggggctaatccacaagccccaggtgttcaaggtggcc

SEQ ID NO: 371498 - DNA, 120 bp, Artificial Sequence
  ENSG00000142002_21 (sequence is synthesized)
atcgcgggtgccccggtcaccgtctggatggcctacgacacagggtacactgagcgctacatggacgtccctgagaacaaccagcacggctatgaggcgggttccgtggccctgcacgtg

SEQ ID NO: 371499 - DNA, 120 bp, Artificial Sequence
  ENSG00000142002_22 (sequence is synthesized)
gagaagctgcccaatgagcccaaccgcttgcttatcctccacggcttcctggacgaaaacgtgcactttttccacacaaacttcctcgtctcccaactgatccgagcagggaaaccttac

SEQ ID NO: 371500 - DNA, 120 bp, Artificial Sequence
  ENSG00000142002_23 (sequence is synthesized)
cagctccagatctaccccaacgagagacacagtattcgctgccccgagtcgggcgagcactatgaagtcacgttgctgcactttctacaggaatacctctgagcctgcccaccgggagcc

SEQ ID NO: 371501 - DNA, 120 bp, Artificial Sequence
  ENSG00000142002_24 (sequence is synthesized)
gccacatcacagcacaagtggctgcagcctccgcggggaaccaggcgggagggactgagtggcccgcgggccccagtgaggcactttgtcccgcccagcgctggccagccccgaggagcc

SEQ ID NO: 371502 - DNA, 120 bp, Artificial Sequence
  ENSG00000142002_25 (sequence is synthesized)
gctgccttcaccgccccgacgccttttatccttttttaaacgctcttgggttttatgtccgctgcttcttggttgccgagacagagagatggtggtctcgggccagcccctcctctcccc

SEQ ID NO: 371503 - DNA, 120 bp, Artificial Sequence
  ENSG00000142002_26 (sequence is synthesized)
gccttctgggaggaggaggtcacacgctgatgggcactggagaggccagaagagactcagaggagcgggctgccttccgcctggggctccctgtgacctctcagtcccctggcccggcca

SEQ ID NO: 371504 - DNA, 120 bp, Artificial Sequence
  ENSG00000142002_27 (sequence is synthesized)
gccaccgtccccagcacccaagcatgcaattgcctgtcccccccggccagcctccccaacttgatgtttgtgttttgtttggggggatatttttcataattatttaaaagacaggccggg

SEQ ID NO: 371505 - DNA, 120 bp, Artificial Sequence
  ENSG00000142002_28 (sequence is synthesized)
gagcgaaactctgtctcaaaataaataaaaaataaaagacagaaagcaaggggtgcctaaatctagacttggggtccacaccgggcagcggggttgcaacccagcacctggtaggctcca

SEQ ID NO: 371506 - DNA, 120 bp, Artificial Sequence
  ENSG00000142002_29 (sequence is synthesized)
ccagcacctggtaggctccatttcttcccaagcccgagcagagggtcatgcgggccccacaggagaagcggccagggcccgcggggggcaccacctgtggacagccctcctgtccccaag

SEQ ID NO: 371507 - DNA, 120 bp, Artificial Sequence
  ENSG00000142002_30 (sequence is synthesized)
ctttcaggcaggcactgaaacgcaccgaacttccacgctctgctggtcagtggcggctgtcccctccccagcccagccgcccagccacatgtgtctgcctgacccgtacacaccaggggt

SEQ ID NO: 371508 - DNA, 120 bp, Artificial Sequence
  ENSG00000142002_31 (sequence is synthesized)
gggttccggggttgggagctgaaccatccccacctcagggttatatttccctctccccttccctccccgccaagagctctgccaggggcgggcaaaaaaaaaagtaaaaagaaaagaaaa

SEQ ID NO: 371509 - DNA, 120 bp, Artificial Sequence
  ENSG00000142002_32 (sequence is synthesized)
aaaaaagaaacaaaccacctctacatattatggaaagaaaatatttttgtcgattcttattcttttataattatgcgtggaagaagtagacacattaaacgattccagttggaaacatgt

SEQ ID NO: 371510 - DNA, 120 bp, Artificial Sequence
  ENSG00000142002_33 (sequence is synthesized)
tccttcacgcccgggcctctcccgagacccagcatgtctccccgcgagcccactgagagataatcattccacagtgctccgtggaatgcctgccacgtgccagccaccagctaagcttct

SEQ ID NO: 371511 - DNA, 120 bp, Artificial Sequence
  ENSG00000142002_34 (sequence is synthesized)
tgatggaggcagccagtgagtagcccctgccccgccccacggaggcctccgcccgcccggctgtaaaacgggacgagggccccatgctggggaaagaggcagaggcctggagctggcctg

SEQ ID NO: 371512 - DNA, 120 bp, Artificial Sequence
  ENSG00000142002_35 (sequence is synthesized)
cctggcctcccacagcacccaggcccctccaagcatctgggaactcgtcataggacataagccacagcccctgccgtccgagacggtcctgggttcgagctgcagtaaagggccggactg

SEQ ID NO: 371513 - DNA, 120 bp, Artificial Sequence
  ENSG00000142002_36 (sequence is synthesized)
cacagaacccggcagggatgcagctccgtgccaaccccctgccaaaatggtaaccagtgagacacagaccctgtcactgggagctcccagggtagtgggcaggtgacaagtaaacatttt

SEQ ID NO: 371514 - DNA, 72 bp, Artificial Sequence
  ENSG00000142002_37 (sequence is synthesized)
gagctcccagggtagtgggcaggtgacaagtaaacattttcatcagcgggcacagtggcttccacgtaggag

SEQ ID NO: 371515 - DNA, 120 bp, Artificial Sequence
  ENSG00000142002_38 (sequence is synthesized)
gcgggagaaggaacagggatcggcaggaagccagccttccccagtgactgcatgatctggcagggcttagagcacccaactgttggcttattcaggcagcagatttactgagcacctccc

SEQ ID NO: 371516 - DNA, 120 bp, Artificial Sequence
  ENSG00000142002_39 (sequence is synthesized)
ctgtgccaggcccttagcacaaccaggggttggccacctacggcccacaggtcaaatccggcccaccacctgtgttcataaataaagttttattggcactgagccacagccacttgttta

SEQ ID NO: 371517 - DNA, 120 bp, Artificial Sequence
  ENSG00000142002_40 (sequence is synthesized)
ggagaaggtgaggttggcctcggaggccctgatccgtgaggatgtggcccagcttctggaattccccaacagtctaagatctggaaggccccttctttccctctcccctggcttccccag

SEQ ID NO: 371518 - DNA, 120 bp, Artificial Sequence
  ENSG00000142002_41 (sequence is synthesized)
cacgtccccaagactgttctggttatttcaagcgaggaggcagtgtggcgtagtgcggggtctccccctcggcactgtggacgctggggctggaatgttctctggggtggggccatccca

SEQ ID NO: 371519 - DNA, 120 bp, Artificial Sequence
  ENSG00000142002_42 (sequence is synthesized)
ttcccacttcctccaagcaagcagcgacttccccaagccaagctgttggtcccggaggacagggcttctggcaaggtcggcagtcactcggagcccacaaagggaagcgagaccagcccc

SEQ ID NO: 371520 - DNA, 120 bp, Artificial Sequence
  ENSG00000142002_43 (sequence is synthesized)
ggtgccaccctttccagaccactggctctcgcagaactgggtcactgcggccatgtttagatttctgtaaaacaaatatttgcctggccagtccagtcaggtcaaggagtgtgctaagtg

SEQ ID NO: 371521 - DNA, 120 bp, Artificial Sequence
  ENSG00000142002_44 (sequence is synthesized)
gtgtcctgagtgggaggagagagtgggatattctttggggaagggcgtgccattcaccctttcacctgcacctcccacatcccgaggctctggaacttccagtgaaggccaagcatctcc

SEQ ID NO: 371522 - DNA, 120 bp, Artificial Sequence
  ENSG00000142002_45 (sequence is synthesized)
ccggctggacagcaagccaacagcacagcttctcgctgaattccgagggggctgagaggatggccaccaccgggaccccaacggccgaccgaggcgacgcagccgccacagatgacccgg

SEQ ID NO: 371523 - DNA, 120 bp, Artificial Sequence
  ENSG00000142002_46 (sequence is synthesized)
ccacctcagcctccagagtagctaggaccacaagcctgcaccaccatgcctggctaatttatttatttatttttagaggtggggtcttactatgttgtccaggctggtctctgaaattcc

SEQ ID NO: 371524 - DNA, 120 bp, Artificial Sequence
  ENSG00000142002_47 (sequence is synthesized)
atttttagaggtggggtcttactatgttgtccaggctggtctctgaaattcctgggctcaagcaagtctcctgccccagcctcccaaactactgggattactggtgtgagccaccatgcc

SEQ ID NO: 371525 - DNA, 120 bp, Artificial Sequence
  ENSG00000142002_48 (sequence is synthesized)
ttcctctgctgggtcccaggggaatcggggcccgtgggatggcttctctcccagattctgtccagggcatgcagacagtgctgcagggcttcaaggcagagctagaatctagccaggtct

SEQ ID NO: 371526 - DNA, 120 bp, Artificial Sequence
  ENSG00000142002_49 (sequence is synthesized)
ccctcctcattgcccgccaccgccgaccgcaggatggcatccggctgcacaaaaccccgccagcagctctctgtgggaggctgagcccgggaccccggcctcggatgggcagaggtgggg

SEQ ID NO: 371527 - DNA, 120 bp, Artificial Sequence
  ENSG00000142002_50 (sequence is synthesized)
aggtggggcatggtgtgcagagcggcgggggggccccaggccggcggcagtcagggcactgcggggcggcggcgatgaggaggaggaggaggcagacgggcagtgggacccggccctctg

SEQ ID NO: 371528 - DNA, 120 bp, Artificial Sequence
  ENSG00000142002_51 (sequence is synthesized)
gggaggggccgcacctgcccgcctgtggcgccctgcccacccccatgccacgcaccgtccacgggggccacgcggtctgagggccccttccttgccggccccatgtgcatgagcgctcct

SEQ ID NO: 371529 - DNA, 120 bp, Artificial Sequence
  ENSG00000142002_52 (sequence is synthesized)
actcaagtgccagctgtagaacagtcaaccagaggaggctccccggctacctgcctggtgccccagcccaccccgcctgccctgactacacagggtcctcggggcccctcaccctccttt

SEQ ID NO: 371530 - DNA, 120 bp, Artificial Sequence
  ENSG00000142002_53 (sequence is synthesized)
gcctgctgactctcccttgttcctctaggaagtcccctagtctccaggttggtatggaggtggccatgggccctgggcccaattcctggagcaggggtcaaaagcaggcagcagattggc

SEQ ID NO: 371531 - DNA, 120 bp, Artificial Sequence
  ENSG00000142002_54 (sequence is synthesized)
agttggaccatcttaggcgcacatcttacccagagcagctctgtccccacagaggatacggggcgatgtctgggtactttgtggttcatcaccactgcgagttctcctggcctggagtgg

SEQ ID NO: 371532 - DNA, 120 bp, Artificial Sequence
  ENSG00000142002_55 (sequence is synthesized)
cttctcagcaccccgcagtgcccagatggccccacccgagaaggagccaccccaatgtccatcatgccagagtagttgttccaggcaggactggggcagtggcccagctgagaaagagcc

SEQ ID NO: 371533 - DNA, 120 bp, Artificial Sequence
  ENSG00000142002_56 (sequence is synthesized)
tgacagtggcccttccccctccctagcagggtcccgagtatgggcccctcccgccttgccactcccaggtgtccatccagagcctccggggcacaggtgctttcattaggctctgaggcc

SEQ ID NO: 371534 - DNA, 120 bp, Artificial Sequence
  ENSG00000142002_57 (sequence is synthesized)
ccagcccggcccggtccccagcccaccggcatctcccctgccaggcccgtcctgcccggcatctcgtgctggactgctggccctcacctccccacaggtgcagctggtgaataactcctt

SEQ ID NO: 371535 - DNA, 120 bp, Artificial Sequence
  ENSG00000142002_58 (sequence is synthesized)
atagggtggtgctaggtggagaaagcccatcacaggctagccctcgctccctcactcttgcgccagcctctctgcaatccgggctgtgcccccgggtagaagagaggtcagcggagggcc

SEQ ID NO: 371536 - DNA, 120 bp, Artificial Sequence
  ENSG00000142002_59 (sequence is synthesized)
tctagccacatccagaagattcctggaagtttctcgcgatgtttcatttcatttctcatctccgggatcgaatttttgcttcttgggctatcagtggtgatcagagcttctcgctgaatt

SEQ ID NO: 371537 - DNA, 120 bp, Artificial Sequence
  ENSG00000142002_60 (sequence is synthesized)
gcttctctcccagattctgtccagggcatgcagacagtgctgcagggcttcaaggcagagctagaatctagccaggtagaatcgggcctgacagtctgcagctcctgagtgggggaggct

SEQ ID NO: 371538 - DNA, 81 bp, Artificial Sequence
  ENSG00000142002_61 (sequence is synthesized)
acacgcgaaaggtccccggttcgatcccgggcggaaacagacatttttatgggatttaaaaaaattttccgtgatgaagag

SEQ ID NO: 371539 - DNA, 120 bp, Artificial Sequence
  ENSG00000142025_0 (sequence is synthesized)
actttctcacagtgtctttgggcgtcttcttgactgaatctgactccattggaggctgtgatccatggaacccagtgacatgcctgctggctaccactgccccttagactctgccccctg

SEQ ID NO: 371540 - DNA, 120 bp, Artificial Sequence
  ENSG00000142025_1 (sequence is synthesized)
ggatgagaccagagacccccagagcacagagctgatccccaggagagccatcagccgctctccaacctgcgcccgctgccgcaaccatggtgtcaccgcccatctcaagggccacaagcg

SEQ ID NO: 371541 - DNA, 120 bp, Artificial Sequence
  ENSG00000142025_2 (sequence is synthesized)
cctctgcctcttccaggcttgcgagtgtcacaaatgtgtcctcatcctggagcgccgcagggtcatggctgcccaggtggccttgcgtaggcagcaggaggcgcagctaaagaagcacct

SEQ ID NO: 371542 - DNA, 120 bp, Artificial Sequence
  ENSG00000142025_3 (sequence is synthesized)
gatgaggagaggggaagcctctcccaaagctcccaaccacttcagaaagggaaccactcagccacaggtcccctctggaaaggagaacatagcaccccagcctcagaccccccatggggc

SEQ ID NO: 371543 - DNA, 120 bp, Artificial Sequence
  ENSG00000142025_4 (sequence is synthesized)
agtcctgctggcaccgacaccccccgggaagaactcctgtgggcctctgctgctcagccatcccccggaagcctcgcccttgtcctggactccggtgcctcctggcccttgggtccctgg

SEQ ID NO: 371544 - DNA, 120 bp, Artificial Sequence
  ENSG00000142025_5 (sequence is synthesized)
acactggctgcctccaggcttctccatgccaccaccagtggtgtgccgcctgctgtaccaagaacctgctgtctctctgcctcccttccctggctttgaccctggcacctccctccagct

SEQ ID NO: 371545 - DNA, 120 bp, Artificial Sequence
  ENSG00000142025_6 (sequence is synthesized)
gcccactcatgggcccttcaccacctgcccaggatctcacccagtactgacagctcctctttctggagagccccaagggccccctagccagccccgcacacactcaactctgatactcca

SEQ ID NO: 371546 - DNA, 120 bp, Artificial Sequence
  ENSG00000142025_7 (sequence is synthesized)
gtggcaccccagaccctcttcagctacagccacaggcctctggagcctcgtgcctggcccggacatctggcccctcagagtggcagctgcagcaagaggcagctgaagccctcgtggggc

SEQ ID NO: 371547 - DNA, 120 bp, Artificial Sequence
  ENSG00000142025_8 (sequence is synthesized)
tgaaagattcatcccaggctcctcgtgtgaccccttctgtgccccccaaccctgcctggatctccctgcttcacccctgtggcccaccagctcctgctggaggaagaggattccagcctg

SEQ ID NO: 371548 - DNA, 120 bp, Artificial Sequence
  ENSG00000142025_9 (sequence is synthesized)
ttggcccctgtcttcgacccagcccagccccctctgttgctctgcatattggccgtctggggtccatctccctcctgagctagaaacccagagatggaggctgtcttgctatggcaggga

SEQ ID NO: 371549 - DNA, 120 bp, Artificial Sequence
  ENSG00000142025_10 (sequence is synthesized)
ctatggcagggaggtgacagcctgctggcactgtatatttagtgtcttacttaaggatttatgcatggaatttaatgtagtacaagcttcgggcttttttgtttgtttgtttgtttgttt

SEQ ID NO: 371550 - DNA, 120 bp, Artificial Sequence
  ENSG00000142025_11 (sequence is synthesized)
aggtgcttcattagctttcagttcctttggtagtgtgggcatttccttggctgacagtggatattcttgtacccttcttgggtcctgggatctcttgaaatccccaataaagagagagtt

SEQ ID NO: 371551 - DNA, 120 bp, Artificial Sequence
  ENSG00000142025_12 (sequence is synthesized)
gtgctatttaagctgaccagtatctataaacgtgtttgcatgagtttacatcccaggattccatgattctgtaaatgcctatgcattcatgtctgtctccatgcatgtgaaaacaggaga

SEQ ID NO: 371552 - DNA, 120 bp, Artificial Sequence
  ENSG00000142025_13 (sequence is synthesized)
gtgttttcattttgtgtctaggtttgtgtgagtaagcaagaaataaacctttgttgttgtaagccactgagatttggagagtgttaccacagcctaacctagtctatcctgactgacaga

SEQ ID NO: 371553 - DNA, 120 bp, Artificial Sequence
  ENSG00000142025_14 (sequence is synthesized)
aaggacttgttcatttcgcttctcaaagtgaaaaatctgttatccaatagctaccatagatgaaaacaaacttggatttttttctttgtccaaataaaaaaaaatgatgtaaagaaataa

SEQ ID NO: 371554 - DNA, 120 bp, Artificial Sequence
  ENSG00000142025_15 (sequence is synthesized)
aggaaaaagcaggaaactgaaggaagcaggggctgaggaacacttagagggtgggcagaagcgggggttcccagtctgcttgtctccctttcccttgcaggcctctggagcctcgtgcct

SEQ ID NO: 371555 - DNA, 120 bp, Artificial Sequence
  ENSG00000142025_16 (sequence is synthesized)
ttggaggctgtggtaaccgtgaactagctgcacgaacacggtccctcctgcctttccgtcctcctccctcttagccggactccctaacccaggagcaggaagcgctggacacagtgactt

SEQ ID NO: 371556 - DNA, 120 bp, Artificial Sequence
  ENSG00000142025_17 (sequence is synthesized)
aataaggggtactcgacgccccattggccacctgcctcgaaagggggaagacagtctgggcgggcaggacgtgcggagggagaggcagcggtggcgcgaggctcaactcgaagcgctatt

SEQ ID NO: 371557 - DNA, 120 bp, Artificial Sequence
  ENSG00000142025_18 (sequence is synthesized)
ggtgggactgatagtcttgtgcgccaagaagctggcagaagggaaggggcgggacatcagttcaggatctcaaaccgcattggtcgtctgcctcggctgagagaggcgatgcttgaagtt

SEQ ID NO: 371558 - DNA, 120 bp, Artificial Sequence
  ENSG00000142025_19 (sequence is synthesized)
ctaaccaaggagatgagggggtcgacaggttgaacgtcttcaggcccaggaccccaagctcctcagcctggcccctgggattgcagttgagagttattcagtgaatcctttttatcagtt

SEQ ID NO: 371559 - DNA, 120 bp, Artificial Sequence
  ENSG00000142025_20 (sequence is synthesized)
tggcactcgacagcaaatttcttgatatcaaggaaagtggggcactgagaaaggcagggacttgcccaagggcatatagtgagacagtggcagggaacccaatgctctgtctctggaccc

SEQ ID NO: 371560 - DNA, 120 bp, Artificial Sequence
  ENSG00000142025_21 (sequence is synthesized)
aggctgcctgctgaagtctgaagtggggtctggcctgggaggaggtctgataagtgccttcaaggagcttacgttctagttagggaaattggatgccttcacaaggctcagtgacaaacc

SEQ ID NO: 371561 - DNA, 120 bp, Artificial Sequence
  ENSG00000142025_22 (sequence is synthesized)
tgaagaagattggaggaaccttgaagagtgagaaacacctagggggacagacagggaaagctgcgaattctcttgtccaaatagtggattgggcagactggcctggaggaaatgctagaa

SEQ ID NO: 371562 - DNA, 120 bp, Artificial Sequence
  ENSG00000142025_23 (sequence is synthesized)
cagagggaaaggaggctggagaggcttctgatggtggagatctggcatgccaggcttaggtgtctagaacagcaactgtatgtgaaggggagccagggaacgtttctgaactaagcaagg

SEQ ID NO: 371563 - DNA, 120 bp, Artificial Sequence
  ENSG00000142025_24 (sequence is synthesized)
acaaattcagagaccctgagctttagaaagacaagtgggtggctttgatggacggtttggaggaggcaagactggaggtgggaaaattagcaaggaggtctgtgaaataatccaggagaa

SEQ ID NO: 371564 - DNA, 120 bp, Artificial Sequence
  ENSG00000142025_25 (sequence is synthesized)
caatgatgaggcctggattggattcggtaaaaagagggggttgctagaaggaaaaacaggtgtgacctgatcctgccccttccttcttgcctgtagctcctgctggaggaagaggattcc

SEQ ID NO: 371565 - DNA, 120 bp, Artificial Sequence
  ENSG00000142025_26 (sequence is synthesized)
cctctttcaatgtgtgcatgtctgttcatctgtttaaccaccctggcatcttctctccttgtttctagacactcaactctgatactccagccctgtggcaccccagaccctcttcagcta

SEQ ID NO: 371566 - DNA, 120 bp, Artificial Sequence
  ENSG00000142039_0 (sequence is synthesized)
aggcccggaacttcggtgcctgggcgcagcggtgcacccggacccggaacattctcaggcgaaagtgtctcttgcgtgcgtgggccggaggttagtgtgcggggcccgccgggcggttga

SEQ ID NO: 371567 - DNA, 120 bp, Artificial Sequence
  ENSG00000142039_1 (sequence is synthesized)
aaagtccgagagaatcaggatggaggccgtggcgacggcgacggcggcgaaggaacccgataagggctgcatagagcctggacctgggcactggggtgagctgagccggacaccagtccc

SEQ ID NO: 371568 - DNA, 120 bp, Artificial Sequence
  ENSG00000142039_2 (sequence is synthesized)
atctaaaccccaggacaaagtggaagcagctgaggcaacaccagtggccctggacagtgacacctccggggctgaaaatgcagcagtgagtgctatgctgcacgctgtagccgccagccg

SEQ ID NO: 371569 - DNA, 120 bp, Artificial Sequence
  ENSG00000142039_3 (sequence is synthesized)
cctgcctgtttgcagccagcagcagggtgaacccgacttgacagagcatgagaaagtggccatcctggcccagctgtaccacgagaagccactggtgttcctggagcgcttccgcacagg

SEQ ID NO: 371570 - DNA, 120 bp, Artificial Sequence
  ENSG00000142039_4 (sequence is synthesized)
cctccgtgaggagcatctggcctgctttggccacgtgcgtggcgaccaccgtgcagacttctactgtgctgaggtggcccggcagggcactgcccggccccgcaccctgcgtacccgcct

SEQ ID NO: 371571 - DNA, 120 bp, Artificial Sequence
  ENSG00000142039_5 (sequence is synthesized)
gcgtaaccggcgctatgctgccctgcgagagctgatccaagggggcgagtacttcagtgatgagcagatgcggttccgggcccccctgctatatgagcagtacatcgggcagtatctcac

SEQ ID NO: 371572 - DNA, 120 bp, Artificial Sequence
  ENSG00000142039_6 (sequence is synthesized)
ccaggaggagctcagtgcccgcaccccaacccaccagccccccaagcccgggtcccccgggagacctgcttgcccgctctccaacttgctgctccagtcctacgaggagcgggagctaca

SEQ ID NO: 371573 - DNA, 120 bp, Artificial Sequence
  ENSG00000142039_7 (sequence is synthesized)
gcagcgtctgctccaacagcaggaggaggaggaggcctgcttggaggaagaggaagaggaggaggacagtgacgaggaagaccagaggtcaggcaaggactcggaggcctgggttcccga

SEQ ID NO: 371574 - DNA, 120 bp, Artificial Sequence
  ENSG00000142039_8 (sequence is synthesized)
ctcggaggagaggctgatcctgcgagaggagttcaccagccgcatgcaccagcgcttcctagatggcaaggacggggactttgactacagcacagtagacgacaaccccgacttcgacaa

SEQ ID NO: 371575 - DNA, 120 bp, Artificial Sequence
  ENSG00000142039_9 (sequence is synthesized)
cctcgacatcgtggcacgggatgaggaggagaggtactttgatgaggaagaacctgaggatgcgcccagcccagagctggatggggactgatggccgccacccttcccaccgcctgcccc

SEQ ID NO: 371576 - DNA, 120 bp, Artificial Sequence
  ENSG00000142039_10 (sequence is synthesized)
atccccatccccaacaaggcagctgattccaggcctgctcagtgaccctttctctagggggacatcagggcagtgccccacaacccacacacaccaccatctcactgggtctagtctcat

SEQ ID NO: 371577 - DNA, 120 bp, Artificial Sequence
  ENSG00000142039_11 (sequence is synthesized)
ctcagacaacccccacccccactgtttctggggttccctttctcatctctcccaccctgtctcctgcctctgtctttcttggtgtctgtctgggcttctttctgtctctttctgtctttc

SEQ ID NO: 371578 - DNA, 120 bp, Artificial Sequence
  ENSG00000142039_12 (sequence is synthesized)
tgtctctctccctacccccgctccctctttccagtgctctggctggctgtctctccctttctccccctctctctctgccttaggctctgtctccaccgcagggcccaaggtgaaagtcct

SEQ ID NO: 371579 - DNA, 120 bp, Artificial Sequence
  ENSG00000142039_13 (sequence is synthesized)
gcctcccgtgctgtctgtctccccctctctgtttatgtctgcgctgtgtctcacactcagagcctccttgcttctgttaggttcccatctctccttctgcctcactctgggcctcttctt

SEQ ID NO: 371580 - DNA, 120 bp, Artificial Sequence
  ENSG00000142039_14 (sequence is synthesized)
tctacttgtacatttccacctctctaggcctctgctctcactgtccctctctgtctgtctctcagcctttatctctgggttttgatcccccactccaggctctgggccccttcttccccc

SEQ ID NO: 371581 - DNA, 120 bp, Artificial Sequence
  ENSG00000142039_15 (sequence is synthesized)
ttccctcaaacctggctgctataggcagcagaaccctgaccactgagtaatacagccccaggggagggaggagaccccaggcagggaggatgggggcagctctcttctctccccaggacc

SEQ ID NO: 371582 - DNA, 120 bp, Artificial Sequence
  ENSG00000142039_16 (sequence is synthesized)
caggctgtggatcacggggcctgccagcttgagtgtagagggaggggggactctacccttctcagccccaccagcccccctctgcccaaccacaattttcccttcctccgccttcctctc

SEQ ID NO: 371583 - DNA, 120 bp, Artificial Sequence
  ENSG00000142039_17 (sequence is synthesized)
cctctcctgtttacactccccaaatgcgcacaggctgttatcatgggtcctgagtcatcccacacacagcctgccccagcgtccctgcccccagctggccgcagggcccgccccatggag

SEQ ID NO: 371584 - DNA, 120 bp, Artificial Sequence
  ENSG00000142039_18 (sequence is synthesized)
ccccctgccgccctgggctaatgggagccagatggccgcctggtgactcagccaccgggcctgtgggaacccaggcgtcccgccttcccatgcccccacacccggctcctgctcccccag

SEQ ID NO: 371585 - DNA, 120 bp, Artificial Sequence
  ENSG00000142039_19 (sequence is synthesized)
cagacacacacaggagggcctggccactgttgagggggcacacagggcaagggtcaccaagtcggggcctagggactcctcatgcctctgagatggaatggtggtatcctgccgtggcca

SEQ ID NO: 371586 - DNA, 120 bp, Artificial Sequence
  ENSG00000142039_20 (sequence is synthesized)
agcctgaaggaccctcaaaactgcctcctggagtccacggttcctgacctccgagcctcagctatgccctctgggtcaaccagaattagagccagacagggaaagtgagagctggatgga

SEQ ID NO: 371587 - DNA, 120 bp, Artificial Sequence
  ENSG00000142039_21 (sequence is synthesized)
ggcagacaagatgctcagagcgactattaaagaacgaaagcctctgctacggagcgcttctgtcctctgtcaggcccgagcgaagtgcctgacaccgggttggatcctcagatggcccca

SEQ ID NO: 371588 - DNA, 120 bp, Artificial Sequence
  ENSG00000142039_22 (sequence is synthesized)
tgaactagtgaagtgggtcaaaggaggcctggaaagatgttgcttcctcaaggccactcggccatcagaggcagaaatgaaacaggaacccaggcctagaatcacaaaggtcctagaaac

SEQ ID NO: 371589 - DNA, 120 bp, Artificial Sequence
  ENSG00000142039_23 (sequence is synthesized)
cacttggctgtctggcctctcaggtgtcagggccatccagagtgagacagcattggagggacaagtgtgcatgcagatgtcctcagacgggaaggtttgagaagggtcagatggtaggcg

SEQ ID NO: 371590 - DNA, 120 bp, Artificial Sequence
  ENSG00000142039_24 (sequence is synthesized)
ggcctaacaagggctccgtgctagccactgtcccgcacacagacaggatcaggtcatcttgatatggagatcagtccccaaatcactgaattgtcccagcagtgctatgccctaggtact

SEQ ID NO: 371591 - DNA, 120 bp, Artificial Sequence
  ENSG00000142039_25 (sequence is synthesized)
accaatatcactcctctatttcccagaggaggaagcagcagctagactccaggaccttggggtcatatctctcagaaagccaagagtgcaggatgagagctgtctgtctcttacctgcct

SEQ ID NO: 371592 - DNA, 120 bp, Artificial Sequence
  ENSG00000142039_26 (sequence is synthesized)
gtatttgtgccccatttttaaagagcagagggcctgggccacaggaaaggtatcagcccttggtgataggcacattttttaccagtctatcatttggtcattaaatttgtttacaatata

SEQ ID NO: 371593 - DNA, 120 bp, Artificial Sequence
  ENSG00000142039_27 (sequence is synthesized)
acggcctttggtcacatgcagagcccttaacaagctgtgggggtctccctttgtggagctacaaggccccaaaacagttccaggatgtggggttgaacagccaaaggaagaggctgggtg

SEQ ID NO: 371594 - DNA, 120 bp, Artificial Sequence
  ENSG00000142039_28 (sequence is synthesized)
acctcggactagccttgtccatctcagaccctcagtctcctcacctctaaggcaggggatggacagggatgacatatagctcagtatcaatgaaaccctgaaacacttccctcctggcaa

SEQ ID NO: 371595 - DNA, 120 bp, Artificial Sequence
  ENSG00000142039_29 (sequence is synthesized)
tctaacgattccttcatttcattgtaactcccgtttcccccaaagtccgaaatccagccaggctcctttcaaagtccttactcaatttctgtgctttcccacaaccttcaaagtaatccg

SEQ ID NO: 371596 - DNA, 120 bp, Artificial Sequence
  ENSG00000142046_0 (sequence is synthesized)
agagcttgggcctgggctcacgaggaaggggctgcagttctccaaggattcccgcctgctcccagacccccgggagtcgtaggaacccgttcctggacgctgacgtcggctttcagggat

SEQ ID NO: 371597 - DNA, 120 bp, Artificial Sequence
  ENSG00000142046_1 (sequence is synthesized)
gctttcagggatccctcgccggacgccgcggagggacagagcctgggaagccgtcgccccgccccgtccccgcccccgcgcgcagcgggcccggggcgctgagacccgcgtagagcaaag

SEQ ID NO: 371598 - DNA, 120 bp, Artificial Sequence
  ENSG00000142046_2 (sequence is synthesized)
gcgccccttggatcctcggtggcagggtccgggcaagtgtcattgcgagggttcaggaagccccggcctgtgatcgtgagcggaaacccctcctggagtttccccaaagccatggacagc

SEQ ID NO: 371599 - DNA, 120 bp, Artificial Sequence
  ENSG00000142046_3 (sequence is synthesized)
cctagtcttcgtgagcttcaacagcctctgctggagggcacagaatgtgagacccctgcccagaagcctggcaggcatgagctggggtcccccttaagagagatagcctttgccgagtcc

SEQ ID NO: 371600 - DNA, 120 bp, Artificial Sequence
  ENSG00000142046_4 (sequence is synthesized)
ctgaggggtttgcagttcctgtcaccgcctcttccctccgtgagcgctggcctgggggaaccaaggccccctgatgttgaggacatgtcatccagtgacagtgactcggactgggatgga

SEQ ID NO: 371601 - DNA, 120 bp, Artificial Sequence
  ENSG00000142046_5 (sequence is synthesized)
ggcagccgtctttcaccatttctaccccacgaccacctcggcttggctgtcttctccatgctgtgttgtttctggcccgttggcatcgctgccttctgtctagcccagaagaccaacaag

SEQ ID NO: 371602 - DNA, 120 bp, Artificial Sequence
  ENSG00000142046_6 (sequence is synthesized)
gcttgggccaagggggacatccagggggcaggggccgcctcccgccgtgccttcctgctgggggtcctcgccgtcgggctgggcgtgtgcacgtatgcggctgccctggtgaccctggct

SEQ ID NO: 371603 - DNA, 120 bp, Artificial Sequence
  ENSG00000142046_7 (sequence is synthesized)
gcctaccttgcctcccgagacccgccctagttgcccctacagccctcactgtgaaccctgaggccggcagcccagcaaatctgtgggcagagagtggagaatcttggtggatgaggctgc

SEQ ID NO: 371604 - DNA, 120 bp, Artificial Sequence
  ENSG00000142046_8 (sequence is synthesized)
ggcggcggcaggagcatctagaaacgggagcgagctggactggaacccttccccttcctggccaccgctcttcgggcggcagcaacctgagattaaacaccagacacccttgcagccaaa

SEQ ID NO: 371605 - DNA, 120 bp, Artificial Sequence
  ENSG00000142046_9 (sequence is synthesized)
gagaggaagggttggagggtgatgcagagagggagaggcggggagatgtcagagacggagacgaggcaacaggaccgtggaggagaaaaatagaaagggagagaaaatagtcggagagac

SEQ ID NO: 371606 - DNA, 120 bp, Artificial Sequence
  ENSG00000142046_10 (sequence is synthesized)
aaaaaccaggagacccatgcgtggacagaaagactaacggagacgaaaagaaagaggcagatggggagacacgtgcgagacgagacacatgtgcatttgttggggagaagaggattggag

SEQ ID NO: 371607 - DNA, 120 bp, Artificial Sequence
  ENSG00000142046_11 (sequence is synthesized)
aagagaaaaatgcaccacaaaaacaaagagccatatacctgaggcgggaaggtggaaggtagcccagagaacctgaactcaaatcctgagtctgccactctctgcaagattttttttgag

SEQ ID NO: 371608 - DNA, 85 bp, Artificial Sequence
  ENSG00000142046_12 (sequence is synthesized)
gcgcgctaccatgcctggctaatttttgaatttttaataaagacggggtttcaccacgttggccacgctggtctcgaactcctga

SEQ ID NO: 371609 - DNA, 120 bp, Artificial Sequence
  ENSG00000142046_13 (sequence is synthesized)
ttttgggcaagtcacttaacttccctgtgcctcactttcctcatctgtaaagtgggaataattgctacctctgggtcaatgtgagaatcaaatgagttagaatagtggcatataccattt

SEQ ID NO: 371610 - DNA, 120 bp, Artificial Sequence
  ENSG00000142046_14 (sequence is synthesized)
taatgtttttatttattttttaaaatttattattattattattttttaccattttaatgtttttattaaccactcagcatccccagtgcctgacctatagtaggtgctacgtatctgctt

SEQ ID NO: 371611 - DNA, 120 bp, Artificial Sequence
  ENSG00000142046_15 (sequence is synthesized)
ttggaatacatgcatgaatgaatgaatgggtatgttgggtgggggagggaccaggggaagggtctgggactgaggggatgcctgggtcactgctgcccactgcctctacagaccaacaag

SEQ ID NO: 371612 - DNA, 120 bp, Artificial Sequence
  ENSG00000142046_16 (sequence is synthesized)
tccagatgcgctgtggctttgcgggcggtgtgggtcaccagagaaagaggaccaggcggagaaggcttaatccgggggatgagacacaggggagccgaccagaggagggggacccagaac

SEQ ID NO: 371613 - DNA, 120 bp, Artificial Sequence
  ENSG00000142065_0 (sequence is synthesized)
agttctttccggcttcgctgctggtgtcggctccgagagctctggcttatcaggactccatagttctccaacagagaaatcttgaaaaggactgaccagtttttgcagttctaaaaccat

SEQ ID NO: 371614 - DNA, 120 bp, Artificial Sequence
  ENSG00000142065_1 (sequence is synthesized)
ggcccatggttcagtgacattcagggatgtggccatagacttctcacaggaagaatgggaattcctggatcctgctcagagggacttatatagggatgtaatgtgggagaactacagcaa

SEQ ID NO: 371615 - DNA, 120 bp, Artificial Sequence
  ENSG00000142065_2 (sequence is synthesized)
cttcatttcactaggaccttccatttctaaaccagatgtgattaccttattggatgaagaaaggaaggaacctgggatggttgtgagggaagggacaagaagatactgccctgatttgga

SEQ ID NO: 371616 - DNA, 120 bp, Artificial Sequence
  ENSG00000142065_3 (sequence is synthesized)
gtccagatacaggaccaatactttatctccagaaaaggacatttatgaaatatattcatttcagtgggatataatggaaagaattaaaagctatagccttcagggttccatttttaggaa

SEQ ID NO: 371617 - DNA, 120 bp, Artificial Sequence
  ENSG00000142065_4 (sequence is synthesized)
tgattgggaatgcaaaagcaagattgagggggaaaaggaacaacaagagggatattttgggcaagtgaaaattacctctgaaaaaatgaccacttacaaaaggcacaattttcttactga

SEQ ID NO: 371618 - DNA, 120 bp, Artificial Sequence
  ENSG00000142065_5 (sequence is synthesized)
gtatcagatcgttcataatggagaaaaggtgtatgagtgtaaggagtgtaggaagacctttattcgtcgctcaacacttagtcaacacctgagaattcatactggtgagaaaccttataa

SEQ ID NO: 371619 - DNA, 120 bp, Artificial Sequence
  ENSG00000142065_6 (sequence is synthesized)
gtgtaaggaatgtgggcaggcctttagacagcgtgcacatcttattcgacatcacaaacttcacaccggtgagaaaccctatgaatgtaaggagtgtgggaaggcctttacagtgctcca

SEQ ID NO: 371620 - DNA, 120 bp, Artificial Sequence
  ENSG00000142065_7 (sequence is synthesized)
agaacttactcaacatcagagacttcatacgggtgaaaaaccctatgaatgtaaggaatgtggaaaggcctttagagtacatcagcaactggctcgacatcagagaattcacactggtga

SEQ ID NO: 371621 - DNA, 120 bp, Artificial Sequence
  ENSG00000142065_8 (sequence is synthesized)
gaaaccctatgaatgtaaggactgtggaaagacctttagacagtgtacacaccttacacgccatcagagacttcatactgctgaaaagctctatgaatgtaaggaatgtgggaaagcctt

SEQ ID NO: 371622 - DNA, 120 bp, Artificial Sequence
  ENSG00000142065_9 (sequence is synthesized)
cgtatgtggtccagaccttagagtacatcagaaaattcattttggtgagaaaccctatgaatgtaaggagtgtggaaaggcttttagaatatgccaacaacttactgttcatcagagtat

SEQ ID NO: 371623 - DNA, 120 bp, Artificial Sequence
  ENSG00000142065_10 (sequence is synthesized)
tcatactggtgagaaaccctacgaatgtaaggaatgtgggaagacttttagattaagacaacaactagttcgccatcagagaatacatactcgtgagaaaccctatgaatgtatggaatg

SEQ ID NO: 371624 - DNA, 120 bp, Artificial Sequence
  ENSG00000142065_11 (sequence is synthesized)
ttggaagacctttagtagttactcacagcttatttcacaccagagcattcatattggtgagagaccctatgaatgtgaagagtgtggaaaggcctttagactgctctcacaacttactca

SEQ ID NO: 371625 - DNA, 120 bp, Artificial Sequence
  ENSG00000142065_12 (sequence is synthesized)
gcatcaaagtattcacactggtgagaaaccttatgaatgtaaggaatgtagaaaaccttttagactgctctcacaacttacccaacatcagagtattcacactggtgagaaaccttatga

SEQ ID NO: 371626 - DNA, 120 bp, Artificial Sequence
  ENSG00000142065_13 (sequence is synthesized)
atgtaaggaatgtggtaaggcttttagactttattcatttcttactcaacaccagagaattcatactggtgagaagccctacaagtgtaaggagtgtaagaaggcctttagacagcattc

SEQ ID NO: 371627 - DNA, 120 bp, Artificial Sequence
  ENSG00000142065_14 (sequence is synthesized)
acaccttactcagcatcagaagattcataatggaatttaatagaagaaagccttcaaatgtatatgatgttacagaacatcagaaaattcatttttgagaaaatgtgtttcatgctcaat

SEQ ID NO: 371628 - DNA, 120 bp, Artificial Sequence
  ENSG00000142065_15 (sequence is synthesized)
tccaagcataataaattttatattagagaaagaatatgttgatttaaaagccttccaacaccatttaaacatggtttatcttcagcaaattcctatgagagaataatgtaatgaatgtag

SEQ ID NO: 371629 - DNA, 120 bp, Artificial Sequence
  ENSG00000142065_16 (sequence is synthesized)
gaaaatctttagccttatctgtcattatctccctttctccacttgattaccagtttgatttattggacaagatactaagcttctgtgcctcattttgctgacttgtaaaatggtaataat

SEQ ID NO: 371630 - DNA, 120 bp, Artificial Sequence
  ENSG00000142065_17 (sequence is synthesized)
agtacttatatgtattagttatttattgctgcgtaataaattaccacagacttagtagcataaaataacatataattatatcttataatttggatcaggagtataggcatgacttagttg

SEQ ID NO: 371631 - DNA, 120 bp, Artificial Sequence
  ENSG00000142065_18 (sequence is synthesized)
ggtcctctgcttcagggtctcttgcaaggctacagatttcagccagggctgaggtctcatctgaaggctcaactggggaaggatccacatccagactaacatagttgttacccaatgtat

SEQ ID NO: 371632 - DNA, 120 bp, Artificial Sequence
  ENSG00000142065_19 (sequence is synthesized)
ttccgtgaggcctgttgcattgagattctcagtttctagctggctgttggctgaacgctgactgcagctcctggccacaatagcctcatcaacatggctgcttgcttcatcaaggcatgc

SEQ ID NO: 371633 - DNA, 120 bp, Artificial Sequence
  ENSG00000142065_20 (sequence is synthesized)
aagccaaaagggaggacagtctgctagcaagatggaagttaccatcttgtgtaatctaatcatggaagtaacattccctcaccttctactggtagaagtaagttactaggatagtccaca

SEQ ID NO: 371634 - DNA, 120 bp, Artificial Sequence
  ENSG00000142065_21 (sequence is synthesized)
ctcaagagaacgggatgatacaagagtgtgaataagtcctggagacaggaccactggggggcctgtttagagtcagcctgccacactgtggaataggattgttgcaaggagtaagtagtt

SEQ ID NO: 371635 - DNA, 120 bp, Artificial Sequence
  ENSG00000142065_22 (sequence is synthesized)
aatacttggaggaatcacagtcatatagcatgtattctgtaaatattatctgtaattgttattattgtcattagtattagtgaattcacgtaaaaggaagatctgtagacataataaatg

SEQ ID NO: 371636 - DNA, 120 bp, Artificial Sequence
  ENSG00000142065_23 (sequence is synthesized)
tagaaatgcctcctgtcacctctcagaaattattaaacataatttattctaggtaaaatttagattgtagtgaatgtaggaagttcttcagcacttgagctgcattagaaatttcatgcc

SEQ ID NO: 371637 - DNA, 120 bp, Artificial Sequence
  ENSG00000142065_24 (sequence is synthesized)
aaaaatgaatttcatgaatgtgaggtcactagtaatacagctgttgaagaattagagggaaataggaaatgattttcccataattccagaaagcaaaaggcttacaatccctgttgtctg

SEQ ID NO: 371638 - DNA, 120 bp, Artificial Sequence
  ENSG00000142065_25 (sequence is synthesized)
accacagtttaaaattaattagaaactatcaaaaatgtggcttaaaagaaattaaccacctaggaatttaatattgttgtgtatatttatgtgtgtgtataaaactcctgtgggaaagaa

SEQ ID NO: 371639 - DNA, 120 bp, Artificial Sequence
  ENSG00000142065_26 (sequence is synthesized)
acaaaacatcattctataagtcagtatacttttggatgctcaaaatgccatatcttcaaccagtaggagttgtttcaagttgagtttttgatgtgatcccaccaataatttgatagttta

SEQ ID NO: 371640 - DNA, 120 bp, Artificial Sequence
  ENSG00000142065_27 (sequence is synthesized)
cttgattgtggctgcataatttggtaacctatgaaagatgctagagcaccaatgtataatttttttgagacagggtgtcactttgtcccccaggctggagtgcagtggtacaagcacagt

SEQ ID NO: 371641 - DNA, 120 bp, Artificial Sequence
  ENSG00000142065_28 (sequence is synthesized)
ggagtgcagtggtacaagcacagttcactgtaccctgttcctcctgggctcaagtgattcttccacctaaattttttttttttttttagagaaagggtctcactatgttgcccaggctgg

SEQ ID NO: 371642 - DNA, 120 bp, Artificial Sequence
  ENSG00000142065_29 (sequence is synthesized)
tcctccctccttggcctccaaaggtgctggggttacaggtatgagccaccacacccagcccaactcattattcttgaaatcaataaatcagaggaaaaattgtcatttagtttccttttc

SEQ ID NO: 371643 - DNA, 120 bp, Artificial Sequence
  ENSG00000142065_30 (sequence is synthesized)
ggaaaaattgtcatttagtttccttttcccatgtgaaccaaatttcagggtcaccagaagttcatcaaattcaaatgaatttggcctggcacaggggtcacacctgtaatcccagcactt

SEQ ID NO: 371644 - DNA, 120 bp, Artificial Sequence
  ENSG00000142065_31 (sequence is synthesized)
gagtgagaccctgtctcaaaaaaaaaatttgttttttgaatgggtttttcttttttgaagaagtctaataaatctagaaggaattagaggattagaaaaatcaccattttctagacctta

SEQ ID NO: 371645 - DNA, 120 bp, Artificial Sequence
  ENSG00000142065_32 (sequence is synthesized)
cattttctagaccttaatggaataatgggtccagaaaacatgatcttcaatgggtactacaactaataggtgaaatattttatagcgagatttttatggtggatctatcaaactggccac

SEQ ID NO: 371646 - DNA, 120 bp, Artificial Sequence
  ENSG00000142065_33 (sequence is synthesized)
ctctgaaccctttgatctgttttaaccttaataaaaatgggtctatcagacaacacacttcctgacgtaatgcaataggaagtccacaccaccatctacaaagccttattgctggaataa

SEQ ID NO: 371647 - DNA, 120 bp, Artificial Sequence
  ENSG00000142065_34 (sequence is synthesized)
tgaactgaaagcagacagggactagatgaacagtatatggtcatcccttggtatccatggggaattggttccaggatcctccactgatggtaaaatctgaggatgctcaagtcccttgta

SEQ ID NO: 371648 - DNA, 120 bp, Artificial Sequence
  ENSG00000142065_35 (sequence is synthesized)
taaaatggcatagtatgtatttgcatattacctactcacatcttcctgtatactttaaattatctttagatcacttatacctatcacaatgtaaatactatgtaaatagttgttatactg

SEQ ID NO: 371649 - DNA, 120 bp, Artificial Sequence
  ENSG00000142065_36 (sequence is synthesized)
tatttttcaatttgcattatttttattgtattttatttttattgtttttttttgagtattttctatttgagattggttgaatctgcacatatggagggctggctataaagggcaccacaa

SEQ ID NO: 371650 - DNA, 120 bp, Artificial Sequence
  ENSG00000142065_37 (sequence is synthesized)
ggaagaagccaaacagatccagaatgtgtgaaattctacagagcaaattacctgatttcttcaactaacaggtagcatgaaaatacaaggggaagggcaaccattaacagattaaaagag

SEQ ID NO: 371651 - DNA, 120 bp, Artificial Sequence
  ENSG00000142065_38 (sequence is synthesized)
acttaaagagacatatcaactaaattcagtatgttggcattacttggacctggtttgaacaaaacataaaaagccattttggagacagtgagggaagtgtggacatggactaaatattaa

SEQ ID NO: 371652 - DNA, 120 bp, Artificial Sequence
  ENSG00000142065_39 (sequence is synthesized)
atgatatttacatatattaatttggttagggattatgtcagtgtgattataaaaaataaaagatcgtatgatatgagatacatactatgaaatgaagatagacacatttggattaaaata

SEQ ID NO: 371653 - DNA, 120 bp, Artificial Sequence
  ENSG00000142065_40 (sequence is synthesized)
ttctagcaaaagaaataattggcaaagagagctggaaactaaattggcaacatgttgataatttaagtggagtgttttgttcatggagacttattgttctaatatttctacttttgtatg

SEQ ID NO: 371654 - DNA, 120 bp, Artificial Sequence
  ENSG00000142065_41 (sequence is synthesized)
tgtttgaaatttcaataataaaatgtttaaaatcaaaaccaaaattatagactatgtagaaatgaatgacagtgagatgcctgcacatctaaccttgtcagatataatcaaagttctgtt

SEQ ID NO: 371655 - DNA, 120 bp, Artificial Sequence
  ENSG00000142065_42 (sequence is synthesized)
cagtgacaaattaatgccctgtaatgtggtaaggaaatcttatttgtggatacagtcttcatcttcttcacttacccacagcagcaacaccaggcctgtcacacagatgaatgtgttgag

SEQ ID NO: 371656 - DNA, 120 bp, Artificial Sequence
  ENSG00000142065_43 (sequence is synthesized)
tgtcacacagatgaatgtgttgagggaatgaataagtatttccgtcaagaaaaaggaaacaacaaaataaaaccaacccaagtaaagaacagccaagtggccaggtgcggtggctcatgc

SEQ ID NO: 371657 - DNA, 81 bp, Artificial Sequence
  ENSG00000142065_44 (sequence is synthesized)
gaggccatggcaggtggatcacctgaggtcgggattttgagaccagcctgaccaacactgagaaaccccatctctattaaa

SEQ ID NO: 371658 - DNA, 71 bp, Artificial Sequence
  ENSG00000142065_45 (sequence is synthesized)
aggaggcggagtttgtggtctgtcaaaaaaaaaaaaaaaaaaaaaggaacagccaagtaacagtagaaagt

SEQ ID NO: 371659 - DNA, 120 bp, Artificial Sequence
  ENSG00000142065_46 (sequence is synthesized)
aaaaaaaaaaaaaaggaacagccaagtaacagtagaaagtagaaattaagagaatggagaatattagacttgattcaatgttaatagtgattagattttggcagttataatcaaggaaga

SEQ ID NO: 371660 - DNA, 120 bp, Artificial Sequence
  ENSG00000142065_47 (sequence is synthesized)
gaaaatgaaagataatacatttagagtattaatgatgataaaagagacacaactctagattatatcaagcagatttttaaaattataaggcaaaactaggccgggcacagtggctcacac

SEQ ID NO: 371661 - DNA, 65 bp, Artificial Sequence
  ENSG00000142065_48 (sequence is synthesized)
tctactaaaaatacaaaaattagcctgtcatggtggcgggcacctgtaatctaagctactccaag

SEQ ID NO: 371662 - DNA, 120 bp, Artificial Sequence
  ENSG00000142065_49 (sequence is synthesized)
acagagtgagaacctgtctcaaaaataataaacataatatggtaaaactatacatgcacacatgcacaaacgtgtatattcattccagtacaagtaaaaatgtaggattgcatttttccc

SEQ ID NO: 371663 - DNA, 120 bp, Artificial Sequence
  ENSG00000142065_50 (sequence is synthesized)
ccaaaaggaatatgttttacaattaactcaccgtataacccaaatagattaacaaaaaatgtgtgtgtgtgtgtgtgtgtgtgaactccctgtttaaaaaatctgatacttataaaaact

SEQ ID NO: 371664 - DNA, 120 bp, Artificial Sequence
  ENSG00000142065_51 (sequence is synthesized)
ttaaggaatagataatcctaaagattttaccaattaattctgcaaggtaaaataatcctaataaaaattagatgaagatagtttctgaaagcaaattctagaccaccttcattatgaaga

SEQ ID NO: 371665 - DNA, 120 bp, Artificial Sequence
  ENSG00000142065_52 (sequence is synthesized)
ttctatttttcacaattctaaataaagtttatttagaatttattacaaaatctatctttgctaataggtcagtgtttcttttcccaagcaccaaatacctccagaaagcctgtgtttgac

SEQ ID NO: 371666 - DNA, 120 bp, Artificial Sequence
  ENSG00000142065_53 (sequence is synthesized)
ccctaaattcaacattctccagaagtttgcttcaaggaatattaattctcgatggtatttgaaaaaaagatttcttgggaaaataggcaaatgaagcaaaacataaaacatctacttttg

SEQ ID NO: 371667 - DNA, 120 bp, Artificial Sequence
  ENSG00000142065_54 (sequence is synthesized)
ggcaacaagagtgaaactcagtctcaaataaaataaaataaaaatctacttttgaggaattcaaagtatacatgatcagtttgccaaagatttagtaaagacatttttatttaactgagt

SEQ ID NO: 371668 - DNA, 120 bp, Artificial Sequence
  ENSG00000142065_55 (sequence is synthesized)
ttttatttaactgagtgtatctcaaatttattgtggaattctcagtccgaatatctggaataggaacagctttgttagatgctaccataaccacaatgaatgtcttcaagggtgtaattt

SEQ ID NO: 371669 - DNA, 120 bp, Artificial Sequence
  ENSG00000142065_56 (sequence is synthesized)
tagatatggtgagtggttgtgttgggggcggcataagtcagggcaattttttgcagctcatatcatgctctgaaagtagctacctgctttaatggatggttagtgcttttctatagaatg

SEQ ID NO: 371670 - DNA, 120 bp, Artificial Sequence
  ENSG00000142065_57 (sequence is synthesized)
gaaaagattccagcccgatccttgatatgtttgtgttaaacatgcttatatattatattaaacaatgattaaggacataaatgagtttctgtggtaataaagatgctatattgaatatca

SEQ ID NO: 371671 - DNA, 120 bp, Artificial Sequence
  ENSG00000142065_58 (sequence is synthesized)
atggttgtgagggaagggacaagaagatactgccctggtgagtgagggctgagcaggcattgagaaatcactactgcaggtaatagctaaactgattagggtggaggcacacccttgaga

SEQ ID NO: 371672 - DNA, 120 bp, Artificial Sequence
  ENSG00000142065_59 (sequence is synthesized)
tgttggggtctctcttcaaaaagcccctggcctatggaggcagggcttgggacttgaagcaaattaagatcttttaagcctggactagcaaaggaactttctattgatcttgaatgcaac

SEQ ID NO: 371673 - DNA, 120 bp, Artificial Sequence
  ENSG00000142065_60 (sequence is synthesized)
actgtttctcatctttcatatttctatcctactttaaagagaagaactattcctggtagaagaaaaaataaataaatataagagcagaaatcagcaaaatagaaaagaaataaagaaaat

SEQ ID NO: 371674 - DNA, 120 bp, Artificial Sequence
  ENSG00000142082_0 (sequence is synthesized)
acttggctgtgccattgaggcgtcaaagagtgtgggcgcctgtggtcgaacccgctacggactagctttgtggtgtcagcctttgtgacccggaattgctcctgtcaaatgaggatcttc

SEQ ID NO: 371675 - DNA, 120 bp, Artificial Sequence
  ENSG00000142082_1 (sequence is synthesized)
ccagtagtgttttgcgaggattaggtgtaaatataatgcctgaccatagtaaaagcgctcagaaagtattaactatcaccgccatccgggttgaaaaagtattaaaggtggaagaaggtc

SEQ ID NO: 371676 - DNA, 120 bp, Artificial Sequence
  ENSG00000142082_2 (sequence is synthesized)
catatctttttctgtgggtgcttcaagtgttgttggaagtggaggcagcagtgacaaggggaagctttccctgcaggatgtagctgagctgattcgggccagagcctgccagagggtggt

SEQ ID NO: 371677 - DNA, 120 bp, Artificial Sequence
  ENSG00000142082_3 (sequence is synthesized)
ggtcatggtgggggccggcatcagcacacccagtggcattccagacttcagatcgccggggagtggcctgtacagcaacctccagcagtacgatctcccgtaccccgaggccatttttga

SEQ ID NO: 371678 - DNA, 120 bp, Artificial Sequence
  ENSG00000142082_4 (sequence is synthesized)
actcccattcttctttcacaaccccaagccctttttcactttggccaaggagctgtaccctggaaactacaagcccaacgtcactcactactttctccggctgcttcatgacaaggggct

SEQ ID NO: 371679 - DNA, 120 bp, Artificial Sequence
  ENSG00000142082_5 (sequence is synthesized)
atcgatgggcttgagagagtgtcgggcatccctgcctcaaagctggttgaagctcatggaacctttgcctctgccacctgcacagtctgccaaagacccttcccaggggaggacattcgg

SEQ ID NO: 371680 - DNA, 120 bp, Artificial Sequence
  ENSG00000142082_6 (sequence is synthesized)
gctgacgtgatggcagacagggttccccgctgcccggtctgcaccggcgttgtgaagcccgacattgtgttctttggggagccgctgccccagaggttcttgctgcatgtggttgatttc

SEQ ID NO: 371681 - DNA, 120 bp, Artificial Sequence
  ENSG00000142082_7 (sequence is synthesized)
cccatggcagatctgctgctcatccttgggacctccctggaggtggagccttttgccagcttgaccgaggccgtgcggagctcagttccccgactgctcatcaaccgggacttggtgggg

SEQ ID NO: 371682 - DNA, 120 bp, Artificial Sequence
  ENSG00000142082_8 (sequence is synthesized)
cccttggcttggcatcctcgcagcagggacgtggcccagctgggggacgtggttcacggcgtggaaagcctagtggagcttctgggctggacagaagagatgcgggaccttgtgcagcgg

SEQ ID NO: 371683 - DNA, 120 bp, Artificial Sequence
  ENSG00000142082_9 (sequence is synthesized)
gaaactgggaagcttgatggaccagacaaataggatgatggctgcccccacacaataaatggtaacataggagacatccacatcccaattctgacaagacctcatgcctgaagacagctt

SEQ ID NO: 371684 - DNA, 120 bp, Artificial Sequence
  ENSG00000142082_10 (sequence is synthesized)
ggaggactccttggactgcgcggaacatggcgttctggggttggcgcgccgcggcagccctccggctgtggggccgggtagttgaacgggtcgaggccgggggaggcgtggggccgtttc

SEQ ID NO: 371685 - DNA, 120 bp, Artificial Sequence
  ENSG00000142082_11 (sequence is synthesized)
tgccactggaatgtcttctcaggccatgagctgcagtgactggtagggctgtgtttacagtcagggccaccccgtcacatatacaaaggagctgcctgcctgtttgctgtgttgaactct

SEQ ID NO: 371686 - DNA, 120 bp, Artificial Sequence
  ENSG00000142082_12 (sequence is synthesized)
tcactctgctgaagctcctaatggaaaaagctttcttctgactgtgaccctcttgaactgaatcagaccaactggaatcccagaccgagtctgctttctgtgcctagttgaacggcaagc

SEQ ID NO: 371687 - DNA, 120 bp, Artificial Sequence
  ENSG00000142082_13 (sequence is synthesized)
tcggcatctgttggttacaagatccagacttgggccgagcggtccccagccctcttcatgttccgaagtgtagtcttgaggccctggtgccgcacttctagcatgttggtctcctttagt

SEQ ID NO: 371688 - DNA, 120 bp, Artificial Sequence
  ENSG00000142082_14 (sequence is synthesized)
ccactcacctcacagccaccctccctctttgaaggaccacatgtaattactaaacctcctgagaacctcttgggacagaaacaagcacagatgtgccgtgactcatgtttttcctgtggg

SEQ ID NO: 371689 - DNA, 120 bp, Artificial Sequence
  ENSG00000142082_15 (sequence is synthesized)
caccctcaggctggctcagtagccctcacttgcttgagatcctgaatctgcgggttggcgtctttcatggttgctggatcatactctgccgttatctcttcggatatgagttgcccctag

SEQ ID NO: 371690 - DNA, 120 bp, Artificial Sequence
  ENSG00000142082_16 (sequence is synthesized)
cccactatctggcccctctctttagggacctctgattgaacatacattagaccttctctctcctgctgttcctgatcactcttctgtcctgtaattgctgcttcttgtgctgcattctgg

SEQ ID NO: 371691 - DNA, 120 bp, Artificial Sequence
  ENSG00000142082_17 (sequence is synthesized)
gcctgcggctgtcggctggtgcttggcggcagggacgatgtgagtgcggggctgagaggcagccatggggcccgcggtgagcccttggacccggcgcgccccttgcagaggcctcccaga

SEQ ID NO: 371692 - DNA, 120 bp, Artificial Sequence
  ENSG00000142082_18 (sequence is synthesized)
aaaaccaggcttgaggacatcacaaccccaaggggctgtgcctccttccaggagtcctgccaagcccagaagttgtgctcttggccttgcgtgctcatctcggaggcggcagcaacactt

SEQ ID NO: 371693 - DNA, 120 bp, Artificial Sequence
  ENSG00000142082_19 (sequence is synthesized)
gatgggcttgagagaggtgatacgggcatgaaaaccaggcttgaggacatcacaaccccaaggggctgtgcctccttccaggagtcctgccaagcccagaagttgtgctcttggccttgc

SEQ ID NO: 371694 - DNA, 120 bp, Artificial Sequence
  ENSG00000142082_20 (sequence is synthesized)
agaaaggtgattattttgagaggcctggggagacacacatgctcattctcgagggtggcggtggtgcagagggcagagccatgctcgttcttgctatcctgagattggttgctatctgtt

SEQ ID NO: 371695 - DNA, 120 bp, Artificial Sequence
  ENSG00000142082_21 (sequence is synthesized)
gaaccctgggatacgtggcgtcccctctattggaacagtctgaggactgaaggcatttgtccctggatttattggagacggcccagctcctccctctgaaggtggtcacattctgttgac

SEQ ID NO: 371696 - DNA, 120 bp, Artificial Sequence
  ENSG00000142082_22 (sequence is synthesized)
tctccatactcagcctctcctccagaaacagatctgttccagaacattccagcactttctatctggcctccttgtccccacactacgcccccccaccctcgccagggcttcctctagtga

SEQ ID NO: 371697 - DNA, 120 bp, Artificial Sequence
  ENSG00000142082_23 (sequence is synthesized)
cactgttagagctaatctctgagacagggaaggcattactcacttaaaacccaggctgagtcctggccacctgctggattgtgacataggaggtggaatccactgaactgctacttctgc

SEQ ID NO: 371698 - DNA, 120 bp, Artificial Sequence
  ENSG00000142082_24 (sequence is synthesized)
acaggctccttctcctggggctgtacccaggcccagccctgatggctcaccctgtcaggcaccagctgctccctcctgggctctcacccacctgcacatcctccttcctagcatcacatt

SEQ ID NO: 371699 - DNA, 120 bp, Artificial Sequence
  ENSG00000142082_25 (sequence is synthesized)
acctgcgtgtttccccagacaaaagcacttcccattcttgaaccttgcctaccctgggctgagctgacggcaatagatttaatgacagtgactcccaggaagggggtcctgtgactttgc

SEQ ID NO: 371700 - DNA, 120 bp, Artificial Sequence
  ENSG00000142082_26 (sequence is synthesized)
gccttaataagaacaaaaggtggaattggtgacctaggaaaactgttgaattctaaaaagaatgaagttagtttctaaccctagttaatgttccttttttattttttgagtcttgccctg

SEQ ID NO: 371701 - DNA, 90 bp, Artificial Sequence
  ENSG00000142082_27 (sequence is synthesized)
gcaactggtagctgggattacaggtgtgtcccaccacacctagcacatgggcatatttgtaatagagacaaggttttgctatgttggcca

SEQ ID NO: 371702 - DNA, 120 bp, Artificial Sequence
  ENSG00000142082_28 (sequence is synthesized)
gtgcctggcccctttatttgataatttacacatacatttttgtccaaaactcttctttatttcaagatgatgtttctgtggctatgtgtggtatgtggtataaatctcaatctatggtca

SEQ ID NO: 371703 - DNA, 120 bp, Artificial Sequence
  ENSG00000142082_29 (sequence is synthesized)
tacaggagtcatctcatgggcccttccagggctggtgccactttgggaaggtgaatggattcagctggggttccaggctgagggagcagcagcctgtgcaggagacaggaaggtgggaag

SEQ ID NO: 371704 - DNA, 120 bp, Artificial Sequence
  ENSG00000142082_30 (sequence is synthesized)
ctgctgggctttggaggtggtataggtgtgggtggggcaccacgtgtgaggagaagggagaaggatgggggtgtgggggcgaggtggaggggcagggcctcccaggtcagatcaggaata

SEQ ID NO: 371705 - DNA, 120 bp, Artificial Sequence
  ENSG00000142082_31 (sequence is synthesized)
ctgatgctgcagtgggaggagtgataaatccacagggactggcccggggacgtagctgcacccttggggtcagggaggcctttggggagtggagagtggagcaagcagtgccaggaggct

SEQ ID NO: 371706 - DNA, 120 bp, Artificial Sequence
  ENSG00000142082_32 (sequence is synthesized)
ggtcctggagaaggtggagctgtggtcgcctgagggatggcgaggagggggactggactcgcagtctgtgatgttttggggacgtgagaaggaggcgtctggcttggtctgtaaggtcag

SEQ ID NO: 371707 - DNA, 120 bp, Artificial Sequence
  ENSG00000142082_33 (sequence is synthesized)
ggcacttgctggtgaggcgtgatttgggagggaggatgcccagctcggttctgtgtgtgtctgaggtgtcgggaaacatgccctggatgtgttcaagcagctgttctgcgtctgcgtctg

SEQ ID NO: 371708 - DNA, 120 bp, Artificial Sequence
  ENSG00000142082_34 (sequence is synthesized)
cagctcaggaaattcctaaaagctgtgatgagagcaagaaatgagaccatgaagtcagtgtgtgcgtgactggatgtaggcaccgaggacagaagggccagaaagacctgtgctcagagg

SEQ ID NO: 371709 - DNA, 120 bp, Artificial Sequence
  ENSG00000142082_35 (sequence is synthesized)
ggcccagggcagccacaggggcccagagcatgtgtttgttcaggcattcattgtgtgctgggccctgctccagtgctttggacatacacggtcagatgtcagtgtaagaagttatatagt

SEQ ID NO: 371710 - DNA, 120 bp, Artificial Sequence
  ENSG00000142082_36 (sequence is synthesized)
aagagtttaccgaggtgaggagggtctggcaggggacactgcacaggtgacaagcagcaaggagggtggggcgaagtcagcattgatggccacggggctggagcagagaagaaggtgggg

SEQ ID NO: 371711 - DNA, 120 bp, Artificial Sequence
  ENSG00000142082_37 (sequence is synthesized)
cacaagtgtcatctcatgggaggctggcgccacctcagaaggtgaatgggttcagcttgggttccaggccagagtctgaagttgagaggactccgttgggtgctgggctgtgagcccacc

SEQ ID NO: 371712 - DNA, 120 bp, Artificial Sequence
  ENSG00000142082_38 (sequence is synthesized)
atgggggcaagactgggagcagcagacccagcagggcccttgtaggtaatcaccggctggcactggctgggggccaggtaaagccagcagaggctgaggggtgctggagtctgggtgtgt

SEQ ID NO: 371713 - DNA, 120 bp, Artificial Sequence
  ENSG00000142082_39 (sequence is synthesized)
gtgaacgcagagtgggtacgctggcacagtgcatgggaggccgtggattcccaaggaccccagggctgtggctggagcagctggaaagacggagccgccgcttcctgagatggagaagcc

SEQ ID NO: 371714 - DNA, 120 bp, Artificial Sequence
  ENSG00000142089_0 (sequence is synthesized)
gagaaccatcccagtaacccgaccgccgctggtcttcgctggacaccatgaatcacactgtccaaaccttcttctctcctgtcaacagtggccagccccccaactatgagatgctcaagg

SEQ ID NO: 371715 - DNA, 120 bp, Artificial Sequence
  ENSG00000142089_1 (sequence is synthesized)
aggagcacgaggtggctgtgctgggggcgccccacaaccctgctcccccgacgtccaccgtgatccacatccgcagcgagacctccgtgcccgaccatgtcgtctggtccctgttcaaca

SEQ ID NO: 371716 - DNA, 120 bp, Artificial Sequence
  ENSG00000142089_2 (sequence is synthesized)
aacccctgctgcctgggcttcatagcattcgcctactccgtgaagtctagggacaggaagatggttggcgacgtgaccggggcccaggcctatgcctccaccgccaagtgcctgaacatc

SEQ ID NO: 371717 - DNA, 120 bp, Artificial Sequence
  ENSG00000142089_3 (sequence is synthesized)
tgggccctgattctgggcatcctcatgaccattctgctcatcgtcatcccagtgctgatcttccaggcctatggatagatcaggaggcatcactgaggccaggagctctgcccatgacct

SEQ ID NO: 371718 - DNA, 120 bp, Artificial Sequence
  ENSG00000142089_4 (sequence is synthesized)
gtatcccacgtactccaacttccattcctcgccctgcccccggagccgagtcctgtatcagccctttatcctcacacgcttttctacaatggcattcaataaagtgcacgtgtttctggt

SEQ ID NO: 371719 - DNA, 120 bp, Artificial Sequence
  ENSG00000142089_5 (sequence is synthesized)
tcctcagagcgcagccaggccagaggctgcaccgaggtgcagaatcagaggaggcaccggagaccccagagtccagtctgagacggcacagggagcaggtctctggtggccttgacaagc

SEQ ID NO: 371720 - DNA, 120 bp, Artificial Sequence
  ENSG00000142089_6 (sequence is synthesized)
tccaggatagggtggggaggggactggaccctggggacctcagagcagagcaggggaaacaggagcccccacctggggagagggggcctcctctccaggaaccccaatcaagacgagcct

SEQ ID NO: 371721 - DNA, 120 bp, Artificial Sequence
  ENSG00000142089_7 (sequence is synthesized)
ccgtgatccacatccgcagcgagacctccgtgcccgaccatgtcgtctggtccctgttcaacaccctcttcatgaacccctgctgcctgggcttcatagcattcgcctactccgtgaaga

SEQ ID NO: 371722 - DNA, 120 bp, Artificial Sequence
  ENSG00000142089_8 (sequence is synthesized)
ctggcacccaggctctcccagaaagtgagaagggaactcacaggtgacttcaccccatggtggggagaacagcctgtgctgaggtcaaggcagaaggaggatgagccccgaggctcctgg

SEQ ID NO: 371723 - DNA, 120 bp, Artificial Sequence
  ENSG00000142102_0 (sequence is synthesized)
gcggaccttcctggtggcgcggcagccgggcggctcctccttcctcccggccctggcgtggagcagagggacacaggttcccacgctggcgcccggcgaccgggtggggctgcggcccag

SEQ ID NO: 371724 - DNA, 120 bp, Artificial Sequence
  ENSG00000142102_1 (sequence is synthesized)
cagctccatggaggacgccggcgaggaccccaccacgtttgctgcccactctctgcccagtgacccccgtctcttggccactgtgaccaacgcatacctgggcacacgagtgtttcacga

SEQ ID NO: 371725 - DNA, 120 bp, Artificial Sequence
  ENSG00000142102_2 (sequence is synthesized)
cacgctgcacgtgagcggcgtgtacaatggggctggcggggacacgcaccgggccatgctgcccagccccctcaacgtccggctggaggcccctgcagggatgggggagcagctgaccga

SEQ ID NO: 371726 - DNA, 120 bp, Artificial Sequence
  ENSG00000142102_3 (sequence is synthesized)
gaccttcgccctggacaccaacacaggctcctttcttcacaccctggagggcccccgcttccgggcctcccagtgcatctatgcgcatcgcacgctgccccacgtgctggctttccgagt

SEQ ID NO: 371727 - DNA, 120 bp, Artificial Sequence
  ENSG00000142102_4 (sequence is synthesized)
gtccatcgcccgcctggccccggggagcgggcccatcacgctgctcctgcggtcagccttctccccagaaagcccagacctggacctgcatcagggtcctgacttccagggagcccggta

SEQ ID NO: 371728 - DNA, 120 bp, Artificial Sequence
  ENSG00000142102_5 (sequence is synthesized)
cctgtatggccacaccctcacccctgagcagcccggggggccacagcaagaggtacacatgctgtggacaccagcacccccagacctgacccttggggaaggtgaggaggctaggacgtg

SEQ ID NO: 371729 - DNA, 120 bp, Artificial Sequence
  ENSG00000142102_6 (sequence is synthesized)
ggacttcctgacagcagtgggcggcagccaggctgaggctcaggcctgcctcactgaggccctgcagctgcaggccaggggagctctgtatacggctcacgcacaggcctgggcccagct

SEQ ID NO: 371730 - DNA, 120 bp, Artificial Sequence
  ENSG00000142102_7 (sequence is synthesized)
ctgggtagaatgtggcttggacgtggtggggcccctgcagctgcgccaggccctgcgtggctccctctactacctgctcagtgccctgccccagcccaaggccccaggatacatctgcca

SEQ ID NO: 371731 - DNA, 120 bp, Artificial Sequence
  ENSG00000142102_8 (sequence is synthesized)
tggcctcagtcctgggggcctctccaatgggagccgtgaggaatgctactggggccacgtcttctgggaccaggacctctggatgttcccgagtatcctgatgttccacccagaagccgc

SEQ ID NO: 371732 - DNA, 120 bp, Artificial Sequence
  ENSG00000142102_9 (sequence is synthesized)
cagggccatcctggagtaccgcatccgcacgctggacggggccctggagaacgcccagaacctgggctaccagggagccaagtttgcctgggagagtgcagactccggcctagaggtttg

SEQ ID NO: 371733 - DNA, 120 bp, Artificial Sequence
  ENSG00000142102_10 (sequence is synthesized)
ccctgaggacatttacggagtccaggaggtccacgtcaacggggccgtggtgttggccttcgagctgtactaccataccacccaggacctgcagctatttcgagaggctggtggctggga

SEQ ID NO: 371734 - DNA, 120 bp, Artificial Sequence
  ENSG00000142102_11 (sequence is synthesized)
cgtggtcagggctgtggccgagttttggtgcagtcgtgttgagtggagccccagggaggaaaagtaccacctgaggggagtcatgtcccccgacgagtaccattcaggggtcaacaactc

SEQ ID NO: 371735 - DNA, 120 bp, Artificial Sequence
  ENSG00000142102_12 (sequence is synthesized)
tgtgtacaccaacgtcctggtccagaacagcctgcgctttgctgctgccctggcccaggacctgggtcttcccatccccagccagtggctggcggtggctgacaagatcaaggtaccctt

SEQ ID NO: 371736 - DNA, 120 bp, Artificial Sequence
  ENSG00000142102_13 (sequence is synthesized)
tgacgtggagcagaacttccacccggagttcgatgggtatgagcctggagaggtggtgaagcaggcagacgtcgtgctcctgggatacccagtccccttctccctgagtcctgatgttcg

SEQ ID NO: 371737 - DNA, 120 bp, Artificial Sequence
  ENSG00000142102_14 (sequence is synthesized)
caggaaaaatctggagatttacgaggctgtgacgtccccccagggccccgccatgacctggagcatgtttgctgtgggctggatggagctgaaggacgcagtgcgggcccggggcctcct

SEQ ID NO: 371738 - DNA, 120 bp, Artificial Sequence
  ENSG00000142102_15 (sequence is synthesized)
cctgcaggcggtggtcttcgggtgcacggggttcagggtcacccgagcgggtgtgacctttgaccctgtgtgtctgtcggggatctccagagtgagcgtctccggcatcttctaccaggg

SEQ ID NO: 371739 - DNA, 120 bp, Artificial Sequence
  ENSG00000142102_16 (sequence is synthesized)
gaacaagctcaacttctctttttccgaggactccgtgaccgtggaggtcacagctcgagcagggccctgggctcctcacctggaggctgagctgtggccatcccagtcccggctctccct

SEQ ID NO: 371740 - DNA, 120 bp, Artificial Sequence
  ENSG00000142102_17 (sequence is synthesized)
gttgccaggacacaaggtctcctttccccgctcggctggccggatacaaatgtcacccccgaagctgcctggaagttccagctccgagttccctgggaggactttttcagatgttaggga

SEQ ID NO: 371741 - DNA, 120 bp, Artificial Sequence
  ENSG00000142102_18 (sequence is synthesized)
cccgctccagagccccctctgggtcaccctgggttcctccagccccaccgagtcactcactgtggaccctgcctctgaataatcaggaacggtggcttcagagacgtctcttgggccttc

SEQ ID NO: 371742 - DNA, 120 bp, Artificial Sequence
  ENSG00000142102_19 (sequence is synthesized)
cctctggccacgtctgcacccacccctcctgggcaccctcctagcctgccatccctcacctgcagccaggctctcagggaaggtccatgctgcttggcctgagttcaaggctttctgcct

SEQ ID NO: 371743 - DNA, 120 bp, Artificial Sequence
  ENSG00000142102_20 (sequence is synthesized)
gtagcctggactcccgtggacccccgtgggcaggtggcttccccgtggcatctccacaccgcctctgcctgcccctgtggactgatgctatcgcgcaccgtcccacgaccccaccccgag

SEQ ID NO: 371744 - DNA, 120 bp, Artificial Sequence
  ENSG00000142102_21 (sequence is synthesized)
ctcctgaagccggggtctgagcctgcatcacctctggcctctcatcccccactctcctgagagcagtggtcacagcggccggccgctctgctgagaaggcagagaggcaggctcaggcct

SEQ ID NO: 371745 - DNA, 120 bp, Artificial Sequence
  ENSG00000142102_22 (sequence is synthesized)
cagcgtggacagcagggataaggggcacgaaggacggggactcggccccttcagaattcctcaggactctcaggtgcagctttgccaaaaaggaacttttcatgtcatgcagttgagggg

SEQ ID NO: 371746 - DNA, 120 bp, Artificial Sequence
  ENSG00000142102_23 (sequence is synthesized)
acttagtctcaatcccaggctcctcttgactctgggcagctttaatcaggttgggcagcctctgctacagcgtggggtgggatggctctcttccctcagccacgccgcttgtgaggacag

SEQ ID NO: 371747 - DNA, 120 bp, Artificial Sequence
  ENSG00000142102_24 (sequence is synthesized)
aggtgggggagtgggaagtgggaagtcaccagagaacaggagagggatttgagggcgagaccccagcgctctccacggaccagccagagggactggagccaggtgtgcatgggttcaagg

SEQ ID NO: 371748 - DNA, 120 bp, Artificial Sequence
  ENSG00000142102_25 (sequence is synthesized)
ccctggccctgcccagcctttgtcttgggagctcagccccagggttcggtcgtcagcagtttcccaagaacaagatgtgatggcatctgctgctgaaaccctgatgaggaccaggccccc

SEQ ID NO: 371749 - DNA, 120 bp, Artificial Sequence
  ENSG00000142102_26 (sequence is synthesized)
tgcaccgctgtcagcctgaggaattaaagctttggtgctggggagagcattattcctctgaggagccgctgtgcttccttctgaagtgagggccgtgccccgggtcccatttctcctttc

SEQ ID NO: 371750 - DNA, 120 bp, Artificial Sequence
  ENSG00000142102_27 (sequence is synthesized)
acttgagtcgggaagcacagcaactttaaggctcgcgcccagcaacatggctcccctcgcatctgcatctccctcctgctctggtgttgccgctgcaccctgtcctcggaggacagcaga

SEQ ID NO: 371751 - DNA, 120 bp, Artificial Sequence
  ENSG00000142102_28 (sequence is synthesized)
ggtttggacggagactcagggagggagggaaggaggcaaggacgcctgtggaaacatctttcaggcagctctagggtctgggggccaggatgcctgggtctcccaaggcctgtctgctgt

SEQ ID NO: 371752 - DNA, 120 bp, Artificial Sequence
  ENSG00000142102_29 (sequence is synthesized)
ctctgccaccctcagcggctgccagaagcagcgtgtgggggaggcatgtgctgcagcacacctgcggccgagaccagcactcagaggtcggctcccctgacaggaaccgtgtagggtgca

SEQ ID NO: 371753 - DNA, 120 bp, Artificial Sequence
  ENSG00000142102_30 (sequence is synthesized)
gcatgatggctgctgggcgtggaggtgtcgagagtgactgtgctggggctgctccatcgttgtctgagcctcccggtgctgccgctgtggccgtttctttgatgaggctctcagaggccg

SEQ ID NO: 371754 - DNA, 120 bp, Artificial Sequence
  ENSG00000142102_31 (sequence is synthesized)
agtcattcactgccagcctgaagctgcccatgcgcatattcgggctggagcctctgaggccacacaaacgccggctggggaggcgaagtgtggggctgagcaccagaactccaggagcgt

SEQ ID NO: 371755 - DNA, 120 bp, Artificial Sequence
  ENSG00000142102_32 (sequence is synthesized)
ctgggctggagacagaactgggtgggcaggtggggagggcctgcagatctgagtgggcagccgaggaggaacccagaagacgccagcgatggagctctgccggggcggaatgtggccagg

SEQ ID NO: 371756 - DNA, 120 bp, Artificial Sequence
  ENSG00000142102_33 (sequence is synthesized)
tggtccagaacaggtcagacacaagatcccctcacctcaccccacccccgccccagctggagacctgccccggtgcccccactaggcaggcagcagctggaagtgtaggggttgcagcct

SEQ ID NO: 371757 - DNA, 120 bp, Artificial Sequence
  ENSG00000142102_34 (sequence is synthesized)
gagcagaacttccacccggagttcgatgggtatgagcctggtgagtggaccccttcaagggctcctcccctgccgtcgagaccctcgagtctgtcctggaacaccttccagtcagcggca

SEQ ID NO: 371758 - DNA, 120 bp, Artificial Sequence
  ENSG00000142102_35 (sequence is synthesized)
ccggccctggcgtggagcagagggacacaggttcccacgctggcgcccggcgaccgggtggggctgcgtgacccccgtctcttggccactgtgaccaacgcatacctgggcacacgagtg

SEQ ID NO: 371759 - DNA, 120 bp, Artificial Sequence
  ENSG00000142102_36 (sequence is synthesized)
gtctctgccctccctgggaccagggctatggttggggaagcacagggactgtggcaaaagggaagaggcctggaaggtgtgcaggagtttggtagaggagtgatctaggtgaggggaatg

SEQ ID NO: 371760 - DNA, 120 bp, Artificial Sequence
  ENSG00000142102_37 (sequence is synthesized)
gaaggtgcagagaccagagctgagagggcctgaggcactttccagagcgtggggaggggcctccaccaaggcgagaagggctgcaggtccagatcaccagcgtttgtagacagtagtgtg

SEQ ID NO: 371761 - DNA, 120 bp, Artificial Sequence
  ENSG00000142102_38 (sequence is synthesized)
gcgcttggagtttacctgagggccagtggagctccagggacctatcaggacggggacctgtggggactgggaaggcctgtggggctgcgtggagcccggtactggaggccgacgggggtg

SEQ ID NO: 371762 - DNA, 120 bp, Artificial Sequence
  ENSG00000142102_39 (sequence is synthesized)
atggtggggaggggctcggggaggaagggtggatgctcccagactcagcagatgattttcagacacctcacgtgtgccagccccacgctgaccaccggcgtggagggaaggcctctgaga

SEQ ID NO: 371763 - DNA, 120 bp, Artificial Sequence
  ENSG00000142102_40 (sequence is synthesized)
gggagagacacactcaggggctcagctgggttcctggagatcaacctttggggtctgagcccctctgagagtcgagctcctttcctgcgaggccccgtctaggaggggcctcaggaaaat

SEQ ID NO: 371764 - DNA, 120 bp, Artificial Sequence
  ENSG00000142102_41 (sequence is synthesized)
cggggctgcccagctggttccgcaactccccccagttctgagggaggcttcaggggattacagacggtctcaagagggaggcccagccagtcccgcggcccctgacaccccatcaggccg

SEQ ID NO: 371765 - DNA, 120 bp, Artificial Sequence
  ENSG00000142149_0 (sequence is synthesized)
actagggatttgaaagtgcacgggctgcggagtggagctcgcatctgttcccgccgcccgcgagcggattaaatttctgcaaattcaaactgaatggggctttcttctgctgccttccag

SEQ ID NO: 371766 - DNA, 120 bp, Artificial Sequence
  ENSG00000142149_1 (sequence is synthesized)
ttctgctgccttccagagggcgccggcagcccgccgcgcgcttctctccggcgggagcggccgcccagcgcacggctaggagcgatcgcgggagcccgacccaagcccgtgcgggccaga

SEQ ID NO: 371767 - DNA, 120 bp, Artificial Sequence
  ENSG00000142149_2 (sequence is synthesized)
acccaggcacccggaccccgggacccaggcgccgccggaccgcgccccaccccgcgcgcccgagcagggcgactgtcattagcttcctggacgggacccggggcgggatcctggtgtcct

SEQ ID NO: 371768 - DNA, 120 bp, Artificial Sequence
  ENSG00000142149_3 (sequence is synthesized)
gggacccggggcgggatcctggtgtcctgaaaggggcccgggcgaccctaagaggaagaacttttgggggcggggtccccggtcccgcgtcccctgggcagccgctattgtctacgcgcc

SEQ ID NO: 371769 - DNA, 120 bp, Artificial Sequence
  ENSG00000142149_4 (sequence is synthesized)
ggccccgggctctgggtgcggagacccaggcggggctgggcccagggcggcggcgggagaagccggggaagccgaagagcctggggaggaggagctgcgagcgcgggagacgagcaggag

SEQ ID NO: 371770 - DNA, 80 bp, Artificial Sequence
  ENSG00000142149_5 (sequence is synthesized)
ggaggaggagctgcgagcgcgggagacgagcaggagccgcgcgggccgcggcgagcgcgatgccggcggcggcgggggac

SEQ ID NO: 371771 - DNA, 120 bp, Artificial Sequence
  ENSG00000142149_6 (sequence is synthesized)
ggaggacgcggccaggcccgcggcggcctgcgagggaagtttcctgcctgcctgggtgagcggcgtgccccgcgagcggctccgcgacttccagcaccacaagcgcgtgggcaactacct

SEQ ID NO: 371772 - DNA, 120 bp, Artificial Sequence
  ENSG00000142149_7 (sequence is synthesized)
catcggcagcaggaagctgggcgagggctcctttgccaaggtgcgcgaggggctgcacgtgctgaccggggagaaggtggccataaaagtcattgataagaagagagccaaaaaggacac

SEQ ID NO: 371773 - DNA, 120 bp, Artificial Sequence
  ENSG00000142149_8 (sequence is synthesized)
ctatgtcaccaaaaacctgcggcgagagggtcagatccagcagatgatccgccaccccaatatcactcagctccttgatattttagaaacggaaaacagctactacctggtcatggagct

SEQ ID NO: 371774 - DNA, 120 bp, Artificial Sequence
  ENSG00000142149_9 (sequence is synthesized)
gtgccctgggggcaacctgatgcacaagatctatgagaagaagcggctggaggagtccgaagcccgcagatacatccgacagctcatctctgccgtagagcacctgcaccgggccggggt

SEQ ID NO: 371775 - DNA, 120 bp, Artificial Sequence
  ENSG00000142149_10 (sequence is synthesized)
ggtccacagagacttgaagatagagaatttgctactagatgaagacaataatatcaagctgattgactttggtttgagcaactgcgcagggatcctgggttactcggatccgttcagcac

SEQ ID NO: 371776 - DNA, 120 bp, Artificial Sequence
  ENSG00000142149_11 (sequence is synthesized)
acagtgtggcagccctgcctacgctgcacctgaactgctcgccaggaagaaatacggccccaaaatcgatgtctggtccataggtgtgaacatgtatgccatgttgaccgggacgctgcc

SEQ ID NO: 371777 - DNA, 120 bp, Artificial Sequence
  ENSG00000142149_12 (sequence is synthesized)
tttcacggtggagcctttcagcctgagggctttgtaccagaagatggtagacaaagaaatgaaccccctccccactcagctctccacaggtgccatcagtttcctgcgctctctcctgga

SEQ ID NO: 371778 - DNA, 120 bp, Artificial Sequence
  ENSG00000142149_13 (sequence is synthesized)
accggatcctgtgaagaggccaaatattcagcaggcactggcgaatcgctggcttaatgagaattacacgggcaaagtgccctgtaatgtcacctatcccaacaggatttctctggaaga

SEQ ID NO: 371779 - DNA, 120 bp, Artificial Sequence
  ENSG00000142149_14 (sequence is synthesized)
tctgagcccgagcgtcgtgctgcacatgaccgagaagctgggttacaagaacagcgacgtgatcaacactgtgctctccaaccgcgcctgccacatcctggccatctacttcctcttaaa

SEQ ID NO: 371780 - DNA, 120 bp, Artificial Sequence
  ENSG00000142149_15 (sequence is synthesized)
caagaaactggagcgctatttgtcagggaaatctgacatccaggacagcctctgctacaagacccggctctaccagatagaaaagtacagggcccccaaggagtcctatgaggcctctct

SEQ ID NO: 371781 - DNA, 120 bp, Artificial Sequence
  ENSG00000142149_16 (sequence is synthesized)
ggacacctggacacgagatcttgaattccatgccgtgcaggataaaaagcccaaagaacaagaaaaaagaggggattttcttcatcgaccattctccaagaagttggacaagaacctgcc

SEQ ID NO: 371782 - DNA, 120 bp, Artificial Sequence
  ENSG00000142149_17 (sequence is synthesized)
ctcgcacaaacagccctcaggctcgcttatgacacagattcagaacaccaaagccctcctgaaggaccggaaggcctccaagtccagcttccccgacaaagattcctttggctgccgcaa

SEQ ID NO: 371783 - DNA, 120 bp, Artificial Sequence
  ENSG00000142149_18 (sequence is synthesized)
tattttccgcaaaacctcagattccaattgtgtggcttcttcttccatggagttcatccccgtgccaccgcccaggaccccgaggattgtgaagaaaccggagccccatcagccagggcc

SEQ ID NO: 371784 - DNA, 120 bp, Artificial Sequence
  ENSG00000142149_19 (sequence is synthesized)
cggaagcactggcatcccccacaaggaagaccccctgatgctggacatggtgcgctccttcgagtctgtggatcgcgacgaccacgtagaagtgctgtctccctctcatcactacaggat

SEQ ID NO: 371785 - DNA, 120 bp, Artificial Sequence
  ENSG00000142149_20 (sequence is synthesized)
tctgaactccccggtcagcttggctcgcagaaattccagcgagaggacgctgtccccgggtctgccatccggaagcatgtcgcctctccatactcctttgcatccaactctggtctcttt

SEQ ID NO: 371786 - DNA, 120 bp, Artificial Sequence
  ENSG00000142149_21 (sequence is synthesized)
tgctcacgaagataagaacagccccccaaaagaggagggcctgtgttgcccacctccggttcccagcaatggccccatgcagcctctggggagccccaattgtgtgaaaagccgaggccg

SEQ ID NO: 371787 - DNA, 120 bp, Artificial Sequence
  ENSG00000142149_22 (sequence is synthesized)
gttccctatgatgggcatcggacagatgttaaggaagcgccatcagagtctgcagccatctgcagataggcccctggaggccagcctgcccccactgcagcccctagcccctgtgaacct

SEQ ID NO: 371788 - DNA, 120 bp, Artificial Sequence
  ENSG00000142149_23 (sequence is synthesized)
tgcctttgacatggccgatggggtcaagacccagtgctaacttgggccagcggggtttggggtatctctagaaaacagcaactgaacagagctccacacatctgtcagggtgtgagcact

SEQ ID NO: 371789 - DNA, 120 bp, Artificial Sequence
  ENSG00000142149_24 (sequence is synthesized)
ccaaggcctcgcgtggagcatccttagtcccacctgtagctgaatccacagacccaaagcctgcacaacccaacctcgcttagggacccccagagatgctggaatcgctaggagggttgg

SEQ ID NO: 371790 - DNA, 120 bp, Artificial Sequence
  ENSG00000142149_25 (sequence is synthesized)
ctccaggggcagccaattcctatcattcagatcttccttcctcccaagtactcaccaaccccttccacttcccacttcccccaggcttggggggaaaacagggcatgagccttctggggc

SEQ ID NO: 371791 - DNA, 120 bp, Artificial Sequence
  ENSG00000142149_26 (sequence is synthesized)
actcagattatggactgttaccagatctttcttcacgctgtgctacatgtgtgcctctcacagcagttggccacagttacagggagagaacaatatcacagtcattcatccaggccacgt

SEQ ID NO: 371792 - DNA, 120 bp, Artificial Sequence
  ENSG00000142149_27 (sequence is synthesized)
ttcctctgcggagtgtagcagccctgcctttcatagcagggattacctgaaggccagcaggagccgggggcaggcccaggatcctcagaggaagatggagaggagcttcggaccaagatc

SEQ ID NO: 371793 - DNA, 120 bp, Artificial Sequence
  ENSG00000142149_28 (sequence is synthesized)
aaaccaaacagtggggaccccaacagaagagaaagactgaaggagacactcatttcccaagcaagattttgatagatttttgttgttgttgttgttgaaacatgctaatgattgaattat

SEQ ID NO: 371794 - DNA, 120 bp, Artificial Sequence
  ENSG00000142149_29 (sequence is synthesized)
cttttccaaagattttttttaaatgtgatgtcggtaaattgaaataacataattttttaaaacttggatggagagatgagaagcaattccaccaaactcatgttttcacaggagggttca

SEQ ID NO: 371795 - DNA, 120 bp, Artificial Sequence
  ENSG00000142149_30 (sequence is synthesized)
gtgtggagagcaaaaaagctgactgtggtgatttgctgagtgctgtggcccacaggcagggcaagtctcggtggccctgtgttcatcctgttgtttaaggcatagccctgatccttctgg

SEQ ID NO: 371796 - DNA, 120 bp, Artificial Sequence
  ENSG00000142149_31 (sequence is synthesized)
aaggcatagaacacggttacagctggttctgtagaaagagggaaaagatgattgtgacaattcagagcataactcagatggcgagaaggcagcattatctctgtgcgatgctgatttcaa

SEQ ID NO: 371797 - DNA, 120 bp, Artificial Sequence
  ENSG00000142149_32 (sequence is synthesized)
gctgcccacagaactggtgcggctcagagctcggcgagtttgctgggagctgggagcaggcttgcctggcagagaacctgttcagatacaggccagtttcttcttcgaggaaagccaagc

SEQ ID NO: 371798 - DNA, 120 bp, Artificial Sequence
  ENSG00000142149_33 (sequence is synthesized)
tcctcaaacagggttcagtccacgttgtgttttcacacctttctccaaggatcgaaccaaagatgtgtctccagtattgtgtctgtgcccctgtgtgtgttttgtggacagccgtgttgt

SEQ ID NO: 371799 - DNA, 120 bp, Artificial Sequence
  ENSG00000142149_34 (sequence is synthesized)
ctgactgtatccagctggcacttgacagggtgcagtcattggtgagaagaatcagaaaaagaagacccatcagcacaggttggataggggttagtgtaggagaccagttacagaatggcc

SEQ ID NO: 371800 - DNA, 120 bp, Artificial Sequence
  ENSG00000142149_35 (sequence is synthesized)
tggagtcttcaacttttgaccggtgcaggtgtgaccagagaccacctctgtggccacctcagatagtcatctcagtccaaggatcccaaaacacaaatctagaattgcaaagccagcctt

SEQ ID NO: 371801 - DNA, 120 bp, Artificial Sequence
  ENSG00000142149_36 (sequence is synthesized)
tatttccctggcaggcagccttgccagaaggcagagaggcagttctgaatcattctctcattcaccagtggtgacatccttcagtccctcacatctctgacagagcgggacagaatggat

SEQ ID NO: 371802 - DNA, 120 bp, Artificial Sequence
  ENSG00000142149_37 (sequence is synthesized)
atttggctgaccttggtgagacctggagctgcctgtttcttccctaggggatcaccacggctctagggcattctaggatgaggtcagaccccttggccattggtgttattttttgtatag

SEQ ID NO: 371803 - DNA, 80 bp, Artificial Sequence
  ENSG00000142149_38 (sequence is synthesized)
aggtcagaccccttggccattggtgttattttttgtatagcttcagactgggttccagaacttaccattgaaaacagagc

SEQ ID NO: 371804 - DNA, 86 bp, Artificial Sequence
  ENSG00000142149_39 (sequence is synthesized)
gcaggtggatcgcttgagctcaggagttcgagagcagcctgggcaacatggtgaaagcccgtctctaccgaaaaatacaaaaaaaa

SEQ ID NO: 371805 - DNA, 120 bp, Artificial Sequence
  ENSG00000142149_40 (sequence is synthesized)
agccaagatcatgctactgcactccagcttaggtggcaaagtgagaccctgtctccaaaaaaagaaaatagagctttataagcagagagaagaaaataatcatctaagaccatctctcca

SEQ ID NO: 371806 - DNA, 120 bp, Artificial Sequence
  ENSG00000142149_41 (sequence is synthesized)
gagagaagaaaataatcatctaagaccatctctccattcgacatgaagtgtaccttttctaaagacggtttccagctgcaacggctccactttgcaggcttgcagggtgtatacctgcgc

SEQ ID NO: 371807 - DNA, 120 bp, Artificial Sequence
  ENSG00000142149_42 (sequence is synthesized)
attgggaacttgctggaacccctgatgcattttccttgagagcaggggtacttccgccttgccgttagcttgtggagaacgtgcttcttattcctggcaggcttcaagaacagctgcaca

SEQ ID NO: 371808 - DNA, 120 bp, Artificial Sequence
  ENSG00000142149_43 (sequence is synthesized)
tgtgccgctaactgaccgcgttgccattggcgacctggactctgaactcaggtttattctaaacccagtgagaggtgagggggagtgatgaaaggggatcagctgtatttgtgtgtgtgt

SEQ ID NO: 371809 - DNA, 120 bp, Artificial Sequence
  ENSG00000142149_44 (sequence is synthesized)
gtgtgtgtgagcacctgacaaatctatgaaaccgagtgaaaggagaaatgttagattctttattattttattatatttatatggaaagctcgactctccctttggtaagtccgaagcatg

SEQ ID NO: 371810 - DNA, 120 bp, Artificial Sequence
  ENSG00000142149_45 (sequence is synthesized)
ttgtctgttcgaccgtgactgtcttcctcagtctgtgcctgtgattccagtcaccctgtagttactgacagaaattgactggactgtcattgtgtgaagtctaggaggaaatgtccattt

SEQ ID NO: 371811 - DNA, 120 bp, Artificial Sequence
  ENSG00000142149_46 (sequence is synthesized)
taattgtatgatttggtcataagtaaggactatatttatgtcaccattattagatatatgtacttttgtaatgactgtgaaatacacttttccctcactacgactgcttctttatttgct

SEQ ID NO: 371812 - DNA, 120 bp, Artificial Sequence
  ENSG00000142149_47 (sequence is synthesized)
cctcactacgactgcttctttatttgctgataaatcttaaaacaactaagtacgttgcaaataatagtacaggtaccatcttttatgtgaagttctttttctttttttgagacagggtct

SEQ ID NO: 371813 - DNA, 64 bp, Artificial Sequence
  ENSG00000142149_48 (sequence is synthesized)
caatgcctagctaattttttttgtattttgtagaaatggggtttcgccatgttgctcaggctga

SEQ ID NO: 371814 - DNA, 120 bp, Artificial Sequence
  ENSG00000142149_49 (sequence is synthesized)
gtgcaccacaatgcctagctaattttttttgtattttgtagaaatggggtttcgccatgttgctcaggctgatctcaaactcctgggctccaacgatctgcccaccttggcctcccaaag

SEQ ID NO: 371815 - DNA, 120 bp, Artificial Sequence
  ENSG00000142149_50 (sequence is synthesized)
ggccttatgtaaagctcttgacctagcatctgactggaaacaagcgggaattgcattggggggcattttctgggccagtttccctgccttattttacctgcaataggtgtgcctacaaaa

SEQ ID NO: 371816 - DNA, 120 bp, Artificial Sequence
  ENSG00000142149_51 (sequence is synthesized)
gtctttctgacatacacactgcaggtggcagttcaagaagaatcaacctttttcatttggggatattaggatcttccttggagactctgaaaatggcacacaaagaatggcagttatgaa

SEQ ID NO: 371817 - DNA, 120 bp, Artificial Sequence
  ENSG00000142149_52 (sequence is synthesized)
cgtgacttctagattttgtccttgtaggaggccttggtcatggataggggaagagggatgatgggatggaatgggagggtgggatctagatgacctcttgaaattgtcccagttactgct

SEQ ID NO: 371818 - DNA, 120 bp, Artificial Sequence
  ENSG00000142149_53 (sequence is synthesized)
tccttcataactgttcacaaaacgtttttcatatataccaccttgtttcccctgggaagtgaggggacgaagccttagagggtgacatagctagaaagtggagaagctcactgttcactg

SEQ ID NO: 371819 - DNA, 120 bp, Artificial Sequence
  ENSG00000142149_54 (sequence is synthesized)
tgcaaagccccagtagtcggattccggggaaaagaacaagtatctagttttgatgacaatgttttcttgtaagaatcccaacactttagaatagaaaaggacctaagattctctggctca

SEQ ID NO: 371820 - DNA, 120 bp, Artificial Sequence
  ENSG00000142149_55 (sequence is synthesized)
gccccagcctttctgaagaagggaaaactagggacccagatggtttaaggacaccccagagtccccagatgagctggcatttgagctggtctggagcagagtttctccctcaaagaacac

SEQ ID NO: 371821 - DNA, 120 bp, Artificial Sequence
  ENSG00000142149_56 (sequence is synthesized)
agagaaatcagagagtggctgccatggtcagagggggatgtcaacaacagatcaagccgtcatcacaacaggtatttctgaagttcctgcagggactaggtcttgcatttttaagtcctt

SEQ ID NO: 371822 - DNA, 120 bp, Artificial Sequence
  ENSG00000142149_57 (sequence is synthesized)
ttcaaaactgtgcagcttcctgaaccttatgctgtttgtcccatccactcttgaagctggggaaagacagctttctttgggaactctgtctttctcagttgacttcccaagtaagcagca

SEQ ID NO: 371823 - DNA, 120 bp, Artificial Sequence
  ENSG00000142149_58 (sequence is synthesized)
aacccctggatagccttgttatctactttaggtattaagaggctattgggttttactagattaaatcaataaaacatttcctatagagccatatcatacactgaagcaaattcagaaaga

SEQ ID NO: 371824 - DNA, 120 bp, Artificial Sequence
  ENSG00000142149_59 (sequence is synthesized)
atgcaaaactgctatcttttgggggagtctggaagcctgttggttagtgtatttattttctttgtggggtcttctgtgagctacaggcacagtaagaataattcagagcggtactgggag

SEQ ID NO: 371825 - DNA, 120 bp, Artificial Sequence
  ENSG00000142149_60 (sequence is synthesized)
ttggttcaatttcatgtcatcacttttcaatgaagggagtgcatttcctgagtagtaaatgagtatattatttgtggcagcttttctgttaagggagctttccagacatctggttgcaaa

SEQ ID NO: 371826 - DNA, 120 bp, Artificial Sequence
  ENSG00000142149_61 (sequence is synthesized)
gacaaataggatatatatttgtacttcttctctgtggacatgtttttgtgacacacagttatctctaggagttgacgtctgtgggcactaagggactgaggttgggggagaaagctgagg

SEQ ID NO: 371827 - DNA, 120 bp, Artificial Sequence
  ENSG00000142149_62 (sequence is synthesized)
aggctttggaagagaaggtgaggagcatttcaggatttgcagtccccctccacatgtatccacatctgagctggtggtgttccaataatgaggcatttggggcaaccaattttggaagga

SEQ ID NO: 371828 - DNA, 120 bp, Artificial Sequence
  ENSG00000142149_63 (sequence is synthesized)
tagaatagctttatgtggagcaaacttgaggatcaattggagttgagtggtttaaaacttaaagatggcacaggaagctgtatcatttacaggtgaaaaaaataaatgggtctgacttca

SEQ ID NO: 371829 - DNA, 120 bp, Artificial Sequence
  ENSG00000142149_64 (sequence is synthesized)
tgccattgttcacaggactcaactacagactgctcttccagatcttgaaataagtaccccctggcctggctcaggagcctgctaggacctgcacaagatggtgtgtggacacagcccaag

SEQ ID NO: 371830 - DNA, 120 bp, Artificial Sequence
  ENSG00000142149_65 (sequence is synthesized)
gcttcccttccacgcggtgggaggccgaggagtgagaaagcggaattccgctgtgcaggggagctgaccgatgcaccccggggggacgccggccaagtgaatggggtcactccaaggcca

SEQ ID NO: 371831 - DNA, 120 bp, Artificial Sequence
  ENSG00000142149_66 (sequence is synthesized)
gggactctccacatcttccatggtgtgacctggatccccacacatgtggtgtcaatcaaaacattgctctagcccggggtgttactcccttcctggcccctgcgctttgtgtgcttgggc

SEQ ID NO: 371832 - DNA, 120 bp, Artificial Sequence
  ENSG00000142149_67 (sequence is synthesized)
cgcatgccccgcctccccactccacgaagtgtgagacagcaagacatgaacttgcttgatacctggtccccctgacacgcagctggagcacgcagcatccccacgtgtccagagactgcg

SEQ ID NO: 371833 - DNA, 120 bp, Artificial Sequence
  ENSG00000142149_68 (sequence is synthesized)
aagaaatacggccccaaaatcgatgtctggtccatgtgccatcagtttcctgcgctctctcctggaaccggatcctgtgaagaggccaaatattcagcaggcactggcgaatcgctggct

SEQ ID NO: 371834 - DNA, 120 bp, Artificial Sequence
  ENSG00000142149_69 (sequence is synthesized)
agatgctattaagtgattattaaaattttattgggtatgttgatggtattgcggttctgtgggggacatctttggtttttgaaggtgcacactcaagggttaaggggtaaaatgtcatga

SEQ ID NO: 371835 - DNA, 120 bp, Artificial Sequence
  ENSG00000142149_70 (sequence is synthesized)
tgtttgtaatttaaaatacttcagcaaaaaaaaaatgcaaggatggcaaagtgatcactggtatatctagatgatggtatacataaagtgattgtactattccctccgcttttctgaata

SEQ ID NO: 371836 - DNA, 120 bp, Artificial Sequence
  ENSG00000142149_71 (sequence is synthesized)
cgagaacattttcaaaataaaaactcaagtcagtgaatgaatgagtgaatgaatgaagctgattgtgcccagggggtctgtgtggggctctccgtgaagtgcaggggtgactggtcctct

SEQ ID NO: 371837 - DNA, 120 bp, Artificial Sequence
  ENSG00000142156_0 (sequence is synthesized)
tccttgccctccgctctcactctggctgggagcagaaggcagcctcggtctctgggcggcggcggcggcccactctgccctggccgcgctgtgtggtgaccgcaggccccagacatgagg

SEQ ID NO: 371838 - DNA, 120 bp, Artificial Sequence
  ENSG00000142156_1 (sequence is synthesized)
gcggcccgtgctctgctgcccctgctgctgcaggcctgctggacagccgcgcaggatgagccggagaccccgagggccgtggccttccaggactgccccgtggacctgttctttgtgctg

SEQ ID NO: 371839 - DNA, 120 bp, Artificial Sequence
  ENSG00000142156_2 (sequence is synthesized)
gacacctctgagagcgtggccctgaggctgaagccctacggggccctcgtggacaaagtcaagtccttcaccaagcgcttcatcgacaacctgagggacaggtactaccgctgtgaccga

SEQ ID NO: 371840 - DNA, 120 bp, Artificial Sequence
  ENSG00000142156_3 (sequence is synthesized)
aacctggtgtggaacgcaggcgcgctgcactacagtgacgaggtggagatcatccaaggcctcacgcgcatgcctggcggccgcgacgcactcaaaagcagcgtggacgcggtcaagtac

SEQ ID NO: 371841 - DNA, 120 bp, Artificial Sequence
  ENSG00000142156_4 (sequence is synthesized)
tttgggaagggcacctacaccgactgcgctatcaagaaggggctggagcagctcctcgtggggggctcccacctgaaggagaataagtacctgattgtggtgaccgacgggcaccccctg

SEQ ID NO: 371842 - DNA, 120 bp, Artificial Sequence
  ENSG00000142156_5 (sequence is synthesized)
gagggctacaaggaaccctgtggggggctggaggatgctgtgaacgaggccaagcacctgggcgtcaaagtcttctcggtggccatcacacccgaccacctggagccgcgtctgagcatc

SEQ ID NO: 371843 - DNA, 120 bp, Artificial Sequence
  ENSG00000142156_6 (sequence is synthesized)
atcgccacggaccacacgtaccggcgcaacttcacggcggctgactggggccagagccgcgacgcagaggaggccatcagccagaccatcgacaccatcgtggacatgatcaaaaataac

SEQ ID NO: 371844 - DNA, 120 bp, Artificial Sequence
  ENSG00000142156_7 (sequence is synthesized)
gtggagcaagtgtgctgctccttcgaatgccagcctgcaagaggacctccggggctccggggcgaccccggctttgagggagaacgaggcaagccggggctcccaggagagaagggagaa

SEQ ID NO: 371845 - DNA, 120 bp, Artificial Sequence
  ENSG00000142156_8 (sequence is synthesized)
gccggagatcctggaagacccggggacctcggacctgttgggtaccagggaatgaagggagaaaaagggagccgtggggagaagggctccaggggacccaagggctacaagggagagaag

SEQ ID NO: 371846 - DNA, 120 bp, Artificial Sequence
  ENSG00000142156_9 (sequence is synthesized)
ggcaagcgtggcatcgacggggtggacggcgtgaagggggagatggggtacccaggcctgccaggctgcaagggctcgcccgggtttgacggcattcaaggaccccctggccccaaggga

SEQ ID NO: 371847 - DNA, 120 bp, Artificial Sequence
  ENSG00000142156_10 (sequence is synthesized)
gaccccggtgcctttggactgaaaggagaaaagggcgagcctggagctgacggggaggcggggagaccagggagctcgggaccatctggagacgagggccagccgggagagcctgggccc

SEQ ID NO: 371848 - DNA, 120 bp, Artificial Sequence
  ENSG00000142156_11 (sequence is synthesized)
cccggagagaaaggagaggcgggcgacgaggggaacccaggacctgacggtgcccccggggagcggggtggccctggagagagaggaccacgggggaccccaggcacgcggggaccaaga

SEQ ID NO: 371849 - DNA, 120 bp, Artificial Sequence
  ENSG00000142156_12 (sequence is synthesized)
ggagaccctggtgaagctggcccgcagggtgatcagggaagagaaggccccgttggtgtccctggagacccgggcgaggctggccctatcggacctaaaggctaccgaggcgatgagggt

SEQ ID NO: 371850 - DNA, 120 bp, Artificial Sequence
  ENSG00000142156_13 (sequence is synthesized)
cccccagggtccgagggtgccagaggagccccaggacctgccggaccccctggagacccggggctgatgggtgaaaggggagaagacggccccgctggaaatggcaccgagggcttcccc

SEQ ID NO: 371851 - DNA, 120 bp, Artificial Sequence
  ENSG00000142156_14 (sequence is synthesized)
ggcttccccgggtatccgggcaacaggggcgctcccgggataaacggcacgaagggctaccccggcctcaagggggacgagggagaagccggggaccccggagacgataacaacgacatt

SEQ ID NO: 371852 - DNA, 120 bp, Artificial Sequence
  ENSG00000142156_15 (sequence is synthesized)
gcaccccgaggagtcaaaggagcaaaggggtaccggggtcccgagggcccccagggacccccaggacaccaaggaccgcctgggccggacgaatgcgagattttggacatcatcatgaaa

SEQ ID NO: 371853 - DNA, 120 bp, Artificial Sequence
  ENSG00000142156_16 (sequence is synthesized)
atgtgctcttgctgtgaatgcaagtgcggccccatcgacctcctgttcgtgctggacagctcagagagcattggcctgcagaacttcgagattgccaaggacttcgtcgtcaaggtcatc

SEQ ID NO: 371854 - DNA, 120 bp, Artificial Sequence
  ENSG00000142156_17 (sequence is synthesized)
agggcagtcgtacgcgggtgtggtgcagtacagccacagccagatgcaggagcacgtgagcctgcgcagccccagcatccggaacgtgcaggagctcaaggaagccatcaagagcctgca

SEQ ID NO: 371855 - DNA, 120 bp, Artificial Sequence
  ENSG00000142156_18 (sequence is synthesized)
gtggatggcgggcggcaccttcacgggggaggccctgcagtacacgcgggaccagctgctgccgcccagcccgaacaaccgcatcgccctggtcatcactgacgggcgctcagacactca

SEQ ID NO: 371856 - DNA, 120 bp, Artificial Sequence
  ENSG00000142156_19 (sequence is synthesized)
gagggacaccacaccgctcaacgtgctctgcagccccggcatccaggtggtctccgtgggcatcaaagacgtgtttgacttcatcccaggctcagaccagctcaatgtcatttcttgcca

SEQ ID NO: 371857 - DNA, 120 bp, Artificial Sequence
  ENSG00000142156_20 (sequence is synthesized)
aggcctggcaccatcccagggccggcccggcctctcgctggtcaaggagaactatgcagagctgctggaggatgccttcctgaagaatgtcaccgcccagatctgcatagacaagaagtg

SEQ ID NO: 371858 - DNA, 120 bp, Artificial Sequence
  ENSG00000142156_21 (sequence is synthesized)
tccagattacacctgccccatcacgttctcctccccggctgacatcaccatcctgctggacggctccgccagcgtgggcagccacaactttgacaccaccaagcgcttcgccaagcgcct

SEQ ID NO: 371859 - DNA, 120 bp, Artificial Sequence
  ENSG00000142156_22 (sequence is synthesized)
ggccgagcgcttcctcacagcgggcaggacggaccccgcccacgacgtgcgggtggcggtggtgcagtacagcggcacgggccagcagcgcccagagcgggcgtcgctgcagttcctgca

SEQ ID NO: 371860 - DNA, 120 bp, Artificial Sequence
  ENSG00000142156_23 (sequence is synthesized)
gaactacacggccctggccagtgccgtcgatgccatggactttatcaacgacgccaccgacgtcaacgatgccctgggctatgtgacccgcttctaccgcgaggcctcgtccggcgctgc

SEQ ID NO: 371861 - DNA, 120 bp, Artificial Sequence
  ENSG00000142156_24 (sequence is synthesized)
caagaagaggctgctgctcttctcagatggcaactcgcagggcgccacgcccgctgccatcgagaaggccgtgcaggaagcccagcgggcaggcatcgagatcttcgtggtggtcgtggg

SEQ ID NO: 371862 - DNA, 120 bp, Artificial Sequence
  ENSG00000142156_25 (sequence is synthesized)
ccgccaggtgaatgagccccacatccgcgtcctggtcaccggcaagacggccgagtacgacgtggcctacggcgagagccacctgttccgtgtccccagctaccaggccctgctccgcgg

SEQ ID NO: 371863 - DNA, 120 bp, Artificial Sequence
  ENSG00000142156_26 (sequence is synthesized)
tgtcttccaccagacagtctccaggaaggtggcgctgggctagcccaccctgcacgccggcaccaaaccctgtcctcccacccctccccactcatcactaaacagagtaaaatgtgatgc

SEQ ID NO: 371864 - DNA, 120 bp, Artificial Sequence
  ENSG00000142156_27 (sequence is synthesized)
gaattttcccgaccaacctgattcgctagattttttttaaggaaaagcttggaaagccaggacacaacgctgctgcctgctttgtgcagggtcctccggggctcagccctgagttggcat

SEQ ID NO: 371865 - DNA, 120 bp, Artificial Sequence
  ENSG00000142156_28 (sequence is synthesized)
cacctgcgcagggccctctggggctcagccctgagctagtgtcacctgcacagggccctctgaggctcagccctgagctggcgtcacctgtgcagggccctctggggctcagccctgagc

SEQ ID NO: 371866 - DNA, 120 bp, Artificial Sequence
  ENSG00000142156_29 (sequence is synthesized)
tggcctcacctgggttccccaccccgggctctcctgccctgccctcctgcccgccctccctcctgcctgcgcagctccttccctaggcacctctgtgctgcatcccaccagcctgagcaa

SEQ ID NO: 371867 - DNA, 120 bp, Artificial Sequence
  ENSG00000142156_30 (sequence is synthesized)
gacgccctctcggggcctgtgccgcactagcctccctctcctctgtccccatagctggtttttcccaccaatcctcacctaacagttactttacaattaaactcaaagcaagctcttctc

SEQ ID NO: 371868 - DNA, 120 bp, Artificial Sequence
  ENSG00000142156_31 (sequence is synthesized)
ctcagcttggggcagccattggcctctgtctcgttttgggaaaccaaggtcaggaggccgttgcagacataaatctcggcgactcggccccgtctcctgagggtcctgctggtgaccggc

SEQ ID NO: 371869 - DNA, 120 bp, Artificial Sequence
  ENSG00000142156_32 (sequence is synthesized)
ctggaccttggccctacagccctggaggccgctgctgaccagcactgaccccgacctcagagagtactcgcaggggcgctggctgcactcaagaccctcgagattaacggtgctaacccc

SEQ ID NO: 371870 - DNA, 120 bp, Artificial Sequence
  ENSG00000142156_33 (sequence is synthesized)
gtctgctcctccctcccgcagagactggggcctggactggacatgagagccccttggtgccacagagggctgtgtcttactagaaacaacgcaaacctctccttcctcagaatagtgatg

SEQ ID NO: 371871 - DNA, 120 bp, Artificial Sequence
  ENSG00000142156_34 (sequence is synthesized)
tgttcgacgttttatcaaaggccccctttctatgttcatgttagttttgctccttctgtgtttttttctgaaccatatccatgttgctgacttttccaaataaaggttttcactcctctc

SEQ ID NO: 371872 - DNA, 120 bp, Artificial Sequence
  ENSG00000142156_35 (sequence is synthesized)
cccgggtgttgggctgggccccgccctctttcacccataactgaaataaccaggagcaggcttgggggggtccctgctccatcattctggcccacaggccccaccctagcctggctgagc

SEQ ID NO: 371873 - DNA, 120 bp, Artificial Sequence
  ENSG00000142156_36 (sequence is synthesized)
gggcagcagagccgagcccagggacacagcgggtcctcagggtggggcccacctgggatggccgcctggaccaccagtgtgcgaagccccagctgccctcacagcaccgtcactggagga

SEQ ID NO: 371874 - DNA, 120 bp, Artificial Sequence
  ENSG00000142156_37 (sequence is synthesized)
cgaggggctgggtagggagggaccgggcaggggtgggcttgatgaggggcagggccctgggggtgggggctgtctcagctcaggaagcacagtgggctcctcaccctcagagctcctcta

SEQ ID NO: 371875 - DNA, 120 bp, Artificial Sequence
  ENSG00000142156_38 (sequence is synthesized)
cccccaggacaccaaggaccgcctgggccggacgaatgcgagattttggacatcatcatgaaaatgtgctcttgctgtggtgagacccaggctctagctcctgagagaatggatcccggg

SEQ ID NO: 371876 - DNA, 120 bp, Artificial Sequence
  ENSG00000142156_39 (sequence is synthesized)
ggtcggggagcgaggcctgggtcccacacatgtcacaggacagcacatggcactctggtccccgcccgcagctccctgcacctgcccgccccctctggggcctgctccaagccagcaggg

SEQ ID NO: 371877 - DNA, 120 bp, Artificial Sequence
  ENSG00000142156_40 (sequence is synthesized)
cggccgcaggtggaaagtaattctgcgtttccatttctctttccagaaaaataacgtggagcaagtggtaagagccctccccaccacccccagccgtgagtctgcacacgtccacccaca

SEQ ID NO: 371878 - DNA, 120 bp, Artificial Sequence
  ENSG00000142156_41 (sequence is synthesized)
tctgcccgtgtgcccgggatgtgtgtccccctgcgtgtccacctgtgtgtctgcccatgtgcctgggacatgtgtccgcctgtgcgtccatccgtgtgtccgtctgcccatgtgcctggg

SEQ ID NO: 371879 - DNA, 120 bp, Artificial Sequence
  ENSG00000142156_42 (sequence is synthesized)
tcgcatgtcaccctgtgtcccagccgtatgtccgtggctttcccactgactcgtctccatgctttccccccacagtgctgctccttcgaatgccagcctgcaagaggacctccggggctc

SEQ ID NO: 371880 - DNA, 120 bp, Artificial Sequence
  ENSG00000142166_0 (sequence is synthesized)
ggtgtgacttaggacggggcgatggcggctgagaggagctgcgcgtgcgcgaacatgtaactggtgggatctgcggcggctcccagatgatggtcgtcctcctgggcgcgacgaccctag

SEQ ID NO: 371881 - DNA, 120 bp, Artificial Sequence
  ENSG00000142166_1 (sequence is synthesized)
tgctcgtcgccgtggcgccatgggtgttgtccgcagccgcaggtggaaaaaatctaaaatctcctcaaaaagtagaggtcgacatcatagatgacaactttatcctgaggtggaacagga

SEQ ID NO: 371882 - DNA, 120 bp, Artificial Sequence
  ENSG00000142166_2 (sequence is synthesized)
gcgatgagtctgtcgggaatgtgactttttcattcgattatcaaaaaactgggatggataattggataaaattgtctgggtgtcagaatattactagtaccaaatgcaacttttcttcac

SEQ ID NO: 371883 - DNA, 120 bp, Artificial Sequence
  ENSG00000142166_3 (sequence is synthesized)
tcaagctgaatgtttatgaagaaattaaattgcgtataagagcagaaaaagaaaacacttcttcatggtatgaggttgactcatttacaccatttcgcaaagctcagattggtcctccag

SEQ ID NO: 371884 - DNA, 120 bp, Artificial Sequence
  ENSG00000142166_4 (sequence is synthesized)
aagtacatttagaagctgaagataaggcaatagtgatacacatctctcctggaacaaaagatagtgttatgtgggctttggatggtttaagctttacatatagcttagttatctggaaaa

SEQ ID NO: 371885 - DNA, 120 bp, Artificial Sequence
  ENSG00000142166_5 (sequence is synthesized)
actcttcaggtgtagaagaaaggattgaaaatatttattccagacataaaatttataaactctcaccagagactacttattgtctaaaagttaaagcagcactacttacgtcatggaaaa

SEQ ID NO: 371886 - DNA, 120 bp, Artificial Sequence
  ENSG00000142166_6 (sequence is synthesized)
ttggtgtctatagtccagtacattgtataaagaccacagttgaaaatgaactacctccaccagaaaatatagaagtcagtgtccaaaatcagaactatgttcttaaatgggattatacat

SEQ ID NO: 371887 - DNA, 120 bp, Artificial Sequence
  ENSG00000142166_7 (sequence is synthesized)
atgcaaacatgacctttcaagttcagtggctccacgcctttttaaaaaggaatcctggaaaccatttgtataaatggaaacaaatacctgactgtgaaaatgtcaaaactacccagtgtg

SEQ ID NO: 371888 - DNA, 120 bp, Artificial Sequence
  ENSG00000142166_8 (sequence is synthesized)
tctttcctcaaaacgttttccaaaaaggaatttaccttctccgcgtacaagcatctgatggaaataacacatctttttggtctgaagagataaagtttgatactgaaatacaagctttcc

SEQ ID NO: 371889 - DNA, 120 bp, Artificial Sequence
  ENSG00000142166_9 (sequence is synthesized)
tacttcctccagtctttaacattagatcccttagtgattcattccatatctatatcggtgctccaaaacagtctggaaacacgcctgtgatccaggattatccactgatttatgaaatta

SEQ ID NO: 371890 - DNA, 120 bp, Artificial Sequence
  ENSG00000142166_10 (sequence is synthesized)
ttttttgggaaaacacttcaaatgctgagagaaaaattatcgagaaaaaaactgatgttacagttcctaatttgaaaccactgactgtatattgtgtgaaagccagagcacacaccatgg

SEQ ID NO: 371891 - DNA, 120 bp, Artificial Sequence
  ENSG00000142166_11 (sequence is synthesized)
atgaaaagctgaataaaagcagtgtttttagtgacgctgtatgtgagaaaacaaaaccaggaaatacctctaaaatttggcttatagttggaatttgtattgcattatttgctctcccgt

SEQ ID NO: 371892 - DNA, 120 bp, Artificial Sequence
  ENSG00000142166_12 (sequence is synthesized)
ttgtcatttatgctgcgaaagtcttcttgagatgcatcaattatgtcttctttccatcacttaaaccttcttccagtatagatgagtatttctctgaacagccattgaagaatcttctgc

SEQ ID NO: 371893 - DNA, 120 bp, Artificial Sequence
  ENSG00000142166_13 (sequence is synthesized)
tttcaacttctgaggaacaaatcgaaaaatgtttcataattgaaaatataagcacaattgctacagtagaagaaactaatcaaactgatgaagatcataaaaaatacagttcccaaacta

SEQ ID NO: 371894 - DNA, 120 bp, Artificial Sequence
  ENSG00000142166_14 (sequence is synthesized)
gccaagattcaggaaattattctaatgaagatgaaagcgaaagtaaaacaagtgaagaactacagcaggactttgtatgaccagaaatgaactgtgtcaagtataaggtttttcagcagg

SEQ ID NO: 371895 - DNA, 120 bp, Artificial Sequence
  ENSG00000142166_15 (sequence is synthesized)
agttacactgggagcctgaggtcctcaccttcctctcagtaactacagagaggacgtttccctgtttagggaaagaaaaaacatcttcagatcataggtcctaaaaatacgggcaagctc

SEQ ID NO: 371896 - DNA, 67 bp, Artificial Sequence
  ENSG00000142166_16 (sequence is synthesized)
acatcttcagatcataggtcctaaaaatacgggcaagctcttaactatttaaaaatgaaattacagg

SEQ ID NO: 371897 - DNA, 120 bp, Artificial Sequence
  ENSG00000142166_17 (sequence is synthesized)
cacgccactgcactccagcctggtgacagcgtgagactctttaaaaaaagaaattaaaagagttgagacaaacgtttcctacattcttttccatgtgtaaaatcatgaaaaagcctgtca

SEQ ID NO: 371898 - DNA, 120 bp, Artificial Sequence
  ENSG00000142166_18 (sequence is synthesized)
aatcatgaaaaagcctgtcaccggacttgcattggatgagatgagtcagaccaaaacagtggccacccgtcttcctcctgtgagcctaagtgcagccgtgctagctgcgcaccgtggcta

SEQ ID NO: 371899 - DNA, 120 bp, Artificial Sequence
  ENSG00000142166_19 (sequence is synthesized)
aggatgacgtctgtgttcctgtccatcactgatgctgctggctactgcatgtgccacacctgtctgttcgccattcctaacattctgtttcattcttcctcgggagatatttcaaacatt

SEQ ID NO: 371900 - DNA, 120 bp, Artificial Sequence
  ENSG00000142166_20 (sequence is synthesized)
tggtcttttcttttaacactgagggtaggcccttaggaaatttatttaggaaagtctgaacacgttatcacttggttttctggaaagtagcttaccctagaaaacagctgcaaatgccag

SEQ ID NO: 371901 - DNA, 120 bp, Artificial Sequence
  ENSG00000142166_21 (sequence is synthesized)
aaagatgatccctaaaaatgttgagggacttctgttcattcatcccgagaacattggcttccacatcacagtatctacccttacatggtttaggattaaagccaggcaatcttttactat

SEQ ID NO: 371902 - DNA, 120 bp, Artificial Sequence
  ENSG00000142166_22 (sequence is synthesized)
gcattaagacctctgattcaaaacttattagaacagtagcttctgctggaatttgcaatcactgaagtcatagaaaataggtaactatctaattagagaaataattgttgtattttaaga

SEQ ID NO: 371903 - DNA, 120 bp, Artificial Sequence
  ENSG00000142166_23 (sequence is synthesized)
tctgagagtgtgtacaagttttagtatacatgccatgccagaagatagtgtatgcaagaagtcttgggaccagaaaatggcaatgataggagactgacatagaagaagaatgcttcccta

SEQ ID NO: 371904 - DNA, 120 bp, Artificial Sequence
  ENSG00000142166_24 (sequence is synthesized)
agtgatcaacccactcttgttatgggtggtctctgtcactttgaatgccaggctggcttctcgtctagcagtattcagataccccttctgctcagcctgcttggcgttaaaatacaaatc

SEQ ID NO: 371905 - DNA, 120 bp, Artificial Sequence
  ENSG00000142166_25 (sequence is synthesized)
attgaactgagggggaaaaatgtaactaggaagaaaaacccaatttaagaaattacataatgctttccaaaggcacctacaacttagttttaaattacttgctactggggattacccatg

SEQ ID NO: 371906 - DNA, 120 bp, Artificial Sequence
  ENSG00000142166_26 (sequence is synthesized)
gatatccttaataggcaggaagtctgggaattctggtggcctctagggcagtgttctcacagcaccgttccgacagggaccagtgaaagaaaagagacaaagttagaacgtgctggggag

SEQ ID NO: 371907 - DNA, 120 bp, Artificial Sequence
  ENSG00000142166_27 (sequence is synthesized)
cggccatttctaaggccagtctggtttaagtagtcatttctgctgaaaaaacagatgatcctggtggaagaaaaggttgaaggcagctgccctcgggagggctgtgatgctcggcacatc

SEQ ID NO: 371908 - DNA, 120 bp, Artificial Sequence
  ENSG00000142166_28 (sequence is synthesized)
ctgcctggcacatacacgtgtctgcaggccacaccgtgcatgtccccagacctgccgcctggcttctggagtgcttcaagcagagcatggtgggtcattgaggagacccaggaatctcat

SEQ ID NO: 371909 - DNA, 120 bp, Artificial Sequence
  ENSG00000142166_29 (sequence is synthesized)
ggtcattgaggagacccaggaatctcatctgagaacccactctctgccggagaaccccatggtgacacattttcatctttctgaccagaggctgtttttttttttttttgagacagtctc

SEQ ID NO: 371910 - DNA, 120 bp, Artificial Sequence
  ENSG00000142166_30 (sequence is synthesized)
gcttgatctcggctcactgcaacctcgcctcccgggttcaagcaattctctgccgcagcctccagagtagctgggataacaggtgcccaccaccacaccccactaatttttgtatttgta

SEQ ID NO: 371911 - DNA, 73 bp, Artificial Sequence
  ENSG00000142166_31 (sequence is synthesized)
gtcttggactcctgacctcatgctccacccacggccggcctgacctttggaaaagccttgtcactttggacgt

SEQ ID NO: 371912 - DNA, 120 bp, Artificial Sequence
  ENSG00000142166_32 (sequence is synthesized)
gccggcctgacctttggaaaagccttgtcactttggacgtttgcgtctttgaagaggcgatgggagcatatcatgactgcctgccaccattgcttttcagactaccacaactcaatcatg

SEQ ID NO: 371913 - DNA, 120 bp, Artificial Sequence
  ENSG00000142166_33 (sequence is synthesized)
ctgtccaggacttctggccctgtgttcaccactgggaaaacgtacttcagactggatagcctaaaaaggagcaatgcccttgtaggatgtggagaagggaaaatacggacattaacatta

SEQ ID NO: 371914 - DNA, 120 bp, Artificial Sequence
  ENSG00000142166_34 (sequence is synthesized)
aaagacaccagtgaaattgttaggtctctaggaagttggagcacaaggcttcacgctttaagaccatctgtggttttcagtgaacaagcgctgagcaccagcagcagaaaacaacaacaa

SEQ ID NO: 371915 - DNA, 120 bp, Artificial Sequence
  ENSG00000142166_35 (sequence is synthesized)
aaaaacacctcgtttttaccttgtcttctagacatgaaaaggcagttgcattccactctgcattatgttctacatgttgctttatcagtatatgcttagctgtaagtgacaagtattttt

SEQ ID NO: 371916 - DNA, 120 bp, Artificial Sequence
  ENSG00000142166_36 (sequence is synthesized)
tctgaacagaagtttacttagaaataccatgcacttgggggtaccaattaaccgcctgaaaattagcatattgatagttcttagagagaccagatataatctaagaatttatatgaaaga

SEQ ID NO: 371917 - DNA, 120 bp, Artificial Sequence
  ENSG00000142166_37 (sequence is synthesized)
tatcattagagccagaaataattttatattaatatataatacagattaacattatatataatatgtacctgtgtcacttctgacatgagcctgtaaacatatattcatatatgtacctgc

SEQ ID NO: 371918 - DNA, 120 bp, Artificial Sequence
  ENSG00000142166_38 (sequence is synthesized)
ctgcacatgtacccacctgatgtaggtcttattcctttagtatggacttaaagtacttattcatataccttgtaactaaaaattagaacagctccctagaattgtgaacttttaagagtc

SEQ ID NO: 371919 - DNA, 120 bp, Artificial Sequence
  ENSG00000142166_39 (sequence is synthesized)
aattagaacagctccctagaattgtgaacttttaagagtctgactagaaatttgcaacttataaaaaagttacttttaaaaatataagttagggctaggcacagtggctcatgcctataa

SEQ ID NO: 371920 - DNA, 120 bp, Artificial Sequence
  ENSG00000142166_40 (sequence is synthesized)
aggccaggagttcaagatcaaccaacctgggtaacatggccagaccccatctctatttatatatatatatataaaacttagagtttttatcttcccctaaaagaggccgtgatatttgca

SEQ ID NO: 371921 - DNA, 120 bp, Artificial Sequence
  ENSG00000142166_41 (sequence is synthesized)
gcagcctcaaattgctcttaaggggtttaggtgtgcagaagctttcctttccctacccagtaaccatgtgactactaacgtggtatattgatttattttgtttgctgtctgtctcccctg

SEQ ID NO: 371922 - DNA, 120 bp, Artificial Sequence
  ENSG00000142166_42 (sequence is synthesized)
ccccactgctggaacagaggctccaagaaaacagggaccttattattcattactgcatccccagtaatgaaagtacttagaaaataattattgaatgaatgaaatctaaactgtgaacct

SEQ ID NO: 371923 - DNA, 120 bp, Artificial Sequence
  ENSG00000142166_43 (sequence is synthesized)
gagggtgtttgtggcagtgtttgttttactgaattgtagaaggacataaccgtgttttcagtgtttctatggaacaaacttgtacattttatttcacttgtgttttgtcttaaaccctac

SEQ ID NO: 371924 - DNA, 120 bp, Artificial Sequence
  ENSG00000142166_44 (sequence is synthesized)
tgctggaaacaattttatgtaataagcaatgggcccaaaagtctaggagtttttttgtacttagtgaatttgtatgcaacagagatgctgcagctgatgcctttaaaaggtattcatcat

SEQ ID NO: 371925 - DNA, 120 bp, Artificial Sequence
  ENSG00000142166_45 (sequence is synthesized)
ggaagagctgaggcctgtgcttggtgttccagagcccagggttgagcatcctgaaggagccactgcagccgtcactgtccccagagcctgtggagatagagcctgtttgctgctttttct

SEQ ID NO: 371926 - DNA, 120 bp, Artificial Sequence
  ENSG00000142166_46 (sequence is synthesized)
tcccgctcttaagacatggctggagctcagtcttcattgaatgaagtttgctgtggtattgcatagccttgctttcttgaactaaactgtttgcccttcacaagtagttcttctttcagg

SEQ ID NO: 371927 - DNA, 120 bp, Artificial Sequence
  ENSG00000142166_47 (sequence is synthesized)
attagttcgttccaaggaggctcttcagtctcacagataagtagatctctcctgctgtctggacacatttcactcggaaattgaatacaatttgtattcaggctgggaacctgaacacac

SEQ ID NO: 371928 - DNA, 120 bp, Artificial Sequence
  ENSG00000142166_48 (sequence is synthesized)
acttgtgtttttaagcttcccttttttacagtggacaaggacacaaataataaataaatcatccctaatgcccaagaaatgccctggtacttagtaataacaaaataccagtaacttcca

SEQ ID NO: 371929 - DNA, 74 bp, Artificial Sequence
  ENSG00000142166_49 (sequence is synthesized)
ctaccactgccaaaaaaaataaaccagcttgcagcattcctggaaattctaactaacagatgttcttgcatatt

SEQ ID NO: 371930 - DNA, 120 bp, Artificial Sequence
  ENSG00000142166_50 (sequence is synthesized)
cattcctggaaattctaactaacagatgttcttgcatattgatatgagccacctccagcagagcacaacatgaccacagtctggaacagtctttggttttcttttatgttagatgcatat

SEQ ID NO: 371931 - DNA, 120 bp, Artificial Sequence
  ENSG00000142166_51 (sequence is synthesized)
ctcttccattgtttgtgagtttcctgagtgtggatactatttatttctgtaaccttagcccctaacatagtgtctggcaattgtaaatacttaataaatatctaatgaatttaaaaaata

SEQ ID NO: 371932 - DNA, 120 bp, Artificial Sequence
  ENSG00000142166_52 (sequence is synthesized)
tcagccacttcctccttccagcctcatctggttcccaggccgctggggactcccaacgccactgtccaagactctagggtcagcaagcgccccgggcggagaagggcgaggacgaagagc

SEQ ID NO: 371933 - DNA, 120 bp, Artificial Sequence
  ENSG00000142166_53 (sequence is synthesized)
gccgggccgcgaccaggagcccacccgcgccctccgactgcagacatggggaagagacgcgggaactccaaagtcgctgggtctgcgcaggtggaaaaaatctaaaatctcctcaaaaag

SEQ ID NO: 371934 - DNA, 120 bp, Artificial Sequence
  ENSG00000142168_0 (sequence is synthesized)
gtttggggccagagtgggcgaggcgcggaggtctggcctataaagtagtcgcggagacggggtgctggtttgcgtcgtagtctcctgcagcgtctggggtttccgttgcagtcctcggaa

SEQ ID NO: 371935 - DNA, 120 bp, Artificial Sequence
  ENSG00000142168_1 (sequence is synthesized)
ccaggacctcggcgtggcctagcgagttatggcgacgaaggccgtgtgcgtgctgaagggcgacggcccagtgcagggcatcatcaatttcgagcagaaggaaagtaatggaccagtgaa

SEQ ID NO: 371936 - DNA, 120 bp, Artificial Sequence
  ENSG00000142168_2 (sequence is synthesized)
ggtgtggggaagcattaaaggactgactgaaggcctgcatggattccatgttcatgagtttggagataatacagcaggctgtaccagtgcaggtcctcactttaatcctctatccagaaa

SEQ ID NO: 371937 - DNA, 120 bp, Artificial Sequence
  ENSG00000142168_3 (sequence is synthesized)
acacggtgggccaaaggatgaagagaggcatgttggagacttgggcaatgtgactgctgacaaagatggtgtggccgatgtgtctattgaagattctgtgatctcactctcaggagacca

SEQ ID NO: 371938 - DNA, 120 bp, Artificial Sequence
  ENSG00000142168_4 (sequence is synthesized)
cattggccgcacactggtggtccatgaaaaagcagatgacttgggcaaaggtggaaatgaagaaagtacaaagacaggaaacgctggaagtcgtttggcttgtggtgtaattgggatcgc

SEQ ID NO: 371939 - DNA, 120 bp, Artificial Sequence
  ENSG00000142168_5 (sequence is synthesized)
ccaataaacattcccttggatgtagtctgaggccccttaactcatctgttatcctgctagctgtagaaatgtatcctgataaacattaaacactgtaatcttaaaagtgtaattgtgtga

SEQ ID NO: 371940 - DNA, 120 bp, Artificial Sequence
  ENSG00000142168_6 (sequence is synthesized)
ctttttcagagttgctttaaagtacctgtagtgagaaactgatttatgatcacttggaagatttgtatagttttataaaactcagttaaaatgtctgtttcaatgacctgtattttgcca

SEQ ID NO: 371941 - DNA, 120 bp, Artificial Sequence
  ENSG00000142168_7 (sequence is synthesized)
gacttaaatcacagatgggtattaaacttgtcagaatttctttgtcattcaagcctgtgaataaaaaccctgtatggcacttattatgaggctattaaaagaatccaaattcaaactaaa

SEQ ID NO: 371942 - DNA, 120 bp, Artificial Sequence
  ENSG00000142168_8 (sequence is synthesized)
tttcgagcagaaggcaagggctgggacggaggcttgtttgcgaggccgctcccacccgctcgtccccccgcgcacctttgctaggagcgggtcgcccgccaggcctcggggccgccctgg

SEQ ID NO: 371943 - DNA, 80 bp, Artificial Sequence
  ENSG00000142168_9 (sequence is synthesized)
tccagcgcccggtcccggcccgtgccgcccggtcggtgccttcgcccccagcggtgcggtgcccaagtgctgagtcaccg

SEQ ID NO: 371944 - DNA, 120 bp, Artificial Sequence
  ENSG00000142168_10 (sequence is synthesized)
ggggagggattgccgcgggccggggaggggcgggggcgggcgtgctgccctctgtggtccttgggccgccgccgcgggtctgtcgtggtgcctggagcggctgtgctcgtcccttgcttg

SEQ ID NO: 371945 - DNA, 120 bp, Artificial Sequence
  ENSG00000142168_11 (sequence is synthesized)
tggagcggctgtgctcgtcccttgcttggccgtgttctcgttcctgagggtcccgcggacaccgagtggcgcagtgccaggcccagcccggggatggcgactgcgcctgggcccgcctgg

SEQ ID NO: 371946 - DNA, 120 bp, Artificial Sequence
  ENSG00000142168_12 (sequence is synthesized)
tgtcttcgcatccctctccgctttccggcttcagcgctctaggtcagggagtcttcgcttttgtacagctctaaggctaggaatggtttttatatttttaaaaggctttggaaaacaaaa

SEQ ID NO: 371947 - DNA, 120 bp, Artificial Sequence
  ENSG00000142168_13 (sequence is synthesized)
atacgcaacagagaccgtttgtgtgacactttgcagggaagtttgctggcctctgttctaggtcatgattgggctgcaagggcagagaaggtagccttgaacagaggtccttttcctcct

SEQ ID NO: 371948 - DNA, 120 bp, Artificial Sequence
  ENSG00000142173_0 (sequence is synthesized)
cggccgcggttccctccctgctgcttactcggcgcccgcgcctcgggccgtcgggagcggagcctcctcgggaccaggacttcagggccacaggtgctgccaagatgctccagggcacct

SEQ ID NO: 371949 - DNA, 120 bp, Artificial Sequence
  ENSG00000142173_1 (sequence is synthesized)
gctccgtgctcctgctctggggaatcctgggggccatccaggcccagcagcaggaggtcatctcgccggacactaccgagagaaacaacaactgcccagagaagaccgactgccccatcc

SEQ ID NO: 371950 - DNA, 120 bp, Artificial Sequence
  ENSG00000142173_2 (sequence is synthesized)
acgtgtacttcgtgctggacacctcggagagcgtcaccatgcagtcccccacggacatcctgctcttccacatgaagcagttcgtgccgcagttcatcagccagctgcagaacgagttct

SEQ ID NO: 371951 - DNA, 120 bp, Artificial Sequence
  ENSG00000142173_3 (sequence is synthesized)
acctggaccaggtggcgctgagctggcgctacggcggcctgcacttctctgaccaggtggaggtgttcagcccaccgggcagcgaccgggcctccttcatcaagaacctgcagggcatca

SEQ ID NO: 371952 - DNA, 120 bp, Artificial Sequence
  ENSG00000142173_4 (sequence is synthesized)
gctccttccgccgcggcaccttcaccgactgcgcgctggccaacatgacggagcagatccggcaggaccgcagcaagggcaccgtccacttcgccgtggtcatcaccgacggccacgtca

SEQ ID NO: 371953 - DNA, 120 bp, Artificial Sequence
  ENSG00000142173_5 (sequence is synthesized)
ccggcagcccctgcgggggcatcaagctgcaggccgagcgggcccgcgaggagggcatccggctcttcgccgtggcccccaaccagaacctgaaggagcagggcctgcgggacatcgcca

SEQ ID NO: 371954 - DNA, 120 bp, Artificial Sequence
  ENSG00000142173_6 (sequence is synthesized)
gcacgccgcacgagctctaccgcaacgactacgccaccatgctgcccgactccaccgagatcgaccaggacaccatcaaccgcatcatcaaggtcatgaaacacgaagcctacggagagt

SEQ ID NO: 371955 - DNA, 120 bp, Artificial Sequence
  ENSG00000142173_7 (sequence is synthesized)
gctacaaggtgagctgcctggaaatccctgggccctctggccccaagggctaccgtggacagaagggtgccaagggcaacatgggtgagccgggagagcctggccagaagggaagacagg

SEQ ID NO: 371956 - DNA, 120 bp, Artificial Sequence
  ENSG00000142173_8 (sequence is synthesized)
gagacccgggcatcgaaggccccattggattcccaggacccaagggcgttcctggcttcaaaggagagaagggtgaatttggagccgacggtcgcaagggggcccctggcctggctggca

SEQ ID NO: 371957 - DNA, 120 bp, Artificial Sequence
  ENSG00000142173_9 (sequence is synthesized)
agaacgggaccgatggacagaagggcaagctggggcgcatcggacctcctggctgcaagggagaccctggaaaccggggccccgacggttacccgggggaagcagggagtccaggggagc

SEQ ID NO: 371958 - DNA, 120 bp, Artificial Sequence
  ENSG00000142173_10 (sequence is synthesized)
gaggagaccaaggcggcaagggggaccctggccgcccaggacgcagagggcccccgggagaaatcggggccaagggaagcaaggggtatcaaggcaacagtggagccccaggaagtcctg

SEQ ID NO: 371959 - DNA, 120 bp, Artificial Sequence
  ENSG00000142173_11 (sequence is synthesized)
gtgtgaaaggagccaagggcgggcctgggccccgcggacccaaaggcgagccggggcgcaggggagaccccggcaccaagggcagcccaggcagcgatggccccaagggggagaaggggg

SEQ ID NO: 371960 - DNA, 120 bp, Artificial Sequence
  ENSG00000142173_12 (sequence is synthesized)
accctggccctgaggggccccgcggcctggctggagaggttggcaacaaaggagccaagggagaccgaggcttgcctggacccagaggcccccagggagctcttggggagcccggaaagc

SEQ ID NO: 371961 - DNA, 120 bp, Artificial Sequence
  ENSG00000142173_13 (sequence is synthesized)
agggatctcggggagaccccggtgatgcaggaccccgtggagactcaggacagccaggccccaagggagaccccggcaggcctggattcagctacccaggaccccgaggagcacccggag

SEQ ID NO: 371962 - DNA, 120 bp, Artificial Sequence
  ENSG00000142173_14 (sequence is synthesized)
cctggtccccctggtgagccaggccctcgggggccaagaggagtcccaggacccgagggtgagcccggcccccctggagaccccggtctcacggagtgtgacgtcatgacctacgtgagg

SEQ ID NO: 371963 - DNA, 120 bp, Artificial Sequence
  ENSG00000142173_15 (sequence is synthesized)
gagacctgcgggtgctgcgactgtgagaagcgctgtggcgccctggacgtggtcttcgtcatcgacagctccgagagcattgggtacaccaacttcacactggagaagaacttcgtcatc

SEQ ID NO: 371964 - DNA, 120 bp, Artificial Sequence
  ENSG00000142173_16 (sequence is synthesized)
aacgtggtcaacaggctgggtgccatcgctaaggaccccaagtccgagacagggacgcgtgtgggcgtggtgcagtacagccacgagggcacctttgaggccatccagctggacgacgaa

SEQ ID NO: 371965 - DNA, 120 bp, Artificial Sequence
  ENSG00000142173_17 (sequence is synthesized)
cgtatcgactccctgtcgagcttcaaggaggctgtcaagaacctcgagtggattgcgggcggcacctggacaccctcagccctcaagtttgcctacgaccgcctcatcaaggagagccgg

SEQ ID NO: 371966 - DNA, 120 bp, Artificial Sequence
  ENSG00000142173_18 (sequence is synthesized)
cgccagaagacacgtgtgtttgcggtggtcatcacggacgggcgccacgaccctcgggacgatgacctcaacttgcgggcgctgtgcgaccgcgacgtcacagtgacggccatcggcatc

SEQ ID NO: 371967 - DNA, 120 bp, Artificial Sequence
  ENSG00000142173_19 (sequence is synthesized)
ggggacatgttccacgagaagcacgagagtgaaaacctctactccatcgcctgcgacaagccacagcaggtgcgcaacatgacgctgttctccgacctggtcgctgagaagttcatcgat

SEQ ID NO: 371968 - DNA, 120 bp, Artificial Sequence
  ENSG00000142173_20 (sequence is synthesized)
gacatggaggacgtcctctgcccggaccctcagatcgtgtgcccagaccttccctgccaaacagagctgtccgtggcacagtgcacgcagcggcccgtggacatcgtcttcctgctggac

SEQ ID NO: 371969 - DNA, 120 bp, Artificial Sequence
  ENSG00000142173_21 (sequence is synthesized)
ggctccgagcggctgggtgagcagaacttccacaaggcccggcgcttcgtggagcaggtggcgcggcggctgacgctggcccggagggacgacgaccctctcaacgcacgcgtggcgctg

SEQ ID NO: 371970 - DNA, 120 bp, Artificial Sequence
  ENSG00000142173_22 (sequence is synthesized)
ctgcagtttggtggccccggcgagcagcaggtggccttcccgctgagccacaacctcacggccatccacgaggcgctggagaccacacaatacctgaactccttctcgcacgtgggcgca

SEQ ID NO: 371971 - DNA, 120 bp, Artificial Sequence
  ENSG00000142173_23 (sequence is synthesized)
ggcgtggtgcacgccatcaatgccatcgtgcgcagcccgcgtggcggggcccggaggcacgcagagctgtccttcgtgttcctcacggacggcgtcacgggcaacgacagtctgcacgag

SEQ ID NO: 371972 - DNA, 120 bp, Artificial Sequence
  ENSG00000142173_24 (sequence is synthesized)
tcggcgcactccatgcgcaagcagaacgtggtacccaccgtgctggccttgggcagcgacgtggacatggacgtgctcaccacgctcagcctgggtgaccgcgccgccgtgttccacgag

SEQ ID NO: 371973 - DNA, 120 bp, Artificial Sequence
  ENSG00000142173_25 (sequence is synthesized)
aaggactatgacagcctggcgcaacccggcttcttcgaccgcttcatccgctggatctgctagcgccgccgcccgggccccgcagtcgagggtcgtgagcccaccccgtccatggtgcta

SEQ ID NO: 371974 - DNA, 120 bp, Artificial Sequence
  ENSG00000142173_26 (sequence is synthesized)
gctaagcgggcccgggtcccacacggccagcaccgctgctcactcggacgacgccctgggcctgcacctctccagctcctcccacggggtccccgtagccccggcccccgcccagcccca

SEQ ID NO: 371975 - DNA, 120 bp, Artificial Sequence
  ENSG00000142173_27 (sequence is synthesized)
tccccaggccctccgcaggctgcccggcctccctccccctgcagccatcccaaggctcctgacctacctggcccctgagctctggagcaagccctgacccaataaaggctttgaacccat

SEQ ID NO: 371976 - DNA, 120 bp, Artificial Sequence
  ENSG00000142173_28 (sequence is synthesized)
atctcactatgttgcccagcctggtctctaactcctggcctcaagcagtcctccctgcctcggcctaccaaaatgttgggattccaggcgtgagctgcacccggcctttcttcccttcta

SEQ ID NO: 371977 - DNA, 120 bp, Artificial Sequence
  ENSG00000142173_29 (sequence is synthesized)
ttttctgtcatggcttaagccaggcttggttttttaaacttgcctagaacacctgaccgagagccaaactctttggcttgtccctgatgggggcagagcctcacagcaccccatgtctca

SEQ ID NO: 371978 - DNA, 120 bp, Artificial Sequence
  ENSG00000142173_30 (sequence is synthesized)
cagctccctcacgcccgcccaggttctcagggcatttcagcatctccttggcccctgctgagagtcgtgggctacacgttctgagaccctgccctgccacctgaggaatgtcccacccat

SEQ ID NO: 371979 - DNA, 120 bp, Artificial Sequence
  ENSG00000142173_31 (sequence is synthesized)
tggcggcgagcccccggtcaccttcctccgcacggaagaggggccggacgccaccttccccaggaccattcccctgatccaacagttgctaaacgccacggagctcacgcaggacccggc

SEQ ID NO: 371980 - DNA, 120 bp, Artificial Sequence
  ENSG00000142173_32 (sequence is synthesized)
cgcctactcccagctggtggccgtgctggtctacaccgccgagcgggccaagttcgccaccggggtagagcggcaggactggatggagctgttcattgacacctttaagctggtgcacag

SEQ ID NO: 371981 - DNA, 120 bp, Artificial Sequence
  ENSG00000142173_33 (sequence is synthesized)
ggacatcgtgggggaccccgagaccgcgctggccctctgctaaagcccgggcacccgcccagccgggctgggccctccctgccacactagcttcccagggctgcccccgacaggctggct

SEQ ID NO: 371982 - DNA, 120 bp, Artificial Sequence
  ENSG00000142173_34 (sequence is synthesized)
ctcagtggaggccagagatctggaatcggggtcagcggggctacagtccttccaggggctctggggcagctcccagcctcttcccatgctggtggccaccgtgtcccttgctgcggctgc

SEQ ID NO: 371983 - DNA, 120 bp, Artificial Sequence
  ENSG00000142173_35 (sequence is synthesized)
atcttccagtctctcctccgtcttcctgtggccgctctctttataagaaccctggtcattgaatttaaggcccaccccaagtccagaatgacctcgcaagacccttaactcactcccgtc

SEQ ID NO: 371984 - DNA, 120 bp, Artificial Sequence
  ENSG00000142173_36 (sequence is synthesized)
ccaccgtgcgggtctcctagctccctgccagcttcctgtccctgtgctcactgcccccacgcctcctgccaaggccgagccacacacccgctccacctgcatttcctctaccgactcgcc

SEQ ID NO: 371985 - DNA, 120 bp, Artificial Sequence
  ENSG00000142173_37 (sequence is synthesized)
agcccaaatgccgctcttcactctggcctcgctgagcggctgcccgaggaggagctctaggccgacgcccaccgcaggccttacagtcttctctggacgctcccttgcagatgcaccgtg

SEQ ID NO: 371986 - DNA, 120 bp, Artificial Sequence
  ENSG00000142173_38 (sequence is synthesized)
tggcgcttcccttcctgccagtgctggccggcagctgacccagcagagatgaccgcgccaggctgccgactcctggcgcctccaggctggaacagatgagaggagagggagtcacctgct

SEQ ID NO: 371987 - DNA, 120 bp, Artificial Sequence
  ENSG00000142173_39 (sequence is synthesized)
ggacccgggctgacagcgacccgcagcccctgccgggccgcccacacccgccctgggactccgccggggcgctggtggaaccgctgggcctgggtctccactgctggcaaccgaacggat

SEQ ID NO: 371988 - DNA, 120 bp, Artificial Sequence
  ENSG00000142173_40 (sequence is synthesized)
ctgctggcaaccgaacggatcggccctctgtggagccgcaggtgtgcgggcgagcggcgcccatccgggctgtgccagcagaaccccggtgcccgcgcctaggacgcccctggagaaggg

SEQ ID NO: 371989 - DNA, 120 bp, Artificial Sequence
  ENSG00000142173_41 (sequence is synthesized)
accttccctttggggtcggaacccagaaaggaggggcctgcgatccgcggagctccttgttcttgggataacacagctctggcttggaggcccccttgcacttcgactctggacttcagg

SEQ ID NO: 371990 - DNA, 120 bp, Artificial Sequence
  ENSG00000142178_0 (sequence is synthesized)
gcagcggcggcggcagccggagcagtaggcacccgagcagcgccagcggccgagcgggcggcttcctggcctgggcgctccggtggcggcggaggtgcgcgcggagccatggttatcatg

SEQ ID NO: 371991 - DNA, 120 bp, Artificial Sequence
  ENSG00000142178_1 (sequence is synthesized)
aggtgcgcgcggagccatggttatcatgtcggagttcagcgcggaccccgcgggccagggtcagggccagcagaagcccctccgggtgggtttttacgacatcgagcggaccctgggcaa

SEQ ID NO: 371992 - DNA, 120 bp, Artificial Sequence
  ENSG00000142178_2 (sequence is synthesized)
aggcaacttcgcggtggtgaagctggcgcggcatcgagtcaccaaaacgcaggttgcaataaaaataattgataaaacacgattagattcaagcaatttggagaaaatctatcgtgaggt

SEQ ID NO: 371993 - DNA, 120 bp, Artificial Sequence
  ENSG00000142178_3 (sequence is synthesized)
tcagctgatgaagcttctgaaccatccacacatcataaagctttaccaggttatggaaacaaaggacatgctttacatcgtcactgaatttgctaaaaatggagaaatgtttgattattt

SEQ ID NO: 371994 - DNA, 120 bp, Artificial Sequence
  ENSG00000142178_4 (sequence is synthesized)
gacttccaacgggcacctgagtgagaacgaggcgcggaagaagttctggcaaatcctgtcggccgtggagtactgtcacgaccatcacatcgtccaccgggacctcaagaccgagaacct

SEQ ID NO: 371995 - DNA, 120 bp, Artificial Sequence
  ENSG00000142178_5 (sequence is synthesized)
cctgctggatggcaacatggacatcaagctggcagattttggatttgggaatttctacaagtcaggagagcctctgtccacgtggtgtgggagccccccgtatgccgccccggaagtctt

SEQ ID NO: 371996 - DNA, 120 bp, Artificial Sequence
  ENSG00000142178_6 (sequence is synthesized)
tgaggggaaggagtatgaaggcccccagctggacatctggagcctgggcgtggtgctgtacgtcctggtctgcggttctctccccttcgatgggcctaacctgccgacgctgagacagcg

SEQ ID NO: 371997 - DNA, 120 bp, Artificial Sequence
  ENSG00000142178_7 (sequence is synthesized)
ggtgctggagggccgcttccgcatccccttcttcatgtctcaagactgtgagagcctgatccgccgcatgctggtggtggaccccgccaggcgcatcaccatcgcccagatccggcagca

SEQ ID NO: 371998 - DNA, 120 bp, Artificial Sequence
  ENSG00000142178_8 (sequence is synthesized)
ccggtggatgcgggctgagccctgcttgccgggacccgcctgccccgccttctccgcacacagctacacctccaacctgggcgactacgatgagcaggcgctgggtatcatgcagaccct

SEQ ID NO: 371999 - DNA, 120 bp, Artificial Sequence
  ENSG00000142178_9 (sequence is synthesized)
gggcgtggaccggcagaggacggtggagtcactgcaaaacagcagctataaccactttgctgccatttattacctcctccttgagcggctcaaggagtatcggaatgcccagtgcgcccg

SEQ ID NO: 372000 - DNA, 120 bp, Artificial Sequence
  ENSG00000142178_10 (sequence is synthesized)
ccccgggcctgccaggcagccgcggcctcggagctcggacctcagtggtttggaggtgcctcaggaaggtctttccaccgaccctttccgacctgccttgctgtgcccgcagccgcagac

SEQ ID NO: 372001 - DNA, 120 bp, Artificial Sequence
  ENSG00000142178_11 (sequence is synthesized)
cttggtgcagtccgtcctccaggccgagatggactgtgagctccagagctcgctgcagtggcccttgttcttcccggtggatgccagctgcagcggagtgttccggccccggcccgtgtc

SEQ ID NO: 372002 - DNA, 120 bp, Artificial Sequence
  ENSG00000142178_12 (sequence is synthesized)
cccaagcagcctgctggacacagccatcagtgaggaggccaggcaggggccgggcctagaggaggagcaggacacgcaggagtccctgcccagcagcacgggccggaggcacaccctggc

SEQ ID NO: 372003 - DNA, 120 bp, Artificial Sequence
  ENSG00000142178_13 (sequence is synthesized)
cgaggtctccacccgcctctccccactcaccgcgccatgtatagtcgtctccccctccaccacggcaagtcctgcagagggaaccagctctgacagttgtctgaccttctctgcgagcaa

SEQ ID NO: 372004 - DNA, 120 bp, Artificial Sequence
  ENSG00000142178_14 (sequence is synthesized)
aagccccgcggggctcagtggcaccccggccactcaggggctgctgggcgcctgctccccggtcaggctggcctcgcccttcctggggtcgcagtccgccaccccagtgctgcaggctca

SEQ ID NO: 372005 - DNA, 120 bp, Artificial Sequence
  ENSG00000142178_15 (sequence is synthesized)
ggggggcttgggaggagctgttctgctccctgtcagcttccaggagggacggcgggcgtcggacacctcactgactcaagggctgaaggcctttcggcagcagctgaggaagaccacgcg

SEQ ID NO: 372006 - DNA, 120 bp, Artificial Sequence
  ENSG00000142178_16 (sequence is synthesized)
gaccaaagggtttctgggactgaacaaaatcaaggggctggctcgccaggtgtgccaggcccccgccagccgggccagcaggggcggcctgagccccttccacgcccctgcacagagccc

SEQ ID NO: 372007 - DNA, 120 bp, Artificial Sequence
  ENSG00000142178_17 (sequence is synthesized)
aggcctgcacggcggcgcagccggcagccgggagggctggagcctgctggaggaggtgctagagcagcagaggctgctccagttacagcaccacccggccgctgcacccggctgctccca

SEQ ID NO: 372008 - DNA, 120 bp, Artificial Sequence
  ENSG00000142178_18 (sequence is synthesized)
ccccagccggcccctgccccgtttgtgatcgccccctgtgatggccctggggctgccccgctccccagcaccctcctcacgtcggggctcccgctgctgccgcccccactcctgcagacc

SEQ ID NO: 372009 - DNA, 120 bp, Artificial Sequence
  ENSG00000142178_19 (sequence is synthesized)
cccaccgccctccccgctgtgcccccaccacgcctggccaggctggccccaggttgtgagcccctggggctgctgcagggggactgtgagatggaggacctgatgccctgctccctaggc

SEQ ID NO: 372010 - DNA, 120 bp, Artificial Sequence
  ENSG00000142178_20 (sequence is synthesized)
acgtttgtcctggtgcagtgagggcagccctgcatcctggcacggacactgactcttacagcaataacttcagaggaggtgaagacatctggcctcaaagccaagaactttctagaagcg

SEQ ID NO: 372011 - DNA, 120 bp, Artificial Sequence
  ENSG00000142178_21 (sequence is synthesized)
aaataagcaatacgttaggtgttttggctttttagtttatttttgttttatttttttcttgcactgagtgacctcaactttgagtagggactggaaactttaggaagaaagataattgag

SEQ ID NO: 372012 - DNA, 120 bp, Artificial Sequence
  ENSG00000142178_22 (sequence is synthesized)
gggcgtgtctgggggcgggggcaggaggggagcggggtggagggaacacgtgcagtgccgtggtgtggggatctcggcccctctctctgggttcgtcgtggttgagatgattacctcgga

SEQ ID NO: 372013 - DNA, 90 bp, Artificial Sequence
  ENSG00000142178_23 (sequence is synthesized)
cattgattactatccatttctttagtcaacgctctccacttcctgatttctgctttaaggaaaactgtgaactttctgcttcatgtatca

SEQ ID NO: 372014 - DNA, 120 bp, Artificial Sequence
  ENSG00000142178_24 (sequence is synthesized)
tgctttaaggaaaactgtgaactttctgcttcatgtatcagttttaaagcagcccaggcaaagatcatctacagattctaggaattctctcccctgaaatcaaaacctggaagacttttt

SEQ ID NO: 372015 - DNA, 120 bp, Artificial Sequence
  ENSG00000142178_25 (sequence is synthesized)
tttcttattttagttgagaagtttcataaactgctcaaggattagttttccaggactctgcggaggaacggcaggaagaacctcagagagggcagaggtgacttcaaagtgctggggact

SEQ ID NO: 372016 - DNA, 120 bp, Artificial Sequence
  ENSG00000142178_26 (sequence is synthesized)
ccgtcctgagggtcacttggccctgagcccctgcgtgcccttgcggaagcccagaagcttcttcctgctgcacctcccgtttccgctgctgctgacgtttatgcatttcatgatggggtc

SEQ ID NO: 372017 - DNA, 120 bp, Artificial Sequence
  ENSG00000142178_27 (sequence is synthesized)
caacaagaacacctgacttgggtgaagttgtgcaatattggaggctgactgtagggctgggcagctgggagacaggctcatggctcatggctcatggctcagggcggtgcctgccctggg

SEQ ID NO: 372018 - DNA, 120 bp, Artificial Sequence
  ENSG00000142178_28 (sequence is synthesized)
ccgggacccccctccccaccccccacctaggctttttgggttttgttcaaggaaggtaaagtgagaggtttaggtcagtgtttttaagtttttgttttttttttaaagcaaatcctgtat

SEQ ID NO: 372019 - DNA, 120 bp, Artificial Sequence
  ENSG00000142178_29 (sequence is synthesized)
atgtatctacatgggagacaggtagacactacttatttgttacattttgtactatacgtttgtgttccaggtttcagcttccctcgctcctgttgttaagaagcgtccctgtcagcacag

SEQ ID NO: 372020 - DNA, 120 bp, Artificial Sequence
  ENSG00000142178_30 (sequence is synthesized)
gtgtgcattgaggaaggggccccagggccttcgctccctcagcactggggtggaggcggcaggaaggggcggcccttacctggcaggtctgggcgcacctttagcaggtggactccgtgg

SEQ ID NO: 372021 - DNA, 120 bp, Artificial Sequence
  ENSG00000142178_31 (sequence is synthesized)
ggctccaccagccagaagcctctggaaggcaacgaaggcaatgctgctccctgagtccagtccccgcccccaaacccagcccaggtgccttcagctacttcggcttcttaaaccctgcag

SEQ ID NO: 372022 - DNA, 120 bp, Artificial Sequence
  ENSG00000142178_32 (sequence is synthesized)
tgttaaacagaggcattgagaaaggggaaaggcgggtatttttaaaagccaaagattgacccagttacttgagggtagggaggcgggcccagtgcaggaggctgcatccctggcctgctg

SEQ ID NO: 372023 - DNA, 120 bp, Artificial Sequence
  ENSG00000142178_33 (sequence is synthesized)
gtgcccaccgggggctgtgcctgtgccgggccgcagggaagctggctgcccccattcctgctgctgctgctgctgctgctctgtggctgtttcaaagactgggcgaaaggctgtccggag

SEQ ID NO: 372024 - DNA, 120 bp, Artificial Sequence
  ENSG00000142178_34 (sequence is synthesized)
ggcagaccaggtgccttgccgcagagaaaacaccaaagtctcctgttcgctcataaagaagtttttgggatgggagagaatccagaccatcttggggcagccaggcccttgccttcattt

SEQ ID NO: 372025 - DNA, 120 bp, Artificial Sequence
  ENSG00000142178_35 (sequence is synthesized)
ttacagaggtagcacaactgattccaacacaaaaccccttcccctttttaaaatgatttctgttctaatgccatagatcaaaggcctcagaaaccattgtgtgtttcctctttgaagcaa

SEQ ID NO: 372026 - DNA, 120 bp, Artificial Sequence
  ENSG00000142178_36 (sequence is synthesized)
tgacaagcactttactttcacggtggtttttgttttttcttattgctgtggaacctcttttggaggacgttaaaggcgtgttttacttgtttttttaagagtgtgtgatgtgtgttttgt

SEQ ID NO: 372027 - DNA, 120 bp, Artificial Sequence
  ENSG00000142178_37 (sequence is synthesized)
agatttcttgacagtgctgtaatacagacggcaatgcaatagcctatttaaagacactacgtgatctgattgagatgtacatagtttttttttttaccataactgaattattttatctct

SEQ ID NO: 372028 - DNA, 120 bp, Artificial Sequence
  ENSG00000142178_38 (sequence is synthesized)
tatgttaacatgagaaatgtatgccaaatgattagttgatgtatgttttttaatttaatatttaaataaaatatttggaaggaaaaaaccttgactttttcccttcctctctctctcatc

SEQ ID NO: 372029 - DNA, 120 bp, Artificial Sequence
  ENSG00000142178_39 (sequence is synthesized)
cactgaatttgctaaaaatggagaaatgtttggtaagccacactcgttttcagtatctgttgaaaaccaatggcacgaacgcgtctggatttgcgcggccagtgtctgggccacacatcc

SEQ ID NO: 372030 - DNA, 120 bp, Artificial Sequence
  ENSG00000142178_40 (sequence is synthesized)
gggttctggtggatggtttgtagcgctgccttgtgccttttttgtgcggttaaatgtcaggtctttcttctttaggttatggaaacaaaggacatgctttacatcgtcactgaatttgct

SEQ ID NO: 372031 - DNA, 120 bp, Artificial Sequence
  ENSG00000142178_41 (sequence is synthesized)
catcataaagctttaccaggtaaggggtcagcttgcctttctctgctaatcctggcaaatgtgttatattttatttccaacagcataagtctgcaatttctgaaggtggcttcccttttg

SEQ ID NO: 372032 - DNA, 120 bp, Artificial Sequence
  ENSG00000142182_0 (sequence is synthesized)
cccatctccacccctcccctgaaccccactccccactgaggtccccaaaccccacccctcactccaccctgagggccccatcctctgaaccccaatcccccagccccactgagctcttaa

SEQ ID NO: 372033 - DNA, 120 bp, Artificial Sequence
  ENSG00000142182_1 (sequence is synthesized)
ccctccccacctgagggttccctttccctgcccgtcccccagcttcctagctccccaccccaagtgaccccccgcagctcctcgcccctcccactgcaaaccggcactgaagggctgccc

SEQ ID NO: 372034 - DNA, 120 bp, Artificial Sequence
  ENSG00000142182_2 (sequence is synthesized)
cgcccccgcccctccccgcccccgcgggacacgcccagattctttgcccccatagcctggtgacctctggccacccgctgtcccaggtgggcctggatccttccagctcattctttgcct

SEQ ID NO: 372035 - DNA, 120 bp, Artificial Sequence
  ENSG00000142182_3 (sequence is synthesized)
gcgccgtccctcgttccatggcccagtcctccccggggaccctgagcctggaagccccggaccactggaaccttgaacccaccagctggctgtacccggagccgtggcagcagccctcat

SEQ ID NO: 372036 - DNA, 120 bp, Artificial Sequence
  ENSG00000142182_4 (sequence is synthesized)
ccccatggcggccatcccagccctggacccagaggccgagcccagcatggacgtgattttggtgggatccagtgagctctcaagctccgtttcacccgggacaggcagagatcttattgc

SEQ ID NO: 372037 - DNA, 120 bp, Artificial Sequence
  ENSG00000142182_5 (sequence is synthesized)
atatgaagtcaaggctaaccagcgaaatatagaagacatctgcatctgctgcggaagtctccaggttcacacacagcaccctctgtttgagggagggatctgcgccccatgtaaggacaa

SEQ ID NO: 372038 - DNA, 120 bp, Artificial Sequence
  ENSG00000142182_6 (sequence is synthesized)
gttcctggatgccctcttcctgtacgacgatgacgggtaccaatcctactgctccatctgctgctccggagagacgctgctcatctgcggaaaccctgattgcacccgatgctactgctt

SEQ ID NO: 372039 - DNA, 120 bp, Artificial Sequence
  ENSG00000142182_7 (sequence is synthesized)
ccgggacctcggggaaggtgcacgccatgagcaactgggtgtgctacctgtgcctgccgtcctcccgaagcgggctgctgcagcgtcggaggaagtggcgcagccagctcaaggccttct

SEQ ID NO: 372040 - DNA, 120 bp, Artificial Sequence
  ENSG00000142182_8 (sequence is synthesized)
acgaccgagagtcggagaatccccttgagatgttcgaaaccgtgcctgtgtggaggagacagccagtccgggtgctgtccctttttgaagacatcaagaaagagctgacgagtttgggct

SEQ ID NO: 372041 - DNA, 120 bp, Artificial Sequence
  ENSG00000142182_9 (sequence is synthesized)
ttttggaaagtggttctgacccgggacaactgaagcatgtggttgatgtcacagacacagtgaggaaggatgtggaggagtggggacccttcgatcttgtgtacggcgccacacctcccc

SEQ ID NO: 372042 - DNA, 120 bp, Artificial Sequence
  ENSG00000142182_10 (sequence is synthesized)
tgggccacacctgtgaccgtcctcccagctggtacctgttccagttccaccggctcctgcagtacgcacggcccaagccaggcagccccaggcccttcttctggatgttcgtggacaatc

SEQ ID NO: 372043 - DNA, 120 bp, Artificial Sequence
  ENSG00000142182_11 (sequence is synthesized)
tggtgctgaacaaggaagacctggacgtcgcatctcgcttcctggagatggagccagtcaccatcccagatgtccacggcggatccttgcagaatgctgtccgcgtgtggagcaacatcc

SEQ ID NO: 372044 - DNA, 120 bp, Artificial Sequence
  ENSG00000142182_12 (sequence is synthesized)
cagccataaggagcagcaggcactgggctctggtttcggaagaagaattgtccctgctggcccagaacaagcagagctcgaagctcgcggccaagtggcccaccaagctggtgaagaact

SEQ ID NO: 372045 - DNA, 120 bp, Artificial Sequence
  ENSG00000142182_13 (sequence is synthesized)
gctttctccccctaagagaatatttcaagtatttttcaacagaactcacttcctctttataaatgagtcactatactgtgaagaaaaagacttttcctagaacaaaggcaactttcctca

SEQ ID NO: 372046 - DNA, 120 bp, Artificial Sequence
  ENSG00000142182_14 (sequence is synthesized)
cagctcctccctcggggttgcctgtctgtctcttccccactctaggcctgcctgggggaggaggggtccatgcacctctgtggccccagcactgggcagggcttcattgctgctggaggg

SEQ ID NO: 372047 - DNA, 120 bp, Artificial Sequence
  ENSG00000142185_0 (sequence is synthesized)
cgcacgctcgggcgagatgtggatggccccgcggggccagggcggcggtgctgcgcggggacgcgggtgacgccggggcgcgggcggctccgagcagcaaccaccccatgtgtctctaga

SEQ ID NO: 372048 - DNA, 120 bp, Artificial Sequence
  ENSG00000142185_1 (sequence is synthesized)
cccatgtgtctctagaaccccagtgtagcgagctggagagaggactgtcctgagggcagcaggcctggttgcagctggcgtgggggtctcagaatggagccctcagccctgaggaaagct

SEQ ID NO: 372049 - DNA, 120 bp, Artificial Sequence
  ENSG00000142185_2 (sequence is synthesized)
ggctcggagcaggaggagggctttgaggggctgcccagaagggtcactgacctggggatggtctccaatctccggcgcagcaacagcagcctcttcaagagctggaggctacagtgcccc

SEQ ID NO: 372050 - DNA, 120 bp, Artificial Sequence
  ENSG00000142185_3 (sequence is synthesized)
ttcggcaacaatgacaagcaagaaagcctcagttcgtggattcctgaaaacatcaagaagaaagaatgcgtgtattttgtggaaagttccaaactgtctgatgctgggaaggtggtgtgt

SEQ ID NO: 372051 - DNA, 120 bp, Artificial Sequence
  ENSG00000142185_4 (sequence is synthesized)
cagtgtggctacacgcatgagcagcacttggaggaggctaccaagccccacaccttccagggcacacagtgggacccaaagaaacatgtccaggagatgccaaccgatgcctttggcgac

SEQ ID NO: 372052 - DNA, 120 bp, Artificial Sequence
  ENSG00000142185_5 (sequence is synthesized)
atcgtcttcacgggcctgagccagaaggtgaaaaagtacgtccgagtctcccaggacacgccctccagcgtgatctaccacctcatgacccagcactgggggctggacgtccccaatctc

SEQ ID NO: 372053 - DNA, 120 bp, Artificial Sequence
  ENSG00000142185_6 (sequence is synthesized)
ttgatctcggtgaccgggggggccaagaacttcaacatgaagccgcggctgaagagcattttccgcagaggcctggtcaaggtggctcagaccacaggggcctggatcatcacagggggg

SEQ ID NO: 372054 - DNA, 120 bp, Artificial Sequence
  ENSG00000142185_7 (sequence is synthesized)
tcccacaccggcgtcatgaagcaggtaggcgaggcggtgcgggacttcagcctgagcagcagctacaaggaaggcgagctcatcaccatcggagtcgccacctggggcactgtccaccgc

SEQ ID NO: 372055 - DNA, 120 bp, Artificial Sequence
  ENSG00000142185_8 (sequence is synthesized)
cgcgagggcctgatccatcccacgggcagcttccccgccgagtacatactggatgaggatggccaagggaacctgacctgcctagacagcaaccactctcacttcatcctcgtggacgac

SEQ ID NO: 372056 - DNA, 120 bp, Artificial Sequence
  ENSG00000142185_9 (sequence is synthesized)
gggacccacggccagtacggggtggagattcctctgaggaccaggctggagaagttcatatcggagcagaccaaggaaagaggaggtgtggccatcaagatccccatcgtgtgcgtggtg

SEQ ID NO: 372057 - DNA, 120 bp, Artificial Sequence
  ENSG00000142185_10 (sequence is synthesized)
ctggagggcggcccgggcacgttgcacaccatcgacaacgccaccaccaacggcaccccctgtgtggttgtggagggctcgggccgcgtggccgacgtcattgcccaggtggccaacctg

SEQ ID NO: 372058 - DNA, 120 bp, Artificial Sequence
  ENSG00000142185_11 (sequence is synthesized)
cctgtctcggacatcactatctccctgatccagcagaaactgagcgtgttcttccaggagatgtttgagaccttcacggaaagcaggattgtcgagtggaccaaaaagatccaagatatc

SEQ ID NO: 372059 - DNA, 120 bp, Artificial Sequence
  ENSG00000142185_12 (sequence is synthesized)
gtccggaggcggcagctgctgactgtcttccgggaaggcaaggatggtcagcaggacgtggatgtggccatcttgcaggccttgctgaaagcctcacggagccaagaccactttggccac

SEQ ID NO: 372060 - DNA, 120 bp, Artificial Sequence
  ENSG00000142185_13 (sequence is synthesized)
gagaactgggaccaccagctgaaactggcagtggcatggaatcgcgtggacattgcccgcagtgagatcttcatggatgagtggcagtggaagccttcagatctgcaccccacgatgaca

SEQ ID NO: 372061 - DNA, 120 bp, Artificial Sequence
  ENSG00000142185_14 (sequence is synthesized)
gctgcactcatctccaacaagcctgagtttgtgaagctcttcctggagaacggggtgcagctgaaggagtttgtcacctgggacaccttgctctacctgtacgagaacctggacccctcc

SEQ ID NO: 372062 - DNA, 120 bp, Artificial Sequence
  ENSG00000142185_15 (sequence is synthesized)
tgcctgttccacagcaagctgcagaaggtgctggtggaggatcccgagcgcccggcttgcgcgcccgcggcgccccgcctgcagatgcaccacgtggcccaggtgctgcgggagctgctg

SEQ ID NO: 372063 - DNA, 120 bp, Artificial Sequence
  ENSG00000142185_16 (sequence is synthesized)
ggggacttcacgcagccgctttatccccggccccggcacaacgaccggctgcggctcctgctgcccgttccccacgtcaagctcaacgtgcagggagtgagcctccggtccctctacaag

SEQ ID NO: 372064 - DNA, 120 bp, Artificial Sequence
  ENSG00000142185_17 (sequence is synthesized)
cgttcctcaggccatgtgaccttcaccatggaccccatccgtgaccttctcatttgggccattgtccagaaccgtcgggagctggcaggaatcatctgggctcagagccaggactgcatc

SEQ ID NO: 372065 - DNA, 120 bp, Artificial Sequence
  ENSG00000142185_18 (sequence is synthesized)
gcagcggccttggcctgcagcaagatcctgaaggaactgtccaaggaggaggaggacacggacagctcggaggagatgctggcgctggcggaggagtatgagcacagagccatcggggtc

SEQ ID NO: 372066 - DNA, 120 bp, Artificial Sequence
  ENSG00000142185_19 (sequence is synthesized)
ttcaccgagtgctaccggaaggacgaagagagagcccagaaactgctcacccgcgtgtccgaggcctgggggaagaccacctgcctgcagctcgccctggaggccaaggacatgaagttt

SEQ ID NO: 372067 - DNA, 120 bp, Artificial Sequence
  ENSG00000142185_20 (sequence is synthesized)
gtgtctcacgggggcatccaggccttcctgaccaaggtgtggtggggccagctctccgtggacaatgggctgtggcgtgtgaccctgtgcatgctggccttcccgctgctcctcaccggc

SEQ ID NO: 372068 - DNA, 120 bp, Artificial Sequence
  ENSG00000142185_21 (sequence is synthesized)
ctcatctccttcagggagaagaggctgcaggatgtgggcacccccgcggcccgcgcccgtgccttcttcaccgcacccgtggtggtcttccacctgaacatcctctcctacttcgccttc

SEQ ID NO: 372069 - DNA, 120 bp, Artificial Sequence
  ENSG00000142185_22 (sequence is synthesized)
ctctgcctgttcgcctacgtgctcatggtggacttccagcctgtgccctcctggtgcgagtgtgccatctacctctggctcttctccttggtgtgcgaggagatgcggcagctcttctat

SEQ ID NO: 372070 - DNA, 120 bp, Artificial Sequence
  ENSG00000142185_23 (sequence is synthesized)
gaccctgacgagtgcgggctgatgaagaaggcagccttgtacttcagtgacttctggaataagctggacgtcggcgcaatcttgctcttcgtggcagggctgacctgcaggctcatcccg

SEQ ID NO: 372071 - DNA, 120 bp, Artificial Sequence
  ENSG00000142185_24 (sequence is synthesized)
ttgtgaagcggatgatgaaggacgtcttcttcttcctcttcctgctggctgtgtgggtggtgtccttcggggtggccaagcaggccatcctcatccacaacgagcgccgggtggactggc

SEQ ID NO: 372072 - DNA, 120 bp, Artificial Sequence
  ENSG00000142185_25 (sequence is synthesized)
tgttccgaggggccgtctaccactcctacctcaccatcttcgggcagatcccgggctacatcgacggtgtgaacttcaacccggagcactgcagccccaatggcaccgacccctacaagc

SEQ ID NO: 372073 - DNA, 120 bp, Artificial Sequence
  ENSG00000142185_26 (sequence is synthesized)
ctaagtgccccgagagcgacgcgacgcagcagaggccggccttccctgagtggctgacggtcctcctactctgcctctacctgctcttcaccaacatcctgctgctcaacctcctcatcg

SEQ ID NO: 372074 - DNA, 120 bp, Artificial Sequence
  ENSG00000142185_27 (sequence is synthesized)
ccatgttcaactacaccttccagcaggtgcaggagcacacggaccagatttggaagttccagcgccatgacctgatcgaggagtaccacggccgccccgccgcgccgccccccttcatcc

SEQ ID NO: 372075 - DNA, 120 bp, Artificial Sequence
  ENSG00000142185_28 (sequence is synthesized)
tcctcagccacctgcagctcttcatcaagagggtggtcctgaagactccggccaagaggcacaagcagctcaagaacaagctggagaagaacgaggaggcggccctgctatcctgggaga

SEQ ID NO: 372076 - DNA, 120 bp, Artificial Sequence
  ENSG00000142185_29 (sequence is synthesized)
tctacctgaaggagaactacctccagaaccgacagttccagcaaaagcagcggcccgagcagaagatcgaggacatcagcaataaggttgacgccatggtggacctgctggacctggacc

SEQ ID NO: 372077 - DNA, 120 bp, Artificial Sequence
  ENSG00000142185_30 (sequence is synthesized)
cactgaagaggtcgggctccatggagcagaggttggcctccctggaggagcaggtggcccagacagcccaagccctgcactggatcgtgaggacgctgcgggccagcggcttcagctcgg

SEQ ID NO: 372078 - DNA, 120 bp, Artificial Sequence
  ENSG00000142185_31 (sequence is synthesized)
aggcggacgtccccactctggcctcccagaaggccgcggaggagccggatgctgagccgggaggcaggaagaagacggaggagccgggcgacagctaccacgtgaatgcccggcacctcc

SEQ ID NO: 372079 - DNA, 120 bp, Artificial Sequence
  ENSG00000142185_32 (sequence is synthesized)
tctaccccaactgccctgtcacgcgcttccccgtgcccaacgagaaggtgccctgggagacggagttcctgatctatgacccacccttttacacggcagagaggaaggacgcggccgcca

SEQ ID NO: 372080 - DNA, 120 bp, Artificial Sequence
  ENSG00000142185_33 (sequence is synthesized)
tggaccccatgggagacaccctggagccactgtccacgatccagtacaacgtggtggatggcctgagggaccgccggagcttccacgggccgtacacagtgcaggccgggttgcccctga

SEQ ID NO: 372081 - DNA, 120 bp, Artificial Sequence
  ENSG00000142185_34 (sequence is synthesized)
accccatgggccgcacaggactgcgtgggcgcgggagcctcagctgcttcggacccaaccacacgctgtaccccatggtcacgcggtggaggcggaacgaggatggagccatctgcagga

SEQ ID NO: 372082 - DNA, 120 bp, Artificial Sequence
  ENSG00000142185_35 (sequence is synthesized)
agagcataaagaagatgctggaagtgctggtggtgaagctccctctctccgagcactgggccctgcctgggggctcccgggagccaggggagatgctacctcggaagctgaagcggatcc

SEQ ID NO: 372083 - DNA, 120 bp, Artificial Sequence
  ENSG00000142185_36 (sequence is synthesized)
tccggcaggagcactggccgtcttttgaaaacttgctgaagtgcggcatggaggtgtacaaaggctacatggatgacccgaggaacacggacaatgcctggatcgagacggtggccgtca

SEQ ID NO: 372084 - DNA, 120 bp, Artificial Sequence
  ENSG00000142185_37 (sequence is synthesized)
gcgtccacttccaggaccagaatgacgtggagctgaacaggctgaactctaacctgcacgcctgcgactcgggggcctccatccgatggcaggtggtggacaggcgcatcccactctatg

SEQ ID NO: 372085 - DNA, 120 bp, Artificial Sequence
  ENSG00000142185_38 (sequence is synthesized)
cgaaccacaagaccctcctccagaaggcagccgctgagttcggggctcactactgactgtgccctcaggctgggcggctccagtccatagacgttccccccagaaaccagggcttctctc

SEQ ID NO: 372086 - DNA, 120 bp, Artificial Sequence
  ENSG00000142185_39 (sequence is synthesized)
tcctgagcctggccaggactcaggctgttcctgggccctgcacatgatggggtttggtggacccagtgcccctcacggctgccgcaagtctgctgcagatgacctcatgaactggaaggg

SEQ ID NO: 372087 - DNA, 120 bp, Artificial Sequence
  ENSG00000142185_40 (sequence is synthesized)
gtcaaggtgacccgggaggagagctcaagacagggcacaggctactcagagctgaggggcccctgggacccttggccatcaggcgaggggctgggcctgtgcagctgggcccttggccag

SEQ ID NO: 372088 - DNA, 120 bp, Artificial Sequence
  ENSG00000142185_41 (sequence is synthesized)
agtccactcccttcctggctgtgtcaccccgagcagctcatccaccatggaggtcattggcctgaggcaagttccccggagagtcggggtcccctgtggccccctcaggcctatgtctgt

SEQ ID NO: 372089 - DNA, 120 bp, Artificial Sequence
  ENSG00000142185_42 (sequence is synthesized)
gaggaaggggccctgccactctccccaagagggcctccatgtttcgaggtgcctcaacatggagccttgcctggcctgggctaggggcactgtctgaactcctgactgtcaggataaact

SEQ ID NO: 372090 - DNA, 120 bp, Artificial Sequence
  ENSG00000142185_43 (sequence is synthesized)
ccgtgggggtacaggagcccagacaaagcccaggcctgtcaagagacgcagagggcccctgccagggttggccccagggaccctgggacgaggctgcagaagctctccctccctactccc

SEQ ID NO: 372091 - DNA, 120 bp, Artificial Sequence
  ENSG00000142185_44 (sequence is synthesized)
tgggagccacgtgctggccatgtggccagggacggcatgagcaggaggcggggacgtgggggccttctggtttggtgtcaacagctcacaggagcgtgaaccatgagggccctcaggagg

SEQ ID NO: 372092 - DNA, 120 bp, Artificial Sequence
  ENSG00000142185_45 (sequence is synthesized)
ggaacgtggtaaaacccaagacattaaatctgccatctcaggcctggctggctcttctgtgctttccacaaataaagttcctgacacgtccagggccaggggctgtgtgacggctgcctg

SEQ ID NO: 372093 - DNA, 120 bp, Artificial Sequence
  ENSG00000142185_46 (sequence is synthesized)
aagttctcctcgatcccccggtgagcttcctgcagcctgtggatgtcctgcagcccctcagccctacccccaagtttctcctctgacccatcagctccctgtcttcattttcctaaacct

SEQ ID NO: 372094 - DNA, 120 bp, Artificial Sequence
  ENSG00000142185_47 (sequence is synthesized)
gggctccagcatcgtccccaagcccaccaggccaggatgcaggcatccacatgccctcctccttggcttcccctgcgtggtggtgccaatgtgccctggcacccctgcagaggctccgga

SEQ ID NO: 372095 - DNA, 120 bp, Artificial Sequence
  ENSG00000142185_48 (sequence is synthesized)
tggagcctggggctgcctggccactgagcactggccgaggtgatgcccacccttccctggacaggcctctgtcttccacctgacccaaagctctctagccacccccttgtccccaggtat

SEQ ID NO: 372096 - DNA, 120 bp, Artificial Sequence
  ENSG00000142185_49 (sequence is synthesized)
tgtgcagaattgtacagttgcgaaaccatgtcgctggcagctggtgctggcggtggagacttccctgtgcggtgctcagtgcagctgcacccgtgggggagggagctctttctctggccc

SEQ ID NO: 372097 - DNA, 120 bp, Artificial Sequence
  ENSG00000142185_50 (sequence is synthesized)
tgcagtcacctgaggttgttaccattatgaacggccgctgggacccccgcatgtgcatgtactcccccagagtgtccgggggccccagccaagggacacagctcaggcagctgggaacat

SEQ ID NO: 372098 - DNA, 120 bp, Artificial Sequence
  ENSG00000142185_51 (sequence is synthesized)
atctcacggtggtggaatcacgcgggtccgagaaggctccagtaaccaccctcgcatgtttgcaaggctgtctgggaaaacatggcagggttgacgccatggtggacctgctggacctgg

SEQ ID NO: 372099 - DNA, 120 bp, Artificial Sequence
  ENSG00000142185_52 (sequence is synthesized)
agccctgcactggatcgtgaggacgctgcgggccagcggcttcagctcggaggcggacgtccccactctggcctcccagaaggccgcggaggagccggatgctgagccgggagcaggaag

SEQ ID NO: 372100 - DNA, 120 bp, Artificial Sequence
  ENSG00000142185_53 (sequence is synthesized)
aggtggaggagcccagatgttttggcggaaggaccacagaggaagtccttgtcctgcgggcgggcacctgagcccgggctccgccttgcgtcacgtcttcctgactgtccccagcctccc

SEQ ID NO: 372101 - DNA, 120 bp, Artificial Sequence
  ENSG00000142186_0 (sequence is synthesized)
gccccgccccggctcgggcggccggaggacccggagctaaggcgcccgaacccgcggcggcggtggggacgatgtggttctttgcccgggacccggtccgggactttccgttcgagctca

SEQ ID NO: 372102 - DNA, 120 bp, Artificial Sequence
  ENSG00000142186_1 (sequence is synthesized)
tcccggagcccccagagggcggcctgcccgggccctgggccctgcaccgcggccgcaagaaggccacaggcagccccgtgtccatcttcgtctatgatgtgaagcctggcgcggaagagc

SEQ ID NO: 372103 - DNA, 120 bp, Artificial Sequence
  ENSG00000142186_2 (sequence is synthesized)
agacccaggtggccaaagctgccttcaagcgcttcaaaactctacggcaccccaacatcctggcttacatcgatggactggagacagaaaaatgcctccacgtcgtgacagaggctgtga

SEQ ID NO: 372104 - DNA, 120 bp, Artificial Sequence
  ENSG00000142186_3 (sequence is synthesized)
ccccgttgggaatatacctcaaggcgagagtggaggctggtggcctgaaggagctggagatctcctgggggctacaccagatcgtgaaagccctcagcttcctggtcaacgactgcagcc

SEQ ID NO: 372105 - DNA, 120 bp, Artificial Sequence
  ENSG00000142186_4 (sequence is synthesized)
tcatccacaacaatgtctgcatggccgccgtgttcgtggaccgagctggcgagtggaagcttgggggcctggactacatgtattcggcccagggcaacggtgggggacctccccgcaagg

SEQ ID NO: 372106 - DNA, 120 bp, Artificial Sequence
  ENSG00000142186_5 (sequence is synthesized)
ggatccccgagcttgagcagtatgaccccccggagttggctgacagcagtggcagagtggtcagagagaagtggtcagcagacatgtggcgcttgggctgcctcatttgggaagtcttca

SEQ ID NO: 372107 - DNA, 120 bp, Artificial Sequence
  ENSG00000142186_6 (sequence is synthesized)
atgggcccctacctcgggcagcagccctacgcaaccctgggaagatccccaaaacgctggtgccccattactgtgagctggtgggagcaaaccccaaggtgcgtcccaacccagcccgct

SEQ ID NO: 372108 - DNA, 120 bp, Artificial Sequence
  ENSG00000142186_7 (sequence is synthesized)
tcctgcagaactgccgggcacctggtggcttcatgagcaaccgctttgtagaaaccaacctcttcctggaggagattcagatcaaagagccagccgagaagcaaaaattcttccaggagc

SEQ ID NO: 372109 - DNA, 120 bp, Artificial Sequence
  ENSG00000142186_8 (sequence is synthesized)
tgagcaagagcctggacgcattccctgaggatttctgtcggcacaaggtgctgccccagctgctgaccgccttcgagttcggcaatgctggggccgttgtcctcacgcccctcttcaagg

SEQ ID NO: 372110 - DNA, 120 bp, Artificial Sequence
  ENSG00000142186_9 (sequence is synthesized)
tgggcaagttcctgagcgctgaggagtatcagcagaagatcatccctgtggtggtcaagatgttctcatccactgaccgggccatgcgcatccgcctcctgcagcagatggagcagttca

SEQ ID NO: 372111 - DNA, 120 bp, Artificial Sequence
  ENSG00000142186_10 (sequence is synthesized)
gccccaaagctgaacgaggccaacctcaatgtggagctgatgaagcactttgcacggctacaggccaaggatgaacagggccccatccgctgcaacaccacagtctgcctgggcaaaatc

SEQ ID NO: 372112 - DNA, 120 bp, Artificial Sequence
  ENSG00000142186_11 (sequence is synthesized)
ggctcctacctcagtgctagcaccagacacagggtccttacctctgccttcagccgagccactagggacccgtttgcaccgtcccgggttgcgggtgtcctgggctttgctgccacccac

SEQ ID NO: 372113 - DNA, 120 bp, Artificial Sequence
  ENSG00000142186_12 (sequence is synthesized)
aacctctactcaatgaacgactgtgcccagaagatcctgcctgtgctctgcggtctcactgtagatcctgagaaatccgtgcgagaccaggccttcaaggccattcggagcttcctgtcc

SEQ ID NO: 372114 - DNA, 120 bp, Artificial Sequence
  ENSG00000142186_13 (sequence is synthesized)
aaattggagtctgtgtcggaggacccgacccagctggaggaagtggagaaggatgtccatgcagcctccagccctggcatgggaggagccgcagctagctgggcaggctgggccgtgacc

SEQ ID NO: 372115 - DNA, 120 bp, Artificial Sequence
  ENSG00000142186_14 (sequence is synthesized)
ggggtctcctcactcacctccaagctgatccgttcgcacccaaccactgccccaacagaaaccaacattccccaaagacccacgcctgaaggagttcctgccccagcccccacccctgtt

SEQ ID NO: 372116 - DNA, 120 bp, Artificial Sequence
  ENSG00000142186_15 (sequence is synthesized)
cctgccacccctacaacctcaggccactgggagacgcaggaggaggacaaggacacagcagaggacagcagcactgctgacagatgggacgacgaagactggggcagcctggagcaggag

SEQ ID NO: 372117 - DNA, 120 bp, Artificial Sequence
  ENSG00000142186_16 (sequence is synthesized)
gccgagtctgtgctggcccagcaggacgactggagcaccgggggccaagtgagccgtgctagtcaggtcagcaactccgaccacaaatcctccaaatccccagagtccgactggagcagc

SEQ ID NO: 372118 - DNA, 120 bp, Artificial Sequence
  ENSG00000142186_17 (sequence is synthesized)
tgggaagctgagggctcctgggaacagggctggcaggagccaagctcccaggagccacctcctgacggtacacggctggccagcgagtataactggggtggcccagagtccagcgacaag

SEQ ID NO: 372119 - DNA, 120 bp, Artificial Sequence
  ENSG00000142186_18 (sequence is synthesized)
ggcgaccccttcgctaccctgtctgcacgtcccagcacccagccgaggccagactcttggggtgaggacaactgggagggcctcgagactgacagtcgacaggtcaaggctgagctggcc

SEQ ID NO: 372120 - DNA, 120 bp, Artificial Sequence
  ENSG00000142186_19 (sequence is synthesized)
cggaagaagcgcgaggagcggcggcgggagatggaggccaaacgcgccgagaggaaggtggccaagggccccatgaagctgggagcccggaagctggactgaaccgtggcggtggccctt

SEQ ID NO: 372121 - DNA, 120 bp, Artificial Sequence
  ENSG00000142186_20 (sequence is synthesized)
cccggctgcggagagcccgccccacagatgtatttattgtacaaaccatgtgagcccggccggcccagccaggccatctcacgtgtacataatcagagccacaataaattctatttcaca

SEQ ID NO: 372122 - DNA, 120 bp, Artificial Sequence
  ENSG00000142186_21 (sequence is synthesized)
ggctgaagactagggctccccgactagcccgcccctacaggcccccggcaggcactggctggagagctgagaccggggctccccttcctgacgccaggacaggtcaaggctgagctggcc

SEQ ID NO: 372123 - DNA, 120 bp, Artificial Sequence
  ENSG00000142186_22 (sequence is synthesized)
gcaccgggggccaagtgagccgtgctagtcaggtgagctgggtctggtggggaggtgtgtgtatggggctctttcctccttgggcccagggctacttccccctcccgctcttctacaggt

SEQ ID NO: 372124 - DNA, 120 bp, Artificial Sequence
  ENSG00000142186_23 (sequence is synthesized)
tcagccagaagtgggccccactgcagcccacacttctctttacagccgaggccagactcttggggtgaggacaactgggagggcctcgagactgacagtcgtaagtgcttcccctgggtg

SEQ ID NO: 372125 - DNA, 120 bp, Artificial Sequence
  ENSG00000142186_24 (sequence is synthesized)
gtccaagcagacactgtccttgctgtgtgggttcaggccgtgggtgcagctcggcagctggcgggggagcacgtcctccattcagcagacaacgagcatctgcctgttcctggcccaagc

SEQ ID NO: 372126 - DNA, 120 bp, Artificial Sequence
  ENSG00000142186_25 (sequence is synthesized)
cccatgctgggaggcagcatgcatgaggtgcccagccccctgcactcatggagcttcctttccagggcacagagggtgggcttgccagacaatacaacagaattagaaaatatgtattgt

SEQ ID NO: 372127 - DNA, 73 bp, Artificial Sequence
  ENSG00000142186_26 (sequence is synthesized)
cttgccagacaatacaacagaattagaaaatatgtattgttggctggtcacggtggctcacgcccataatccc

SEQ ID NO: 372128 - DNA, 120 bp, Artificial Sequence
  ENSG00000142186_27 (sequence is synthesized)
cagggccaggagtcttgtgtgtgggggccttcattctcccagagacttagaccctgcacgctgttggccccatatctgggttcccagaggaggagtgagttggccgaagtcacacagtca

SEQ ID NO: 372129 - DNA, 120 bp, Artificial Sequence
  ENSG00000142186_28 (sequence is synthesized)
ggcggagggaccgagggaccgacaggcggacagggccggggtcacgtgggcccggcgaagtgtccctaaggctgacctggggagagacctggctgcgggcccttgtcttccggccacaca

SEQ ID NO: 372130 - DNA, 120 bp, Artificial Sequence
  ENSG00000142186_29 (sequence is synthesized)
atctgaatccaggcgtgcttggccccatggcctgtgtgcatcccttcagccagggtttgtaagttcagttgcttgccgtgcccagacagttaacaggaatgaacggtcagctgggcaggg

SEQ ID NO: 372131 - DNA, 120 bp, Artificial Sequence
  ENSG00000142186_30 (sequence is synthesized)
caactctccccatttaagtgattcattcatatttttcagattctggggacctatgggtggtcccattctgggaagtaagggctggtggttctgggtcccaacattgaccctacactcagg

SEQ ID NO: 372132 - DNA, 120 bp, Artificial Sequence
  ENSG00000142188_0 (sequence is synthesized)
gctctatcctcgcgtctgctcccagctccgggctcccggggctgaggtggagccgcgggacgccggcagggttgtggcgcagcagtctccttcctgcgcgcgcgcctgaagtcggcgtgg

SEQ ID NO: 372133 - DNA, 120 bp, Artificial Sequence
  ENSG00000142188_1 (sequence is synthesized)
gcgtttgaggaagctgggatacagcatttaatgaaaaatttatgcttaagaagtaaaaatggcaggcttcctagataattttcgttggccagaatgtgaatgtattgactggagtgagag

SEQ ID NO: 372134 - DNA, 120 bp, Artificial Sequence
  ENSG00000142188_2 (sequence is synthesized)
aagaaatgctgtggcatctgttgtcgcaggtatattgttttttacaggctggtggataatgattgatgcagctgtggtgtatcctaagccagaacagttgaaccatgcctttcacacatg

SEQ ID NO: 372135 - DNA, 120 bp, Artificial Sequence
  ENSG00000142188_3 (sequence is synthesized)
tggtgtattttccacattggctttcttcatgataaatgctgtatccaatgctcaggtgagaggtgatagctatgaaagcggctgtttaggaagaacaggtgctcgagtttggcttttcat

SEQ ID NO: 372136 - DNA, 120 bp, Artificial Sequence
  ENSG00000142188_4 (sequence is synthesized)
tggtttcatgttgatgtttgggtcacttattgcttccatgtggattctttttggtgcatatgttacccaaaatactgatgtttatccgggactagctgtgttttttcaaaatgcacttat

SEQ ID NO: 372137 - DNA, 120 bp, Artificial Sequence
  ENSG00000142188_5 (sequence is synthesized)
attttttagcactctgatctacaaatttggaagaaccgaagagctatggacctgagatcacttcttaagtcacattttccttttgttatattctgtttgtagataggttttttatctctc

SEQ ID NO: 372138 - DNA, 120 bp, Artificial Sequence
  ENSG00000142188_6 (sequence is synthesized)
agtacacattgccaaatggagtagattgtacattaaatgttttgtttctttacatttttatgttctgagttttgaaatagttttatgaaatttctttatttttcattgcatagactgtta

SEQ ID NO: 372139 - DNA, 120 bp, Artificial Sequence
  ENSG00000142188_7 (sequence is synthesized)
atatgtatataatacaagactatatgaattggataatgagtatcagttttttattcctgagatttagaacttgatctactccctgagccagggttacatcatcttgtcattttagaagta

SEQ ID NO: 372140 - DNA, 120 bp, Artificial Sequence
  ENSG00000142188_8 (sequence is synthesized)
gcttgaacccggggggcagaggttgtagtgagctgagtttgcgccactgcactctagcctgggggagaaagtgaaactccctctcaaaaaaaagaaggaccactctcagtatctgatttc

SEQ ID NO: 372141 - DNA, 120 bp, Artificial Sequence
  ENSG00000142188_9 (sequence is synthesized)
ctctcaaaaaaaagaaggaccactctcagtatctgatttctgaagatgtacaaaaaaatatagcttcatatatctagaatgagcactgagccataaaaggttttcagcaagttgtaactt

SEQ ID NO: 372142 - DNA, 120 bp, Artificial Sequence
  ENSG00000142188_10 (sequence is synthesized)
attttggcctaaaaatgaggtttttttggtaaagaaaaaatatttgttcttatgtattgaagaagtgtacttttatataatgattttttaaatgcccaaaggactagtttgaaagcttct

SEQ ID NO: 372143 - DNA, 120 bp, Artificial Sequence
  ENSG00000142188_11 (sequence is synthesized)
tttaaaaagaattcctctaatatgactttatgtgagaagggataatacatgatcaaataaactcagttttttatggttactgtaaaaagactgtgtaaggcagctcagcaccatgcttct

SEQ ID NO: 372144 - DNA, 120 bp, Artificial Sequence
  ENSG00000142188_12 (sequence is synthesized)
cgtaaaagcagcttcaaatatccactggggttatcttttgacaacttgccattatctgatgttacacaattcaatagcaagcaagtttgagacaatcgcagtttaaaagcatgaaccatt

SEQ ID NO: 372145 - DNA, 120 bp, Artificial Sequence
  ENSG00000142188_13 (sequence is synthesized)
taacaaaaagtggaataattaaagataaagcacttcttcccaaagggaattatcacctagtgaaaaattatgcatttcatctactcagttaccgactgcaagtctctcctcgctctagct

SEQ ID NO: 372146 - DNA, 120 bp, Artificial Sequence
  ENSG00000142188_14 (sequence is synthesized)
ctcaagctttgggtgaatattcctgtgaaatatatcttcaacttgaaagttcatactccaatcaaaaactccttttactgagtttgcagtactgtatttgcactgtttgtattcctctgg

SEQ ID NO: 372147 - DNA, 120 bp, Artificial Sequence
  ENSG00000142188_15 (sequence is synthesized)
gcccttattgctacttttgctttcctttgttacacagattttgtgttgcactttttctccagaggggtgttgtagagccttggttgtatgaataataccagtggtagtgtccacggctct

SEQ ID NO: 372148 - DNA, 120 bp, Artificial Sequence
  ENSG00000142188_16 (sequence is synthesized)
aatgtaagcccatttggcatcactcctctcctctctcttgagaggatttcttgtgcacagagtatgaagcagttgtggagcgctgtgcctttgtcaagataccatcttgtttgatgactt

SEQ ID NO: 372149 - DNA, 120 bp, Artificial Sequence
  ENSG00000142188_17 (sequence is synthesized)
ctttctttgctgttttttcttcaaaatgttagtaagctctgtcatgcttctagcaaattgtaagactaattatttgtttccacctcataacctgttgcaataaatattacttctcataca

SEQ ID NO: 372150 - DNA, 120 bp, Artificial Sequence
  ENSG00000142188_18 (sequence is synthesized)
caagactggtaatgattatatagaatattttttatttgctttaaaacaaagttttagtgttattcaaatccttaagaaagtaagttattgctagaagttactgtttttgtcatgttacac

SEQ ID NO: 372151 - DNA, 120 bp, Artificial Sequence
  ENSG00000142188_19 (sequence is synthesized)
tgcccatgatatagataaaaaatgttgctattcaaatggatcttggactccagtgctaatgatggatttattattatcccaattgttgaccaataatgttacttacaagatggctgacta

SEQ ID NO: 372152 - DNA, 120 bp, Artificial Sequence
  ENSG00000142188_20 (sequence is synthesized)
agtatacccaattaaagatgcagttatgtttataaaataagaagaaatagacttgtaaaatgcttatgtgagggttattgaaggtttccctgaagactgactggaaatggtggctgtttt

SEQ ID NO: 372153 - DNA, 120 bp, Artificial Sequence
  ENSG00000142188_21 (sequence is synthesized)
aaggtttccctgaagactgactggaaatggtggctgtttttttctatttctgactctgccatgaatttttttttttttttttaaagacaatatctcactctgttgcctaggctggagtgc

SEQ ID NO: 372154 - DNA, 82 bp, Artificial Sequence
  ENSG00000142188_22 (sequence is synthesized)
gtgcaaccacagctcactgcaccttcaaatgctggagctcaggcaatcctcttacctccgctttccaagcagctgggaccac

SEQ ID NO: 372155 - DNA, 120 bp, Artificial Sequence
  ENSG00000142188_23 (sequence is synthesized)
cagcctcccgagtagctggggttacagatgtatcctccactcctcgctggccaccatcctgctgcccaacagaagaagctcttctgtctccgatttcctgaacggtctaagggagccagt

SEQ ID NO: 372156 - DNA, 120 bp, Artificial Sequence
  ENSG00000142188_24 (sequence is synthesized)
aacggtctaagggagccagtgggctaggcccatgctttggttcaaagcgtttggagaacatcttcttgctccttttccggaaacgagataatggacacagagtcccagacgtcatccttt

SEQ ID NO: 372157 - DNA, 120 bp, Artificial Sequence
  ENSG00000142188_25 (sequence is synthesized)
agaaagactggttggtgacatgtatcccttaccttttgccctggaaattaatgccggttcctttgaactgagaatggctttccagaactatttatttcactgctgttttgtatagatgat

SEQ ID NO: 372158 - DNA, 120 bp, Artificial Sequence
  ENSG00000142188_26 (sequence is synthesized)
tatcagagttctagatactattgccaagcagaatatggtaggccctggattcattttgactttgtaaatgtgtacttaatatcttttcttcagttccagtgataatataattattatagg

SEQ ID NO: 372159 - DNA, 120 bp, Artificial Sequence
  ENSG00000142188_27 (sequence is synthesized)
caatagcatttttaacttactgatacaacatatatgtaagtactttaagatccttaaaggctcagaatttgatgtaacccaaaattattgttgtgacttattgaaggtcagacaacagtg

SEQ ID NO: 372160 - DNA, 120 bp, Artificial Sequence
  ENSG00000142188_28 (sequence is synthesized)
cagaagaagctcttctgtctccgatttcctgaacggtctaaggaccaggaagaaacaggctcctgccagcaccgacagcaacgaaaatgttcccacggagatcaggatgacttgctgaag

SEQ ID NO: 372161 - DNA, 120 bp, Artificial Sequence
  ENSG00000142188_29 (sequence is synthesized)
ctcagtggaggctaaaaagaggacacgaaagtgaacagaatgatcttcctacgcacaacacaaacatcagttaatgttccatccatgctgcttaaagagcattcctgtcctagtaaaatg

SEQ ID NO: 372162 - DNA, 120 bp, Artificial Sequence
  ENSG00000142188_30 (sequence is synthesized)
ggcaagtccctctaccccccaccctcacctggtatgcttacattaatagctaaagtcaatcctgtaatgaaataaagcaagtggtagctgtctggtagcctccactactgcaaatctcag

SEQ ID NO: 372163 - DNA, 120 bp, Artificial Sequence
  ENSG00000142188_31 (sequence is synthesized)
tgttacccaaatgttggccataggaggcaaaggagcaagttactgcttcctcagcagttttgatgtagctagaaccagcaattactttgactaaaagaaaactttatactgatgtttatc

SEQ ID NO: 372164 - DNA, 120 bp, Artificial Sequence
  ENSG00000142188_32 (sequence is synthesized)
ggaaagggaaggggaacaacattctttcgagaattataaaccttgagctccgttaaataagtagcagcagagcattgtcactggagcagtggtagtcgcgggtaggaccgtttcggtttt

SEQ ID NO: 372165 - DNA, 120 bp, Artificial Sequence
  ENSG00000142188_33 (sequence is synthesized)
tagccaataggctggttaaaggtacttaaaacagtaagttggaaggtgctgaaattctaagcatggtagcccaagcattagtgttccagagaaccaggcagatgctccattgccttctgt

SEQ ID NO: 372166 - DNA, 120 bp, Artificial Sequence
  ENSG00000142192_0 (sequence is synthesized)
gtcagtttcctcggcagcggtaggcgagagcacgcggaggagcgtgcgcgggggccccgggagacggcggcggtggcggcgcgggcagagcaaggacgcggcggatcccactcgcacagc

SEQ ID NO: 372167 - DNA, 120 bp, Artificial Sequence
  ENSG00000142192_1 (sequence is synthesized)
agcgcactcggtgccccgcgcagggtcgcgatgctgcccggtttggcactgctcctgctggccgcctggacggctcgggcgctggaggtacccactgatggtaatgctggcctgctggct

SEQ ID NO: 372168 - DNA, 120 bp, Artificial Sequence
  ENSG00000142192_2 (sequence is synthesized)
gaaccccagattgccatgttctgtggcagactgaacatgcacatgaatgtccagaatgggaagtgggattcagatccatcagggaccaaaacctgcattgataccaaggaaggcatcctg

SEQ ID NO: 372169 - DNA, 120 bp, Artificial Sequence
  ENSG00000142192_3 (sequence is synthesized)
cagtattgccaagaagtctaccctgaactgcagatcaccaatgtggtagaagccaaccaaccagtgaccatccagaactggtgcaagcggggccgcaagcagtgcaagacccatccccac

SEQ ID NO: 372170 - DNA, 120 bp, Artificial Sequence
  ENSG00000142192_4 (sequence is synthesized)
tttgtgattccctaccgctgcttagttggtgagtttgtaagtgatgcccttctcgttcctgacaagtgcaaattcttacaccaggagaggatggatgtttgcgaaactcatcttcactgg

SEQ ID NO: 372171 - DNA, 120 bp, Artificial Sequence
  ENSG00000142192_5 (sequence is synthesized)
cacaccgtcgccaaagagacatgcagtgagaagagtaccaacttgcatgactacggcatgttgctgccctgcggaattgacaagttccgaggggtagagtttgtgtgttgcccactggct

SEQ ID NO: 372172 - DNA, 120 bp, Artificial Sequence
  ENSG00000142192_6 (sequence is synthesized)
gaagaaagtgacaatgtggattctgctgatgcggaggaggatgactcggatgtctggtggggcggagcagacacagactatgcagatgggagtgaagacaaagtagtagaagtagcagag

SEQ ID NO: 372173 - DNA, 120 bp, Artificial Sequence
  ENSG00000142192_7 (sequence is synthesized)
gaggaagaagtggctgaggtggaagaagaagaagccgatgatgacgaggacgatgaggatggtgatgaggtagaggaagaggctgaggaaccctacgaagaagccacagagagaaccacc

SEQ ID NO: 372174 - DNA, 120 bp, Artificial Sequence
  ENSG00000142192_8 (sequence is synthesized)
agcattgccaccaccaccaccaccaccacagagtctgtggaagaggtggttcgagaggtgtgctctgaacaagccgagacggggccgtgccgagcaatgatctcccgctggtactttgat

SEQ ID NO: 372175 - DNA, 120 bp, Artificial Sequence
  ENSG00000142192_9 (sequence is synthesized)
gtgactgaagggaagtgtgccccattcttttacggcggatgtggcggcaaccggaacaactttgacacagaagagtactgcatggccgtgtgtggcagcgccatgtcccaaagtttactc

SEQ ID NO: 372176 - DNA, 120 bp, Artificial Sequence
  ENSG00000142192_10 (sequence is synthesized)
aagactacccaggaacctcttgcccgagatcctgttaaacttcctacaacagcagccagtacccctgatgccgttgacaagtatctcgagacacctggggatgagaatgaacatgcccat

SEQ ID NO: 372177 - DNA, 120 bp, Artificial Sequence
  ENSG00000142192_11 (sequence is synthesized)
ttccagaaagccaaagagaggcttgaggccaagcaccgagagagaatgtcccaggtcatgagagaatgggaagaggcagaacgtcaagcaaagaacttgcctaaagctgataagaaggca

SEQ ID NO: 372178 - DNA, 120 bp, Artificial Sequence
  ENSG00000142192_12 (sequence is synthesized)
gttatccagcatttccaggagaaagtggaatctttggaacaggaagcagccaacgagagacagcagctggtggagacacacatggccagagtggaagccatgctcaatgaccgccgccgc

SEQ ID NO: 372179 - DNA, 120 bp, Artificial Sequence
  ENSG00000142192_13 (sequence is synthesized)
ctggccctggagaactacatcaccgctctgcaggctgttcctcctcggcctcgtcacgtgttcaatatgctaaagaagtatgtccgcgcagaacagaaggacagacagcacaccctaaag

SEQ ID NO: 372180 - DNA, 120 bp, Artificial Sequence
  ENSG00000142192_14 (sequence is synthesized)
tctccctgctctacaacgtgcctgcagtggccgaggagattcaggatgaagttgatgagctgcttcagaaagagcaaaactattcagatgacgtcttggccaacatgattagtgaaccaa

SEQ ID NO: 372181 - DNA, 120 bp, Artificial Sequence
  ENSG00000142192_15 (sequence is synthesized)
ggatcagttacggaaacgatgctctcatgccatctttgaccgaaacgaaaaccaccgtggagctccttcccgtgaatggagagttcagcctggacgatctccagccgtggcattcttttg

SEQ ID NO: 372182 - DNA, 120 bp, Artificial Sequence
  ENSG00000142192_16 (sequence is synthesized)
gggctgactctgtgccagccaacacagaaaacgaagttgagcctgttgatgcccgccctgctgccgaccgaggactgaccactcgaccaggttctgggttgacaaatatcaagacggagg

SEQ ID NO: 372183 - DNA, 120 bp, Artificial Sequence
  ENSG00000142192_17 (sequence is synthesized)
agatctctgaagtgaagatggatgcagaattccgacatgactcaggatatgaagttcatcatcaaaaattggtgttctttgcagaagatgtgggttcaaacaaaggtgcaatcattggac

SEQ ID NO: 372184 - DNA, 120 bp, Artificial Sequence
  ENSG00000142192_18 (sequence is synthesized)
tcatggtgggcggtgttgtcatagcgacagtgatcgtcatcaccttggtgatgctgaagaagaaacagtacacatccattcatcatggtgtggtggaggttgacgccgctgtcaccccag

SEQ ID NO: 372185 - DNA, 120 bp, Artificial Sequence
  ENSG00000142192_19 (sequence is synthesized)
aggagcgccacctgtccaagatgcagcagaacggctacgaaaatccaacctacaagttctttgagcagatgcagaactagacccccgccacagcagcctctgaagttggacagcaaaacc

SEQ ID NO: 372186 - DNA, 120 bp, Artificial Sequence
  ENSG00000142192_20 (sequence is synthesized)
attgcttcactacccatcggtgtccatttatagaataatgtgggaagaaacaaacccgttttatgatttactcattatcgccttttgacagctgtgctgtaacacaagtagatgcctgaa

SEQ ID NO: 372187 - DNA, 120 bp, Artificial Sequence
  ENSG00000142192_21 (sequence is synthesized)
cttgaattaatccacacatcagtaatgtattctatctctctttacattttggtctctatactacattattaatgggttttgtgtactgtaaagaatttagctgtatcaaactagtgcatg

SEQ ID NO: 372188 - DNA, 120 bp, Artificial Sequence
  ENSG00000142192_22 (sequence is synthesized)
aatagattctctcctgattatttatcacatagccccttagccagttgtatattattcttgtggtttgtgacccaattaagtcctactttacatatgctttaagaatcgatgggggatgct

SEQ ID NO: 372189 - DNA, 120 bp, Artificial Sequence
  ENSG00000142192_23 (sequence is synthesized)
tcatgtgaacgtgggagttcagctgcttctcttgcctaagtattcctttcctgatcactatgcattttaaagttaaacatttttaagtatttcagatgctttagagagattttttttcca

SEQ ID NO: 372190 - DNA, 120 bp, Artificial Sequence
  ENSG00000142192_24 (sequence is synthesized)
tgactgcattttactgtacagattgctgcttctgctatatttgtgatataggaattaagaggatacacacgtttgtttcttcgtgcctgttttatgtgcacacattaggcattgagactt

SEQ ID NO: 372191 - DNA, 120 bp, Artificial Sequence
  ENSG00000142192_25 (sequence is synthesized)
caagcttttctttttttgtccacgtatctttgggtctttgataaagaaaagaatccctgttcattgtaagcacttttacggggcgggtggggaggggtgctctgctggtcttcaattacc

SEQ ID NO: 372192 - DNA, 120 bp, Artificial Sequence
  ENSG00000142192_26 (sequence is synthesized)
aagaattctccaaaacaattttctgcaggatgattgtacagaatcattgcttatgacatgatcgctttctacactgtattacataaataaattaaataaaataaccccgggcaagacttt

SEQ ID NO: 372193 - DNA, 120 bp, Artificial Sequence
  ENSG00000142192_27 (sequence is synthesized)
tctttgaaggatgactacagacattaaataatcgaagtaattttgggtggggagaagaggcagattcaattttctttaaccagtctgaagtttcatttatgatacaaaagaagatgaaaa

SEQ ID NO: 372194 - DNA, 120 bp, Artificial Sequence
  ENSG00000142192_28 (sequence is synthesized)
tggaagtggcaatataaggggatgaggaaggcatgcctggacaaacccttcttttaagatgtgtcttcaatttgtataaaatggtgttttcatgtaaataaatacattcttggaggagca

SEQ ID NO: 372195 - DNA, 120 bp, Artificial Sequence
  ENSG00000142192_29 (sequence is synthesized)
gtaacattctaaaggtagtagggtcttgattgggttgcttaggcattaaaaggctgtttaacttgtcttgaagtctatctttccttgatgtcttctgcggtaagaacactgtgatacaga

SEQ ID NO: 372196 - DNA, 120 bp, Artificial Sequence
  ENSG00000142192_30 (sequence is synthesized)
gcattgccaccaccaccaccaccaccacagagtctgtggaagaggtggttcgagagaagtggtataaggaagtacattctggccaggcacgatggctcatgctgtaatcccagcactttg

SEQ ID NO: 372197 - DNA, 68 bp, Artificial Sequence
  ENSG00000142192_31 (sequence is synthesized)
aagccgagttcactccattgtactctagcctgggtgacagagcgagattcgtctcaaaaaaaaaaaaa

SEQ ID NO: 372198 - DNA, 120 bp, Artificial Sequence
  ENSG00000142192_32 (sequence is synthesized)
gttaggtcacatacacagacttgttcttcagcacattgccactctgtgttgtactgtgttttggactcttgcagttacattctgtgcactgaccctataggagcagtatttttgagttcc

SEQ ID NO: 372199 - DNA, 120 bp, Artificial Sequence
  ENSG00000142192_33 (sequence is synthesized)
ctgcctcagaatgaatttacccagggtgtatattgaaattacaaattcctgggccagttccaggactcctgaatgaaaaatgcctatagtagcggatccgggaattcttattttaccgta

SEQ ID NO: 372200 - DNA, 120 bp, Artificial Sequence
  ENSG00000142192_34 (sequence is synthesized)
tcgcatagatgattctcatgaacaggggccttgtgtgtttcttcacatagactttctagaagaaagaatctaatgtgaagctgcagcattttgttaatttctaaaaaaaaaaaaaaaaaa

SEQ ID NO: 372201 - DNA, 120 bp, Artificial Sequence
  ENSG00000142192_35 (sequence is synthesized)
gttcacataactccagcatcatcaccttctttgcatggttttgtgtttcttgaacacctgtcttagtaaaatgtttcttcccattaccttgcttgtaattacatctgattttgccagaca

SEQ ID NO: 372202 - DNA, 120 bp, Artificial Sequence
  ENSG00000142192_36 (sequence is synthesized)
gtcggatgattcaagctcacggggacgagcaggagcgctctcgacttttctagagcctcagcgtcctaggactcacctttccctgatcctgcaccgtccctctcctggccccagactctc

SEQ ID NO: 372203 - DNA, 120 bp, Artificial Sequence
  ENSG00000142192_37 (sequence is synthesized)
actggagggctgagaagagactgatggcatttgttgttcttgaccttgaaagaagagttgcagattgttggagcaaggccagatggtaataggttggaaagaacaagtgaggggcgtgag

SEQ ID NO: 372204 - DNA, 120 bp, Artificial Sequence
  ENSG00000142192_38 (sequence is synthesized)
atccttgccaacctctcaaccaggatttaacttctgcttttcccccattttcaaaaattatagcatgtatttaaaggcagcagaagccttactttcaggtttcccttaccctttcatttc

SEQ ID NO: 372205 - DNA, 120 bp, Artificial Sequence
  ENSG00000142192_39 (sequence is synthesized)
tttttgttcaaaataggtagtaattgaagttttaaatatagggtatcatttttctttaagagtcatttatcaattttcttctaacttcaggcctagaaagaagttttgggtaggctttgt

SEQ ID NO: 372206 - DNA, 77 bp, Artificial Sequence
  ENSG00000142192_40 (sequence is synthesized)
gacttgagcccagaagttcaagaccagaatgggaaacatggcaagaccacatttctacaaaaaaattatccaggcat

SEQ ID NO: 372207 - DNA, 120 bp, Artificial Sequence
  ENSG00000142192_41 (sequence is synthesized)
atggcaagaccacatttctacaaaaaaattatccaggcatgataacatctatttgtagtcccagctactcaggaggctgtggtgggaggatctcctgagcctggggtggctgaggctgca

SEQ ID NO: 372208 - DNA, 120 bp, Artificial Sequence
  ENSG00000142192_42 (sequence is synthesized)
tagagcaagaccctgtctcaaaaaaaggaagaaaaagactattatttcccccattgaatggtcttggcactattacacaaaatcaattgtccatagataatatgggtttatttcttaatt

SEQ ID NO: 372209 - DNA, 120 bp, Artificial Sequence
  ENSG00000142192_43 (sequence is synthesized)
atagataatatgggtttatttcttaattcttagttcttttctttgatctgtgtgcctgtgcttactgtagtaccacactgttttgattattgtagctttgtagtaaattttgaaatcagc

SEQ ID NO: 372210 - DNA, 120 bp, Artificial Sequence
  ENSG00000142192_44 (sequence is synthesized)
ggcgcggcctcttccctggcagctctggggactctggtttagttcccctgggggcacaggatgctggggagggtccgaagggtcttttttttagggtgcagataaaaggatcgaattgag

SEQ ID NO: 372211 - DNA, 120 bp, Artificial Sequence
  ENSG00000142192_45 (sequence is synthesized)
agagttccggaggctttggttgtccattgttagcttagaagttggcgcagtgtgcgtgtgatccacgcctaaatagcacagccttgctgtgcgtggtagaagttgggttagtgttgacat

SEQ ID NO: 372212 - DNA, 120 bp, Artificial Sequence
  ENSG00000142192_46 (sequence is synthesized)
gctgttgactcaccctcccgaggatggaagctctggcctgggtcaagttgtggtcactgcagttaacagtttgttgatctcagggagtattccacagttgctgatgtaattgacaatgat

SEQ ID NO: 372213 - DNA, 120 bp, Artificial Sequence
  ENSG00000142197_0 (sequence is synthesized)
ttcatctcccacagtgcctggcccagaagccttgctaaatatttgaacaggattgcccaatacttttctgctgtgagaatgtaagatggatccagaagagcaggagctcttaaatgatta

SEQ ID NO: 372214 - DNA, 120 bp, Artificial Sequence
  ENSG00000142197_1 (sequence is synthesized)
cagatacagaagctactcttcagtgattgaaaaggctttgagaaattttgagtcctcgagtgaatgggcggatctcatatcttcacttggcaaactcaacaaggctcttcagagtaacct

SEQ ID NO: 372215 - DNA, 120 bp, Artificial Sequence
  ENSG00000142197_2 (sequence is synthesized)
gaggtactccttgttgccaagacggctcctcatcagcaaaagattagctcagtgtttgcaccctgccctgcccagtggtgtccacttaaaagctctggaaacctacgagattatctttaa

SEQ ID NO: 372216 - DNA, 120 bp, Artificial Sequence
  ENSG00000142197_3 (sequence is synthesized)
aatcgtggggaccaaatggctggccaaggacttgtttctgtacagctgcgggttatttcctctcctggcacacgcggcggtgtcggtgaggccggtgctgctcaccctgtacgagaagta

SEQ ID NO: 372217 - DNA, 120 bp, Artificial Sequence
  ENSG00000142197_4 (sequence is synthesized)
cttcctcccactgcagaagctgctcctgcccagtctgcaggccttcatcgtgggcctgctgcccggccttgaagagggctccgagatctccgacagaacggatgctctgctcctgagact

SEQ ID NO: 372218 - DNA, 120 bp, Artificial Sequence
  ENSG00000142197_5 (sequence is synthesized)
gtcgctggtggttggcaaagaggtgttttacaccgccctctgggggagcgtcctggccagcccgtccatccgcctccctgcctcagtcttcgtggtgggccacatcaacagggatgcccc

SEQ ID NO: 372219 - DNA, 120 bp, Artificial Sequence
  ENSG00000142197_6 (sequence is synthesized)
cggccgggagcagaagtacatgctggggaccaatcaccaactcacggtgaagtctttgcgtgcctccctgttggactcaaatgttcttgtgcaaagaaataatctggaaatcgttctgtt

SEQ ID NO: 372220 - DNA, 120 bp, Artificial Sequence
  ENSG00000142197_7 (sequence is synthesized)
tttcttcccattttatacctgtctggattccaatgagagagccatccccctcctcagatctgacatcgtgcgcattctctcagccgccacccagaccctactgagaagggacatgtccct

SEQ ID NO: 372221 - DNA, 120 bp, Artificial Sequence
  ENSG00000142197_8 (sequence is synthesized)
gaacagaagactgtatgcatggttactaggctcagacataaaaggaaataccgttgtgccagaatctgaaatctcaaattcttatgaagaccagtcgtcttatttttttgaaaaatactc

SEQ ID NO: 372222 - DNA, 120 bp, Artificial Sequence
  ENSG00000142197_9 (sequence is synthesized)
caaggatcttttagttgagggtttggctgagatattgcatcagaagttcatagatgctgacgtggaggaacgccatcatgcatacctgaagccttttcgcgtcctcatcagtctgcttga

SEQ ID NO: 372223 - DNA, 120 bp, Artificial Sequence
  ENSG00000142197_10 (sequence is synthesized)
caagccagaaatagggcctcaagtggttgggaatttgtttctcgaagtcatcagggccttttattcttactgcagagatgcccttggctctgatcttaaacttagctacacccagagtgg

SEQ ID NO: 372224 - DNA, 120 bp, Artificial Sequence
  ENSG00000142197_11 (sequence is synthesized)
aaattcgctgataagtgcaatcaaggaaaacagaaatgcctctgagattgtcaaaacggtaaatttgctgataacttctctaagcacagactttctctgggattatatgacaaggtgttt

SEQ ID NO: 372225 - DNA, 120 bp, Artificial Sequence
  ENSG00000142197_12 (sequence is synthesized)
tgaggaatgctttagaccagtgaagcagcgttacagcgtgaggaacagcgtcagccctccccccacggtctcggagctctgcgccctcctggtcttcctgctggatgtcattcctttgga

SEQ ID NO: 372226 - DNA, 120 bp, Artificial Sequence
  ENSG00000142197_13 (sequence is synthesized)
actttactctgaggtgcaaacccagtatctccctcaggtgctcggctgcctggtgcagcctcttgctgaggacatggaggccttaagtttacctgaactcacgcatgccttgaagacgtg

SEQ ID NO: 372227 - DNA, 120 bp, Artificial Sequence
  ENSG00000142197_14 (sequence is synthesized)
tttcaaggtgctcagcaaagtccagatgcctccttcctacctcgacacggagtccaccagcggaacctcgagtccagtaaaaggtgaaaacggcaaaataattttggaaacaaaggcagt

SEQ ID NO: 372228 - DNA, 120 bp, Artificial Sequence
  ENSG00000142197_15 (sequence is synthesized)
gattcccggtgacgaagatgcttcgtttccccctctgaagtctgaggacagtgggatcgggctcagtgcctcgtcaccggagctctctgagcacttgagggttcctcgagtttctctgga

SEQ ID NO: 372229 - DNA, 120 bp, Artificial Sequence
  ENSG00000142197_16 (sequence is synthesized)
aagggacgacgtttggaagaagggcgggagcatgcagaggacgtttctttgcatccaagagctaatcgccaactttgccagcaagaacatttttggagtacagctgacagcgtcaggaga

SEQ ID NO: 372230 - DNA, 120 bp, Artificial Sequence
  ENSG00000142197_17 (sequence is synthesized)
agaaagcaagtccgaggagcctgcagggaagagggacagggatgggacgcagagcctggcagccaatgattccagcaggaagaactcttgggagcccaagcccatcactgtgcctcagtt

SEQ ID NO: 372231 - DNA, 120 bp, Artificial Sequence
  ENSG00000142197_18 (sequence is synthesized)
caagcagatgctgtcagacttgttcacagcacgagggtctccattcaagacaaaaagttcagagtcaccatcgtcttcgcccagcagccctgccaggaaaaacgggggagaatgggatgt

SEQ ID NO: 372232 - DNA, 120 bp, Artificial Sequence
  ENSG00000142197_19 (sequence is synthesized)
tgagaaggtggtcattgacctggggggttccagggaggaacgcagggaggcctttgccgccgcctgccacctgctgctggattgtgccactttccctgtctacctgtccgaggaagagac

SEQ ID NO: 372233 - DNA, 120 bp, Artificial Sequence
  ENSG00000142197_20 (sequence is synthesized)
cgagcagctctgtgcaacgctcttccagctgccaggagccggtgattccagttttccatcttggctgaagtccctcatgactatttgctgctgtgtgactgactgctacctccagaacgt

SEQ ID NO: 372234 - DNA, 120 bp, Artificial Sequence
  ENSG00000142197_21 (sequence is synthesized)
ggccatttccactctgctggaagtgataaaccattcccagtccctggcgcttgtcattgaagacaagatgaaacgctataagagctctggacacaaccctttttttggcaagctgcagat

SEQ ID NO: 372235 - DNA, 120 bp, Artificial Sequence
  ENSG00000142197_22 (sequence is synthesized)
ggtgacggttcctcccattgctccagggatattgaaagtcattgcagagaaaacagatttctatcagagggtggctcgtgtgctttggaatcagctgaacaaagagacccgggagcatca

SEQ ID NO: 372236 - DNA, 120 bp, Artificial Sequence
  ENSG00000142197_23 (sequence is synthesized)
cgtcacctgcgtagaattgttctaccggctgcactgcctggcccctacggccaacatctgcgaggacatcatctgccatgccctcctggaccctgacaagggaacaaggctggaagctct

SEQ ID NO: 372237 - DNA, 120 bp, Artificial Sequence
  ENSG00000142197_24 (sequence is synthesized)
gtttagattttccgtgatctggcatctgacaagagagatccaaggcagtcgagtaacatctcacaatcgctcctttgataggtccttgtttgtcgtgctggacagcctggcctgcacgga

SEQ ID NO: 372238 - DNA, 120 bp, Artificial Sequence
  ENSG00000142197_25 (sequence is synthesized)
tggtgccatcggtgcggcagcccagggctggctggtgcgtgcgctctccctcggggacgtggctcgcatcctcgaacccgtgctcctgctgctgctgcagccaaaaacccagagaacctc

SEQ ID NO: 372239 - DNA, 120 bp, Artificial Sequence
  ENSG00000142197_26 (sequence is synthesized)
catccactgcctcaagcaggagaactcggccgatgacttgcaccgttggtttaacaggaagaaaacctctttcagagaggcatgcgcagtgcccgagcctcaggagagcggctctgaaga

SEQ ID NO: 372240 - DNA, 120 bp, Artificial Sequence
  ENSG00000142197_27 (sequence is synthesized)
gcacctgcctctgagccagttcaccacagtggaccgtgaagccatttgggccgaagtggagaaggagcccgagaagtacccgctgcgaggcgagctgagcgaggaagagctgccctacta

SEQ ID NO: 372241 - DNA, 120 bp, Artificial Sequence
  ENSG00000142197_28 (sequence is synthesized)
cgtggagcttccagacaggacggcccacggcgccccggacagcagcgagcacaccgagtctgcagatacaagctcctgccacacggacagcgagaacacgtcctccttctcctccccttc

SEQ ID NO: 372242 - DNA, 120 bp, Artificial Sequence
  ENSG00000142197_29 (sequence is synthesized)
ccacgacctgcaggagctgagcaacgaagagaactgctgtgcacccatccccatggggggcagggcgtaccccaagcgctcggccctgctggcggccttccagtcagaaagcttcaaggc

SEQ ID NO: 372243 - DNA, 120 bp, Artificial Sequence
  ENSG00000142197_30 (sequence is synthesized)
tggggccaagttaagcctggtgcgggtggactcggacaagacgcaggcttctgagtcgttctccagcgacgaggaggcggacttggagctccaggccctcaccacatccaggctgctaaa

SEQ ID NO: 372244 - DNA, 120 bp, Artificial Sequence
  ENSG00000142197_31 (sequence is synthesized)
gcagcagcgggaaaggcaggaggccgtcgaggccttgttcaagcacatcctgctctacctgcagccctacgactctcggcgggtcctctatgccttctcggtgctggaggctgtgctcaa

SEQ ID NO: 372245 - DNA, 120 bp, Artificial Sequence
  ENSG00000142197_32 (sequence is synthesized)
accctaaggaattcatcgaggctgtgtccaggactagcatggataccagctccaccgcgcacctcaacctcatctccaacctcctcgctcgccaccaggaggccctcattggccagagtt

SEQ ID NO: 372246 - DNA, 120 bp, Artificial Sequence
  ENSG00000142197_33 (sequence is synthesized)
tctacggaaagctccagacccaggtccccaacgtgtgcccccactctctgctcctggagctgctcacctacctctgcctgagcttcctgcgctcctactacccttgctatttgaaggtct

SEQ ID NO: 372247 - DNA, 120 bp, Artificial Sequence
  ENSG00000142197_34 (sequence is synthesized)
cgcaccgagacattctcggcaaccgggacgtgcaggtcaaaagtgtcgaggttttgatcaggataatgatgcagctggtctcagtggccaagtcttcggaagggaagaacgtggagttca

SEQ ID NO: 372248 - DNA, 120 bp, Artificial Sequence
  ENSG00000142197_35 (sequence is synthesized)
tccacagcttgctgcagaggtgcaaagttcaggagtttgtcctgctctccctgtcggcgtccatgtacacgagccagaagcgctacgggctggccaccgcccaccacggcagggccctgc

SEQ ID NO: 372249 - DNA, 120 bp, Artificial Sequence
  ENSG00000142197_36 (sequence is synthesized)
cagaggacagcctctttgaggagagtctcattaacttgggtcaggaccagatctggagtgagcacccgctgcagattgagctgctgaagctgctgcaggtgctgattgtcttggaacacc

SEQ ID NO: 372250 - DNA, 120 bp, Artificial Sequence
  ENSG00000142197_37 (sequence is synthesized)
acctgggtcgggcccatgaggaggcggaaaaccagcccgacctgtcccgggagtggcagagagccctgaacttccagcaggccatcagcgccctgcagtacgtgcagccccaccccctca

SEQ ID NO: 372251 - DNA, 120 bp, Artificial Sequence
  ENSG00000142197_38 (sequence is synthesized)
cctcccagggtcttctggtctctgcggtggtgaggggtctgcagcccgcctacggttacggcatgcatccggcctgggtgagcttggtcacgcattccttgccctacttcggaaagtccc

SEQ ID NO: 372252 - DNA, 120 bp, Artificial Sequence
  ENSG00000142197_39 (sequence is synthesized)
tgggctggacggtgacaccctttgttgtccagatttgcaaaaacttggatgacttggtcaagcagtatgaaagcgaatctgtgaagctctctgtcagcacaacctccaagagggaaaaca

SEQ ID NO: 372253 - DNA, 120 bp, Artificial Sequence
  ENSG00000142197_40 (sequence is synthesized)
tttctccagattatccactcacccttctagaaggtctaacgaccattagtcatttttgtcttttggaacaagccaaccaaaacaaaaagaccatggctgcaggtgatcctgccaacttga

SEQ ID NO: 372254 - DNA, 120 bp, Artificial Sequence
  ENSG00000142197_41 (sequence is synthesized)
ggaatgccagaaatgccattttggaagagctgcctcgaactgttaacaccatggcccttctctggaatgttctcagaaaggaggagactcaaaagagacctgtcgatctcctaggggcca

SEQ ID NO: 372255 - DNA, 120 bp, Artificial Sequence
  ENSG00000142197_42 (sequence is synthesized)
cgaagggatcctcttccgtttactttaaaaccaccaaaaccataagacaaaaaattttagacttcttaaaccccttgacggcccatcttggggttcagttgacagcggctgttgcggcag

SEQ ID NO: 372256 - DNA, 120 bp, Artificial Sequence
  ENSG00000142197_43 (sequence is synthesized)
tgtggagcagaaagaaagcccagcgtcacagtaagatgaagattatcccaacggcaagtgcatcccagctaacccttgtcgacttggtgtgtgcactcagcaccctgcagactgacacgc

SEQ ID NO: 372257 - DNA, 120 bp, Artificial Sequence
  ENSG00000142197_44 (sequence is synthesized)
tgctgcacctggtgaaggaggtggtgaagaggccaccccaagtcaaagggggtgatgagaaatcgcccctagtggacattcctgtgttgcagttttgctatgcttttctccaaaggctcc

SEQ ID NO: 372258 - DNA, 120 bp, Artificial Sequence
  ENSG00000142197_45 (sequence is synthesized)
cagtaccagccttgcaagagaacttttcttcactgttgggagtattgaaagagtctgtacagttgaatctagccccacctgggtattttctgcttctcagcatgctgaatgactttgtaa

SEQ ID NO: 372259 - DNA, 120 bp, Artificial Sequence
  ENSG00000142197_46 (sequence is synthesized)
caagaactcccaacctggaaaacaagaaggaccaaaaagacctgcaggaaatcactcagaaaatcctagaagctgtggggaacattgccggctcttccttggagcaaaccagctggctaa

SEQ ID NO: 372260 - DNA, 120 bp, Artificial Sequence
  ENSG00000142197_47 (sequence is synthesized)
gcagaaacctggaagtgaaggcccaacctcaggcctctctagaagaatctgatgctgaggaggacctgtatgatgctgctgcagcttcagcaatggtgtcttcatccgccccgtcggtgt

SEQ ID NO: 372261 - DNA, 120 bp, Artificial Sequence
  ENSG00000142197_48 (sequence is synthesized)
acagcgtgcaagccctctctctcctggcagaggtactggcttccctcctggacatggtttatcgaagtgatgagaaggagaaagctgtgccgttaatctcccgtctgctttactatgttt

SEQ ID NO: 372262 - DNA, 120 bp, Artificial Sequence
  ENSG00000142197_49 (sequence is synthesized)
ttccatacttacgcaaccacagtgcctacaatgctcccagcttccgggctggcgctcagctgctgagctccctgagtggctatgcctacacaaagcgagcctggaggaaggaggtcctgg

SEQ ID NO: 372263 - DNA, 120 bp, Artificial Sequence
  ENSG00000142197_50 (sequence is synthesized)
agctgtttctcgaccccgctttctttcagatggatacttcctgtgttcattggaagtccattattgaccatcttttgactcatgagaaaacaatgtttaaggatttaatgaacatgcaga

SEQ ID NO: 372264 - DNA, 120 bp, Artificial Sequence
  ENSG00000142197_51 (sequence is synthesized)
gcagttctttgaaactattctcaagttttgaacagaaagccatgctgttaaagcgccaggcttttgctgtcttcagtggagaacttgatcaataccacctttaccttccactgatacaag

SEQ ID NO: 372265 - DNA, 120 bp, Artificial Sequence
  ENSG00000142197_52 (sequence is synthesized)
aacgcctgacagacaatctcagagttggacagacatccatagttgctgctcagatgtttctttttttcagagttttgctgctaagaatatctcctcaacatttgacttcattgtggccaa

SEQ ID NO: 372266 - DNA, 120 bp, Artificial Sequence
  ENSG00000142197_53 (sequence is synthesized)
taatggtctctgaattgattcagacattcacacagcttgaagaagatctaaaagatgaagatgagtcattgagaagcaccaacaaagtaaacagaacgaaagtttcagtcccggatgcaa

SEQ ID NO: 372267 - DNA, 120 bp, Artificial Sequence
  ENSG00000142197_54 (sequence is synthesized)
atggaccctcagtgggggagataccccagagtgaactcatcttgtatttatcagcttgcaaattcttggacacagcgctttcttttccacctgacaagatgccattatttcaaatttata

SEQ ID NO: 372268 - DNA, 120 bp, Artificial Sequence
  ENSG00000142197_55 (sequence is synthesized)
ggtgggcatttattccagaagtggacacagagggccctgccttcctgtcggatgtagaggagaatcaccaagaatgcaaaccccacactgtcaggattctagaacttctaaaattaaagt

SEQ ID NO: 372269 - DNA, 120 bp, Artificial Sequence
  ENSG00000142197_56 (sequence is synthesized)
ttggggaaatcagtagctctgatgagatcaccatgaagagtgaattcccgcttctgcgccaacattctgtttccagcatcaggcagttgatgccattcttcatgactctaaatggtgcat

SEQ ID NO: 372270 - DNA, 120 bp, Artificial Sequence
  ENSG00000142197_57 (sequence is synthesized)
ttaagacccagagacagctgcctgctgatagcccaggaactccattcttggactttcctgtcacagatagcccaaggatcttaaaacaactggaagaatgcatcgaatatgattttctgg

SEQ ID NO: 372271 - DNA, 120 bp, Artificial Sequence
  ENSG00000142197_58 (sequence is synthesized)
aacatccagaatgttaaccatgtgagagagaatatgtttaatccatgtattggtactttactgaaaaccaggttatattctaaagaagaaagaaggcaggatagtgcttttgaacaagcc

SEQ ID NO: 372272 - DNA, 69 bp, Artificial Sequence
  ENSG00000142197_59 (sequence is synthesized)
taaagaagaaagaaggcaggatagtgcttttgaacaagcctatttccattttgaaagtagatttcaggc

SEQ ID NO: 372273 - DNA, 120 bp, Artificial Sequence
  ENSG00000142197_60 (sequence is synthesized)
gaggctgcagtgagccgagatcacgacactgcactccagctgtgtgacagaatgagaccatctccaaaaaaaaaaaaaagtagatttcagataatttactgttcagcaacaggacacacc

SEQ ID NO: 372274 - DNA, 120 bp, Artificial Sequence
  ENSG00000142197_61 (sequence is synthesized)
tccctaaatgccttgtaatatatttgaatctgattctgcatttcttcctcaatttatgtaatgaaaataaaattaatatatcatctaacagtagcacaaaatttgtaatatgaagtaaag

SEQ ID NO: 372275 - DNA, 120 bp, Artificial Sequence
  ENSG00000142197_62 (sequence is synthesized)
tatgaagataatgaagaagttgttttctttgttgaagcagttatatgggtctttctcagtatatttctcttttctctaaaagtttaaacttattaaaagaatgttatttttaacctttca

SEQ ID NO: 372276 - DNA, 120 bp, Artificial Sequence
  ENSG00000142197_63 (sequence is synthesized)
gacccgcgcggtggggaagagccgctgccgctggttctccggctcttcctcggcggttctggctcccggccgcgccgcagccctgcccagtctctctcccccagcccggagggctcctcc

SEQ ID NO: 372277 - DNA, 120 bp, Artificial Sequence
  ENSG00000142197_64 (sequence is synthesized)
cattgttcagaaaatatcttaaagttgtcataatttcttcccaaggtattgatctatgcttttccttctccagagagttaacatcttaaaatctgtgcagcgtactttgaacactttata

SEQ ID NO: 372278 - DNA, 120 bp, Artificial Sequence
  ENSG00000142197_65 (sequence is synthesized)
tgagcgaagctttatgtgaggcctgttaaactttaaaaggcttggatttgcattaaattgatacagaaaaagaaaaaaaccacatatagggaagtgttaaagacctcttttagaaaaagg

SEQ ID NO: 372279 - DNA, 81 bp, Artificial Sequence
  ENSG00000142197_66 (sequence is synthesized)
ttgtttctggtggcgttctcagtgtgccttcccatgttttatgtggagaggtatctgctttgatttgctaagttaatatat

SEQ ID NO: 372280 - DNA, 120 bp, Artificial Sequence
  ENSG00000142197_67 (sequence is synthesized)
tgtggagaggtatctgctttgatttgctaagttaatatatgtattaggtgtctcagctaagagagcattaaaggggattccgcaggtttttccccatggatgaaaaagaagctttactgg

SEQ ID NO: 372281 - DNA, 120 bp, Artificial Sequence
  ENSG00000142197_68 (sequence is synthesized)
aaagaagctttactggacctcattcagatcttacaatggctgcatcccaggtgcagctctgtgttgcagaaaatgagggtgaggtggctgggtgcggtggctcaacgcctgtaatcccag

SEQ ID NO: 372282 - DNA, 79 bp, Artificial Sequence
  ENSG00000142197_69 (sequence is synthesized)
gaccagcctggccaacgtggtaaaaccctatgtctactaaaactacaaaaaattagccagggcttggtggctgaatcac

SEQ ID NO: 372283 - DNA, 120 bp, Artificial Sequence
  ENSG00000142207_0 (sequence is synthesized)
ctgcgccatgtgggcctgaagcgcgtgtctgctgtctgtgccagtgctcctgccgggtcccctcaggtgtgtcgtttccgtcgcgcttccgccctctcggccatgggggtccccaagagg

SEQ ID NO: 372284 - DNA, 120 bp, Artificial Sequence
  ENSG00000142207_1 (sequence is synthesized)
aaggcctcgggcggccaggacggcgcggcttcctccgcgggtgcagccaagcgcgcccgcaaagaagagctcacgggcgtgcggttcaaggctcagctgaaggacccgcagggccccggg

SEQ ID NO: 372285 - DNA, 120 bp, Artificial Sequence
  ENSG00000142207_2 (sequence is synthesized)
ccaggcttggaagcgtttgtgtctgctgccaagaagctaccacgagaagatgtgtatgatgttgtggaagggtatataaagatttctgttgagtgtgtcgaaattttccagctcctaagt

SEQ ID NO: 372286 - DNA, 120 bp, Artificial Sequence
  ENSG00000142207_3 (sequence is synthesized)
ggagagaaacgacctgaaagtgaaacgatgttaatatttcaagttttcgaggccatattattgcggacagcaagtgatctttcacatttccatgttgtgggaaccaacattgtgaaaaag

SEQ ID NO: 372287 - DNA, 120 bp, Artificial Sequence
  ENSG00000142207_4 (sequence is synthesized)
ctgatgaacaaccacatgaagctcatctgtgagtccctgtatgcctcaggttacaggttggctcgcgcctgcctgagcctgatgaccgccatggtgacccagggtccggaagctgccagg

SEQ ID NO: 372288 - DNA, 120 bp, Artificial Sequence
  ENSG00000142207_5 (sequence is synthesized)
gacgtctgcagccattttgatttgaataaaaagaccctgtacaccctggtgaccaagagggattcaaagggagtgtacgacgttcggcaggcctacgttcagtttgctctctccttttta

SEQ ID NO: 372289 - DNA, 120 bp, Artificial Sequence
  ENSG00000142207_6 (sequence is synthesized)
attgcgggtgatgacagcactatagtgcaggtgttggaagtgaaagaatttattccttgcatttttagctcagggataaaggaagataggatctctaccatcaatattttattatccaca

SEQ ID NO: 372290 - DNA, 120 bp, Artificial Sequence
  ENSG00000142207_7 (sequence is synthesized)
ctgaaaacaaaggtagttcacaataaaaatatcacaaaaacccagaaggtgcgtttctttacggggcagttattgaaccacatagcatcgctgtacaactggaatgggattaccgatgtg

SEQ ID NO: 372291 - DNA, 120 bp, Artificial Sequence
  ENSG00000142207_8 (sequence is synthesized)
aacccagaaaatgtcaaggtttctgccgaagaagcagggaaaaccatggtgcgggagcttgttcataacttcctgatggatctttgctgttcactcaagcatggaattaatttttacgat

SEQ ID NO: 372292 - DNA, 120 bp, Artificial Sequence
  ENSG00000142207_9 (sequence is synthesized)
gcatctttgggtacctttggcagaggcggaaacctgacactcttgcacttcttgctgggtttgaaaactgcagctgatgatgatctggtggctgaccttgtggtaaacatcctcaaagtg

SEQ ID NO: 372293 - DNA, 120 bp, Artificial Sequence
  ENSG00000142207_10 (sequence is synthesized)
tgcccggacttactgaacaaatacttcaaggaagtaacgttttcctttatcccacgagcgaagtctacttggttaaataatatcaaactactaaacaagatctatgaggctcagccggag

SEQ ID NO: 372294 - DNA, 120 bp, Artificial Sequence
  ENSG00000142207_11 (sequence is synthesized)
atttcccgggcatttcagaccagagagtttatacccttgcctcggctcctggcaatggtgatggtgaccaccgtgcccctggtgtgcaataagagcatgttcacccaagcattaaacttg

SEQ ID NO: 372295 - DNA, 120 bp, Artificial Sequence
  ENSG00000142207_12 (sequence is synthesized)
gacagcacctcagtgaggcacacagccttatcccttatttctgtcattttgaagagggcattaaaaactgttgaccactgcctgaataaagaggtgtggcaggaatcaggcgtgtacaca

SEQ ID NO: 372296 - DNA, 120 bp, Artificial Sequence
  ENSG00000142207_13 (sequence is synthesized)
gctgtgatgatggaagaattcgtgcagctcttcagagaagccctgagcaagattttgccagacctgaacactgtcgtgtgggtctggcagtcacttaaaaagcaagagaccaaacaggat

SEQ ID NO: 372297 - DNA, 120 bp, Artificial Sequence
  ENSG00000142207_14 (sequence is synthesized)
gacaagaaagggcagaaaaggagcgatgggcccccggctgcctgcgatgctcaccagtgcgatgatgcagaaaccattcttttgaaagctgttttgctccaggtcatatgcctctaccag

SEQ ID NO: 372298 - DNA, 120 bp, Artificial Sequence
  ENSG00000142207_15 (sequence is synthesized)
aaggtggtcccccacgtggtcatgcagtacaactttgacttcagcaagctcctgaaaggtgtcatctctgagcagggccttcgagaggaggtgcctcccattctgcagcaccacatgctg

SEQ ID NO: 372299 - DNA, 120 bp, Artificial Sequence
  ENSG00000142207_16 (sequence is synthesized)
aaggtggccctggagctgccggccagcaagtttctgtggttaaaggcacaggaaggcccagatgcagaaattattggaggtgaacgatcagtattttacttactaatgaaaatgtttgtg

SEQ ID NO: 372300 - DNA, 120 bp, Artificial Sequence
  ENSG00000142207_17 (sequence is synthesized)
accagtagccatttacaactgaagtcattgaccaaacttctgatcatgaagattctgcgggacacgggggtgtttgagcacacctggaaggagctggagctctggctggagcatttagag

SEQ ID NO: 372301 - DNA, 120 bp, Artificial Sequence
  ENSG00000142207_18 (sequence is synthesized)
aacaccatggaagaggacaaagagactgtgattcagtttctggaacgcattttattgacattggtggcgaatccctattcatacacagacaaagcatctgactttgtccaagaagcaagc

SEQ ID NO: 372302 - DNA, 120 bp, Artificial Sequence
  ENSG00000142207_19 (sequence is synthesized)
atgctgcaggccactatgacgaagcaagaagccgatgacatgagcattcccatctcccacattgacgatgttctcgacatggtggatgtcctggtggagggcagtgaaggcttggatgag

SEQ ID NO: 372303 - DNA, 120 bp, Artificial Sequence
  ENSG00000142207_20 (sequence is synthesized)
gaaatagggttcacgttgagtgaagacatgatcctgctcacgttcccattcagtgcggtagtccctgcggccctggaagccaggaataagttgctccttgggacaggcaatgaagcagcg

SEQ ID NO: 372304 - DNA, 120 bp, Artificial Sequence
  ENSG00000142207_21 (sequence is synthesized)
gaaaacgttgtgacatatctgacggcagtgctgactgacctcctccacacccagagggaccccctggctctgtgtctcctgctccaggcatatgataagcttgagcctccatgcctggtg

SEQ ID NO: 372305 - DNA, 120 bp, Artificial Sequence
  ENSG00000142207_22 (sequence is synthesized)
ccttgctgccagcagctctcacggtttaacagatactacagcctctggatcccggagcaagcccgagaggcctggctgctgcaggcacagggcagcccctcgccccctgcccttcccttg

SEQ ID NO: 372306 - DNA, 120 bp, Artificial Sequence
  ENSG00000142207_23 (sequence is synthesized)
gcctcgtccttcacagccctgctgcaggcagcctacgagagccaagcgcttcgggacgagcacatccaggtgcagctgcaggccaccatgccacacctgtccatgcagcaggtcctgctc

SEQ ID NO: 372307 - DNA, 120 bp, Artificial Sequence
  ENSG00000142207_24 (sequence is synthesized)
gcggccaagcaggtgttgctctacctgcggagcactgtggagaacttcggccagctgggcagaagtgtgggcccgcccctcctgcagctcttcctggatctcctcaggcgcctggttgtc

SEQ ID NO: 372308 - DNA, 120 bp, Artificial Sequence
  ENSG00000142207_25 (sequence is synthesized)
cactgtgagcagctggatgcccagaaccagcagagatgcgaggccgcccgggccgaagccgacctcttcctggacatggagtccgtggcctcgctggagttggccaatgatcagacgctg

SEQ ID NO: 372309 - DNA, 120 bp, Artificial Sequence
  ENSG00000142207_26 (sequence is synthesized)
gaggaggtgcttgtggccatcctcaggcaccccaccctggagggctggttcctggccctggagcagcaggccctcccgccgcacacgctcagccctgtcctcgtgaagctcctggccacc

SEQ ID NO: 372310 - DNA, 120 bp, Artificial Sequence
  ENSG00000142207_27 (sequence is synthesized)
cactttagtgcaggggtccttcagctgctggcagcaagtgccccgatcctccagaacattgggcagctgggccttctggccaggtactcagaggccatcacccagagtgtgctgaaggaa

SEQ ID NO: 372311 - DNA, 120 bp, Artificial Sequence
  ENSG00000142207_28 (sequence is synthesized)
cttcagaacaggagggcgggcccggccacatcaccaccaaagaccccgccgcagctggaggccctgcaggagctgcatccatacatggagggtgcccagctccgtgaggtcaccctggcc

SEQ ID NO: 372312 - DNA, 120 bp, Artificial Sequence
  ENSG00000142207_29 (sequence is synthesized)
ttgctgagcctgcctgagacacacctggtgacccagcaacccacgaaatcccccgggaaggaaagacacctgaatgctcttggaaagaccctggtgcagctgctgacctgcagcccccag

SEQ ID NO: 372313 - DNA, 120 bp, Artificial Sequence
  ENSG00000142207_30 (sequence is synthesized)
gatcagctgcagagtggtgagctcctgtggtcctccgagtatgtgagaggcctgggggctctgctgcccacgctagcagtggacgagctggacacagtgctcctccacactctgcagaga

SEQ ID NO: 372314 - DNA, 120 bp, Artificial Sequence
  ENSG00000142207_31 (sequence is synthesized)
gaccctgtgctggcccccgcagtcggggctgatctgcttgactactgcctggcccggcgcacacaggcggccctcagcatcgctgccctgctcctccaggagagctgcacccacttgctg

SEQ ID NO: 372315 - DNA, 120 bp, Artificial Sequence
  ENSG00000142207_32 (sequence is synthesized)
tggttcgagcagtggtgcctgcaggctggcccagggctcggcctccagggggacctggacgacttccttcccctcatccatgtgtacctccagtgcaggacacggagccacttcacacgc

SEQ ID NO: 372316 - DNA, 120 bp, Artificial Sequence
  ENSG00000142207_33 (sequence is synthesized)
ccagcaggagtgtcttccgctgtcattcctgtcttgaggaagaccctgtggaggcagctacagagcaggcttcttagcactgacagtcccccagcatctgggctgtaccaggagatcctg

SEQ ID NO: 372317 - DNA, 120 bp, Artificial Sequence
  ENSG00000142207_34 (sequence is synthesized)
gcacagctggtcccgtttgcacgagccaaggatctcagtgtactcatggaccgcctgcccagcttgcttcacaccccaagcagtcacaagaggtggatcgtggccgactccatttcagca

SEQ ID NO: 372318 - DNA, 120 bp, Artificial Sequence
  ENSG00000142207_35 (sequence is synthesized)
gctctggaagggtcagcagaagagctgtgtgcctggagaaggacccttttggagtcctgtgtgaagtggctgatcgtgtctttcagtggtggacagcaagatgatgataatactcagaat

SEQ ID NO: 372319 - DNA, 120 bp, Artificial Sequence
  ENSG00000142207_36 (sequence is synthesized)
caggagaaggaaatgctgcttagattaaatgcgttgttgcatgcacttaatgaagttgatcctggtgactggcagaaattcgtgaagaagggactcaaatttcggtaccaggaccacaca

SEQ ID NO: 372320 - DNA, 120 bp, Artificial Sequence
  ENSG00000142207_37 (sequence is synthesized)
tttttaaagatgctcctcaccgccgtacagctcctgtacagcccagaaagctccgtgcgcacgaagctcatccagctcccggtggtctacgtgatgctcatgcagcactcgctgtttctg

SEQ ID NO: 372321 - DNA, 120 bp, Artificial Sequence
  ENSG00000142207_38 (sequence is synthesized)
ccgactctactgacgtctgacggagaggagagcccggacagccaagtaaaagaagcgctggtggacctgatgctgacggtggtggagatgtgcccctctgtctgtgagagcagccacttt

SEQ ID NO: 372322 - DNA, 120 bp, Artificial Sequence
  ENSG00000142207_39 (sequence is synthesized)
gcagtgcttctcggggcctatggcgccactctcagcgtcctagatcagaagattttacttctgcttcgagcgtatgagcagaacaagctcagcctcatcaacttcagggtgctgctgtgg

SEQ ID NO: 372323 - DNA, 120 bp, Artificial Sequence
  ENSG00000142207_40 (sequence is synthesized)
ggcccagcggccgtggagcatcacaagacgtgccggagcctgggcaggtcactgtggcagcagccgagtgtcggggacatccttcgcctgctggaccgggaccggatgatgcagaccatc

SEQ ID NO: 372324 - DNA, 120 bp, Artificial Sequence
  ENSG00000142207_41 (sequence is synthesized)
ctgcacttcccccagaaccggaggctgctgccccccgaggacacacaggagctgatattcaaagacaaaagcagggtggatcttgatggcctctatgacccctgctttctccttcagctc

SEQ ID NO: 372325 - DNA, 120 bp, Artificial Sequence
  ENSG00000142207_42 (sequence is synthesized)
ttcagtgagctgaccaggccagagtttgtggtggattgtcgaaaatttttggattcaaatgctctgggcctaactgtcacagccctcagcagctatgacccccagatgcgagccatagcc

SEQ ID NO: 372326 - DNA, 120 bp, Artificial Sequence
  ENSG00000142207_43 (sequence is synthesized)
taccatgtcctggcggcctactactcgcacttggagggcgcacggttccaagagcagtcccagctactttacctgttggatgtagtccggaatgggattcgaactcaggacatgagactt

SEQ ID NO: 372327 - DNA, 120 bp, Artificial Sequence
  ENSG00000142207_44 (sequence is synthesized)
acttttaccttggctctcttcattgccaaagcagccctgcagattttgaaaccagaggagcacatgtacctgaaggtcagcaacttcctgctgtcgcatgagtacttgaacatggacaaa

SEQ ID NO: 372328 - DNA, 120 bp, Artificial Sequence
  ENSG00000142207_45 (sequence is synthesized)
ttcttctacagctccgactttgagcaaaaaacagagcagaagtgggtgtttggcgttctgcggcaggggatccgtgacaagcagtgctacgaactgtgtgcccggcgtggcatcttccac

SEQ ID NO: 372329 - DNA, 120 bp, Artificial Sequence
  ENSG00000142207_46 (sequence is synthesized)
atcatcctgtccttcttccacagcccgctgtgtgacgaggcagcacagaattggattctggaaattctacagaatgctgcccaggttgccagatctgcgtatgaaatcatacgagactat

SEQ ID NO: 372330 - DNA, 120 bp, Artificial Sequence
  ENSG00000142207_47 (sequence is synthesized)
agccttttaacatggattttacacatccttgaaagcaagtttctggagactccgctgctgtctaatgtgatctccttgctacacacactgtgggtgaccaacctgggggacaaggcagtg

SEQ ID NO: 372331 - DNA, 120 bp, Artificial Sequence
  ENSG00000142207_48 (sequence is synthesized)
gagtgggagagccagcgcctttgccagcctagctcccaggagcctgccaagcggcttgccctgcacctggtcaatgagttcctttatgttctcatcgtgctcatgaagcacctgaggccc

SEQ ID NO: 372332 - DNA, 120 bp, Artificial Sequence
  ENSG00000142207_49 (sequence is synthesized)
accttggcccccgtccagctgaccaacttcttcgggacacttgactccgtgctgaggtaccgggccactgtcatacaggcctttagggacatgaacagattcaccgtaaatgagacagtg

SEQ ID NO: 372333 - DNA, 120 bp, Artificial Sequence
  ENSG00000142207_50 (sequence is synthesized)
ctttccaccaaggacgtccttgtcctcttgcacaagtggagcctcattgaaagagacctcaagctccaggaagacctgagagcagccattgagaaggcccaagcccgggagctcatgaaa

SEQ ID NO: 372334 - DNA, 120 bp, Artificial Sequence
  ENSG00000142207_51 (sequence is synthesized)
atgctcaaggataagaacaagcctgtcatgccagcccgagccaaaggcccacggggccgaaagaggaggcctggggaggcagaggagatggctgaccctgagctgatggcatctaccttg

SEQ ID NO: 372335 - DNA, 120 bp, Artificial Sequence
  ENSG00000142207_52 (sequence is synthesized)
gagacatgcaagggcctcctgaggtccatcttgacttactggagaccagtgatccctggtcctgaccccactcaggagcctgtggactcagccagccccgagagcgatgcgccaggcccc

SEQ ID NO: 372336 - DNA, 120 bp, Artificial Sequence
  ENSG00000142207_53 (sequence is synthesized)
gtatatgctgccgcttccctggcagtcagttgggtgctgcggtcggtggccgagcacccgctcagcagggcagaggctgcaggactcattggctggcttaagagccatattttgccacac

SEQ ID NO: 372337 - DNA, 120 bp, Artificial Sequence
  ENSG00000142207_54 (sequence is synthesized)
cctgtggtcgtggctgacctccttaaggacagtgccgtgaggagcagcatattcaggctgtatagccggctctgtggggctgaggggctggcagggcctgtgcaggaggtggcctgcctg

SEQ ID NO: 372338 - DNA, 120 bp, Artificial Sequence
  ENSG00000142207_55 (sequence is synthesized)
ttcaatacggtcatgctgcagctggtggctgcccagggccgggcagggagccccttccacccggccatggaagccctctccctgtcttctctgagtgagaaggatgaagccacacaagcc

SEQ ID NO: 372339 - DNA, 120 bp, Artificial Sequence
  ENSG00000142207_56 (sequence is synthesized)
tccgcagcattcctagtgtctctctacataaaggacatctggctgggggctcagcggccggacaccctcttaacccacgtccggatggtgtgtgaggccgcagatgatgccccgagcagt

SEQ ID NO: 372340 - DNA, 120 bp, Artificial Sequence
  ENSG00000142207_57 (sequence is synthesized)
gaagaggaggccatcgtggtgctctgcaaggacgccgccagcgcagcctcagatgcttgactcctgccggccagcaccttgcaccctgatgaccagagcctcgagcacagcaccagcttc

SEQ ID NO: 372341 - DNA, 120 bp, Artificial Sequence
  ENSG00000142207_58 (sequence is synthesized)
tagaagtttggttgagtcaagggtttccagagaaggcatgggaaacaacaggttcagtacattggctcagttctttgacaagaaaagttgagaggactttattgaactgcccagtaaatg

SEQ ID NO: 372342 - DNA, 120 bp, Artificial Sequence
  ENSG00000142207_59 (sequence is synthesized)
ataaactcgggcctgtaggtgcccagcatcagagttgcaaggaatgtggggacttctaggccatgaggcccatccagtgcctcgtcaggccgccccttcctctctaggggcttggagctc

SEQ ID NO: 372343 - DNA, 120 bp, Artificial Sequence
  ENSG00000142207_60 (sequence is synthesized)
atcacaggaaatagctcgagtttgaggcagcacttctgaatgcagaagagattcatctgtgttaaagctgaaatgtcaaaaggtatcagattttttttatgaaaacgaagagagatgttt

SEQ ID NO: 372344 - DNA, 70 bp, Artificial Sequence
  ENSG00000142207_61 (sequence is synthesized)
tcgtgccattgctaaagtttgtttttctataaaaagtcataacaaagtattagtatgactttttgaataa

SEQ ID NO: 372345 - DNA, 120 bp, Artificial Sequence
  ENSG00000142207_62 (sequence is synthesized)
ttgaataagttaatttctgccagtgtttaattattttattaaagaaaaggatgttacactgaatccttaaagaataaaagtgatttgacctctgctttgagaagacagcctgtaattttt

SEQ ID NO: 372346 - DNA, 120 bp, Artificial Sequence
  ENSG00000142207_63 (sequence is synthesized)
aaagctatacttcaaagaggggattttgaattttataaatgcttgttaatgtctatttttgtaaggtttttgtgttttcctttcattgttgtcaagaggctatttttgctccacataggc

SEQ ID NO: 372347 - DNA, 120 bp, Artificial Sequence
  ENSG00000142207_64 (sequence is synthesized)
ctgcatttattttaaaggtcagaattttactcttaatggtcatatattagttggggttgtagctgacaaaagtcatgaaatttcgtggttttcacagttaaaatttccgtctgttccttt

SEQ ID NO: 372348 - DNA, 120 bp, Artificial Sequence
  ENSG00000142207_65 (sequence is synthesized)
aaaactctcctgcatgcctggggctcttgggatctgctctgtggcctaggatgtggctgttttatctgccgtataatgtacatcgtgctgacaatgccttggttttgtctgaaacattta

SEQ ID NO: 372349 - DNA, 120 bp, Artificial Sequence
  ENSG00000142207_66 (sequence is synthesized)
cacttctattttccaccagtgttctttagaattgtttctgttttaggtgacttaaagttttaactaaagcatgagtaacgtttgttggcatacagtcccttcaccacaaataattgtctt

SEQ ID NO: 372350 - DNA, 120 bp, Artificial Sequence
  ENSG00000142207_67 (sequence is synthesized)
gcactgtctacaaagcaaggatcagttacctcacttgtccccttccctacccaaataaaccttacaacgctattctttgagactatcctgaacttgaaatcccacgtttagatccaagct

SEQ ID NO: 372351 - DNA, 120 bp, Artificial Sequence
  ENSG00000142207_68 (sequence is synthesized)
ggactcaggcaagcgctgctccaacaaagcgttctcttcctggttccccttaatctttatccacctctccaaggcctatctttggggattcctttggttataggcacctctgcttgttta

SEQ ID NO: 372352 - DNA, 120 bp, Artificial Sequence
  ENSG00000142207_69 (sequence is synthesized)
tgcagggggcattggccggaaggacattggtctggggaatatccctgaaccccatgcctctgggggcacagggaggggcagcgagcaggtggggtggatttccacggcttcatccctggc

SEQ ID NO: 372353 - DNA, 120 bp, Artificial Sequence
  ENSG00000142207_70 (sequence is synthesized)
tccaggcctaagctgcctcccaggttcttagggcccagcaagtcaatacatactacgtcaggtggcgacaaatgctccaaagccgagttccagctcagtcaagtgaggacacattttcag

SEQ ID NO: 372354 - DNA, 120 bp, Artificial Sequence
  ENSG00000142207_71 (sequence is synthesized)
cacctcaccttcttttctgcatctctggagctcatcagtcttgcttttctttgttctcccttttaaatccactgccctgaccttgttcgtgtattttccagtcacttagtgtggaggaag

SEQ ID NO: 372355 - DNA, 120 bp, Artificial Sequence
  ENSG00000142207_72 (sequence is synthesized)
ggaatctcatcccatggagaatagatcgaacatggtcttcacctgacttaaaatataaaatgctaaattagaaatatcttaagtggggcggggggcacagttattttaaaaataaaacct

SEQ ID NO: 372356 - DNA, 120 bp, Artificial Sequence
  ENSG00000142207_73 (sequence is synthesized)
atcaactccctccttgcctgaaagctgtaggggacatatgggtcttctgagatttgctgtgtgatgctgtctcctctccagggacaaggctgctgggcactagaggactagatctttcaa

SEQ ID NO: 372357 - DNA, 120 bp, Artificial Sequence
  ENSG00000142207_74 (sequence is synthesized)
gggtcccagatccactgtcacataaagtcacatccagaagacctttcctgccagcttccagggctctttgtgttctgtgacagcatttgggcatagatcctgcttacccggcctggctgc

SEQ ID NO: 372358 - DNA, 120 bp, Artificial Sequence
  ENSG00000142207_75 (sequence is synthesized)
tgacaggcgttggctgcctgccctccaggggagacactttcttgggctctgtctttgaaaggctgtggggaggttgaaggtgcaactcaggtccccagactgcagtgagctgacctggca

SEQ ID NO: 372359 - DNA, 120 bp, Artificial Sequence
  ENSG00000142207_76 (sequence is synthesized)
gggcagatgccatcacatctgggggagccggcgggtgttagtggagcttggatgggaacttacccagcatcctaacaaaggtacagaaggaccaggtgaactcagggctgataacgcatt

SEQ ID NO: 372360 - DNA, 120 bp, Artificial Sequence
  ENSG00000142207_77 (sequence is synthesized)
acacagtaatggtaaagtggcatagtaaagattagtaagcaaacagcttttcctcttgatttgcatatattttattttcctactcttccctgagcaaatataagcagtaagcaagcaggc

SEQ ID NO: 372361 - DNA, 120 bp, Artificial Sequence
  ENSG00000142207_78 (sequence is synthesized)
taggtgtgctcaataaactcagcaacacctgggatgacctctgcactcgaggggccactgcaatctttgtcaaaggcataggatgctcctgctctagttgcacttgacctaggtgccctt

SEQ ID NO: 372362 - DNA, 120 bp, Artificial Sequence
  ENSG00000142207_79 (sequence is synthesized)
tctgctacatgcaaatggcctctaagaagaacgaggaacgtatgtgtccaggttggcttgatttcaccagttcactcagctatggccacgatttactgacatcagctctgcaattgagag

SEQ ID NO: 372363 - DNA, 120 bp, Artificial Sequence
  ENSG00000142207_80 (sequence is synthesized)
gtcctgtctccagggggaggctcgctgggcttgctcctgacgaggggacccccattgagggtcagttcccagaggagagtggggtgggtctggaaacccccgaggggcaaggtggaggag

SEQ ID NO: 372364 - DNA, 120 bp, Artificial Sequence
  ENSG00000142207_81 (sequence is synthesized)
ctctcctgtcgtagcggctggtcagggccagttctgctccctggctccactgagctcgcctgagcctgtgaggttgccaggggttccctgtggcacggcaggcacttctggatgcagagg

SEQ ID NO: 372365 - DNA, 120 bp, Artificial Sequence
  ENSG00000142207_82 (sequence is synthesized)
tggaggttgaggccgtgactccaggggcatgtttggtggtgcttggggctgttcctgtgaacagagcagagtgggaggcaggcatcatagttgctgcagaacagtccatactgtggggct

SEQ ID NO: 372366 - DNA, 120 bp, Artificial Sequence
  ENSG00000142207_83 (sequence is synthesized)
ggggggtttcctgccacacctgccatctgcccggaccccatagggaaggccacacaggcaaattcctgagaagggtcagccagctcacaaaggtggccattctagagaaatctcagagga

SEQ ID NO: 372367 - DNA, 120 bp, Artificial Sequence
  ENSG00000142207_84 (sequence is synthesized)
gaggaagtgctttgtcaggaactaggcctcaggtctttccctggaggccacttcttcctacattgatttaggatggggggggtggggggtggaggggagcaggttgacctcccatccagc

SEQ ID NO: 372368 - DNA, 120 bp, Artificial Sequence
  ENSG00000142207_85 (sequence is synthesized)
catccagcgctgtatctgagtgtagttcattttatatccatagcccaagccaacttgtatcttggtgatatggtttggctgcgtcacgacacaaatctcaccttgaattgtaataatccc

SEQ ID NO: 372369 - DNA, 64 bp, Artificial Sequence
  ENSG00000142207_86 (sequence is synthesized)
gggtcttcccatgctgttctctgcccttttgcctgtgtcatgtaagatgtggctttgctcttcc

SEQ ID NO: 372370 - DNA, 120 bp, Artificial Sequence
  ENSG00000142207_87 (sequence is synthesized)
gggagtttccctgcacatgcccttttgcctgtgtcatgtaagatgtggctttgctcttcctttgccttctgccatgactgtgaagcctcccccgccatgtgaaactgtgagtccattaaa

SEQ ID NO: 372371 - DNA, 120 bp, Artificial Sequence
  ENSG00000142207_88 (sequence is synthesized)
tctttccttttctgacattagtgactgttgtcgacttgcacagaagcgaacctgtatttagaagaattttgtttagaagtatttagctctatagataatgttccttgattgcctggaggc

SEQ ID NO: 372372 - DNA, 120 bp, Artificial Sequence
  ENSG00000142207_89 (sequence is synthesized)
gctgggcttggtgctctcaggaaaacctatgggaatgagatacagtcttcccatctgctgagggtaacagactgtgagaaatttagacatttttaaagtggcagctgactcacgccccgt

SEQ ID NO: 372373 - DNA, 120 bp, Artificial Sequence
  ENSG00000142207_90 (sequence is synthesized)
tggcatttggcgagtcagagggatttaattgaggtgaggtgggcagaggggcctggggcagcaggaggaggaaacagcatgcaggagtggaaactcaggacatttggggaaaggggtgct

SEQ ID NO: 372374 - DNA, 120 bp, Artificial Sequence
  ENSG00000142207_91 (sequence is synthesized)
taccacatgaggacctgaatcttggaaataattcttaaaggatcttcagccatcctcatctgttcattccagtgattttcagcaaagtcacagttagtattttgaacatacagtgattta

SEQ ID NO: 372375 - DNA, 80 bp, Artificial Sequence
  ENSG00000142208_0 (sequence is synthesized)
cacgcagcgcggcccgaagacgggagcaggcggccgagcaccgagcgctgggcaccgggcaccgagcggcggcggcacgc

SEQ ID NO: 372376 - DNA, 120 bp, Artificial Sequence
  ENSG00000142208_1 (sequence is synthesized)
cgcgctcgcgcccggacgcggcggcccggggcttagggaaggccgagccagcctgggtcaaagaagtcaaaggggctgcctggaggaggcagcctgtcagctggtgcatcagaggctgtg

SEQ ID NO: 372377 - DNA, 120 bp, Artificial Sequence
  ENSG00000142208_2 (sequence is synthesized)
gccaggccagctgggctcggggagcgccagcctgagaggagcgcgtgagcgtcgcgggagcctcgggcaccatgagcgacgtggctattgtgaaggagggttggctgcacaaacgagggg

SEQ ID NO: 372378 - DNA, 120 bp, Artificial Sequence
  ENSG00000142208_3 (sequence is synthesized)
agtacatcaagacctggcggccacgctacttcctcctcaagaatgatggcaccttcattggctacaaggagcggccgcaggatgtggaccaacgtgaggctcccctcaacaacttctctg

SEQ ID NO: 372379 - DNA, 120 bp, Artificial Sequence
  ENSG00000142208_4 (sequence is synthesized)
tggcgcagtgccagctgatgaagacggagcggccccggcccaacaccttcatcatccgctgcctgcagtggaccactgtcatcgaacgcaccttccatgtggagactcctgaggagcggg

SEQ ID NO: 372380 - DNA, 120 bp, Artificial Sequence
  ENSG00000142208_5 (sequence is synthesized)
aggagtggacaaccgccatccagactgtggctgacggcctcaagaagcaggaggaggaggagatggacttccggtcgggctcacccagtgacaactcaggggctgaagagatggaggtgt

SEQ ID NO: 372381 - DNA, 120 bp, Artificial Sequence
  ENSG00000142208_6 (sequence is synthesized)
ccctggccaagcccaagcaccgcgtgaccatgaacgagtttgagtacctgaagctgctgggcaagggcactttcggcaaggtgatcctggtgaaggagaaggccacaggccgctactacg

SEQ ID NO: 372382 - DNA, 120 bp, Artificial Sequence
  ENSG00000142208_7 (sequence is synthesized)
ccatgaagatcctcaagaaggaagtcatcgtggccaaggacgaggtggcccacacactcaccgagaaccgcgtcctgcagaactccaggcaccccttcctcacagccctgaagtactctt

SEQ ID NO: 372383 - DNA, 120 bp, Artificial Sequence
  ENSG00000142208_8 (sequence is synthesized)
tccagacccacgaccgcctctgctttgtcatggagtacgccaacgggggcgagctgttcttccacctgtcccgggagcgtgtgttctccgaggaccgggcccgcttctatggcgctgaga

SEQ ID NO: 372384 - DNA, 120 bp, Artificial Sequence
  ENSG00000142208_9 (sequence is synthesized)
ttgtgtcagccctggactacctgcactcggagaagaacgtggtgtaccgggacctcaagctggagaacctcatgctggacaaggacgggcacattaagatcacagacttcgggctgtgca

SEQ ID NO: 372385 - DNA, 120 bp, Artificial Sequence
  ENSG00000142208_10 (sequence is synthesized)
gtgggggctgggcgtggtcatgtacgagatgatgtgcggtcgcctgcccttctacaaccaggaccatgagaagctttttgagctcatcctcatggaggagatccgcttcccgcgcacgct

SEQ ID NO: 372386 - DNA, 120 bp, Artificial Sequence
  ENSG00000142208_11 (sequence is synthesized)
tggtcccgaggccaagtccttgctttcagggctgctcaagaaggaccccaagcagaggcttggcgggggctccgaggacgccaaggagatcatgcagcatcgcttctttgccggtatcgt

SEQ ID NO: 372387 - DNA, 120 bp, Artificial Sequence
  ENSG00000142208_12 (sequence is synthesized)
gtggcagcacgtgtacgagaagaagctcagcccacccttcaagccccaggtcacgtcggagactgacaccaggtattttgatgaggagttcacggcccagatgatcaccatcacaccacc

SEQ ID NO: 372388 - DNA, 120 bp, Artificial Sequence
  ENSG00000142208_13 (sequence is synthesized)
tgaccaagatgacagcatggagtgtgtggacagcgagcgcaggccccacttcccccagttctcctactcggccagcggcacggcctgaggcggcggtggactgcgctggacgatagcttg

SEQ ID NO: 372389 - DNA, 120 bp, Artificial Sequence
  ENSG00000142208_14 (sequence is synthesized)
gagggatggagaggcggcctcgtgccatgatctgtatttaatggtttttatttctcgggtgcatttgagagaagccacgctgtcctctcgagcccagatggaaagacgtttttgtgctgt

SEQ ID NO: 372390 - DNA, 120 bp, Artificial Sequence
  ENSG00000142208_15 (sequence is synthesized)
gggcagcaccctcccccgcagcggggtagggaagaaaactatcctgcgggttttaatttatttcatccagtttgttctccgggtgtggcctcagccctcagaacaatccgattcacgtag

SEQ ID NO: 372391 - DNA, 120 bp, Artificial Sequence
  ENSG00000142208_16 (sequence is synthesized)
ggaaatgttaaggacttctgcagctatgcgcaatgtggcattggggggccgggcaggtcctgcccatgtgtcccctcactctgtcagccagccgccctgggctgtctgtcaccagctatc

SEQ ID NO: 372392 - DNA, 120 bp, Artificial Sequence
  ENSG00000142208_17 (sequence is synthesized)
tgtcatctctctggggccctgggcctcagttcaacctggtggcaccagatgcaacctcactatggtatgctggccagcaccctctcctgggggtggcaggcacacagcagccccccagca

SEQ ID NO: 372393 - DNA, 120 bp, Artificial Sequence
  ENSG00000142208_18 (sequence is synthesized)
ctaaggccgtgtctctgaggacgtcatcggaggctgggcccctgggatgggaccagggatgggggatgggccagggtttacccagtgggacagaggagcaaggtttaaatttgttattgt

SEQ ID NO: 372394 - DNA, 120 bp, Artificial Sequence
  ENSG00000142208_19 (sequence is synthesized)
gtattatgttgttcaaatgcattttgggggtttttaatctttgtgacaggaaagccctcccccttccccttctgtgtcacagttcttggtgactgtcccaccgggagcctccccctcaga

SEQ ID NO: 372395 - DNA, 120 bp, Artificial Sequence
  ENSG00000142208_20 (sequence is synthesized)
tgatctctccacggtagcacttgaccttttcgacgcttaacctttccgctgtcgccccaggccctccctgactccctgtgggggtggccatccctgggcccctccacgcctcctggccag

SEQ ID NO: 372396 - DNA, 120 bp, Artificial Sequence
  ENSG00000142208_21 (sequence is synthesized)
acgctgccgctgccgctgcaccacggcgtttttttacaacattcaactttagtatttttactattataatataatatggaaccttccctccaaattcttcaataaaagttgcttttcaaa

SEQ ID NO: 372397 - DNA, 120 bp, Artificial Sequence
  ENSG00000142208_22 (sequence is synthesized)
aagaatatgtgcttatggtaaaggcaggcggcaggtacggaggctgtgggaagtcggggtccctccgcccccacaggcagccctgtgctggcctggtgtatacgtttctgtgcagacgta

SEQ ID NO: 372398 - DNA, 120 bp, Artificial Sequence
  ENSG00000142208_23 (sequence is synthesized)
caccaccctgtgtgagcacagatgtatttttacacatggctctggacagctgtctgactctgtcagcagcaggccttggaggggctcaggcccgtgtgggggtggggggacatccagagg

SEQ ID NO: 372399 - DNA, 120 bp, Artificial Sequence
  ENSG00000142208_24 (sequence is synthesized)
tctttgagtccagccctctgcctccaggccacgcccactcagtgtcgtcagagccccctgtgcctgaggcgtgcgcggctcggagccctgccctcggagtcctgcggtgccttcctcgag

SEQ ID NO: 372400 - DNA, 120 bp, Artificial Sequence
  ENSG00000142208_25 (sequence is synthesized)
tctggcctgctttccatcctgctaagtacttggggcatttccctctttgggtaaggtgtggtcttccctgtcctggcattagacacaaggcagtgggccttcctgccattctaagtgtag

SEQ ID NO: 372401 - DNA, 120 bp, Artificial Sequence
  ENSG00000142208_26 (sequence is synthesized)
cttaagacaatcagtgcaaagcaaccctttgtgggtgtccagcccttgcctcgggaggccagaaaggtggcctggggggagagcgtctaagctggctgtggaaagacccatgttgggatc

SEQ ID NO: 372402 - DNA, 120 bp, Artificial Sequence
  ENSG00000142208_27 (sequence is synthesized)
cattccacagaggtcgtcaggggtctctgcctggcctggaggtcccagagaggaccctcctcccctcaggaaggcccatctggaagggtagcagaggactgctcacaggaagagcatgcg

SEQ ID NO: 372403 - DNA, 120 bp, Artificial Sequence
  ENSG00000142208_28 (sequence is synthesized)
aagtgctctttctggggatgcctgtagttggtgatgtgggaactgggttttgagggatgcctaggagttcatccatcagaggggaaatgaggaagccatgcaggatcaatggataaagtg

SEQ ID NO: 372404 - DNA, 120 bp, Artificial Sequence
  ENSG00000142208_29 (sequence is synthesized)
tgctcaggtgagggttggctggtgggccgctgcagggcgggggcctgtccagtgctcccccacttacttgctgcctcccgactgctgtaattatgggtctgtaaccaccctggactgggt

SEQ ID NO: 372405 - DNA, 120 bp, Artificial Sequence
  ENSG00000142208_30 (sequence is synthesized)
gctcctcactgacggacttgtctgaacctctctttgtctccagcgcccagcactgggcctggcaaaacctgagacgcccggtacatgttggccaaatgaatgaaccagattcagaccggc

SEQ ID NO: 372406 - DNA, 120 bp, Artificial Sequence
  ENSG00000142208_31 (sequence is synthesized)
aggggcgctgtggtttaggaggggcctggggtttctcccaggaggtttttgggcttgcgctggagggctctggactcccgtttgcgccagtggcctgcatcctggtcctgtcttcctcat

SEQ ID NO: 372407 - DNA, 120 bp, Artificial Sequence
  ENSG00000142208_32 (sequence is synthesized)
gtttgaatttctttgctttcctagtctggggagcagggaggagccctgtgccctgtcccaggatccatgggtaggaacaccatggacagggagagcaaacggggccatctgtcaccaggg

SEQ ID NO: 372408 - DNA, 120 bp, Artificial Sequence
  ENSG00000142208_33 (sequence is synthesized)
gctgcctggaggaggcagcctgtcagctggtgcatcaggttagggaggctgggaaggccttttggggatgggggtgatttgtccaacggctgggggaggtgggaatggggaggtgagcaa

SEQ ID NO: 372409 - DNA, 120 bp, Artificial Sequence
  ENSG00000142208_34 (sequence is synthesized)
ggcagcagctctcagggcctggctgttgcgggtggtggtggcaggggctggaggctctaagcctagaataaggagaggcccaggtccagggaactgtgttcaattacatggatttgacac

SEQ ID NO: 372410 - DNA, 120 bp, Artificial Sequence
  ENSG00000142208_35 (sequence is synthesized)
ttggcagccctgagtgttttggggagagggaaggcaggcgggcagatgggggtcagagagcttagagggatggcagcccacctgggaaggcaggtgcgggtggagcccccaggcacgtgc

SEQ ID NO: 372411 - DNA, 120 bp, Artificial Sequence
  ENSG00000142208_36 (sequence is synthesized)
gtggcacgctcgccagatttcccacacactcgccctcacctcaggagcctgctgcagtcctggtacaaggagggccttgctgcaccaacctcagcgcctggtgctcagaggctctggcac

SEQ ID NO: 372412 - DNA, 120 bp, Artificial Sequence
  ENSG00000142208_37 (sequence is synthesized)
tgccgggttccaccaggaaactggcctggtcctcatttcctcctcccctcggaggtgtgtcacactctgagtttcctcctcccctcggaggtgtgtcacactctgagtgccagccttggg

SEQ ID NO: 372413 - DNA, 120 bp, Artificial Sequence
  ENSG00000142208_38 (sequence is synthesized)
gttcccttccctgacgctgtgcagtgaaggctggctggtggtggaccaggggtgctgccccttggcctccacgagttcctcctgtttgacctcaatcccttctgccgcaaggagagccca

SEQ ID NO: 372414 - DNA, 120 bp, Artificial Sequence
  ENSG00000142208_39 (sequence is synthesized)
gccctatttctggctgtgcagggacagggacagcacctacttttctggcacatgggggagtccgccctggagggaggcagctctttctgcatgagtcgccatcctgggtgctcatctttc

SEQ ID NO: 372415 - DNA, 120 bp, Artificial Sequence
  ENSG00000142208_40 (sequence is synthesized)
agggaccctaggagccctggccatcaccccagctgatggggtctgccagctgggttcggaagcctgcactctgagatgctgggtgccctgtcaccaggtgtgcttctgccccgttcccag

SEQ ID NO: 372416 - DNA, 120 bp, Artificial Sequence
  ENSG00000142208_41 (sequence is synthesized)
cctgcccctcccctgaatgcctgtcctaggctgtgtgcagctggtcgggctgggcagccctgggacccagctgggcacctgttctcccattaacacagggtgccctggtcctggtccccg

SEQ ID NO: 372417 - DNA, 120 bp, Artificial Sequence
  ENSG00000142208_42 (sequence is synthesized)
ttcctgccttgaggcctgccaccctcctgccctgccctccaagggtatggggggcctgggcagtgctcaacctctgcccagccttgaccagagaccttgctaattgacaatggacaatgc

SEQ ID NO: 372418 - DNA, 120 bp, Artificial Sequence
  ENSG00000142208_43 (sequence is synthesized)
tggtgcccagcccagactctggggtggggcagtgcttgagggggtccttgactgtgggacctgaggggctctctggcagctcctcacgtgtgcacatcaccttatagtcacccttcatcc

SEQ ID NO: 372419 - DNA, 120 bp, Artificial Sequence
  ENSG00000142208_44 (sequence is synthesized)
tgggtcattgagagtcctgtctgcagccagatgccagcaggctgtggtcctgtagtccctgagccatggaggcagggtgggctcatcctgtgcaccttgttccacagtctccctctttcc

SEQ ID NO: 372420 - DNA, 120 bp, Artificial Sequence
  ENSG00000142208_45 (sequence is synthesized)
caatttacaagaagaccaataagaaaaataagaaaacaagaaagaaaaaggaaaaataaagttatcacctcctggtagcagggagggtctctcagagctgggctgcactacctcctgtcg

SEQ ID NO: 372421 - DNA, 120 bp, Artificial Sequence
  ENSG00000142208_46 (sequence is synthesized)
cctgctggggctgctgtgagggcagctttgcgtctcagctgttgagggttgtctccgtgctcctgcacccctcatgtccctccctcccagagctgcctctgtggggggctggtggcttgc

SEQ ID NO: 372422 - DNA, 120 bp, Artificial Sequence
  ENSG00000142208_47 (sequence is synthesized)
ttttggcttcagatgttttaaaatctaaatatttaaaaaggttccttttggagagtgccaatgatcagggtgggaggcagtgctctgagggcccaggtccctgtgtcaatctgtggggcc

SEQ ID NO: 372423 - DNA, 120 bp, Artificial Sequence
  ENSG00000142208_48 (sequence is synthesized)
ctgtctcagtttcctggcagtatggcagcgtgctggccgtgctttaagaggttggcttcctactggagctgtgggtgggtggaggtggcagggaggtggggcaccggggtctgagctgtc

SEQ ID NO: 372424 - DNA, 120 bp, Artificial Sequence
  ENSG00000142208_49 (sequence is synthesized)
gaggccttgccctgcaaagccccaggctgaggggctggggttggggtggggtttaccaggacctggttcctgtaagccgaggtctccttccctggctcttccagcctcaagccagcagta

SEQ ID NO: 372425 - DNA, 120 bp, Artificial Sequence
  ENSG00000142208_50 (sequence is synthesized)
gcagggcagcctgatagagtagggcaccccaggggtgaggggagaccaggaaggcagacacccctgtctcctgacagcctcgtaaccatgcaggagactcactgtgacttgtcccacacc

SEQ ID NO: 372426 - DNA, 120 bp, Artificial Sequence
  ENSG00000142208_51 (sequence is synthesized)
ctccccagtgtctcctcggttggggctgggggcttcagggatcagggagaggctgggtgccagcagcgtgcctggtggcacctgggacagggccttgctgggggtgggtgctgtgggtgt

SEQ ID NO: 372427 - DNA, 120 bp, Artificial Sequence
  ENSG00000142208_52 (sequence is synthesized)
gctcgccaggccgaggcattgggaaggaacgaggtggggagctctctggagaggcacacgggtgggtaccagctggaggtgttgcctgagcagctggcaaggctggggccttcagattag

SEQ ID NO: 372428 - DNA, 120 bp, Artificial Sequence
  ENSG00000142208_53 (sequence is synthesized)
gccataggtgagtggcctggagcgcctggccaaggagcagagctgggcaggggccaggggctgtgctgggcctctgtccggggcttttctccggggaacggttccggggcagtgggctcg

SEQ ID NO: 372429 - DNA, 120 bp, Artificial Sequence
  ENSG00000142208_54 (sequence is synthesized)
agactctggccctggggattgcatactggggcagatcggaccatccaggagcgagtgggaggtgggtgtgccggggcttcacaccggtttccacttctctggcctgtgttgacacaggcc

SEQ ID NO: 372430 - DNA, 120 bp, Artificial Sequence
  ENSG00000142208_55 (sequence is synthesized)
accctccccaccaggctggtcccgagccccctcctggcccccaggcctggaagacagcttccttgctgcctggccaggcccccttgtggttgccagggcctcgatgctggaatgtcagag

SEQ ID NO: 372431 - DNA, 120 bp, Artificial Sequence
  ENSG00000142208_56 (sequence is synthesized)
gccccccactggcccctcagcctcctcctgctttgcacaggctgggccagagcctgccacggagccccagcggctacacactccactcactcacacctctcagggccccgcacgttccca

SEQ ID NO: 372432 - DNA, 120 bp, Artificial Sequence
  ENSG00000142208_57 (sequence is synthesized)
cagccctcagggtgtacgtgctgtaggtgtggctgtgccccaggtatgtgttccccaggtgtgcttgtgccccaggtgtggctgtgccccaggtgtgcgtgtgccccaggtgttcgtgtg

SEQ ID NO: 372433 - DNA, 120 bp, Artificial Sequence
  ENSG00000142208_58 (sequence is synthesized)
ccccagatgtggctaggtgtctagatgtgttctagatgtctgtgtattccagtgtggctgtgtcccaggtgtgcgtgtgccccaggtgtgtgcctcaggtgtgcgtgtgccccaggtgtg

SEQ ID NO: 372434 - DNA, 120 bp, Artificial Sequence
  ENSG00000142208_59 (sequence is synthesized)
gctttgcctccagtgtgtgtgtgccccagatgtatgtgtgccccaggtgtggctgtgccccaggtgtgcctgtgccccaggtgtggctgtgccccaggtgtgcctgtgccccaggtgtgg

SEQ ID NO: 372435 - DNA, 120 bp, Artificial Sequence
  ENSG00000142208_60 (sequence is synthesized)
gtgtgccccaggtgtgggtgtgctccaggtggctgtatttcccaggtactcagggtgaggttgggaaaaaagcaggacatttctacactaggtgggacaagcaggtttctggggtgcccc

SEQ ID NO: 372436 - DNA, 120 bp, Artificial Sequence
  ENSG00000142208_61 (sequence is synthesized)
cctcatgccagcccctctgtgggatctccatacccctcatcctctgaggcctggcgcacggcggggctcagagactgaaggaaggactgtaggagtggacgatggtgggggtttgacctg

SEQ ID NO: 372437 - DNA, 120 bp, Artificial Sequence
  ENSG00000142208_62 (sequence is synthesized)
acgccgggccagatgccctgtgtggctgcctcagcctggagtagagtgtctgagctggaacaggggtcctagccccactctgtgaggcgagaaactgaggcttggagagaggaagagatg

SEQ ID NO: 372438 - DNA, 120 bp, Artificial Sequence
  ENSG00000142208_63 (sequence is synthesized)
gggcttcccaggacctggtgggtggtatgcaaggggagctggctggtgcagcgggggctgtggtgagggccctgggaggggcagggggatgcacgcagacagaggctctgcctgcccgca

SEQ ID NO: 372439 - DNA, 120 bp, Artificial Sequence
  ENSG00000142208_64 (sequence is synthesized)
gagtgccagctgatgaagacggagcggccccggcccaacaccttcatcatccgctgcctgcagtggaccactgtcatcgaacgcaccttccatgtggagactcctgaggagcggtacgtg

SEQ ID NO: 372440 - DNA, 120 bp, Artificial Sequence
  ENSG00000142208_65 (sequence is synthesized)
ggctgtggcggccaggccaggcacttgggcagccccagcgcttaggagggacacggggatggcggggtgctggcacctctgcctgtagccatcctcactccccagtgctcccaggccctc

SEQ ID NO: 372441 - DNA, 120 bp, Artificial Sequence
  ENSG00000142208_66 (sequence is synthesized)
ctcagagcccagtttggaaactggcccagtcctgcctgtggggtttgggtggggaaactgaggctggagataaaaactggctagggaccgggtgcagtggctcacgtctataatctcggc

SEQ ID NO: 372442 - DNA, 68 bp, Artificial Sequence
  ENSG00000142208_67 (sequence is synthesized)
ctagggaccgggtgcagtggctcacgtctataatctcgtagcctgccaacatggtgaaacccccgtct

SEQ ID NO: 372443 - DNA, 83 bp, Artificial Sequence
  ENSG00000142208_68 (sequence is synthesized)
ggctgaggcacaagaatcgcttgaacccgagaggcagaggctgcaggagccgagattttaccactgcactccagccagcccgg

SEQ ID NO: 372444 - DNA, 120 bp, Artificial Sequence
  ENSG00000142208_69 (sequence is synthesized)
cgtctcaaaaaaagaaaaacccggtggagagggccagtcctccttggggggcggagtcctgcttgggaggcggagtcctgcttggggggggcggagtcctgctggggggcggagtcctgc

SEQ ID NO: 372445 - DNA, 120 bp, Artificial Sequence
  ENSG00000142208_70 (sequence is synthesized)
tgggggttggagtccggttgtggggacagagtcctgctggggggctaagcctgggtgtcccccacgtccaagagggcttcgtgaccctgagtgtatgtggccagaccaggtcaagtggtg

SEQ ID NO: 372446 - DNA, 120 bp, Artificial Sequence
  ENSG00000142208_71 (sequence is synthesized)
gcctcctcagggctgtctctgggaaccccgacagctgtggaaccacgcttgtgaggctggcgggtgggtgaaagacgtggggtggagctcctgatctggtacaggcctgcagcctcacct

SEQ ID NO: 372447 - DNA, 120 bp, Artificial Sequence
  ENSG00000142208_72 (sequence is synthesized)
cggcccaggagacactcagcactccacggcatctccacctaggccggttttccatgtagggcgcagctgcttcccaggtgggtcctcttccccatgtcagaggaaaactggggttgctga

SEQ ID NO: 372448 - DNA, 120 bp, Artificial Sequence
  ENSG00000142208_73 (sequence is synthesized)
gccctgccaggcttgggcaatgttaccccacccttccctgaaccccatgctctgagctggggccgcagccatgtgttccctgtaagcctggactccccgctgagcccagtaggccaccag

SEQ ID NO: 372449 - DNA, 120 bp, Artificial Sequence
  ENSG00000142208_74 (sequence is synthesized)
gtgtgaagtggacgcctctcctggctctgcctccgactctggggcccctcatgccaccccacgcatgccgaccagctgggcactgttggcagcgccgcttgctgaccctggtgcctgccc

SEQ ID NO: 372450 - DNA, 120 bp, Artificial Sequence
  ENSG00000142208_75 (sequence is synthesized)
agtcatcgtggccaaggtggggccggggcggtggggcagggtggagatgagggtgcggggtggcagctcacccagccctgctttacaggacgaggtggcccacacactcaccgagaaccg

SEQ ID NO: 372451 - DNA, 120 bp, Artificial Sequence
  ENSG00000142208_76 (sequence is synthesized)
tgggcacgtgagggctttacacaccgtggactccgccgctggtgagacaggcctgccctggagggtcaggctgtggaggtgcccagtgtgggctaggggctgtgctcgctgctcccgtgt

SEQ ID NO: 372452 - DNA, 120 bp, Artificial Sequence
  ENSG00000142208_77 (sequence is synthesized)
gcgggcaggtgggtggggcaggtggccctggtcttccttgcactctgccgaggctccaggaggccccagctccccatgccctgcagccctgcctgccaggcttttgttgaggcccgggct

SEQ ID NO: 372453 - DNA, 120 bp, Artificial Sequence
  ENSG00000142208_78 (sequence is synthesized)
ctgtcctgcagaacctgttctggggacttggcccaggaggtatttactgtgaagggggccagggtccagccacttggttagttccaggtcactgtgtttggggacgattctcctgcagat

SEQ ID NO: 372454 - DNA, 120 bp, Artificial Sequence
  ENSG00000142208_79 (sequence is synthesized)
ctgaggtcccaactcaccctggaggacctgagcccaggccaccttgctcacctttcaaacactccttggcacctcaggggctgccggggcccagcctgatggtggcgtggcatgaggcag

SEQ ID NO: 372455 - DNA, 120 bp, Artificial Sequence
  ENSG00000142208_80 (sequence is synthesized)
tgtggtgtggggcagtgtggtgtggggcagcgtggcatgggggcagtgtgatgtgggggtgtatggtgtggggcagtgtgatggggtgtgtggtgtggggcagtgtggtatcgggcggtg

SEQ ID NO: 372456 - DNA, 120 bp, Artificial Sequence
  ENSG00000142208_81 (sequence is synthesized)
tggtatcaggcagcgtggtgtcgggcagtgtggtgtggggctacgggcggtgtggtatcaggcgacgtggtatcaagcagcgtggtgtcgggcagcgtggtgcggggctgccgtcctgcc

SEQ ID NO: 372457 - DNA, 120 bp, Artificial Sequence
  ENSG00000142208_82 (sequence is synthesized)
tgtggggccgcagttccagctccccttccttgcaggccctgaagtactctttccagacccacgaccgcctctgctttgtcatggagtacgccaacgggggcgaggtaggggctggggctg

SEQ ID NO: 372458 - DNA, 120 bp, Artificial Sequence
  ENSG00000142208_83 (sequence is synthesized)
cgggggatggacttcgcggcctgtgggccgcccatggtggggccggtccttcccggagcctcggctactctccatggcaccagacggtgctccctgctgggtgggtggtgtgatgcctgc

SEQ ID NO: 372459 - DNA, 120 bp, Artificial Sequence
  ENSG00000142208_84 (sequence is synthesized)
ccaggcagctgcctgctgtggggtgacttgttcctgctgagttagggcttctgagactttccaggcccccgtgccctctggtggctggtcccttccctgtgcaatgccgagacccggtct

SEQ ID NO: 372460 - DNA, 120 bp, Artificial Sequence
  ENSG00000142208_85 (sequence is synthesized)
gagaaaccccagccctgcaggccatgggggcagaggcccgagccacggctgtgcctcaggttgcgcctcccgcagctgttcttccacctgtcccgggagcgtgtgttctccgaggaccgg

SEQ ID NO: 372461 - DNA, 120 bp, Artificial Sequence
  ENSG00000142208_86 (sequence is synthesized)
gctgcgtccccacgtcctgagcacacgcaatgctgtgtcctctctgtgccccaagcacgtcacacctcccccggcagtgtcccggacaccccttgatgccgagtcctgcccatctgccac

SEQ ID NO: 372462 - DNA, 120 bp, Artificial Sequence
  ENSG00000142224_0 (sequence is synthesized)
tgcacacactgacaggagtccaagaatgtgcactgagggagcgtttccgcacagatctgcgtgttccttaccactcacacatgtgcacacacatatccatgtgtgtgtgccagtgctttg

SEQ ID NO: 372463 - DNA, 120 bp, Artificial Sequence
  ENSG00000142224_1 (sequence is synthesized)
gggctctgttccacggggcatgaagttacagtgtgtttccctttggctcctgggtacaatactgatattgtgctcagtagacaaccacggtctcaggagatgtctgatttccacagacat

SEQ ID NO: 372464 - DNA, 120 bp, Artificial Sequence
  ENSG00000142224_2 (sequence is synthesized)
gcaccatatagaagagagtttccaagaaatcaaaagagccatccaagctaaggacaccttcccaaatgtcactatcctgtccacattggagactctgcagatcattaagcccttagatgt

SEQ ID NO: 372465 - DNA, 120 bp, Artificial Sequence
  ENSG00000142224_3 (sequence is synthesized)
gtgctgcgtgaccaagaacctcctggcgttctacgtggacagggtgttcaaggatcatcaggagccaaaccccaaaatcttgagaaaaatcagcagcattgccaactctttcctctacat

SEQ ID NO: 372466 - DNA, 120 bp, Artificial Sequence
  ENSG00000142224_4 (sequence is synthesized)
agtcatccatgacaactatgatcagctggaggtccacgctgctgccattaaatccctgggagagctcgacgtctttctagcctggattaataagaatcatgaagtaatgttctcagcttg

SEQ ID NO: 372467 - DNA, 120 bp, Artificial Sequence
  ENSG00000142224_5 (sequence is synthesized)
atgacaaggaacctgtatagtgatccagggatgaacaccccctgtgcggtttactgtgggagacagcccaccttgaaggggaaggagatggggaaggccccttgcagctgaaagtcccac

SEQ ID NO: 372468 - DNA, 120 bp, Artificial Sequence
  ENSG00000142224_6 (sequence is synthesized)
tggctggcctcaggctgtcttattccgcttgaaaatagccaaaaagtctactgtggtatttgtaataaactctatctgctgaaagggcctgcaggccatcctgggagtaaagggctgcct

SEQ ID NO: 372469 - DNA, 120 bp, Artificial Sequence
  ENSG00000142224_7 (sequence is synthesized)
tcccatctaatttattgtaaagtcatatagtccatgtctgtgatgtgagccaagtgatatcctgtagtacacattgtactgagtggtttttctgaataaattccatattttacctatgaa

SEQ ID NO: 372470 - DNA, 120 bp, Artificial Sequence
  ENSG00000142224_8 (sequence is synthesized)
gctggagtgcaatggtgaaattatagcagactgcagtcttcaactcctgacctcaagcaattgtcctgcctcctcaacttcctgactacaggtgtgcatgaggactacaggcaggcatgt

SEQ ID NO: 372471 - DNA, 120 bp, Artificial Sequence
  ENSG00000142224_9 (sequence is synthesized)
gccaacacatgcagctttttttttttttttttttcagagatgtggtctcgctttgttgcctacactggtctcaaactcttggcctcaagggatcctcccacctcggcttcccaaagtgca

SEQ ID NO: 372472 - DNA, 120 bp, Artificial Sequence
  ENSG00000142224_10 (sequence is synthesized)
gagattacagtctcattttctctctctctgcattaatcaagaatgagagaaccctccaggggacaagatgaaggggaaatagatgatgtgcaaagaaatccttgctttatgaggggaaaa

SEQ ID NO: 372473 - DNA, 120 bp, Artificial Sequence
  ENSG00000142224_11 (sequence is synthesized)
agtgttcctcatgaagttcaacaaaatgatgcaggtaaagcagttagctagcacctggcacatggcagacactcatagctgcctaaggcattggagaactggatcgtgctgcagccagag

SEQ ID NO: 372474 - DNA, 120 bp, Artificial Sequence
  ENSG00000142224_12 (sequence is synthesized)
gcacctgcagagcctcatgggctggctgctgcagggtgtggctgattgagagtgcttttgtgagttggcctgcagggtacacttggtaacgtgccacagctctcaggaaagtgacctaag

SEQ ID NO: 372475 - DNA, 120 bp, Artificial Sequence
  ENSG00000142224_13 (sequence is synthesized)
ttggatttttctgcatggacatagaattgcaaaaaattctcatttgcatggagatggggagtttatttttcctagaagctgcatgtcaagacccagaagaaagaggcatttcataataat

SEQ ID NO: 372476 - DNA, 120 bp, Artificial Sequence
  ENSG00000142224_14 (sequence is synthesized)
acaattaaggaaatacaatactaagaaaacaaggggaaaaaacaatctccccaaggtggatccacccagcaaaccttgacagcatttcctcttatccacctgaataaaaatgaccagccc

SEQ ID NO: 372477 - DNA, 120 bp, Artificial Sequence
  ENSG00000142224_15 (sequence is synthesized)
gactccaggagtctttcctcatttacagctagctctgccagtctgtgtctttgctgtgtctgtggatgtgagtgtccctgctggtctgtaggagatggtattttgggggcagctgcaagg

SEQ ID NO: 372478 - DNA, 120 bp, Artificial Sequence
  ENSG00000142224_16 (sequence is synthesized)
gaaaaaactgatctgctacttacacagcgccgtagcctcagcctgagggtcttcaggttctcccccagggagttcacatgcgccttgatgtctgggtcttggttctcagcttggggcatc

SEQ ID NO: 372479 - DNA, 120 bp, Artificial Sequence
  ENSG00000142224_17 (sequence is synthesized)
taattcaactcttcagtagccaggattgcctgtctccaaccccttctgaatctagttatgttggatactgggagagaagcatgtagactctttgggcctgacctttctgatttttctctg

SEQ ID NO: 372480 - DNA, 120 bp, Artificial Sequence
  ENSG00000142224_18 (sequence is synthesized)
gaagggcttcactgaaggggcacagaagaataatgtttctacagcatagatccaggggctcctccccaccaggaacccagcttagcaggcaggctgttcatgtggaactcgccaaaaccc

SEQ ID NO: 372481 - DNA, 120 bp, Artificial Sequence
  ENSG00000142224_19 (sequence is synthesized)
cgtgcaggtggatgtgcggaaacaccaaagaactgcacgattgtccctgcctttggaaggtctcattccctgtcattccttcattcagtcaacaaacttggaggacccagtatgtgctac

SEQ ID NO: 372482 - DNA, 120 bp, Artificial Sequence
  ENSG00000142224_20 (sequence is synthesized)
attttgaggataaagtgatgaacaacacagacaagatccctgcccttgtggagtctatattcaaaccagagcttgaccttcaaactgagagaccaacttaaaaatggggccatctggcca

SEQ ID NO: 372483 - DNA, 120 bp, Artificial Sequence
  ENSG00000142224_21 (sequence is synthesized)
ctaactgttatacaccctctgcttgggacacacggtctcagccctcctccaccttcaagtctgataggagagagatttcagagtggcccaaacaatctaaagtaaaagtgaacagagttc

SEQ ID NO: 372484 - DNA, 120 bp, Artificial Sequence
  ENSG00000142224_22 (sequence is synthesized)
aaaataagtcctcaagggctgaggggagaccaaggggaagataatgcggtgagggcactgagagagggattcctagaggaattgtaccttgctttgaattttagccctaagctgcaaatc

SEQ ID NO: 372485 - DNA, 120 bp, Artificial Sequence
  ENSG00000142224_23 (sequence is synthesized)
ctagctaacttctaagtagatgctgacagctggcttctatttggtctgccatattgaatggctttgtccccaggacatggtggagatttagacaacccagggcagaaaatcctctaggaa

SEQ ID NO: 372486 - DNA, 120 bp, Artificial Sequence
  ENSG00000142224_24 (sequence is synthesized)
aggaagtctgaactacaccgctggctttctgaaaggacaggatttgaggagctgggatggtagtaggggagagggcagctgggtggggtttcttccaggaaacaatgtggatgcaagatg

SEQ ID NO: 372487 - DNA, 120 bp, Artificial Sequence
  ENSG00000142224_25 (sequence is synthesized)
cagtcctcgtccctggcctgcccttaccgctttagtatttcagatgagtcagctctcactctgccacctgctttctgtaactctgcagcaggccagcagcctccagtccaccctctcctc

SEQ ID NO: 372488 - DNA, 120 bp, Artificial Sequence
  ENSG00000142224_26 (sequence is synthesized)
ctcccagggctctggggtgaagccctccccaggaactccctggctcccagtacccatgggagaagctcttttcaactgacatgatttattttaacaataagaggaaaaaaccacatccga

SEQ ID NO: 372489 - DNA, 120 bp, Artificial Sequence
  ENSG00000142224_27 (sequence is synthesized)
tttccacagaattagagttcctcctgacacgcctggacttgccagttgggaaggacactctcaagccatcctctatgccatttgccgttctgctgttcctttgcttggagggaagagatg

SEQ ID NO: 372490 - DNA, 120 bp, Artificial Sequence
  ENSG00000142224_28 (sequence is synthesized)
cctgtttctatagggaggaagtttgaagtgagaagagaggacaaagattctgtgaatggaaagagcactggactgagagttcagggatgtggcctccggtcccagctccaccactactca

SEQ ID NO: 372491 - DNA, 120 bp, Artificial Sequence
  ENSG00000142224_29 (sequence is synthesized)
aagtgccgttgtgatacgcttatgttggtgggatgggggaaagaaataacaggtttgtatggagtgttatgaaagaattaaatcttaaccttccattggggtaagctgatggaaacaacc

SEQ ID NO: 372492 - DNA, 120 bp, Artificial Sequence
  ENSG00000142224_30 (sequence is synthesized)
atagcaaaggacagactgaatatttttttattctctttatagaaaataacagtaaaaaaaagtattgacataggagaaggaaacaaaaagttgtcaggagttaatgaatagaaatattat

SEQ ID NO: 372493 - DNA, 120 bp, Artificial Sequence
  ENSG00000142224_31 (sequence is synthesized)
ttttttctggattttatggtgtttgtgttatttgttagcttttatgaatttgtaatttgttgtaatttctttctaaataagtatttacttttgtctctaattttgtccatctatttttga

SEQ ID NO: 372494 - DNA, 120 bp, Artificial Sequence
  ENSG00000142224_32 (sequence is synthesized)
ctctctgggcctcagctgttccctcatctgtaaatgagaagggtgggccagatgctctttcatgtctggtgtaatgaagccctggagtgggctgcctatgactgcacgcagctgtaccac

SEQ ID NO: 372495 - DNA, 120 bp, Artificial Sequence
  ENSG00000142224_33 (sequence is synthesized)
accccacctgggtgtctttgggtgaagtacttggtagctccaagtctcatcttccttatccaaaatgatggacacaaaaatagtattgacctcatggaataggtgtgaagatgaaaacag

SEQ ID NO: 372496 - DNA, 120 bp, Artificial Sequence
  ENSG00000142224_34 (sequence is synthesized)
acaatgcatatggatgcttcacacagaccctggggtggcaaatgtgctcagtacttgttagttattagtgtgagtctactcttttagtctatgaattttgttagaggaactcctgcttac

SEQ ID NO: 372497 - DNA, 120 bp, Artificial Sequence
  ENSG00000142224_35 (sequence is synthesized)
caggcctctggtttaataaaacatgactggagtgacacatttctaagctcaccaccacttataattacagaagattgatggctatataggacatctcccaccaagcctgcagaatgtcca

SEQ ID NO: 372498 - DNA, 120 bp, Artificial Sequence
  ENSG00000142224_36 (sequence is synthesized)
gatgtcccaagtacagcccactttactcagagataacgtcaatgagcagactcaagttgaaggattaatggtcactagagcaccaacagcccctacctttagtgagcacatctgcacatt

SEQ ID NO: 372499 - DNA, 120 bp, Artificial Sequence
  ENSG00000142224_37 (sequence is synthesized)
ccaagtttaatcatagctccttatagtttcttataagcagagatgttcctaaaggacaggggttcctcctcctgctttctgggcatgccctactctctaatggagtagtttccaataaat

SEQ ID NO: 372500 - DNA, 120 bp, Artificial Sequence
  ENSG00000142224_38 (sequence is synthesized)
ttgcttctttgtctgtgctccaattctttcctgtgtgagatctaagaacccactcttggggtctagattgggatcctcttttctggcaacatcttgagtatgtgaccatgagaaatgtta

SEQ ID NO: 372501 - DNA, 120 bp, Artificial Sequence
  ENSG00000142224_39 (sequence is synthesized)
gaaattggagtgaaaggtacgtaaacatttgaacccaataccattctctggttctcccagaggcacagtaaaaaaaagtattgacatagaagaaggaaacaaaaagttgtcaggagttaa

SEQ ID NO: 372502 - DNA, 120 bp, Artificial Sequence
  ENSG00000142224_40 (sequence is synthesized)
agaataaagatttttttttctggattttgtggtgtttgtggtatttgttagcttttatgatttgtaatttgttgtaatttctctttctaaataaacgtttacttttgtctctaattttgt

SEQ ID NO: 372503 - DNA, 120 bp, Artificial Sequence
  ENSG00000142224_41 (sequence is synthesized)
tgtgtgagtcactgggtcagaattccagcatctgctccctgtctgcccaaggagaggccaggaagtgctggcccccatcggcctcctgatatggtgcttggagtcaaaggaaattctctg

SEQ ID NO: 372504 - DNA, 120 bp, Artificial Sequence
  ENSG00000142224_42 (sequence is synthesized)
agaactgtggagaacctctcccagtggccactgcttccccagggctccctgcctgctgacaactcctcagatggtctcctcctagataaccctcctggggtgaccaacttatgtcaacat

SEQ ID NO: 372505 - DNA, 120 bp, Artificial Sequence
  ENSG00000142224_43 (sequence is synthesized)
attccttagtaagaggcatggcaaggactccagttctactgtaagcatacccctggtttctttatttctggccctttggtgtctttacatcaataaacctctgggtagttccttggtatg

SEQ ID NO: 372506 - DNA, 120 bp, Artificial Sequence
  ENSG00000142224_44 (sequence is synthesized)
gcctatccctaaaggttacttagaaattcattgcgatctatttaaatccaacatcagaaacaaaaccaacacaaaccaacaaaaacttagaccaggagagaacctgggctctagccccat

SEQ ID NO: 372507 - DNA, 120 bp, Artificial Sequence
  ENSG00000142224_45 (sequence is synthesized)
tcctgctaatgatttcctgtgagactttgtggcaagtgacttcacctctctgtgcctcggattctaaaattgttagaagagttgatggcccctgtcctacttgcattaatatgataatgg

SEQ ID NO: 372508 - DNA, 120 bp, Artificial Sequence
  ENSG00000142227_0 (sequence is synthesized)
ggaggcccgagcgagggacaagactccgactccagctctgacttttttcgcggctctcggcttccactgcagccatgtcactcctcttgctggtggtctcagcccttcacatcctcattc

SEQ ID NO: 372509 - DNA, 120 bp, Artificial Sequence
  ENSG00000142227_1 (sequence is synthesized)
ttatactgcttttcgtggccactttggacaagtcctggtggactctccctgggaaagagtccctgaatctctggtacgactgcacgtggaacaacgacaccaaaacatgggcctgcagta

SEQ ID NO: 372510 - DNA, 120 bp, Artificial Sequence
  ENSG00000142227_2 (sequence is synthesized)
ctccctcattctctgctgtctctccttcatcctgttcatgttccagctctacaccatgcgacgaggaggtctcttctatgccaccggcctctgccagctttgcaccagcgtggcggtgtt

SEQ ID NO: 372511 - DNA, 120 bp, Artificial Sequence
  ENSG00000142227_3 (sequence is synthesized)
tactggcgccttgatctatgccattcacgccgaggagatcctggagaagcacccgcgagggggcagcttcggatactgcttcgccctggcctgggtggccttccccctcgccctggtcag

SEQ ID NO: 372512 - DNA, 120 bp, Artificial Sequence
  ENSG00000142227_4 (sequence is synthesized)
cggcatcatctacatccacctacggaagcgggagtgagcgccccgcctcgctcggctgcccccgccccttcccggcccccctcgccgcgcgtcctccaaaaaataaaaccttaaccgcgg

SEQ ID NO: 372513 - DNA, 120 bp, Artificial Sequence
  ENSG00000142227_5 (sequence is synthesized)
ctccagctctgacttttttcgcggctctcgcgcgaatcctatccatttcctccagaagatgtccaacagtcaccagtctggcagcagggtggggcttccactgcagccatgtcactcctc

SEQ ID NO: 372514 - DNA, 120 bp, Artificial Sequence
  ENSG00000142227_6 (sequence is synthesized)
ggggcttccccgtaaggggcgggcttcgagggtcgcgtttggaaggccttacgaggggcccggtggaagggcggtgaagggcgggctaatcgggaggcgctcaggccttgaaggcctgcg

SEQ ID NO: 372515 - DNA, 120 bp, Artificial Sequence
  ENSG00000142227_7 (sequence is synthesized)
ggaggtcgaaatggtcctggggaggtcgaggctgaggtctcactagtaccgcgggcctggaagcggcgggagttgaaagagcctgcggtgacctgtatggaagccctcgaagccaggccg

SEQ ID NO: 372516 - DNA, 120 bp, Artificial Sequence
  ENSG00000142227_8 (sequence is synthesized)
aggtcctacaagacggagcccgagaggtgccggtcttaagctgactgtgaccacgttaaattaaggattcataggaaggaaggcggtgtcgaagccgggagttgcgcggagaaggagcgc

SEQ ID NO: 372517 - DNA, 120 bp, Artificial Sequence
  ENSG00000142227_9 (sequence is synthesized)
cgaccaacggcttcccgggaagcagccaaaaacgcttggccgcctaccacgtccgcgcgctggagggcggaagtgggcttccactgcagccatgtcactcctcttgctggtggtctcagc

SEQ ID NO: 372518 - DNA, 120 bp, Artificial Sequence
  ENSG00000142227_10 (sequence is synthesized)
ctcatgggactgagaattgggaaccctcccccaacaaagttggagtgggcggggtccaggcctgagtggctgagtgcctagggctaatgcatgtcccgcctgtctggatgtacctacctc

SEQ ID NO: 372519 - DNA, 120 bp, Artificial Sequence
  ENSG00000142227_11 (sequence is synthesized)
attgagaggaggagagaaagagaaacgggagcaagagagaaggaggcccagacagtgagggcaggagggagagaagagacgcagaaggagagcgagcgagagagaaagggttctggattg

SEQ ID NO: 372520 - DNA, 120 bp, Artificial Sequence
  ENSG00000142227_12 (sequence is synthesized)
gaggggagagcaagggagggaggaaggcggtgagagaggcgggggcctcgggagggtgaaaggagggaggagaagggcggggcacggaggcccgagcgagggacaagactccgactccag

SEQ ID NO: 372521 - DNA, 120 bp, Artificial Sequence
  ENSG00000142230_0 (sequence is synthesized)
actccgggcgtgctgccggcggcggtaggtggcgcgcgggtccggcgggcggttggcttgagcgggaccggagctgaggcaggaagagccggcgccatggtggagaaggaggaggctggc

SEQ ID NO: 372522 - DNA, 120 bp, Artificial Sequence
  ENSG00000142230_1 (sequence is synthesized)
ggcggcattagcgaggaggaggcggcacagtatgaccggcagatccgcctgtggggactggaggcccagaaacggctgcgggcctctcgggtgcttcttgtcggcttgaaaggacttggg

SEQ ID NO: 372523 - DNA, 120 bp, Artificial Sequence
  ENSG00000142230_2 (sequence is synthesized)
gctgaaattgccaagaatctcatcttggcaggagtgaaaggactgaccatgctggatcacgaacaggtaactccagaagatcccggagctcagttcttgattcgtactgggtctgttggc

SEQ ID NO: 372524 - DNA, 120 bp, Artificial Sequence
  ENSG00000142230_3 (sequence is synthesized)
cgaaatagggctgaagcctctttggagcgagctcagaatctcaaccccatggtggatgtgaaggtggacactgaggatatagagaagaaaccagagtcatttttcactcaattcgatgct

SEQ ID NO: 372525 - DNA, 120 bp, Artificial Sequence
  ENSG00000142230_4 (sequence is synthesized)
gtgtgtctgacttgctgctccagggatgtcatagttaaagttgaccagatctgtcacaaaaatagcatcaagttctttacaggagatgtttttggctaccatggatacacatttgccaat

SEQ ID NO: 372526 - DNA, 120 bp, Artificial Sequence
  ENSG00000142230_5 (sequence is synthesized)
ctaggagagcatgagtttgtagaggagaaaactaaagttgccaaagttagccaaggagtagaagatgggcccgacaccaagagagcaaaacttgattcttctgagacaacgatggtcaaa

SEQ ID NO: 372527 - DNA, 120 bp, Artificial Sequence
  ENSG00000142230_6 (sequence is synthesized)
aagaaggtggtcttctgccctgttaaagaagccctggaggtggactggagcagtgagaaagcaaaggctgctctgaagcgcacgacctccgactactttctccttcaagtgctcttaaag

SEQ ID NO: 372528 - DNA, 120 bp, Artificial Sequence
  ENSG00000142230_7 (sequence is synthesized)
ttccgtacagataaaggaagagatcccagttctgatacatatgaggaagattctgagttgttgctccagatacgaaatgatgtgcttgactcactgggtattagtcctgacctgcttcct

SEQ ID NO: 372529 - DNA, 120 bp, Artificial Sequence
  ENSG00000142230_8 (sequence is synthesized)
gaggactttgtcaggtactgcttctccgagatggccccagtgtgtgcggtggttggagggattttggcacaggaaattgtgaaggccctgtctcagcgggaccctcctcacaacaacttc

SEQ ID NO: 372530 - DNA, 120 bp, Artificial Sequence
  ENSG00000142230_9 (sequence is synthesized)
ttcttcttcgatggcatgaaggggaatgggattgtggagtgccttggccccaagtgaactcaagatttggcagccccagagatgccaactgcagcatgcccacctgtattccctgtcccc

SEQ ID NO: 372531 - DNA, 120 bp, Artificial Sequence
  ENSG00000142230_10 (sequence is synthesized)
ccttcatgaaggcatctccaggcaaggaaaactgaagtcattggcccgatacaaaacatttcctgcaacgaaggaggtggtgccgacgtgctgcttcccatcaccagcagctgctcgaca

SEQ ID NO: 372532 - DNA, 120 bp, Artificial Sequence
  ENSG00000142230_11 (sequence is synthesized)
aggggcgcagggtggctgtctttgttccagcactgttcaggctgcctgtcatcccgggcctgccagctcccctgagtgatgagcacttccaagcacccctctgccctttctctgtcctta

SEQ ID NO: 372533 - DNA, 120 bp, Artificial Sequence
  ENSG00000142230_12 (sequence is synthesized)
tgctgtcccggcctcgccagccctctggggcattgtgggagatgcctgccaggaatgagcaagctctgttgctcgggagcctcttgtcaccttcttggacttattccccacctgatacct

SEQ ID NO: 372534 - DNA, 120 bp, Artificial Sequence
  ENSG00000142230_13 (sequence is synthesized)
tatagagaaaagtgtgaattcaggtggagagtaggcccaggccccatgaggcaccagtggaagcacagctccaagttcagacaggtgcccttagagaggaaaaccatgacaggcaaatgc

SEQ ID NO: 372535 - DNA, 120 bp, Artificial Sequence
  ENSG00000142230_14 (sequence is synthesized)
atttcctctggagtttgagaccctgacaaacaacaggtggcatctggtgtgctgttcttgagttttcgtttaggattagttgagttccagctgggttttgggagaaaggagatgctacca

SEQ ID NO: 372536 - DNA, 120 bp, Artificial Sequence
  ENSG00000142230_15 (sequence is synthesized)
agtcttggatgttagggcgagaccctgcaagttgagtattagagagcttgtctttcaaggcaggttcctggggcttcagggctaggagggaggagcctgcccttttaacagaaccccagt

SEQ ID NO: 372537 - DNA, 120 bp, Artificial Sequence
  ENSG00000142230_16 (sequence is synthesized)
cacatgcggctcaagtcactcagaggctgttgcatttcagggctatgttggtcctttgtttacctcctaaaccacagctgtttgtgtttcacatatgttgtgaattttccttggttcttt

SEQ ID NO: 372538 - DNA, 120 bp, Artificial Sequence
  ENSG00000142230_17 (sequence is synthesized)
ttaaaggaatgataataaagttacttgctttaggatttgcttgtttttcttccacttcagaagcttctgagagggaatgggatgatcctaccagttgccttttcagacctgaggctctaa

SEQ ID NO: 372539 - DNA, 120 bp, Artificial Sequence
  ENSG00000142230_18 (sequence is synthesized)
ctcaagagattcctcctctccctcaccattcctgccaccattttttctgggtgatgcagcaagagttaaattgttcacattctagaatgtgtagaagcttctggctccagttgtctaatg

SEQ ID NO: 372540 - DNA, 120 bp, Artificial Sequence
  ENSG00000142230_19 (sequence is synthesized)
gataattcagctaaatagtggctattttcagtggcaagaattataataataaagggaagtcaaaagtgatgcttcatatgccccaagtgccacagccgctacgggtcagagcttttattg

SEQ ID NO: 372541 - DNA, 120 bp, Artificial Sequence
  ENSG00000142230_20 (sequence is synthesized)
gaagaccaggtttgccttgatgcagccaaagtgcgttccagttcaccccactcttgcttgtgtttcttctttatgtaaattgtgtgatgtttcaataaatcagtctctttcctattctga

SEQ ID NO: 372542 - DNA, 120 bp, Artificial Sequence
  ENSG00000142230_21 (sequence is synthesized)
gaagcactccgggcgtgctgccggcggcgtttgagccaccatcatcctccctcaccttaactgtgacatcttcctacccccatggctttccatcatgcctcgaagaaaatccagaatcct

SEQ ID NO: 372543 - DNA, 120 bp, Artificial Sequence
  ENSG00000142230_22 (sequence is synthesized)
ggactggaggcccagaaacggtcagggccggcgcggcttgaggccgctagggtctggagggggcgtctattctgaggcgtttgcggcccggaaggagcgggaaggctgcgggcctctcgg

SEQ ID NO: 372544 - DNA, 120 bp, Artificial Sequence
  ENSG00000142230_23 (sequence is synthesized)
ggccgaggggaggcggaaatagccgaaaggagctgagcaggagcgaggaggcgacgggggagagccagaaagagctgaagacagggtctctctgtcgcgcagactagagtgcagtggtgt

SEQ ID NO: 372545 - DNA, 120 bp, Artificial Sequence
  ENSG00000142230_24 (sequence is synthesized)
tccgcggacgaggtactgcgcaggcgtgggagggtctgcgcatgcgcagaagcactccgggcgtgctgccggcggcggctgcgggcctctcgggtgcttcttgtcggcttgaaaggactt

SEQ ID NO: 372546 - DNA, 120 bp, Artificial Sequence
  ENSG00000142230_25 (sequence is synthesized)
gaaactgagacggtccggaaagagccgaaagcggtgtccgggtgggtggcaggaggtggaaacagccgaaagaaaagcagccaggttcctgggatggctctagggagggttatttacact

SEQ ID NO: 372547 - DNA, 120 bp, Artificial Sequence
  ENSG00000142230_26 (sequence is synthesized)
gtgagtgaggaggcattcacagagaagttcctccagagtgtggaagaagcactaccatttggcaccaacgcctggagaacaaaggaggagaccattggccaaagagaggcatttccattt

SEQ ID NO: 372548 - DNA, 120 bp, Artificial Sequence
  ENSG00000142230_27 (sequence is synthesized)
cagagacatcccagaagcactgaacgcactcatgccaagatgttaatacctttcctcactaaagagaaaccagggttccttggagaaatggctgtttccagatctggggtaggaaaatta

SEQ ID NO: 372549 - DNA, 120 bp, Artificial Sequence
  ENSG00000142230_28 (sequence is synthesized)
ggtcagaatgttgagttaaattacgctaacgaggggattctaaagagtgcagaaaccacaaaagagactgcagaaaaccacaaaagtggaactctcagactctccagcaaggcggcgttg

SEQ ID NO: 372550 - DNA, 120 bp, Artificial Sequence
  ENSG00000142233_0 (sequence is synthesized)
gagagcccaccgcgccacagcttggaggaagagcctgcggggaactggctgcaggacgctctcttcttgagtgcaggtgctggctctgctgtgaccatgcccgtgacctttgccctcctg

SEQ ID NO: 372551 - DNA, 120 bp, Artificial Sequence
  ENSG00000142233_1 (sequence is synthesized)
ctcctcctgggccaggccactgcggacccatgctacgatccacagggccgcccccaattctgcctcccgccagtgacacagctggctgccgtggcggcctcctgccctcaggcctgtgcc

SEQ ID NO: 372552 - DNA, 120 bp, Artificial Sequence
  ENSG00000142233_2 (sequence is synthesized)
ctgtccccaggaaaccaccttggcgccagggaaacctgcaatggcagcctgactttggccctgggtggccccttcctcctgacatctgtcagcttgcgcttctgtaccccaggaccccca

SEQ ID NO: 372553 - DNA, 120 bp, Artificial Sequence
  ENSG00000142233_3 (sequence is synthesized)
gccctcatcctgtctgctgcctgggcctcagggggtccctggaggctgctgtggcacaggcccgcctggcctggggccttagggggccctgaaagggtgaccttccactccacaccaggt

SEQ ID NO: 372554 - DNA, 120 bp, Artificial Sequence
  ENSG00000142233_4 (sequence is synthesized)
cctaaggccactgtggcggccagccacctccgtgtggagtttgggggccaggccgggctagcggcagctgggctgagaggccgctgccagtgtcatggccacgctgcccgctgtgccgcc

SEQ ID NO: 372555 - DNA, 120 bp, Artificial Sequence
  ENSG00000142233_5 (sequence is synthesized)
gcccccccgctgccactgccgccaccataccactggcccggggtgcgagagctgccgcccgtcccatcgagactggccctggcggcctgccacgccccggcacccccacccttgcctacc

SEQ ID NO: 372556 - DNA, 120 bp, Artificial Sequence
  ENSG00000142233_6 (sequence is synthesized)
tgcctaccctgctcctgcaaccagcacgcccgacgctgccggttcaactctgagctgttcagactgtcgggcggccggagtgggggtgtttgtgagcggtgccgccaccacacagctggg

SEQ ID NO: 372557 - DNA, 120 bp, Artificial Sequence
  ENSG00000142233_7 (sequence is synthesized)
gaccctagccagcctatcttcagccgcagggcctgcagagcctgccagtgccaccctattggggcaacaggaggaacctgcaaccagaccagtgggcagtgcacctgcaagttaggggtc

SEQ ID NO: 372558 - DNA, 120 bp, Artificial Sequence
  ENSG00000142233_8 (sequence is synthesized)
acaggcctgacctgcaaccgctgtggccctggctaccagcagagccgctcccccaggatgccctgccagcgaattccagaggcaacaaccacccttgccactactcctggtgcttatagc

SEQ ID NO: 372559 - DNA, 120 bp, Artificial Sequence
  ENSG00000142233_9 (sequence is synthesized)
tctgaccctcagtgtcaaaactactgcaatatgtcggacaccagggtacacatgagccttcggaggtactgccagcaggaccatgttctccgcgcgcaggtgctagcgtccgaggcggcg

SEQ ID NO: 372560 - DNA, 120 bp, Artificial Sequence
  ENSG00000142233_10 (sequence is synthesized)
cggcatggcagcggctggccgtgcgcgtgctggccgtttacaagcagcgggcgcagcccgtgcgacgcggcgaccaggacgcctgggtgccccgcgccgacctgacctgcggctgcctgc

SEQ ID NO: 372561 - DNA, 120 bp, Artificial Sequence
  ENSG00000142233_11 (sequence is synthesized)
ctgcgcctgcagccaggcaccgactacctgctgctgggcagcgccgtgggcgaccccgaccccacgcgcctcatcctcgaccgccacggcctcgcgctgccatggaggccgcgctgggcc

SEQ ID NO: 372562 - DNA, 120 bp, Artificial Sequence
  ENSG00000142233_12 (sequence is synthesized)
cggcccctgaagcggctgcagcaggaggagcgcgccggaggctgccgcggcgtgcgggcacccacacccagtcccaggccggagcactagacgtgagatggggctgcctcgagcaccaac

SEQ ID NO: 372563 - DNA, 120 bp, Artificial Sequence
  ENSG00000142233_13 (sequence is synthesized)
aaagtaatttgggagcgactaggagctgagccttctacctcgacggtgcactgcagagagccaatcagacgtcgcagagccccgacgacactatgcttgcgcccacgccgagcaggcgtg

SEQ ID NO: 372564 - DNA, 120 bp, Artificial Sequence
  ENSG00000142233_14 (sequence is synthesized)
cggaacttttagcaaaaggcggcaagcgggacttctggtcccaacatttcctcctttggcctgtggcttattccccgccagtgatctgtttcccccaataaagtctcaaatctttgggaa

SEQ ID NO: 372565 - DNA, 120 bp, Artificial Sequence
  ENSG00000142233_15 (sequence is synthesized)
acccattgagcccagtcccaaaggtttgggtaccccagctggccatcaagatggaacggagggatgggcaggggcagaaggctgtggtctaggccccaggagcccactgcagacagcctg

SEQ ID NO: 372566 - DNA, 120 bp, Artificial Sequence
  ENSG00000142233_16 (sequence is synthesized)
accctccccagaccctcagtgtcaaaactactgcaatatgtcggacaccagggtacacatgagccttcggaggtactgccagcaggaccatggtgagtgctggggagacagacagctgaa

SEQ ID NO: 372567 - DNA, 120 bp, Artificial Sequence
  ENSG00000142233_17 (sequence is synthesized)
ggctacacagctggttctgatgactgcttctaagccaccccctttctggccttccactttctcatcttaaatgggaaggagtgttggattccaaaccccttcctgatctagaaattgatg

SEQ ID NO: 372568 - DNA, 120 bp, Artificial Sequence
  ENSG00000142233_18 (sequence is synthesized)
gggcagaagacaaatggggaggggagtggggagggggcattcactaccttcctgtgtctcctctttccccatgttcttcggcttacagagtttcatcatctccttcagcctgacatctct

SEQ ID NO: 372569 - DNA, 120 bp, Artificial Sequence
  ENSG00000142233_19 (sequence is synthesized)
gagggatggaagagataggggaactggttgagtggaatgaactcttgccctgtcctccctatctcagagaccctttctgcttcccttcatggtcccagatatttgagccttagccccact

SEQ ID NO: 372570 - DNA, 120 bp, Artificial Sequence
  ENSG00000142233_20 (sequence is synthesized)
tcccataaagacttgtcccacggttccctaatccccagtccacacctgctccatgaccttggggtctatgacctcaggctattcagctctcttaagacactcaggagttcggcccagcca

SEQ ID NO: 372571 - DNA, 120 bp, Artificial Sequence
  ENSG00000142233_21 (sequence is synthesized)
acaaatctagaccaacgccagctatttctctcaatgtataggaccgcagacttctccctcaggaacctcatctggtcactagtgttctaggccttcacaggtggaaagattttccccacc

SEQ ID NO: 372572 - DNA, 120 bp, Artificial Sequence
  ENSG00000142233_22 (sequence is synthesized)
ttccacagggatctcctgccccgcagacccagctggctagtcagagtcccacccagcctctcagaaagtgcatttttctggccgggcgcggtggctcatgctaataatcccagcactttg

SEQ ID NO: 372573 - DNA, 80 bp, Artificial Sequence
  ENSG00000142233_23 (sequence is synthesized)
aaaaattagccaggcgtggtggcaggatcctgtaaacccagctgaggcacaagaatcacttcaacctgggaggcactggg

SEQ ID NO: 372574 - DNA, 120 bp, Artificial Sequence
  ENSG00000142233_24 (sequence is synthesized)
tctgctctgagcccccgcccagcccagaaaccccactagcctggggcctgagaacagccacgccactccctcctgagagcccaccgcgccacagcttggaggaagagcctgcggggaact

SEQ ID NO: 372575 - DNA, 120 bp, Artificial Sequence
  ENSG00000142235_0 (sequence is synthesized)
atgaggcaagtgctgtggttgtgtaatgtctgcgtaaccgcacgggaaacccgccaccacctccacctccctgccatcctcgacaagatgcctgcccccggcgccctcatcctccttgcg

SEQ ID NO: 372576 - DNA, 120 bp, Artificial Sequence
  ENSG00000142235_1 (sequence is synthesized)
gccgtctccgcctccggctgcctggcgtccccggcccaccccgatggattcgccctgggccgggctcctctggctcctccctacgctgtggtcctcatttcctgctccggcctgctggcc

SEQ ID NO: 372577 - DNA, 120 bp, Artificial Sequence
  ENSG00000142235_2 (sequence is synthesized)
ttcatcttcctcctcctcacctgtctgtgctgcaaacggggcgatgtcggcttcaaggaatttgagaaccctgaaggggaggactgctccggggagtacactccccctgcggaggagacc

SEQ ID NO: 372578 - DNA, 120 bp, Artificial Sequence
  ENSG00000142235_3 (sequence is synthesized)
tcctcctcacagtcgctgcctgatgtctacattctcccgctggctgaggtctccctgccaatgcctgccccgcagccttcacactcagacatgaccacccccctgggccttagccggcag

SEQ ID NO: 372579 - DNA, 120 bp, Artificial Sequence
  ENSG00000142235_4 (sequence is synthesized)
cacctgagctacctgcaggagattgggagtggctggtttgggaaggtgatcctgggagagattttctccgactacacccccgcccaggtggtggtgaaggagctccgagccagcgcgggg

SEQ ID NO: 372580 - DNA, 120 bp, Artificial Sequence
  ENSG00000142235_5 (sequence is synthesized)
cccctggagcaacgcaagttcatctcggaagcacagccgtacaggagcctgcagcaccccaatgtcctccagtgcctgggtctgtgcgtggagacgctgccgtttctgctgattatggag

SEQ ID NO: 372581 - DNA, 120 bp, Artificial Sequence
  ENSG00000142235_6 (sequence is synthesized)
ttctgtcaactgggggacctgaagcgttacctccgagcccagcggccccccgagggcctgtcccctgagctaccccctcgagacctgcggacgctgcagaggatgggcctggagatcgcc

SEQ ID NO: 372582 - DNA, 120 bp, Artificial Sequence
  ENSG00000142235_7 (sequence is synthesized)
cgcgggctggcgcacctgcattcccacaactacgtgcacagcgacctggccctgcgcaactgcctgctgacctctgacctgaccgtgcgcatcggagactacgggctggcccacagcaac

SEQ ID NO: 372583 - DNA, 120 bp, Artificial Sequence
  ENSG00000142235_8 (sequence is synthesized)
tacaaggaggactactacctgaccccagagcgcctgtggatcccactgcgctgggcggcgcccgagctcctcggggagctccacgggaccttcatggtggtggaccagagccgcgagagc

SEQ ID NO: 372584 - DNA, 120 bp, Artificial Sequence
  ENSG00000142235_9 (sequence is synthesized)
aacatctggtccctgggggtgaccctgtgggagctgtttgagtttggggcccagccctaccgccacctgtcagacgaggaggtcctcgccttcgtggtccgccagcagcatgtgaagctg

SEQ ID NO: 372585 - DNA, 120 bp, Artificial Sequence
  ENSG00000142235_10 (sequence is synthesized)
gcccggccgaggctcaagctgccttacgcggactactggtatgacattcttcagtcctgctggcggccacctgcccagcgcccttcagcctctgatctccaattgcagctcacctacttg

SEQ ID NO: 372586 - DNA, 120 bp, Artificial Sequence
  ENSG00000142235_11 (sequence is synthesized)
ctcacctacttgctctccgagcggcctccccggcccccaccgccgccacccccaccccgagacggtcccttcccctggccctggccccctgcacacagtgcgccccgcccggggaccctc

SEQ ID NO: 372587 - DNA, 120 bp, Artificial Sequence
  ENSG00000142235_12 (sequence is synthesized)
cccctactggatggcttccctggagccgaccccgacgatgtgctcacggtcaccgagagtagccgcggcctcaacctcgagtgcctgtgggagaaggcccggcgtggggccggccggggt

SEQ ID NO: 372588 - DNA, 120 bp, Artificial Sequence
  ENSG00000142235_13 (sequence is synthesized)
gggggggcacctgcctggcagccggcgtcggcccccccggccccccacgccaacccctccaaccctttctacgaggcgctgtccacgcccagcgtgctgcctgtcatcagcgcccgcagc

SEQ ID NO: 372589 - DNA, 120 bp, Artificial Sequence
  ENSG00000142235_14 (sequence is synthesized)
ccctccgtgagcagcgagtactacatccgcttggaggagcacggctcccctcctgagcccctcttccccaacgactgggaccccctggacccaggagtgcccgcccctcaggccccccag

SEQ ID NO: 372590 - DNA, 120 bp, Artificial Sequence
  ENSG00000142235_15 (sequence is synthesized)
gccccctccgaggtcccccagctggtgtccgagacctgggcctcccccctcttccctgcgccccggcccttcccagcccagtcctcagcgtcaggcagcttcctgctgagcggctgggac

SEQ ID NO: 372591 - DNA, 120 bp, Artificial Sequence
  ENSG00000142235_16 (sequence is synthesized)
cccgagggccggggcgccggggagaccctggcgggagaccctgccgaggtcttgggggagcgggggaccgccccgtgggtggaagaagaagaggaggaggaggagggcagctccccaggg

SEQ ID NO: 372592 - DNA, 120 bp, Artificial Sequence
  ENSG00000142235_17 (sequence is synthesized)
gaagacagcagcagccttggaggtggcccaagccgccggggtcccctaccctgtcccctgtgcagccgcgagggggcctgctcctgcctgccactggagcggggggacgccgtagcaggc

SEQ ID NO: 372593 - DNA, 120 bp, Artificial Sequence
  ENSG00000142235_18 (sequence is synthesized)
gaggccaccctgctcttggctgcccccacccccccgaggacgactcctcgctgcgggcagagcggggctccctggccgacttgcccatggccccccccgcctcggccccccccgagtttc

SEQ ID NO: 372594 - DNA, 80 bp, Artificial Sequence
  ENSG00000142235_19 (sequence is synthesized)
ctcggccccccccgagtttctggaccccctcatgggggcggcggcgccccagtaccccgggcgggggccacctcccgctc

SEQ ID NO: 372595 - DNA, 120 bp, Artificial Sequence
  ENSG00000142235_20 (sequence is synthesized)
agccgggggacagcggctacgagaccgagacccctttttccccagagggagccttcccaggtgggggggcggccgaggaggaaggggtccctcggccgcgggctccccccgagccacccg

SEQ ID NO: 372596 - DNA, 120 bp, Artificial Sequence
  ENSG00000142235_21 (sequence is synthesized)
acccaggagcgccccggccacctccagacccgggtccgctcccactcccggggccccgggagaagccgaccttcgtggttcaagtgagcacggaacagctgctgatgtccctgcgggagg

SEQ ID NO: 372597 - DNA, 120 bp, Artificial Sequence
  ENSG00000142235_22 (sequence is synthesized)
atgtgacaaggaacctcctgggggagaagggggcgacagcccgggagacaggacccaggaaggcggggagaggccccgggaacagagagaaagtcccgggcctgaacagggacccgacag

SEQ ID NO: 372598 - DNA, 120 bp, Artificial Sequence
  ENSG00000142235_23 (sequence is synthesized)
tcctgggcaacgggaaacaagccccaagcctgagcctcccagtgaacggggtgacagtgctggagaacggggaccagagagccccaggcatcgaggagaaggcggcggagaatggggccc

SEQ ID NO: 372599 - DNA, 120 bp, Artificial Sequence
  ENSG00000142235_24 (sequence is synthesized)
tggggtcccccgagagagaagagaaagtgctggagaatggggagctgacacccccaaggagggaggagaaagcgctggagaatggggagctgaggtccccagaggccggggagaaggtgc

SEQ ID NO: 372600 - DNA, 120 bp, Artificial Sequence
  ENSG00000142235_25 (sequence is synthesized)
tggtgaatgggggcctgacacccccaaagagcgaggacaaggtgtcagagaatgggggcctgagattccccaggaacacggagaggccaccagagactgggccttggagagccccagggc

SEQ ID NO: 372601 - DNA, 120 bp, Artificial Sequence
  ENSG00000142235_26 (sequence is synthesized)
cctgggagaagacgcccgagagttggggtccagcccccacgatcggggagccagccccagagacctctctggagagagcccctgcacccagcgcagtggtctcctcccggaacggcgggg

SEQ ID NO: 372602 - DNA, 120 bp, Artificial Sequence
  ENSG00000142235_27 (sequence is synthesized)
agacagcccctggcccccttggcccagcccccaagaacgggacgctggaacccgggaccgagaggagagcccccgagactgggggggcgccgagagccccaggggctgggaggctggacc

SEQ ID NO: 372603 - DNA, 120 bp, Artificial Sequence
  ENSG00000142235_28 (sequence is synthesized)
gacctcgggagtgggggccgagccccagtgggcacggggacggcccccggcggcggccccggaagcggcgtggacgcaaaggccggatgggtagacaacacgaggccgcagccaccgccg

SEQ ID NO: 372604 - DNA, 120 bp, Artificial Sequence
  ENSG00000142235_29 (sequence is synthesized)
caccggaggcacagccgaggaggctggagccagcgcccccgagagccaggccggaggtggcccccgagggagagcccggggccccagacagcagggccggcggagacacggcactcagcg

SEQ ID NO: 372605 - DNA, 120 bp, Artificial Sequence
  ENSG00000142235_30 (sequence is synthesized)
cggcactcagcggagacggggacccccccaagcccgagaggaagggccccgagatgccacgactattcttggacttgggaccccctcaggggaacagcgagcagatcaaagccaggctct

SEQ ID NO: 372606 - DNA, 120 bp, Artificial Sequence
  ENSG00000142235_31 (sequence is synthesized)
ggggaacagcgagcagatcaaagccaggctctcccggctctcgctggcgctgccgccgctcacgctcacgccattcccggggccgggcccgcggcggcccccgtgggagggcgcggacgc

SEQ ID NO: 372607 - DNA, 80 bp, Artificial Sequence
  ENSG00000142235_32 (sequence is synthesized)
gagcgccggggccggcggaggaggacggggaggacgaggacgaggacgaggaggaggacgaggaggcggcggcgccgggc

SEQ ID NO: 372608 - DNA, 120 bp, Artificial Sequence
  ENSG00000142235_33 (sequence is synthesized)
ccccggtgcccgtcgtggtgagcagcgccgacgcggacgcggcccgcccgctgcgggggctgctcaagtctccgcgcggggccgacgagccagaggacagcgagctggagaggaagcgca

SEQ ID NO: 372609 - DNA, 120 bp, Artificial Sequence
  ENSG00000142235_34 (sequence is synthesized)
agatggtctccttccacggggacgtgaccgtctacctcttcgaccaggagacgccaaccaacgagctgagcgtccaggccccccccgagggggacacggacccgtcaacgcctccagcgc

SEQ ID NO: 372610 - DNA, 120 bp, Artificial Sequence
  ENSG00000142235_35 (sequence is synthesized)
ccccgacacctccccaccccgccacccccggagatgggtttcccagcaacgacagcggctttggaggcagtttcgagtgggcggaggatttccccctcctcccccctccaggccccccgc

SEQ ID NO: 372611 - DNA, 120 bp, Artificial Sequence
  ENSG00000142235_36 (sequence is synthesized)
tgtgcttctcccgcttctccgtctcgcctgcgctggagaccccggggccacccgcccgggcccccgacgcccggcccgcaggccccgtggagaattgattccccgaagacccgaccccgc

SEQ ID NO: 372612 - DNA, 120 bp, Artificial Sequence
  ENSG00000142235_37 (sequence is synthesized)
tgcaccctcagaagaggggttgagaatggaatcctctgtggatgacggcgccactgccaccaccgcagacgccgcctctggggaggcccccgaggctgggccctccccctcccactcccc

SEQ ID NO: 372613 - DNA, 120 bp, Artificial Sequence
  ENSG00000142235_38 (sequence is synthesized)
taccatgtgccaaacgggaggccccgggcccccgccccccagccccccagatggctcccctgacccccctgaccccctcggagccaaatgaggcaggaatccccccgcccctccatagag

SEQ ID NO: 372614 - DNA, 120 bp, Artificial Sequence
  ENSG00000142235_39 (sequence is synthesized)
agccgcctttctcggaactgaactgaactcttttgggcctggagcccctcgacacagcggaggtccctcctcacccactcctggcccaagacaggggccgcaggcttcggggacccggac

SEQ ID NO: 372615 - DNA, 120 bp, Artificial Sequence
  ENSG00000142235_40 (sequence is synthesized)
cccccatttcgcgtctcccctttccctccccagcccggcccctggaggggcctctggttcaaaccttcgcgtggcattttcacattatttaaaaaagacaaaaacaactttttggaggaa

SEQ ID NO: 372616 - DNA, 120 bp, Artificial Sequence
  ENSG00000142235_41 (sequence is synthesized)
cctctgtccgcctctccatcccttcatccgtctgtcccttcaaagagggggaggggggtacctgagccagcaagcagcccctccctccccctgtcctgcgtctcctgcccctctcctggg

SEQ ID NO: 372617 - DNA, 120 bp, Artificial Sequence
  ENSG00000142235_42 (sequence is synthesized)
ccgggaggaggccagggtcgcgcgggtccccatggctgggggctgagggcccgcccccccctcctccccagccgccaccacctccacctccctgccatcctcgacaagatgcctgccccc

SEQ ID NO: 372618 - DNA, 120 bp, Artificial Sequence
  ENSG00000142235_43 (sequence is synthesized)
gtcttttctcactccccgccccccgattgcatcccctccaccctgcagcctaggccgtgcgccccctccctcccgcgatgaacctgcctcagtttctccaatgagacaccctgagggcag

SEQ ID NO: 372619 - DNA, 120 bp, Artificial Sequence
  ENSG00000142235_44 (sequence is synthesized)
ccccttcccctgagccccccgatgaggacggctgcgctctgcggggagtgtgcactgcccggccggtgtgcgccacggctgcgcgttttggtggaaagccctgggcccctgctgggggtt

SEQ ID NO: 372620 - DNA, 120 bp, Artificial Sequence
  ENSG00000142235_45 (sequence is synthesized)
ggggttgggggctgggtcgcctgcgccgagtgttgctgaggctgcgtcttgggtgcgcagctccggcccagcctcacccaggggaacgcctcgcaggtgctcacggacgatggagaggtc

SEQ ID NO: 372621 - DNA, 120 bp, Artificial Sequence
  ENSG00000142235_46 (sequence is synthesized)
ctgaggctgcgtcttgggtgcgcagctccggcccagcctcacccaggggaacgcctcgcaggtgctcacggacgatggagaggtccgcgcccagggtgggagtccgcgcttccgggtgtg

SEQ ID NO: 372622 - DNA, 120 bp, Artificial Sequence
  ENSG00000142235_47 (sequence is synthesized)
tccccgatggaccgggttccagtcccagctttgccactccccggcttgtgtgccttggggcaggtgactaccccgcgctgtgcctcagttgcctcatctgtacaatgggcatgattaaaa

SEQ ID NO: 372623 - DNA, 120 bp, Artificial Sequence
  ENSG00000142235_48 (sequence is synthesized)
aatacctgtctcagagggcggttgtgaggattgagaggtaattctgtacgtgtaaaacgctgcggacgatacctggcacagactaaatactcataagaataaatacattaaataaactat

SEQ ID NO: 372624 - DNA, 120 bp, Artificial Sequence
  ENSG00000142235_49 (sequence is synthesized)
acatgaccacccccctgggccttagccggcagcacctgagctacctgcaggagattgggagtggctggtttgggaagtcagcgcctccctcctcactccattgaccactccgccgcgcca

SEQ ID NO: 372625 - DNA, 120 bp, Artificial Sequence
  ENSG00000142235_50 (sequence is synthesized)
agagaagcaggagaagccagaagggtcagatgaataagaggaggagccagtgcagaggaaaaggagaggagacttggaggaaccagggcgacctggccctgcgcaactgcctgctgacct

SEQ ID NO: 372626 - DNA, 120 bp, Artificial Sequence
  ENSG00000142252_0 (sequence is synthesized)
accagtagccgcggacctcggtgagtacaaggtggtggggggtcgccagcaggttccctctccccggccccagctctggacgctcaccccagtgcaacgccctgagtgacggaaagaggt

SEQ ID NO: 372627 - DNA, 120 bp, Artificial Sequence
  ENSG00000142252_1 (sequence is synthesized)
ctggcggcttctctgttgacaactcagctggttccacaccctggcaattgtgaagagttggccaaatgtttgtccactgagctgatctcctctctggagcaccggggccaccaggaggga

SEQ ID NO: 372628 - DNA, 120 bp, Artificial Sequence
  ENSG00000142252_2 (sequence is synthesized)
gccaagacaatgcaaactccagtgaacattcccgtgcctgtgctccggctgccccggggccctgatggcttcagccgtggctttgcccctgatggacgcagagcccccttgaggccagag

SEQ ID NO: 372629 - DNA, 120 bp, Artificial Sequence
  ENSG00000142252_3 (sequence is synthesized)
gttcctgaaatccaggagtgtcccatagctcaagaatccctggaatcccaggagcagcgggcacgagccgcccttcgggagcgttacctccgcagcctgctggccatggtgggtcatcag

SEQ ID NO: 372630 - DNA, 120 bp, Artificial Sequence
  ENSG00000142252_4 (sequence is synthesized)
gtgagcttcacgttgcacgagggtgtgcgtgtggccgcccactttggagccaccgacctggatgtggccaacttctacgtgtcacagctgcagactcccataggtgtgcaagcagaggcg

SEQ ID NO: 372631 - DNA, 120 bp, Artificial Sequence
  ENSG00000142252_5 (sequence is synthesized)
ctgctccgatgtagtgacattatttcatataccttcaagccataaagatattgtgttcacttttctgcttgaggctaaggcactgtatcccaggcctcccaatgttcccgagccaggaac

SEQ ID NO: 372632 - DNA, 120 bp, Artificial Sequence
  ENSG00000142252_6 (sequence is synthesized)
aattctgcaactctaggaattctaagatcccattggaaggaatgctctacctcacagaactctgaaccctacagaaatatgggcctgctgccatttcctgaagaccggggcatcggggtg

SEQ ID NO: 372633 - DNA, 120 bp, Artificial Sequence
  ENSG00000142252_7 (sequence is synthesized)
gggtgataaaggatacaacctgcacagggggaagttattaaagaggctgcaaagtccagccaccctgaagatactccccagtgctcccctcctgctaaagaaccagttaccccaggaaaa

SEQ ID NO: 372634 - DNA, 120 bp, Artificial Sequence
  ENSG00000142252_8 (sequence is synthesized)
ttcgactcctgtttttctttaattaactataccgacggggatggagtcatctttaggggctggtagggtggttatccaagggctgaatccagtggagctgggccaagtacgacaggagtc

SEQ ID NO: 372635 - DNA, 120 bp, Artificial Sequence
  ENSG00000142252_9 (sequence is synthesized)
cagataaaggtgtaggggctgcacggccgcaagtctcctggaaaggctggagtgaccggcatgccgggattgggagattaggatttgatttcattttggggcgggcggtggctcgtgctg

SEQ ID NO: 372636 - DNA, 120 bp, Artificial Sequence
  ENSG00000142252_10 (sequence is synthesized)
ggtcacgtggtcgtgcccaagcgctcctcctgttgccccacctgtggttgctgtggactgcacacgacagcagattcgctgtcccctcgttggaggcgaatggtcggaccccgagtggcg

SEQ ID NO: 372637 - DNA, 120 bp, Artificial Sequence
  ENSG00000142252_11 (sequence is synthesized)
gcgcccctgataaaaggccgaggattcgcgatcagggtgcaacttcactccctcctcttttctctccagccttgcagcgtggccgttcacatcacgcgcttcactaagcctcctatcact

SEQ ID NO: 372638 - DNA, 120 bp, Artificial Sequence
  ENSG00000142252_12 (sequence is synthesized)
agtaacctttcagcgcattgtttaaaaagaaagcagtttctgtccctttctgtagttcctttaagttcaggatgtaagcgaagccttccattaagtaaaggtgagtgtcgtttcgtctca

SEQ ID NO: 372639 - DNA, 87 bp, Artificial Sequence
  ENSG00000142252_13 (sequence is synthesized)
caatcctctcaccttggcctcctgagatccctgttgtccttgtttggcccagaggctggaagatcacttgaggccagaagttcaaga

SEQ ID NO: 372640 - DNA, 120 bp, Artificial Sequence
  ENSG00000142273_0 (sequence is synthesized)
atcccagccgcaccggtccttcccggcacacgcgaggctcccatggctctggcggtggccccgtgggggcgacagtgggaagaggcccgcgccctgggccgggcagtcaggatgctgcag

SEQ ID NO: 372641 - DNA, 120 bp, Artificial Sequence
  ENSG00000142273_1 (sequence is synthesized)
cgcctagaagagcaatgcgtcgacccccggctgtccgtgagtcccccttcgctgcgggacctgctgccccgcacagcgcagctgcttcgagaggtggcccattctcggcgggcggccggc

SEQ ID NO: 372642 - DNA, 120 bp, Artificial Sequence
  ENSG00000142273_2 (sequence is synthesized)
ggaggcggccccgggggtcccggcggctctggggactttctactcatctacctggccaatctggaggccaagagcaggcaggtggccgcgctgctgcctccccggggccgaaggagtgcc

SEQ ID NO: 372643 - DNA, 120 bp, Artificial Sequence
  ENSG00000142273_3 (sequence is synthesized)
aacgacgagctcttccgggcgggctccagactcaggcgacagctggccaagctggccatcatcttcagccacatgcacgcagagctgcacgcactcttccccgggggaaagtactgtgga

SEQ ID NO: 372644 - DNA, 120 bp, Artificial Sequence
  ENSG00000142273_4 (sequence is synthesized)
cacatgtaccagctcaccaaggcccccgcccacaccttctggagggaaagttgcggagcccggtgtgtgctgccctgggctgagtttgagtccctcctgggcacctgccaccctgtggaa

SEQ ID NO: 372645 - DNA, 120 bp, Artificial Sequence
  ENSG00000142273_5 (sequence is synthesized)
ccaggctgcacagccctggccttgcgcaccaccattgacctcacctgcagcgggcacgtgtccatcttcgagttcgacgtcttcaccaggctctttcagccatggccaacactcctcaag

SEQ ID NO: 372646 - DNA, 120 bp, Artificial Sequence
  ENSG00000142273_6 (sequence is synthesized)
cagtcaaccacccaggctacatggccttcctcacctatgatgaggtccaagagcgtctgcaggcctgcagggacaagccaggcagttacatcttccggcccagctgtactcgcctggggc

SEQ ID NO: 372647 - DNA, 120 bp, Artificial Sequence
  ENSG00000142273_7 (sequence is synthesized)
agtgggccatcggctatgtgagctcagatggcagcatcctgcagaccatccctgccaacaaacccctgtcccaggtgctcctggagggacagaaggacggcttctacctctacccagatg

SEQ ID NO: 372648 - DNA, 120 bp, Artificial Sequence
  ENSG00000142273_8 (sequence is synthesized)
gaaagacccacaacccagacctgactgagctcggccaggcagaaccccagcagcgcatccacgtgtcagaggagcagctgcagctctactgggccatggactccacatttgagctctgca

SEQ ID NO: 372649 - DNA, 120 bp, Artificial Sequence
  ENSG00000142273_9 (sequence is synthesized)
agatctgtgctgagagcaacaaggatgtgaagattgagccgtgcgggcacctgctctgcagctgctgcctggctgcctggcagcactcggacagccagacctgccccttctgccgctgcg

SEQ ID NO: 372650 - DNA, 120 bp, Artificial Sequence
  ENSG00000142273_10 (sequence is synthesized)
agatcaagggctgggaggccgtgagtatctaccagttccacggtcaggctactgctgaggactcagggaacagcagtgaccaggaaggcagggagttggagctggggcaggtgccccttt

SEQ ID NO: 372651 - DNA, 120 bp, Artificial Sequence
  ENSG00000142273_11 (sequence is synthesized)
cggctcctccattgcccccacggccagatctgccccccaggaagcccagaaatgcccagccgaaagtgagactcctaaaggggaactcccctccagctgcgctgggaccccaggaccctg

SEQ ID NO: 372652 - DNA, 120 bp, Artificial Sequence
  ENSG00000142273_12 (sequence is synthesized)
ccccggcctgaaggccagggcacccagatgtgctgctcaagggagccccaagggctggaagggggttgtgaaaccgaaataaactgccaagcctggtctgtcctccagggtgcaaaggaa

SEQ ID NO: 372653 - DNA, 80 bp, Artificial Sequence
  ENSG00000142279_0 (sequence is synthesized)
cgggctccgggcttcgggcggacgatgcggcggcccggccggagcggcggcgggaagcggaggcggaggtgacgcgccag

SEQ ID NO: 372654 - DNA, 80 bp, Artificial Sequence
  ENSG00000142279_1 (sequence is synthesized)
ggacgaggcggccctactcctggccgggctggccctgcgggagctggagcccgggtgcggctctcccggtcgggggcggc

SEQ ID NO: 372655 - DNA, 80 bp, Artificial Sequence
  ENSG00000142279_2 (sequence is synthesized)
cggacggactgagccgcggggagcggggtccccggcgcgcggcggttccggagctcagcgcgcagcctgcgggcagccca

SEQ ID NO: 372656 - DNA, 80 bp, Artificial Sequence
  ENSG00000142279_3 (sequence is synthesized)
cccacgggccagcctggcggggtccgacggcggcggcggtggcggcagcgcccgatccagcggcatcagcctgggctacg

SEQ ID NO: 372657 - DNA, 120 bp, Artificial Sequence
  ENSG00000142279_4 (sequence is synthesized)
cgctccggtcgctcggacccgcgtcccggtcccgggccgccttcggtgggcagcgcccgctccagcgtttccagcctcggctcccggggctcggccggcgcctacgctgacttcctcccg

SEQ ID NO: 372658 - DNA, 80 bp, Artificial Sequence
  ENSG00000142279_5 (sequence is synthesized)
ctgcactcccgctgccccctggccgggagggcggcccaagcgcggccgagcggcggctggaggcgctcacccgggagctg

SEQ ID NO: 372659 - DNA, 120 bp, Artificial Sequence
  ENSG00000142279_6 (sequence is synthesized)
gctggagcgggcgctcgaggcgcgcacggcgcgggactacttcggcatttgcatcaagtgtgggcttggcatctacggagcccagcaggcgtgccaggcaatggggagtctttatcacac

SEQ ID NO: 372660 - DNA, 120 bp, Artificial Sequence
  ENSG00000142279_7 (sequence is synthesized)
tgactgcttcacctgcgactcgtgtgggagacgactccgtgggaaggcgttctacaacgtgggtgagaaagtgtactgccaggaggacttcctgtactccgggttccagcagacggccga

SEQ ID NO: 372661 - DNA, 120 bp, Artificial Sequence
  ENSG00000142279_8 (sequence is synthesized)
caaatgcagcgtgtgtggacatctcatcatggaaatgatcctgcaggccctgggcaagtcctaccacccaggctgcttccggtgctccgtgtgcaatgagtgcctggacggggttccctt

SEQ ID NO: 372662 - DNA, 120 bp, Artificial Sequence
  ENSG00000142279_9 (sequence is synthesized)
caccgtggacgtggagaacaacatctactgcgtgcgagactatcacacggtttttgcaccaaaatgcgcctcctgtgcccgtcctatcctccctgcacagggctgcgagacaaccatccg

SEQ ID NO: 372663 - DNA, 120 bp, Artificial Sequence
  ENSG00000142279_10 (sequence is synthesized)
tgtggtgtccatggacagagactaccacgtggcatgttaccactgtgaggactgcgggctgcagctgagcggggaggagggacgccgttgctatcccctggcgggccacctactgtgtcg

SEQ ID NO: 372664 - DNA, 120 bp, Artificial Sequence
  ENSG00000142279_11 (sequence is synthesized)
tcgttgccacctgcggcgcctccaacctgggcctcttccctcacccactgtgcacgtcactgagctctgagcaggggaaaacccgtccctgggccggggtgggtgtgggtgtggagggag

SEQ ID NO: 372665 - DNA, 120 bp, Artificial Sequence
  ENSG00000142279_12 (sequence is synthesized)
ggcccgcgtgggtggccctggtcagcgtcaggggagctccctccaatcagtttcccaccgagctgctgtctgcaggggccggacccccgcgtggaagcttctatttattcaccgtctgtg

SEQ ID NO: 372666 - DNA, 120 bp, Artificial Sequence
  ENSG00000142279_13 (sequence is synthesized)
cctgctcaagtcacttccctgcgggccctgcctcccacccaccccatcaccagctttccacttggaggccccctgtgccctgcagcctcagggtaggccgtgggtcaccaggctggagag

SEQ ID NO: 372667 - DNA, 120 bp, Artificial Sequence
  ENSG00000142279_14 (sequence is synthesized)
ggcccctgccttggccaggggtgcgaggtgacccggctgcattgctgggtgggagctgctgtctgttgttcaggggcctggcccccgccctcccccccgaccccgacctcgcaaagcgca

SEQ ID NO: 372668 - DNA, 120 bp, Artificial Sequence
  ENSG00000142279_15 (sequence is synthesized)
ctcccgggcagggtgtggtctggaaggcggggctggcggggacatgggtgttcctgcatctcctagcgcagttcctgctggtgggtggaagggtgcctggtttaggcggggtcccaggag

SEQ ID NO: 372669 - DNA, 120 bp, Artificial Sequence
  ENSG00000142279_16 (sequence is synthesized)
ggggtgaggggtgacacccttggggagggggcctgcaaagggcactgcctgtggccacgtggtgtctgtgggaattggtcctggggactttgatgggtgtttgcggccccagttgccgcc

SEQ ID NO: 372670 - DNA, 120 bp, Artificial Sequence
  ENSG00000142279_17 (sequence is synthesized)
ctgctccctcttccagggctcctggcttgggccccccgacccccctgctcagctcgggaaaatccccgtgcggctccagccccgggtcacgctcaggagcgatgagaggggcgccctggc

SEQ ID NO: 372671 - DNA, 120 bp, Artificial Sequence
  ENSG00000142279_18 (sequence is synthesized)
cacgcttcaggaaagcctgtgtctgcgcgcggggcaaggggctccacgacaaaaggacaagatttgacttaaattaagtttttcccttgaggatattttcattttctttaaaagaatata

SEQ ID NO: 372672 - DNA, 120 bp, Artificial Sequence
  ENSG00000142279_19 (sequence is synthesized)
attttcttctaagatcttggaccagccttgttatttttaaagcaaatgccggcaaactcacaagtgtctagtttgtctgttacggagctggttttcaggtggtaagaaccttgtggtttc

SEQ ID NO: 372673 - DNA, 120 bp, Artificial Sequence
  ENSG00000142279_20 (sequence is synthesized)
aggacttttgtcctgaaattcctctaaaacttcgccacgcgtgtccacctttcagactttagggtagtgtggggttccgtgtgtgtccgggtgttaagggcggtcgccccatgaaatgca

SEQ ID NO: 372674 - DNA, 120 bp, Artificial Sequence
  ENSG00000142279_21 (sequence is synthesized)
gtgtggaggtccctccgtgctccccgggacacactgacgggaatgtggggtctggacatgggaggccctggtcctgatgcggaatccccaggggttcaggggacatctggactgaagtca

SEQ ID NO: 372675 - DNA, 120 bp, Artificial Sequence
  ENSG00000142279_22 (sequence is synthesized)
ctcgcccctgggagagcctggacccacctcttggctgctgctctccccttcctcccccaccgtcaggtgtgagttctgtgaatcactcgcggggctgggctaggctccgggaaccagcag

SEQ ID NO: 372676 - DNA, 120 bp, Artificial Sequence
  ENSG00000142279_23 (sequence is synthesized)
ggctgtccaggccgagcccaagggaacaaacaccaggaggcgcccgcagggaagtggcggcttcggagtccagcagggccgaggcatggcgcgggcgccacctggtgggctgagccggca

SEQ ID NO: 372677 - DNA, 120 bp, Artificial Sequence
  ENSG00000142279_24 (sequence is synthesized)
agtacaggggtggtcagggagccttagccagggacttacacagcgtggagagcgctgcatcttagagtggggccttcagcaggaccaggggccacttcttggaggaggtgatcccactgg

SEQ ID NO: 372678 - DNA, 120 bp, Artificial Sequence
  ENSG00000142279_25 (sequence is synthesized)
gggccacttcttggaggaggtgatcccactggggccagagagtaaagtccaggcgtggaggctccggtgctggctctctcctgctagctgagctgctttttcttttcttttctttttttt

SEQ ID NO: 372679 - DNA, 70 bp, Artificial Sequence
  ENSG00000142279_26 (sequence is synthesized)
gtcaggctggtctccaactgctgacctcagaccactgtgcccggctttttttttttttttttttgagaca

SEQ ID NO: 372680 - DNA, 88 bp, Artificial Sequence
  ENSG00000142279_27 (sequence is synthesized)
ttttttgagacagggtctcgttctgtcgcccaggctggagtgcgttggcacaatctgggcctactgcaacctctgcctccacagtagc

SEQ ID NO: 372681 - DNA, 76 bp, Artificial Sequence
  ENSG00000142279_28 (sequence is synthesized)
ctactgcaacctctgcctccactacaggtgtgccccatgacgcccagctattttttttttttttttttttaaagac

SEQ ID NO: 372682 - DNA, 120 bp, Artificial Sequence
  ENSG00000142279_29 (sequence is synthesized)
tggagtgcagtggcgtgatctgggctgactgcaacctctgcctcccacgttcaagcattctgcctcagccttccaagtgctgggattacaagtgtgcgccaccaggcctggctaattttt

SEQ ID NO: 372683 - DNA, 75 bp, Artificial Sequence
  ENSG00000142279_30 (sequence is synthesized)
atgttggccagactggtctggaactcctggcctcaagcgatccatccgccttgacctactttttgtatttttagt

SEQ ID NO: 372684 - DNA, 120 bp, Artificial Sequence
  ENSG00000142279_31 (sequence is synthesized)
gccactgtgcctggccttactttttgtatttttagttgagagggggtttcagcatgttggccaggttggtgtcaaactcctgacctcaagcgagcccaccttggcctcccagagtgttgg

SEQ ID NO: 372685 - DNA, 120 bp, Artificial Sequence
  ENSG00000142279_32 (sequence is synthesized)
caccgtgcctggcctgggctcctttgccttctaactggtcagttgcaaagctgtcctctgaactgtcctctctgcttcctccctcaaacctgctttgagccgggtttctccttgttgcca

SEQ ID NO: 372686 - DNA, 120 bp, Artificial Sequence
  ENSG00000142279_33 (sequence is synthesized)
acccggtccttctcctccccttcctttgcatgtgccatggtgggccctgtgcttatatccatggggttgcttcactgaaccctgctccatcccggtcaccatgcacgctcctgccagctg

SEQ ID NO: 372687 - DNA, 120 bp, Artificial Sequence
  ENSG00000142279_34 (sequence is synthesized)
gcctgagtcatcacagcttggagtccccccaaccccacccaagtaacacactttgtcaaaggtcgcagtcaagggactgcataggcccttggggcagtggcctcaccaggccacactctg

SEQ ID NO: 372688 - DNA, 120 bp, Artificial Sequence
  ENSG00000142279_35 (sequence is synthesized)
ccctttctttctgggcccctgggccccgcattgccttctgtcagggctggtggccactgctccacctcctcccccggagctgtgcatggcagttccctccgtgggagccactctcccggg

SEQ ID NO: 372689 - DNA, 120 bp, Artificial Sequence
  ENSG00000142279_36 (sequence is synthesized)
gtttcttcctctatgaagaaaccttggcctctatgaagtcaggccccagttgtgacacctcacttgacacccagaagtcttggcctctgctctccaagctcatttgccaacagcagtatc

SEQ ID NO: 372690 - DNA, 120 bp, Artificial Sequence
  ENSG00000142279_37 (sequence is synthesized)
tccatttcatgcccaggggtgacactgaccccatgattatagagatggaggatgctgtgtgagaactgggctgagccatgccagtggcctgtgaccctccagccctggatgccacccccc

SEQ ID NO: 372691 - DNA, 120 bp, Artificial Sequence
  ENSG00000142279_38 (sequence is synthesized)
acctgcccaaggggacccccactgatgtggtctctgctgacacctgtgcctgtgcctggggtccctgtcatccttccctggtctgagtggcaagtctcctgccatccctgtccccgctat

SEQ ID NO: 372692 - DNA, 120 bp, Artificial Sequence
  ENSG00000142279_39 (sequence is synthesized)
gcggtgagctcttcagcttgggcccgcctggtggctcacgctactctccaccgtgcctggattagggcgagtgctgaggctggagctgaccctgccctggccttcagggtcttggcttag

SEQ ID NO: 372693 - DNA, 120 bp, Artificial Sequence
  ENSG00000142279_40 (sequence is synthesized)
ttccacctgcactggtccaagtccagcctggttgcctagtgaaggatccacagtgggtacataaagggccaagcgctgtccacgtggacacatcctatgtgggcgtgagtgctccctgca

SEQ ID NO: 372694 - DNA, 120 bp, Artificial Sequence
  ENSG00000142279_41 (sequence is synthesized)
atccccagacaagcctgcctctcagcggggctcagctcagagacatagaccctggagggctgagtctgcctgtgtgcgtgtgtgtgtgcatgtgtgtgtgtgtgagagagagacagggat

SEQ ID NO: 372695 - DNA, 120 bp, Artificial Sequence
  ENSG00000142279_42 (sequence is synthesized)
ggggggagagtgtgtgtatcaatgagagagacggagaaagtcgtgtgtgaaagggattgaatatttcagaaaatgaatgagagagattgggagagatggtgggaggtggagtgggagaga

SEQ ID NO: 372696 - DNA, 120 bp, Artificial Sequence
  ENSG00000142279_43 (sequence is synthesized)
gacctgttgtttaagagggagactgagtgactccgagaatgagggggaaagatacggagacaggataagctgcagagagagagggagagagggattgaactggagcgagaccaacagagc

SEQ ID NO: 372697 - DNA, 120 bp, Artificial Sequence
  ENSG00000142279_44 (sequence is synthesized)
cctgacgctgggatttgggaggatttggtgggttctcagtgaccccactgaggcctgacccaccagtggaaaaggctcacctcctgtaagtgaccacactgtggggtgtaattgtgtgtt

SEQ ID NO: 372698 - DNA, 120 bp, Artificial Sequence
  ENSG00000142279_45 (sequence is synthesized)
tgtgtgtgtgtgtgtctgtgtgtgtgttggcgtcgccctgatggcctcttggagggtcctggggtgggtgggtcttgggcatggggtgccctctgccctcattctttcttcatccgggct

SEQ ID NO: 372699 - DNA, 120 bp, Artificial Sequence
  ENSG00000142279_46 (sequence is synthesized)
tccgggctccctgcccctgttggggtgggaagcacagatgtcagcttgctgagctgcaggtaccatgacaatcccaagtggaactgctcttggggggctgtgtggggaggggccactggg

SEQ ID NO: 372700 - DNA, 120 bp, Artificial Sequence
  ENSG00000142279_47 (sequence is synthesized)
caggatttatgagacctgggcagaggtgtggggagcagtgtgggccagagggtgactgggggttggggtgagttgggtagggtgcagctgtgctcatccctcccacccagccccaccctg

SEQ ID NO: 372701 - DNA, 120 bp, Artificial Sequence
  ENSG00000142279_48 (sequence is synthesized)
aggctggtctctagctcgtgagcagaggccgagagaaggcccttccccatcacggggtcctgtctcgtccggtctggcagccctcatctggccaggaggccagcaaggacttccggtgcc

SEQ ID NO: 372702 - DNA, 120 bp, Artificial Sequence
  ENSG00000142279_49 (sequence is synthesized)
acactcgggaggggtgagggctttgctggctgcagggttaggagtaggcgcagcctgtggggcccaggagaaccttggggtggggatcaagaacaggtctgggagaggggggagcatcag

SEQ ID NO: 372703 - DNA, 120 bp, Artificial Sequence
  ENSG00000142279_50 (sequence is synthesized)
ggccacctgcagcctccacccagcccagctctggaggctttgcccccaccccgcccccatggtaggcgtgttccctagaggctggtggggacctgggagaggggcatgtgcacacatttc

SEQ ID NO: 372704 - DNA, 120 bp, Artificial Sequence
  ENSG00000142279_51 (sequence is synthesized)
atggggatgatgggggactctgggagccagcctgggtgggggctcagaggtgggaggggccctgaggcctgaggtggtggaaggagctcacctatctcaggcccaggcccttgccaggtt

SEQ ID NO: 372705 - DNA, 120 bp, Artificial Sequence
  ENSG00000142279_52 (sequence is synthesized)
cctagtccctggccggataccccagggtggcctgggatcctggagagtgctcaggaaactcaggaggagtgtggacgcggctcctctccttccacccacttccctggccctgagggcatt

SEQ ID NO: 372706 - DNA, 120 bp, Artificial Sequence
  ENSG00000142279_53 (sequence is synthesized)
gctgggccaccatcccagacctggggcatgtgtcacagggctgccaggagggcatagggcccaaggattccccagggatgccagcccccctgtgggccctcaggactggtagccctgggc

SEQ ID NO: 372707 - DNA, 120 bp, Artificial Sequence
  ENSG00000142279_54 (sequence is synthesized)
gcgcacactcctctccacgctgcgcacgtgaacccgcccgggtcacacacctgccctgccatggtgacaggactgtgtgggatctctgcctccctgcctgaagttcctgccattgggacc

SEQ ID NO: 372708 - DNA, 120 bp, Artificial Sequence
  ENSG00000142279_55 (sequence is synthesized)
tgtcacaggcacacaggacacagctggctcaccctcttctctgacagcacctgggccatccctgatagtgatcagccctgctgaggaagggttagggtgggctgcaggctggaggccagg

SEQ ID NO: 372709 - DNA, 120 bp, Artificial Sequence
  ENSG00000142279_56 (sequence is synthesized)
gagaggccctggaccgggcctggcatttactcaccctcctcccatcccacactgtcccggagcctccatctccacctgagccagctgggttgatgcggatttccaggcatcctcagcggg

SEQ ID NO: 372710 - DNA, 120 bp, Artificial Sequence
  ENSG00000142279_57 (sequence is synthesized)
acccatggcctggggtcaccaccttcctgagctgcgtggatctcagccaggacttctcgtccctgagaacagattggggctgggagtcccagcccgtccctggaccagccctgccatcag

SEQ ID NO: 372711 - DNA, 120 bp, Artificial Sequence
  ENSG00000142279_58 (sequence is synthesized)
cttgcccagcctagttccctttctcttctgcgctctgaatgtgcactccgcgtgttcagatgctcatggtttctgatgagaagttggctgtgtctctcacggagcctctctcggaggtga

SEQ ID NO: 372712 - DNA, 120 bp, Artificial Sequence
  ENSG00000142279_59 (sequence is synthesized)
tgagtgacttttctcttgctgccgtcaagattcctggctgtggattggatggatgggaagctctgtccctgaacagcccttgtgactatggggctgtccttccacagtgtgcactgaggg

SEQ ID NO: 372713 - DNA, 120 bp, Artificial Sequence
  ENSG00000142279_60 (sequence is synthesized)
tgcaggccaaaccttttaaagaataaacagaaagaaatcggctctttcacttcttgcaagttggtgaaaacagactcttccagggaattttaactttttatcatcctatttactctggaa

SEQ ID NO: 372714 - DNA, 90 bp, Artificial Sequence
  ENSG00000142279_61 (sequence is synthesized)
cagggaattttaactttttatcatcctatttactctggaaagccttgtctcgtgttttagagcttgtagggtttaataaaactagttaac

SEQ ID NO: 372715 - DNA, 73 bp, Artificial Sequence
  ENSG00000142279_62 (sequence is synthesized)
ccagcactttgggaggccgtggcggataggtcacttgaggtcaggagttcgagacactagccaggtgtggtgg

SEQ ID NO: 372716 - DNA, 61 bp, Artificial Sequence
  ENSG00000142279_63 (sequence is synthesized)
ggctgaggcacgagaatcgcttgaactggggagactgctatctcaaaaataaataaataaa

SEQ ID NO: 372717 - DNA, 120 bp, Artificial Sequence
  ENSG00000142279_64 (sequence is synthesized)
taaataaataaatgaatataaataaaactggttaaaaattgagtctccctgaagtaggtgctctttcccgtgaaaactacttttttggtttggtttgaaggtaagaaagagcgggagaaa

SEQ ID NO: 372718 - DNA, 70 bp, Artificial Sequence
  ENSG00000142279_65 (sequence is synthesized)
ttttttggtttggtttgaaggtaagaaagagcgggagaaactttgctcttttcatttaataattgtgttc

SEQ ID NO: 372719 - DNA, 120 bp, Artificial Sequence
  ENSG00000142279_66 (sequence is synthesized)
gaaatattttattattagatagcagtgtcactaataagttttaagttgtccagagttaattgtgaatatcagaacaggattcttataacaaaagcagttgtcttaagatgaatggctcat

SEQ ID NO: 372720 - DNA, 120 bp, Artificial Sequence
  ENSG00000142279_67 (sequence is synthesized)
ataaaccaaaaaaaaaaaaaaaaaaattccagactgtcccctttggatgccagttgaatctgtgtcttgtgccccctgagggtctgcccggtcacatccccttgtcttctctagggttca

SEQ ID NO: 372721 - DNA, 120 bp, Artificial Sequence
  ENSG00000142279_68 (sequence is synthesized)
tgcccggtcacatccccttgtcttctctagggttcacggggatccttctcatcctcttctaggtaccaggttccattagttttgtctgtcagtcttgtcaccagggagctggagacctgg

SEQ ID NO: 372722 - DNA, 120 bp, Artificial Sequence
  ENSG00000142279_69 (sequence is synthesized)
aggggagccctgatgtctgggacagtgcttgtcagtggatgggcttttgcatagggggatggggtagggagtgagtcattgcattatagacttggactaggtggatgctatttttcatgg

SEQ ID NO: 372723 - DNA, 120 bp, Artificial Sequence
  ENSG00000142279_70 (sequence is synthesized)
tggtggtgatgggagaagctgttgggttatttcacagaggaagcccgagctccctgctgaagatgataaatgatgcacagatttcaatccatcctacggcttcagcctccagtcctggtc

SEQ ID NO: 372724 - DNA, 120 bp, Artificial Sequence
  ENSG00000142279_71 (sequence is synthesized)
ccacacatctcctggagcagagcctgattcccagcctctgtagctggttgaggagcaaataggtttccctgtcctgactccaccttggagcaccttcccttgagacccaccaggctctct

SEQ ID NO: 372725 - DNA, 120 bp, Artificial Sequence
  ENSG00000142279_72 (sequence is synthesized)
ttcagtcacagcatcttcctcctgctccatgtggttgaaatctcaggtcctctaaggatccctcctcattctctgttagtgtgaggtgggacttttttttttgttttgagatggagtctt

SEQ ID NO: 372726 - DNA, 70 bp, Artificial Sequence
  ENSG00000142279_73 (sequence is synthesized)
tgtcgcccaggctggagttcagtggcaggatttcagctcagtacagcctcggcctcccgggttcaagtga

SEQ ID NO: 372727 - DNA, 74 bp, Artificial Sequence
  ENSG00000142279_74 (sequence is synthesized)
ctgggattacaggcacctgccatcactcccagctaattttttatatttttagtgaattaagtgatctacccgcc

SEQ ID NO: 372728 - DNA, 120 bp, Artificial Sequence
  ENSG00000142279_75 (sequence is synthesized)
ataggtgtgagccactgcacctggcctgtgaggtgggaagtttcaatactcccttagccttggtttggtcaccagaaggaggggacatgagtgaaggtcccagtccaccctatgcaagca

SEQ ID NO: 372729 - DNA, 120 bp, Artificial Sequence
  ENSG00000142279_76 (sequence is synthesized)
agcagaagcctctttggttttagttttaaaggtgcattgacccatgtacctttgcatggacatgttcttatttggggttacctttgtgttgactttgtgtggccaggaccctggagatga

SEQ ID NO: 372730 - DNA, 120 bp, Artificial Sequence
  ENSG00000142279_77 (sequence is synthesized)
ggccaggatggccgactccaaccccttagctgcttccttgccctgtatggagcagctcagcctgggatgcaggagcagctgtgtccctccgctcccgccaggcctctccccctgccttct

SEQ ID NO: 372731 - DNA, 120 bp, Artificial Sequence
  ENSG00000142279_78 (sequence is synthesized)
gggactggaagttcctaggagtccggaagtgctgagctgcaggaggcttctcatggccccaggacacacccatcaccccatctatattgagatgttatctagagagacgcctgtagtaaa

SEQ ID NO: 372732 - DNA, 120 bp, Artificial Sequence
  ENSG00000142279_79 (sequence is synthesized)
atccgctctgtgacggtggtgtataaacattttctgtgcaaggaccttgccctccttttcaaaaaagtaagtatgactcccacatgaaaattttcttctacaacacgacatacgttcatt

SEQ ID NO: 372733 - DNA, 120 bp, Artificial Sequence
  ENSG00000142279_80 (sequence is synthesized)
gtggtacatttaggaaatttaaatgatttatttcttataaaacatcatctgtttttctactggacctggcttttataaatcatgcggtgataaataatatggcagttagagctgggtgca

SEQ ID NO: 372734 - DNA, 120 bp, Artificial Sequence
  ENSG00000142279_81 (sequence is synthesized)
cttggctcctgcctgtggtcccagctggctgggaggcagaggcaggaggattgcttgaggccaggattccaggctgcagggagctatgactgccagtgcactccagccagggtaacacag

SEQ ID NO: 372735 - DNA, 85 bp, Artificial Sequence
  ENSG00000142279_82 (sequence is synthesized)
gagctatgactgccagtgcactccagccagggtaacacagcgagaccctgtgttagcctgttttcacgctgctgataaagacatc

SEQ ID NO: 372736 - DNA, 120 bp, Artificial Sequence
  ENSG00000142279_83 (sequence is synthesized)
cagcctcccacatggctggggaggcctcccaccaaaaggcactttcatggtggcggcaagagaaaaatgacagagatgcaaaagcagaaacccccgataaaaccatcagatcttgtgaga

SEQ ID NO: 372737 - DNA, 120 bp, Artificial Sequence
  ENSG00000142279_84 (sequence is synthesized)
catgagaacagtgtgggggaaactgcccccatgattcagattctctcccactgggtccctcccacaaaatgtgggaattaagggagtacagttcaagatgagatttgggtggagacacag

SEQ ID NO: 372738 - DNA, 120 bp, Artificial Sequence
  ENSG00000142279_85 (sequence is synthesized)
catgtcctcacatttcaaaaccaatcatgacttcccaacagtcccccaaattcttaactcatttcagcattaacccaaatccagagtccaaagtctaatctgagacaaggcaaggccctt

SEQ ID NO: 372739 - DNA, 75 bp, Artificial Sequence
  ENSG00000142279_86 (sequence is synthesized)
gtcccccaaattcttaactcatttcagcattaacccaaatccagagtccaaagtctaatctgagacaaggcaagg

SEQ ID NO: 372740 - DNA, 120 bp, Artificial Sequence
  ENSG00000142279_87 (sequence is synthesized)
aaattggccaaaacaaaggggttacaggacccatgcaagtccaaaatccagcggggcagtcaaattttgaagctccaaagtgatttcctttgactccatgtctcatatccaagtcacagt

SEQ ID NO: 372741 - DNA, 89 bp, Artificial Sequence
  ENSG00000142279_88 (sequence is synthesized)
tcgcatagctcccctgctggcttctttcatgggctggcattgagtgtctgcggcttttccaggcaccttgtacaagctgtcagtgtatc

SEQ ID NO: 372742 - DNA, 120 bp, Artificial Sequence
  ENSG00000142279_89 (sequence is synthesized)
gcggcttttccaggcaccttgtacaagctgtcagtgtatctaccattctgatgtttggaggatggtggccttcttcttacagctctactaggcagtaccccagtagggatactgtgtttg

SEQ ID NO: 372743 - DNA, 68 bp, Artificial Sequence
  ENSG00000142279_90 (sequence is synthesized)
taggcagtaccccagtagggatactgtgttagagggcccctcccctgcagcaaacttttgcctgggca

SEQ ID NO: 372744 - DNA, 120 bp, Artificial Sequence
  ENSG00000142279_91 (sequence is synthesized)
ttcccaaacctcaattcttgacttctgtacacccgcaggctcaacaccacatggtagctgccaaggttggggtttgcactctctgaaaccatgggctgagctgtaccttggcccctttta

SEQ ID NO: 372745 - DNA, 120 bp, Artificial Sequence
  ENSG00000142279_92 (sequence is synthesized)
cccttttagcaatggctggagtggctgggacacaaggcagcaagtcctaggctgcacacaacatggggactttgggtccagcccacaaaaccattttttgctcctaggcttctgggtctg

SEQ ID NO: 372746 - DNA, 82 bp, Artificial Sequence
  ENSG00000142279_93 (sequence is synthesized)
gcccacaaaaccattttttgctcctaggcttctgggtctgtgatgggaagaccaattaaacattcccctccttgttacttat

SEQ ID NO: 372747 - DNA, 87 bp, Artificial Sequence
  ENSG00000142279_94 (sequence is synthesized)
atttctgcagccagcttgaatttcttctaaaaaaatgggtgtttctttactgcatcgtcaggctgcaaattttccaatttttttaaa

SEQ ID NO: 372748 - DNA, 87 bp, Artificial Sequence
  ENSG00000142279_95 (sequence is synthesized)
tctccatctgagaccacatcagcctggaccttagtattcatatcactatcagcatttttatcaaatattaaacaaattatattcttc

SEQ ID NO: 372749 - DNA, 120 bp, Artificial Sequence
  ENSG00000142279_96 (sequence is synthesized)
ttcatgctgctgataaagacatacctgtgactgggaagaaaaagaggtttaatgggacttgtagctccacatggctgggaggcctcagaatcatggcctgaggcaaaagttatgtggtag

SEQ ID NO: 372750 - DNA, 120 bp, Artificial Sequence
  ENSG00000142279_97 (sequence is synthesized)
aggcaaaagttatgtggtagcggcaagagaaaatgaagggtgcaaaagcggaaaccctcgataaaaccatgagatctcgtgagacatattcactaccatgagaacaatatgggggaaact

SEQ ID NO: 372751 - DNA, 87 bp, Artificial Sequence
  ENSG00000142279_98 (sequence is synthesized)
gagacatattcactaccatgagaacaatatgggggaaactgcccccatgattcaaaatatttcccattgggtccctcccacaacacg

SEQ ID NO: 372752 - DNA, 120 bp, Artificial Sequence
  ENSG00000142279_99 (sequence is synthesized)
tctacaaaaacaaaaacaaaataaaaaaaagtagctacgtgtttgggcctggctttcattatttaccaaggatcaagacctgaacatgaaaatggcaggccaagggttcctgcctttgga

SEQ ID NO: 372753 - DNA, 120 bp, Artificial Sequence
  ENSG00000142279_100 (sequence is synthesized)
tgcacatggccaccttgcccactagaacatctgtgccaagcagtgttcccatcaatcataggaaaataccatttcccgcatccttaccaaccctaggtattgccaataagaaaacaaagt

SEQ ID NO: 372754 - DNA, 120 bp, Artificial Sequence
  ENSG00000142279_101 (sequence is synthesized)
ctgtatcaatttgatgaaaataatttgaatgtgtgcatttgatgagctgtgagaatgagaatcttttgcatgcattggccatgggcttcccttttgtgagttgcctgtgaatgtcctttt

SEQ ID NO: 372755 - DNA, 120 bp, Artificial Sequence
  ENSG00000142279_102 (sequence is synthesized)
cccagtttactagtttgggattgaatattcttacacatttatttggtgaagaacttttatttcaaattatgaaagaaaaaaatacttgctagaattctgatttgaagtgctttcaaattc

SEQ ID NO: 372756 - DNA, 120 bp, Artificial Sequence
  ENSG00000142279_103 (sequence is synthesized)
tgtgttaatttggagctgacaccctttaatattgagtcctggctttgagggtctggtgcgtttcctccattcactgaagttttattttacatctctcagtaaagctttatggattagggt

SEQ ID NO: 372757 - DNA, 120 bp, Artificial Sequence
  ENSG00000142279_104 (sequence is synthesized)
cttcagaagccttacttgtttttctggctctattttcttgtccagaaactccaccactgtgctaaagagacagtggtggaggtgctgggcgtgctgcttttctcctggctctaatgggaa

SEQ ID NO: 372758 - DNA, 120 bp, Artificial Sequence
  ENSG00000142279_105 (sequence is synthesized)
ggccaagaggcaggtcagggtcagactccaccttgagtctggcattggctgttggcatcatgaggaccccacgtattgtactttgataaagttaataaatggaattctcctttacctcaa

SEQ ID NO: 372759 - DNA, 120 bp, Artificial Sequence
  ENSG00000142303_0 (sequence is synthesized)
gacccctccctgcccaggctccaaagaagaagaaaccaaggcccagagagggaggcccaggtgcagggagcaggcgagggaaggatccgtacaggggcccaacactactccaccaaccga

SEQ ID NO: 372760 - DNA, 120 bp, Artificial Sequence
  ENSG00000142303_1 (sequence is synthesized)
agcccccaaaaggagcccggtgatgctgcgaaggctgtgaacaggggaggcggcactgtgggggctgccggcagccggggctggggagagacatgtggacacgtggcctctatggctccc

SEQ ID NO: 372761 - DNA, 120 bp, Artificial Sequence
  ENSG00000142303_2 (sequence is synthesized)
gcctgccagatcctccgctgggccctcgccctggggctgggcctcatgttcgaggtcacgcacgccttccggtctcaagatgagttcctgtccagtctggagagctatgagatcgccttc

SEQ ID NO: 372762 - DNA, 120 bp, Artificial Sequence
  ENSG00000142303_3 (sequence is synthesized)
cccacccgcgtggaccacaacggggcactgctggccttctcgccacctcctccccggaggcagcgccgcggcacgggggccacagccgagtcccgcctcttctacaaagtggcctcgccc

SEQ ID NO: 372763 - DNA, 120 bp, Artificial Sequence
  ENSG00000142303_4 (sequence is synthesized)
agcacccacttcctgctgaacctgacccgcagctcccgtctactggcagggcacgtctccgtggagtactggacacgggagggcctggcctggcagagggcggcccggccccactgcctc

SEQ ID NO: 372764 - DNA, 120 bp, Artificial Sequence
  ENSG00000142303_5 (sequence is synthesized)
tacgctggtcacctgcagggccaggccagcagctcccatgtggccatcagcacctgtggaggcctgcacggcctgatcgtggcagacgaggaagagtacctgattgagcccctgcacggt

SEQ ID NO: 372765 - DNA, 120 bp, Artificial Sequence
  ENSG00000142303_6 (sequence is synthesized)
gggcccaagggttctcggagcccggaggaaagtggaccacatgtggtgtacaagcgttcctctctgcgtcacccccacctggacacagcctgtggagtgagagatgagaaaccgtggaaa

SEQ ID NO: 372766 - DNA, 120 bp, Artificial Sequence
  ENSG00000142303_7 (sequence is synthesized)
gggcggccatggtggctgcggaccttgaagccaccgcctgccaggcccctggggaatgaaacagagcgtggccagccaggcctgaagcgatcggtcagccgagagcgctacgtggagacc

SEQ ID NO: 372767 - DNA, 120 bp, Artificial Sequence
  ENSG00000142303_8 (sequence is synthesized)
ctggtggtggctgacaagatgatggtggcctatcacgggcgccgggatgtggagcagtatgtcctggccatcatgaacattgttgccaaacttttccaggactcgagtctgggaagcacc

SEQ ID NO: 372768 - DNA, 120 bp, Artificial Sequence
  ENSG00000142303_9 (sequence is synthesized)
gttaacatcctcgtaactcgcctcatcctgctcacggaggaccagcccactctggagatcacccaccatgccgggaagtccctggacagcttctgtaagtggcagaaatccatcgtgaac

SEQ ID NO: 372769 - DNA, 120 bp, Artificial Sequence
  ENSG00000142303_10 (sequence is synthesized)
cacagcggccatggcaatgccattccagagaacggtgtggctaaccatgacacagcagtgctcatcacacgctatgacatctgcatctacaagaacaaaccctgcggcacactaggcctg

SEQ ID NO: 372770 - DNA, 120 bp, Artificial Sequence
  ENSG00000142303_11 (sequence is synthesized)
gccccggtgggcggaatgtgtgagcgcgagagaagctgcagcgtcaatgaggacattggcctggccacagcgttcaccattgcccacgagatcgggcacacattcggcatgaaccatgac

SEQ ID NO: 372771 - DNA, 120 bp, Artificial Sequence
  ENSG00000142303_12 (sequence is synthesized)
ggcgtgggaaacagctgtggggcccgtggtcaggacccagccaagctcatggctgcccacattaccatgaagaccaacccattcgtgtggtcatcctgcagccgtgactacatcaccagc

SEQ ID NO: 372772 - DNA, 120 bp, Artificial Sequence
  ENSG00000142303_13 (sequence is synthesized)
tttctagactcgggcctggggctctgcctgaacaaccggccccccagacaggactttgtgtacccgacagtggcaccgggccaagcctacgatgcagatgagcaatgccgctttcagcat

SEQ ID NO: 372773 - DNA, 120 bp, Artificial Sequence
  ENSG00000142303_14 (sequence is synthesized)
ggagtcaaatcgcgtcagtgtaaatacggggaggtctgcagcgagctgtggtgtctgagcaagagcaaccggtgcatcaccaacagcatcccggccgccgagggcacgctgtgccagacg

SEQ ID NO: 372774 - DNA, 120 bp, Artificial Sequence
  ENSG00000142303_15 (sequence is synthesized)
cacaccatcgacaaggggtggtgctacaaacgggtctgtgtcccctttgggtcgcgcccagagggtgtggacggagcctgggggccgtggactccatggggcgactgcagccggacctgt

SEQ ID NO: 372775 - DNA, 120 bp, Artificial Sequence
  ENSG00000142303_16 (sequence is synthesized)
ggcggcggcgtgtcctcttctagccgtcactgcgacagccccaggccaaccatcgggggcaagtactgtctgggtgagagaaggcggcaccgctcctgcaacacggatgactgtccccct

SEQ ID NO: 372776 - DNA, 120 bp, Artificial Sequence
  ENSG00000142303_17 (sequence is synthesized)
acgtgcctagcggaaggcttcaacttctacacggagagggcggcagccgtggtggacgggacaccctgccgtccagacacggtggacatttgcgtcagtggcgaatgcaagcacgtgggc

SEQ ID NO: 372777 - DNA, 120 bp, Artificial Sequence
  ENSG00000142303_18 (sequence is synthesized)
tgcgaccgagtcctgggctccgacctgcgggaggacaagtgccgagtgtgtggcggtgacggcagtgcctgcgagaccatcgagggcgtcttcagcccagcctcacctggggccgggtac

SEQ ID NO: 372778 - DNA, 120 bp, Artificial Sequence
  ENSG00000142303_19 (sequence is synthesized)
gaggatgtcgtctggattcccaaaggctccgtccacatcttcatccaggatctgaacctctctctcagtcacttggccctgaagggagaccaggagtccctgctgctggaggggctgcct

SEQ ID NO: 372779 - DNA, 120 bp, Artificial Sequence
  ENSG00000142303_20 (sequence is synthesized)
gggaccccccagccccaccgtctgcctctagctgggaccacctttcaactgcgacaggggccagaccaggtccagagcctcgaagccctgggaccgattaatgcatctctcatcgtcatg

SEQ ID NO: 372780 - DNA, 120 bp, Artificial Sequence
  ENSG00000142303_21 (sequence is synthesized)
gtgctggcccggaccgagctgcctgccctccgctaccgcttcaatgcccccatcgcccgtgactcgctgcccccctactcctggcactatgcgccctggaccaagtgctcggcccagtgt

SEQ ID NO: 372781 - DNA, 120 bp, Artificial Sequence
  ENSG00000142303_22 (sequence is synthesized)
gcaggcggtagccaggtgcaggcggtggagtgccgcaaccagctggacagctccgcggtcgccccccactactgcagtgcccacagcaagctgcccaaaaggcagcgcgcctgcaacacg

SEQ ID NO: 372782 - DNA, 120 bp, Artificial Sequence
  ENSG00000142303_23 (sequence is synthesized)
gagccttgccctccagactgggttgtagggaactggtcgctctgcagccgcagctgcgatgcaggcgtgcgcagccgctcggtcgtgtgccagcgccgcgtctctgccgcggaggagaag

SEQ ID NO: 372783 - DNA, 120 bp, Artificial Sequence
  ENSG00000142303_24 (sequence is synthesized)
gcgctggacgacagcgcatgcccgcagccgcgcccacctgtactggaggcctgccacggccccacttgccctccggagtgggcggccctcgactggtctgagtgcacccccagctgcggg

SEQ ID NO: 372784 - DNA, 120 bp, Artificial Sequence
  ENSG00000142303_25 (sequence is synthesized)
ccgggcctccgccaccgcgtggtcctttgcaagagcgcagaccaccgcgccacgctgcccccggcgcactgctcacccgccgccaagccaccggccaccatgcgctgcaacttgcgccgc

SEQ ID NO: 372785 - DNA, 120 bp, Artificial Sequence
  ENSG00000142303_26 (sequence is synthesized)
tgccccccggcccgctgggtggctggcgagtggggtgagtgctctgcacagtgcggcgtcgggcagcggcagcgctcggtgcgctgcaccagccacacgggccaggcgtcgcacgagtgc

SEQ ID NO: 372786 - DNA, 120 bp, Artificial Sequence
  ENSG00000142303_27 (sequence is synthesized)
acggaggccctgcggccgcccaccacgcagcagtgtgaggccaagtgcgacagcccaacccccggggacggccctgaagagtgcaaggatgtgaacaaggtcgcctactgccccctggtg

SEQ ID NO: 372787 - DNA, 120 bp, Artificial Sequence
  ENSG00000142303_28 (sequence is synthesized)
ctcaaatttcagttctgcagccgagcctacttccgccagatgtgctgcaaaacctgccatggccactagggggcgcgcggcacccggagccacagctggcggggtctccgccgccagccc

SEQ ID NO: 372788 - DNA, 120 bp, Artificial Sequence
  ENSG00000142303_29 (sequence is synthesized)
tgcagcgggccggccagagggggccccgggggggcgggaactgggagggaagggtgagacggagccggaagttatttattgggaacccctgcagggccctggctggggggatggagaggg

SEQ ID NO: 372789 - DNA, 120 bp, Artificial Sequence
  ENSG00000142303_30 (sequence is synthesized)
gctggctatccccccagagcccctcttcagcatccgccccttccagttcacatagtgagaccccccctccagggtgggtctggggaggggacagctgttcaccccagcaccctttgaacc

SEQ ID NO: 372790 - DNA, 120 bp, Artificial Sequence
  ENSG00000142303_31 (sequence is synthesized)
cacccttagggagtccccaacactccccccctcctttgatcggaatatgtactgtgaagagtaggggtggggaggtggtctgccggtgccctgccccccagcactgccctacccctccac

SEQ ID NO: 372791 - DNA, 120 bp, Artificial Sequence
  ENSG00000142303_32 (sequence is synthesized)
tccgagctgggggggaatctgtgtctgctatgggaggggggggggtagcaccacctccctgacaccctcccctgacctgactagggggaggatccaccccaacctctgccctgcccgccc

SEQ ID NO: 372792 - DNA, 120 bp, Artificial Sequence
  ENSG00000142303_33 (sequence is synthesized)
caggggcaccccgacatccaggccaccccctcatggtgctacagaccctgccctggggcccacacactcctgccaggaagccctacatcaataaagttctgtcttgtgtagatttctacg

SEQ ID NO: 372793 - DNA, 120 bp, Artificial Sequence
  ENSG00000142303_34 (sequence is synthesized)
gggaggggagggggccgctggggctgggggagggaactccaccagggcacccacctgggaagtgagggggtgggagaaccgggaaggggggtgaggtgagcccccatggtgacctgggag

SEQ ID NO: 372794 - DNA, 120 bp, Artificial Sequence
  ENSG00000142303_35 (sequence is synthesized)
cccatcccggagaggctgatatctctggctggggcctggagtggggaacggtgcatggggccgacgagtgtcctccgggctggactcactccttcctgtctccccccacccagtggtgct

SEQ ID NO: 372795 - DNA, 120 bp, Artificial Sequence
  ENSG00000142303_36 (sequence is synthesized)
gaaattctacaagtggaaaacgtaccggggaggtgagtgtgggactccaaaggctgtggggccgtgaagggcagccgtgggagtgtccagcagcaggtggatgaatgcagcatcccgggg

SEQ ID NO: 372796 - DNA, 120 bp, Artificial Sequence
  ENSG00000142303_37 (sequence is synthesized)
ctcggcattgtcccctcccaaactcccacccctccacatagcttaaaagtgttgggggcttctccagtttagatgggggaacaaagagaaccaacagctggaaaaaactagagatgaggc

SEQ ID NO: 372797 - DNA, 120 bp, Artificial Sequence
  ENSG00000142303_38 (sequence is synthesized)
cgttggcctagtcatcatccaggccgatttctcagaaccaccactttctcttcggctactttgcccatcccataaaagaaccccaaatccttcctgttcattcctcagcagttcccacgt

SEQ ID NO: 372798 - DNA, 120 bp, Artificial Sequence
  ENSG00000142303_39 (sequence is synthesized)
ttccttccagaaactcagaaggcaccaggaactgaattgcaaagttcgttagagcacagactctgaattaaagagctgggttaaactccaggctattcccttagtagctgtgtgacctta

SEQ ID NO: 372799 - DNA, 120 bp, Artificial Sequence
  ENSG00000142303_40 (sequence is synthesized)
cctgtctgaagcttggttttctcccagtaagatggggtagtactgcctaaagaggtatatggcatgtataaagtgctccataaatggagcttattgggagagtataagtcacaggccatg

SEQ ID NO: 372800 - DNA, 120 bp, Artificial Sequence
  ENSG00000142303_41 (sequence is synthesized)
ctctgctctgggaccggcagtgagccggacatctgggtcctcccaagccgggcgggctgccccagggaggaagggaggggggcgagcctgagcgggcacctcggcccgcaggaggtctgc

SEQ ID NO: 372801 - DNA, 120 bp, Artificial Sequence
  ENSG00000142303_42 (sequence is synthesized)
tcctcttgggtctggggtctgtccctcttggcctcactcccccagggagcaagcaaagagttccggggtggcctggcccgtggtgtgacggggccgtgccccccagggggcgtgaaggcc

SEQ ID NO: 372802 - DNA, 120 bp, Artificial Sequence
  ENSG00000142303_43 (sequence is synthesized)
aggccagcagctcccatgtggccatcagcacctgtggaggcctggtgagctgaggattctggaacgcggggggaaatgcccataagtttggaagttaagaaaaacacttctacatagagg

SEQ ID NO: 372803 - DNA, 120 bp, Artificial Sequence
  ENSG00000142319_0 (sequence is synthesized)
gagaccgcccagcgctgcggagcgggaggggaggcttcgcggaacgctctcggcgccaggactcgcgtgcaaagcccaggcccgggcggccagaccaagagggaagaagcacagaattcc

SEQ ID NO: 372804 - DNA, 120 bp, Artificial Sequence
  ENSG00000142319_1 (sequence is synthesized)
tcaactcccagtgtgcccatgagtaagagcaaatgctccgtgggactcatgtcttccgtggtggccccggctaaggagcccaatgccgtgggcccgaaggaggtggagctcatccttgtc

SEQ ID NO: 372805 - DNA, 120 bp, Artificial Sequence
  ENSG00000142319_2 (sequence is synthesized)
aaggagcagaacggagtgcagctcaccagctccaccctcaccaacccgcggcagagccccgtggaggcccaggatcgggagacctggggcaagaagatcgactttctcctgtccgtcatt

SEQ ID NO: 372806 - DNA, 120 bp, Artificial Sequence
  ENSG00000142319_3 (sequence is synthesized)
ggctttgctgtggacctggccaacgtctggcggttcccctacctgtgctacaaaaatggtggcggtgccttcctggtcccctacctgctcttcatggtcattgctgggatgccacttttc

SEQ ID NO: 372807 - DNA, 120 bp, Artificial Sequence
  ENSG00000142319_4 (sequence is synthesized)
tacatggagctggccctcggccagttcaacagggaaggggccgctggtgtctggaagatctgccccatactgaaaggtgtgggcttcacggtcatcctcatctcactgtatgtcggcttc

SEQ ID NO: 372808 - DNA, 120 bp, Artificial Sequence
  ENSG00000142319_5 (sequence is synthesized)
ttctacaacgtcatcatcgcctgggcgctgcactatctcttctcctccttcaccacggagctcccctggatccactgcaacaactcctggaacagccccaactgctcggatgcccatcct

SEQ ID NO: 372809 - DNA, 120 bp, Artificial Sequence
  ENSG00000142319_6 (sequence is synthesized)
ggtgactccagtggagacagctcgggcctcaacgacacttttgggaccacacctgctgccgagtactttgaacgtggcgtgctgcacctccaccagagccatggcatcgacgacctgggg

SEQ ID NO: 372810 - DNA, 120 bp, Artificial Sequence
  ENSG00000142319_7 (sequence is synthesized)
cctccgcggtggcagctcacagcctgcctggtgctggtcatcgtgctgctctacttcagcctctggaagggcgtgaagacctcagggaaggtggtatggatcacagccaccatgccatac

SEQ ID NO: 372811 - DNA, 120 bp, Artificial Sequence
  ENSG00000142319_8 (sequence is synthesized)
gtggtcctcactgccctgctcctgcgtggggtcaccctccctggagccatagacggcatcagagcatacctgagcgttgacttctaccggctctgcgaggcgtctgtttggattgacgcg

SEQ ID NO: 372812 - DNA, 120 bp, Artificial Sequence
  ENSG00000142319_9 (sequence is synthesized)
gccacccaggtgtgcttctccctgggcgtggggttcggggtgctgatcgccttctccagctacaacaagttcaccaacaactgctacagggacgcgattgtcaccacctccatcaactcc

SEQ ID NO: 372813 - DNA, 120 bp, Artificial Sequence
  ENSG00000142319_10 (sequence is synthesized)
ctgacgagcttctcctccggcttcgtcgtcttctccttcctggggtacatggcacagaagcacagtgtgcccatcggggacgtggccaaggacgggccagggctgatcttcatcatctac

SEQ ID NO: 372814 - DNA, 120 bp, Artificial Sequence
  ENSG00000142319_11 (sequence is synthesized)
ccggaagccatcgccacgctccctctgtcctcagcctgggccgtggtcttcttcatcatgctgctcaccctgggtatcgacagcgccatgggtggtatggagtcagtgatcaccgggctc

SEQ ID NO: 372815 - DNA, 120 bp, Artificial Sequence
  ENSG00000142319_12 (sequence is synthesized)
atcgatgagttccagctgctgcacagacaccgtgagctcttcacgctcttcatcgtcctggcgaccttcctcctgtccctgttctgcgtcaccaacggtggcatctacgtcttcacgctc

SEQ ID NO: 372816 - DNA, 120 bp, Artificial Sequence
  ENSG00000142319_13 (sequence is synthesized)
ctggaccattttgcagccggcacgtccatcctctttggagtgctcatcgaagccatcggagtggcctggttctatggtgttgggcagttcagcgacgacatccagcagatgaccgggcag

SEQ ID NO: 372817 - DNA, 120 bp, Artificial Sequence
  ENSG00000142319_14 (sequence is synthesized)
cggcccagcctgtactggcggctgtgctggaagctggtcagcccctgctttctcctgttcgtggtcgtggtcagcattgtgaccttcagacccccccactacggagcctacatcttcccc

SEQ ID NO: 372818 - DNA, 120 bp, Artificial Sequence
  ENSG00000142319_15 (sequence is synthesized)
gactgggccaacgcgctgggctgggtcatcgccacatcctccatggccatggtgcccatctatgcggcctacaagttctgcagcctgcctgggtcctttcgagagaaactggcctacgcc

SEQ ID NO: 372819 - DNA, 120 bp, Artificial Sequence
  ENSG00000142319_16 (sequence is synthesized)
caggaagtcatcctgcaatgggagagacacgaacaaaccaaggaaatctaagtttcgagagaaaggagggcaacttctactcttcaacctctactgaaaacacaaacaacaaagcagaag

SEQ ID NO: 372820 - DNA, 120 bp, Artificial Sequence
  ENSG00000142319_17 (sequence is synthesized)
actcctctcttctgactgtttacacctttccgtgccgggagcgcacctcgccgtgtcttgtgttgctgtaataacgacgtagatctgtgcagcgaggtccaccccgttgttgtccctgca

SEQ ID NO: 372821 - DNA, 120 bp, Artificial Sequence
  ENSG00000142319_18 (sequence is synthesized)
gggcagaaaaacgtctaacttcatgctgtctgtgtgaggctccctccctccctgctccctgctcccggctctgaggctgccccaggggcactgtgttctcaggcggggatcacgatcctt

SEQ ID NO: 372822 - DNA, 120 bp, Artificial Sequence
  ENSG00000142319_19 (sequence is synthesized)
gtagacgcacctgctgagaatccccgtgctcacagtagcttcctagaccatttactttgcccatattaaaaagccaagtgtcctgcttggtttagctgtgcagaaggtgaaatggaggaa

SEQ ID NO: 372823 - DNA, 120 bp, Artificial Sequence
  ENSG00000142319_20 (sequence is synthesized)
accacaaattcatgcaaagtcctttcccgatgcgtggctcccagcagaggccgtaaattgagcgttcagttgacacattgcacacacagtctgttcagaggcattggaggatgggggtcc

SEQ ID NO: 372824 - DNA, 120 bp, Artificial Sequence
  ENSG00000142319_21 (sequence is synthesized)
tggtatgtctcaccaggaaattctgtttatgttcttgcagcagagagaaataaaactccttgaaaccagctcaggctactgccactcaggcagcctgtgggtccttgcggtgtagggaac

SEQ ID NO: 372825 - DNA, 120 bp, Artificial Sequence
  ENSG00000142319_22 (sequence is synthesized)
ggcctgagaggagcgtgtcctatccccggacgcatgcagggcccccacaggagcgtgtcctatccccggacgcatgcagggcccccacaggagcatgtcctatccctggacgcatgcagg

SEQ ID NO: 372826 - DNA, 120 bp, Artificial Sequence
  ENSG00000142319_23 (sequence is synthesized)
gcccccacaggagcgtgtactaccccagaacgcatgcagggcccccacaggagcgtgtactaccccaggacgcatgcagggcccccactggagcgtgtactaccccaggacgcatgcagg

SEQ ID NO: 372827 - DNA, 120 bp, Artificial Sequence
  ENSG00000142319_24 (sequence is synthesized)
gcccccacaggagcgtgtcctatccccggaccggacgcatgcagggcccccacaggagcgtgtactaccccaggacgcatgcagggcccccacaggagcgtgtactaccccaggatgcat

SEQ ID NO: 372828 - DNA, 120 bp, Artificial Sequence
  ENSG00000142319_25 (sequence is synthesized)
gcagggcccccacaggagcgtgtactaccccaggacgcatgcagggcccccatgcaggcagcctgcagaccacactctgcctggccttgagccgtgacctccaggaagggaccccactgg

SEQ ID NO: 372829 - DNA, 120 bp, Artificial Sequence
  ENSG00000142319_26 (sequence is synthesized)
aattttatttctctcaggtgcgtgccacatcaataacaacagtttttatgtttgcgaatggctttttaaaatcatatttacctgtgaatcaaaacaaattcaagaatgcagtatccgcga

SEQ ID NO: 372830 - DNA, 120 bp, Artificial Sequence
  ENSG00000142319_27 (sequence is synthesized)
gcctgcttgctgatattgcagtttttgtttacaagaataattagcaatactgagtgaaggatgttggccaaaagctgctttccatggcacactgccctctgccactgacaggaaagtgga

SEQ ID NO: 372831 - DNA, 120 bp, Artificial Sequence
  ENSG00000142319_28 (sequence is synthesized)
tgccatagtttgaattcatgcctcaagtcggtgggcctgcctacgtgctgcccgagggcaggggccgtgcagggccagtcatggctgtcccctgcaagtggacgtgggctccagggactg

SEQ ID NO: 372832 - DNA, 120 bp, Artificial Sequence
  ENSG00000142319_29 (sequence is synthesized)
gagtgtaatgctcggtgggagccgtcagcctgtgaactgccaggcagctgcagttagcacagaggatggcttccccattgccttctggggagggacacagaggacggcttccccatcgcc

SEQ ID NO: 372833 - DNA, 120 bp, Artificial Sequence
  ENSG00000142319_30 (sequence is synthesized)
ttctggccgctgcagtcagcacagagagcggcttccccattgccttctggggagggacacagaggacagcttccccatcgccttctggctgctgcagtcagcacagagagcggcttcccc

SEQ ID NO: 372834 - DNA, 120 bp, Artificial Sequence
  ENSG00000142319_31 (sequence is synthesized)
atcgccttctggggaggggctccgtgtagcaacccaggtgttgtccgtgtctgttgaccaatctctattcagcatcgtgtgggtccctaagcacaataaaagacatccacaatggaaaaa

SEQ ID NO: 372835 - DNA, 120 bp, Artificial Sequence
  ENSG00000142319_32 (sequence is synthesized)
agactcaagagccatctccaggaccacgttttattttcaagcgagtgctcaaatgctgatgttctgctctgcgctagactttaaggggaccgtcaggatgttggcttcgggcctgactgg

SEQ ID NO: 372836 - DNA, 120 bp, Artificial Sequence
  ENSG00000142319_33 (sequence is synthesized)
ctgtctggtcggcatgggcactggcagtaaactggcctacgccattgcacccgagaaggaccgtgagctggtggacagaggggaggtgcgccagttcacgctccgccactggctcaaggt

SEQ ID NO: 372837 - DNA, 120 bp, Artificial Sequence
  ENSG00000142319_34 (sequence is synthesized)
agatgaggccgtgctgttccgagggttattaggatgctgtggtcatgccgtgtgtggatgagtccatgctgttctgagggctatggagcagggcacctctggttctgtggaatcgctgcc

SEQ ID NO: 372838 - DNA, 120 bp, Artificial Sequence
  ENSG00000142319_35 (sequence is synthesized)
ttgatactccatggggaatcccagatcaatgaacacagacagccccctgcttctcaggctcttccaggccgctggcccgggagggttcacttcctgaggctgcatcttccaccagtcgtc

SEQ ID NO: 372839 - DNA, 80 bp, Artificial Sequence
  ENSG00000142327_0 (sequence is synthesized)
ggcgcccctcgcccgcggcccggcgcggccgccgcccatggatttcacctagtgccggcggccatggccgcgcagtgctg

SEQ ID NO: 372840 - DNA, 80 bp, Artificial Sequence
  ENSG00000142327_1 (sequence is synthesized)
ccgccgcccgagccgccgcccgccctggacgtggcctcggcctccagcgcgcagctcttccgcctccgccacctgcagct

SEQ ID NO: 372841 - DNA, 80 bp, Artificial Sequence
  ENSG00000142327_2 (sequence is synthesized)
gggcctggagctgcggcccgaggcgcgcgagttggccggctgcctggtgctcgagctgtgcgcgctgcggcccgcgcccc

SEQ ID NO: 372842 - DNA, 80 bp, Artificial Sequence
  ENSG00000142327_3 (sequence is synthesized)
cgcctgcactcagccgccttccgtcgcgcccccgccgccgccgccgagacgccctgcgccttcgccttctccgcccccgg

SEQ ID NO: 372843 - DNA, 120 bp, Artificial Sequence
  ENSG00000142327_4 (sequence is synthesized)
cggctccgagcccgcctgctgtccgctggccttcagggtggacccgttcaccgactacggctcctcgctcaccgtcacgctgccgcccgagctgcaggcgcaccagcccttccaggtcat

SEQ ID NO: 372844 - DNA, 120 bp, Artificial Sequence
  ENSG00000142327_5 (sequence is synthesized)
cctgcggtacacctcgaccgacgcccccgccatctggtggctggacccagagctgacctatggctgcgccaagcccttcgtcttcacccagggccactccgtgtgcaaccgctccttctt

SEQ ID NO: 372845 - DNA, 120 bp, Artificial Sequence
  ENSG00000142327_6 (sequence is synthesized)
cccgtgcttcgacacacctgccgtgaagtgcacctactctgccgtcgtcaaggcgccatcgggggtgcaggtgctgatgagtgccacccggagtgcatacatggaggaagaaggcgtctt

SEQ ID NO: 372846 - DNA, 120 bp, Artificial Sequence
  ENSG00000142327_7 (sequence is synthesized)
ccacttccacatggagcaccccgtgcccgcctacctcgtggccctggtggccggagacctcaagccggcagacatcgggcccaggagccgcgtgtgggccgagccatgcctcctgcccac

SEQ ID NO: 372847 - DNA, 120 bp, Artificial Sequence
  ENSG00000142327_8 (sequence is synthesized)
ggccaccagcaagctgtcgggcgcagtggagcagtggctgagtgcagctgagcggctgtatgggccctacatgtggggcaggtacgacattgtcttcctgccaccctccttccccatcgt

SEQ ID NO: 372848 - DNA, 120 bp, Artificial Sequence
  ENSG00000142327_9 (sequence is synthesized)
ggccatggagaacccctgcctcaccttcatcatctcctccatcctggagagcgatgagttcctggtcatcgatgtcatccacgaggtggcccacagttggttcggcaacgctgtcaccaa

SEQ ID NO: 372849 - DNA, 120 bp, Artificial Sequence
  ENSG00000142327_10 (sequence is synthesized)
cgccacgtgggaagagatgtggctgagcgagggcctggccacctatgcccagcgccgtatcaccaccgagacctacggtgctgccttcacctgcctggagactgccttccgcctggacgc

SEQ ID NO: 372850 - DNA, 120 bp, Artificial Sequence
  ENSG00000142327_11 (sequence is synthesized)
cctgcaccggcagatgaagcttctgggagaggacagcccggtcagcaaactgcaggtcaagctggagccaggagtgaatcccagccacctgatgaacctgttcacctacgagaagggcta

SEQ ID NO: 372851 - DNA, 120 bp, Artificial Sequence
  ENSG00000142327_12 (sequence is synthesized)
ctgcttcgtgtactacctgtcccagctctgcggagacccacagcgctttgatgactttctccgagcctatgtggagaagtacaagttcaccagcgtggtggcccaggacctgctggactc

SEQ ID NO: 372852 - DNA, 120 bp, Artificial Sequence
  ENSG00000142327_13 (sequence is synthesized)
cttcctgagcttcttcccggagctgaaggagcagagcgtggactgccgggcagggctggaattcgagcgctggctcaatgccacaggcccgccgctggctgagccggacctgtctcaggg

SEQ ID NO: 372853 - DNA, 120 bp, Artificial Sequence
  ENSG00000142327_14 (sequence is synthesized)
atccagcctgacccggcccgtggaggcccttttccagctgtggaccgcagaacctctggaccaggcagctgcctcggccagcgccattgacatctccaagtggaggaccttccagacagc

SEQ ID NO: 372854 - DNA, 120 bp, Artificial Sequence
  ENSG00000142327_15 (sequence is synthesized)
actcttcctggaccggctcctggatgggtccccgctgccgcaggaggtggtgatgagcctgtccaagtgctactcctccctgctggactcgatgaacgctgagatccgcatccgctggct

SEQ ID NO: 372855 - DNA, 120 bp, Artificial Sequence
  ENSG00000142327_16 (sequence is synthesized)
gcagattgtggtccgcaacgactactatcctgacctccacagggtgcggcgcttcctggagagccagatgtcacgcatgtacaccatcccgctgtacgaggacctctgcaccggtgccct

SEQ ID NO: 372856 - DNA, 120 bp, Artificial Sequence
  ENSG00000142327_17 (sequence is synthesized)
caagtccttcgcgctggaggtcttctaccagacgcagggccggctgcaccccaacctgcgcagagccatccagcagatcctgtcccagggcctgggctccagcacagagcccgcctcaga

SEQ ID NO: 372857 - DNA, 120 bp, Artificial Sequence
  ENSG00000142327_18 (sequence is synthesized)
gcccagcacggagctgggcaaggctgaagcagacacagactcggacgcacaggccctgctgcttggggacgaggcccccagcagtgccatctctctcagggacgtcaatgtgtctgccta

SEQ ID NO: 372858 - DNA, 120 bp, Artificial Sequence
  ENSG00000142327_19 (sequence is synthesized)
gccctgttggcgggctgaccctcgacctcccagacaccacaattgtgccttctgtgggccaggcctgccatgactgcgtctcggctctggccatgagctctgcccaggcccacaagcccc

SEQ ID NO: 372859 - DNA, 120 bp, Artificial Sequence
  ENSG00000142327_20 (sequence is synthesized)
tcccctgggctctcccaggcagggagaatggggagagggacctccttgtgtctggcagagacctgtggacctggcctccccactcccagctctcttgcactgcaggccctggggccagcc

SEQ ID NO: 372860 - DNA, 120 bp, Artificial Sequence
  ENSG00000142327_21 (sequence is synthesized)
cgcacacaccatgcctcctgtctcaacactgacagctgtgcctagccccggatgccagcacctgccaggtgccgccccggggcaagggccccagcagccctatggtgaccgccacactgt

SEQ ID NO: 372861 - DNA, 120 bp, Artificial Sequence
  ENSG00000142327_22 (sequence is synthesized)
gccttaatgtctgccgggggcccaggctgtgctgtccctgcagcacgcctccttgcagggatctgagccaccctccccgcacagccctgcaccccgcccctggggttggcagcctcagtt

SEQ ID NO: 372862 - DNA, 120 bp, Artificial Sequence
  ENSG00000142327_23 (sequence is synthesized)
ggcccctggcagaggaacaaggacacagacattccctcagtgtggggggcaggggacacagggagaggatggttgtccctggggagggccctctggccccaggcaaccttagcccctcag

SEQ ID NO: 372863 - DNA, 120 bp, Artificial Sequence
  ENSG00000142327_24 (sequence is synthesized)
acagggagtcccaggacccagggagagtgtggggacaggacagcctgtctcttgtagcttcctggggtgggaggcacaggggcaaagcaataccccagggaaagtgggaggtggtgctgg

SEQ ID NO: 372864 - DNA, 120 bp, Artificial Sequence
  ENSG00000142327_25 (sequence is synthesized)
tgctctctccaggcccaccatgctgggagaggcggccagagcctggggcctccagcctgggactgctgtgatggggtatcacggtgatggtcccattaaacttccactctgcaaacctga

SEQ ID NO: 372865 - DNA, 120 bp, Artificial Sequence
  ENSG00000142327_26 (sequence is synthesized)
tctcctgcgctctttctcgcgactcttgtcctctgcatcttcctggctgtgtagggtgggctggcctgccgggacttggggcctggagctggtcaggagctgggtgtggccccctcctct

SEQ ID NO: 372866 - DNA, 120 bp, Artificial Sequence
  ENSG00000142327_27 (sequence is synthesized)
gatacataagcccgagagcaggctccccgaatcctgcccagccccttggctggaccccctgggcctgagtagcctctggatgtcacaggaaagccatgtgtcaccttcactctgggcctt

SEQ ID NO: 372867 - DNA, 120 bp, Artificial Sequence
  ENSG00000142327_28 (sequence is synthesized)
cacctgtggcttaagccaaatcccggcctcagtggtgatcctttcccaagatgggtacaaggtgacaggcatgttttgttttggagaactgagatttccattttcccaggcgataggtgt

SEQ ID NO: 372868 - DNA, 120 bp, Artificial Sequence
  ENSG00000142327_29 (sequence is synthesized)
cgctgcccttcacagtccccaaggatgtggcgccaccatctcagtgccacgcacacctggccaacatgccgtggcccagaagcagcacgtctcttctcccaacccgctggccaggcccag

SEQ ID NO: 372869 - DNA, 120 bp, Artificial Sequence
  ENSG00000142327_30 (sequence is synthesized)
tcacagccccactccacacatggcagccaggaagtggggagggcaggaggtgctgggcaaataaccctgataccatcactgtccagtccccagtcaccaaatgtcccactcaccctcctt

SEQ ID NO: 372870 - DNA, 120 bp, Artificial Sequence
  ENSG00000142327_31 (sequence is synthesized)
cctgttctggatgccccgcccctcccctcccctcccaaggacatatgagtcccctccagtggcggtggcaactctggtctagggtctggggccgtctctacatgtgttgcttcatgtacc

SEQ ID NO: 372871 - DNA, 120 bp, Artificial Sequence
  ENSG00000142327_32 (sequence is synthesized)
ttcttcacatcaggtctgggggaggcgccaccccatccagagacctaggaactagaagactgccactgcccctcacacccagggataggatgactgcagtaacccctgtgaaagcgggta

SEQ ID NO: 372872 - DNA, 120 bp, Artificial Sequence
  ENSG00000142327_33 (sequence is synthesized)
tggagggcacctggcagcccctgctgcatggccatctaaagtcttgccaggcaggcacagctagggcccctgcctgggagtggacaccccactcccccaagtcatgttctctgtggcctg

SEQ ID NO: 372873 - DNA, 120 bp, Artificial Sequence
  ENSG00000142327_34 (sequence is synthesized)
gggctccagccttgggaggacccctttcctgtttcttaaccatgcttgatggtgtcctcaaaggagccctgctcagtggcagaactgctttctcagcctcttccccgccaaggttgtttt

SEQ ID NO: 372874 - DNA, 120 bp, Artificial Sequence
  ENSG00000142327_35 (sequence is synthesized)
caagtcccagcagtcacagactttcatcctgggctcttctttcttttgcaattcagctctcgaaatgactctgtggtctgcgggtgactccactccacgtgcctacagccacgcccacag

SEQ ID NO: 372875 - DNA, 120 bp, Artificial Sequence
  ENSG00000142327_36 (sequence is synthesized)
cgccacctccggacgctgctgagctgcgcacctgtgcctgacacctggctttgggaaactcagcagcagtgcccagcgtcatgaccctgggggcaggagggcatctggatccaggatggc

SEQ ID NO: 372876 - DNA, 120 bp, Artificial Sequence
  ENSG00000142327_37 (sequence is synthesized)
accctcaccacaatctgtcttggctctgtgcccgcccgtggggtacacaggagggctctttcagccctaagtccttgtgttcctgacctttgttcctcttccacccagcttgcaagtgca

SEQ ID NO: 372877 - DNA, 120 bp, Artificial Sequence
  ENSG00000142327_38 (sequence is synthesized)
gaatttttttttagctcgtcgcttccctgcagtcccttgtccaatgcagcctccggccgatactcaggccagtgttgtttcccaacctctccactagatacgcacacttagctcacggtc

SEQ ID NO: 372878 - DNA, 120 bp, Artificial Sequence
  ENSG00000142327_39 (sequence is synthesized)
tgcctcatgagtcatcccagttgagctttaccaaatgttttgccccacctaacagcctgcccacattccaaatcctggcaggtcgcacgttttattagcacagcacccctctcctagcgg

SEQ ID NO: 372879 - DNA, 120 bp, Artificial Sequence
  ENSG00000142327_40 (sequence is synthesized)
ccagcttctctattaggccacgttatgctccagccacacaactatgaagcgcagacgtctcacacaacaaagctttctcatgctgcaggcccacctcaggctggcaggggaaggggggat

SEQ ID NO: 372880 - DNA, 120 bp, Artificial Sequence
  ENSG00000142327_41 (sequence is synthesized)
tctcttcaatgtgaccactctcggacccgtaccgatgaacagagatctcaaatgtttccaggcaccttgccagggataagagagctgttgaggggctcacactggcagtggaagttctaa

SEQ ID NO: 372881 - DNA, 120 bp, Artificial Sequence
  ENSG00000142327_42 (sequence is synthesized)
ggggcctacaaccacaggggctgcaaccccaccatatgcacaaaagcgggggcagatggcaaacagcactaatgacaacgacggagctgaggccagaatgtgagagagatctgcattttg

SEQ ID NO: 372882 - DNA, 120 bp, Artificial Sequence
  ENSG00000142327_43 (sequence is synthesized)
gggattagggcctagtcaggcaggtaggagatgatgttcaaaaagggaaaagaagcgtgatgaaagactggtttctacagagatagattagaaagctgaagcctgaaaaaacagtgaagg

SEQ ID NO: 372883 - DNA, 120 bp, Artificial Sequence
  ENSG00000142327_44 (sequence is synthesized)
agacccatgcaaatttctaggccctggaggtccaaataaggttttctaagtccctcaggccatgacaggttcagtccagacttgtctcccagagtgtttctctgccatccctactctaac

SEQ ID NO: 372884 - DNA, 120 bp, Artificial Sequence
  ENSG00000142327_45 (sequence is synthesized)
tgggacttattggtggtgtttctctcctaaggccagatgctttgcacagaacattaggaaactccagatgtaaaggtaaggcacaactgagaatcacctgcccagggcagcaacacagtg

SEQ ID NO: 372885 - DNA, 120 bp, Artificial Sequence
  ENSG00000142327_46 (sequence is synthesized)
tgaaggaaaacaggccactcaacccaaacttacacctgagacagaggcaacagaaaaatcagaaaaggactttagaacacatataatcaaaatctcagacctaaagacgacttttgaaat

SEQ ID NO: 372886 - DNA, 120 bp, Artificial Sequence
  ENSG00000142327_47 (sequence is synthesized)
aaaccataacatatgaagaggcacttatgaaacaagaacaggtagtttataaaaaagaaccagtcagagaccctggaaattttttaaaaagcaattactaaaataaaaaatgaaaactca

SEQ ID NO: 372887 - DNA, 120 bp, Artificial Sequence
  ENSG00000142327_48 (sequence is synthesized)
gcctatgtggagaagtacaagttcaccagcgtggtggcccaggacctgctggactccttcctgagcttcttcccggagctgaaggagcagagcgtggactgccgggcaggcccgccgctg

SEQ ID NO: 372888 - DNA, 120 bp, Artificial Sequence
  ENSG00000142327_49 (sequence is synthesized)
atcacaagctggtgcccagggcagtccccatctctgtggagggcttgcctgccgctggcctctctagataagctcctcatgactcatgcaaccttttcatcaacccggaaggaagcagcc

SEQ ID NO: 372889 - DNA, 120 bp, Artificial Sequence
  ENSG00000142327_50 (sequence is synthesized)
gccggtcgccactagtgggtgctgccttcacctgcctggagactgccttccgcctggacgccctgcaccggcagatgaagcttctgggagaggacagcccggtcagcaaactgcaggcct

SEQ ID NO: 372890 - DNA, 120 bp, Artificial Sequence
  ENSG00000142327_51 (sequence is synthesized)
ccccggctcacagggctgcctgctcttgcggcagttggggtggaactggcaggggcctgtgagcctggctgggacctagtctgcctttctttgtggggagtgcctgggttgccacctccc

SEQ ID NO: 372891 - DNA, 120 bp, Artificial Sequence
  ENSG00000142327_52 (sequence is synthesized)
cttctgccaccctgtttgctcccttggcagggcctgcgtgccaagtgctggctccgcagtgcccactagctgcccctgtgcccagcacgtaccttggcgcacgccctgcagtgccctgca

SEQ ID NO: 372892 - DNA, 120 bp, Artificial Sequence
  ENSG00000142327_53 (sequence is synthesized)
agggtggtgatgagcctgtccaagtgctactcctccctgctggactcgatgaacgctgagatccgcatccgctggctgcagattgtggtccgcaacgactactatcctgacctccacagg

SEQ ID NO: 372893 - DNA, 120 bp, Artificial Sequence
  ENSG00000142327_54 (sequence is synthesized)
ggctctgagcagcagtcacagtggtgtgtgagtcctcagtcttccccgaggccctgccgctgcacgcccagggcatcagtacacatctggacatgtgagggacagtggcgcttggccctt

SEQ ID NO: 372894 - DNA, 120 bp, Artificial Sequence
  ENSG00000142327_55 (sequence is synthesized)
ggcaggcggggcctctgctgcctgaggggccactccacctggaggaaagccctgtcagttcactgtctgtccttcagccaacccttgctggaccatgtgggccccaggctggtatgctat

SEQ ID NO: 372895 - DNA, 120 bp, Artificial Sequence
  ENSG00000142327_56 (sequence is synthesized)
cccctcgtctgacccctggggtgtcctgtccccatctcctggggaggaagcggagctcaccgcaggggctgggctgatccctgctgggtggaaggtggggtgcgggtgtgcagggtggga

SEQ ID NO: 372896 - DNA, 120 bp, Artificial Sequence
  ENSG00000142327_57 (sequence is synthesized)
tgccatgctgcaggtgcccacacctcctgcttcccccgacgacccctacaccccctcacctctcctctgtctccggaccccatccaggtgctgccttcacctgcctggagactgccttcc

SEQ ID NO: 372897 - DNA, 120 bp, Artificial Sequence
  ENSG00000142327_58 (sequence is synthesized)
tgcccttcgtgtgttctggctgtggcttctctgtcctgcactgtgcctggacccctgccaaggccaagctgggagcccctggccagggcaaggcctccccaggctcccacagccaccgcc

SEQ ID NO: 372898 - DNA, 120 bp, Artificial Sequence
  ENSG00000142327_59 (sequence is synthesized)
gcaggaagggcgggtgacgggggtgtcctggagctggagaacagcagccagccctgtttatgtgtcacttgtaaaggtgtccctgagggtctgagggcttggggcccaggaaggcactgc

SEQ ID NO: 372899 - DNA, 120 bp, Artificial Sequence
  ENSG00000142327_60 (sequence is synthesized)
catcaagagctttttgtgggtagggaatgggcactgccctttaagagcaggaatatcatcttaagagcctgttgcccccatcccgcccctgctggttcatggcgcaggtggcctccacca

SEQ ID NO: 372900 - DNA, 120 bp, Artificial Sequence
  ENSG00000142327_61 (sequence is synthesized)
gcactgaggttgggtttagactacttcattgtcttccacccaggagaggcgtggagtgggtgcgagtcccttggtcaccaacccaagtctctgcttccctgtaccccttcacagaagccc

SEQ ID NO: 372901 - DNA, 120 bp, Artificial Sequence
  ENSG00000142327_62 (sequence is synthesized)
cttcagtggcttcaagtggcagtgctggctggagctgactccgccttcctgaacagcccacgtccctggaacaggccacctgcctggaacacactcagggtctggggtctcctgggcaga

SEQ ID NO: 372902 - DNA, 80 bp, Artificial Sequence
  ENSG00000142330_0 (sequence is synthesized)
agactagcgggccggcgtactggcctggtccagcacctgcggggccctcgggcttggagggctgggccgggcggggaacg

SEQ ID NO: 372903 - DNA, 120 bp, Artificial Sequence
  ENSG00000142330_1 (sequence is synthesized)
cttctctccggggctgcgaccccgaggcaaccggctgcagatgggagcccgcggagccgaggatgcgggcgggccggggcgcgacgccggcgagggagctgttccgggacgccgccttcc

SEQ ID NO: 372904 - DNA, 120 bp, Artificial Sequence
  ENSG00000142330_2 (sequence is synthesized)
cgcggactcctcgctcttctgcgacttgtctacgccgctggcccagttccgcgaggacatcacgtggaggcggccccaggagatttgtgccacaccccggctgtttccagatgacccacg

SEQ ID NO: 372905 - DNA, 120 bp, Artificial Sequence
  ENSG00000142330_3 (sequence is synthesized)
ggaagggcaggtgaagcaggggctgctgggggattgctggttcctgtgtgcctgcgccgcgctgcagaagagcaggcacctcctggaccaggtcattcctccgggacagccgagctgggc

SEQ ID NO: 372906 - DNA, 120 bp, Artificial Sequence
  ENSG00000142330_4 (sequence is synthesized)
cgaccaggagtaccggggctccttcacctgtcgcatttggcagtttggacgctgggtggaggtgaccacagatgaccgcctgccgtgccttgcagggagactctgtttctcccgctgcca

SEQ ID NO: 372907 - DNA, 120 bp, Artificial Sequence
  ENSG00000142330_5 (sequence is synthesized)
gagggaggatgtgttctggctccccttactggaaaaggtctacgccaaggtccatgggtcctacgagcacctgtgggccgggcaggtggcggatgccctggtggacctgaccggcggcct

SEQ ID NO: 372908 - DNA, 120 bp, Artificial Sequence
  ENSG00000142330_6 (sequence is synthesized)
ggcagaaagatggaacctgaagggcgtagcaggaagcggaggccagcaggacaggccaggccgctgggagcacaggacttgtcggcagctgctccacctgaaggaccagtgtctgatcag

SEQ ID NO: 372909 - DNA, 120 bp, Artificial Sequence
  ENSG00000142330_7 (sequence is synthesized)
ctgctgcgtgctcagccccagagcaggtgcccgggagctgggggagttccatgccttcattgtctcggacctgcgggagctccagggtcaggcgggccagtgcatcctgctgctgcggat

SEQ ID NO: 372910 - DNA, 120 bp, Artificial Sequence
  ENSG00000142330_8 (sequence is synthesized)
ccagaacccctggggccggcggtgctggcaggggctctggagagaggggggtgaagggtggagccaggtagatgcagcggtagcatctgagctcctgtcccagctccaggaaggggagtt

SEQ ID NO: 372911 - DNA, 120 bp, Artificial Sequence
  ENSG00000142330_9 (sequence is synthesized)
ctgggtggaggaggaggagttcctcagggagtttgacgagctcaccgttggctacccggtcacggaggccggccacctgcagagcctctacacagagaggctgctctgccatacgcgggc

SEQ ID NO: 372912 - DNA, 120 bp, Artificial Sequence
  ENSG00000142330_10 (sequence is synthesized)
gtgaggtgtacattgccgtcctgcagagatccaggctgcacgcggcggactgggcaggccgggcccgggcactggtgggtgacagtcatacttcgtggagcccagcgagcatcccgggca

SEQ ID NO: 372913 - DNA, 120 bp, Artificial Sequence
  ENSG00000142330_11 (sequence is synthesized)
agcactaccaggctgtgggtctgcacctctggaaggtagagaagcggcgggtcaatctgcctagggtcctgtccatgccccccgtggctggcaccgcgtgccatgcatacgaccgggagg

SEQ ID NO: 372914 - DNA, 120 bp, Artificial Sequence
  ENSG00000142330_12 (sequence is synthesized)
tccacctgcgttgtgagctctcaccgggctactacctggctgtccccagcaccttcctgaaggacgcgccaggggagttcctgctccgagtcttctctaccgggcgagtctcccttagcg

SEQ ID NO: 372915 - DNA, 120 bp, Artificial Sequence
  ENSG00000142330_13 (sequence is synthesized)
ccatcagggcagtggccaagaacaccacccccggggcagccctgcctgcgggggagtgggggaccgtgcagctacggggttcttggagagtcggccagacggcggggggcagcaggaact

SEQ ID NO: 372916 - DNA, 120 bp, Artificial Sequence
  ENSG00000142330_14 (sequence is synthesized)
ttgcctcataccccaccaacccctgcttccccttctcggtccccgagggccctggcccccgctgcgtccgcatcactctgcatcagcactgccggcccagtgacaccgagttccacccca

SEQ ID NO: 372917 - DNA, 120 bp, Artificial Sequence
  ENSG00000142330_15 (sequence is synthesized)
tcggcttccatatcttccaggtcccagagggtggaaggagccaggacgcacccccactgctgctgcaggagccgctgctgagctgcgtgccacatcgctacgcccaggaggtgagccggc

SEQ ID NO: 372918 - DNA, 120 bp, Artificial Sequence
  ENSG00000142330_16 (sequence is synthesized)
tctgcctcctgcctgcgggcacctacaaggttgtgccctccacctacctgccggacacagagggggccttcacagtgaccatcgcaaccaggattgacaggccatccattcacagccagg

SEQ ID NO: 372919 - DNA, 120 bp, Artificial Sequence
  ENSG00000142330_17 (sequence is synthesized)
agatgctgggccagttcctccaagaggtctccatcatggcagtgatgaaaacctaacagggtggccccctgtgccagctcaggtgactggagcccgagggcctgacaggttcccagcagc

SEQ ID NO: 372920 - DNA, 120 bp, Artificial Sequence
  ENSG00000142330_18 (sequence is synthesized)
tgggccggccagccttgcactgtgggggctggtcctgagtcttggcctgcctcccagccctgccaggaggctgcggcctaggggtccacgggaagcctccgtcaggagagacgcagccct

SEQ ID NO: 372921 - DNA, 120 bp, Artificial Sequence
  ENSG00000142330_19 (sequence is synthesized)
gggggccagctggtgctgcaaggaagggtgggaagcttgctggcttctgttgcgccactgagacggcagagaccccaggatcccagagcttcccaggatccctcccagatcctctgctga

SEQ ID NO: 372922 - DNA, 120 bp, Artificial Sequence
  ENSG00000142330_20 (sequence is synthesized)
ctccatatggaggcctcacacccagagggtagggcagcagatcttctttataactatttattgttcgaatcacttttaggatgtaactttataaataaacatgagcgctgatgatttgca

SEQ ID NO: 372923 - DNA, 120 bp, Artificial Sequence
  ENSG00000142330_21 (sequence is synthesized)
ccacatgatgttcctttcctcttgcaaaagaagttgctggaaggcccactgtccagcagcccccaggttgcctgggccacggtgcctttgtgggcccagctacaaggaggacttgcaggc

SEQ ID NO: 372924 - DNA, 120 bp, Artificial Sequence
  ENSG00000142330_22 (sequence is synthesized)
tcgtgtctgggacagatactggcgccagggccaagtgaagcccgggattggtgggcatctctagctggtccctgagagagggtggagggtgctgacaggccttggcgctttcatctgtca

SEQ ID NO: 372925 - DNA, 120 bp, Artificial Sequence
  ENSG00000142330_23 (sequence is synthesized)
ttgggcactttccctctgtggttggcaggtgtccatgtgggaactgaggccaccgggaacctgctgccagcgccctcccatgtttgtcttcttggcagcgccatcagggcagtggccaag

SEQ ID NO: 372926 - DNA, 120 bp, Artificial Sequence
  ENSG00000142330_24 (sequence is synthesized)
catgcctgccaatctcctgtcgactgcgagtcagctccgatacttcaccagattcagccacctgggggagctggaagtgaatctcatcttagctgagccttctgatgagactgcagcccc

SEQ ID NO: 372927 - DNA, 120 bp, Artificial Sequence
  ENSG00000142330_25 (sequence is synthesized)
gaagtgaatctcctcgtagctgagccttctgatgagactgcagccccggctgacacctggattgcagactcatgaaagacctgaaactctaccaacagccacctgggggagctggaagtg

SEQ ID NO: 372928 - DNA, 120 bp, Artificial Sequence
  ENSG00000142330_26 (sequence is synthesized)
aatctcctcgtagctgagccttctgatgagactgcagccccggctgacacctggattgcagactcatgaaagaccctgagcagaggacccagtttggcagagcccgaattcctgacccac

SEQ ID NO: 372929 - DNA, 120 bp, Artificial Sequence
  ENSG00000142330_27 (sequence is synthesized)
aggaactgggagataaaactctgtggttttaatcttctcattttagaggtaatttttttgtgtagcaataggtagctgacaatgcacagctaaaataatagataattaaccctaatgcta

SEQ ID NO: 372930 - DNA, 120 bp, Artificial Sequence
  ENSG00000142330_28 (sequence is synthesized)
gtttcattcatccatcagggtttgcaaagtagtgatattctacttctgtcttccttcattatttattagcagaaatgtatctataaaaagaagtgttccttcattaactctttggtcatg

SEQ ID NO: 372931 - DNA, 120 bp, Artificial Sequence
  ENSG00000142330_29 (sequence is synthesized)
ttgaggtacagtttgcataggaaaggcagggcaaatgcttgattctttcccttcctttcctcatttataaaataatgaactgttttcctggcatctttcaacaatgactaatgagttttt

SEQ ID NO: 372932 - DNA, 120 bp, Artificial Sequence
  ENSG00000142330_30 (sequence is synthesized)
gttattaaacctgtttctgtgggtagacagatactctgggaggagaaggccttctcaggttttccttacctgggagtgttcaccgttttatgcttggcttgttgctaagtgttgctgatt

SEQ ID NO: 372933 - DNA, 120 bp, Artificial Sequence
  ENSG00000142330_31 (sequence is synthesized)
aatgcagcggcgtcaacagtgtgacctcattcagagtttcactcatgtcccaggccccatggtaagcgtgtcacagtcactggctttcagacacatggtcttaccagctttgactttttt

SEQ ID NO: 372934 - DNA, 120 bp, Artificial Sequence
  ENSG00000142330_32 (sequence is synthesized)
tttaaacgagagtgctaaaatcactgccattgtgtttctggccgtaaagtggcagagccaggaccgcaccaggtgcctggtgcccagcctgcactcccccgatgctgggtcagaatgctt

SEQ ID NO: 372935 - DNA, 120 bp, Artificial Sequence
  ENSG00000142330_33 (sequence is synthesized)
acccctgaaggagccctgcggtggacgctgtgggtgcaagcagctggcccagtgtcggggcgccaggctcccagcagcaggaggggctgctgttcctgtggtgacgtgttgcttgcagcc

SEQ ID NO: 372936 - DNA, 120 bp, Artificial Sequence
  ENSG00000142330_34 (sequence is synthesized)
agctcggtcaagaactgggtcactcatgcccttgaatgtcacatttgttttggcttcaggtcagatgcttttagtgagggcagcagagtgtgtcccgggatatgtggctccctcggtgtg

SEQ ID NO: 372937 - DNA, 120 bp, Artificial Sequence
  ENSG00000142330_35 (sequence is synthesized)
gtcctcaagttttgcaatgagaggtctgttaatttcatgtgggtgatgcagccctgtgcaggcgccgacatccaggtgtgccgaagagttctctgcgacatccaggtgtgccgtagagtt

SEQ ID NO: 372938 - DNA, 120 bp, Artificial Sequence
  ENSG00000142330_36 (sequence is synthesized)
ctctgcgacatccaggtgtgccgtagagttctctgcgacatccaggtgtgccgtagagttctctgcgacatccaggtgtgcgttagagttctctgcagaccgcggtgcctgtggagcact

SEQ ID NO: 372939 - DNA, 120 bp, Artificial Sequence
  ENSG00000142330_37 (sequence is synthesized)
cagctgtggccacaccgcggccgggacactggagtagcgccgggtggtgcttatatcacgctcgccttttgcttctccctgtgcatggcaggtcattcctccgggacagccgagctgggc

SEQ ID NO: 372940 - DNA, 120 bp, Artificial Sequence
  ENSG00000142330_38 (sequence is synthesized)
gagggaggatgtgttctggctccccttactggaaaaggtctacgccaagtgcgtgtgctgggggctgaagggcctggcctggggcaagtgggagctgccactaccatgggctgccccagg

SEQ ID NO: 372941 - DNA, 120 bp, Artificial Sequence
  ENSG00000142330_39 (sequence is synthesized)
agggtctctgctcactctgggctgcagagcccccttcagttctgagggtctggcagctcattctgtgagtcaggctgacaggccaggtgcagagattcttcttttgggcctgtggattgc

SEQ ID NO: 372942 - DNA, 120 bp, Artificial Sequence
  ENSG00000142330_40 (sequence is synthesized)
ccactccctgctttcccttcccttgttccaaagcccagcgtggagtcgttctccacagagaacatgtgtgccgtcctccttattttatcggccccagcaagaaagatgcttctttatatt

SEQ ID NO: 372943 - DNA, 120 bp, Artificial Sequence
  ENSG00000142330_41 (sequence is synthesized)
tgttgtggagtggttgggacaggcagactcattgtgtagtcgttggggaggaatgaggctaccccagcataccaacacttgtgtatcacggtgcttgctggctcaggggaccaggaccct

SEQ ID NO: 372944 - DNA, 120 bp, Artificial Sequence
  ENSG00000142330_42 (sequence is synthesized)
caccatgagtcataattgaatagccttccctcttagaatgcatttgtcttcttgccaaaggcaactggactgacaggcaggcagggaagctggtgaacatgggaaggctggctggtgaca

SEQ ID NO: 372945 - DNA, 120 bp, Artificial Sequence
  ENSG00000142330_43 (sequence is synthesized)
tcagtgcccagtgagcccttccatcccaagggctgttttaggaaaagcagggttggagcttgagagccaagggatgtgggcatccatagcttccacgcctcctgccctgctcctgtgccc

SEQ ID NO: 372946 - DNA, 120 bp, Artificial Sequence
  ENSG00000142330_44 (sequence is synthesized)
acaccggatgccagagagtttctgtgtgtgggcagaggactgcagggcgctcacgcttgctgtgaagtaaggcgtttgaaggtgaggctaagccttgacttggtgaggatgaggaagaag

SEQ ID NO: 372947 - DNA, 120 bp, Artificial Sequence
  ENSG00000142330_45 (sequence is synthesized)
gcagaggggagtaaagaggtgggattgaggcagcggttggacgatttggggtgctacagaccatgggaatcagagagggggccatgctcaatgccagaggctcactcccatggtgattgt

SEQ ID NO: 372948 - DNA, 120 bp, Artificial Sequence
  ENSG00000142330_46 (sequence is synthesized)
aagagcaggcacctcctggaccaggtgcggggccccttccctgtgtttgtcctggagccggtttctttttgcgtttctccagcctgctgagtaccaggaggccttgcgaaagcagagctg

SEQ ID NO: 372949 - DNA, 120 bp, Artificial Sequence
  ENSG00000142330_47 (sequence is synthesized)
tgccgcagccggatctcctgctgtgttgggggaaggcaggagagttccaaggcagaggctgaggactgcactctgtccctctgctgcaggggggggtgccttggcctcgccagaaggctc

SEQ ID NO: 372950 - DNA, 120 bp, Artificial Sequence
  ENSG00000142330_48 (sequence is synthesized)
catcagggaggttcgccctgctctgtgctctcctgacccccggactccatggagtcagatcaccacgtttagaataaagagacaaatgtgccagctcacaggaggacggggctggctggc

SEQ ID NO: 372951 - DNA, 120 bp, Artificial Sequence
  ENSG00000142330_49 (sequence is synthesized)
cctgcccccatggcatgcatgatccattagggaggaccgtctgcacaaaggatctcactctgtttgtccaggctgaagtccagtggcaggatttcagctcactgcagcctcaacctcctg

SEQ ID NO: 372952 - DNA, 90 bp, Artificial Sequence
  ENSG00000142330_50 (sequence is synthesized)
tacaagcacagatgttttttagtagaaacagggtttcgctatgttgcccaggctagtctcaaacgcctggactccaacaatccacccacc

SEQ ID NO: 372953 - DNA, 120 bp, Artificial Sequence
  ENSG00000142330_51 (sequence is synthesized)
ggctagtctcaaacgcctggactccaacaatccacccaccttggcctcccggagtgctgggattataggctggggccactgtgctgaaccctgtccatttatttggatcttctttaattt

SEQ ID NO: 372954 - DNA, 120 bp, Artificial Sequence
  ENSG00000142330_52 (sequence is synthesized)
agaactttgggaggctgaggtgggagtatcgctggagcccaggagttcaagagacccgcctgggcaacatggcaagatctcatctctacaaaaaatgaaggaaaaaaatcacttagatgg

SEQ ID NO: 372955 - DNA, 120 bp, Artificial Sequence
  ENSG00000142330_53 (sequence is synthesized)
catctctacaaaaaatgaaggaaaaaaatcacttagatggaaccacatgtgacttttgagtgcgctctcagttttccatgagcacgcacggtttacgtgttcccttccgcaccgcttctc

SEQ ID NO: 372956 - DNA, 120 bp, Artificial Sequence
  ENSG00000142330_54 (sequence is synthesized)
acactgccacacacgcgctgtcaaatgttcgccccatgagcgggtttgccacagtctcttaatcattcccctgatgttggatattaagatctctctggttttatataattataagcagta

SEQ ID NO: 372957 - DNA, 120 bp, Artificial Sequence
  ENSG00000142330_55 (sequence is synthesized)
attgggcctggggtttcaatagggcagacatcatcacgggctcgggcagcagtcctgggaagacgcatccagaggcgtgaagttcctctgggaaaagagagggctccagggtggccgctg

SEQ ID NO: 372958 - DNA, 120 bp, Artificial Sequence
  ENSG00000142330_56 (sequence is synthesized)
cccagaaggccctgtgctgcagagctgcttcgggtgtgggaggggctgcagagctggggcacggggttgctggcaggaactcagggctctctgggtcccctccaggcttccccccagcct

SEQ ID NO: 372959 - DNA, 120 bp, Artificial Sequence
  ENSG00000142347_0 (sequence is synthesized)
atcaagttctgacccctcccttcaggctcagagccccaaacagccagctccccgcccccctccacacccagcttccctcccccatggcctcggcccctcccgccaaaggaagtgagaagg

SEQ ID NO: 372960 - DNA, 120 bp, Artificial Sequence
  ENSG00000142347_1 (sequence is synthesized)
ggctgttgtaagaggaactaaagccgggagtccggtgaacgggcagaagcagggccatgcccaagccacccccaagatccccctgaacctgcacctccatcacgacccattcaggagcct

SEQ ID NO: 372961 - DNA, 120 bp, Artificial Sequence
  ENSG00000142347_2 (sequence is synthesized)
ccaggagcccagacaccagccccccaccatgggcagcaaggagcgcttccactggcagagccacaacgtgaagcagagcggcgtggatgacatggtgcttcttccccagatcaccgaaga

SEQ ID NO: 372962 - DNA, 120 bp, Artificial Sequence
  ENSG00000142347_3 (sequence is synthesized)
cgccattgccgccaacctccggaagcgcttcatggacgactacatcttcacctacatcggctctgtgctcatctctgtaaaccccttcaagcagatgccctacttcaccgaccgtgagat

SEQ ID NO: 372963 - DNA, 120 bp, Artificial Sequence
  ENSG00000142347_4 (sequence is synthesized)
cgacctctatcagggcgcggcccagtatgagaatcccccgcacatctacgccctcacggacaacatgtaccggaacatgcttatcgactgtgagaaccagtgtgtcatcattagtggaga

SEQ ID NO: 372964 - DNA, 120 bp, Artificial Sequence
  ENSG00000142347_5 (sequence is synthesized)
gagtggagctgggaagacagtggcagccaaatatatcatgggctacatctccaaggtgtctggcggaggcgagaaggtccagcacgtcaaagatatcatcctgcagtccaacccgctgct

SEQ ID NO: 372965 - DNA, 120 bp, Artificial Sequence
  ENSG00000142347_6 (sequence is synthesized)
cgaggccttcggcaacgccaagactgtgcgcaacaacaattccagccgctttggcaagtactttgagatccagttcagccgaggtggggagccagatgggggcaagatctccaacttctt

SEQ ID NO: 372966 - DNA, 120 bp, Artificial Sequence
  ENSG00000142347_7 (sequence is synthesized)
gctggagaagtcccgcgtggtcatgcaaaatgaaaatgagaggaacttccacatctactaccagctgctggaaggggcctcccaggagcaaaggcagaacctgggcctcatgacaccgga

SEQ ID NO: 372967 - DNA, 120 bp, Artificial Sequence
  ENSG00000142347_8 (sequence is synthesized)
ctactattactacctcaaccaatcggacacctaccaggtggacggcacggacgacagaagcgactttggtgagactctgagtgctatgcaggttattgggatcccgcccagcatccagca

SEQ ID NO: 372968 - DNA, 120 bp, Artificial Sequence
  ENSG00000142347_9 (sequence is synthesized)
gctggtcctgcagctcgtggcggggatcttgcacctggggaacatcagtttctgtgaagacgggaattacgcccgagtggagagtgtggacctcctggcctttcccgcctacctgctggg

SEQ ID NO: 372969 - DNA, 120 bp, Artificial Sequence
  ENSG00000142347_10 (sequence is synthesized)
cattgacagcgggcgactgcaggagaagctgaccagccgcaagatggacagccgctggggcgggcgcagcgagtccatcaatgtgaccctcaacgtggagcaggcagcctacacccgtga

SEQ ID NO: 372970 - DNA, 120 bp, Artificial Sequence
  ENSG00000142347_11 (sequence is synthesized)
tgccctggccaaggggctctatgcccgcctcttcgacttcctcgtggaggccatcaaccgtgctatgcagaaaccccaggaagagtacagcatcggtgtgctggacatttacggcttcga

SEQ ID NO: 372971 - DNA, 120 bp, Artificial Sequence
  ENSG00000142347_12 (sequence is synthesized)
gatcttccagaaaaatggcttcgagcagttttgcatcaacttcgtcaatgagaagctgcagcaaatctttatcgaacttaccctgaaggccgagcaggaggagtatgtgcaggaaggcat

SEQ ID NO: 372972 - DNA, 120 bp, Artificial Sequence
  ENSG00000142347_13 (sequence is synthesized)
ccgctggactccaatccagtacttcaacaacaaggtcgtctgtgacctcatcgaaaacaagctgagccccccaggcatcatgagcgtcttggacgacgtgtgcgccaccatgcacgccac

SEQ ID NO: 372973 - DNA, 120 bp, Artificial Sequence
  ENSG00000142347_14 (sequence is synthesized)
gggcgggggagcagaccagacactgctgcagaagctgcaggcggctgtggggacccacgagcatttcaacagctggagcgccggcttcgtcatccaccactacgctggcaaggtctccta

SEQ ID NO: 372974 - DNA, 120 bp, Artificial Sequence
  ENSG00000142347_15 (sequence is synthesized)
cgacgtcagcggcttctgcgagaggaaccgagacgttctcttctccgacctcatagagctgatgcagaccagtgagcaggccttcctccggatgctcttccccgagaagctggatggaga

SEQ ID NO: 372975 - DNA, 120 bp, Artificial Sequence
  ENSG00000142347_16 (sequence is synthesized)
caagaaggggcgccccagcaccgccggctccaagatcaagaaacaagccaacgacctggtggccacactgatgaggtgcacaccccactacatccgctgcatcaaacccaacgagaccaa

SEQ ID NO: 372976 - DNA, 120 bp, Artificial Sequence
  ENSG00000142347_17 (sequence is synthesized)
ccgccgccagttcgccaaattcctgcagaggtatgccattctgacccccgagacgtggccgcggtggcgtggggacgaacgccagggcgtccagcacctgcttcgggcggtcaacatgga

SEQ ID NO: 372977 - DNA, 120 bp, Artificial Sequence
  ENSG00000142347_18 (sequence is synthesized)
gcccgaccagtaccagatggggagcaccaaggtctttgtcaagaacccagagtcgcttttcctcctggaggaggtgcgagagcgaaagttcgatggctttgcccgaaccatccagaaggc

SEQ ID NO: 372978 - DNA, 120 bp, Artificial Sequence
  ENSG00000142347_19 (sequence is synthesized)
ctggcggcgccacgtggctgtccggaagtacgaggagatgcgggaggaagcttccaacatcctgctgaacaagaaggagcggaggcgcaacagcatcaatcggaacttcgtcggggacta

SEQ ID NO: 372979 - DNA, 120 bp, Artificial Sequence
  ENSG00000142347_20 (sequence is synthesized)
cctggggctggaggagcggcccgagctgcgtcagttcctgggcaagagggagcgggtggacttcgccgattcggtcaccaagtacgaccgccgcttcaagcccatcaagcgggacttgat

SEQ ID NO: 372980 - DNA, 120 bp, Artificial Sequence
  ENSG00000142347_21 (sequence is synthesized)
cctgacgcccaagtgtgtgtatgtgattgggcgagagaaagtgaagaagggacctgagaagggccaggtgtgtgaagtcttgaagaagaaagtggacatccaggctctgcggggagtctc

SEQ ID NO: 372981 - DNA, 120 bp, Artificial Sequence
  ENSG00000142347_22 (sequence is synthesized)
cctcagcacgcgacaggacgacttcttcatcctccaagaggatgccgccgacagcttcctggagagcgtcttcaagaccgagtttgtcagccttctgtgcaagcgcttcgaggaggcgac

SEQ ID NO: 372982 - DNA, 120 bp, Artificial Sequence
  ENSG00000142347_23 (sequence is synthesized)
gcggaggcccctgcccctcaccttcagcgacacactacagtttcgggtgaagaaggagggctggggcggtggcggcacccgcagcgtcaccttctcccgcggcttcggcgacttggcagt

SEQ ID NO: 372983 - DNA, 120 bp, Artificial Sequence
  ENSG00000142347_24 (sequence is synthesized)
gctcaaggttggcggtcggaccctcacggtcagcgtgggcgatgggctgcccaagagctccaagcctacgcggaagggaatggccaagggaaaacctcggaggtcgtcccaagcccctac

SEQ ID NO: 372984 - DNA, 120 bp, Artificial Sequence
  ENSG00000142347_25 (sequence is synthesized)
ccgggcggcccctgcgccccccagaggcatggatcgcaatggggtgcccccctctgccagagggggccccctgcccctggagatcatgtctggagggggcacccacaggcctccccgggg

SEQ ID NO: 372985 - DNA, 120 bp, Artificial Sequence
  ENSG00000142347_26 (sequence is synthesized)
ccctccgtccacatccctgggagccagcagacgaccccgggcacgtccgccctcagagcacaacacagaattcctcaacgtgcctgaccagggcatggccggcatgcagaggaagcgcag

SEQ ID NO: 372986 - DNA, 120 bp, Artificial Sequence
  ENSG00000142347_27 (sequence is synthesized)
cgtggggcaacggccagtgcctggtgtgggccgacccaagccccagcctcggacacatggtcccaggtgccgggccctataccagtacgtgggccaagatgtggacgagctgagcttcaa

SEQ ID NO: 372987 - DNA, 120 bp, Artificial Sequence
  ENSG00000142347_28 (sequence is synthesized)
cgtgaacgaggtcattgagatcctcatggaagatccctcgggctggtggaagggccggcttcacggccaggagggccttttcccaggaaactacgtggagaagatctgagctgggccctg

SEQ ID NO: 372988 - DNA, 120 bp, Artificial Sequence
  ENSG00000142347_29 (sequence is synthesized)
ggatactgccttctctttcgcccgcctatctgcctgccggcctggtggggagccaggccctgccaatgagagcctcgtttacctgggctgcaatagcctaaaagtccagtcctttggcct

SEQ ID NO: 372989 - DNA, 120 bp, Artificial Sequence
  ENSG00000142347_30 (sequence is synthesized)
ccagtcctgcccaggccctgggtcaccaggtcactgctgcagcccccgcccctgggccctggtcttcctccaacatcacacctgctgcccattctccatttctgtgtgtgtcaaagggga

SEQ ID NO: 372990 - DNA, 120 bp, Artificial Sequence
  ENSG00000142347_31 (sequence is synthesized)
ctaacagcagaatctacctcccaactgccatgtgattaagaaatgggtcttgagtcctgtgctgttggcaaagtgccaggcacagttggggaggggggggtccttaacaagcgtgacttt

SEQ ID NO: 372991 - DNA, 120 bp, Artificial Sequence
  ENSG00000142347_32 (sequence is synthesized)
gctcattctgtcatcactaaggcaataaacctttgccaggtgaaagcacgagttaacttactaagtgcccaacaaggacgatgttttcacagccctgtgaggtaggagctgtgaaggacc

SEQ ID NO: 372992 - DNA, 120 bp, Artificial Sequence
  ENSG00000142347_33 (sequence is synthesized)
ccatcttacaggtggaacaatggaggttcagagaggttcactgacccaagactgcacagagccatgccttgcattcatatgtgaccataaagcttgaatttgtcccagtttgggctgggc

SEQ ID NO: 372993 - DNA, 60 bp, Artificial Sequence
  ENSG00000142347_34 (sequence is synthesized)
gaccaggagttcaagaccagcctggataacacagcaaaaccctgtttctactaaaaattt

SEQ ID NO: 372994 - DNA, 120 bp, Artificial Sequence
  ENSG00000142347_35 (sequence is synthesized)
tctccgacctcatagagctgatgcagaccagtgagcagtgagtggtcccaggcatggggacctccggctacaaccccccaaggggatggagggaggaccgggccccactccatcttaccc

SEQ ID NO: 372995 - DNA, 120 bp, Artificial Sequence
  ENSG00000142347_36 (sequence is synthesized)
agaactgccatctcgccacaaactcgaggggagtggctgtgcggccaggatggtgtttctatggactagttctgatgtaaaaagtaactccagagtgctgggattacaggcatgcaccac

SEQ ID NO: 372996 - DNA, 120 bp, Artificial Sequence
  ENSG00000142347_37 (sequence is synthesized)
cgcacccggccttattaaccattttaaaatgtacaatttatccgtgttgttccctttttgtgacaaagaaaaaataaaggaaataaataaataaataaaataagataaaatgaaatgaaa

SEQ ID NO: 372997 - DNA, 120 bp, Artificial Sequence
  ENSG00000142347_38 (sequence is synthesized)
aggatcccttagcaactaggggacaccccagccctccccaccgcgttcccacctctctgtgccaacctacccaggctccatagtgatacttccttctgcctctaaagctttgggaaggac

SEQ ID NO: 372998 - DNA, 71 bp, Artificial Sequence
  ENSG00000142347_39 (sequence is synthesized)
aaggtcaggagtttaagaccggcctggccaacgtggttaaaccccgtctctacttaaaatacaaaaattag

SEQ ID NO: 372999 - DNA, 80 bp, Artificial Sequence
  ENSG00000142347_40 (sequence is synthesized)
ccgtgtgactgtaatcccagctactggggaggcagaggcaggaaaattgcttgaaaacgggaggtggaagttgcagtgag

SEQ ID NO: 373000 - DNA, 120 bp, Artificial Sequence
  ENSG00000142347_41 (sequence is synthesized)
tcccttgctatattcccttgtctgttgtgggtcccatggcctaagccagaccttcagcaaacgaaatctaacaaacacagtttaccactcacttctctgtccaggactctccgtagctcc

SEQ ID NO: 373001 - DNA, 120 bp, Artificial Sequence
  ENSG00000142347_42 (sequence is synthesized)
acatctcccgcagaataaaggctaaacttagtttggcattcagagcccttcaaaacccaaacccagctaaccactgacatcttctctcctcctaccctacactcctgccctgtaaactac

SEQ ID NO: 373002 - DNA, 120 bp, Artificial Sequence
  ENSG00000142347_43 (sequence is synthesized)
ccagccccccaccatggtaagtccttcaagggtgggatctggaagaagaaagaggagggacaccagccaggtggaggtgtcctaaaaatgaccatcagaaattggggtgaggggaggggc

SEQ ID NO: 373003 - DNA, 120 bp, Artificial Sequence
  ENSG00000142347_44 (sequence is synthesized)
atggtggacttctgtgggggtggggtgtctctcagtgcagctcaggtgcctccagcatcccttaccagggagcaagctcccatctgtaggtggtggggatgccagggtggtatccctgga

SEQ ID NO: 373004 - DNA, 120 bp, Artificial Sequence
  ENSG00000142347_45 (sequence is synthesized)
tccaaggatagggcaggacctggaagacagaaggtggcccagggagaatcacagagtctgcagggacaaggacatagcctcctttgcttgcaaattaagggagccctttcccagtccagc

SEQ ID NO: 373005 - DNA, 120 bp, Artificial Sequence
  ENSG00000142347_46 (sequence is synthesized)
cccctctcttggccccggttcccacagatgtcatatttggaaatccgtctagatgcggaagttgctcttcaggggtctttcagttgcaacattctcaaggtctgtgggttctgccacaga

SEQ ID NO: 373006 - DNA, 120 bp, Artificial Sequence
  ENSG00000142347_47 (sequence is synthesized)
gtcctcggctgagatgggaagctatgtctaacaagcgatggggtggattgacgccctccctgtgccggtgacgggcggtatggctgcagcagaggcaggagaggctgaatacgtccatgc

SEQ ID NO: 373007 - DNA, 120 bp, Artificial Sequence
  ENSG00000142347_48 (sequence is synthesized)
caccctttggtgggcatcccttatcccaagaggaggatggcagccagaggtgttgctgcctgtcaagtctgaggtctgtcgatgatagcaacggggagactgtcgtgatcatggcgctat

SEQ ID NO: 373008 - DNA, 120 bp, Artificial Sequence
  ENSG00000142347_49 (sequence is synthesized)
tcctagcagtatcgtaccaccataagacgcaaagtaagaggtggccagggctgaccccaccccacagctctctgctgtgtagaccacttcagctttcatttctcgtcattcagtcagtga

SEQ ID NO: 373009 - DNA, 120 bp, Artificial Sequence
  ENSG00000142347_50 (sequence is synthesized)
gaaggggccgggggagagggagcaccacctggagcccagcggggtggacaatgggaaggtaaacacctaggggggcatggcagggcagatgagggatcacaggggctgagccaggcaagc

SEQ ID NO: 373010 - DNA, 120 bp, Artificial Sequence
  ENSG00000142347_51 (sequence is synthesized)
ctacagcctggcaccctcacctggcccagatgcacctgcccacagccagatatcccccagcctagatccatctgttccatcacaggtacaccctcacctggcccatatgcacctgcccac

SEQ ID NO: 373011 - DNA, 120 bp, Artificial Sequence
  ENSG00000142347_52 (sequence is synthesized)
actgcgcttcggccccggccgcggccccgcccctgccccaaccagcgagagttgggtggggcgggggacctcagccagcgcccccaagctttcttctctccccatagactacagtttcgg

SEQ ID NO: 373012 - DNA, 120 bp, Artificial Sequence
  ENSG00000142347_53 (sequence is synthesized)
caggcagggaaggaatgaatggctgggccatggacggagaggagggtgaaggagcagagggaggaatgggccgggagagcaccaagtggtgacacagaggacagacagagtgacagcagg

SEQ ID NO: 373013 - DNA, 120 bp, Artificial Sequence
  ENSG00000142347_54 (sequence is synthesized)
gctctggttgggggcagctgtggctgccactgctccctctgtcctggggaagctcagccccagcgtgttccatttcccccattccggatccaaccctgtttgttcttttttttttttttt

SEQ ID NO: 373014 - DNA, 120 bp, Artificial Sequence
  ENSG00000142347_55 (sequence is synthesized)
catcacaggtatatcctcacctagcccaggcacacctgcccacaggtatctatcccccagcctagatcaatctgttccatcacaggtacatcattacccggcacagacacacctgcccac

SEQ ID NO: 373015 - DNA, 120 bp, Artificial Sequence
  ENSG00000142347_56 (sequence is synthesized)
tgggtcgccctcacctgcatggtagtgcagccccacccatctgcactcctgcctcagtctgacttcttcccactccacctgcctctgccccagcacgtcaaagatatcatcctgcagtcc

SEQ ID NO: 373016 - DNA, 78 bp, Artificial Sequence
  ENSG00000142347_57 (sequence is synthesized)
aaatttcaaattagttgggtgtagtggtgtgcatgtgtagttctggctactcagagggctgaggttgggggatcattt

SEQ ID NO: 373017 - DNA, 120 bp, Artificial Sequence
  ENSG00000142347_58 (sequence is synthesized)
gtgtgcatgtgtagttctggctactcagagggctgaggttgggggatcatttgaacccaggaggttggggctgcagtgagctatgattgcgctattgtactccagcctgggtgacagagc

SEQ ID NO: 373018 - DNA, 120 bp, Artificial Sequence
  ENSG00000142347_59 (sequence is synthesized)
ttatccagggctgtagaattccactgtcccccgcctcaatccaccccctactaaccagaactacagacccttccggctgaccccccaggaactctctaagccccaaacttgtctggacac

SEQ ID NO: 373019 - DNA, 120 bp, Artificial Sequence
  ENSG00000142347_60 (sequence is synthesized)
aaggtcgtctgtgacctcatcgaaaacaagctggtgagggctgggtcaactttggcgggggcgtctcactggtcccctgagctgagtctggaagatgagggggagggccaagggtgttat

SEQ ID NO: 373020 - DNA, 120 bp, Artificial Sequence
  ENSG00000142347_61 (sequence is synthesized)
ggcatcctcaggcccttctctaccctacactcaggacttccagcgacagataacaaccaaaatgtcccttccgcccctcatccattcattccgcctacttgtccacctttcacttaatca

SEQ ID NO: 373021 - DNA, 120 bp, Artificial Sequence
  ENSG00000142396_0 (sequence is synthesized)
gaggtcctgggcggccgctggccaccaggcggaagtgcgtaccggaagtgccggcggcagtgtgtaagacgctcacgggcgcgcggactatcgggcggctaggctctctgaggaggctgc

SEQ ID NO: 373022 - DNA, 120 bp, Artificial Sequence
  ENSG00000142396_1 (sequence is synthesized)
cacagtgaagcaaccgtgacaagtggtgcccgaccagggacctgaacgaggaaggtctgccagagcagagaaagtgaaactgatcagacgaactacgaacccctggacgggagagtctgc

SEQ ID NO: 373023 - DNA, 120 bp, Artificial Sequence
  ENSG00000142396_2 (sequence is synthesized)
cggcggagaatataaggagatggacaaaccgtgtgggtgccctccaggtgtgtgtgaccatggaacgggagaccggagggatccatggtattcaaccgtgggcctgttacctccagtacg

SEQ ID NO: 373024 - DNA, 120 bp, Artificial Sequence
  ENSG00000142396_3 (sequence is synthesized)
agccatgagccagcggaatctgaatgcaaagacagaacaagggccgaccggagtcacaatgacatccaaccccataacatggggacagatcaagaaaacgacacaagaagctgagaaact

SEQ ID NO: 373025 - DNA, 120 bp, Artificial Sequence
  ENSG00000142396_4 (sequence is synthesized)
actggagcgccagggtcaggcaaaaacccctgactccatgttcttggccatgctagctgtagtgtcctgtgcgtctataggatcgggtgaaccaccaaccggcaattgaaagctgcacag

SEQ ID NO: 373026 - DNA, 120 bp, Artificial Sequence
  ENSG00000142396_5 (sequence is synthesized)
cctgaaattacctttattcaattaatgcaaaaacaaaaggggagatgttggaggccgaaggaatgagggtcgtgaccaactcagtataccactggaggctctgtgagcaaacagcaaact

SEQ ID NO: 373027 - DNA, 120 bp, Artificial Sequence
  ENSG00000142396_6 (sequence is synthesized)
tgacaaactctgtctgccgccagaaggaatgctgggggcagtcatgtcccaggtcccgtgctccttgaggttatccacaggaacatccagaacctgttgaacaaagaaaggaatcatgtg

SEQ ID NO: 373028 - DNA, 120 bp, Artificial Sequence
  ENSG00000142396_7 (sequence is synthesized)
ggcctgtgttaaatcaaatagctgaccgacagttatcccttcctccctattcactctacctaataaatatgaagggctgtaaaagctcaggtccctgttccctaatatcaaggagccccc

SEQ ID NO: 373029 - DNA, 120 bp, Artificial Sequence
  ENSG00000142396_8 (sequence is synthesized)
tgaccccttctttcaaacagatccttttgtctgtctcatttctgcattcgtcgtccttcgttcggtccagaagcaaccgcgacagtcctgcatgtgttgatgccacctgtatgtgcaggt

SEQ ID NO: 373030 - DNA, 120 bp, Artificial Sequence
  ENSG00000142396_9 (sequence is synthesized)
gtgacctcaggtgtgtgagtatccctcataccccttatcatcactgcctattcgctcttcctccagcctctggcaaccactaatccacgttatatgtctagatttgcctcttctggacac

SEQ ID NO: 373031 - DNA, 120 bp, Artificial Sequence
  ENSG00000142396_10 (sequence is synthesized)
ttcatataaatggagtcatacaatatgtggtttcttgtgtctggctttttaccactgaacgttttcagagttcatccatgttgtagcatgtatcagtttttcattcctctttatggctga

SEQ ID NO: 373032 - DNA, 120 bp, Artificial Sequence
  ENSG00000142396_11 (sequence is synthesized)
ataatactgcattgtatggatataccacagtttgtttactcattagttcatagacattggggttgtttccaactctctgatattataaatgctactgctgtgaaaattcatgtacaggtg

SEQ ID NO: 373033 - DNA, 120 bp, Artificial Sequence
  ENSG00000142396_12 (sequence is synthesized)
gaatataagcccgtgtcctctgtctcttgcttcggcgcctggatggcttgccgcccacacaagagcaccttaaaaccagaactgcttaacctatttctgagactccaaaaagctgttcgc

SEQ ID NO: 373034 - DNA, 120 bp, Artificial Sequence
  ENSG00000142396_13 (sequence is synthesized)
cagaatctgtctgttgaggagcaacattatgtgcagctgcttaaagttttacttaaacaatctggtgctcgggttagttctcaaacattaagcttctgcaggaggttattacacataacc

SEQ ID NO: 373035 - DNA, 120 bp, Artificial Sequence
  ENSG00000142396_14 (sequence is synthesized)
catggtttctgcagacaggtactcttgctgtggaaaattgagactgagtaggagaaagattgaaacgagctcatcagaaagttcttaaagtggatccttctattttctctgcttggggtt

SEQ ID NO: 373036 - DNA, 120 bp, Artificial Sequence
  ENSG00000142396_15 (sequence is synthesized)
tggtctgtactgtcctcctgccattgtcctcttcttattctgccagacagcaggtgctatgttctgaatctcaaaaattgaaagaatcttttgtctcaccagcagcgcccattgaaaatg

SEQ ID NO: 373037 - DNA, 120 bp, Artificial Sequence
  ENSG00000142396_16 (sequence is synthesized)
actataccattacacaagaaggacaagcctcaattcgccttctctgtgccttctattaatcagagagagcctgtctcttgtgatcaatgaaaagttttattaccccaggcatgctcaaca

SEQ ID NO: 373038 - DNA, 120 bp, Artificial Sequence
  ENSG00000142396_17 (sequence is synthesized)
gtcctacgttatgtcagcattttgtaggaaaagcattgaaggagcctcggaatatgttttccaccacctacatcattcattatatggataatattgttttggccactcctacagatcaag

SEQ ID NO: 373039 - DNA, 120 bp, Artificial Sequence
  ENSG00000142396_18 (sequence is synthesized)
tattataccagttattcagagaaataaaatgggctttaactaaatggaatctcaaaatagctcctgaaaaggtacaaacaacctcctcataccaatacttagatactactgttactgaaa

SEQ ID NO: 373040 - DNA, 120 bp, Artificial Sequence
  ENSG00000142396_19 (sequence is synthesized)
aaagtattcagcctcagaaagtagctcttcgtaagaacaaattacaaactctgaataacttaggggatattaattggctgcgcccaatgctaggtattgcttcttatcaactcactcatg

SEQ ID NO: 373041 - DNA, 120 bp, Artificial Sequence
  ENSG00000142396_20 (sequence is synthesized)
tttatcaaaccctccaaggagattcttcattagattcccctcggcaacttactaaggaggcagaagctgaattacagcttgtagaaagatgcttcagcaacgacatgcctcctggctaca

SEQ ID NO: 373042 - DNA, 120 bp, Artificial Sequence
  ENSG00000142396_21 (sequence is synthesized)
accacaaaagtctttggttttgtttattcttcctaccccccattctccatcaggacttttagctcaattcatagacaaaactataatggtaatagaatggctttttttatccagtcaaac

SEQ ID NO: 373043 - DNA, 120 bp, Artificial Sequence
  ENSG00000142396_22 (sequence is synthesized)
agtaaaatctttgcaagtttatcttgctttagtcacacaacttataacaataggcaggcatagatcaaaaatgcttacaggatatgatcctgataaaattattgttaccttggattccca

SEQ ID NO: 373044 - DNA, 120 bp, Artificial Sequence
  ENSG00000142396_23 (sequence is synthesized)
acaacaggctgcggcctgggagatgtccactgcatggcaaatcactttcgcagattttgtagaaataatagataaccattatccatcagacaaaattttgcagttttataaaattcaccc

SEQ ID NO: 373045 - DNA, 120 bp, Artificial Sequence
  ENSG00000142396_24 (sequence is synthesized)
ttttattccccctgtgattgctcatcacaaacccatttcaggtggacagacctattttaccgatggctcttccaaaagccacacagccatttatggacctaaatatacttaaataataaa

SEQ ID NO: 373046 - DNA, 120 bp, Artificial Sequence
  ENSG00000142396_25 (sequence is synthesized)
gacccctagagtttcagctcaacactctgaattaatggcagttattcaagttttaaagctcacagctttatttcctattaatattgtctgtaattcagcctatgtcgtaaatgtagctag

SEQ ID NO: 373047 - DNA, 71 bp, Artificial Sequence
  ENSG00000142396_26 (sequence is synthesized)
atattgtctgtaattcagcctatgtcgtaaatgtagctagttgcattaaaactgccactatcaagagtgta

SEQ ID NO: 373048 - DNA, 60 bp, Artificial Sequence
  ENSG00000142396_27 (sequence is synthesized)
actgtgctcccccagggaaagggagaccgccccccaccctttcccggtctgctaagtagc

SEQ ID NO: 373049 - DNA, 64 bp, Artificial Sequence
  ENSG00000142396_28 (sequence is synthesized)
ccgctagaccacggtcttcccaaacgctggcgtcaccactagaccaaggagccctctggtggcc

SEQ ID NO: 373050 - DNA, 120 bp, Artificial Sequence
  ENSG00000142396_29 (sequence is synthesized)
ttcctggggccactatctctaggtaatgatagagcagataaattcatcagttctatatttcaacaagcccaagcttcccatgctttactgcatcagaacaacttgcccttactcgtatgt

SEQ ID NO: 373051 - DNA, 120 bp, Artificial Sequence
  ENSG00000142396_30 (sequence is synthesized)
ttcatctgcctcgcagccaggcttgagttattgtgcaagcctgccccacttgccagcatgtccctggtgttgcacctgtggaaggatgcaacccacgaggcttggctccaaatgaaatct

SEQ ID NO: 373052 - DNA, 120 bp, Artificial Sequence
  ENSG00000142396_31 (sequence is synthesized)
ggcagatggatgttacatatatatagcagcctttggctaactccgctatgttcatgtaatatagacacttactcccatatgttacatgccacatgccaaactggggaaacagctggtcat

SEQ ID NO: 373053 - DNA, 120 bp, Artificial Sequence
  ENSG00000142396_32 (sequence is synthesized)
gtctgacgatactgtctgtcgtcatttgcccatatgggggtccctaaacaatttaaaactgacagtggactcgcttatgttagtcatgctttcccaattttttacaattgtgggcaatca

SEQ ID NO: 373054 - DNA, 120 bp, Artificial Sequence
  ENSG00000142396_33 (sequence is synthesized)
atcataaaacaggaattccatacaatccctgagggccaggcattattgagcgggtacatcaaacactacaacgcatgctgaaaaaacaaaaagggagaataggggaccaattaccacttc

SEQ ID NO: 373055 - DNA, 120 bp, Artificial Sequence
  ENSG00000142396_34 (sequence is synthesized)
aaacaaaattacatttagccttgtttactttaaattgtttgactcctggtacggatggcaagaccccagcagaacgacactggcaactgctagaggaaaagaggcaagtttatccaaaag

SEQ ID NO: 373056 - DNA, 120 bp, Artificial Sequence
  ENSG00000142405_0 (sequence is synthesized)
ttcagcaaaaggtctttcctcccttgctctctcctccaaccactggctcagcctctccgcccgctgcctgtgaatgatgcaatggaaggtgtgctggggtcgccctgtgtcccgtgcata

SEQ ID NO: 373057 - DNA, 120 bp, Artificial Sequence
  ENSG00000142405_1 (sequence is synthesized)
ggagcatctcagcctccaggtcctctcctttggggctcacggcacccccatgctacgaaccgcaggcagggacggcctctgtcgcctgtccacctacttggaagaactcgaggctgtgga

SEQ ID NO: 373058 - DNA, 120 bp, Artificial Sequence
  ENSG00000142405_2 (sequence is synthesized)
actgaagaagttcaagttatacctggggaccgcgacagagctgggagaaggcaagatcccctggggaagcatggagaaggccggtcccctggaaatggcccagctgctcatcacccactt

SEQ ID NO: 373059 - DNA, 120 bp, Artificial Sequence
  ENSG00000142405_3 (sequence is synthesized)
cgggccagaggaggcctggaggttggctctcagcacctttgagcggataaacaggaaggacctgtgggagagaggacagagagaggacctggtgagggataccccacctggtggcccgtc

SEQ ID NO: 373060 - DNA, 120 bp, Artificial Sequence
  ENSG00000142405_4 (sequence is synthesized)
ctcacttgggaaccagtcaacatgccttctggaagtctctcttgtcactccaagaaaagatccccaggaaacctacagggactatgtccgcaggaaattccggctcatggaagaccgcaa

SEQ ID NO: 373061 - DNA, 120 bp, Artificial Sequence
  ENSG00000142405_5 (sequence is synthesized)
tgcgcgcctaggggaatgtgtcaacctcagccaccggtacacccggctcctgctggtgaaggagcactcaaaccccatgcaggtccagcagcagcttctggacacaggccggggacacgc

SEQ ID NO: 373062 - DNA, 120 bp, Artificial Sequence
  ENSG00000142405_6 (sequence is synthesized)
gaggaccgtgggacaccaggctagccccatcaagatagagaccctctttgagccagacgaggagcgccccgagccaccgcgcaccgtggtcatgcaaggcgcggcagggataggcaagtc

SEQ ID NO: 373063 - DNA, 120 bp, Artificial Sequence
  ENSG00000142405_7 (sequence is synthesized)
catgctggcacacaaggtgatgctggactgggcggacgggaagctcttccaaggcagatttgattatctcttctacatcaactgcagggagatgaaccagagtgccacggaatgcagcat

SEQ ID NO: 373064 - DNA, 120 bp, Artificial Sequence
  ENSG00000142405_8 (sequence is synthesized)
gcaagacctcatcttcagctgctggcctgagcccagcgcgcctctccaggagctcatccgagttcccgagcgcctccttttcatcatcgacggcttcgatgagctcaagccttctttcca

SEQ ID NO: 373065 - DNA, 120 bp, Artificial Sequence
  ENSG00000142405_9 (sequence is synthesized)
cgatcctcagggaccctggtgcctctgctgggaggagaaacggcccacggagctgcttcttaacagcttaattcggaagaagctgctccctgagctatctttgctcatcaccacacggcc

SEQ ID NO: 373066 - DNA, 120 bp, Artificial Sequence
  ENSG00000142405_10 (sequence is synthesized)
cacggctttggagaagctccaccgtctgctggagcaccccaggcatgtggagatcctgggcttctctgaggcagaaaggaaggaatacttctacaagtatttccacaatgcagagcaggc

SEQ ID NO: 373067 - DNA, 120 bp, Artificial Sequence
  ENSG00000142405_11 (sequence is synthesized)
gggccaagtcttcaattacgtgagggacaacgagcctctcttcaccatgtgcttcgtccccctggtgtgctgggtggtgtgtacctgcctccagcagcagctggagggtggggggctgtt

SEQ ID NO: 373068 - DNA, 120 bp, Artificial Sequence
  ENSG00000142405_12 (sequence is synthesized)
gagacagacgtccaggaccaccactgcagtgtacatgctctacctgctgagtctgatgcaacccaagccgggggccccgcgcctccagcccccacccaaccagagagggttgtgctcctt

SEQ ID NO: 373069 - DNA, 120 bp, Artificial Sequence
  ENSG00000142405_13 (sequence is synthesized)
ggcggcagatgggctctggaatcagaaaatcctatttgaggagcaggacctccggaagcacggcctagacggggaagacgtctctgccttcctcaacatgaacatcttccagaaggacat

SEQ ID NO: 373070 - DNA, 120 bp, Artificial Sequence
  ENSG00000142405_14 (sequence is synthesized)
caactgtgagaggtactacagcttcatccacttgagtttccaggaattctttgcagctatgtactatatcctggacgagggggagggcggggcaggcccagaccaggacgtgaccaggct

SEQ ID NO: 373071 - DNA, 120 bp, Artificial Sequence
  ENSG00000142405_15 (sequence is synthesized)
caggagccacctggagaagagtctctgctggaaggtctcgccgcacatcaagatggacctgttgcagtggatccaaagcaaagctcagagcgacggctccaccctgcagcagggctcctt

SEQ ID NO: 373072 - DNA, 120 bp, Artificial Sequence
  ENSG00000142405_16 (sequence is synthesized)
ggagttcttcagctgcttgtacgagatccaggaggaggagtttatccagcaggccctgagccacttccaggtgatcgtggtcagcaacattgcctccaagatggagcacatggtctcctc

SEQ ID NO: 373073 - DNA, 120 bp, Artificial Sequence
  ENSG00000142405_17 (sequence is synthesized)
gttctgtctgaagcgctgcaggagcgcccaggtgctgcacttgtatggcgccacctacagcgcggacggggaagaccgcgcgaggtgctccgcaggagcgcacacgctgttggtgcagct

SEQ ID NO: 373074 - DNA, 120 bp, Artificial Sequence
  ENSG00000142405_18 (sequence is synthesized)
accagagaggaccgttctgctggacgcctacagtgaacatctggcagcggccctgtgcaccaatccaaacctgatagagctgtctctgtaccgaaatgccctgggcagccggggggtgaa

SEQ ID NO: 373075 - DNA, 120 bp, Artificial Sequence
  ENSG00000142405_19 (sequence is synthesized)
gctgctctgtcaaggactcagacaccccaactgcaaacttcagaacctgaggctgaagaggtgccgcatctccagctcagcctgcgaggacctctctgcagctctcatagccaataagaa

SEQ ID NO: 373076 - DNA, 120 bp, Artificial Sequence
  ENSG00000142405_20 (sequence is synthesized)
tttgacaaggatggatctcagtggcaacggcgttggattcccaggcatgatgctgctttgcgagggcctgcggcatccccagtgcaggctgcagatgattcagttgaggaagtgtcagct

SEQ ID NO: 373077 - DNA, 120 bp, Artificial Sequence
  ENSG00000142405_21 (sequence is synthesized)
ggagtccggggcttgtcaggagatggcttctgtgctcggcaccaacccacatctggttgagttggacctgacaggaaatgcactggaggatttgggcctgaggttactatgccagggact

SEQ ID NO: 373078 - DNA, 120 bp, Artificial Sequence
  ENSG00000142405_22 (sequence is synthesized)
gaggcacccagtctgcagactacggactttgtggctgaagatctgccgcctcactgctgctgcctgtgacgagctggcctcaactctcagtgtgaaccagagcctgagagagctggacct

SEQ ID NO: 373079 - DNA, 120 bp, Artificial Sequence
  ENSG00000142405_23 (sequence is synthesized)
gagcctgaatgagctgggggacctcggggtgctgctgctgtgtgagggcctcaggcatcccacgtgcaagctccagaccctgcggttgggcatctgccggctgggctctgccgcctgtga

SEQ ID NO: 373080 - DNA, 120 bp, Artificial Sequence
  ENSG00000142405_24 (sequence is synthesized)
gggtctttctgtggtgctccaggccaaccacaacctccgggagctggacttgagtttcaacgacctgggagactggggcctgtggttgctggctgaggggctgcaacatcccgcctgcag

SEQ ID NO: 373081 - DNA, 120 bp, Artificial Sequence
  ENSG00000142405_25 (sequence is synthesized)
actccagaaactgtggctggatagctgtggcctcacagccaaggcttgtgagaatctttacttcaccctggggatcaaccagaccttgaccgacctttacctgaccaacaacgccctagg

SEQ ID NO: 373082 - DNA, 120 bp, Artificial Sequence
  ENSG00000142405_26 (sequence is synthesized)
ggacacaggtgtccgactgctttgcaagcggctgagccatcctggctgcaaactccgagtcctctggttatttgggatggacctgaataaaatgacccacagtaggttggcagcgcttcg

SEQ ID NO: 373083 - DNA, 120 bp, Artificial Sequence
  ENSG00000142405_27 (sequence is synthesized)
agtaacaaaaccttatttggacattggctgctgaatggtcctatctgctggctctcccctgagatctggacagaggaagatgggagggtgctcatcacccccccagcataatgatcagcc

SEQ ID NO: 373084 - DNA, 120 bp, Artificial Sequence
  ENSG00000142405_28 (sequence is synthesized)
tccttcctagagacagactcatgcagattgagatcaaaagtccctctgcttgggatcaaattaatgtttgacagagctggccaggcgtggtggctcatgtatgtaatcctagcacttcga

SEQ ID NO: 373085 - DNA, 72 bp, Artificial Sequence
  ENSG00000142405_29 (sequence is synthesized)
agtccctttttcttgagagagtgtggctctgtcacctgcgtgtctcagcctcctgagcagctgggaccacag

SEQ ID NO: 373086 - DNA, 120 bp, Artificial Sequence
  ENSG00000142405_30 (sequence is synthesized)
tgtgagccaccacacccagcctctatatcccttttatcggtggacccaacaatcttctgtagacagaagactgtgtgaataagccaatggtcccaagagagcacgcatcctaatgagaac

SEQ ID NO: 373087 - DNA, 120 bp, Artificial Sequence
  ENSG00000142405_31 (sequence is synthesized)
ggagacagataataaagagggaaacaagtaaaccaactatcaatgattaggagcgtcagatagagccaggtgcagcctggacaacatgatgagatccccatctctaaaaatataaaataa

SEQ ID NO: 373088 - DNA, 120 bp, Artificial Sequence
  ENSG00000142405_32 (sequence is synthesized)
attagctggtcatgatggtgcacacctgtagccccagcttctcagtaggctgaggtgggaggattgcttaagcctgggaggtcaagcctacagtgagccatgatctcaccatgcactcca

SEQ ID NO: 373089 - DNA, 120 bp, Artificial Sequence
  ENSG00000142405_33 (sequence is synthesized)
gtcaagcctacagtgagccatgatctcaccatgcactccagcctagacaacagggcaaggccctctaaaaaaaaaaatgaaaagatagcatgctttggccggatgtggtggctcacgcct

SEQ ID NO: 373090 - DNA, 90 bp, Artificial Sequence
  ENSG00000142405_34 (sequence is synthesized)
catggtggcacacgtctgtaagattgcttcaacccaggaggcagaggttgtggctgaagaggtgccgcatctccagctcagcctgcgagg

SEQ ID NO: 373091 - DNA, 120 bp, Artificial Sequence
  ENSG00000142408_0 (sequence is synthesized)
ctgcgctgtgaacccccccccagccgccggcacggccccgcccccgctgccccggtggtggcccacggccccccggctgcccgtggtcaaactggagtcgctgaagcgctggaacgaaga

SEQ ID NO: 373092 - DNA, 120 bp, Artificial Sequence
  ENSG00000142408_1 (sequence is synthesized)
ctggaacgaagagcggggcctctggtgcgagaagggggtgcaggtgctgctgacgacggtgggcgccttcgccgccttcggcctcatgaccatcgccatcagcactgactactggctcta

SEQ ID NO: 373093 - DNA, 120 bp, Artificial Sequence
  ENSG00000142408_2 (sequence is synthesized)
cacgcgcgccctcatctgcaacaccaccaacctcacggccggcggcgacgacgggaccccccaccgcgggggcggcggcgcctcggagaagaaggaccccggcggcctcacgcactcggg

SEQ ID NO: 373094 - DNA, 120 bp, Artificial Sequence
  ENSG00000142408_3 (sequence is synthesized)
cctctggaggatctgctgcctggaagggttgaaaagaggcgtctgcgtgaagatcaatcatttcccggaggacacggactacgaccacgacagcgcggagtatctactccgagttgtccg

SEQ ID NO: 373095 - DNA, 120 bp, Artificial Sequence
  ENSG00000142408_4 (sequence is synthesized)
ggcctccagcatcttccccatccttagcgccatcctgctgctgctcgggggtgtgtgcgtggcggcctcccgcgtctacaagtccaagaggaacatcattctgggcgcagggatcctgtt

SEQ ID NO: 373096 - DNA, 120 bp, Artificial Sequence
  ENSG00000142408_5 (sequence is synthesized)
cgtggcagcaggcctgagcaacatcatcggcgtgatcgtgtacatctccgccaacgcgggcgagccgggcccgaagcgggacgaggagaagaaaaaccactactcgtacggctggtcctt

SEQ ID NO: 373097 - DNA, 120 bp, Artificial Sequence
  ENSG00000142408_6 (sequence is synthesized)
ctacttcggcgggctgtcgttcatcctggccgaggtgataggcgtgctggccgtcaacatctacatcgagcgcagccgcgaggcgcactgccagtctcgctcggacctgctcaaggccgg

SEQ ID NO: 373098 - DNA, 120 bp, Artificial Sequence
  ENSG00000142408_7 (sequence is synthesized)
cgggggcgcgggcggcagtggcgggagcggcccctcggccatcctccgtctgcccagttaccgcttccgctaccgccgccgctcccgctctagctcccgctccagcgagccgtcgccgtc

SEQ ID NO: 373099 - DNA, 120 bp, Artificial Sequence
  ENSG00000142408_8 (sequence is synthesized)
cgtcgcgggacgcgtctcccggcggccccgggggcccgggctttgcctccacggacatctccatgtacacgctcagccgcgacccctccaagggcagcgtggccgcggggctggcggggg

SEQ ID NO: 373100 - DNA, 80 bp, Artificial Sequence
  ENSG00000142408_9 (sequence is synthesized)
cggcggaggcggcggcggggcgggtgccgagcgggaccgcgggggggcgtccggcttcctcacgctgcacaacgccttcc

SEQ ID NO: 373101 - DNA, 80 bp, Artificial Sequence
  ENSG00000142408_10 (sequence is synthesized)
cacgctgcacaacgccttccccaaggaggcgggcggcggcgtcacggtcacggtcaccgggccgcccgccccgcccgcgc

SEQ ID NO: 373102 - DNA, 120 bp, Artificial Sequence
  ENSG00000142408_11 (sequence is synthesized)
ggccaaggaggccgccgcctccaacaccaacacgctcaacaggaaaaccacgcctgtgtaggggcgcggcgggggagccgaggggcgtgtccggggcgcgtgcgcgggcgcgcgtgcatc

SEQ ID NO: 373103 - DNA, 80 bp, Artificial Sequence
  ENSG00000142408_12 (sequence is synthesized)
gaggctgccggggtcgggggcgcccccgctttcccccgtgagcgcgctggagactgctgggcccgccccacgcccaccct

SEQ ID NO: 373104 - DNA, 120 bp, Artificial Sequence
  ENSG00000142408_13 (sequence is synthesized)
gggggcaggggagggagggggccgctgtgagggagcgtcgtgttttatttttttgggggatctatggggaggggggagggccatggtgttttttgcagtttcgagatgttttctttttca

SEQ ID NO: 373105 - DNA, 120 bp, Artificial Sequence
  ENSG00000142408_14 (sequence is synthesized)
gggcggggcggggggaggggagggagggactcccagcccagcccaactcctggagaggggcccataatacacgaatacatagttacacccacaaactatatatatgccctatataaagag

SEQ ID NO: 373106 - DNA, 120 bp, Artificial Sequence
  ENSG00000142408_15 (sequence is synthesized)
tatatgccctatataaagagacacagcgaagggatgcagaaaggcagaaagaagggttggacgcgggcattcattcatttttttcattcattattccacaagggcttattaagcacctac

SEQ ID NO: 373107 - DNA, 120 bp, Artificial Sequence
  ENSG00000142408_16 (sequence is synthesized)
tgtgtaccaggcactggtacataagaaggcattggagcaggggacacgaacgaggcacagaaagggccttctcattcattcattcattaccggcaatttatttgtgcgccttaaaaagct

SEQ ID NO: 373108 - DNA, 120 bp, Artificial Sequence
  ENSG00000142408_17 (sequence is synthesized)
aggcattgtgctccgtgctcagcgtgcaggaggcaggaaaacagccaggggccccgacgtctcatagagtaaacatcttgtgcatgagacaggcattaatcgatcatgtacatacacaat

SEQ ID NO: 373109 - DNA, 120 bp, Artificial Sequence
  ENSG00000142408_18 (sequence is synthesized)
aaattacagttaggctataggagaaacgagatgctatgaaatgctccatcaggggagcctaacccagttgtgaggaagagatttcagtggacagtgaaaggatgagaagaagccagcagg

SEQ ID NO: 373110 - DNA, 120 bp, Artificial Sequence
  ENSG00000142408_19 (sequence is synthesized)
gcggagctggggcaggagtgtggcaggcagagcagcacgtgcaaaggccccggggcaggaaggagcttgcagcgagggctgaagggtagtgaggcaggtgagcggggatcaaggtgaggc

SEQ ID NO: 373111 - DNA, 120 bp, Artificial Sequence
  ENSG00000142408_20 (sequence is synthesized)
cggagacacagacagggccagattgtgcaggggctcgtaggtcaggagttcagattttattctaggagtggtgagggccgtggaacgggtttaagcaggacgctaacgtgaatggtgtac

SEQ ID NO: 373112 - DNA, 120 bp, Artificial Sequence
  ENSG00000142408_21 (sequence is synthesized)
aaagggaagacaggaactcggaggcaagagtaggaggcagagatgtgctgaaatacagcatcaaacatgggcacgggcccttggagctcacactcttgtgggaggaagcacgtaattaca

SEQ ID NO: 373113 - DNA, 120 bp, Artificial Sequence
  ENSG00000142408_22 (sequence is synthesized)
cagatgctgaagcatagtcatggtgtctggtgtgcaggagaaagccgtggggcttagagactcatgtgtctgtcactcgttcattcagccactcacccattgccatttttggccatctgc

SEQ ID NO: 373114 - DNA, 120 bp, Artificial Sequence
  ENSG00000142408_23 (sequence is synthesized)
taaggtaccaggaagtgtgttaggatccagatccccaggggtgaaacagactctagccctgctctcaagcagtttattgtcatcaaacaccgccatccaggcagggcaatcggtgctgga

SEQ ID NO: 373115 - DNA, 120 bp, Artificial Sequence
  ENSG00000142408_24 (sequence is synthesized)
acccggaccaccgtgggtaccgtggcacacggtggacagagtgaccaactgccaggagtgagcagcacttggggtaggcttcctggagaatatgatgcccattctgggtcttgaagaaat

SEQ ID NO: 373116 - DNA, 120 bp, Artificial Sequence
  ENSG00000142408_25 (sequence is synthesized)
gagtgggcatcttctggttgatgaaaggcatgagaaaggcttgtggggccaaagaacaacttgggtgaaaacgggaggaagtgaacgagcatgatgtattggggtcagtgctaacagttc

SEQ ID NO: 373117 - DNA, 120 bp, Artificial Sequence
  ENSG00000142408_26 (sequence is synthesized)
tcagtgctaacagttctgggatgctgatgtacaaggtggggctgggagatgaggccgggaaagtagccacaagctagagtgtaaaggtaccagggtggccgggcgcggtggctcatgcct

SEQ ID NO: 373118 - DNA, 120 bp, Artificial Sequence
  ENSG00000142408_27 (sequence is synthesized)
gtttgagaccagcctggataacatggcgaaaccctgtctctacaaaacattaaaaaaaattagccgggcgtggtggagcacacctgtggacacagctactcaggaggctgagggaggagg

SEQ ID NO: 373119 - DNA, 120 bp, Artificial Sequence
  ENSG00000142408_28 (sequence is synthesized)
tgtggacacagctactcaggaggctgagggaggaggaccatttgactccaagagttcgaggctgcagtgagctaggatcgcggcactacactccagcctgagcaacagactgagatcctg

SEQ ID NO: 373120 - DNA, 120 bp, Artificial Sequence
  ENSG00000142408_29 (sequence is synthesized)
tctcagaaaaaaagagaaaaaggtgcctgagttccaggcagagggactgaggctcttctaaggatggtgagagaggatgacagctgcgcgggggcaagggctgtgcggtgattggagggg

SEQ ID NO: 373121 - DNA, 120 bp, Artificial Sequence
  ENSG00000142408_30 (sequence is synthesized)
atgggtttgaagttcactgagaaggcagaggggacagcgcccagtaggcttcccttccatatttgctcagcaagtgtttcctgaggcctcccccgaagccttgtgctgggcggtgctggg

SEQ ID NO: 373122 - DNA, 120 bp, Artificial Sequence
  ENSG00000142408_31 (sequence is synthesized)
agtggagaggtgattttgatcttgccctgctctcaaggggctcccagtctggcgggaaaacaggcacagacgcagcttgaggaggacgtggcagcggtggtgccatgctgccaggggctc

SEQ ID NO: 373123 - DNA, 120 bp, Artificial Sequence
  ENSG00000142408_32 (sequence is synthesized)
tgcgtgcccttctcttgacggaagggtacagatcagagctgggtgttcagaatttctctccgaggcctgtgtggaaggaccaggaagagagagactgaaggtccctaggaagaattctgc

SEQ ID NO: 373124 - DNA, 120 bp, Artificial Sequence
  ENSG00000142408_33 (sequence is synthesized)
caaggcggtttcaggaagagatgctgggaaatgtaggaaaaggaatacaaatcagtgagacggagaagcgctgagtgagagagacggatacgtggagagaagagggatgccggagcgggt

SEQ ID NO: 373125 - DNA, 84 bp, Artificial Sequence
  ENSG00000142408_34 (sequence is synthesized)
gagacggatacgtggagagaagagggatgccggagcgggtgttaaaagagacaaatctggccgggtgctgtggctcctgagctc

SEQ ID NO: 373126 - DNA, 90 bp, Artificial Sequence
  ENSG00000142408_35 (sequence is synthesized)
tgaaaggatctcgcttgggcctgggagggtgaggctgcagtgacccgtgatggcaccactgcgctccagcctgggcgaaagagcgagact

SEQ ID NO: 373127 - DNA, 120 bp, Artificial Sequence
  ENSG00000142408_36 (sequence is synthesized)
ttaggggagaatggattctagagtctgaaggccaaacagaacgagagagagagagagagagagagaaagaatgaggttgagggtaggcaggaggaagagcaagatggggagggaggggga

SEQ ID NO: 373128 - DNA, 120 bp, Artificial Sequence
  ENSG00000142408_37 (sequence is synthesized)
gagcaggagagaccaaactagtagagtcacagacagagaaaaagtcaaagacaggaaggtgatacagaggagagagaagaggaagaggagagactgacaggtgcacaaatcagagaagtc

SEQ ID NO: 373129 - DNA, 120 bp, Artificial Sequence
  ENSG00000142408_38 (sequence is synthesized)
ccagagatagcagaaacacacacagagacagagatagagagggagaggtaagccggagacagactcagagattcgcacaaaaagcaacgtggagactcagaagcaagcgcagcgtcaagg

SEQ ID NO: 373130 - DNA, 120 bp, Artificial Sequence
  ENSG00000142408_39 (sequence is synthesized)
aatgctccatttctggtgtgttgttttcccagtattcaagaaatatttattgagtgccaacctgttctagacccaatctcggccaggggatgtggtggcaaatagacggacaagggcctg

SEQ ID NO: 373131 - DNA, 120 bp, Artificial Sequence
  ENSG00000142408_40 (sequence is synthesized)
gacggacaagggcctgctctcctgaaacacactggagagataaacaataaataatatcatttcagtaaccaaaaagtgctttaaaaattaagctgaaggccgggcgcagtggctcatgcc

SEQ ID NO: 373132 - DNA, 69 bp, Artificial Sequence
  ENSG00000142408_41 (sequence is synthesized)
catctctaccaataaataaataaagtagctgggtgtgctggtgtgcctgtagtcccagctacttgggag

SEQ ID NO: 373133 - DNA, 120 bp, Artificial Sequence
  ENSG00000142408_42 (sequence is synthesized)
atgacagagcaaggatgactttagatgaggtccttggagtagaccttgtggcagaggtcacagagatgtggattgtgagtaggaaagagaggtgagaaagtctgggggccaggcattcca

SEQ ID NO: 373134 - DNA, 120 bp, Artificial Sequence
  ENSG00000142408_43 (sequence is synthesized)
cccaccagaggcagccccaaagcccagaaaagtagcaggtcttcgaggaggcctgtgcggtgagcagatccaccataggacagaggcacagggtaggggctgatcagttagggccttgga

SEQ ID NO: 373135 - DNA, 120 bp, Artificial Sequence
  ENSG00000142408_44 (sequence is synthesized)
tccttgggaagaaatctgaattttattctagatctgatgggaagtgcttggagggttttgagcacaggcatgccatgatcatatttttattttcttatttatatttattttgaaaaagag

SEQ ID NO: 373136 - DNA, 89 bp, Artificial Sequence
  ENSG00000142408_45 (sequence is synthesized)
atatttttattttcttatttatatttattttgaaaaagagtcttgctctgtctcaggctggagtccagtgggctgatctcggctcactg

SEQ ID NO: 373137 - DNA, 120 bp, Artificial Sequence
  ENSG00000142408_46 (sequence is synthesized)
acaggagtgagccactgcgcccggcctcatatttttatttaaacaagaacagcagaattacattgctgtgctgagcatacgtagacttcaggagtcaaaggggaaggaaggaggtagcgg

SEQ ID NO: 373138 - DNA, 120 bp, Artificial Sequence
  ENSG00000142408_47 (sequence is synthesized)
ggtagcgggctgttgccttcctctggttgctggaggcctggaccaaggtggagttagtgggatggaggaagtggaagaaggcatgggattttggaggctagagcctgcattggtggtgaa

SEQ ID NO: 373139 - DNA, 120 bp, Artificial Sequence
  ENSG00000142408_48 (sequence is synthesized)
ctggatgtcatagaggagggaaggaaaaggaaccaggaagagaagaactctctgaattgggcacgcacatctctgatgggcaccgatgaggattgttaccaggaacgaggagactgggat

SEQ ID NO: 373140 - DNA, 120 bp, Artificial Sequence
  ENSG00000142408_49 (sequence is synthesized)
caggaaagtggctttgggagggaggaaccaaggcttctcttttggatgtgtcaagatagatctgccttcgagaaatccgagttgtggtatcaaatagccagttggatatgtgagactgga

SEQ ID NO: 373141 - DNA, 120 bp, Artificial Sequence
  ENSG00000142408_50 (sequence is synthesized)
gtttgggggaaagagaggccgtggctcaaaaacgtaagttttggaaacgtcaacataaagccacaggattgggtgacgtggcctagcaggggggtggggacagagaagcgaccctggcca

SEQ ID NO: 373142 - DNA, 120 bp, Artificial Sequence
  ENSG00000142408_51 (sequence is synthesized)
gagccttggggacatctacatctgggggagaaggggatgtagcaaaacgagcttaggagtgatctcgaggtaggctgaaaccaggagggttacagagggcaaatgcacctttgtgtttca

SEQ ID NO: 373143 - DNA, 120 bp, Artificial Sequence
  ENSG00000142408_52 (sequence is synthesized)
agaaggagaggagacagccagctgtgccaagggctgctgagacttggacaaggatgcagagagcagagtgaccattaggtctgatgacatggacagggttggtgatcttgataagataag

SEQ ID NO: 373144 - DNA, 120 bp, Artificial Sequence
  ENSG00000142408_53 (sequence is synthesized)
taagatgtcagttcagtgcagtggtggggacagaagccctgctggagtggaggggagagagaatttggggggaagacagaaggaaagggaattcaggcaagtgtgtgtgtgtgtgtgtgt

SEQ ID NO: 373145 - DNA, 67 bp, Artificial Sequence
  ENSG00000142408_54 (sequence is synthesized)
cgtctctactaaaaatacagaaattagacaggtgtcttgggcccaggaggcagaggttgcagtgagc

SEQ ID NO: 373146 - DNA, 64 bp, Artificial Sequence
  ENSG00000142408_55 (sequence is synthesized)
gaccctgaaaggaagtagggagacatgcagatagggagatgggaggcagaaaattgcatcctgc

SEQ ID NO: 373147 - DNA, 120 bp, Artificial Sequence
  ENSG00000142408_56 (sequence is synthesized)
atgcagatagggagatgggaggcagaaaattgcatcctgcaattagctgtcacagcaggcaggagcaagagagatggggaagcccagggccaggaggggaagatgaattcagggggcagg

SEQ ID NO: 373148 - DNA, 120 bp, Artificial Sequence
  ENSG00000142408_57 (sequence is synthesized)
gaagagaggatgctgtcagctaggctctggcagatcccctagccagggatgctctgcccagctcctgtctcttgctgctgtcagcgccgggcacactctgggattccccctgtagaccct

SEQ ID NO: 373149 - DNA, 120 bp, Artificial Sequence
  ENSG00000142408_58 (sequence is synthesized)
gtcaagacctattgaggtgaaggggaagaacacgttttcatcattcattttcagaaataaacattcactcagttcttggaaatactttctggccaggcttgggggctcatgcctgtaatc

SEQ ID NO: 373150 - DNA, 120 bp, Artificial Sequence
  ENSG00000142408_59 (sequence is synthesized)
gaggccaagacaggaggattgcttgaggcttggcgtttgagaccagcctgggcaatatagtaagaccccgtctctacaaaaatgaaaaatgagctgtggcgtggtggctcacgcctgtag

SEQ ID NO: 373151 - DNA, 90 bp, Artificial Sequence
  ENSG00000142408_60 (sequence is synthesized)
aggattgcttgagtccaggagtttaaggttcaggctgggccacagagcaagaccctgtctcagaaaacagaaagaaagaaagtcaaagaa

SEQ ID NO: 373152 - DNA, 120 bp, Artificial Sequence
  ENSG00000142408_61 (sequence is synthesized)
gaccctgtctcagaaaacagaaagaaagaaagtcaaagaaataaagtcaaagacaagaaggtgatacagagaagacagaaaaggaggaggagagagactgacaggtacacaaatcagaga

SEQ ID NO: 373153 - DNA, 120 bp, Artificial Sequence
  ENSG00000142408_62 (sequence is synthesized)
agtcccagagataacaaaaacacaaccacagagatagggagacgtaagccggagaaagacccagagattcgcatagaaagcaacgtggagactcagaagcaagcacagcatcaaggaatg

SEQ ID NO: 373154 - DNA, 120 bp, Artificial Sequence
  ENSG00000142408_63 (sequence is synthesized)
atcaataaaaagaaaaaaaaatatttcctgaggacttccaagtacaaggccctgcaatctcaggccacttctgtcccatctctgccttcagagggggggacaggtagtccagacaattag

SEQ ID NO: 373155 - DNA, 120 bp, Artificial Sequence
  ENSG00000142408_64 (sequence is synthesized)
aatacagagggggctgtgttctgacggggccacgcgggcattgaggaaacgcagcaggcccctcccctagctggggcggggatgtctgtgtgccatcatctcactccatctggtcattcc

SEQ ID NO: 373156 - DNA, 120 bp, Artificial Sequence
  ENSG00000142408_65 (sequence is synthesized)
tttgcccattcatccatccattcattcaagtcaccccatgcacattttccaagactgcctgtgacctggccctgtgccgggtagagctgaggatgccaaggtgaattcctcctgtgcctg

SEQ ID NO: 373157 - DNA, 120 bp, Artificial Sequence
  ENSG00000142408_66 (sequence is synthesized)
gccccggccccagtctgctggaagaaccagacacagacaatcacactgcggggaaacacgtgctccatcggaaaagtccagagcagggggtgggcagagaggcccagcgtgcaccagagc

SEQ ID NO: 373158 - DNA, 120 bp, Artificial Sequence
  ENSG00000142408_67 (sequence is synthesized)
ctcgctcaggtcagcgccaggcctgcctggagcagccaactgtgggagaagaaggagttggtgaaaggtgggtcccacctgggccgtccacagaagggctgaggggtagggggtgagggg

SEQ ID NO: 373159 - DNA, 120 bp, Artificial Sequence
  ENSG00000142408_68 (sequence is synthesized)
ttgaagatcaggccctgccgccatgccacacggctgtcctctgtccctgctcctgggggagctgaaactgcatggaaggtcccccaggggtgccccgtctaataaactcgatgaagagga

SEQ ID NO: 373160 - DNA, 120 bp, Artificial Sequence
  ENSG00000142409_0 (sequence is synthesized)
acttccggcctgggcgcccgtccccctgaccccagggtctgagtcgccgctgccgccgctgccaccatccgcgaggcaggagagaggaggaggagtgcggcgcggcggccccgggaccaa

SEQ ID NO: 373161 - DNA, 120 bp, Artificial Sequence
  ENSG00000142409_1 (sequence is synthesized)
ggagggacccagacatggagctgcgggaagaagcctggtctccggggccgctggattctgaggaccagcagatggccagtcacgagaacccagtggacatcctcatcatggatgatgacg

SEQ ID NO: 373162 - DNA, 120 bp, Artificial Sequence
  ENSG00000142409_2 (sequence is synthesized)
acgtccccagctggcctcccaccaagctgtccccgccccagtctgcgcccccagccggcccgcctccccggccgcggccgcccgccccctacatctgcaacgagtgtggcaagagcttta

SEQ ID NO: 373163 - DNA, 120 bp, Artificial Sequence
  ENSG00000142409_3 (sequence is synthesized)
gccactggtccaagctgacgcggcaccagcgcacgcacaccggcgagcggcccaacgcctgcgccgactgcggcaagaccttctcgcagagctcgcacctggtgcagcaccggcgcatcc

SEQ ID NO: 373164 - DNA, 120 bp, Artificial Sequence
  ENSG00000142409_4 (sequence is synthesized)
acacgggcgagaagccctacgcctgcttggagtgcggcaagcgcttcagctggagctccaacctcatgcagcaccagcgcatccacacgggcgagaagccctacacctgccccgactgcg

SEQ ID NO: 373165 - DNA, 120 bp, Artificial Sequence
  ENSG00000142409_5 (sequence is synthesized)
gccgcagcttcactcagagcaagagcctggccaagcaccggcgctcgcacagcggcctcaagcccttcgtgtgcccgcgctgcggccgcggcttcagccagcccaagagcctcgcgcgtc

SEQ ID NO: 373166 - DNA, 120 bp, Artificial Sequence
  ENSG00000142409_6 (sequence is synthesized)
acctgcggctgcacccggagctgtcggggcctggcgtggcggccaaggtgctggcggctagcgtccggcgggccaaggggcccgaagaggcggtggcggcggacggcgagatcgccatcc

SEQ ID NO: 373167 - DNA, 80 bp, Artificial Sequence
  ENSG00000142409_7 (sequence is synthesized)
cgccatccccgtgggcgatggcgagggcatcatcgtggtgggcgcgccgggcgagggggccgcggccgcggcagccatgg

SEQ ID NO: 373168 - DNA, 80 bp, Artificial Sequence
  ENSG00000142409_8 (sequence is synthesized)
ctggagtgcgggaagggcttcgggcacggggccgggctcctggcgcaccagcgggcccagcacggggacgggctcggggc

SEQ ID NO: 373169 - DNA, 120 bp, Artificial Sequence
  ENSG00000142409_9 (sequence is synthesized)
ggggagggcttcgtgcagggcgccgcgctccggagacacaagaagatccacgcggtgggcgcgccctcggtctgcagcagctgcggacagagctactaccgcgcgggcggggaggaggag

SEQ ID NO: 373170 - DNA, 120 bp, Artificial Sequence
  ENSG00000142409_10 (sequence is synthesized)
gagtgccgcggtggggagggccggtaggggaggggcccgggggggggggcgggcagggcccctcgggcttggcgggagcgacgacgtgcaagaccaagagacccagggagaagcggacgg

SEQ ID NO: 373171 - DNA, 120 bp, Artificial Sequence
  ENSG00000142409_11 (sequence is synthesized)
cgtgcaagaccaagagacccagggagaagcggacggggtgcgatggaccccgcggcatccccggctccccgccctcctctgtccctgcgccgtccgtgggggggcactggggcgtattag

SEQ ID NO: 373172 - DNA, 120 bp, Artificial Sequence
  ENSG00000142409_12 (sequence is synthesized)
ggcccgttcacttctccgcctcgagactctgccccctcagcctggcccgcccttcctaagttatcggcctgcgagccggagagacaatggagagaactgcagaggccgagtggcgaccag

SEQ ID NO: 373173 - DNA, 120 bp, Artificial Sequence
  ENSG00000142409_13 (sequence is synthesized)
gccccaagcggaaggccattttccctgctcttcctcagttgtccggggcgggggtggggggtgctgcgaggaatggagaaaccaggccctttagaggatcccagagagggaagagaacca

SEQ ID NO: 373174 - DNA, 120 bp, Artificial Sequence
  ENSG00000142409_14 (sequence is synthesized)
ggggcccttttctcttttagaattttcttttaatcagcccaccttttgactccccgcccgccccaatccattatttttttctgccttccgggtcccatccttagagctcgagtcgttcct

SEQ ID NO: 373175 - DNA, 120 bp, Artificial Sequence
  ENSG00000142409_15 (sequence is synthesized)
tcccctcctggattccgggtagcagaggcagcgccgcaggaggcgggtgcccgtttgtcccaggcctgggcgtggtggaggaaggggtgctggaacaataaacggcactatccaaatgtc

SEQ ID NO: 373176 - DNA, 120 bp, Artificial Sequence
  ENSG00000142409_16 (sequence is synthesized)
aactggcggtggttgtagcccttgagggtccttgagtccttcctgcggctgtgtgaggccttggctggcccctgcagtggggagcggccaggctagctccaggccagttctcggtgtcct

SEQ ID NO: 373177 - DNA, 120 bp, Artificial Sequence
  ENSG00000142409_17 (sequence is synthesized)
gggaggaaaccccccttccctgttttcccctcttggggccctgggaccacccgaccctggcctcccctcccgccctgggccttgcactcctggctgtagagggagggctagtgttgtggc

SEQ ID NO: 373178 - DNA, 120 bp, Artificial Sequence
  ENSG00000142409_18 (sequence is synthesized)
tccaagtttcctttctgctggatgatcttggggacccctgggggccaccttctctgcctgacttcctctgtccttgcccctccagcctgggcagcacccccgtctgttgagggtgccccc

SEQ ID NO: 373179 - DNA, 120 bp, Artificial Sequence
  ENSG00000142409_19 (sequence is synthesized)
ttcctctccccacagccccgcctccacatcctggaccctctgctatgattccaggcgggcctgtggccctccctggcaggaaactccttacaccaggggtggcccaggagcgcagggaac

SEQ ID NO: 373180 - DNA, 120 bp, Artificial Sequence
  ENSG00000142409_20 (sequence is synthesized)
ccgcaggctgatgccgacttttcagggaaagctcaggagtgcagggaacccgcaggctgacgcagacttttcagggaaagttgtcagtttgggtttttatgtgaaatccttcactttttg

SEQ ID NO: 373181 - DNA, 120 bp, Artificial Sequence
  ENSG00000142409_21 (sequence is synthesized)
ccccatggtgacctcactgtggcccctgacacctcatggcctccctcccctccacggaggccgcctccctgcctcagacctgaggaataaggtgcggcagcttctctccttgctgtgtct

SEQ ID NO: 373182 - DNA, 120 bp, Artificial Sequence
  ENSG00000142409_22 (sequence is synthesized)
gcatgtcaggccccaggtcccaggcccacgctggccccacgctggccggggctcagcagaccttttctgcagagagccagagaggaaatactgttcatcttgcaggctgcgggcctcaca

SEQ ID NO: 373183 - DNA, 120 bp, Artificial Sequence
  ENSG00000142409_23 (sequence is synthesized)
gataccacgcagccacagtccacacggaaatgcgtgggcacacttgatgcagaaaggccggcagagcttgccagctcaggctggcatagctgagtcgtcccatacaaagaccggggtgaa

SEQ ID NO: 373184 - DNA, 120 bp, Artificial Sequence
  ENSG00000142409_24 (sequence is synthesized)
gtttgggatcgattttgtaaagcacctcagcccctttttgagtgatttctgagatctgtggatggagcatgaacagaagctccctgtgggcggggctgtggcagccttggtcccggggta

SEQ ID NO: 373185 - DNA, 120 bp, Artificial Sequence
  ENSG00000142409_25 (sequence is synthesized)
gaaactatgatgggggttttgagtgcgttgccaggaccgcatgcccagggggcccacaccccggccccaggctgccccgcgtctcagtgggtggttgccatcccgcaccgccacagccct

SEQ ID NO: 373186 - DNA, 120 bp, Artificial Sequence
  ENSG00000142409_26 (sequence is synthesized)
cgagggctgcccctgccttctccctcgcatacatccttggccttcgaaccttttcgaaaattaattctgtggaaatctcaagtgtgtggacgcagtgtgatgaatccctcttcctgcgcc

SEQ ID NO: 373187 - DNA, 120 bp, Artificial Sequence
  ENSG00000142409_27 (sequence is synthesized)
agcgattcgcggcactgctggtccctttctgcccactgtggttctctttccacagcgttttagagaaaatatccatcacatcattttgtctgtaaattctccaacatgtaaggactcctt

SEQ ID NO: 373188 - DNA, 120 bp, Artificial Sequence
  ENSG00000142444_0 (sequence is synthesized)
agacggaagaggatggccgcggcggctctgaggagattttggtcccggcgccgcgcagaggcgggcgacgcggtagtggcgaagccgggagtgtgggcgcggctggggtcctgggcccgc

SEQ ID NO: 373189 - DNA, 120 bp, Artificial Sequence
  ENSG00000142444_1 (sequence is synthesized)
gcgctgctccgggactacgccgaggcctgcagggacgcttcggcggaggctagggcccggccggggcgcgccgctgtgtatgtgggtctgctgggcggcgcggcggcctgcttcacgctg

SEQ ID NO: 373190 - DNA, 120 bp, Artificial Sequence
  ENSG00000142444_2 (sequence is synthesized)
gcgcccagcgagggtgccttcgaggaggcgctgctggaggcgtcggggaccctcctgctgctggcgccggccacccgcaaccgcgagtccgaagccttcgtgcagaggctgctctggctg

SEQ ID NO: 373191 - DNA, 120 bp, Artificial Sequence
  ENSG00000142444_3 (sequence is synthesized)
cggggccgtggccgcctgcgctacgtcaacctggggctctgctcgctggtgtacgaggcgcccttcgacgcccaggccagcctctaccaggcgcgttgccgctacctgcagccccgctgg

SEQ ID NO: 373192 - DNA, 120 bp, Artificial Sequence
  ENSG00000142444_4 (sequence is synthesized)
accgacttccccggccgggtcctggacgtgggcttcgtgggtcgctggtgggtgctgggggcctggatgcgcgactgcgacatcaacgacgacgaattcctgcacctgccggcgcatttg

SEQ ID NO: 373193 - DNA, 120 bp, Artificial Sequence
  ENSG00000142444_5 (sequence is synthesized)
tccgagaccaacgagcggctcttcgatgagaagtacaagcctgtcgtgctcaccgacgatcaggtggaccaggcgctgtgggaggagcaggtcttgcagaaggagaagaaggacaggctc

SEQ ID NO: 373194 - DNA, 120 bp, Artificial Sequence
  ENSG00000142444_6 (sequence is synthesized)
gccctgagccaggcccactcgctggtgcaggcggaggccccgagatgaaaccctgaggcccccgagtcctggcaaactgcttgcctggggtggtgcagttctgagtgtgcctcacctgca

SEQ ID NO: 373195 - DNA, 120 bp, Artificial Sequence
  ENSG00000142444_7 (sequence is synthesized)
gaacagctgagacagatgatgtgcaaagtgttttctcactggatttgcacaagtttggggagcctttctgccccccgtctttgttctttattagctgaagctaattcagagccacctggg

SEQ ID NO: 373196 - DNA, 120 bp, Artificial Sequence
  ENSG00000142444_8 (sequence is synthesized)
tccgggagttggggacagcagaacgacttgacacatgttcatcactggcagagctggtcatgagccttttatataagcctttttcatcgggcctcagaggccctccttaaggaggtacca

SEQ ID NO: 373197 - DNA, 120 bp, Artificial Sequence
  ENSG00000142444_9 (sequence is synthesized)
cattggtcagctgacttgcaaactcttctaaggccacttagattttctttttcaagtttgggttgtggcctggcatggtgatgtctgtaatcccagcagtttgcaaactgaggcaagaga

SEQ ID NO: 373198 - DNA, 120 bp, Artificial Sequence
  ENSG00000142444_10 (sequence is synthesized)
atcgcttgaggccaggagtttgaggccagctagagtgacatagcaagactccgatgctacaaaaaagaataataatagtaattaactaaataaaatttgagctgaaatgtttttattcta

SEQ ID NO: 373199 - DNA, 120 bp, Artificial Sequence
  ENSG00000142444_11 (sequence is synthesized)
cattttctggtctggaaatctatatggaatcatagattctggttatgttgtacttcagtaaccctgaaacagaattctatgaaaagaagtaagttagtgtacacagctggtacttagcta

SEQ ID NO: 373200 - DNA, 80 bp, Artificial Sequence
  ENSG00000142444_12 (sequence is synthesized)
gtaagttagtgtacacagctggtacttagctaggttatggtaaattgtattacacccaggctggagttgcagtgagccga

SEQ ID NO: 373201 - DNA, 85 bp, Artificial Sequence
  ENSG00000142444_13 (sequence is synthesized)
ctccgtctaaaactgaagtattaagggagtgatgctacctcaggggcctgtggcaagttaataaaaccaggtggtaaaacaacta

SEQ ID NO: 373202 - DNA, 120 bp, Artificial Sequence
  ENSG00000142449_0 (sequence is synthesized)
gccctctctcccctcccttccacttcccactcccgtcttgccttggctgtgcaccctcagccccaagacccttctctaacatcacacctcctccaggaagcctcctctgactgttcaccg

SEQ ID NO: 373203 - DNA, 120 bp, Artificial Sequence
  ENSG00000142449_1 (sequence is synthesized)
cttcccggttggggctggatgcctccttgggctcccagaggccccggggctgccccatttggcaaccaccctgccctcctcgttgtgttgggtcccccatggctagggtggggggctcat

SEQ ID NO: 373204 - DNA, 120 bp, Artificial Sequence
  ENSG00000142449_2 (sequence is synthesized)
ctagggctgactctgcttcctctccgcagcctccaggggacacgccatgactctggagggtctgtatttggcaaggggccccctggcccggctcctgctggcctggtcggccctgttgtg

SEQ ID NO: 373205 - DNA, 120 bp, Artificial Sequence
  ENSG00000142449_3 (sequence is synthesized)
catggcaggtggccaaggccgctgggacggggccttggaggctgcaggtcctggacgtgtgcggaggcggggcagcccaggcatcttgcaggggccgaatgtgtgcggctcccggttcca

SEQ ID NO: 373206 - DNA, 120 bp, Artificial Sequence
  ENSG00000142449_4 (sequence is synthesized)
tgcctactgctgtccaggctggaggacattccctggcaggagccagtgtgtcgtacccatctgtaggcgcgcctgcggtgaaggcttctgctcccagcccaacctgtgcacctgtgcgga

SEQ ID NO: 373207 - DNA, 120 bp, Artificial Sequence
  ENSG00000142449_5 (sequence is synthesized)
tgggacgctggctcccagctgcggggtgagccgagggtcagggtgcagtgtgagctgtatgaatgggggcacctgccggggggcgtcctgtctgtgtcagaagggctacacaggcaccgt

SEQ ID NO: 373208 - DNA, 120 bp, Artificial Sequence
  ENSG00000142449_6 (sequence is synthesized)
gtgtgggcagcccatctgtgaccgcggctgccacaatgggggtcgctgcattgggcccaaccgctgcgcctgtgtgtatggcttcatgggacctcaatgtgagagagattaccggacggg

SEQ ID NO: 373209 - DNA, 120 bp, Artificial Sequence
  ENSG00000142449_7 (sequence is synthesized)
accctgctttggccaagtaggccccgaggggtgccagcatcagctgacgggcctcgtgtgcaccaaggcactttgctgtgccactgtgggccgtgcctggggccttccatgtgaactttg

SEQ ID NO: 373210 - DNA, 120 bp, Artificial Sequence
  ENSG00000142449_8 (sequence is synthesized)
ccctgcacagccacacccctgccgccgcggcttcatccccaatatccacacgggggcctgccaagatgtggatgagtgccaggctgtgccaggcctgtgccagggaggcagctgcgtcaa

SEQ ID NO: 373211 - DNA, 120 bp, Artificial Sequence
  ENSG00000142449_9 (sequence is synthesized)
catggtgggctccttccattgccgctgtccagttggacaccggctcagtgacagcagcgccgcatgtgaagactaccgggccggcgcctgcttctcagtgcttttcgggggccgctgtgc

SEQ ID NO: 373212 - DNA, 120 bp, Artificial Sequence
  ENSG00000142449_10 (sequence is synthesized)
tggagacctcgccggccactacactcgcaggcagtgctgctgtgacaggggcaggtgctgggcagctggcccggtccctgagctgtgtcctcctcggggctccaatgaattccagcaact

SEQ ID NO: 373213 - DNA, 120 bp, Artificial Sequence
  ENSG00000142449_11 (sequence is synthesized)
gtgcgcccagcggctgccgctgctacccggccaccctggcctcttccctggcctcctgggcttcggatccaatggcatgggtccccctcttgggccagcgcgactcaacccccatggctc

SEQ ID NO: 373214 - DNA, 120 bp, Artificial Sequence
  ENSG00000142449_12 (sequence is synthesized)
tgatgcgcgtgggatccccagcctgggccctggcaactctaatattggcactgctaccctgaaccagaccattgacatctgccgacacttcaccaacctgtgtctgaatggccgctgcct

SEQ ID NO: 373215 - DNA, 120 bp, Artificial Sequence
  ENSG00000142449_13 (sequence is synthesized)
gcccacgccttccagctaccgctgcgagtgtaacgtgggctacacccaggacgtgcgcggcgagtgcattgatgtagacgaatgcaccagcagcccctgccaccacggtgactgcgtcaa

SEQ ID NO: 373216 - DNA, 120 bp, Artificial Sequence
  ENSG00000142449_14 (sequence is synthesized)
catccccggcacctaccactgccggtgctacccgggcttccaggccacgcccaccaggcaggcatgcgtggatgtggacgagtgcattgtcagtggtggcctttgtcacctgggccgctg

SEQ ID NO: 373217 - DNA, 120 bp, Artificial Sequence
  ENSG00000142449_15 (sequence is synthesized)
tgtcaacacagagggcagcttccagtgtgtctgcaatgcaggcttcgagctcagccctgacggcaagaactgtgtggaccacaacgagtgtgccaccagcaccatgtgcgtcaacggcgt

SEQ ID NO: 373218 - DNA, 120 bp, Artificial Sequence
  ENSG00000142449_16 (sequence is synthesized)
gtgtctcaacgaggatggcagcttctcctgcctctgcaaacccggcttcctgctggcgcctggcggccactactgcatggacattgacgagtgccagacgcccggcatctgcgtgaacgg

SEQ ID NO: 373219 - DNA, 120 bp, Artificial Sequence
  ENSG00000142449_17 (sequence is synthesized)
ccactgtaccaacaccgagggctccttccgctgccagtgcctgggggggctggcggtaggcacggatggccgcgtgtgcgtggacacccacgtgcgcagcacctgctatggggccatcga

SEQ ID NO: 373220 - DNA, 120 bp, Artificial Sequence
  ENSG00000142449_18 (sequence is synthesized)
gaagggctcctgtgcccgccccttccctggcactgtcaccaagtccgagtgctgctgtgccaatccggaccacggttttggggagccctgccagctttgtcctgccaaagactccgctga

SEQ ID NO: 373221 - DNA, 120 bp, Artificial Sequence
  ENSG00000142449_19 (sequence is synthesized)
gttccaggcactgtgcagcagtgggcttggcattaccacggatggtcgagacatcaacgagtgtgctctggatcctgaggtttgtgccaatggcgtgtgcgagaaccttcggggcagcta

SEQ ID NO: 373222 - DNA, 120 bp, Artificial Sequence
  ENSG00000142449_20 (sequence is synthesized)
ccgctgtgtctgcaacctgggttatgaggcaggtgcctcaggcaaggactgcacagacgtggatgagtgtgccctcaacagcctcctgtgtgacaacgggtggtgccagaatagccctgg

SEQ ID NO: 373223 - DNA, 120 bp, Artificial Sequence
  ENSG00000142449_21 (sequence is synthesized)
cagctacagctgctcctgcccccccggcttccacttctggcaggacacggagatctgcaaagatgtcgacgaatgcctgtccagcccgtgtgtgagtggcgtctgtcggaacctggccgg

SEQ ID NO: 373224 - DNA, 120 bp, Artificial Sequence
  ENSG00000142449_22 (sequence is synthesized)
ctcctacacctgcaaatgtggccctggcagccggctggacccctctggtaccttctgtctagacagcaccaagggcacctgctggctgaagatccaggagagccgctgtgaggtgaacct

SEQ ID NO: 373225 - DNA, 120 bp, Artificial Sequence
  ENSG00000142449_23 (sequence is synthesized)
tcagggagccagcctgcggtctgagtgctgcgccaccctcggggcagcctgggggagcccctgcgaacgctgcgagatcgaccctgcctgtgcccggggctttgcccggatgacgggtgt

SEQ ID NO: 373226 - DNA, 120 bp, Artificial Sequence
  ENSG00000142449_24 (sequence is synthesized)
cacctgcgatgatgtgaacgagtgtgagtccttcccgggagtctgtcccaacgggcgttgcgtcaacactgctgggtctttccgctgtgagtgtccagagggcctgatgctggacgcctc

SEQ ID NO: 373227 - DNA, 120 bp, Artificial Sequence
  ENSG00000142449_25 (sequence is synthesized)
aggccggctgtgcgtggatgtgagattggaaccatgtttcctgcgatgggatgaggatgagtgtggggtcaccctgcctggcaagtaccggatggacgtctgctgctgctccatcggggc

SEQ ID NO: 373228 - DNA, 120 bp, Artificial Sequence
  ENSG00000142449_26 (sequence is synthesized)
cgtgtggggagtcgagtgcgaggcctgcccggatcccgagtctctggagttcgccagcctgtgcccgcgggggctgggcttcgccagccgggacttcctgtctggccgaccattctataa

SEQ ID NO: 373229 - DNA, 120 bp, Artificial Sequence
  ENSG00000142449_27 (sequence is synthesized)
agatgtgaatgaatgcaaggtgttccctggcctctgcacgcacggtacctgcagaaacacggtgggcagcttccactgcgcctgtgcggggggcttcgccctggatgcccaggaacggaa

SEQ ID NO: 373230 - DNA, 120 bp, Artificial Sequence
  ENSG00000142449_28 (sequence is synthesized)
ctgcacagatatcgacgagtgtcgcatctctcctgacctctgcggccagggcacctgtgtcaacacgccgggcagctttgagtgcgagtgttttcccggctacgagagtggcttcatgct

SEQ ID NO: 373231 - DNA, 120 bp, Artificial Sequence
  ENSG00000142449_29 (sequence is synthesized)
gatgaagaactgcatggacgtggacgagtgtgcaagggacccgctgctctgccggggaggcacttgcaccaacacggatgggagctacaagtgccagtgtccccctgggcatgagctgac

SEQ ID NO: 373232 - DNA, 120 bp, Artificial Sequence
  ENSG00000142449_30 (sequence is synthesized)
ggccaagggcactgcctgtgaggacatcgatgagtgctccctgagtgatggcctgtgtccccatggccagtgtgtcaatgtcatcggtgccttccagtgctcctgccatgccggcttcca

SEQ ID NO: 373233 - DNA, 120 bp, Artificial Sequence
  ENSG00000142449_31 (sequence is synthesized)
gagcacacctgaccgccagggctgcgtggacatcaacgaatgccgggtccagaatggtgggtgtgacgtgcactgtattaacactgagggcagctaccggtgcagctgtgggcagggcta

SEQ ID NO: 373234 - DNA, 120 bp, Artificial Sequence
  ENSG00000142449_32 (sequence is synthesized)
ctcgctgatgcccgacggaagggcatgtgcagacgtggacgagtgtgaagagaacccccgcgtttgtgaccaaggccactgcaccaacatgccagggggtcaccgctgcctgtgctatga

SEQ ID NO: 373235 - DNA, 120 bp, Artificial Sequence
  ENSG00000142449_33 (sequence is synthesized)
tggcttcatggccacgccagacatgaggacatgtgttgatgtggatgagtgtgacctgaaccctcacatctgcctccatggggactgcgagaacacgaagggttcctttgtctgccactg

SEQ ID NO: 373236 - DNA, 120 bp, Artificial Sequence
  ENSG00000142449_34 (sequence is synthesized)
tcagctgggctacatggtcaggaagggggccacaggctgctctgatgtggatgaatgcgaggttggaggacacaactgtgacagtcacgcctcctgtctcaacatcccggggagtttcag

SEQ ID NO: 373237 - DNA, 120 bp, Artificial Sequence
  ENSG00000142449_35 (sequence is synthesized)
ctgtaggtgcctgccaggctgggtgggggatggcttcgaatgtcacgacctggatgaatgcgtctcccaggagcaccggtgcagcccaagaggtgactgtctcaatgtccctggctccta

SEQ ID NO: 373238 - DNA, 120 bp, Artificial Sequence
  ENSG00000142449_36 (sequence is synthesized)
ccgctgcacctgccgccagggctttgccggggatggcttcttctgcgaagacagggatgaatgtgccgagaacgtggacctctgtgacaacgggcagtgcctcaatgcgcccggcgggta

SEQ ID NO: 373239 - DNA, 120 bp, Artificial Sequence
  ENSG00000142449_37 (sequence is synthesized)
ccgctgtgaatgtgagatgggctttgaccccaccgaggaccaccgggcctgccaggatgtggacgagtgtgcgcaagggaacctctgtgcatttgggagctgtgagaacctgcctggaat

SEQ ID NO: 373240 - DNA, 120 bp, Artificial Sequence
  ENSG00000142449_38 (sequence is synthesized)
acccccggcagctacctctgcagctgcccccaggattttgagctgaaccccagcggagtgggctgcgtggacactcgggccgggaactgtttcctggagacgcatgaccgaggggacagt

SEQ ID NO: 373241 - DNA, 120 bp, Artificial Sequence
  ENSG00000142449_39 (sequence is synthesized)
ggcatttcctgcagtgccgagatcggagttggtgtcacccgagcttcctgctgttgctccctgggccgggcttggggcaatccctgtgagctgtgccctatggccaacaccactgagtac

SEQ ID NO: 373242 - DNA, 120 bp, Artificial Sequence
  ENSG00000142449_40 (sequence is synthesized)
agaaccctgtgcccgggtggtgagggcttccagcctaaccgcatcactgtcattctggaagacatcgacgagtgccaagagctgccagggctgtgtcaggggggtgactgcgtcaacacg

SEQ ID NO: 373243 - DNA, 120 bp, Artificial Sequence
  ENSG00000142449_41 (sequence is synthesized)
tttggcagtttccagtgtgagtgcccacctggctaccacctcagtgagcacacccgcatctgtgaggatattgacgaatgctccacacactccggcatctgtggccctggcacctgctac

SEQ ID NO: 373244 - DNA, 120 bp, Artificial Sequence
  ENSG00000142449_42 (sequence is synthesized)
aacaccctggggaactacacctgtgtctgccctgcagagtacctccaagtcaatggtggcaacaactgcatggatatgaggaagagtgtctgcttccggcactataacggcacatgtcaa

SEQ ID NO: 373245 - DNA, 120 bp, Artificial Sequence
  ENSG00000142449_43 (sequence is synthesized)
aatgagctggccttcaacgtgacccggaaaatgtgttgctgctcctacaacattggccaggcctggaatagaccctgtgaggcctgccccactcccatcagtcctgactaccagatcctg

SEQ ID NO: 373246 - DNA, 120 bp, Artificial Sequence
  ENSG00000142449_44 (sequence is synthesized)
tgtggaaatcaggccccgggattcctcactgacatccacacggggaagccccttgacattgatgagtgtggggagatccccgccatctgtgccaatggcatctgcataaaccagatcggg

SEQ ID NO: 373247 - DNA, 120 bp, Artificial Sequence
  ENSG00000142449_45 (sequence is synthesized)
agtttccgctgcgagtgccccgcaggcttcaactacaacagcatcctgctggcttgtgaagatgtcgatgagtgtggcagcagggagagtccctgccagcagaatgctgactgcatcaac

SEQ ID NO: 373248 - DNA, 120 bp, Artificial Sequence
  ENSG00000142449_46 (sequence is synthesized)
atccccggtagctaccgctgcaagtgcacccgagggtacaaactgtcgccaggcggggcttgtgtgggacggaatgagtgtcgggagatcccgaatgtctgtagccatggtgactgcatg

SEQ ID NO: 373249 - DNA, 120 bp, Artificial Sequence
  ENSG00000142449_47 (sequence is synthesized)
gacacagaaggcagctacatgtgtctgtgtcaccgtggattccaggcctctgcagaccagaccctgtgcatggacattgacgagtgtgaccggcagccttgtggaaatgggacctgcaag

SEQ ID NO: 373250 - DNA, 120 bp, Artificial Sequence
  ENSG00000142449_48 (sequence is synthesized)
aacatcattggctcctacaactgcctctgcttccctggctttgtggtgacacacaatggggattgtgtggattttgatgagtgtactaccctggtggggcaggtgtgccgatttggccat

SEQ ID NO: 373251 - DNA, 120 bp, Artificial Sequence
  ENSG00000142449_49 (sequence is synthesized)
tgcctcaacacagctggttccttccactgcctctgccaggatggctttgagctcacagctgatgggaagaactgtgtggacaccaatgagtgcctcagccttgcaggaacctgcctaccc

SEQ ID NO: 373252 - DNA, 120 bp, Artificial Sequence
  ENSG00000142449_50 (sequence is synthesized)
ggcacttgccagaacctcgagggctccttccgctgcatctgtccccctggcttccaggtgcagagtgaccactgcattgatatcgacgagtgctcagaggagcccaacctctgcctcttt

SEQ ID NO: 373253 - DNA, 120 bp, Artificial Sequence
  ENSG00000142449_51 (sequence is synthesized)
ggcacctgtaccaacagccctgggagcttccagtgcctctgcccacctggctttgtcctctctgacaatgggcaccgttgctttgacacacggcagagtttctgcttcacccgttttgag

SEQ ID NO: 373254 - DNA, 120 bp, Artificial Sequence
  ENSG00000142449_52 (sequence is synthesized)
gctgggaagtgctcggtgcccaaagctttcaacaccaccaagacccgctgctgctgcagtaagaggcctggggagggctggggagacccctgcgaactgtgtccccaggagggcagcgct

SEQ ID NO: 373255 - DNA, 120 bp, Artificial Sequence
  ENSG00000142449_53 (sequence is synthesized)
gcctttcaggagctctgcccctttggccacggggcagtcccaggcccggatgactcccgagaagacgtgaatgagtgtgcagagaaccctggcgtctgcactaacggcgtctgtgtcaac

SEQ ID NO: 373256 - DNA, 120 bp, Artificial Sequence
  ENSG00000142449_54 (sequence is synthesized)
accgatggatccttccgctgtgagtgtccctttggctacagcctggacttcactggcatcaactgtgtggacacagacgagtgctctgtcggccacccctgtgggcaagggacatgcacc

SEQ ID NO: 373257 - DNA, 120 bp, Artificial Sequence
  ENSG00000142449_55 (sequence is synthesized)
aatgtcatcggaggcttcgaatgtgcctgtgctgacggctttgagcctggcctcatgatgacctgcgaggacatcgacgaatgctccctgaacccgctgctctgtgccttccgctgccac

SEQ ID NO: 373258 - DNA, 120 bp, Artificial Sequence
  ENSG00000142449_56 (sequence is synthesized)
aataccgagggctcctacctgtgcacctgtccagccggctacaccctgcgggaggatggggccatgtgtcgagatgtggacgagtgtgcagatggtcagcaggactgccacgcccggggc

SEQ ID NO: 373259 - DNA, 120 bp, Artificial Sequence
  ENSG00000142449_57 (sequence is synthesized)
atggagtgcaagaacctcatcggtaccttcgcgtgcgtctgtcccccaggcatgcggcccctgcctggctctggggagggctgcacagatgacaatgaatgccacgctcagcctgacctc

SEQ ID NO: 373260 - DNA, 120 bp, Artificial Sequence
  ENSG00000142449_58 (sequence is synthesized)
tgtgtcaacggccgctgtgtcaacaccgcgggcagcttccggtgcgactgtgatgagggattccagcccagccccacccttaccgagtgccacgacatccggcaggggccctgctttgcc

SEQ ID NO: 373261 - DNA, 120 bp, Artificial Sequence
  ENSG00000142449_59 (sequence is synthesized)
gaggtgctgcagaccatgtgccggtctctgtccagcagcagtgaggctgtcaccagggccgagtgctgctgtgggggtggccggggctgggggccccgctgcgagctctgtcccctgccc

SEQ ID NO: 373262 - DNA, 120 bp, Artificial Sequence
  ENSG00000142449_60 (sequence is synthesized)
ggcacctctgcctacaggaagctgtgcccccatggctcaggctacactgctgagggccgagatgtagatgaatgccgtatgcttgctcacctgtgtgctcatggggagtgcatcaacagc

SEQ ID NO: 373263 - DNA, 120 bp, Artificial Sequence
  ENSG00000142449_61 (sequence is synthesized)
cttggctccttccgctgccactgtcaggccgggtacacaccggatgctactgctactacctgcctggatatggatgagtgcagccaggtccccaagccatgtaccttcctctgcaaaaac

SEQ ID NO: 373264 - DNA, 120 bp, Artificial Sequence
  ENSG00000142449_62 (sequence is synthesized)
acgaagggcagtttcctgtgcagctgtccccgaggctacctgctggaggaggatggcaggacctgcaaagacctggacgaatgcacctcccggcagcacaactgtcagttcctctgtgtc

SEQ ID NO: 373265 - DNA, 120 bp, Artificial Sequence
  ENSG00000142449_63 (sequence is synthesized)
aacactgtgggcgccttcacctgccgctgtccgcccggcttcacccagcaccaccaggcctgcttcgacaatgatgagtgctcagcccagcctggcccatgtggtgcccacgggcactgc

SEQ ID NO: 373266 - DNA, 120 bp, Artificial Sequence
  ENSG00000142449_64 (sequence is synthesized)
cacaacaccccgggcagcttccgctgtgaatgccaccaaggcttcaccctggtcagctcaggccatggctgtgaagatgtgaatgaatgtgatgggccccaccgctgccagcatggctgt

SEQ ID NO: 373267 - DNA, 120 bp, Artificial Sequence
  ENSG00000142449_65 (sequence is synthesized)
cagaaccagctagggggctaccgctgcagctgcccccagggtttcacccagcactcccagtgggcccagtgtgtggatgagaatgagtgtgccctgtcgccccccacctgcgggagcgcc

SEQ ID NO: 373268 - DNA, 120 bp, Artificial Sequence
  ENSG00000142449_66 (sequence is synthesized)
tcctgtcgcaacactcttggtggcttccgctgcgtctgcccctctggctttgactttgatcaggccctcgggggctgccaggaggtggatgagtgcgccggacggcgtggcccctgtagc

SEQ ID NO: 373269 - DNA, 120 bp, Artificial Sequence
  ENSG00000142449_67 (sequence is synthesized)
tacagctgtgccaacacgcctggtggcttcctgtgcggctgtcctcaaggctacttccgggctgggcaagggcactgtgtctccggcctgggcttcagccccggaccccaggacaccccg

SEQ ID NO: 373270 - DNA, 120 bp, Artificial Sequence
  ENSG00000142449_68 (sequence is synthesized)
gacaaagaggagctgctctcgtctgaagcctgctacgaatgcaagatcaatggcctctcccctcgggaccggccacgacgcagtgcccacagggaccaccaggtgaacctggccaccctt

SEQ ID NO: 373271 - DNA, 120 bp, Artificial Sequence
  ENSG00000142449_69 (sequence is synthesized)
gactccgaggccctgctgaccttgggcctgaacctctcacacctgggccgggccgagcgcatcctggagctccggccggccctggagggtctagagggccggatccgctacgtcatcgtc

SEQ ID NO: 373272 - DNA, 120 bp, Artificial Sequence
  ENSG00000142449_70 (sequence is synthesized)
cgcggaaacgagcaaggtttctttcgcatgcatcacctccgtggcgtcagctccctgcagctggggcggaggcggccggggcctggaacctaccggctggaggtggtgagccacatggca

SEQ ID NO: 373273 - DNA, 120 bp, Artificial Sequence
  ENSG00000142449_71 (sequence is synthesized)
ggaccctggggtgtccagccagaggggcagccagggccatggggccaggccttgaggctgaaggtgcagctgcagttgctttagttgggaggagcctcagtgggccccagctgtccagag

SEQ ID NO: 373274 - DNA, 120 bp, Artificial Sequence
  ENSG00000142449_72 (sequence is synthesized)
aagggggattctggaactgggaaggactgatccccagaagcgatggctgaccagattgaaccccgaaactcaggaagagtgaaatgctacacgacaacctcaggcaagcccggcctctgc

SEQ ID NO: 373275 - DNA, 120 bp, Artificial Sequence
  ENSG00000142449_73 (sequence is synthesized)
ctgggcctctgtgccagccccgggggccccccagttactcagtctttcctggagacagcaagaagctgcaatgtgcaatccccctgcccccacagccaaggtcaggaagaggccctgtgg

SEQ ID NO: 373276 - DNA, 120 bp, Artificial Sequence
  ENSG00000142449_74 (sequence is synthesized)
tcaccgtgtctggccaatctcaggctttcacttctgtactgcactgtggcttgccctggcggggggcagggggttggcaggacatggcaatgggcaactggggtgggcacagggcttatt

SEQ ID NO: 373277 - DNA, 120 bp, Artificial Sequence
  ENSG00000142449_75 (sequence is synthesized)
cctcggagtagaagggtgtacagggggcccagactccacagtgacttgccacatttgccccccatttggagaatgcttttatatcaaaagtggagacgataataaagttattttgggtta

SEQ ID NO: 373278 - DNA, 80 bp, Artificial Sequence
  ENSG00000142449_76 (sequence is synthesized)
agctctgggctgggaacgcggcggggtcggcctctcggctttgcgttcccgccccgggtccccggcgccgcaggagcccg

SEQ ID NO: 373279 - DNA, 120 bp, Artificial Sequence
  ENSG00000142449_77 (sequence is synthesized)
ggagcctcagagtgcggactgacccggacaactgagaagaaaaagagggcgcccctctccagccagccaaccctccaacgttgacaggggtctctcccttctccggggcctttggacaac

SEQ ID NO: 373280 - DNA, 120 bp, Artificial Sequence
  ENSG00000142449_78 (sequence is synthesized)
cagttggacaccggctcagtgacagcagcgccgcatgtgaagatgtgaatgagtgtctcagcctgtccggcctctgttctgggggtgactgcaccaacactgtcgggagctacgtgtgca

SEQ ID NO: 373281 - DNA, 120 bp, Artificial Sequence
  ENSG00000142449_79 (sequence is synthesized)
cagacgccaccctgcaagatgatgtgacaagcacaattatctaaagattgaacaggccagcccagaaggtagtgagttccccactgctggggagtcaaggtgcagcagaataagcatcaa

SEQ ID NO: 373282 - DNA, 120 bp, Artificial Sequence
  ENSG00000142449_80 (sequence is synthesized)
aaagtgtctgagttcattccttagggcatggtggcctggaggactcagttgagaaagattctgagacctgaagtctgcaattttgtgatcacagggaaagagtgctgtgattgattagtg

SEQ ID NO: 373283 - DNA, 120 bp, Artificial Sequence
  ENSG00000142449_81 (sequence is synthesized)
ctaccagatcctgtgtggaaatcaggccccgggattcctcactgacatccacacggggaagccccttgatgtcgatgagtgtggcagcagggagagtccctgccagcagaatgctgactg

SEQ ID NO: 373284 - DNA, 120 bp, Artificial Sequence
  ENSG00000142453_0 (sequence is synthesized)
ggcggtcccgggcggcgcggggccctgcgctaccgtgtcggtgttccccggcgcccgcctcctcaccatcggcgacgcgaacggcgagatccagcggcacgcggagcagcaggcgctgcg

SEQ ID NO: 373285 - DNA, 120 bp, Artificial Sequence
  ENSG00000142453_1 (sequence is synthesized)
cctcgaggtgcgcgccggcccggactcggcgggcatcgccctctacagccatgaagatgtgtgtgtctttaagtgctcagtgtcccgagagacagagtgcagccgtgtgggcaagcagtc

SEQ ID NO: 373286 - DNA, 120 bp, Artificial Sequence
  ENSG00000142453_2 (sequence is synthesized)
cttcatcatcaccctgggctgcaacagcgtcctcatccagttcgccacacccaacgatttctgttccttctacaacatcctgaaaacctgccggggccacaccctggagcggtctgtgtt

SEQ ID NO: 373287 - DNA, 120 bp, Artificial Sequence
  ENSG00000142453_3 (sequence is synthesized)
cagcgagcggacggaggagtcttctgccgtgcagtacttccagttttatggctacctgtcccagcagcagaacatgatgcaggactacgtgcggacaggcacctaccagcgcgccatcct

SEQ ID NO: 373288 - DNA, 120 bp, Artificial Sequence
  ENSG00000142453_4 (sequence is synthesized)
gcaaaaccacaccgacttcaaggacaagatcgttcttgatgttggctgtggctctgggatcctgtcgttttttgccgcccaagctggagcacggaaaatctacgcggtggaggccagcac

SEQ ID NO: 373289 - DNA, 120 bp, Artificial Sequence
  ENSG00000142453_5 (sequence is synthesized)
catggcccagcacgctgaggtcttggtgaagagtaacaacctgacggaccgcatcgtggtcatcccgggcaaggtggaggaggtgtcactccccgagcaggtggacatcatcatctcgga

SEQ ID NO: 373290 - DNA, 120 bp, Artificial Sequence
  ENSG00000142453_6 (sequence is synthesized)
gcccatgggctacatgctcttcaacgagcgcatgctggagagctacctccacgccaagaagtacctgaagcccagcggaaacatgtttcctaccattggtgacgtccaccttgcaccctt

SEQ ID NO: 373291 - DNA, 120 bp, Artificial Sequence
  ENSG00000142453_7 (sequence is synthesized)
cacggatgaacagctctacatggagcagttcaccaaggccaacttctggtaccagccatctttccatggagtggacctgtcggccctccgaggtgccgcggtggatgagtatttccggca

SEQ ID NO: 373292 - DNA, 120 bp, Artificial Sequence
  ENSG00000142453_8 (sequence is synthesized)
gcctgtggtggacacatttgacatccggatcctgatggccaagtctgtcaagtacacggtgaacttcttagaagccaaagaaggagatttgcacaggatagaaatcccattcaaattcca

SEQ ID NO: 373293 - DNA, 120 bp, Artificial Sequence
  ENSG00000142453_9 (sequence is synthesized)
catgctgcattcagggctggtccacggcctggctttctggtttgacgttgctttcatcggctccataatgaccgtgtggctgtccacagccccgacagagcccctgacccactggtacca

SEQ ID NO: 373294 - DNA, 120 bp, Artificial Sequence
  ENSG00000142453_10 (sequence is synthesized)
ggtgcggtgcctgttccagtcaccactgttcgccaaggcaggggacacgctctcagggacatgtctgcttattgccaacaaaagacagagctacgacatcagtattgtggcccaggtgga

SEQ ID NO: 373295 - DNA, 120 bp, Artificial Sequence
  ENSG00000142453_11 (sequence is synthesized)
ccactacacatctccctcggaaaacatgtggaacacgggcagcacctacaacctcagcagcgggatggccgtggcagggatgccgaccgcctatgacttgagcagtgttattgccagtgg

SEQ ID NO: 373296 - DNA, 120 bp, Artificial Sequence
  ENSG00000142453_12 (sequence is synthesized)
ctccagcgtgggccacaacaacctgattcctttagccaacacggggattgtcaatcacacccactcccggatgggctccataatgagcacggggattgtccaagggtcctccggcgccca

SEQ ID NO: 373297 - DNA, 120 bp, Artificial Sequence
  ENSG00000142453_13 (sequence is synthesized)
gggcagtggtggtggcagcacgagtgcccactatgcagtcaacagccagttcaccatgggcggccccgccatctccatggcgtcgcccatgtccatcccgaccaacaccatgcactacgg

SEQ ID NO: 373298 - DNA, 120 bp, Artificial Sequence
  ENSG00000142453_14 (sequence is synthesized)
gagctaggggcccgccccgcggactgacagcaccaggaaaccaaatgatgtccctgcccgccgcccccgccgggcggctttcccccttgtactggagaagctcgaacacccggtcacagc

SEQ ID NO: 373299 - DNA, 120 bp, Artificial Sequence
  ENSG00000142453_15 (sequence is synthesized)
tctctttgctatgggaactgggacacttttttacacgatgttgccgccgtccccaccctaacccccacctcccggccctgagcgtgtgtcgctgccatattttacacaaaatcatgttgt

SEQ ID NO: 373300 - DNA, 120 bp, Artificial Sequence
  ENSG00000142453_16 (sequence is synthesized)
gggagccctcgtcccccctcctgcccgctctaccctgacctgggcttgtcatctgctggaacaggcgccatggggcctgccagccctgcctgccaggtcccttagcacctgtccccctgc

SEQ ID NO: 373301 - DNA, 120 bp, Artificial Sequence
  ENSG00000142453_17 (sequence is synthesized)
ctgtctccagtgggaaggtagcctggccaggcggggcctccccttcgacgaccaggcctcggtcacaacggacgtgacatgctgctttttttaattttatttttttatgaaaagaaccag

SEQ ID NO: 373302 - DNA, 120 bp, Artificial Sequence
  ENSG00000142453_18 (sequence is synthesized)
tgtcaatccgcagaccctctgtgaagccaggccggccgggccgagccagcagcccctctccctagactcagaggcgccgcggggaggggtggccccgccgaggcttcaggggccccctcc

SEQ ID NO: 373303 - DNA, 120 bp, Artificial Sequence
  ENSG00000142453_19 (sequence is synthesized)
ccaccaaagggttcacctcacacttgaatgtacaacccaccccactgtcgggaaggcctccgtcctcggcccctgcctcttgctgctgtcctgtccccgagcccctgcaggtcccccccc

SEQ ID NO: 373304 - DNA, 120 bp, Artificial Sequence
  ENSG00000142453_20 (sequence is synthesized)
gcccccccactcaagagttagagcaggtggctgcaggccttgggcccggagggaaggccactgccggccacttggggcagacacagacacctcaaggatctgtcacggaaggcgtccttt

SEQ ID NO: 373305 - DNA, 120 bp, Artificial Sequence
  ENSG00000142453_21 (sequence is synthesized)
ttccttgtagctaacgttaggcctgagtagctcccctccatccttgtagacgctccagtccctactactgtgacggcatttccatccctcccctgcccgggaagggaccttgcagggacc

SEQ ID NO: 373306 - DNA, 120 bp, Artificial Sequence
  ENSG00000142453_22 (sequence is synthesized)
gaaaaaaagaaaaagaaagaaaaaataaatgaggaaacgtgttgcagcacaggcagttttcttctccttctgctcccctgtttctcatacccccaaactcagatgctggagctcaggccc

SEQ ID NO: 373307 - DNA, 120 bp, Artificial Sequence
  ENSG00000142453_23 (sequence is synthesized)
gctggagctcaggcccgccgtgtgtgcacccaggcaggagcgggcgctgtccaggctgggccgcccccttggctctccctcctgttccaggggagccataggagggaaagcaggtggccc

SEQ ID NO: 373308 - DNA, 120 bp, Artificial Sequence
  ENSG00000142453_24 (sequence is synthesized)
gggggggatatgggggccccagccctgtcccaaagctccctgctcggctgcccctcgcccgcctttatataaattctctgaatcacctttgcatagaaaataaaagtgtttgctttgtaa

SEQ ID NO: 373309 - DNA, 120 bp, Artificial Sequence
  ENSG00000142453_25 (sequence is synthesized)
cagatgagaaaactgaggctcagagaggttaagtgacttgctccaagtcacacagctatatgcaacagagccaagatgggaagccaggtctgcctgatgccaaagtctgtgcccctgccc

SEQ ID NO: 373310 - DNA, 120 bp, Artificial Sequence
  ENSG00000142453_26 (sequence is synthesized)
aggtgccacgctgcctcccgatcgcccgttgtcttacagagagacaccacacctcacctgcctggcgctctgagttctaggttttatggctacctgtcccagcagcagaacatgatgcag

SEQ ID NO: 373311 - DNA, 78 bp, Artificial Sequence
  ENSG00000142453_27 (sequence is synthesized)
gcagcactagtgttgttgttgtttttaagagacagggtctccctgtgtttcccaggcttgattcacactctcgggctt

SEQ ID NO: 373312 - DNA, 120 bp, Artificial Sequence
  ENSG00000142453_28 (sequence is synthesized)
aggcatacaattccacacccagctagcacctagttctttaacttgcttttttggttaacttgcttaatgatttagcttggagatctttcctcatctgttcataaagagcctcttcattct

SEQ ID NO: 373313 - DNA, 120 bp, Artificial Sequence
  ENSG00000142453_29 (sequence is synthesized)
ttctcacgtccgcatggtctttgatgggagagccatcactggtttaattagatggtttccagtgtgtcgctaccacggacaatctaattatacatgtaagtttgttgatgtgttcatgta

SEQ ID NO: 373314 - DNA, 120 bp, Artificial Sequence
  ENSG00000142453_30 (sequence is synthesized)
tctggaggttaaactcctgtagtgccaaatcttttatgtggataaacacttgtcatttggagagctgtcacctgattgccctcggtggcgttgtgccggtcccctcctcacggcgtgtct

SEQ ID NO: 373315 - DNA, 120 bp, Artificial Sequence
  ENSG00000142453_31 (sequence is synthesized)
ctggctttctggtttgacgttgctttcatcggctccatacagagctacgacatcagtattgtggcccaggtggaccagaccggctccaagtccagtaacctcctggatctgaaaaacccc

SEQ ID NO: 373316 - DNA, 80 bp, Artificial Sequence
  ENSG00000142459_0 (sequence is synthesized)
cgggccggggctgcggggcgaacggcgcggctaggatccggcggctcagcccggggcggcgaggctcggcacggagatgg

SEQ ID NO: 373317 - DNA, 120 bp, Artificial Sequence
  ENSG00000142459_1 (sequence is synthesized)
gcacggagatggcggcgcgctcggcgcagacagagctgtgaaccaaccccgctcacggctaacaagcccacccaccatggcgagccccactctgagccccgactcctcatcccaggaggc

SEQ ID NO: 373318 - DNA, 120 bp, Artificial Sequence
  ENSG00000142459_2 (sequence is synthesized)
cctgtcggcccccacctgctccccaacctctgactccgagaacctcagccccgatgagctggagctgctggccaagctcgaagagcagaaccggctcctggaggccgactccaagtccat

SEQ ID NO: 373319 - DNA, 120 bp, Artificial Sequence
  ENSG00000142459_3 (sequence is synthesized)
gcgctccatgaatggctcgcggcggaacagtggctcctcgctagtgtccagctcctcggcctcctccaacctgagccacctggaggaggacacgtggatcctgtggggccggatcgccaa

SEQ ID NO: 373320 - DNA, 120 bp, Artificial Sequence
  ENSG00000142459_4 (sequence is synthesized)
cgagtgggaggagtggcggcgcaggaaggagaagctgctcaaggagctgatccgcaagggcatcccccaccacttccgggccatcgtgtggcagcttctgtgcagcgccacggacatgcc

SEQ ID NO: 373321 - DNA, 120 bp, Artificial Sequence
  ENSG00000142459_5 (sequence is synthesized)
cgtcaagaaccagtactccgagctgctcaagatgtcctcgccgtgcgagaagctgatccgcagggacatcgcccgcacctacccggaacatgagttcttcaagggccaggacagcctggg

SEQ ID NO: 373322 - DNA, 120 bp, Artificial Sequence
  ENSG00000142459_6 (sequence is synthesized)
ccaggaggtcctcttcaacgtcatgaaggcatactcgctggtagaccgggaggtgggctactgccagggaagcgccttcatcgtgggcctgctcctcatgcagatgcctgaggaggaggc

SEQ ID NO: 373323 - DNA, 120 bp, Artificial Sequence
  ENSG00000142459_7 (sequence is synthesized)
cttctgtgtgttcgtgcggctgatgcaggagtaccggctgcgggagctcttcaaacccagcatggccgagctcgggctctgcatctatcagttcgagtacatgctgcaggagcagctccc

SEQ ID NO: 373324 - DNA, 120 bp, Artificial Sequence
  ENSG00000142459_8 (sequence is synthesized)
agacctcaacacccacttccgttcccaaagcttccacacatccatgtatgcctcgtcctggttcctcacactgttcctgaccaccttcccactccccgtcgccacccgggtctttgacat

SEQ ID NO: 373325 - DNA, 120 bp, Artificial Sequence
  ENSG00000142459_9 (sequence is synthesized)
cttcatgtatgaggggctggagatcgtgttccgagtgggcctcgccctgctgcaggtgaaccaggcagagctgatgcagctggacatggaggggatgtcccagtacttccagagagtgat

SEQ ID NO: 373326 - DNA, 120 bp, Artificial Sequence
  ENSG00000142459_10 (sequence is synthesized)
cccccaccagttcgacagctgcccggacaagctggtcctcaaagcctaccaggtcaagtacaaccccaagaagatgaagaggctggagaaggagtacgcagccatgaagagcaaggagat

SEQ ID NO: 373327 - DNA, 120 bp, Artificial Sequence
  ENSG00000142459_11 (sequence is synthesized)
ggaggagcagatcgagatcaaaagacttcggacggagaaccggctcctgaaacagcggattgaaaccctagagaaggggcaagtgacacgggcgcaggaggcggaggagaactacgtcat

SEQ ID NO: 373328 - DNA, 120 bp, Artificial Sequence
  ENSG00000142459_12 (sequence is synthesized)
caagcgggagctggcggtggtgcggcagcagtgcagctcggcggccgaggacctgcagaaggcacagagcaccatccggcagctacaggagcagcaggagaacccccgcctcacagaaga

SEQ ID NO: 373329 - DNA, 120 bp, Artificial Sequence
  ENSG00000142459_13 (sequence is synthesized)
cttcgtgtcccacctggagaccgagctggagcagtcgaggctgcgggagacggagacactgggggcccttcgggagatgcaggacaaggttctcgacatggaaaagaggaacagctcgct

SEQ ID NO: 373330 - DNA, 120 bp, Artificial Sequence
  ENSG00000142459_14 (sequence is synthesized)
gcccgacgagaacaatgtggcgcagctgcaggaggagctgaaggcgctcaaggtgcgggaaggccaggcggtggcctcgacgcgagagcttaaactgcagctgcaggagctctcggacac

SEQ ID NO: 373331 - DNA, 120 bp, Artificial Sequence
  ENSG00000142459_15 (sequence is synthesized)
ctggcaggcccatctggcccgcggcggccgctggaaggagtccccacggaagctggtcgtgggcgagctgcaggacgagctgatgagcgtgcgtctgcgcgaggcccaggccctggccga

SEQ ID NO: 373332 - DNA, 120 bp, Artificial Sequence
  ENSG00000142459_16 (sequence is synthesized)
gcagcgcgtggtggaacttgagacgcaggaccacatccaccgcaaccttctgaaccgcgtggaggcggagcgcgcggcgctgcaggagaagctgcagtacctggctgcacagaacaaggg

SEQ ID NO: 373333 - DNA, 120 bp, Artificial Sequence
  ENSG00000142459_17 (sequence is synthesized)
gctgcagacgcagctcagcgaaagccgccgcaagcaggccgaggccgagtgcaagagcaaggaggaggtgatggctgtgcgactgcgggaggcggacagcatggctgcggtggccgagat

SEQ ID NO: 373334 - DNA, 120 bp, Artificial Sequence
  ENSG00000142459_18 (sequence is synthesized)
gcggcagcgcattgccgagctggagatccagagggaggaaggccgcatccagggccagctgaaccactcggactcatcgcagtacatccgcgagctcaaggaccagatcgaggagctgaa

SEQ ID NO: 373335 - DNA, 120 bp, Artificial Sequence
  ENSG00000142459_19 (sequence is synthesized)
ggccgaggtgcggctgctgaagggcccgccgcccttcgaggacccgctggctttcgatgggctgagcctggcgcggcacttggacgaggactcgctgccgtcgtcggacgaggagctact

SEQ ID NO: 373336 - DNA, 120 bp, Artificial Sequence
  ENSG00000142459_20 (sequence is synthesized)
tggcgtaggcgtgggcgctgccctgcaggacgcattgtaccctctgtccccgcgcgatgcgcgcttcttccgccgtctggagcggccggccaaggacagcgagggcagctcagacagcga

SEQ ID NO: 373337 - DNA, 120 bp, Artificial Sequence
  ENSG00000142459_21 (sequence is synthesized)
cgccgatgagctggccgcgccctacagccagggtctggacaactgaggccatgcccagcgcgcccggagtcaggaggccgcagccgcggggggcgcccgggcagtccgcgttctgctccc

SEQ ID NO: 373338 - DNA, 120 bp, Artificial Sequence
  ENSG00000142459_22 (sequence is synthesized)
cacctgccgcacttgacaaactacgcgccctctgtggctcggccacccctaaagcgaggcccggcgaggcagcgcagagggtagggtccgacctgggctcctcagggccccggggcaggc

SEQ ID NO: 373339 - DNA, 120 bp, Artificial Sequence
  ENSG00000142459_23 (sequence is synthesized)
tctctatccccagcagtgtttacccatcttggtctgtacccctccgggccctctggcgttccaggggtgcctggaggggctgactgctctcttaacaggagggcagagggcaggggacag

SEQ ID NO: 373340 - DNA, 120 bp, Artificial Sequence
  ENSG00000142459_24 (sequence is synthesized)
acgacccagaggtcccagcactgaatgagcaggcagctcccacctcctggcaggcttccttctgggacaggggcgacattgctgggaagtgctcaggaggtagccgaggcctgaggaagg

SEQ ID NO: 373341 - DNA, 120 bp, Artificial Sequence
  ENSG00000142459_25 (sequence is synthesized)
agagcgccagctctgggctggacatcagcaccccacaacactcctcgggatgaagtgacccttgactagcccctggccatctctaggggagtcaggccgctggggacagatggccaggcc

SEQ ID NO: 373342 - DNA, 120 bp, Artificial Sequence
  ENSG00000142459_26 (sequence is synthesized)
ggcctctcctgcctggcgcaggcaccgtggcccctgcagcggaaaccaaagtccccctactatgtgcggggcgcctggggactgagtggctaacgggaagcctccctgcttctctggggc

SEQ ID NO: 373343 - DNA, 120 bp, Artificial Sequence
  ENSG00000142459_27 (sequence is synthesized)
cagagcagcttccaggaagtgaagagacccctctccccagtgccccacatctttctctgggagacactcgcgccccctatcctggccagtgatggaggggtatctctacaggggtcctcg

SEQ ID NO: 373344 - DNA, 120 bp, Artificial Sequence
  ENSG00000142459_28 (sequence is synthesized)
gtctccatctacttccctttcttcatgtgtttccagccccaccctcagccagagccaggcccccaggcaggagcttcccagcgagcggcctcccctcacttcctcctggtggtcccgttg

SEQ ID NO: 373345 - DNA, 120 bp, Artificial Sequence
  ENSG00000142459_29 (sequence is synthesized)
tctctgctgaatcagagctgagaacggtgccaaaatccaacgatgccccccaggccccttcctcccttcccccggccccccgggcctcatgaccctgggggctgcccccctcggtgctcc

SEQ ID NO: 373346 - DNA, 120 bp, Artificial Sequence
  ENSG00000142459_30 (sequence is synthesized)
cggagcctccagtagagtagcgtcacaagcaatctccctggcgcttcctgggtggggacccctgctccgtccccgcttcctagctgcccacttttcagtgttacgaagcctggggaccgg

SEQ ID NO: 373347 - DNA, 120 bp, Artificial Sequence
  ENSG00000142459_31 (sequence is synthesized)
ggcaggcacccacggggctctccacacgccccctacactgcccgccaccattttgcacactgcctgttcacatgtcgcccaggcgggaaaaatggaaaataaagtgtatttacacagtca

SEQ ID NO: 373348 - DNA, 120 bp, Artificial Sequence
  ENSG00000142459_32 (sequence is synthesized)
gctgcaggcagtcccccattccctcccctcacgctcagtctttccattgctccacaaacactgaggacacggcgttgaggacatggcgacaccccgggcagacccgttcctgcccccctc

SEQ ID NO: 373349 - DNA, 120 bp, Artificial Sequence
  ENSG00000142459_33 (sequence is synthesized)
cggcagctacaggagcagcagggctcataatctgccccgcctcagcacctggccctcctgttcctttctggggtaaggggaacccagagacaagcgcagattctcccccagcagctccac

SEQ ID NO: 373350 - DNA, 120 bp, Artificial Sequence
  ENSG00000142459_34 (sequence is synthesized)
tcctgaaacagcggattgaaaccctagagaagagatagtccactgcgttagtgacaagtggttcttgtctgtctcccctctcctgtccccgcgccttccgctctgcctcctccccctgtc

SEQ ID NO: 373351 - DNA, 120 bp, Artificial Sequence
  ENSG00000142459_35 (sequence is synthesized)
gctgggaacccccttcgccgggtaggagagcgctgctctggctgataggttaatccaggtactgtagctttttatcccctctccggattccttcctggccccttccctgcaccctgcaca

SEQ ID NO: 373352 - DNA, 120 bp, Artificial Sequence
  ENSG00000142459_36 (sequence is synthesized)
tgacagccagtaaccgcctcttccctgccattctgcgggcaggcctggcgccatgcatggagcagctggggaccgcttctgggggacacagaggcttcccgggggggcggggcatgtgaa

SEQ ID NO: 373353 - DNA, 120 bp, Artificial Sequence
  ENSG00000142459_37 (sequence is synthesized)
gtggggagaagggtgtgtgtggaggggctgtgagtgcgtttgggtgtgaatgtccacatgcatgtacagaaagcttcctccgggcgacacagggtggggacccaggagggctggggaacc

SEQ ID NO: 373354 - DNA, 120 bp, Artificial Sequence
  ENSG00000142459_38 (sequence is synthesized)
taaaaccatattcacataaggccctggtgtgtgcagtgctgcggtcacacacacacacaacacatgcacacacacacacgcacacacacgcccggccctcacgctgctgctctctgctcc

SEQ ID NO: 373355 - DNA, 120 bp, Artificial Sequence
  ENSG00000142459_39 (sequence is synthesized)
tacctgcaatgcctgctaccaccttctctagctcacctgctcctgctgccacctcatcttgaatggctttatctggaagctgccacccgccacctggtggctttgagcctggaatggggg

SEQ ID NO: 373356 - DNA, 120 bp, Artificial Sequence
  ENSG00000142459_40 (sequence is synthesized)
gcccaagttgggtaggggacaaagatgaggtgggggaaaaaagggggtcttagctccaggcaggtggaggccccagagcccaggactagagaagatgccgctgggagaggtgaatgccct

SEQ ID NO: 373357 - DNA, 120 bp, Artificial Sequence
  ENSG00000142459_41 (sequence is synthesized)
ggtggcctcgctgtgcccctggataaggatcccaactggggcagagactgagagccagagtggggaaggagatggagctttccaagcccagggctagctctgttcctcccgggctcctcc

SEQ ID NO: 373358 - DNA, 120 bp, Artificial Sequence
  ENSG00000142459_42 (sequence is synthesized)
aggtgtcctattcctgcctgtcacccacccacgtccccaggcccagtgggacgctcatcccaggctctgagtacgggaggcccccacctcacttccccccacctccactctctgggcctc

SEQ ID NO: 373359 - DNA, 120 bp, Artificial Sequence
  ENSG00000142459_43 (sequence is synthesized)
cccctgtggcgggaggcagggccttgggtgggagccgagggtcacggcctccccctgccccctgtcctcgctgttctcaggggcaagtgacacgggcgcaggaggcggaggagaactacg

SEQ ID NO: 373360 - DNA, 120 bp, Artificial Sequence
  ENSG00000142459_44 (sequence is synthesized)
gctgctgggcggggccatgacccgcgcccccgcccccgcccaacggttttctttcagggctcataatctgccccgcctcagcacctggccctcctgttcctttctggggtaaggggaacc

SEQ ID NO: 373361 - DNA, 120 bp, Artificial Sequence
  ENSG00000142459_45 (sequence is synthesized)
cagagacaagcgcagattctcccccagcagctccacattctgagacatcctgatatccatttcttgccacctcatagtgtgtctgcagtatctgacttcccaacccccagcctcagcacg

SEQ ID NO: 373362 - DNA, 120 bp, Artificial Sequence
  ENSG00000142459_46 (sequence is synthesized)
gaggcctctgaagaccgggctgtccctgcagggtttcctctgtgtcacaggcagcagacagggctgtgactccttacggaggctcttgcctgtccccagggtctgaaggattgttaggtg

SEQ ID NO: 373363 - DNA, 120 bp, Artificial Sequence
  ENSG00000142459_47 (sequence is synthesized)
tccctggggggccagccatggagaatgggagcagggcagtccgggactgtttggggagctctgagccagcagggtggggctgagggggcaccttgagtgtcttgagggccatgaactttg

SEQ ID NO: 373364 - DNA, 120 bp, Artificial Sequence
  ENSG00000142459_48 (sequence is synthesized)
ggtcccatgatgggcaggcccatgagtggggccccaccccaagattttcttctcctgaaagcttttagaacttaactgcgacctggtgcagtggctcacgccttaatctcagcactttgg

SEQ ID NO: 373365 - DNA, 60 bp, Artificial Sequence
  ENSG00000142459_49 (sequence is synthesized)
catctctaataaaaatacaaaaataagctgggtatggtggtgcgcacctgtagtcccagc

SEQ ID NO: 373366 - DNA, 120 bp, Artificial Sequence
  ENSG00000142459_50 (sequence is synthesized)
tcaaagccagctgtgagcgcctcccccgcctgacgccgcggtaaccaagacagtcaaggtccctgccccgctgggccgcccagcgtcatggggaagcaatcaataaaccactgaactaga

SEQ ID NO: 373367 - DNA, 120 bp, Artificial Sequence
  ENSG00000142484_0 (sequence is synthesized)
actttcactcaccgcctgtccttcctgacacctcaccatgtgtacgggaaaatgtgcccgctgtgtggggctctccctcattaccctctgcctcgtctgcattgtggccaacgccctcct

SEQ ID NO: 373368 - DNA, 120 bp, Artificial Sequence
  ENSG00000142484_1 (sequence is synthesized)
gctggtacctaatggggagacctcctggaccaacaccaaccatctcagcttgcaagtctggctcatgggcggcttcattggcgggggcctaatggtactgtgtccggggattgcagccgt

SEQ ID NO: 373369 - DNA, 120 bp, Artificial Sequence
  ENSG00000142484_2 (sequence is synthesized)
ggtgtctggagctgggctccgaaatggacccagatgcttaatgaacggcgagtggggctaccacttcgaagacaccgcgggagcttacttgctcaaccgcactctatgggatcggtgcga

SEQ ID NO: 373370 - DNA, 120 bp, Artificial Sequence
  ENSG00000142484_3 (sequence is synthesized)
ggcgccccctcgcgtggtcccctggaatgtgacgctcttctcgctgctggtggccgcctcctgcctggagatagtactgtgtgggatccagctggtgaacgcgaccattggtgtcttctg

SEQ ID NO: 373371 - DNA, 120 bp, Artificial Sequence
  ENSG00000142484_4 (sequence is synthesized)
cggcgattgcaggaaaaaacaggacacacctcactgaggctccactgaccgccgggttacacctgctccttcctggacgctcactcccttgctcgctagaataaactgctttgcgctctc

SEQ ID NO: 373372 - DNA, 120 bp, Artificial Sequence
  ENSG00000142484_5 (sequence is synthesized)
tcgtgtcctccattctctgcctcttccctcccgcccttcccccgtggactgggacacctgggcgggactcgacttcgagggcactcgctccacgtgggctacctgggccttagcaaatcc

SEQ ID NO: 373373 - DNA, 120 bp, Artificial Sequence
  ENSG00000142494_0 (sequence is synthesized)
actgccggcctgcgcggtactcactgccggcctccgcggtacccactgccggcctccgcgctacccggccgcagcgcgcgagtcacatggaagctcctgaggagcccgcgccagtgcgcg

SEQ ID NO: 373374 - DNA, 120 bp, Artificial Sequence
  ENSG00000142494_1 (sequence is synthesized)
gaggcccggaggccacccttgaggtccgtgggtcgcgctgcttgcggctgtccgccttccgagaagagctgcgggcgctcttggtcctggctggccccgcgttcttggttcagctgatgg

SEQ ID NO: 373375 - DNA, 120 bp, Artificial Sequence
  ENSG00000142494_2 (sequence is synthesized)
tgttcctgatcagcttcataagctccgtgttctgtggccacctgggcaagctggagctggatgcagtcacgctggcaatcgcggttatcaatgtcactggtgtctcagtgggattcggct

SEQ ID NO: 373376 - DNA, 120 bp, Artificial Sequence
  ENSG00000142494_3 (sequence is synthesized)
tatcttctgcctgtgacaccctcatctcccagacgtacgggagccagaacctgaagcacgtgggcgtgatcctgcagcggagtgcgctcgtcctgctcctctgctgcttcccctgctggg

SEQ ID NO: 373377 - DNA, 120 bp, Artificial Sequence
  ENSG00000142494_4 (sequence is synthesized)
cgctctttctcaacacccagcacatcctgctgctcttcaggcaggacccagatgtgtccaggcttacccagacctatgtcacgatcttcattccagctcttcctgcaacctttctttata

SEQ ID NO: 373378 - DNA, 120 bp, Artificial Sequence
  ENSG00000142494_5 (sequence is synthesized)
tgttacaagttaaatatttgctcaaccagggaattgtactgccccagatcgtaactggagttgcagccaaccttgtcaatgccctcgccaactatctgtttctccatcaactgcatcttg

SEQ ID NO: 373379 - DNA, 120 bp, Artificial Sequence
  ENSG00000142494_6 (sequence is synthesized)
gggtgataggctctgcactggcaaacttgatttcccagtacaccctggctctactcctctttctctacatcctcgggaaaaaactgcatcaagctacatggggaggctggtccctcgagt

SEQ ID NO: 373380 - DNA, 120 bp, Artificial Sequence
  ENSG00000142494_7 (sequence is synthesized)
gcctgcaggactgggcctccttcctccgcctggccatccccagcatgctcatgctgtgcatggagtggtgggcctatgaggtcgggagcttcctcagtggcatcctcggcatggtggagc

SEQ ID NO: 373381 - DNA, 120 bp, Artificial Sequence
  ENSG00000142494_8 (sequence is synthesized)
tgggcgctcagtccatcgtgtatgaactggccatcattgtgtacatggtccctgcaggcttcagtgtggctgccagtgtccgggtaggaaacgctctgggtgctggagacatggagcagg

SEQ ID NO: 373382 - DNA, 120 bp, Artificial Sequence
  ENSG00000142494_9 (sequence is synthesized)
cacggaagtcctctaccgtttccctgctgattacagtgctctttgctgtagccttcagtgtcctgctgttaagctgtaaggatcacgtggggtacatttttactaccgaccgagacatca

SEQ ID NO: 373383 - DNA, 120 bp, Artificial Sequence
  ENSG00000142494_10 (sequence is synthesized)
ttaatctggtggctcaggtggttccaatttatgctgtttcccacctctttgaagctcttgcttgcacgagtggtggtgttctgagggggagtggaaatcagaaggttggagccattgtga

SEQ ID NO: 373384 - DNA, 120 bp, Artificial Sequence
  ENSG00000142494_11 (sequence is synthesized)
ataccattgggtactatgtggttggcctccccatcgggatcgcgctgatgtttgcaaccacacttggagtgatgggtctgtggtcagggatcatcatctgtacagtctttcaagctgtgt

SEQ ID NO: 373385 - DNA, 120 bp, Artificial Sequence
  ENSG00000142494_12 (sequence is synthesized)
gttttctaggctttattattcagctaaattggaaaaaagcctgtcagcaggctcaggtacacgccaatttgaaagtaaacaacgtgcctcggagtgggaattctgctctccctcaggatc

SEQ ID NO: 373386 - DNA, 120 bp, Artificial Sequence
  ENSG00000142494_13 (sequence is synthesized)
aacgaacgatgttggaaagacaggcgagcctcagtcagatcagcagatgcgccaagaagaacctttgccggaacatccacaggacggcgctaaattgtccaggaaacagctggtgctgcg

SEQ ID NO: 373387 - DNA, 120 bp, Artificial Sequence
  ENSG00000142494_14 (sequence is synthesized)
gcgagggcttctgctcctgggggtcttcttaatcttgctggtggggattttagtgagattctatgtcagaattcagtgacgtggtaggaaagaaagtcaggtcaagtgatgcttttgagc

SEQ ID NO: 373388 - DNA, 120 bp, Artificial Sequence
  ENSG00000142494_15 (sequence is synthesized)
ttacacacaattcacaggcccaccagtgacaatttactgtgagttaatgtcattcaggtgtgcccatggattttgagggctggaaatgcaaagacacatttttctataaaaagaaaaagc

SEQ ID NO: 373389 - DNA, 120 bp, Artificial Sequence
  ENSG00000142494_16 (sequence is synthesized)
aactaaggttaaaagctatattgtggcccaagacactgtctgaaagatgacatgagtagtaattcaccactatctgaaccaagcaaggatcaatgtgctgactgcattggccaatggctt

SEQ ID NO: 373390 - DNA, 120 bp, Artificial Sequence
  ENSG00000142494_17 (sequence is synthesized)
tgatacttctgctatttttttagacacaaacccataaactaactgcttaagaattcatactgcttgaattatgtaaaatatattttacagtatatctttccttgggccttagattactat

SEQ ID NO: 373391 - DNA, 120 bp, Artificial Sequence
  ENSG00000142494_18 (sequence is synthesized)
attactattcactgggcaaatggtatttgtttttgttttaattttttttttaatagacggaagtcttgctctgtcatgcaggctggagtgcggtggtgcgatcatagctcactgcagcct

SEQ ID NO: 373392 - DNA, 120 bp, Artificial Sequence
  ENSG00000142494_19 (sequence is synthesized)
tgggcttcaagcaatcctcctgtgtcagccaccagagtagctgagactacaggggtatgccaccatgcccagctggcatttgttaatcttcatttgaggtctagatctaggcactgtgga

SEQ ID NO: 373393 - DNA, 120 bp, Artificial Sequence
  ENSG00000142494_20 (sequence is synthesized)
actgtggacactgaaaaacagttgggaaatctttcgagctgtggaaatccaaacaaagactgataattcctggtaggggtgtgtgcgtgacgtactgcagcctcaacctcctgggctcaa

SEQ ID NO: 373394 - DNA, 120 bp, Artificial Sequence
  ENSG00000142494_21 (sequence is synthesized)
agcctcctgagtagctgagaccacaggcgtgtgccaccacgcctagctaattttttataccagggtctaccctttgtttcccaggctggtcttgaattcctgggatcaagcaatccttcc

SEQ ID NO: 373395 - DNA, 120 bp, Artificial Sequence
  ENSG00000142494_22 (sequence is synthesized)
tgggattataggcatgagccaccacgactggccagaggacaaaattttaataaaggtcttagcttaagcagtaatcctacttcattaagccttcctggggtgcggtacacaccgttaatt

SEQ ID NO: 373396 - DNA, 120 bp, Artificial Sequence
  ENSG00000142494_23 (sequence is synthesized)
tcctggggtgcggtacacaccgttaattcagcaaccctcagtacatactaagtatgctcagtgctgtgaaagtggattacaccaaattaagtcattcttatcacacccaatcaaaagtca

SEQ ID NO: 373397 - DNA, 120 bp, Artificial Sequence
  ENSG00000142494_24 (sequence is synthesized)
agaagccagggataaaagcacctcaggcacataacattaatctagtaatgtaattctctgcacatccagctggtgaaactgcgtgctgtaagctgggaccagctttgtccataactgctg

SEQ ID NO: 373398 - DNA, 120 bp, Artificial Sequence
  ENSG00000142494_25 (sequence is synthesized)
agagaacttgctgaagctctaggaataattttgcctgcccggttgctcaccagttgtagcttgccagctcccaacacccttcctggtgccaataaactttctcaaagagcaatactgaca

SEQ ID NO: 373399 - DNA, 120 bp, Artificial Sequence
  ENSG00000142494_26 (sequence is synthesized)
tttcttttgataaaacctccagccttctctgtgttgttccgacataccgaggaccaactggtctacatggatgccctgaacatgcaattctttcttccaaaataaaacattaaatagaga

SEQ ID NO: 373400 - DNA, 120 bp, Artificial Sequence
  ENSG00000142494_27 (sequence is synthesized)
gccggtaccggcgggctggggacctggtgatttctgcctccgcgggtgactttggcgggctttggggaccgagcgagctgtccgccggcgggctccggggagcatcgtgccaggagccgg

SEQ ID NO: 373401 - DNA, 120 bp, Artificial Sequence
  ENSG00000142494_28 (sequence is synthesized)
gcgggcaccccagctcctctgcctgcgtcccggccgctttccgctccgcaccacccgactgggggccccgcggggcactgcgggaacggctggtacgcgcccgggcgcatgttggctcgg

SEQ ID NO: 373402 - DNA, 120 bp, Artificial Sequence
  ENSG00000142494_29 (sequence is synthesized)
agaggccggcggctccagcctcctgcgccaggagacaccggagagctgggacctttgcccctaacggggctctaccaggtccaggctgcatttgcatccgggggtgccttctctgggagc

SEQ ID NO: 373403 - DNA, 120 bp, Artificial Sequence
  ENSG00000142494_30 (sequence is synthesized)
tgattccggccaataaaacgcaagttgcctgaacttcaaaacacaagggaacttgtttctttgaaaagtagcggtcaaaagttcgggagctctgcgatctaaataatcccgaggcacgga

SEQ ID NO: 373404 - DNA, 120 bp, Artificial Sequence
  ENSG00000142494_31 (sequence is synthesized)
ggagggggtgcgtggtctgtcgtggactcagagctgcgaaatgatttcttcagaattcagtcaacctctaccgaggaaaccagaggcatcctgtaccaccccctccccgccagtaattat

SEQ ID NO: 373405 - DNA, 120 bp, Artificial Sequence
  ENSG00000142494_32 (sequence is synthesized)
tttttaatcattaggttagggctgtttctgccttgtctcctaaaaataatgtggttttaaaaaccacaaaaacacaatcctatccacgttctcctgccagcttgggtggttttcaaaccg

SEQ ID NO: 373406 - DNA, 120 bp, Artificial Sequence
  ENSG00000142494_33 (sequence is synthesized)
agagggtaggacgcggcacaagaagcaactggtatgcacttaaggcgtgaataagcttttgactttgaggcccacattctgcacctgcgcgggctgaggggggccgctgtgcctctggag

SEQ ID NO: 373407 - DNA, 120 bp, Artificial Sequence
  ENSG00000142494_34 (sequence is synthesized)
tgggggctcggtagtttgtgggatattgtggcacccgctgtggtgtgcaggacagcaagggtaatgccgaggtcaaagccatggaataagatccatcagccatgctttctcacagaccag

SEQ ID NO: 373408 - DNA, 120 bp, Artificial Sequence
  ENSG00000142494_35 (sequence is synthesized)
agctcactgcagcctcgaactcttgggcttcaagcaatcctcctgtgtcagccaccagagtagctgagactacagggctggtgaaactgcgtgctgtaagctgggaccagctttgtccat

SEQ ID NO: 373409 - DNA, 120 bp, Artificial Sequence
  ENSG00000142494_36 (sequence is synthesized)
ggccctgtctgggtgcaaggcgacagctgtctttcttcaccaggcatcctcggcatggtggagctgggcgctcagtccatcgtgtatgaactggccatcattgtgtacatggtttccttt

SEQ ID NO: 373410 - DNA, 120 bp, Artificial Sequence
  ENSG00000142494_37 (sequence is synthesized)
aaccccacacaccccgcggggtgctaaccgagtcacggctcgaggcctctgggtccttccacgccaggtcattcagaacctgaaacccccagcggaggtggagagccgggttcttggttc

SEQ ID NO: 373411 - DNA, 120 bp, Artificial Sequence
  ENSG00000142494_38 (sequence is synthesized)
ttggagccattgtgaataccattgggtactatgtggttggcctccccatcgggatcgcgctgatgtttgcaaccacacttggagtgatggagcagtgccccatgtgctcaccaagcagca

SEQ ID NO: 373412 - DNA, 120 bp, Artificial Sequence
  ENSG00000142494_39 (sequence is synthesized)
ctctgtgcccccacagagctccccacaaggccatacacgtggtcggtgtgaacagcacagaaggaagggggcggacttgagcaccttcccacatttggaagaaaaaacttaatccacagc

SEQ ID NO: 373413 - DNA, 120 bp, Artificial Sequence
  ENSG00000142494_40 (sequence is synthesized)
atctgaaattaccagagctaatctttttaaaaagtacggaaataaatgactgcccagctttgatttctaaaataataatttggaacatattggcagttaataaatgatgatatgaaaacc

SEQ ID NO: 373414 - DNA, 120 bp, Artificial Sequence
  ENSG00000142507_0 (sequence is synthesized)
agttgctttgaggcagtaccggaggagaaagatggcggctaccttactagctgctcggggagccgggccagcaccggcttgggggccggaggcgttcactccagactgggaaagccgaga

SEQ ID NO: 373415 - DNA, 120 bp, Artificial Sequence
  ENSG00000142507_1 (sequence is synthesized)
agtttccactgggaccactatcatggccgtgcagtttgacgggggcgtggttctgggggcggactccagaacaaccactgggtcctacatcgccaatcgagtgactgacaagctgacacc

SEQ ID NO: 373416 - DNA, 120 bp, Artificial Sequence
  ENSG00000142507_2 (sequence is synthesized)
tattcacgaccgcattttctgctgtcgctcaggctcagctgctgatacccaggcagtagctgatgctgtcacctaccagctcggtttccacagcattgaactgaatgagcctccactggt

SEQ ID NO: 373417 - DNA, 120 bp, Artificial Sequence
  ENSG00000142507_3 (sequence is synthesized)
tgtactcagtgcctatggggggtatgatggtaaggcagtcctttgccattggaggctccgggagctcctacatctatggctatgttgatgctacctaccgggaaggcatgaccaaggaag

SEQ ID NO: 373418 - DNA, 120 bp, Artificial Sequence
  ENSG00000142507_4 (sequence is synthesized)
agtgtctgcaattcactgccaatgctctcgctttggccatggagcgggatggctccagtggaggagtgatccgcctggcagccattgcagagtcaggggtagagcggcaagtacttttgg

SEQ ID NO: 373419 - DNA, 120 bp, Artificial Sequence
  ENSG00000142507_5 (sequence is synthesized)
gagaccagatacccaaattcgccgttgccactttaccacccgcctgaatcctgggattctagtatgcaataagagatgccctgtactgatgcaaaatttaataaagtttgtcacagagaa

SEQ ID NO: 373420 - DNA, 120 bp, Artificial Sequence
  ENSG00000142507_6 (sequence is synthesized)
ttttgttactttcagttcccctcactcgttagtggaatccttacaaaagtctgttctccagcccgcttcagtttggatgagaataagcaatactggaggccaggcacggtggctcacgcc

SEQ ID NO: 373421 - DNA, 120 bp, Artificial Sequence
  ENSG00000142507_7 (sequence is synthesized)
gagggcaggtcagatccccacccgaccagagcacacttgagccaggacttttatcctctccccagccattttctttttctttccagtctctacctcacttattcttactattaacgtgcc

SEQ ID NO: 373422 - DNA, 90 bp, Artificial Sequence
  ENSG00000142511_0 (sequence is synthesized)
gtaccttgctgtctctaaaagaataataataataagcattccataaaaattatggaatggagaaatcatgaatggggtctcggaggggac

SEQ ID NO: 373423 - DNA, 120 bp, Artificial Sequence
  ENSG00000142511_1 (sequence is synthesized)
tatggaatggagaaatcatgaatggggtctcggaggggaccagaggctgcagtgacaggcaacctggggtcctgacacgtgatcgctcttgttccaggaagatgaactcttccggatgcc

SEQ ID NO: 373424 - DNA, 120 bp, Artificial Sequence
  ENSG00000142511_2 (sequence is synthesized)
tgtctgaggaggtggggtccctccgcccactgactgtggttatcctgtctgcgtccattgtcgtcggagtgctgggcaatgggctggtgctgtggatgactgtcttccgtatggcacgca

SEQ ID NO: 373425 - DNA, 120 bp, Artificial Sequence
  ENSG00000142511_3 (sequence is synthesized)
cggtctccaccgtctgcttcttccacctggcccttgccgatttcatgctctcactgtctctgcccattgccatgtactatattgtctccaggcagtggctcctcggagagtgggcctgca

SEQ ID NO: 373426 - DNA, 120 bp, Artificial Sequence
  ENSG00000142511_4 (sequence is synthesized)
aactctacatcacctttgtgttcctcagctactttgccagtaactgcctccttgtcttcatctctgtggaccgttgcatctctgtcctctaccccgtctgggccctgaaccaccgcactg

SEQ ID NO: 373427 - DNA, 120 bp, Artificial Sequence
  ENSG00000142511_5 (sequence is synthesized)
aattccggacaaccagaaaatggaatggctgtacgcactgctacttggcgttcaactctgacaatgagactgcccagatttggattgaaggggtcgtggagggacacattatagggacca

SEQ ID NO: 373428 - DNA, 120 bp, Artificial Sequence
  ENSG00000142511_6 (sequence is synthesized)
ttggccacttcctgctgggcttcctggggcccttagcaatcataggcacctgcgcccacctcatccgggccaagctcttgcgggagggctgggtccatgccaaccggcccaagaggctgc

SEQ ID NO: 373429 - DNA, 120 bp, Artificial Sequence
  ENSG00000142511_7 (sequence is synthesized)
tgctggtgctggtgagcgctttctttatcttctggtccccgtttaacgtggtgctgttggtccatctgtggcgacgggtgatgctcaaggaaatctaccacccccggatgctgctcatcc

SEQ ID NO: 373430 - DNA, 120 bp, Artificial Sequence
  ENSG00000142511_8 (sequence is synthesized)
tccaggctagctttgccttgggctgtgtcaacagcagcctcaaccccttcctctacgtcttcgttggcagagatttccaagaaaagtttttccagtctttgacttctgccctggcgaggg

SEQ ID NO: 373431 - DNA, 120 bp, Artificial Sequence
  ENSG00000142511_9 (sequence is synthesized)
cgtttggagaggaggagtttctgtcatcctgtccccgtggcaacgccccccgggaatgatggaagacttcagctggaagctggaagccgtccttcttagtttgcttgtggcctcttacct

SEQ ID NO: 373432 - DNA, 120 bp, Artificial Sequence
  ENSG00000142512_0 (sequence is synthesized)
actcacagcacgaccagagaacaggcctgtctcaggcaggccctgcgcctcctatgcggagatgctactgccactgctgctgtcctcgctgctgggcgggtcccaggctatggatgggag

SEQ ID NO: 373433 - DNA, 120 bp, Artificial Sequence
  ENSG00000142512_1 (sequence is synthesized)
attctggatacgagtgcaggagtcagtgatggtgccggagggcctgtgcatctctgtgccctgctctttctcctacccccgacaggactggacagggtctaccccagcttatggctactg

SEQ ID NO: 373434 - DNA, 120 bp, Artificial Sequence
  ENSG00000142512_2 (sequence is synthesized)
gttcaaagcagtgactgagacaaccaagggtgctcctgtggccacaaaccaccagagtcgagaggtggaaatgagcacccggggccgattccagctcactggggatcccgccaaggggaa

SEQ ID NO: 373435 - DNA, 120 bp, Artificial Sequence
  ENSG00000142512_3 (sequence is synthesized)
ctgctccttggtgatcagagacgcgcagatgcaggatgagtcacagtacttctttcgggtggagagaggaagctatgtgagatataatttcatgaacgatgggttctttctaaaagtaac

SEQ ID NO: 373436 - DNA, 120 bp, Artificial Sequence
  ENSG00000142512_4 (sequence is synthesized)
agccctgactcagaagcctgatgtctacatccccgagaccctggagcccgggcagccggtgacggtcatctgtgtgtttaactgggcctttgaggaatgtccacccccttctttctcctg

SEQ ID NO: 373437 - DNA, 120 bp, Artificial Sequence
  ENSG00000142512_5 (sequence is synthesized)
gacgggggctgccctctcctcccaaggaaccaaaccaacgacctcccacttctcagtgctcagcttcacgcccagaccccaggaccacaacaccgacctcacctgccatgtggacttctc

SEQ ID NO: 373438 - DNA, 120 bp, Artificial Sequence
  ENSG00000142512_6 (sequence is synthesized)
cagaaagggtgtgagcgcacagaggaccgtccgactccgtgtggcctatgcccccagagaccttgttatcagcatttcacgtgacaacacgccagccctggagccccagccccagggaaa

SEQ ID NO: 373439 - DNA, 120 bp, Artificial Sequence
  ENSG00000142512_7 (sequence is synthesized)
tgtcccatacctggaagcccaaaaaggccagttcctgcggctcctctgtgctgctgacagccagccccctgccacactgagctgggtcctgcagaacagagtcctctcctcgtcccatcc

SEQ ID NO: 373440 - DNA, 120 bp, Artificial Sequence
  ENSG00000142512_8 (sequence is synthesized)
ctggggccctagacccctggggctggagctgcccggggtgaaggctggggattcagggcgctacacctgccgagcggagaacaggcttggctcccagcagcgagccctggacctctctgt

SEQ ID NO: 373441 - DNA, 120 bp, Artificial Sequence
  ENSG00000142512_9 (sequence is synthesized)
gcagtatcctccagagaacctgagagtgatggtttcccaagcaaacaggacagtcctggaaaaccttgggaacggcacgtctctcccagtactggagggccaaagcctgtgcctggtctg

SEQ ID NO: 373442 - DNA, 120 bp, Artificial Sequence
  ENSG00000142512_10 (sequence is synthesized)
tgtcacacacagcagccccccagccaggctgagctggacccagaggggacaggttctgagcccctcccagccctcagaccccggggtcctggagctgcctcgggttcaagtggagcacga

SEQ ID NO: 373443 - DNA, 120 bp, Artificial Sequence
  ENSG00000142512_11 (sequence is synthesized)
aggagagttcacctgccacgctcggcacccactgggctcccagcacgtctctctcagcctctccgtgcactactccccgaagctgctgggcccctcctgctcctgggaggctgagggtct

SEQ ID NO: 373444 - DNA, 120 bp, Artificial Sequence
  ENSG00000142512_12 (sequence is synthesized)
gcactgcagctgctcctcccaggccagcccggccccctctctgcgctggtggcttggggaggagctgctggaggggaacagcagccaggactccttcgaggtcacccccagctcagccgg

SEQ ID NO: 373445 - DNA, 120 bp, Artificial Sequence
  ENSG00000142512_13 (sequence is synthesized)
agataagaagggactcatctcaacggcattctccaacggagcgtttctgggaatcggcatcacggctcttcttttcctctgcctggccctgatcatcatgaagattctaccgaagagacg

SEQ ID NO: 373446 - DNA, 120 bp, Artificial Sequence
  ENSG00000142512_14 (sequence is synthesized)
gactcagacagaaaccccgaggcccaggttctcccggcacagcacgatcctggattacatcaatgtggtcccgacggctggccccctggctcagaagcggaatcagaaagccacaccaaa

SEQ ID NO: 373447 - DNA, 120 bp, Artificial Sequence
  ENSG00000142512_15 (sequence is synthesized)
cagtcctcggacccctcttccaccaggtgctccctccccagaatcaaagaagaaccagaaaaagcagtatcagttgcccagtttcccagaacccaaatcatccactcaagccccagaatc

SEQ ID NO: 373448 - DNA, 120 bp, Artificial Sequence
  ENSG00000142512_16 (sequence is synthesized)
ccaggagagccaagaggagctccattatgccacgctcaacttcccaggcgtcagacccaggcctgaggcccggatgcccaagggcacccaggcggattatgcagaagtcaagttccaatg

SEQ ID NO: 373449 - DNA, 120 bp, Artificial Sequence
  ENSG00000142512_17 (sequence is synthesized)
agggtctcttaggctttaggactgggacttcggctagggaggaaggtagagtaagaggttgaagataacagagtgcaaagtttccttctctccctctctctctctctttctctctctctc

SEQ ID NO: 373450 - DNA, 77 bp, Artificial Sequence
  ENSG00000142512_18 (sequence is synthesized)
gcagtgagccaagatcacaccattgcactcctccaaatgggttgggtgtctgtaatcccagcactttgggaggctaa

SEQ ID NO: 373451 - DNA, 65 bp, Artificial Sequence
  ENSG00000142512_19 (sequence is synthesized)
atagctgggcttggtggtgtgtgcctgtagtcccagctgtcagacatttaaaccagagcaactcc

SEQ ID NO: 373452 - DNA, 120 bp, Artificial Sequence
  ENSG00000142512_20 (sequence is synthesized)
acaaaacatagctgggcttggtggtgtgtgcctgtagtcccagctgtcagacatttaaaccagagcaactccatctggaataggagctgaataaaatgaggctgagacctactgggctgc

SEQ ID NO: 373453 - DNA, 120 bp, Artificial Sequence
  ENSG00000142512_21 (sequence is synthesized)
ggatgagacaggaggtccgtacaagatacaggtcataaagactttgctgataaaacagattgcagtaaagaagccaaccaaatcccaccaaaaccaagttggccacgagagtgacctctg

SEQ ID NO: 373454 - DNA, 86 bp, Artificial Sequence
  ENSG00000142512_22 (sequence is synthesized)
gatatgtcccaaaagggggaggaatgaataatccaccccttgtttagcaaataagcaagaaataaccataaaagtgggcaaccagc

SEQ ID NO: 373455 - DNA, 120 bp, Artificial Sequence
  ENSG00000142512_23 (sequence is synthesized)
gaggaatgaataatccaccccttgtttagcaaataagcaagaaataaccataaaagtgggcaaccagcagctctaggcgctgctcttgtctatggagtagccattcttttgttcctttac

SEQ ID NO: 373456 - DNA, 120 bp, Artificial Sequence
  ENSG00000142512_24 (sequence is synthesized)
gcccccaggagacccagaggacaactgggcaaggtgggccggagagtgtgggggaaggcaaaggagttctgtgagctcagcgtctgaagctcatttcatgcatcaggccccagggctcag

SEQ ID NO: 373457 - DNA, 120 bp, Artificial Sequence
  ENSG00000142512_25 (sequence is synthesized)
ttcacgtgacaacacgccaggtactgagggccgtcgggctggggctgggccagttgtctttagatgaaaaggcttcaggggatgaggggatgtgctcctccctgtaccccttctctcttt

SEQ ID NO: 373458 - DNA, 120 bp, Artificial Sequence
  ENSG00000142512_26 (sequence is synthesized)
gagggaccctggggacagcctatgggctgagcagagagggctctcagggacccctgcagcacaagaatctcccaccacggtctctgtcccagccctgactcagaagcctgatgtctacat

SEQ ID NO: 373459 - DNA, 120 bp, Artificial Sequence
  ENSG00000142513_0 (sequence is synthesized)
atggccggcctggggttttggggccaccctgctggacctctcctgctgctgctgctgctggtgctgccaccccgggccctgccagaaggacccctggtgttcgtggctctggtattccgc

SEQ ID NO: 373460 - DNA, 120 bp, Artificial Sequence
  ENSG00000142513_1 (sequence is synthesized)
catggcgaccgggccccgctggcctcctaccccatggacccacacaaggaggtggcctccaccctgtggccacgaggcctgggccagctgaccacggagggggtccgccagcagctggag

SEQ ID NO: 373461 - DNA, 120 bp, Artificial Sequence
  ENSG00000142513_2 (sequence is synthesized)
ctgggccgcttcctgaggagccgctacgaggccttcctgagtccggagtaccggcgggaggaggtgtacatccgcagcacggactttgaccgcacgctggagagtgcccaggccaacctt

SEQ ID NO: 373462 - DNA, 120 bp, Artificial Sequence
  ENSG00000142513_3 (sequence is synthesized)
gccgggctgtttcccgaggctgctccagggagccccgaggcccgctggaggccgatcccggtgcacacggtgcccgtggctgaggataagctgctgaggttccccatgcgcagctgtccc

SEQ ID NO: 373463 - DNA, 120 bp, Artificial Sequence
  ENSG00000142513_4 (sequence is synthesized)
cgataccacgagctgctgcgggaggccaccgaggccgccgagtaccaggaggccctggagggctggacgggcttcctgagtcgcctggagaacttcacgggactgtcgctggttggagag

SEQ ID NO: 373464 - DNA, 120 bp, Artificial Sequence
  ENSG00000142513_5 (sequence is synthesized)
ttctggacaccctcatgtgccagcaagcccacggtcttccactaccagcctgggcctccccagatgtcctgcggactcttgcccagatctcggctttggatattggagcccacgtgggcc

SEQ ID NO: 373465 - DNA, 120 bp, Artificial Sequence
  ENSG00000142513_6 (sequence is synthesized)
caccccgggcagcagagaaggcccagctgacaggggggatcctgctgaatgctatccttgcaaacttctcccgggtccagcgcctggggctgcccctcaagatggtcatgtactcagctc

SEQ ID NO: 373466 - DNA, 120 bp, Artificial Sequence
  ENSG00000142513_7 (sequence is synthesized)
atgacagcaccctgctggccctccagggggccctgggcctctatgatggacacaccccgccatatgctgcctgcctcggctttgagttccggaagcacctggggaatcccgccaaagatg

SEQ ID NO: 373467 - DNA, 120 bp, Artificial Sequence
  ENSG00000142513_8 (sequence is synthesized)
gagggaatgtcaccgtctccctcttctaccgcaatgactccgcccacctgcccctgcctctcagcctccccgggtgcccggccccctgtccactaggccgcttctaccagctgactgccc

SEQ ID NO: 373468 - DNA, 120 bp, Artificial Sequence
  ENSG00000142513_9 (sequence is synthesized)
cggcccggcctcccgcccatggggtctcctgccatggcccctatgaggctgccatccccccagctccagtggtgcccctgctggccggagctgtagctgtgctggtggcactcagcttgg

SEQ ID NO: 373469 - DNA, 120 bp, Artificial Sequence
  ENSG00000142513_10 (sequence is synthesized)
ggctgggcctgctggcctggagaccagggtgcctgcgggccttggggggccccgtgtgagccagaaaccagggcttccctacccccagctgacactggaccccaacatgtatgctcagta

SEQ ID NO: 373470 - DNA, 120 bp, Artificial Sequence
  ENSG00000142515_0 (sequence is synthesized)
agccccaagcttaccacctgcacccggagagctgtgtcaccatgtgggtcccggttgtcttcctcaccctgtccgtgacgtggattggtgctgcacccctcatcctgtctcggattgtgg

SEQ ID NO: 373471 - DNA, 120 bp, Artificial Sequence
  ENSG00000142515_1 (sequence is synthesized)
gaggctgggagtgcgagaagcattcccaaccctggcaggtgcttgtggcctctcgtggcagggcagtctgcggcggtgttctggtgcacccccagtgggtcctcacagctgcccactgca

SEQ ID NO: 373472 - DNA, 120 bp, Artificial Sequence
  ENSG00000142515_2 (sequence is synthesized)
tcaggaacaaaagcgtgatcttgctgggtcggcacagcctgtttcatcctgaagacacaggccaggtatttcaggtcagccacagcttcccacacccgctctacgatatgagcctcctga

SEQ ID NO: 373473 - DNA, 120 bp, Artificial Sequence
  ENSG00000142515_3 (sequence is synthesized)
agaatcgattcctcaggccaggtgatgactccagccacgacctcatgctgctccgcctgtcagagcctgccgagctcacggatgctgtgaaggtcatggacctgcccacccaggagccag

SEQ ID NO: 373474 - DNA, 120 bp, Artificial Sequence
  ENSG00000142515_4 (sequence is synthesized)
cactggggaccacctgctacgcctcaggctggggcagcattgaaccagaggagttcttgaccccaaagaaacttcagtgtgtggacctccatgttatttccaatgacgtgtgtgcgcaag

SEQ ID NO: 373475 - DNA, 120 bp, Artificial Sequence
  ENSG00000142515_5 (sequence is synthesized)
ttcaccctcagaaggtgaccaagttcatgctgtgtgctggacgctggacagggggcaaaagcacctgctcgggtgattctgggggcccacttgtctgtaatggtgtgcttcaaggtatca

SEQ ID NO: 373476 - DNA, 120 bp, Artificial Sequence
  ENSG00000142515_6 (sequence is synthesized)
ccctgcccgaaaggccttccctgtacaccaaggtggtgcattaccggaagtggatcaaggacaccatcgtggccaacccctgagcacccctatcaaccccctattgtagtaaacttggaa

SEQ ID NO: 373477 - DNA, 120 bp, Artificial Sequence
  ENSG00000142515_7 (sequence is synthesized)
ccttggaaatgaccaggccaagactcaagcctccccagttctactgacctttgtccttaggtgtgaggtccagggttgctaggaaaagaaatcagcagacacaggtgtagaccagagtgt

SEQ ID NO: 373478 - DNA, 120 bp, Artificial Sequence
  ENSG00000142515_8 (sequence is synthesized)
ttcttaaatggtgtaattttgtcctctctgtgtcctggggaatactggccatgcctggagacatatcactcaatttctctgaggacacagataggatggggtgtctgtgttatttgtggg

SEQ ID NO: 373479 - DNA, 120 bp, Artificial Sequence
  ENSG00000142515_9 (sequence is synthesized)
gtacagagatgaaagaggggtgggatccacactgagagagtggagagtgacatgtgctggacactgtccatgaagcactgagcagaagctggaggcacaacgcaccagacactcacagca

SEQ ID NO: 373480 - DNA, 120 bp, Artificial Sequence
  ENSG00000142515_10 (sequence is synthesized)
aggatggagctgaaaacataacccactctgtcctggaggcactgggaagcctagagaaggctgtgagccaaggagggagggtcttcctttggcatgggatggggatgaagtaaggagagg

SEQ ID NO: 373481 - DNA, 120 bp, Artificial Sequence
  ENSG00000142515_11 (sequence is synthesized)
gactggaccccctggaagctgattcactatggggggaggtgtattgaagtcctccagacaaccctcagatttgatgatttcctagtagaactcacagaaataaagagctgttatactgtg

SEQ ID NO: 373482 - DNA, 120 bp, Artificial Sequence
  ENSG00000142515_12 (sequence is synthesized)
aagcttaccacctgcacccggagagctgtgtcaccatgtgggtcccggttgtcttcctcaccctggcagtctgcggcggtgttctggtgcacccccagtgggtcctcacagctgcccact

SEQ ID NO: 373483 - DNA, 120 bp, Artificial Sequence
  ENSG00000142515_13 (sequence is synthesized)
cttgaggggaaaggtgagtggggaccttaattctgggctggggtctagaagccaacaaggcgtctgcctcccctgctccccagctgtagccatgccacctccccgtgtctcatctcattc

SEQ ID NO: 373484 - DNA, 120 bp, Artificial Sequence
  ENSG00000142515_14 (sequence is synthesized)
cctccttccctcttctttgactccctcaaggcaataggttattcttacagcacaactcatctgttcctgcgttcagcacacggttactaggcacctgctatgcacccagcactgccctag

SEQ ID NO: 373485 - DNA, 120 bp, Artificial Sequence
  ENSG00000142515_15 (sequence is synthesized)
agcctgggacatagcagtgaacagacagagagcagcccctcccttctgtagcccccaagccagtgaggggcacaggcaggaacagggaccacaacacagaaaagctggagggtgtcagga

SEQ ID NO: 373486 - DNA, 120 bp, Artificial Sequence
  ENSG00000142515_16 (sequence is synthesized)
agccccaagcttaccacctgcacccggagagctgtgtcaccatgtgggtcccggttgtcttcctcaccctgtccgtgacgtggattggtgagaggggccatggttggggggatgcaggag

SEQ ID NO: 373487 - DNA, 120 bp, Artificial Sequence
  ENSG00000142515_17 (sequence is synthesized)
agggagccagccctgactgtcaagctgaggctctttcccccccaacccagcaccccagcccagacagggagctgggctcttttctgtctctcccagccccactccaagcccataccccca

SEQ ID NO: 373488 - DNA, 120 bp, Artificial Sequence
  ENSG00000142515_18 (sequence is synthesized)
gcccctccatattgcaacagtcctcactcccacaccaggtccccgctccctcccacttaccccagaactttctccccattgcccagccagctccctgctcccagctgctttactaaaggg

SEQ ID NO: 373489 - DNA, 120 bp, Artificial Sequence
  ENSG00000142515_19 (sequence is synthesized)
gaagttcctgggcatctccgtgtttctctttgtggggctcaaaacctccaaggacctctctcaatgccattggttccttggaccgtatcactggtccacctcctgagcccctcaatccta

SEQ ID NO: 373490 - DNA, 120 bp, Artificial Sequence
  ENSG00000142515_20 (sequence is synthesized)
gccttgggactgggggagagagggaaagttctggttcaggtcacatggggaggcagggttggggctggaccaccctccccatggctgcctgggtctccatctgtgttcctctatgtctct

SEQ ID NO: 373491 - DNA, 120 bp, Artificial Sequence
  ENSG00000142515_21 (sequence is synthesized)
ttgtgtcgctttcattatgtctcttggtaactggcttcggttgtgtctctccgtgtgactattttgttctctctctccctctcttctctgtcttcagtctccatatctccccctctctct

SEQ ID NO: 373492 - DNA, 120 bp, Artificial Sequence
  ENSG00000142515_22 (sequence is synthesized)
tcacagtctactgacttttcccattcagctgtgagtgcccaaccctatcccagagaccttgatgcttggcctcccaatcttgccctaggatacccagatgccaaccagacacctccttct

SEQ ID NO: 373493 - DNA, 120 bp, Artificial Sequence
  ENSG00000142515_23 (sequence is synthesized)
tcctagccaggctatctggcctgagacaacaaatgggtccctcagtctggcaatgggactctgagaactcctcattccctgactcttagccccagactcttcattcagtggcccacattt

SEQ ID NO: 373494 - DNA, 120 bp, Artificial Sequence
  ENSG00000142515_24 (sequence is synthesized)
tggcccacattttccttaggaaaaacatgagcatccccagccacaactgccagctctctgattccccaaatctgcatccttttcaaaacctaaaaacaaaaagaaaaacaaataaaacaa

SEQ ID NO: 373495 - DNA, 120 bp, Artificial Sequence
  ENSG00000142515_25 (sequence is synthesized)
ccagaactgttttctcaacctgggacttcctaaactttccaaaaccttcctcttccagcaactgaacctcgccataaggcacttatccctggttcctagcaccgcttatcccctcagaat

SEQ ID NO: 373496 - DNA, 120 bp, Artificial Sequence
  ENSG00000142515_26 (sequence is synthesized)
ccacaacttgtaccaagtttcccttctcccagtccaagaccccaaatcaccacaaaggacccaatccccagactcaagatatggtctgggcgctgtcttgtgtctcctaccctgatccct

SEQ ID NO: 373497 - DNA, 120 bp, Artificial Sequence
  ENSG00000142515_27 (sequence is synthesized)
gggttcaactctgctcccagagcatgaagcctctccaccagcaccagccaccaacctgcaaacctagggaagattgacagaattcccagcctttcccagctccccctgcccatgtcccag

SEQ ID NO: 373498 - DNA, 120 bp, Artificial Sequence
  ENSG00000142515_28 (sequence is synthesized)
gactcccagccttggttctctgcccccgtgtcttttcaaacccacatcctaaatccatctcctatccgagtcccccagttcctcctgtcaaccctgattcccctgatctagcaccccctc

SEQ ID NO: 373499 - DNA, 120 bp, Artificial Sequence
  ENSG00000142515_29 (sequence is synthesized)
agccccaagcttaccacctgcacccggagagctgtgtcaccatgtgggtcccggttgtcttcctcaccctgtccgtgacgtggattgcaccccctctgcaggtgcttgtggcctctcgtg

SEQ ID NO: 373500 - DNA, 120 bp, Artificial Sequence
  ENSG00000142515_30 (sequence is synthesized)
cgctggacagggggcaaaagcacctgctcgtgggtcattctgatcaccgaactgaccatgccagccctgccgatggtcctccatggctccctagtgccctggagaggaggtgtctagtca

SEQ ID NO: 373501 - DNA, 120 bp, Artificial Sequence
  ENSG00000142515_31 (sequence is synthesized)
tggaccctcccctctgcacaggagctggaccctgaagtcccttccccaccggccaggactggagcccctacccctctgttggaatccctgcccaccttcttctggaagtcggctctggag

SEQ ID NO: 373502 - DNA, 120 bp, Artificial Sequence
  ENSG00000142515_32 (sequence is synthesized)
acatttctctcttcttccaaagctgggaactgctatctgttatctgcctgtccaggtctgaaagataggattgcccaggcagaaactgggactgacctatctcactctctccctgctttt

SEQ ID NO: 373503 - DNA, 120 bp, Artificial Sequence
  ENSG00000142515_33 (sequence is synthesized)
ggaccctggggagcgaagtggaggatacaaccttgggcctgcaggccaggctacctacccacttggaaacccacgccaaagccgcatctacagctgagccactctgaggcctcccctccc

SEQ ID NO: 373504 - DNA, 120 bp, Artificial Sequence
  ENSG00000142515_34 (sequence is synthesized)
cagcggtccccactcagctccaaagtctctctcccttttctctcccacactctatcatcccccggattcctctctacttggttctcattcttcctttgacttcctgcttccctttctcat

SEQ ID NO: 373505 - DNA, 120 bp, Artificial Sequence
  ENSG00000142515_35 (sequence is synthesized)
tcatctgtttctcactttctgcctggttttgttcttctctctctctttctctggcccatgtctgtttctctatgtttctgtcttttctttctcatcctgtgtattttcggctcaccttgt

SEQ ID NO: 373506 - DNA, 120 bp, Artificial Sequence
  ENSG00000142515_36 (sequence is synthesized)
ttgtcactgttctcccctctgccctttcattctctctgtccttttaccctcttcctttttcccttggtttctctcagtttctgtatctgcccttcaccctctcacactgctgtttcccaa

SEQ ID NO: 373507 - DNA, 120 bp, Artificial Sequence
  ENSG00000142515_37 (sequence is synthesized)
ctcgttgtctgtatttttggcctgaactgtgtcttccccaaccctgtgtttttctcactgtttctttttctcttttggagcctcctccttgctcctctgtcccttctctctttccttatc

SEQ ID NO: 373508 - DNA, 120 bp, Artificial Sequence
  ENSG00000142515_38 (sequence is synthesized)
ggaccacctgctacgcctcaggctggggcagcattgaaccagaggagtgtacgcctgggccagatggtgcagccgggagcccagatgcctgggtctgagggaggaggggacaggactcct

SEQ ID NO: 373509 - DNA, 120 bp, Artificial Sequence
  ENSG00000142515_39 (sequence is synthesized)
aggtctgagggaggagggccaaggaaccaggtggggtccagcccacaacagtgtttttgcctggcccgtagtcttgaccccaaagaaacttcagtgtgtggacctccatgttatttccaa

SEQ ID NO: 373510 - DNA, 120 bp, Artificial Sequence
  ENSG00000142528_0 (sequence is synthesized)
agagaagcttctcgcgcacaggaagtcgctgcgaggaggcgcgtgtgcggggagttgaatctcccgctcccttgaggctggggttgcgtctgttgacgcggccgactacaatcccgaggg

SEQ ID NO: 373511 - DNA, 120 bp, Artificial Sequence
  ENSG00000142528_1 (sequence is synthesized)
agactcacattgggacttgtcctcctcctcctggacattttgggggctcgtcagcatggacagcgagtcagccatgggtggaagggaggctttctcacagctcccttgtgcttcccacag

SEQ ID NO: 373512 - DNA, 120 bp, Artificial Sequence
  ENSG00000142528_2 (sequence is synthesized)
ccctgccagccgggaacacggaggggaaggaggaggagcttaaaagaggctactgaaccccagttggccatggctgaggaatttgtgaccctcaaggatgtcggcatggacttcaccttg

SEQ ID NO: 373513 - DNA, 120 bp, Artificial Sequence
  ENSG00000142528_3 (sequence is synthesized)
ggagactgggagcagctcgggctggaacagggggacacgttctgggacacagcgttggacaattgccaggacctcttcctgctggaccccccaagacccaacctgacctcccacccagat

SEQ ID NO: 373514 - DNA, 120 bp, Artificial Sequence
  ENSG00000142528_4 (sequence is synthesized)
ggcagtgaagatctggagcctctggcaggaggaagcccagaagcaacaagccctgatgtgactgagaccaagaactctcctctgatggaggatttcttcgaagaaggattctcccaggag

SEQ ID NO: 373515 - DNA, 120 bp, Artificial Sequence
  ENSG00000142528_5 (sequence is synthesized)
attatagagatgttatccaaggatggcttctggaactccaatttcggagaagcctgtatagaggacacctggttagatagtttgctaggcgatccagaaagtcttctgaggtctgatatt

SEQ ID NO: 373516 - DNA, 120 bp, Artificial Sequence
  ENSG00000142528_6 (sequence is synthesized)
gccaccaacggggaaagtcccacggaatgcaagagtcatgaattaaagagaggactcagtcctgtgtccaccgtttccacgggagaagattccatggtgcataatgtttctgaaaagacc

SEQ ID NO: 373517 - DNA, 120 bp, Artificial Sequence
  ENSG00000142528_7 (sequence is synthesized)
ctcacaccagctaagtctaaggaatataggggtgagtttttctcctactccgaccacagccagcaggattctgttcaggaaggggagaaaccatatcaatgtagtgaatgtgggaaaagc

SEQ ID NO: 373518 - DNA, 120 bp, Artificial Sequence
  ENSG00000142528_8 (sequence is synthesized)
ttcagtgggagttaccgtcttacccagcactggatcactcatactagggagaaacccactgtccatcaagagtgtgagcaaggttttgaccggaatgcttccctttctgtgtatccgaaa

SEQ ID NO: 373519 - DNA, 120 bp, Artificial Sequence
  ENSG00000142528_9 (sequence is synthesized)
actcacacgggctacaaattctatgtgtgtaatgaatatgggacaacttttagtcagagtacatacctgtggcatcagaaaactcacactggagaaaaaccatgtaagagtcaagatagt

SEQ ID NO: 373520 - DNA, 120 bp, Artificial Sequence
  ENSG00000142528_10 (sequence is synthesized)
gaccacccacccagtcatgacacacagcctggtgagcatcagaaaactcacacagatagtaagtcctacaactgtaacgaatgcggcaaggcttttacccggatcttccaccttactcgg

SEQ ID NO: 373521 - DNA, 120 bp, Artificial Sequence
  ENSG00000142528_11 (sequence is synthesized)
caccagaagatccacactcggaaacgctatgagtgttccaagtgccaggcgaccttcaacttgagaaaacacctcatccaacatcagaaaactcacgctgcaaaaactacctctgagtgt

SEQ ID NO: 373522 - DNA, 120 bp, Artificial Sequence
  ENSG00000142528_12 (sequence is synthesized)
caggagtgtgggaagatttttaggcacagttcgctgctcattgaacaccaggctcttcatgctggagaggagccttataagtgtaacgaacgtgggaaatccttcaggcataactctacc

SEQ ID NO: 373523 - DNA, 120 bp, Artificial Sequence
  ENSG00000142528_13 (sequence is synthesized)
ctaaagatccatcagagggttcacagtggagagaagccttacaaatgcagtgagtgtgggaaggccttccaccggcacactcaccttaatgaacatcggcgaattcatacaggctacaga

SEQ ID NO: 373524 - DNA, 120 bp, Artificial Sequence
  ENSG00000142528_14 (sequence is synthesized)
ccccacaaatgtcaggaatgcgtcaggagtttcagccggccctcacatctgatgcgacatcaggccattcacaccgcagaaaagccctatagctgtgctgaatgcaaggagactttcagc

SEQ ID NO: 373525 - DNA, 120 bp, Artificial Sequence
  ENSG00000142528_15 (sequence is synthesized)
gataacaatcgccttgtgcaacaccagaaaatgcacactgtcaaaaccccatatgaatgtcaggagtgcggagaacgcttcatttgcggctcaaccctgaagtgccacgagagtgttcac

SEQ ID NO: 373526 - DNA, 120 bp, Artificial Sequence
  ENSG00000142528_16 (sequence is synthesized)
gccagagaaaaacaaggattttttgtgagtgggaagatcttggatcagaacccagaacagaaagagaagtgctttaagtgtaacaaatgtgagaaaacctttagctgcagcaaataccta

SEQ ID NO: 373527 - DNA, 120 bp, Artificial Sequence
  ENSG00000142528_17 (sequence is synthesized)
actcagcacgagaggattcacaccaggggagtgaagccctttgaatgtgaccagtgtgggaaagcctttggccaaagtactcggctcattcaccatcaaagaatccactctagagtgagg

SEQ ID NO: 373528 - DNA, 120 bp, Artificial Sequence
  ENSG00000142528_18 (sequence is synthesized)
ctgtataaatggggtgagcaagggaaagccatcagcagtgcctcccttatcaaacttcagtccttccacacaaaggagcacccttttaaatgtaacgaatgcggaaagaccttcagccac

SEQ ID NO: 373529 - DNA, 120 bp, Artificial Sequence
  ENSG00000142528_19 (sequence is synthesized)
agagaaactaccttgttcagcatgagcgaactcatgccagaaagaagccgttggtgtgtaacgaatgcgggaaaacgttccgtcagagctcatgcctttctaagcatcagagaattcact

SEQ ID NO: 373530 - DNA, 120 bp, Artificial Sequence
  ENSG00000142528_20 (sequence is synthesized)
caggtgagaagccctatgtatgtgattactgcgggaaggccttcggcctgagtgctgagcttgtccgccaccagagaattcacactggagaaaagccttatgtttgtcaggaatgcggga

SEQ ID NO: 373531 - DNA, 120 bp, Artificial Sequence
  ENSG00000142528_21 (sequence is synthesized)
aagccttcacccagagctcatgcctttctattcaccggagagttcacactggggagaagccctacagatgtggtgaatgtgggaaagcctttgcccagaaagcaaatctaacacagcacc

SEQ ID NO: 373532 - DNA, 120 bp, Artificial Sequence
  ENSG00000142528_22 (sequence is synthesized)
agagaattcacacaggggagaagccttactcctgtaatgtgtgtggcaaagcttttgtcctcagtgcccatctcaaccagcacctgagagttcacacccaggagacactttatcagtgtc

SEQ ID NO: 373533 - DNA, 120 bp, Artificial Sequence
  ENSG00000142528_23 (sequence is synthesized)
aacgttgccagaaagcctttcggtgccactcgagcctcagccgccatcagcgtgtacacaacaagcagcaatactgcctgtagccattgggtggcagcagagtcccagaatatgagaccg

SEQ ID NO: 373534 - DNA, 120 bp, Artificial Sequence
  ENSG00000142528_24 (sequence is synthesized)
ttactcggatgttgaaagttggaaactatcccattgcaagtttctctccaaataaatgcatctaaagattgattagaaagtttgtgcgcatgtttttcattataacaatgaaaacacaaa

SEQ ID NO: 373535 - DNA, 120 bp, Artificial Sequence
  ENSG00000142528_25 (sequence is synthesized)
agtggagaagctgtacaacgtcaggattcagaggtaggctctggagccagtctaccttgagttaaatcccacctctgccatctactacctaagtgaccttgggaaggtcagaaaaatctc

SEQ ID NO: 373536 - DNA, 120 bp, Artificial Sequence
  ENSG00000142528_26 (sequence is synthesized)
tcagggcctcggtgtccttatctgtaaaatgggcatcacctacctcagagggcttttctgaggattaaataaataaatgtgaagcacttagaactgatggccagcacatgagggctcacc

SEQ ID NO: 373537 - DNA, 120 bp, Artificial Sequence
  ENSG00000142528_27 (sequence is synthesized)
aagtgtaagccacaaatacacatcagctatagcacaaatatacttgtgttacaagaaaggaattagtaatctgtgtttactgtagttaatgttcttacaatgtatcgcttttaatttaag

SEQ ID NO: 373538 - DNA, 120 bp, Artificial Sequence
  ENSG00000142528_28 (sequence is synthesized)
ttttccttttttacagtttttctccagcactttactcttcttaagtgcctggccttttttgtccctttatctctcctggtttttttcttaagccccagaaagccaaaaagaacatgtaaa

SEQ ID NO: 373539 - DNA, 120 bp, Artificial Sequence
  ENSG00000142528_29 (sequence is synthesized)
ctcttcacctcaactagctacaaccttccactcctaacctcccaagcttctcacttaaagaggactccctatcccacaaacacatgctccctcttcctatgaccttcctccatttaacag

SEQ ID NO: 373540 - DNA, 120 bp, Artificial Sequence
  ENSG00000142528_30 (sequence is synthesized)
tgttggttatgcaataagacacccaatttttcatgggagttgacaccaaaacacagctggattccatcaggaaagctgcattgatcagggtgttaaccgcatatgaaacaacccatatgg

SEQ ID NO: 373541 - DNA, 120 bp, Artificial Sequence
  ENSG00000142528_31 (sequence is synthesized)
aagacatacttaggggtcaaacctgtggtgtgtggaagtgaccactgggatgtcatcattcaccatttatccaggatggccgctcaccaggcaatttgctaggctcgggggcgggtagta

SEQ ID NO: 373542 - DNA, 120 bp, Artificial Sequence
  ENSG00000142528_32 (sequence is synthesized)
tccatacactatgcactactgctctgaagcttctggaatcagaaatgaacccattttcatcgacgattgctgttagttgacaagtgacatcttgaaaatgccacattccctcatgtcaca

SEQ ID NO: 373543 - DNA, 120 bp, Artificial Sequence
  ENSG00000142528_33 (sequence is synthesized)
ggaagttctgggatcaccaaggattgttggagagtccagtgagatggaaccacacaaccagttccctaccagtgtcttgtcagctctgggtgtttgttccctgccactaagtggctcagt

SEQ ID NO: 373544 - DNA, 120 bp, Artificial Sequence
  ENSG00000142528_34 (sequence is synthesized)
cacacctttgctgaaacacagtagtcttatgaaaagcactggacacatactttgaatacctttcatattttaggtgctgaaaatggtgagggagtgagtgctctgcacccttgggctttt

SEQ ID NO: 373545 - DNA, 120 bp, Artificial Sequence
  ENSG00000142528_35 (sequence is synthesized)
caactcttgcacctggagttctgctggttaagtttgttaaacttagttgaaactgggaacctgttggctaaccattggggccttacactgtttttcaaatggttgcaacatttaacttct

SEQ ID NO: 373546 - DNA, 120 bp, Artificial Sequence
  ENSG00000142528_36 (sequence is synthesized)
cgcacatggttcccgtcctctggagctctgtcttgtcggggagatgggcatgttgtataccaaaagagtgtacaaagtgttgcagggctgtgacacaatagggactctatggaaaactgg

SEQ ID NO: 373547 - DNA, 120 bp, Artificial Sequence
  ENSG00000142528_37 (sequence is synthesized)
cagccattgggtgtgggggcagtctgtaaatcagtcacctgtgttgctgcaggccaaggtagaaacgccctccgtgtgtgcatatttgttggttctctgattaaagttttgagtctaaaa

SEQ ID NO: 373548 - DNA, 120 bp, Artificial Sequence
  ENSG00000142528_38 (sequence is synthesized)
aattagatgattctttaacaaggtaaaaatctggactacaaactgatgccgcctggtcctgattctctttctactctactcccacagtgctaaggctgaagaagcaggaggagatgggaa

SEQ ID NO: 373549 - DNA, 120 bp, Artificial Sequence
  ENSG00000142528_39 (sequence is synthesized)
gtcacaacgcgtttccatggcaacctaccgcttgctcttcggaaaaggttaacactccctgacttctagtaaagtgctaaggctgaagaagcaggaggagatgggaaggcgaaagaagtc

SEQ ID NO: 373550 - DNA, 120 bp, Artificial Sequence
  ENSG00000142528_40 (sequence is synthesized)
agagaagcttctcgcgcacaggaagtcgctgcgaggaggcgcgtgtgcggggagttgaatctcccgctcccttgaggctggggttgcgtctgttgacgcggccgactacaatcccgagga

SEQ ID NO: 373551 - DNA, 120 bp, Artificial Sequence
  ENSG00000142528_41 (sequence is synthesized)
aagcaacaagccctggtttctaaggtgataggagataagcctggagctgctcgtggtcaccttgccaccatggggggagaacctgccagaaaatgaaactaaccaaaaaggaagctgagc

SEQ ID NO: 373552 - DNA, 120 bp, Artificial Sequence
  ENSG00000142528_42 (sequence is synthesized)
taagaggagtgaccagattactgacatgtctcttaaacacctggatccatctgttcctgaaggcaaaactgttcaattacataggctaataaattccctttcttccttaaacaaacagaa

SEQ ID NO: 373553 - DNA, 120 bp, Artificial Sequence
  ENSG00000142528_43 (sequence is synthesized)
gaggcgaggtgttggcagggccaccatgttccttctggaggctccagcacgtagatagtccttcctggcccgttgccagcttctggaggtcacctgtattgcttgactcatggcttctca

SEQ ID NO: 373554 - DNA, 120 bp, Artificial Sequence
  ENSG00000142528_44 (sequence is synthesized)
gtcttcaaagacagcagtggcgttttctccgctgtggcctgtatccctcctggatggtgactctgttcccttccttggggaagcttgtggagggtatggctcaggactgcttgggctctg

SEQ ID NO: 373555 - DNA, 120 bp, Artificial Sequence
  ENSG00000142528_45 (sequence is synthesized)
ggaccctgacattttctgtccctggcccatggaggcctcaggcaatgtgtggcccatgggtcagtgaataaatcatgaatggctaaggaagtacgtgcctctccacctggcagatcctgc

SEQ ID NO: 373556 - DNA, 120 bp, Artificial Sequence
  ENSG00000142528_46 (sequence is synthesized)
ccattaaagagctgtcacaagtcctttgtatccccagccccagctgtcacagctttgatcaccctggattgtgattgtttggctccctctccatcactggactgggaaccctacaggaca

SEQ ID NO: 373557 - DNA, 120 bp, Artificial Sequence
  ENSG00000142528_47 (sequence is synthesized)
ggcatccccagagtcgcccagtgcagcacctcgtccacacacaggagccacgtgcaggataaagcatagaaaagtcaggagagccaggaggttctcactgagtgtctggatggtcctcca

SEQ ID NO: 373558 - DNA, 120 bp, Artificial Sequence
  ENSG00000142528_48 (sequence is synthesized)
tgtcctggttgggtgacaatgcttttctctccctgcagaccccccaagacccaacctgacctcccacccagatggcagtgaagatctggagcctctggcaggaggaagcccagaagcaac

SEQ ID NO: 373559 - DNA, 120 bp, Artificial Sequence
  ENSG00000142528_49 (sequence is synthesized)
aagccctggtgagtggatggagaggggccccttgtgtaccttctgtcttccagacctccatcctgaggctgcagccagctttcccacaggtctaccgagacattacaacgctcagcttca

SEQ ID NO: 373560 - DNA, 120 bp, Artificial Sequence
  ENSG00000142528_50 (sequence is synthesized)
cttctcgctggcttccatccccttgtcctgggagctggggggatcaggacatttttatagaccctcactctggggtctctctaccttgcccttcagcacagggttatcctggtgcctctc

SEQ ID NO: 373561 - DNA, 120 bp, Artificial Sequence
  ENSG00000142528_51 (sequence is synthesized)
cacagctcctcctctttccttccagactcaacaagggtacgccctccactctctcagttggtctctctactttcctgccttgtgctccctgagtgtgttgaccctcattctacttctttt

SEQ ID NO: 373562 - DNA, 120 bp, Artificial Sequence
  ENSG00000142528_52 (sequence is synthesized)
acctcctttccttcaggcccatttttccttcctatccctggggcatagcagatggccacatcagggagtaacttaagcccaggcctgaatgctgccaagagcatctgccctgccatctcc

SEQ ID NO: 373563 - DNA, 120 bp, Artificial Sequence
  ENSG00000142528_53 (sequence is synthesized)
caagccggggttcctccaggtggatcaggttaggtggtgaggattcctggggtattacccatggtagagacgtccccagcatgagaagcagggccctgaaccagagaccacaggaatctc

SEQ ID NO: 373564 - DNA, 120 bp, Artificial Sequence
  ENSG00000142528_54 (sequence is synthesized)
aggctgtaccccatccagtcagtctgcagctcccttcttggctcaccacgctcaggctcgtgtacatgaggcctctgcagcctcctcttcagcacatcagtgttcctcataggtgactaa

SEQ ID NO: 373565 - DNA, 120 bp, Artificial Sequence
  ENSG00000142528_55 (sequence is synthesized)
ctcatgcacaggctctcacaacttctgctttctgtttctgtcacctcagcatattggctgtttccaaacataggtagccatgcctttactaacaaatatacctccatatcctctagtagt

SEQ ID NO: 373566 - DNA, 120 bp, Artificial Sequence
  ENSG00000142528_56 (sequence is synthesized)
gacacttgagttgcatagttaccacataagcgtctttcccctttaacagcatgccgctcttggaagcagggcttagctgattcaccctgtattcccagctcctgacatcatgcttggcat

SEQ ID NO: 373567 - DNA, 120 bp, Artificial Sequence
  ENSG00000142530_0 (sequence is synthesized)
gcctccttccgtctgtaactcacctaaagacccaagacctgcgacatccgtagaccgcgcccgctatgcacagctaaagagcactcacccctcgcgcaccagtcccggcccggcagccgc

SEQ ID NO: 373568 - DNA, 120 bp, Artificial Sequence
  ENSG00000142530_1 (sequence is synthesized)
tgccccgggctcgactgggcgctgctaccgccatcagcaagagcaggagcagccgggttgccccagcgctggctgccgccatctcggcttcttcccaccagcgaagggacggctgtgagc

SEQ ID NO: 373569 - DNA, 120 bp, Artificial Sequence
  ENSG00000142530_2 (sequence is synthesized)
caagagccgcggagcacgccgggaggaacaggccgcatcctgacgcccgtgcgcctgcgctgggccccggcacctgcgcactggcacccgtccgcacctggggcctgacgtcagcaggat

SEQ ID NO: 373570 - DNA, 120 bp, Artificial Sequence
  ENSG00000142530_3 (sequence is synthesized)
ggggccgcccctttggcctgatctccaggagccgccccctccagggacgtcatcacaaatcaggagcccgctcttgtgtgacgtcataaagcccgctccgcatcatgacgtcacagtgcg

SEQ ID NO: 373571 - DNA, 120 bp, Artificial Sequence
  ENSG00000142530_4 (sequence is synthesized)
cgtagtcccgccccctcgctttctccctctgctcctccgtccgctcccgtcggacggggacattgcaatgaggcgggatcgcggccctaagccggccctgggtggagctggcgaggtgga

SEQ ID NO: 373572 - DNA, 120 bp, Artificial Sequence
  ENSG00000142530_5 (sequence is synthesized)
acgggccgtcccagacggctccaacgctacctccagagcggcgaattcgaccagtttcgggacttccccatctttgagagcaacttcgtacaggtgactcggttgggagaagttgccaac

SEQ ID NO: 373573 - DNA, 120 bp, Artificial Sequence
  ENSG00000142530_6 (sequence is synthesized)
gaggtcaccatgggggtggcagcctccagtccagccctggagctcccggacctattgcttctggccggccctgccaaggagaacggacacctgcaactcttcgggctgttccccttgaag

SEQ ID NO: 373574 - DNA, 120 bp, Artificial Sequence
  ENSG00000142530_7 (sequence is synthesized)
ttcgtccagctctttgtccacgacaaaagccggtgtcagctcgaggtcaagttgaacaccagccgcaccttctacttgcagctgcgggccccactcaagacccgagaccgagagttcggc

SEQ ID NO: 373575 - DNA, 120 bp, Artificial Sequence
  ENSG00000142530_8 (sequence is synthesized)
cagtgggtgcggctgctctaccgcctgcgcttcctctctgcttctgctgtgcccttcacgcaggagtaagagccccaaggcgtggaagccagacttgaccccaagacctctgaactctgg

SEQ ID NO: 373576 - DNA, 120 bp, Artificial Sequence
  ENSG00000142530_9 (sequence is synthesized)
ggactctgagtcttccagcatccttcaaggtcaccgaatgaccagagatcaaagtaccttgcctcagggccgggcagatgagatattaaagttaataaaggtcagtccattaagaaccaa

SEQ ID NO: 373577 - DNA, 120 bp, Artificial Sequence
  ENSG00000142530_10 (sequence is synthesized)
atggcaggtgagagaggggagccaggcctagaggggttggacctggtgaaggaaccaagtaggatggggccggcaattcgggggcatctgataccccgtcctctccgcggggctgtgccg

SEQ ID NO: 373578 - DNA, 120 bp, Artificial Sequence
  ENSG00000142530_11 (sequence is synthesized)
agtaagaggtgctggaggatgtagatggggagggtgatgatgatgaggtggaggcccagagggagtgggaggagccccaaggcgtggaagccagacttgaccccaagacctctgaactct

SEQ ID NO: 373579 - DNA, 120 bp, Artificial Sequence
  ENSG00000142534_0 (sequence is synthesized)
ctttttttcaggcggccgggaagatggcggacattcagactgagcgtgcctaccaaaagcagccgaccatctttcaaaacaagaagagggtcctgctgggagaaactggcaaggagaagc

SEQ ID NO: 373580 - DNA, 120 bp, Artificial Sequence
  ENSG00000142534_1 (sequence is synthesized)
tcccgcggtactacaagaacatcggtctgggcttcaagacacccaaggaggctattgagggcacctacattgacaagaaatgccccttcactggtaatgtgtccattcgagggcggatcc

SEQ ID NO: 373581 - DNA, 120 bp, Artificial Sequence
  ENSG00000142534_2 (sequence is synthesized)
agcgccacaagaacatgtctgtacacctgtccccctgcttcagggacgtccagatcggtgacatcgtcacagtgggcgagtgccggcctctgagcaagacagtgcgcttcaacgtgctca

SEQ ID NO: 373582 - DNA, 120 bp, Artificial Sequence
  ENSG00000142534_3 (sequence is synthesized)
aggtcaccaaggctgccggcaccaagaagcagttccagaagttctgaggctggacatcggcccgctccccacaatgaaataaagttattttctcattcccaggccagacttgggatcttc

SEQ ID NO: 373583 - DNA, 120 bp, Artificial Sequence
  ENSG00000142534_4 (sequence is synthesized)
cctgcctgcatctaagtggcttctggggctgctgggaattgtagttgcttccctgaggccacgcccctggctcttttaaggaaccgcccgcccaaggctcactcctttatctttcctatc

SEQ ID NO: 373584 - DNA, 120 bp, Artificial Sequence
  ENSG00000142534_5 (sequence is synthesized)
cctgaaatactgaaagaagggtcttggggcccagactcctgggtcctgggtgagaggggtggttaggaatgcaaacttgtaggtccaggtacattggcagatgatgtttgttttcacgat

SEQ ID NO: 373585 - DNA, 120 bp, Artificial Sequence
  ENSG00000142534_6 (sequence is synthesized)
ggtcttcagatgcccacgtgggcactgctgagaaagccacttggtaaaactgatgccggaaatggggctttttgggatccctgctcagctgcttctgagtcccagcatgccctgggttac

SEQ ID NO: 373586 - DNA, 120 bp, Artificial Sequence
  ENSG00000142534_7 (sequence is synthesized)
ctatggccctctttcccatgggacctgacctatgatcggcccccgctcctaggcgtggtgaccaagatgaagatgcagaggaccattgtcatccgccgagactatctgcactacatccgc

SEQ ID NO: 373587 - DNA, 120 bp, Artificial Sequence
  ENSG00000142534_8 (sequence is synthesized)
aagaacatgtctgtacacctgtccccctgcttcaggtgagcgcagtggcccatcaggttgctcaggccacgctctctcagccttcagattccagatcggaccaatttaaggccaactgag

SEQ ID NO: 373588 - DNA, 120 bp, Artificial Sequence
  ENSG00000142534_9 (sequence is synthesized)
ggagggaaagactgaggtggcatctctgggaagccccagaatctcaggatttgtatatcatatgttcttcagaatcaaagcgttctacagggtgaatatctctacctgaaatgcttggaa

SEQ ID NO: 373589 - DNA, 120 bp, Artificial Sequence
  ENSG00000142534_10 (sequence is synthesized)
aagatggcggacattcagactgagcgtgcctaccaaaagcagccgaccatctttcaaaacaagaagagggtcctgctgggagaaactggcaaggagaagctcccgcgggcggatcctctc

SEQ ID NO: 373590 - DNA, 120 bp, Artificial Sequence
  ENSG00000142538_0 (sequence is synthesized)
gtaggggactgtgcgggaagctgggggtggatgcatggtggggcccggggttctgggccgggatgcagccctactgagcccctttctggttctccacaggtgatggagacccgccaggtg

SEQ ID NO: 373591 - DNA, 120 bp, Artificial Sequence
  ENSG00000142538_1 (sequence is synthesized)
ggcggatcccgccacccccaggccgcggaggagcctggcgctggcggacgacgcggccttccgggagcgcgcgcggttgctggccgccctcgagcgccgccactggctgaactcgtacat

SEQ ID NO: 373592 - DNA, 120 bp, Artificial Sequence
  ENSG00000142538_2 (sequence is synthesized)
tggccgccctcgagcgccgccactggctgaactcgtacatgcacaagctgctggtgttggatgcgccctgagcgcgctgcccgtccccatcttaataaagaccatgccctgcgctccgga

SEQ ID NO: 373593 - DNA, 120 bp, Artificial Sequence
  ENSG00000142541_0 (sequence is synthesized)
cttttccaagcggctgccgaagatggcggaggtgcaggtcctggtgcttgatggtcgaggccatctcctgggccgcctggcggccatcgtggctaaacaggtactgctgggccggaaggt

SEQ ID NO: 373594 - DNA, 120 bp, Artificial Sequence
  ENSG00000142541_1 (sequence is synthesized)
ggtggtcgtacgctgtgaaggcatcaacatttctggcaatttctacagaaacaagttgaagtacctggctttcctccgcaagcggatgaacaccaacccttcccgaggcccctaccactt

SEQ ID NO: 373595 - DNA, 120 bp, Artificial Sequence
  ENSG00000142541_2 (sequence is synthesized)
ccgggcccccagccgcatcttctggcggaccgtgcgaggtatgctgccccacaaaaccaagcgaggccaggccgctctggaccgtctcaaggtgtttgacggcatcccaccgccctacga

SEQ ID NO: 373596 - DNA, 120 bp, Artificial Sequence
  ENSG00000142541_3 (sequence is synthesized)
caagaaaaagcggatggtggttcctgctgccctcaaggtcgtgcgtctgaagcctacaagaaagtttgcctatctggggcgcctggctcacgaggttggctggaagtaccaggcagtgac

SEQ ID NO: 373597 - DNA, 120 bp, Artificial Sequence
  ENSG00000142541_4 (sequence is synthesized)
ggaagaagaaacagctcatgaggctacggaaacaggccgagaagaacgtggagaagaaaattgacaaatacacagaggtcctcaagacccacggactcctggtctgagcccaataaagac

SEQ ID NO: 373598 - DNA, 120 bp, Artificial Sequence
  ENSG00000142541_5 (sequence is synthesized)
tgttaattcctcatgcgttgcctgcccttcctccattgttgccctggaatgtacgggacccaggggcagcagcagtccaggtgccacaggcagccctgggacataggaagctgggagcaa

SEQ ID NO: 373599 - DNA, 120 bp, Artificial Sequence
  ENSG00000142541_6 (sequence is synthesized)
ggaaagggtcttagtcactgcctcccgaagttgcttgaaagcactcggagaattgtgcaggtgtcatttatctatgaccaataggaagagcaaccagttactatgagtgaaagggagcca

SEQ ID NO: 373600 - DNA, 120 bp, Artificial Sequence
  ENSG00000142541_7 (sequence is synthesized)
gaagactgattggagggccctatcttgtgagtggggcatctgttggactttccacctggtcatatactctgcagctgttagaatgtgcaagcacttggggacagcatgagcttgctgttg

SEQ ID NO: 373601 - DNA, 120 bp, Artificial Sequence
  ENSG00000142541_8 (sequence is synthesized)
tacacagggtatttctagaagcagaaatagactgggaagatgcacaaccaaggggttacaggcatcgcccatgctcctcacctgtattttgtaatcagaaataaattgcttttaaagaaa

SEQ ID NO: 373602 - DNA, 120 bp, Artificial Sequence
  ENSG00000142541_9 (sequence is synthesized)
gtacgctgtgaaggcatcaacatttctggcaatttctacagaaacaagtgtaagttaggacctgggaggagcactggagagggtctccctgtggggtgttgaggctctgaaagcaattgc

SEQ ID NO: 373603 - DNA, 120 bp, Artificial Sequence
  ENSG00000142541_10 (sequence is synthesized)
agccgtgttgggagaggctacttggggtttctgagaaggcccttggaagtggggttttgggggtgctggtagactgggcaggcctcacactctcccctctccctagtgaagtacctggct

SEQ ID NO: 373604 - DNA, 120 bp, Artificial Sequence
  ENSG00000142541_11 (sequence is synthesized)
cattcgagtttcccgaccatgagatgactccacatgcactaccatctgaggccaccccatgggcccacctcagtggggtgggtgggcatccttatgaggccctctgactgggcctgctat

SEQ ID NO: 373605 - DNA, 120 bp, Artificial Sequence
  ENSG00000142541_12 (sequence is synthesized)
ccagcttacgctgcaccatctacttgggagatttcaggcctgctgagggacctggggacctggagcctggcagatgatgtccttatctcacgatggtctgcggatgtccctgtgggaatg

SEQ ID NO: 373606 - DNA, 120 bp, Artificial Sequence
  ENSG00000142541_13 (sequence is synthesized)
agcggctgccgaagatggcggaggtgcaggtcctggtgcttgatggtcgaggccatctcctgggccgcctggcggccatcgtggctaaacaggtactgctgggtaagtcgctgctcgtgg

SEQ ID NO: 373607 - DNA, 120 bp, Artificial Sequence
  ENSG00000142541_14 (sequence is synthesized)
cccctctgtcatgggcccccgctggaggtcagtgatgagcaacattcaccatctttcgtttgagtctcacggccatgagatcaaccccatgcaccgctctgagacctgccagccactctt

SEQ ID NO: 373608 - DNA, 120 bp, Artificial Sequence
  ENSG00000142541_15 (sequence is synthesized)
tttcatttaaacaggaacttagctctggcaagtactgcgctgtgtctggagggtgactgcataggcagtggtgggaccctcaggcggctcggccctgctaagcctttccctccctctagg

SEQ ID NO: 373609 - DNA, 120 bp, Artificial Sequence
  ENSG00000142541_16 (sequence is synthesized)
tgccaaaccccacaggcagcggccttacctgtggcgtccatgatgttccgcaactacctacattgtttgatcctcatgaaagcagcactggctgagacgccagtccagccgacctccttc

SEQ ID NO: 373610 - DNA, 120 bp, Artificial Sequence
  ENSG00000142541_17 (sequence is synthesized)
ggcctgcagagaacagttgcattatgatatgcccagctgtcagtcacctcccagctctcaacagctccggctcttcagggtgtgggggcttagatatccttacaacttcatttgttcacc

SEQ ID NO: 373611 - DNA, 120 bp, Artificial Sequence
  ENSG00000142541_18 (sequence is synthesized)
cacttctgccgcccctgtttcaagggataagaaaccctgcgacaaaacctcctccttttccaagcggctgccgaagatggcggaggtgcaggtcctggtgcttgatggtcgaggccatct

SEQ ID NO: 373612 - DNA, 120 bp, Artificial Sequence
  ENSG00000142544_0 (sequence is synthesized)
acttccgggccaggcttccgcgtggtgggcagtgtgggcatcccagcactgagttctgcccgggagaagccgacccctcccgcaatgcccgccccgccgtgcgcctcctgccatgctgca

SEQ ID NO: 373613 - DNA, 120 bp, Artificial Sequence
  ENSG00000142544_1 (sequence is synthesized)
atgctgcacgcgccgccctccgccgtccgctctcgggccaagcgctgtgcggtgcctgcttctgcgccgccttcgaggccgaggtgctgcacacggtgctcgccggccgcctgctgccgc

SEQ ID NO: 373614 - DNA, 120 bp, Artificial Sequence
  ENSG00000142544_2 (sequence is synthesized)
gtggtggccgtgggcgcctcgggcggcaaggactccacggtgctggcgcacgtgctgcgcgcgctggcgccgcgcctgggcatctcactgcagctcgtggccgtcgatgagggcatcggt

SEQ ID NO: 373615 - DNA, 120 bp, Artificial Sequence
  ENSG00000142544_3 (sequence is synthesized)
ggctaccgggacgcggcgttggcggccgtgcggcgccaggcggcgcgctgggagctgccgctcacggtcgtggcctacgaagacctctttgggggctggacgatggacgccgtggcccgc

SEQ ID NO: 373616 - DNA, 120 bp, Artificial Sequence
  ENSG00000142544_4 (sequence is synthesized)
agcacagccggctccggccgcagccgctcctgctgcaccttctgtggagtgctgcggcgccgggcgctggaggaaggggcgcgccgcgtgggagccacgcacatcgtgacaggtcacaac

SEQ ID NO: 373617 - DNA, 120 bp, Artificial Sequence
  ENSG00000142544_5 (sequence is synthesized)
gtcacaacgccgacgacatggcggagaccgtgctcatgaacttcctacggggcgacgcggggcggctggcccggggcgggggcctgggctctcccggcgaggggggcgccctgccgcgct

SEQ ID NO: 373618 - DNA, 120 bp, Artificial Sequence
  ENSG00000142544_6 (sequence is synthesized)
ctgcagttcgcctcgcagaaggaggtggtgctgtacgcgcacttccgccgcctcgactacttctccgaggagtgcgtctacgcgcccgaggccttccgcggccacgcccgggacctgctc

SEQ ID NO: 373619 - DNA, 80 bp, Artificial Sequence
  ENSG00000142544_7 (sequence is synthesized)
gctcaagcgcctggaggcggcgcggccgtccgcggtgctggacctcgtgcactcggccgagcgcctggcgctggccccgg

SEQ ID NO: 373620 - DNA, 120 bp, Artificial Sequence
  ENSG00000142544_8 (sequence is synthesized)
ccggggtctggacgaggaggcgacgccggggacgcccggggatccggcccggccccccgcctccaaggccgtccccaccttctagcgacttcgggcctcccgccgggatctgatgccgcg

SEQ ID NO: 373621 - DNA, 120 bp, Artificial Sequence
  ENSG00000142544_9 (sequence is synthesized)
gggtgggggctgcctgtaaatgacactgtgaataaacccgttaccttacctggccttccatgtggggttgggaaggagacgggggcccattcacctgaaaccctgaagaagctgggaccc

SEQ ID NO: 373622 - DNA, 120 bp, Artificial Sequence
  ENSG00000142544_10 (sequence is synthesized)
cagacttcgaggtctcagggaagaagggtctcgaactgggcttcaggctctgagggaggagggggctgggggaccatcctaggtctgagagaggagagggccaggactaagcctagaaga

SEQ ID NO: 373623 - DNA, 120 bp, Artificial Sequence
  ENSG00000142544_11 (sequence is synthesized)
agtgggactggggaccccaggcatctgtggctgaggaaggagggcctggggtcgtggactcctgggtctcagggaggagggggctgaacaccgtgtgattcttgagcgagtggggattgg

SEQ ID NO: 373624 - DNA, 120 bp, Artificial Sequence
  ENSG00000142544_12 (sequence is synthesized)
ttggggacctcctgcccagggcctctgctggttctgggtgcgctcagcatggtcctgaccctccttgagcatcagattcctgatgtttcctgtttgcccgcagtggggtaagcggagcgt

SEQ ID NO: 373625 - DNA, 120 bp, Artificial Sequence
  ENSG00000142544_13 (sequence is synthesized)
gacttgatggacacacgccattcacagccgccgtcacgatgcctcccttccagcgcttcgtgtgtagcacgcactgcaccctcatttcgtctccaccacggtctcactggctgtagcctg

SEQ ID NO: 373626 - DNA, 120 bp, Artificial Sequence
  ENSG00000142544_14 (sequence is synthesized)
aagtggtaaatggccctaagacacccagtcggaaggggtcacaccgagggctccctccaaagctctcgaatatcacaggtcgtggaattggtcctcccccacccatcccctctcgaatct

SEQ ID NO: 373627 - DNA, 120 bp, Artificial Sequence
  ENSG00000142544_15 (sequence is synthesized)
ctcctggtatctctgtcacgggtgaggaggggttggatgcgttccccaaaccttggactctggaggcagggttgtgtgagcctgtcggtgacttagcctctttcatgtcccatttctcct

SEQ ID NO: 373628 - DNA, 89 bp, Artificial Sequence
  ENSG00000142544_16 (sequence is synthesized)
atgaaaatataatcaggcatcaaggcaccactgggaggaaatggaagatcagagaagttgaggtgctcaataaatggtgaccacttgga

SEQ ID NO: 373629 - DNA, 120 bp, Artificial Sequence
  ENSG00000142546_0 (sequence is synthesized)
acagttgaagaagcgaccgagggactgggagtcgttagtgaggatgacgcggcatggcaagaactgcaccgcaggggccgtctacacctaccacgagaagaagaaggacacagcggcctc

SEQ ID NO: 373630 - DNA, 120 bp, Artificial Sequence
  ENSG00000142546_1 (sequence is synthesized)
gggctatgggacccagaacattcgactgagccgggatgccgtgaaggacttcgactgctgttgtctctccctgcagccttgccacgatcctgttgtcaccccagatggctacctgtatga

SEQ ID NO: 373631 - DNA, 120 bp, Artificial Sequence
  ENSG00000142546_2 (sequence is synthesized)
gcgtgaggccatcctggagtacattctgcaccagaagaaggagattgcccggcagatgaaggcctacgagaagcagcggggcacccggcgcgaggagcagaaggagcttcagcgggcggc

SEQ ID NO: 373632 - DNA, 120 bp, Artificial Sequence
  ENSG00000142546_3 (sequence is synthesized)
ctcgcaggaccatgtgcggggcttcctggagaaggagtcggctatcgtgagccggcccctcaaccctttcacagccaaggccctctcgggcaccagcccagatgatgtccaacctgggcc

SEQ ID NO: 373633 - DNA, 120 bp, Artificial Sequence
  ENSG00000142546_4 (sequence is synthesized)
cagtgtgggtcctccaagtaaggacaaggacaaagtgctgcccagcttctggatcccgtcgctgacgcccgaagccaaggccaccaagctggagaagccgtcccgcacggtgacctgccc

SEQ ID NO: 373634 - DNA, 120 bp, Artificial Sequence
  ENSG00000142546_5 (sequence is synthesized)
tgacgcccgtgcacttcacaccgctagacagctccgtggaccgcgtggggctcatcacccgcagcgagcgctacgtgtgtgccgtgacccgcgacagcctgagcaacgccaccccctgcg

SEQ ID NO: 373635 - DNA, 120 bp, Artificial Sequence
  ENSG00000142546_6 (sequence is synthesized)
ctgtgctgcggccctctggggctgtggtcaccctcgaatgcgtggagaagctgattcggaaggacatggtggaccctgtgactggagacaaactcacagaccgcgacatcatcgtgctgc

SEQ ID NO: 373636 - DNA, 120 bp, Artificial Sequence
  ENSG00000142546_7 (sequence is synthesized)
agcggggcggtaccggcttcgcgggctccggagtgaagctgcaagcggagaaatcacggccggtgatgcaggcctgagtgtgtgcgggagaccaaataaaccggcttgggtgcgcaacga

SEQ ID NO: 373637 - DNA, 120 bp, Artificial Sequence
  ENSG00000142546_8 (sequence is synthesized)
cgtggcgccttcattcgcggcgtgggcgccccggggacagggcaggcgaggatgcagggccgtgcaaacagtgctcctacagcgcacgctggagtttgaaagagcgggctaagcatattg

SEQ ID NO: 373638 - DNA, 64 bp, Artificial Sequence
  ENSG00000142546_9 (sequence is synthesized)
agcgcacgctggagtttgaaagagcgggctaagcatattgaatgtggtctcacattaagaacaa

SEQ ID NO: 373639 - DNA, 120 bp, Artificial Sequence
  ENSG00000142546_10 (sequence is synthesized)
gtacaccattcccctcccctgcttccggccaaatccttctcaccgatttcagcccagatgctgcctcctctgagctcctgccagtccccaggatctgccccagtcacctcttctcttagc

SEQ ID NO: 373640 - DNA, 120 bp, Artificial Sequence
  ENSG00000142546_11 (sequence is synthesized)
acttagcatagttgtagctgtacatgtggctgtctgacacatgcccactttcccttatggacttcgagttttcccaccctgtagcttaggtccttagtaaagatatgctaaatgggtcgg

SEQ ID NO: 373641 - DNA, 120 bp, Artificial Sequence
  ENSG00000142546_12 (sequence is synthesized)
gtcagggagggtgctcttgttaccccatgttccagaggaagaaactgaggcccaaagagggacaggcacttgagcttggtcacagtcagaagggtggaggggagtcagccgtcagcccct

SEQ ID NO: 373642 - DNA, 120 bp, Artificial Sequence
  ENSG00000142546_13 (sequence is synthesized)
ccaccaagctgccactcagtgaccaggcctgtctgcctctcaccctccagggttgacaactccctgtgggttcagcccgtggccccagcacacaggcagcggctcccaactgcctgtttc

SEQ ID NO: 373643 - DNA, 120 bp, Artificial Sequence
  ENSG00000142546_14 (sequence is synthesized)
tctctgagtcccccacccccaccaccgcgttgtctctgtgcctctctctggggctttggagacggacatgtctcctgttgctccgcccctccatcactctgcccatctctgtccccagcg

SEQ ID NO: 373644 - DNA, 120 bp, Artificial Sequence
  ENSG00000142546_15 (sequence is synthesized)
caccagaagaaggagattgcccggcagatgaagtttcatcgtctgtaaaacgggctgacggccaaatcagaggacacagcagggcacctgggaggtacacgcagatgagcattctcaagg

SEQ ID NO: 373645 - DNA, 120 bp, Artificial Sequence
  ENSG00000142546_16 (sequence is synthesized)
cgtgttactgggaacccggcctggccttccatggacaaagccatttgatgggtggctccccctgtgcccatgtcctccacacagcctggtggtcatgtcggaggccctcatgagcatcca

SEQ ID NO: 373646 - DNA, 120 bp, Artificial Sequence
  ENSG00000142546_17 (sequence is synthesized)
cttcccctgcctggttgctggcgctcaggaaacactacaggtcacatgcttattgggctttttgtcccaagcaggtggctccccctgtgcccatgtcctccacacagcctggtggtcatg

SEQ ID NO: 373647 - DNA, 120 bp, Artificial Sequence
  ENSG00000142546_18 (sequence is synthesized)
tcggaggccctcatgagcatccatcactgtcactgttacctcctcactcagctgggtggcccagggtggtctggaactgcagcaccgcccaggcaactgctgtgcgccaggcagggctga

SEQ ID NO: 373648 - DNA, 120 bp, Artificial Sequence
  ENSG00000142546_19 (sequence is synthesized)
gctcaggtcatggcttcacttctcccgtcctcactcactgtccgtccatagacatgggctcctcagcattcccttagatctgaagtctacatcccccgtcccaaacacgggctggggcat

SEQ ID NO: 373649 - DNA, 120 bp, Artificial Sequence
  ENSG00000142546_20 (sequence is synthesized)
gcactgtatagaaaacttaattggccagcaggtgacattaattaaatgcttagctgagtgccaggtgaggctctccatgctgtaaacactcaccttatgtaacccttcagtgagccgctg

SEQ ID NO: 373650 - DNA, 120 bp, Artificial Sequence
  ENSG00000142546_21 (sequence is synthesized)
aggtgggtaaccactgttaggctgttttacagatgaagaaactgaggccaggagaggtcatagtgctcacttaggccacagagtgacagagatgggctttgagccctggcagtctggcta

SEQ ID NO: 373651 - DNA, 120 bp, Artificial Sequence
  ENSG00000142546_22 (sequence is synthesized)
gttaccaccctctgccacatagtgcctccatcagagggtcccctttgtgggcctcagtttacctacctgtgaaatgggaggaagatacccccagccccacgggcagatgctcagcccact

SEQ ID NO: 373652 - DNA, 120 bp, Artificial Sequence
  ENSG00000142546_23 (sequence is synthesized)
cacagggaccacgcgctctccacctgcgccagccctgcctactgagcccgcctctctctgccccttgcagtcccgcacggtgacctgccccatgtcagggaagcccctgcgcatgtcgga

SEQ ID NO: 373653 - DNA, 120 bp, Artificial Sequence
  ENSG00000142546_24 (sequence is synthesized)
aaaaccagaaacattgctgatatgaccacaataccatcatcacactttaaaagaacaaccgtaattctagactactatccattacgtggtgcagagtcaagtccagtgtaactgtgggtt

SEQ ID NO: 373654 - DNA, 120 bp, Artificial Sequence
  ENSG00000142546_25 (sequence is synthesized)
ctgggcacaggccccaccctcctatacggctccacacatacaacgctgggccacgcccctagaccattgcatggggccccgcccccgcactccaagccccgccccaggatgacgcggcat

SEQ ID NO: 373655 - DNA, 120 bp, Artificial Sequence
  ENSG00000142546_26 (sequence is synthesized)
cattctgcaccagaagaaggagattgcccggcagatgaaggtgatggggatggggaggaggcggcacacggaggcaggagcttttgagtctgagctcacaggcagagccactcagagccc

SEQ ID NO: 373656 - DNA, 68 bp, Artificial Sequence
  ENSG00000142546_27 (sequence is synthesized)
acttgaggtcaacagttaataaaaaaaaaaattgagccgggcatggcgggcgcctgtaatcccagcta

SEQ ID NO: 373657 - DNA, 90 bp, Artificial Sequence
  ENSG00000142546_28 (sequence is synthesized)
aggagaatcgcttgaacccatgaggtagaggtcgcagtgagctgagatggcaccgctgcacttcagcctgggtaaccgagcgagatatgt

SEQ ID NO: 373658 - DNA, 120 bp, Artificial Sequence
  ENSG00000142546_29 (sequence is synthesized)
ggtggggagagcaagggaaccgccaggaggaggctgtgtgcgtgggtctggccacctgcacagccagggaaccctggatgagcagtttatcctcagagcctctgtattctcacatgggac

SEQ ID NO: 373659 - DNA, 120 bp, Artificial Sequence
  ENSG00000142546_30 (sequence is synthesized)
gccatcggagcagctcacctttggacacttcccatgacctacctctgatggtagggcaaaggcttaacaggtgctgagtccaggcactaaatacgtgctcaattagtggtatattttgta

SEQ ID NO: 373660 - DNA, 120 bp, Artificial Sequence
  ENSG00000142546_31 (sequence is synthesized)
gaagacagtaattaatgatcagggcccccaaggccaccttcaggtttcttttttttttttgagacagagtcttcactttgttgcccaggctggagtgcaatggggacatcttggctcact

SEQ ID NO: 373661 - DNA, 120 bp, Artificial Sequence
  ENSG00000142546_32 (sequence is synthesized)
aggctcaggtgatcctcctgcctcagcccccacgagtagctggaaccacgggtgtgcactaccacacctggcgtttttgtttgttttttgtagagaggggagctcactttgttgcccagg

SEQ ID NO: 373662 - DNA, 120 bp, Artificial Sequence
  ENSG00000142546_33 (sequence is synthesized)
tgcccaggctggtctcgaactcgtggctgcaacaatatgtggcacacattgttgctgagagaatgaagcactttccctgcagctctattgggagaggacagctggaagctcaaatctagt

SEQ ID NO: 373663 - DNA, 120 bp, Artificial Sequence
  ENSG00000142549_0 (sequence is synthesized)
atgcccccccctgcgcccggggcccggctccggcttctcgccgccgccgccctggccggcttggccgtcatcagccgagggctgctctcccagagcctggagttcaactctcctgccgac

SEQ ID NO: 373664 - DNA, 120 bp, Artificial Sequence
  ENSG00000142549_1 (sequence is synthesized)
aactacacagtgtgtgaaggtgacaacgccaccctcagctgcttcatcgacgagcacgtgacccgcgtggcctggctgaaccgctccaacatcctgtatgccggcaatgaccgctggacc

SEQ ID NO: 373665 - DNA, 120 bp, Artificial Sequence
  ENSG00000142549_2 (sequence is synthesized)
agcgacccgcgggtgcggctgctcatcaacacccccgaggagttctccatcctcatcaccgaggtggggctcggcgacgagggcctctacacctgctccttccagacccgccaccagccg

SEQ ID NO: 373666 - DNA, 120 bp, Artificial Sequence
  ENSG00000142549_3 (sequence is synthesized)
tacaccactcaggtctacctcattgtccacgtccctgcccgcattgtgaacatctcgtcgcctgtgacggtgaatgaggggggcaatgtgaacctgctttgcctggccgtggggcggcca

SEQ ID NO: 373667 - DNA, 120 bp, Artificial Sequence
  ENSG00000142549_4 (sequence is synthesized)
gagcccacggtcacctggagacagctccgagacggcttcacctcggagggagagatcctggagatctctgacatccagcggggccaggccggggagtatgagtgcgtgactcacaacggg

SEQ ID NO: 373668 - DNA, 120 bp, Artificial Sequence
  ENSG00000142549_5 (sequence is synthesized)
gttaactcggcgcccgacagccgccgcgtgctggtcacagtcaactatcctccgaccatcacggacgtgaccagcgcccgcaccgcgctgggccgggccgccctcctgcgctgcgaagcc

SEQ ID NO: 373669 - DNA, 120 bp, Artificial Sequence
  ENSG00000142549_6 (sequence is synthesized)
atggcggttccccccgcggatttccagtggtacaaggatgacagactgctgagcagcggcacggccgaaggcctgaaggtgcagacggagcgcacccgctcgatgcttctctttgccaac

SEQ ID NO: 373670 - DNA, 120 bp, Artificial Sequence
  ENSG00000142549_7 (sequence is synthesized)
gtgagcgcccggcattacggcaactatacgtgtcgcgccgccaaccgactgggagcgtccagcgcctccatgcggctcctgcgcccaggatccctggagaactcagccccgaggccccca

SEQ ID NO: 373671 - DNA, 120 bp, Artificial Sequence
  ENSG00000142549_8 (sequence is synthesized)
gggctcctggccctcctctccgccctgggctggctgtggtggagaatgtaggcgcaacccagtggagctcacctccccctgcagggggcctcaggccaagagtgagagaaacgggggagc

SEQ ID NO: 373672 - DNA, 120 bp, Artificial Sequence
  ENSG00000142549_9 (sequence is synthesized)
aagagccgtgggtctcgtgggggcagaagagctctcggccaccaaggaagaagagagaggagaagaggaggaggcagaggaagaaagatcttcagagaacccatcactgtgagggataac

SEQ ID NO: 373673 - DNA, 120 bp, Artificial Sequence
  ENSG00000142549_10 (sequence is synthesized)
ctcttagctcaggctgtcaactggcttgtgtgggtgtgggtgtgtgagtgtgagcctgcatgcatgtgtaggtgtctgtgtctctgtttgtgtgtgtgtgggggggtgggctgggggaag

SEQ ID NO: 373674 - DNA, 120 bp, Artificial Sequence
  ENSG00000142549_11 (sequence is synthesized)
ggactcagccgtcctcccgcccccaaaacccccatgtccactgtccccaaccctattgcctctcacctctggctggaggtaggtatgaggctctgcagtggaagctgtgaagagaggctt

SEQ ID NO: 373675 - DNA, 120 bp, Artificial Sequence
  ENSG00000142549_12 (sequence is synthesized)
accaggctccctgcttccccaatatatgcacgcacactacccctccccctgtcgaaagggcaactcctggcaggttgggagtggggaggggcatcgcactcacctgtcaagctgtcattc

SEQ ID NO: 373676 - DNA, 120 bp, Artificial Sequence
  ENSG00000142549_13 (sequence is synthesized)
agcctttgtgagtaagtgggggacctccatctaggctctgggcttccctgctgtcaaccaccagcttcctgtagccagaggccccatcgctggctcagtggcctgagaccttcccacttt

SEQ ID NO: 373677 - DNA, 120 bp, Artificial Sequence
  ENSG00000142549_14 (sequence is synthesized)
tcctgtccctccacaccctggattttctggccccctcctgggccaatcggtgcttccatccaactgtcagactggtggcaggagtcacctgtctgtttcagtgctttgccctacccttgc

SEQ ID NO: 373678 - DNA, 120 bp, Artificial Sequence
  ENSG00000142549_15 (sequence is synthesized)
caccactccccttggccttgatttccccacctgcggcaccagccagctgcccttggggcctttgcagctggcccacaggtgtgagcttgctggtctatcacttcctggcctctccaccaa

SEQ ID NO: 373679 - DNA, 120 bp, Artificial Sequence
  ENSG00000142549_16 (sequence is synthesized)
gcttgctggtctatcacttcctggcctctccaccaactgtacctcccaaaggctacctgaccgccctcacagacactcagacgcaccacacacacatacacacacacagacacacacaca

SEQ ID NO: 373680 - DNA, 120 bp, Artificial Sequence
  ENSG00000142549_17 (sequence is synthesized)
tagccccctggctccagctgtccggtagctggtgactagctgtatttccccctgggtaggcatctggtgtcaggaagggacgctgagaggccgcagcctcagctctgactgtaggaacac

SEQ ID NO: 373681 - DNA, 120 bp, Artificial Sequence
  ENSG00000142549_18 (sequence is synthesized)
tccaccctggtacaccacaccacacaaagtgggggacagagaggcatcacacagacatcctgagcccagacaaagatgccatgtcaccaactccgactcccaggagaccctctatataaa

SEQ ID NO: 373682 - DNA, 120 bp, Artificial Sequence
  ENSG00000142549_19 (sequence is synthesized)
cacccaccccaaaccacaccacccagagtctggtggagaaaaggagagggcaaggcgcagtgactgtacctcagacgggggcatgggccccatcccacattgtcttccattcccagggtc

SEQ ID NO: 373683 - DNA, 120 bp, Artificial Sequence
  ENSG00000142549_20 (sequence is synthesized)
caggggatggggtgggacaggggagggatgctagggagggggtggggggccctgggggccatgtgttccaattcatggggagtgttgagaccaccacaccaataaacgcctttttccaaa

SEQ ID NO: 373684 - DNA, 120 bp, Artificial Sequence
  ENSG00000142552_0 (sequence is synthesized)
acatttgcgggaacgcagagcggagcgtggagagcggagcgaagctggataacaggggaccgatgatgtggcgaccatcagttctgctgcttctgttgctactgaggcacggggcccagg

SEQ ID NO: 373685 - DNA, 120 bp, Artificial Sequence
  ENSG00000142552_1 (sequence is synthesized)
ggaagccatccccagacgcaggccctcatggccaggggagggtgcaccaggcggcccccctgagcgacgctccccatgatgacgcccacgggaacttccagtacgaccatgaggctttcc

SEQ ID NO: 373686 - DNA, 120 bp, Artificial Sequence
  ENSG00000142552_2 (sequence is synthesized)
tgggacgggaagtggccaaggaattcgaccaactcaccccagaggaaagccaggcccgtctggggcggatcgtggaccgcatggaccgcgcgggggacggcgacggctgggtgtcgctgg

SEQ ID NO: 373687 - DNA, 120 bp, Artificial Sequence
  ENSG00000142552_3 (sequence is synthesized)
ccgagcttcgcgcgtggatcgcgcacacgcagcagcggcacatacgggactcggtgagcgcggcctgggacacgtacgacacggaccgcgacgggcgtgtgggttgggaggagctgcgca

SEQ ID NO: 373688 - DNA, 120 bp, Artificial Sequence
  ENSG00000142552_4 (sequence is synthesized)
acgccacctatggccactacgcgcccggtgaagaatttcatgacgtggaggatgcagagacctacaaaaagatgctggctcgggacgagcggcgtttccgggtggccgaccaggatgggg

SEQ ID NO: 373689 - DNA, 120 bp, Artificial Sequence
  ENSG00000142552_5 (sequence is synthesized)
actcgatggccactcgagaggagctgacagccttcctgcaccccgaggagttccctcacatgcgggacatcgtgattgctgaaaccctggaggacctggacagaaacaaagatggctatg

SEQ ID NO: 373690 - DNA, 120 bp, Artificial Sequence
  ENSG00000142552_6 (sequence is synthesized)
tactcagccgagcctggggaggaggagccggcgtgggtgcagacggagaggcagcagttccgggacttccgggatctgaacaaggatgggcacctggatgggagtgaggtgggccactgg

SEQ ID NO: 373691 - DNA, 120 bp, Artificial Sequence
  ENSG00000142552_7 (sequence is synthesized)
gtgctgccccctgcccaggaccagcccctggtggaagccaaccacctgctgcacgagagcgacacggacaaggatgggcggctgagcaaagcggaaatcctgggtaattggaacatgttt

SEQ ID NO: 373692 - DNA, 120 bp, Artificial Sequence
  ENSG00000142552_8 (sequence is synthesized)
gtgggcagtcaggccaccaactatggcgaggacctgacccggcaccacgatgagctgtgagcaccgcgcacctgccacagcctcagaggcccgcacaatgaccggaggaggggccgctgt

SEQ ID NO: 373693 - DNA, 120 bp, Artificial Sequence
  ENSG00000142552_9 (sequence is synthesized)
ggtctggccccctccctgtccaggccccgcaggaggcagatgcagtcccaggcatcctcctgcccctgggctctcagggaccccctgggtcggcttctgtccctgtcacacccccaaccc

SEQ ID NO: 373694 - DNA, 120 bp, Artificial Sequence
  ENSG00000142552_10 (sequence is synthesized)
cagggaggggctgtcatagtcccagaggataagcaatacctatttctgactgagtctcccagcccagacccagggacccttggccccaagctcagctctaagaaccgccccaacccctcc

SEQ ID NO: 373695 - DNA, 120 bp, Artificial Sequence
  ENSG00000142552_11 (sequence is synthesized)
agctccaaatctgagcctccaccacatagactgaaactcccctggccccagccctctcctgcctggcctggcctgggacacctcctctctgccaggaggcaataaaagccagcgccggga

SEQ ID NO: 373696 - DNA, 120 bp, Artificial Sequence
  ENSG00000142552_12 (sequence is synthesized)
tcctcaccttccttttgctgtagttcttcaagctaggaagactggatttccctctggtgttttagctgccagtcatggtatgaactagaactcacccccaagtaaaagctgtacaaataa

SEQ ID NO: 373697 - DNA, 120 bp, Artificial Sequence
  ENSG00000142552_13 (sequence is synthesized)
cctctaagcatcccgccctcttttcccccatcgcccgccctttttgagcccgaaagcttgcagccaacttccaactccctgtcctgtcctagggaccgatgatgtggcgaccatcagttc

SEQ ID NO: 373698 - DNA, 120 bp, Artificial Sequence
  ENSG00000142552_14 (sequence is synthesized)
agcggcacatacgggactcggtgaagaatttcatgacgtggaggatgcagagacctacaaaaagatgctggctcgggacgagcggcgtttccgggtggccgaccaggatggggactcgat

SEQ ID NO: 373699 - DNA, 120 bp, Artificial Sequence
  ENSG00000142556_0 (sequence is synthesized)
ggtcctcgcctcgcttcacggtctttaccgctcagcttcccggagtccgcgcaggagcgcgtctgaataggaagcgttttcggacgtggatgcggcgttttgtcgctgccagtggtgtct

SEQ ID NO: 373700 - DNA, 120 bp, Artificial Sequence
  ENSG00000142556_1 (sequence is synthesized)
ggagaggttcgggctcggtcctcaggtcctggctcccagaagcaaaataactcaagtgaagcaatgaaggaagaagaaggaggttgctggccttggatatcataatttctggggacaact

SEQ ID NO: 373701 - DNA, 120 bp, Artificial Sequence
  ENSG00000142556_2 (sequence is synthesized)
ttaagtggacactaatatttctgactaggaaaacttcaaaaacttcatggcaaatgcagaagagacaaagacgtatagtccatgttatccactattttctgagcacagaagaaaatgatc

SEQ ID NO: 373702 - DNA, 120 bp, Artificial Sequence
  ENSG00000142556_3 (sequence is synthesized)
aagacccaggaatcactgaccctggaggatgtggctgtggaattcagctgggaggagtggcagctcctggacactgctcagaagaacctgtaccgggatgtgatggtggagaactataac

SEQ ID NO: 373703 - DNA, 120 bp, Artificial Sequence
  ENSG00000142556_4 (sequence is synthesized)
cacctagtatcactggggtatcaaactagcaaaccagatgtactctccaagttggcacatggacaagaaccatggacaacagatgctaaaattcagaataaaaattgtccaggaatcggg

SEQ ID NO: 373704 - DNA, 120 bp, Artificial Sequence
  ENSG00000142556_5 (sequence is synthesized)
aaagttgacagtcatctgcaagagcactctccaaaccaaagacttctgaagagcgtgcagcaatgcaatggacagaatacacttagaaatattgtacatctcagcaagacacattttcct

SEQ ID NO: 373705 - DNA, 120 bp, Artificial Sequence
  ENSG00000142556_6 (sequence is synthesized)
atagtgcaaaatcatgatacatttgacttgtacagaaaaaatttgaaatcaagtttaagtttaatcaaccagaagagaagacatggaataaataaccctgttgagtttattggaggtgag

SEQ ID NO: 373706 - DNA, 120 bp, Artificial Sequence
  ENSG00000142556_7 (sequence is synthesized)
aaaacacttctacatggtaagcatgaacgtacgcatactaaaactagattttctgaaaatgcaaaatgtatccatactaaattccaagtcttcaagcatcagaggactcagaaaattgag

SEQ ID NO: 373707 - DNA, 120 bp, Artificial Sequence
  ENSG00000142556_8 (sequence is synthesized)
aaaccccatgcatgcattgaatgtgagcaaaccttccttaggaagtctcagctcatttaccatgagaacatttgtatacaagagaatcctggaagtggtcaatgtgagaaattatccaga

SEQ ID NO: 373708 - DNA, 120 bp, Artificial Sequence
  ENSG00000142556_9 (sequence is synthesized)
agtgtcctgttcactaagcatctgaaaactaatacaacagacaaaatctgtatacccaatgaatatagaaaaggctctactgtgaagagtagtctcattacacatcaacaaacccataca

SEQ ID NO: 373709 - DNA, 120 bp, Artificial Sequence
  ENSG00000142556_10 (sequence is synthesized)
gaagagaaatcctatatgtgcagtgagtgtggaaagggctttacaatgaagcgctatctaattgctcatcagcgaactcatagtggagagaaaccttatgtgtgcaaagaatgtggaaaa

SEQ ID NO: 373710 - DNA, 120 bp, Artificial Sequence
  ENSG00000142556_11 (sequence is synthesized)
ggtttcactgtgaagagcaatctcattgtacatcagcgaactcatacaggggagaaaccctatatatgcagtgaatgtggaaaaggcttcaccatgaagcgctatcttgttgtacatcag

SEQ ID NO: 373711 - DNA, 120 bp, Artificial Sequence
  ENSG00000142556_12 (sequence is synthesized)
cgaactcatactggagagaaaccctatatgtgcagtgaatgtggaaaaggctttaccgtgaagagcaatctcattgtacatcagcgctcccacacaggagaaaaatcttacatatgcagc

SEQ ID NO: 373712 - DNA, 120 bp, Artificial Sequence
  ENSG00000142556_13 (sequence is synthesized)
gaatgtggaaaaggcttcactgtcaaacgcactctcgttatacatcagcgaactcatacaggagagaaatcttacatatgcaatgaatgtggtaaaggcttcaccacaaagcgcactctt

SEQ ID NO: 373713 - DNA, 120 bp, Artificial Sequence
  ENSG00000142556_14 (sequence is synthesized)
attatacatcagcgaactcatacaggagaaaaaccctatgaatgcaatgaatgtggtaaagccttcagccagaaaatatgcctcatacaacatgagagatgtcatacaggaaagactccc

SEQ ID NO: 373714 - DNA, 120 bp, Artificial Sequence
  ENSG00000142556_15 (sequence is synthesized)
tttgtatgtaccgagtgcggaaaatcctattcacacaaatatggcctcattacccatcagagaattcacacaggagagaaaccttatgagtgcaatgaatgtggaaaagccttcaccaca

SEQ ID NO: 373715 - DNA, 120 bp, Artificial Sequence
  ENSG00000142556_16 (sequence is synthesized)
aagtcagtactcaatgtacatcaaagaacgcatacaggagagaggccgtatggatgcagtgattgtgagaaagccttctcccacttatcaaaccttgtcaaacataagaaaatgcacaca

SEQ ID NO: 373716 - DNA, 120 bp, Artificial Sequence
  ENSG00000142556_17 (sequence is synthesized)
agagaaatgggtagaatcagtcaagttgaaaactcctgtaatggagagtcacagctccttccttataagtgaactcatgcagaagaaaaccctactagtgccgtgactatggaaatgcct

SEQ ID NO: 373717 - DNA, 120 bp, Artificial Sequence
  ENSG00000142556_18 (sequence is synthesized)
tttgtggcaactcagacttcattaaacatcagtgtgtttctagccaattggaacataaacatggtgctgcctgttgacagatgtgtgtctgtcctcaggaggtgaaataatttgccctag

SEQ ID NO: 373718 - DNA, 120 bp, Artificial Sequence
  ENSG00000142556_19 (sequence is synthesized)
aatgaaaatacgttgaataaactatattaatgtggagatgttttgagcaataatttctgctcatatgtctgaaaagtatacagagataaattctgtgaatacaaagactaagaaaagtct

SEQ ID NO: 373719 - DNA, 120 bp, Artificial Sequence
  ENSG00000142556_20 (sequence is synthesized)
tctgtggaaagatagactttattatcaggtttcatcatagatttcaacgtaagtgagcttattgttgatagaaacatgatgaccatgacaaagtctttactcagaaatatgacctcagtg

SEQ ID NO: 373720 - DNA, 120 bp, Artificial Sequence
  ENSG00000142556_21 (sequence is synthesized)
agtgtcaaagtttacactggaaaataactttaaggtgacagtattgatggcaggatttcagcgacgcactctgcttcatcatttgtcaggagatcacatagaaagtaaaattgttccgaa

SEQ ID NO: 373721 - DNA, 120 bp, Artificial Sequence
  ENSG00000142556_22 (sequence is synthesized)
catgctatcaaataaatgtggaacacctttagcaaactatcaacagctcatgaaggcatgaaatgtggtgaaaatgatgaatatttgagtgctttttcttaataagtataaccttaaaca

SEQ ID NO: 373722 - DNA, 120 bp, Artificial Sequence
  ENSG00000142556_23 (sequence is synthesized)
tcagctaatacacctggtgtgcattttcagtcaggataccttaatcctcatttctagttgccttgccaatgattccataatatactgtctcattactgtttatttttactgttgtgtaaa

SEQ ID NO: 373723 - DNA, 120 bp, Artificial Sequence
  ENSG00000142556_24 (sequence is synthesized)
attgtggtataatgagaaatacatttggtctttgttcctggttcctggcatagagctcctaaaacgcttagaatttcatgagtgataagagttttttggttttgttttgtttttgctgtt

SEQ ID NO: 373724 - DNA, 120 bp, Artificial Sequence
  ENSG00000142556_25 (sequence is synthesized)
gttgttattcatagcactgcccttttaattacacctgattatactactgaagtgacttatggttgctcccctagacagcctcagaatggggctgttctctaggaagatcaagtaactaga

SEQ ID NO: 373725 - DNA, 120 bp, Artificial Sequence
  ENSG00000142556_26 (sequence is synthesized)
ggatggagactttgtgccccatttctcccacctcctggaaggggaggggtgctggagattagattagacaatgagattaagagaactccaaatagcccaagagggtggtgcacccccaac

SEQ ID NO: 373726 - DNA, 120 bp, Artificial Sequence
  ENSG00000142556_27 (sequence is synthesized)
ttcataggggtagaggctcctgagattaggagaaccctttttaggctttactctatgtacctcttcatttgagtgttcatttgcgtcctttataaccagtaaaacaaagtacgctgtttt

SEQ ID NO: 373727 - DNA, 120 bp, Artificial Sequence
  ENSG00000142556_28 (sequence is synthesized)
cttgagttttgtgagccctgtagcaaattatcaaacctgagtagggcagtgggaactcggaatttatcaccattcagaactgcaggttgtccttgtgagtggcatctgatgtgggggaag

SEQ ID NO: 373728 - DNA, 120 bp, Artificial Sequence
  ENSG00000142556_29 (sequence is synthesized)
tcttggactgagccccttaacttgtggagtctgcactaatttagactgcactaactaacttgcactgcactaacttggactgcactaacttgtggagtctgcactaacttggagaagtta

SEQ ID NO: 373729 - DNA, 120 bp, Artificial Sequence
  ENSG00000142556_30 (sequence is synthesized)
gtgtcagaattgaattatagaacacccagttgttcagaattgaattgtagaacacccaattggtgtgggagaattagagaatttatttgtgtcagaaaatactccagaacaaccacccca

SEQ ID NO: 373730 - DNA, 120 bp, Artificial Sequence
  ENSG00000142556_31 (sequence is synthesized)
tattatgattagctcttttcctttctttggctctgagcttaattgtacattaagcaaacttaagtagaaaagaaactgaatatgttaaatatattaacaacatatttggacttgcttaac

SEQ ID NO: 373731 - DNA, 120 bp, Artificial Sequence
  ENSG00000142556_32 (sequence is synthesized)
taagattatagagatgatcagtttataaaaccaccttcaacttaaataaatttgaactcgaaattgcaaaagcagtctagaggctttgctagtatccttcaaccaatttctagtaaaaat

SEQ ID NO: 373732 - DNA, 120 bp, Artificial Sequence
  ENSG00000142556_33 (sequence is synthesized)
atcctatataaccataattatcaaaaccagaaaaacaacattggtaggatactataaagtactaatcttattttggatttgacgaatttttacatgtttttttcttttttagtttgtact

SEQ ID NO: 373733 - DNA, 120 bp, Artificial Sequence
  ENSG00000142556_34 (sequence is synthesized)
ctaagaagttgtattacatgtacagattcgtgtaaccactgcaaccacataaaactaatgaacacaaagtccctcatgctacctttttatgcttacactccatccaaacctaactctgcc

SEQ ID NO: 373734 - DNA, 120 bp, Artificial Sequence
  ENSG00000142556_35 (sequence is synthesized)
cctaactctgccaaccacttttctcctatcagtataatttcatcatttcatgaatatgataaaaataaaattgtttttgtaaatggtttttataaattttatataaataagttatatgaa

SEQ ID NO: 373735 - DNA, 120 bp, Artificial Sequence
  ENSG00000142556_36 (sequence is synthesized)
gagagtatgtaagcttttggcatttttgtcactcagcaaattactcctaaggtttatatgagttgatgaatagttgttttattatttttttttaccaccatgtatctaaccagatgaaag

SEQ ID NO: 373736 - DNA, 120 bp, Artificial Sequence
  ENSG00000142556_37 (sequence is synthesized)
ttgtttatatttgagagtagtatacatatttgatgtagtagtttatccattcacctatgagatatatttgcactgttttcctggttttaagtgctataaataaagatgctgtgaaatcta

SEQ ID NO: 373737 - DNA, 120 bp, Artificial Sequence
  ENSG00000142556_38 (sequence is synthesized)
cttcttaaatttgaacatctctgccctaaattgtggattggtgctcccatcaccattcccacactgtaacaggatggattcagggcagattgtctccagcaatgaatcagacaaaagtgc

SEQ ID NO: 373738 - DNA, 120 bp, Artificial Sequence
  ENSG00000142556_39 (sequence is synthesized)
tccaccaaccaggcccttgaatcaccttccttgtcccgtgaatcagcacagcctgccacggcaaagttttatcagcccactcctggaaatgatcagtgaaggtcccatcatgggctgctc

SEQ ID NO: 373739 - DNA, 71 bp, Artificial Sequence
  ENSG00000142556_40 (sequence is synthesized)
ggacaacagatgctaaaattcagaataaaaattgtccagacttgctgcaacctcgtcctcctgggatcaag

SEQ ID NO: 373740 - DNA, 82 bp, Artificial Sequence
  ENSG00000142556_41 (sequence is synthesized)
agtctactaaaaatacacacaaaaaattagctgggtatggtgctgggctgttgggagccgaaggcccatgggatgtgaccaa

SEQ ID NO: 373741 - DNA, 78 bp, Artificial Sequence
  ENSG00000142556_42 (sequence is synthesized)
tatcatgaatgcacgatgtgggcaaactcatgactgcttccgctgccagaaggtttgctgagggcaatcgcttcctgg

SEQ ID NO: 373742 - DNA, 120 bp, Artificial Sequence
  ENSG00000142556_43 (sequence is synthesized)
tccgctgccagaaggtttgctgagggcaatcgcttcctggtgctgagctccttgaggttatctactgggacatctagagaatgccatcttgcaaaccctactctggactgagtagctgac

SEQ ID NO: 373743 - DNA, 62 bp, Artificial Sequence
  ENSG00000142556_44 (sequence is synthesized)
atgccatcttgcaaaccctactctggactgagtagctgaccccttcttccacccgccttctc

SEQ ID NO: 373744 - DNA, 120 bp, Artificial Sequence
  ENSG00000142583_0 (sequence is synthesized)
atggccaaagtgcacccagaatgtcttctctctccattcagtgcacgcgttactttggctaaaaggaggtgagcggcactctgcccttccagagcaagcatggagcaacaggatcagagc

SEQ ID NO: 373745 - DNA, 120 bp, Artificial Sequence
  ENSG00000142583_1 (sequence is synthesized)
atgaaggaagggaggctgacgcttgtgcttgccctggcaaccctgatagctgcctttgggtcatccttccagtatgggtacaacgtggctgctgtcaactccccagcactgctcatgcaa

SEQ ID NO: 373746 - DNA, 120 bp, Artificial Sequence
  ENSG00000142583_2 (sequence is synthesized)
caattttacaatgagacttactatggtaggaccggtgaattcatggaagacttccccttgacgttgctgtggtctgtaaccgtgtccatgtttccatttggagggtttatcggatccctc

SEQ ID NO: 373747 - DNA, 120 bp, Artificial Sequence
  ENSG00000142583_3 (sequence is synthesized)
ctggtcggccccttggtgaataaatttggcagaaaaggggccttgctgttcaacaacatattttctatcgtgcctgcgatcttaatgggatgcagcagagtcgccacatcatttgagctt

SEQ ID NO: 373748 - DNA, 120 bp, Artificial Sequence
  ENSG00000142583_4 (sequence is synthesized)
atcattatttccagacttttggtgggaatatgtgcaggtgtatcttccaacgtggtccccatgtacttaggggagctggcccctaaaaacctgcggggggctctcggggtggtgccccag

SEQ ID NO: 373749 - DNA, 120 bp, Artificial Sequence
  ENSG00000142583_5 (sequence is synthesized)
ctcttcatcactgttggcatccttgtggcccagatctttggtcttcggaatctccttgcaaacgtagatggctggccgatcctgctggggctgaccggggtccccgcggcgctgcagctc

SEQ ID NO: 373750 - DNA, 120 bp, Artificial Sequence
  ENSG00000142583_6 (sequence is synthesized)
cttctgctgcccttcttccccgagagccccaggtacctgctgattcagaagaaagacgaagcggccgccaagaaagccctacagacgctgcgcggctgggactctgtggacagggaggtg

SEQ ID NO: 373751 - DNA, 120 bp, Artificial Sequence
  ENSG00000142583_7 (sequence is synthesized)
gccgagatccggcaggaggatgaggcagagaaggccgcgggcttcatctccgtgctgaagctgttccggatgcgctcgctgcgctggcagctgctgtccatcatcgtcctcatgggcggc

SEQ ID NO: 373752 - DNA, 120 bp, Artificial Sequence
  ENSG00000142583_8 (sequence is synthesized)
cagcagctgtcgggcgtcaacgctatctactactacgcggaccagatctacctgagcgccggcgtgccggaggagcacgtgcagtacgtgacggccggcaccggggccgtgaacgtggtc

SEQ ID NO: 373753 - DNA, 120 bp, Artificial Sequence
  ENSG00000142583_9 (sequence is synthesized)
atgaccttctgcgccgtgttcgtggtggagctcctgggtcggaggctgctgctgctgctgggcttctccatctgcctcatagcctgctgcgtgctcactgcagctctggcactgcaggac

SEQ ID NO: 373754 - DNA, 120 bp, Artificial Sequence
  ENSG00000142583_10 (sequence is synthesized)
acagtgtcctggatgccatacatcagcatcgtctgtgtcatctcctacgtcataggacatgccctcgggcccagtcccatacccgcgctgctcatcactgagatcttcctgcagtcctct

SEQ ID NO: 373755 - DNA, 120 bp, Artificial Sequence
  ENSG00000142583_11 (sequence is synthesized)
cggccatctgccttcatggtggggggcagtgtgcactggctctccaacttcaccgtgggcttgatcttcccgttcatccaggagggcctcggcccgtacagcttcattgtcttcgccgtg

SEQ ID NO: 373756 - DNA, 120 bp, Artificial Sequence
  ENSG00000142583_12 (sequence is synthesized)
atctgcctcctcaccaccatctacatcttcttgattgtcccggagaccaaggccaagacgttcatagagatcaaccagattttcaccaagatgaataaggtgtctgaagtgtacccggaa

SEQ ID NO: 373757 - DNA, 120 bp, Artificial Sequence
  ENSG00000142583_13 (sequence is synthesized)
aaggaggaactgaaagagcttccacctgtcacttcggaacagtgactctggagaggaagccagtggagctggtctgccaggggcttcccactttggcttatttttctgacttctagctgt

SEQ ID NO: 373758 - DNA, 120 bp, Artificial Sequence
  ENSG00000142583_14 (sequence is synthesized)
ctgtgaatatccagaaataaaacaactctgatgtggaatgcagtcctcatctccagcctccccaccccagtgggaactgtgcaaagggctgccttgctgttcttgaagctgggctgtctc

SEQ ID NO: 373759 - DNA, 120 bp, Artificial Sequence
  ENSG00000142583_15 (sequence is synthesized)
tctccatgttggcctgtcaccagacccgagtcaattaaacagctggtcctccactttgctggttcagccttcgtgtggctcctggtaacgtggctccaccttgatgggtcaacctttgtg

SEQ ID NO: 373760 - DNA, 120 bp, Artificial Sequence
  ENSG00000142583_16 (sequence is synthesized)
tggctcctggtaacataacaacaacagttactatagtggtgagatggaaggaatcaaattttgccagagaaactaacttggtggccccgacaggtcttccggggccatgggcatttgttt

SEQ ID NO: 373761 - DNA, 120 bp, Artificial Sequence
  ENSG00000142583_17 (sequence is synthesized)
caaattcatcctcttaccagatccttttccagaaatacctgtctaggaaggtgtgatgtcagaaacaatgacatccagaaagctgaggaacaggttcctgtggagacactgagtcagaat

SEQ ID NO: 373762 - DNA, 120 bp, Artificial Sequence
  ENSG00000142583_18 (sequence is synthesized)
tcttcatcctaaattattttgttagtggaaaatggaattgcttctgtgtagtcaataaaatgaacctgatcacttttcaacaagacgtgctgctgttctttgagcaagtagaaggcagga

SEQ ID NO: 373763 - DNA, 65 bp, Artificial Sequence
  ENSG00000142583_19 (sequence is synthesized)
caagacgtgctgctgttctttgagcaagtagaaggcaggaggaagttccctgctcattcaggcag

SEQ ID NO: 373764 - DNA, 74 bp, Artificial Sequence
  ENSG00000142583_20 (sequence is synthesized)
ctcatgatccgcccacctaggccttcaggcagtttgactgcacgagtgtcagttccttgagggcaggggcttgg

SEQ ID NO: 373765 - DNA, 120 bp, Artificial Sequence
  ENSG00000142583_21 (sequence is synthesized)
tgactgcacgagtgtcagttccttgagggcaggggcttggtcagttttgtttatgcctgaatccccagcatctcgaagagggcctctggaggctgaggtgggaggattgcttaagcctgg

SEQ ID NO: 373766 - DNA, 88 bp, Artificial Sequence
  ENSG00000142583_22 (sequence is synthesized)
aaaaaaaatttttttaattgggcatggtgacacgcctttggggtcccagctatttgggaggctgaaatgggaggatcgcttgagcctg

SEQ ID NO: 373767 - DNA, 120 bp, Artificial Sequence
  ENSG00000142583_23 (sequence is synthesized)
cgcttgagcctgggaggtcaaggctgccctgagtcatgattgcatcactgcacaccagcctgcatgacagaatgagaccttgtctcaaataaataaatacatgtaagattgaggaagctt

SEQ ID NO: 373768 - DNA, 120 bp, Artificial Sequence
  ENSG00000142583_24 (sequence is synthesized)
ataaatacatgtaagattgaggaagcttccaaatgtcctcacatatgtaatgaaatcttgaggagtcttaaaatcttgagactgtggtgggggaggaagggaaaaggaacagggtcttga

SEQ ID NO: 373769 - DNA, 88 bp, Artificial Sequence
  ENSG00000142583_25 (sequence is synthesized)
tgtagctcccataattcccatgtgttctgggagggaccctgtgggagataattgaatcatgggggcaaagcctcatgagatctgatgg

SEQ ID NO: 373770 - DNA, 120 bp, Artificial Sequence
  ENSG00000142583_26 (sequence is synthesized)
tgttctcatggtagtgaatcagcctcatgagatctgatggttctgtaaggggtaaaaccttttgcttggttctcattctctcttgcctgccaccaggtaagacgtgccttttgctttctg

SEQ ID NO: 373771 - DNA, 120 bp, Artificial Sequence
  ENSG00000142583_27 (sequence is synthesized)
gtgaggcctccccagccatgtggaatggcgagtccattaaatctctttttctttgcaatttacccagtctctgatacatctttatcagcagcatgaaaatggtctaacacaggtctctcc

SEQ ID NO: 373772 - DNA, 120 bp, Artificial Sequence
  ENSG00000142583_28 (sequence is synthesized)
gtctctccccaaaaatatagagagctggaggtttttcttagagatatgaataaagggtgtgagtgtgagtgtatgtgcaaaaatatggataaaaccttgaaagtgctgaatggcctgtag

SEQ ID NO: 373773 - DNA, 120 bp, Artificial Sequence
  ENSG00000142583_29 (sequence is synthesized)
caagaagtgatgtcttctcatagatgggtggcagaggctggtggccgggagagagagcagtgggacttgggagcactttttgtgggtatgtaatggagattccaccagcaacaagctaaa

SEQ ID NO: 373774 - DNA, 120 bp, Artificial Sequence
  ENSG00000142583_30 (sequence is synthesized)
ccactcacaagcgggcccagaggaagtaaacagaacactgtggttgaaccatccttggccttctgcagcaaggatctgcagcctggaaggggcacagaaacaaccaaagatgaaggctct

SEQ ID NO: 373775 - DNA, 120 bp, Artificial Sequence
  ENSG00000142583_31 (sequence is synthesized)
cagagctgaggagaggccaggtcagaatatcagaagtcaagaaactgcagcacctctaacacaggggaggctatgaagttcatggttctggatgtctgctccctgggttcaaaccttggt

SEQ ID NO: 373776 - DNA, 120 bp, Artificial Sequence
  ENSG00000142583_32 (sequence is synthesized)
cctgccacattagttgtgcaacttggaaagttacttggcttttttgtatctcagtcttctcttctgttaaatggcactaatagtaaatgtctcacatgtccattgtgagaattaaatgac

SEQ ID NO: 373777 - DNA, 120 bp, Artificial Sequence
  ENSG00000142583_33 (sequence is synthesized)
agatgccgaaccaccaccaggggtggttggcaaactgcagccacccaaggggctggagtagttttcaaacagcaccacattatcccaggaggaaaagcagacgcgtgacagagtcagaga

SEQ ID NO: 373778 - DNA, 120 bp, Artificial Sequence
  ENSG00000142583_34 (sequence is synthesized)
gcaggcatagagtgctgtggcagtcagccagtgcccacatcaacaccaaggagagtcctgcgggtgctgtgcaaggccgggtgcacgcgttactttggctaaaaggaggtgagcggcact

SEQ ID NO: 373779 - DNA, 72 bp, Artificial Sequence
  ENSG00000142583_35 (sequence is synthesized)
attgtctggtcacagaacagcccggagatgtgccagcttgctttgtggaattcctgggctcaagcgatcctc

SEQ ID NO: 373780 - DNA, 120 bp, Artificial Sequence
  ENSG00000142583_36 (sequence is synthesized)
accgctgccatccccctcctccatctttgagccactaggcttctcacagtctcccaccccgccctgctcgcggagcctgcaggcctcggcctcatggcggcctgaggcaggggcctggag

SEQ ID NO: 373781 - DNA, 120 bp, Artificial Sequence
  ENSG00000142583_37 (sequence is synthesized)
gctggtccgcccgccacgaaggttggggggtccctggccagaagcaggacccgggcgaggctgagggggactctggcagaagctgaaggggacccggtgcacgcgttactttggctaaaa

SEQ ID NO: 373782 - DNA, 120 bp, Artificial Sequence
  ENSG00000142583_38 (sequence is synthesized)
accatgagcctgactggtagagactttagcaatggggaaataccgtagactgttccatcaggacaatgctgggcctgcagtccccagggggcacccacttacttagccaaaccccagacg

SEQ ID NO: 373783 - DNA, 120 bp, Artificial Sequence
  ENSG00000142583_39 (sequence is synthesized)
agatctttggtcttcggaatctccttgcaaacgtagatggtgagttcaggacatctcgggagcacccccaccccttcaccactacccttggccccctccttgtgttccaaagccaccacc

SEQ ID NO: 373784 - DNA, 120 bp, Artificial Sequence
  ENSG00000142583_40 (sequence is synthesized)
acaggacaggactttctgcagactggtctcttctaacaggctggatgtccttggggggcccatcctgtcccgagccaacatagcaggccatggacaaaggcgcgataagggactggccag

SEQ ID NO: 373785 - DNA, 120 bp, Artificial Sequence
  ENSG00000142583_41 (sequence is synthesized)
cgtttactatctagtccctcttaggagatggatgaggtggctttgagtgatgggcttccctgcctgctcagcagctgtccatatggaggcccgtggcatagcaatgacagccaccagtgt

SEQ ID NO: 373786 - DNA, 120 bp, Artificial Sequence
  ENSG00000142583_42 (sequence is synthesized)
gccaggctctgtgcttggggcggacccagcatcagttcataggaccctcccagcaacgctgctgcctgggactcagtgattatcccattttgcagaccagaaagagaagtaccaggagtg

SEQ ID NO: 373787 - DNA, 120 bp, Artificial Sequence
  ENSG00000142583_43 (sequence is synthesized)
agacagcctggggcctggcatgcggcaggtgcacagacacctgtaaccggggttgtttttgcacgactttccctttaaactatcatcagtcatcccgtcagccaaaacataagccagttc

SEQ ID NO: 373788 - DNA, 120 bp, Artificial Sequence
  ENSG00000142583_44 (sequence is synthesized)
ccgccagggttctacacaccgtctgcaagtcagtcaagtggatcatcaagctctgtgctgcttagacactctctgtagaaagtgcttaccgtgagccaagtgccaagtcttttttagtaa

SEQ ID NO: 373789 - DNA, 120 bp, Artificial Sequence
  ENSG00000142583_45 (sequence is synthesized)
ctcatgtattcctcagaacagccctattaagcctgtaccagtatcatacccattttgcaggtgcatcacaggtacagagagattggaagactggtccaaggtctcatgaggatgcagacc

SEQ ID NO: 373790 - DNA, 120 bp, Artificial Sequence
  ENSG00000142583_46 (sequence is synthesized)
cagcggcacagacctaggtccctgtttaagtaccacatgctcctgcctctccttcactcctgcatgtgttggggacacttacgccaaggcgccgcgttctcattaggagctgggaccaga

SEQ ID NO: 373791 - DNA, 120 bp, Artificial Sequence
  ENSG00000142583_47 (sequence is synthesized)
agtgaataagccaggttcctgtctcagggagctccatagcaggactcagaaccacacacggccctctaggcatttgtgaagctctgtgcttcatttttttgctttgcctctagttttgcc

SEQ ID NO: 373792 - DNA, 120 bp, Artificial Sequence
  ENSG00000142583_48 (sequence is synthesized)
tttgcagtaccaatgcagccagcccatgtgtcccctctatgtggaatgttaacgatattcccactgtttctggtgtcctttctgtaatcagagctgccgtgaccattccagttcaggcat

SEQ ID NO: 373793 - DNA, 120 bp, Artificial Sequence
  ENSG00000142583_49 (sequence is synthesized)
cctggtggcctggcttctctgggcatagagctgggagtgggcagttgggtcaggccgggtatgcccagctcctccagcccctgcaagactgtcctctgaaggacacggggacgttctcac

SEQ ID NO: 373794 - DNA, 120 bp, Artificial Sequence
  ENSG00000142583_50 (sequence is synthesized)
cagcacatggtattaccggcctcgtcggtgtggtctgtctgatgggcgcaggggtgcgtcgctgctgatccctgctgcaggtgtttcccgagtgtccaccgtcgggagttgctgttctta

SEQ ID NO: 373795 - DNA, 120 bp, Artificial Sequence
  ENSG00000142583_51 (sequence is synthesized)
gggctgggaaagctgtgccctcctggagcctgcaccccactcaggatgacggggctggggccggctctgcagagggcgccttcggggtggtggggaggccgctggtgccagctcgctgcc

SEQ ID NO: 373796 - DNA, 120 bp, Artificial Sequence
  ENSG00000142583_52 (sequence is synthesized)
ttcctcccaggctggccgatcctgctggggctgaccggggtccccgcggcgctgcagctccttctgctgcccttcttccccgagagccccaggtacctgctgattcagaagaaagacgaa

SEQ ID NO: 373797 - DNA, 120 bp, Artificial Sequence
  ENSG00000142583_53 (sequence is synthesized)
cgggtgaagaatgtgggggagagtggcagttggccagatgccgaaccaccaccaggggtggttggcaaactgcagccacccaaggggctggagtagttttcaaacagtttgactcttttc

SEQ ID NO: 373798 - DNA, 120 bp, Artificial Sequence
  ENSG00000142583_54 (sequence is synthesized)
tccgtgctgaagctgttccggatgcgctcgctgcgctggcagctgctgtccatcatcgtcctcatgggcggccagcagctgtcgggcgtcaacgctgtatgggccgggctgcggctcggg

SEQ ID NO: 373799 - DNA, 120 bp, Artificial Sequence
  ENSG00000142583_55 (sequence is synthesized)
gggggcgcggggcgcaggtcctggggcgccgggcgtgggtcctggcgccgaggccgcctcctccgggcagccgcccagccccgcgcttgccttgcagatctactactacgcggaccagat

SEQ ID NO: 373800 - DNA, 120 bp, Artificial Sequence
  ENSG00000142599_0 (sequence is synthesized)
aaaatcaccatcatcctcagggagccccctcgccctcggaaaacaaaaccagacatgatcctgggctcctgcttctgaaagatctgcccgaccgaggaggagggagcctaggttcaagtc

SEQ ID NO: 373801 - DNA, 120 bp, Artificial Sequence
  ENSG00000142599_1 (sequence is synthesized)
agggagcctaggttcaagtcgcaggaaaggtcacggcagggaagccccctcagcccctccgcgtcgcctccccgcgggccgcccctctcggccctgcgccccgcggccccgcagcctccg

SEQ ID NO: 373802 - DNA, 120 bp, Artificial Sequence
  ENSG00000142599_2 (sequence is synthesized)
ccgccactttccccggagctgggccgcgaacacctcactattgatggtgtagcgctttaggggaaggaggtgattgtctaggagtaactgtatgtgcgctcagcaccgggtcacaaccac

SEQ ID NO: 373803 - DNA, 120 bp, Artificial Sequence
  ENSG00000142599_3 (sequence is synthesized)
cgtgggatccacttacagagaagatttgtggagagcttcagcctgtttatggtgttactgagaaaggaattgtggccatttgatataattctggatggaagacctcttatttgtattaca

SEQ ID NO: 373804 - DNA, 120 bp, Artificial Sequence
  ENSG00000142599_4 (sequence is synthesized)
ttgaattagagcatttttgaaacgttggggttgttggagtggttggattttccctggaattgagtgagaaattcagaagactgaagcccaggcttactgtctacctttcacggaggccta

SEQ ID NO: 373805 - DNA, 120 bp, Artificial Sequence
  ENSG00000142599_5 (sequence is synthesized)
gccgtgagaggacagaagaaggcacgtggcgaatcatgacagcggacaaagacaaagacaaagacaaagagaaggaccgggaccgagaccgggaccgagagagagagaaaagagacaaag

SEQ ID NO: 373806 - DNA, 120 bp, Artificial Sequence
  ENSG00000142599_6 (sequence is synthesized)
caagagagagtgagaattcaaggccacgccggagctgtaccttggaaggaggagccaaaaattatgctgagagtgatcacagtgaagacgaggacaatgacaacaatagtgccaccgcag

SEQ ID NO: 373807 - DNA, 120 bp, Artificial Sequence
  ENSG00000142599_7 (sequence is synthesized)
aggagtccacgaagaagaataagaagaaaccaccgaaaaaaaagtctcgttatgaaaggacagataccggtgagataacatcctacatcactgaagatgatgtggtctacagaccaggag

SEQ ID NO: 373808 - DNA, 120 bp, Artificial Sequence
  ENSG00000142599_8 (sequence is synthesized)
actgtgtgtatatcgagagtcggaggccaaacacaccgtatttcatctgtagcattcaagacttcaaactggtccacaactcccaggcctgttgcagatctccaactcctgctttgtgtg

SEQ ID NO: 373809 - DNA, 120 bp, Artificial Sequence
  ENSG00000142599_9 (sequence is synthesized)
accccccagcatgctctctgccggtggcatcacagccaccacagcatctttctgaagccgggagagggcctgtagggagtaagagggaccatctcctcatgaacgtcaaatggtactacc

SEQ ID NO: 373810 - DNA, 120 bp, Artificial Sequence
  ENSG00000142599_10 (sequence is synthesized)
gtcaatctgaggttccagattctgtgtatcagcatttggttcaggatcgacataatgaaaatgactctggaagagaacttgtcattacagacccagttatcaagaaccgagagctcttca

SEQ ID NO: 373811 - DNA, 120 bp, Artificial Sequence
  ENSG00000142599_11 (sequence is synthesized)
tttctgattacgttgacacttaccatgctgctgcccttagagggaagtgtaacatctcccatttttctgacatatttgctgctagagagtttaaagcccgagtggattcatttttctaca

SEQ ID NO: 373812 - DNA, 120 bp, Artificial Sequence
  ENSG00000142599_12 (sequence is synthesized)
tattaggatataaccctgagacaaggaggctgaacagtacccagggggagattcgtgtcggtcctagtcatcaggccaaacttccagatctgcaaccatttccttctccagatggtgata

SEQ ID NO: 373813 - DNA, 120 bp, Artificial Sequence
  ENSG00000142599_13 (sequence is synthesized)
cagtgacccaacatgaggaactggtctggatgcctggagttaacgactgtgacctccttatgtacttgagggcagcaaggagcatggcggcatttgcaggaatgtgtgatggaggctcta

SEQ ID NO: 373814 - DNA, 120 bp, Artificial Sequence
  ENSG00000142599_14 (sequence is synthesized)
cagaggacggctgtgtcgcagcctctcgggatgacaccactctgaatgcactgaacacactgcatgaaagcggttacgatgctggcaaagccctgcagcgcctggtgaagaagcctgtgc

SEQ ID NO: 373815 - DNA, 120 bp, Artificial Sequence
  ENSG00000142599_15 (sequence is synthesized)
ccaagctcatcgagaagtgctggaccgaggacgaagtgaaacgcttcgttaagggactcaggcagtacgggaagaacttcttcagaattagaaaggagctgcttcccaataaggaaacag

SEQ ID NO: 373816 - DNA, 120 bp, Artificial Sequence
  ENSG00000142599_16 (sequence is synthesized)
gggagctgatcaccttctattactattggaagaagacccccgaagcagccagctcccgagcccatcgtaggcaccgcaggcaggccgtgttcaggaggattaagactcgcaccgcgtcca

SEQ ID NO: 373817 - DNA, 120 bp, Artificial Sequence
  ENSG00000142599_17 (sequence is synthesized)
cacccgtcaacacaccctccagacccccgtccagtgaattcttggacctaagttcagccagtgaagatgacttcgacagtgaggacagtgagcaggagctgaaggggtacgcctgccgcc

SEQ ID NO: 373818 - DNA, 120 bp, Artificial Sequence
  ENSG00000142599_18 (sequence is synthesized)
actgcttcaccaccacctccaaagattggcaccacggaggccgggagaacatcctgctttgcaccgactgtcgcatccacttcaagaaatacggtgagctcccgcccattgagaagcccg

SEQ ID NO: 373819 - DNA, 120 bp, Artificial Sequence
  ENSG00000142599_19 (sequence is synthesized)
tggacccgccaccgtttatgttcaaacccgtcaaggaagaggatgatgggctcagtgggaagcatagcatgaggacacggcggagtcggggctcgatgtcgacactacgcagtggtcgga

SEQ ID NO: 373820 - DNA, 120 bp, Artificial Sequence
  ENSG00000142599_20 (sequence is synthesized)
agaagcagccagccagccctgatggtcgcacctcacccatcaatgaagacatccgctccagcggccggaactcccccagcgctgccagtacctccagcaatgacagtaaagcagagacag

SEQ ID NO: 373821 - DNA, 120 bp, Artificial Sequence
  ENSG00000142599_21 (sequence is synthesized)
tgaagaagtcggccaagaaggtgaaggaggaagcctcttcccctcttaagagtaacaaacgccagcgggagaaggtggcctctgatacggaggaggctgacaggaccagctccaagaaga

SEQ ID NO: 373822 - DNA, 120 bp, Artificial Sequence
  ENSG00000142599_22 (sequence is synthesized)
caaaaacgcaggagatcagcaggcccaactcgccatctgaaggtgagggagagagttcagacagtcgcagcgtcaacgatgagggtagcagtgaccccaaagacatcgaccaggacaatc

SEQ ID NO: 373823 - DNA, 120 bp, Artificial Sequence
  ENSG00000142599_23 (sequence is synthesized)
gcagcacgtccccgagcatccccagcccccaggacaatgagagtgactcggactcgtcagcccagcagcagatgctgcaggcccagcccccagccttgcaggctcccactggggtcaccc

SEQ ID NO: 373824 - DNA, 120 bp, Artificial Sequence
  ENSG00000142599_24 (sequence is synthesized)
cagctccctcctcagctcctccagggacccctcagctgcccacgccagggcccacgccctctgccactgcagttcccccacagggctcccccacggcctcccaggcccctaaccagccac

SEQ ID NO: 373825 - DNA, 120 bp, Artificial Sequence
  ENSG00000142599_25 (sequence is synthesized)
aggctcccacagcgcctgttccccacacccacatccaacaggcaccggccttgcacccccagcggccgccctcaccgcatcccccgccgcatccctcgccacatcccccgctgcagcctc

SEQ ID NO: 373826 - DNA, 120 bp, Artificial Sequence
  ENSG00000142599_26 (sequence is synthesized)
tgactgggtcggcgggccagccttctgcaccctctcatgcccagcccccactgcacggtcagggcccacccggccctcacagcctgcaggctgggcccctgctgcagcacccaggccccc

SEQ ID NO: 373827 - DNA, 120 bp, Artificial Sequence
  ENSG00000142599_27 (sequence is synthesized)
cacagccctttggcctccctccccaggcctcccaaggccaggcccctctggggacctccccagcagcagcgtaccctcacacctccctgcagctgccagcctctcagtcagcgctgcagt

SEQ ID NO: 373828 - DNA, 120 bp, Artificial Sequence
  ENSG00000142599_28 (sequence is synthesized)
cccaacagcctccacgggagcagcccctgccaccagcgcccttggccatgccccacatcaagcccccgcctaccactcccatcccccagctgccggcgccacaggcccacaagcaccctc

SEQ ID NO: 373829 - DNA, 120 bp, Artificial Sequence
  ENSG00000142599_29 (sequence is synthesized)
cccacctctcggggccctcacccttctccatgaatgccaacctgcctccccctccagccctgaagcccctgagctccctgtccacacatcaccccccgtcggctcaccccccacccctgc

SEQ ID NO: 373830 - DNA, 120 bp, Artificial Sequence
  ENSG00000142599_30 (sequence is synthesized)
aactcatgcctcagagccagccattgccctcctcgcccgcccagccccccgggctgacccagagccagaacctgcccccgccccctgcctcccacccccctacaggcctccaccaggtgg

SEQ ID NO: 373831 - DNA, 120 bp, Artificial Sequence
  ENSG00000142599_31 (sequence is synthesized)
ccccccaacccccgtttgctcagcacccctttgtccctggaggccctcctcccatcacccctccgacctgcccctccacctctaccccaccggcgggacctggcacctcggcccagccac

SEQ ID NO: 373832 - DNA, 120 bp, Artificial Sequence
  ENSG00000142599_32 (sequence is synthesized)
cctgctctggtgcggcggcttcaggaggcagcatagcgggggggtcgtcctgcccactccccaccgtccagatcaaggaggaggctctggacgacgctgaggagcctgagagcccccctc

SEQ ID NO: 373833 - DNA, 120 bp, Artificial Sequence
  ENSG00000142599_33 (sequence is synthesized)
tgcccggacagacctgtacttcatgcctctggccgggtccaagctggccaagaagagggaggaggccattgagaaggccaagcgcgaggctgagcagaaagcccgagaggagcgagagcg

SEQ ID NO: 373834 - DNA, 120 bp, Artificial Sequence
  ENSG00000142599_34 (sequence is synthesized)
ggagaaggagaaggagaaggagcgggagcgggagcgagagcgggagcgcgaggcagagcgggcggctaaggcgtccagctcagcgcatgaaggtcgcctcagtgacccacagctcagtgg

SEQ ID NO: 373835 - DNA, 120 bp, Artificial Sequence
  ENSG00000142599_35 (sequence is synthesized)
tcctggccacatgcggccatccttcgagccaccaccaaccaccattgctgctgtgcccccctacatcgggcccgacacacctgcccttcggactctgagcgagtacgcccggccccacgt

SEQ ID NO: 373836 - DNA, 120 bp, Artificial Sequence
  ENSG00000142599_36 (sequence is synthesized)
catgtcgcccaccaaccgcaaccaccccttctacatgccccttaaccccacggaccccctgctggcctaccacatgcctggcctctacaacgtcgaccccaccatccgcgagcgggagct

SEQ ID NO: 373837 - DNA, 120 bp, Artificial Sequence
  ENSG00000142599_37 (sequence is synthesized)
ccgggagcgggagatccgagagcgggagatccgagagcgggagctgcgggagaggatgaagccgggcttcgaggtgaagcccccagagctggaccccctgcacccagccgccaaccccat

SEQ ID NO: 373838 - DNA, 120 bp, Artificial Sequence
  ENSG00000142599_38 (sequence is synthesized)
ggagcactttgcccggcacagcgccctcaccatccccccgaccgccgggccccacccttttgcttctttccacccgggcctgaaccccttggagagggagagactggccctggcgggccc

SEQ ID NO: 373839 - DNA, 120 bp, Artificial Sequence
  ENSG00000142599_39 (sequence is synthesized)
ccagctgcggcccgagatgagctaccctgacagactggcagccgagcgtatccacgcagagcgcatggcatcgctgaccagcgatcccctggcccgactgcagatgttcaacgtgactcc

SEQ ID NO: 373840 - DNA, 120 bp, Artificial Sequence
  ENSG00000142599_40 (sequence is synthesized)
gcaccatcaccagcactctcacattcactcccacctccacctccaccagcaggaccccctccaccaaggttcagcaggccccgttcacccgctggtcgaccccctgactgccggtcccca

SEQ ID NO: 373841 - DNA, 120 bp, Artificial Sequence
  ENSG00000142599_41 (sequence is synthesized)
cctggctcgcttcccctacccgcctggcactctccccaaccctctgcttggacagcccccacacgagcacgagatgcttcgccacccagttttcggcaccccctacccccgtgacctgcc

SEQ ID NO: 373842 - DNA, 120 bp, Artificial Sequence
  ENSG00000142599_42 (sequence is synthesized)
tggggccatcccaccccccatgtcagcagcccaccagctgcaggccatgcatgcccagtcggccgagctgcagagactggccatggagcagcagtggctgcatggacacccccacatgca

SEQ ID NO: 373843 - DNA, 120 bp, Artificial Sequence
  ENSG00000142599_43 (sequence is synthesized)
tggtggccacctaccaagtcaggaagattattacagtcgactgaagaaagaaggtgacaagcagttataagttatttatttgttaacgctggctgtggaaaccccagttcttggggggag

SEQ ID NO: 373844 - DNA, 120 bp, Artificial Sequence
  ENSG00000142599_44 (sequence is synthesized)
aaacaggactttttacataaaataggagctgcaaaagcaaaaagaatatcttctaaagatttctttatatatttaaaaacccacaactaaaaatgtatccacatagtagtgttcgtttgt

SEQ ID NO: 373845 - DNA, 120 bp, Artificial Sequence
  ENSG00000142599_45 (sequence is synthesized)
cgagaggatttcctgagactggtttggatctccctgcatgacagtcccccagaaacttagtgagtcctggactggactgaacatccagaaagcttccctgcaatcttggggtttggcttt

SEQ ID NO: 373846 - DNA, 120 bp, Artificial Sequence
  ENSG00000142599_46 (sequence is synthesized)
agttttcttttccttgatttctcagtaggtgctagaatccagttcacacccttcactgtgcgtgcagacacactgacacactccgccacgagtgctccagagcccacgaggcttgcagat

SEQ ID NO: 373847 - DNA, 120 bp, Artificial Sequence
  ENSG00000142599_47 (sequence is synthesized)
cgggggcataggaatttggaatccaagagctataatttttaaaaaaaaaaatcttttattttaatacattgtaggaaatcttcataattggagaaagttctgcagcatggctttttacgt

SEQ ID NO: 373848 - DNA, 120 bp, Artificial Sequence
  ENSG00000142599_48 (sequence is synthesized)
ctgtaaataaataattttagaacagcctttttttcttccataaactactattgtgatctattttttccagccatgtcactaattgtgaattcctaccaactattgacagaatacagagtt

SEQ ID NO: 373849 - DNA, 120 bp, Artificial Sequence
  ENSG00000142599_49 (sequence is synthesized)
gattttttaataaaaagttatatataattatccctttaattaaagggagcaaaggggcgttccacatggacagaggcttggaccgaggcctggtcacagcagcgagcatccagggtttgc

SEQ ID NO: 373850 - DNA, 120 bp, Artificial Sequence
  ENSG00000142599_50 (sequence is synthesized)
agggacgatgttacagactctgttttctgcctggcgtttcacttgtgtctgctcctagcctgtgctctgccagcagcacagacatctgctccatcagacctcttccattttgcacaggga

SEQ ID NO: 373851 - DNA, 120 bp, Artificial Sequence
  ENSG00000142599_51 (sequence is synthesized)
gtgcaggaggtgaatgttcactttctgttctccagtgtcactgttctgtttccacgggatggaaagcgcatgggcctgtgtccattgtagatttccttctagatttctgtgtacacacac

SEQ ID NO: 373852 - DNA, 120 bp, Artificial Sequence
  ENSG00000142599_52 (sequence is synthesized)
ttgattgttctggatgaatgtcttttttaatactccgaaaatttcatcatctaagaaaatgattccatacaaataactcagcacacaagtgacccaggacatatgcctgccaaagggatg

SEQ ID NO: 373853 - DNA, 120 bp, Artificial Sequence
  ENSG00000142599_53 (sequence is synthesized)
tgttagaaggctgccttctcatgcgcattgtcacttggatcttgtggtgaggacggccccatctttcttgccacagattgaggccacttttgagcaagggagatcctggagttaagacag

SEQ ID NO: 373854 - DNA, 120 bp, Artificial Sequence
  ENSG00000142599_54 (sequence is synthesized)
gtgttgggggcagcctgtattttaccctaggggcaggtctgcatggtgaccccacattgcactggtaaaccatttgagtcccactcttcatcctggaagtgggaactggagtcccaccca

SEQ ID NO: 373855 - DNA, 120 bp, Artificial Sequence
  ENSG00000142599_55 (sequence is synthesized)
cagtgcattcagaaagcatgctgtgtgggggctgcttctcaggaggccaggcccttctgagcggaaccgtcctggagagagcctgccctcgtttccaggctgcagccgtaacgcactttc

SEQ ID NO: 373856 - DNA, 120 bp, Artificial Sequence
  ENSG00000142599_56 (sequence is synthesized)
tcccaggctgagggcgggtgttctggggtgtctgccctctgtcggccctgcttcctgccaggacgtggcctcttccgatccttttctctcagacactggaggtctcttctgccattgtgc

SEQ ID NO: 373857 - DNA, 120 bp, Artificial Sequence
  ENSG00000142599_57 (sequence is synthesized)
tggtcccatcccaagaattgtaggacagagaccacactgggtcggcggacacaaagtccatccaggacccaggccgcagagggagcaggaagagatgctgatagtttgatctagaaacca

SEQ ID NO: 373858 - DNA, 120 bp, Artificial Sequence
  ENSG00000142599_58 (sequence is synthesized)
gcagctactggctcaaattcaggttctggcgtcaaatagcgacatttccagtttctcttaaaaaccgtgtttggtttcagttgggataggcttgttttgtctgttgaaaatgtttctagt

SEQ ID NO: 373859 - DNA, 120 bp, Artificial Sequence
  ENSG00000142599_59 (sequence is synthesized)
tttttttctttcatttttctctcattccatttctgccttaactttagtttgttcacagggaggcaaagctgacatgaaccttttgtcgtgggacttcaggccacattggcttgaaggcat

SEQ ID NO: 373860 - DNA, 120 bp, Artificial Sequence
  ENSG00000142599_60 (sequence is synthesized)
tcgtttccttctggggtggggacaggccctcatggcaggcttgttcccgtggctctgagcgaggcctcttcctgctgggctcccagactcctgcatccaggcccccaccttctcggcttc

SEQ ID NO: 373861 - DNA, 120 bp, Artificial Sequence
  ENSG00000142599_61 (sequence is synthesized)
tggtttttctttctttttggtagaacacaacatctaccattcagttaaaccttctttatctcctcctttggcatccatttttccaaagaagagtcgagtcctctgaggtctgtgcttgaa

SEQ ID NO: 373862 - DNA, 120 bp, Artificial Sequence
  ENSG00000142599_62 (sequence is synthesized)
agccgtccgaaggcattcttgttagctttgcttttctccccatatcccaaggcgaagcgctgagattcttccatctaaaaaaccctcgacccgaaaccctcaccagataaactacagttt

SEQ ID NO: 373863 - DNA, 120 bp, Artificial Sequence
  ENSG00000142599_63 (sequence is synthesized)
gtttaggaggccctgaccttcatggtgtctttgaagcccaaccactcggtttccttcggattttcctccctttgttcggggtttggtttggctcctctgtgtgtgtccgtatcttgttcg

SEQ ID NO: 373864 - DNA, 120 bp, Artificial Sequence
  ENSG00000142599_64 (sequence is synthesized)
gtgtcctcgaggttgagcttcactccactgcggcagaggcagcgtgcacactcggatttgctacgtttctatatatcttgaagctaaatgtatatatgagtagtttgccatgagataaca

SEQ ID NO: 373865 - DNA, 120 bp, Artificial Sequence
  ENSG00000142599_65 (sequence is synthesized)
cagtgtaaacagtagacacccagaaatcgtgacttctgtgttctctccatttgagtattttgtaatttttttgaaatatttgtggacataaataaaaccaagctacactacaacccttgg

SEQ ID NO: 373866 - DNA, 120 bp, Artificial Sequence
  ENSG00000142599_66 (sequence is synthesized)
agacgctcgcgagcaaccctccgcgctccggagcctcctcagcctcccgcacaccccgagacgctcgccccgctgggcctcggtccccgcctcctcccccgtccttttcccctctctcgc

SEQ ID NO: 373867 - DNA, 120 bp, Artificial Sequence
  ENSG00000142599_67 (sequence is synthesized)
ggcttaggtcatagcacaagctcagtgaaagctctatgaggtctctgagactgcatgtgcctccattttgagttgttagtgtagaaaagggcagagttttagcagaaagtaaaggttcag

SEQ ID NO: 373868 - DNA, 80 bp, Artificial Sequence
  ENSG00000142599_68 (sequence is synthesized)
ctgggccgccagggagaggccgcccacaatcgcgggccggaagggaccgcggggggcgtcggggccagccccccgtttcg

SEQ ID NO: 373869 - DNA, 120 bp, Artificial Sequence
  ENSG00000142599_69 (sequence is synthesized)
agaccaagcctgggcaacatagtgagaaccccgtctctacaaaaaaatatttttaaaattagctgggcatggtaactgacacatacctgtagtctgacctacttgggaggccgagccagg

SEQ ID NO: 373870 - DNA, 120 bp, Artificial Sequence
  ENSG00000142599_70 (sequence is synthesized)
aggatcatttgagcccggaagctccacgttacagtgaactgtgatcataccactgtagcctaggtggcagagcaagaccctgtctctaaaaataataataaataataataaaagtgaaat

SEQ ID NO: 373871 - DNA, 120 bp, Artificial Sequence
  ENSG00000142599_71 (sequence is synthesized)
ctaacagcacttgttgaggtttctccttcatagcatctcaaatatcacaaacgaggatgaaaaggactctatttcgggggacatactgcatgggggtggggggagcagaagtctcagcct

SEQ ID NO: 373872 - DNA, 120 bp, Artificial Sequence
  ENSG00000142599_72 (sequence is synthesized)
gggttagcagtaatctgagcatttctttttgtaaaattttagagaaatactttggaactcaaactcccctctgcatgcagcccattgtatccagctgtgtatgtaaatgagctattagta

SEQ ID NO: 373873 - DNA, 120 bp, Artificial Sequence
  ENSG00000142599_73 (sequence is synthesized)
tgtttgtattccttataaatatacagatctaatctgtttgtgtgtgtaatttacacacagctgtgttcatgctcccgtattaccaatattgtcagcaagagtgaggtatcatgggagcgc

SEQ ID NO: 373874 - DNA, 120 bp, Artificial Sequence
  ENSG00000142599_74 (sequence is synthesized)
tattgttccaaacaaaagccagcagcgtagccttgtggtggggcccattaccagcccctgatcttgggaccctcccttgggggactctcttgaaagtcacagccattctgcatggggata

SEQ ID NO: 373875 - DNA, 120 bp, Artificial Sequence
  ENSG00000142599_75 (sequence is synthesized)
gccatcctgcatggggtaggcgggagaccagagtgcctgtaatagaaaaaaaaaacaatgatcacctgttagacagggatctgcattatgactgaggtttggcttttgtcattgaaatgc

SEQ ID NO: 373876 - DNA, 120 bp, Artificial Sequence
  ENSG00000142599_76 (sequence is synthesized)
ttcctccacccccaccctggactacatttcctaaaggggtcattgattttcctttcttctttgagatcattctttaaatgaaccgagtcaaatgaggaacccagtcccatgttgtattgt

SEQ ID NO: 373877 - DNA, 120 bp, Artificial Sequence
  ENSG00000142599_77 (sequence is synthesized)
caagaaggggaaacaaaatccaggagcccctcctgtatcaggagctgacggaaggccctggtgctggtcgaggtcttcagtttcccttgtttgggaagtggggcagatcttaagaacttt

SEQ ID NO: 373878 - DNA, 120 bp, Artificial Sequence
  ENSG00000142599_78 (sequence is synthesized)
ggcatttggtcgaattcttctagaagacaagttttatgtaatttgaaataacggccctatgtggttttattttaggaatttatgatatcgttgcccatgattctaacagtatagttattt

SEQ ID NO: 373879 - DNA, 120 bp, Artificial Sequence
  ENSG00000142599_79 (sequence is synthesized)
tgcctccctaatagaaaacttggagtgctttggatgtttcagtattttacaaaaaaagaagttaggattattctagacctgtgctttccaatgtggtaaccactggtctcttgtggctgt

SEQ ID NO: 373880 - DNA, 120 bp, Artificial Sequence
  ENSG00000142599_80 (sequence is synthesized)
tgagcatctgcaatgtgctggcccaagtgtagatgcacggtcagtgtaaaatacacactgatttcaaagactgagcaggaagaaaaagaatgtaaaatatttcattactaacttttatat

SEQ ID NO: 373881 - DNA, 120 bp, Artificial Sequence
  ENSG00000142599_81 (sequence is synthesized)
tggattaagcggcaggaattctgattactgaggtggagtgtgccagtagttgaggtcctcatctcatacctgaactgtgtcagcagcctctttaactggtctgtccctaatctacactta

SEQ ID NO: 373882 - DNA, 120 bp, Artificial Sequence
  ENSG00000142599_82 (sequence is synthesized)
ggccacactgccactggcacagtcctcatccagtcttttcatggaaagctccagcttcagcctttctgccagcctacaattaggaactcttccgtgcggcctgaagggctctctgcaacc

SEQ ID NO: 373883 - DNA, 120 bp, Artificial Sequence
  ENSG00000142599_83 (sequence is synthesized)
ggatccttgcctgcctctttcgtcttatctgctggcactccattctgcacaccctgtcctccttgcagttcccagaatgttccctgtgccttttcctggctgacttctgctggaagccct

SEQ ID NO: 373884 - DNA, 120 bp, Artificial Sequence
  ENSG00000142599_84 (sequence is synthesized)
gggcggaaggggtgctggttattctctggtgtctcggagtggcttttaatgacggacggtggggcaggcccgctggctttcgtgttcccggtgggcttctgtgatactggtgccttccgg

SEQ ID NO: 373885 - DNA, 120 bp, Artificial Sequence
  ENSG00000142599_85 (sequence is synthesized)
gagccggagcccagtgacaggcgacggcctcttgccgccccggaccccgggcgcttacctgtggctgctggggtcggccgcccgggaccaggctgggagccccgagaaacgcttcgttaa

SEQ ID NO: 373886 - DNA, 120 bp, Artificial Sequence
  ENSG00000142599_86 (sequence is synthesized)
aatgtttaatgctgggtctttcaaatgtgtgtcctttacatactttgggtcttatttagcagccagagaatcaagaggtatgctttttcatggtataagtaatttatcccaggtatttat

SEQ ID NO: 373887 - DNA, 120 bp, Artificial Sequence
  ENSG00000142599_87 (sequence is synthesized)
aattgtagcagtatgtgtttggcttatttatctgaaagaaattgaacaccagaatttaataattaaggatttattagttaaaactgagtgttataatgagccagatgctgctgcattgaa

SEQ ID NO: 373888 - DNA, 120 bp, Artificial Sequence
  ENSG00000142599_88 (sequence is synthesized)
acagccattttcattagcatttttaaatagaagagaattgaatttaaatttggagtgtcttgactttgatgagttgacattttaaaatcttttaaaatccgtcaaatagaaggcaaactt

SEQ ID NO: 373889 - DNA, 120 bp, Artificial Sequence
  ENSG00000142599_89 (sequence is synthesized)
aagtggtgagcaggaaccagcatttgccttgtgctctggggcatcgggccaccggcgtctcagtgtgtgacctccctgctgctcagggaaagcagaagcttcagtcatgcagaatggctg

SEQ ID NO: 373890 - DNA, 120 bp, Artificial Sequence
  ENSG00000142599_90 (sequence is synthesized)
tccgtggcagcgccaggcaggaggatggggcccttcagccccttaattgtacagaaagacttgattttattaagattaggcttcatagatgtcgggaaagattgtccaactttcatggaa

SEQ ID NO: 373891 - DNA, 120 bp, Artificial Sequence
  ENSG00000142599_91 (sequence is synthesized)
agaaaggagaaattgatagttactcctaaaaaaagttaatttgaacttgtttttggtgcaagctagcttgtgatacctccctatttaaagacagcatgttaaaacccgtggacatataac

SEQ ID NO: 373892 - DNA, 120 bp, Artificial Sequence
  ENSG00000142599_92 (sequence is synthesized)
ctaaagtagggttggtgacttgtcttttttttaatcataattattttagagaagggggttttgccgtgttgctcaggctggttttgaactcctgggctccatcagtcctcttgccccagc

SEQ ID NO: 373893 - DNA, 120 bp, Artificial Sequence
  ENSG00000142599_93 (sequence is synthesized)
ttcttaagtagctgggactgtaggcatgctctaccatgcttggcttggtgacttgtttttatagggcttgtaagacccctgacctccttaaaggacattgattacaagcgggaagcagag

SEQ ID NO: 373894 - DNA, 120 bp, Artificial Sequence
  ENSG00000142599_94 (sequence is synthesized)
agttgatgaaataaatatgctggattttacatactgattgtattgctgtggcctgttgaaggaagtggggggagagaaatgtgcccacagatacagccttgcaaacccatggattcccat

SEQ ID NO: 373895 - DNA, 120 bp, Artificial Sequence
  ENSG00000142599_95 (sequence is synthesized)
ccagcagacagttttaatgaagctacatctccatcttgtgacttgtaaaaggcattgctgtaaacgacttacggatttcttgtgcttttgcaaatacagtcttcagtatgaatgttaccg

SEQ ID NO: 373896 - DNA, 120 bp, Artificial Sequence
  ENSG00000142599_96 (sequence is synthesized)
cttgacatttgcctttcaggtcgaatgaaatttaaatgaaggctggcactaatacacctattgattgcaagttcctctcctgtattttaaaatatgctaagaaagaatgtttagaaattg

SEQ ID NO: 373897 - DNA, 120 bp, Artificial Sequence
  ENSG00000142599_97 (sequence is synthesized)
gtcatggatgatccattcagcccctgcagtctagagggcaagacagccattcaaagaaataactacaaaaaataaatataaaatcctgactgtgatatgggtggaaggagaggaggctga

SEQ ID NO: 373898 - DNA, 120 bp, Artificial Sequence
  ENSG00000142599_98 (sequence is synthesized)
ggctcacagggactcagagccagagtgaagccagcccagagctctgggcaaagctcggtgagatgaatggagctgtcactggataaagggagattcccggacagcacatccttgtcaaca

SEQ ID NO: 373899 - DNA, 120 bp, Artificial Sequence
  ENSG00000142599_99 (sequence is synthesized)
ctctctcctgtgtcaccgcagatgctgggacgaggcacagcagaggccatgggacctggtcaaagcgagacttcttccttggcccattttgatttcttttttgttgtcgtcgttgagaca

SEQ ID NO: 373900 - DNA, 68 bp, Artificial Sequence
  ENSG00000142599_100 (sequence is synthesized)
ggcccattttgatttcttttttgttgtcgtcgttgagacagagtctctttacatcctggattcaagtg

SEQ ID NO: 373901 - DNA, 120 bp, Artificial Sequence
  ENSG00000142599_101 (sequence is synthesized)
aggcatgagccactgcgcccggcctcccactttgatttctgaaccttttgggtaacatctccttccctcacatttcttgtgtgttgaggtcttttgttcaggctttcagtggatgaaagg

SEQ ID NO: 373902 - DNA, 120 bp, Artificial Sequence
  ENSG00000142599_102 (sequence is synthesized)
gtggatgaaaggacagaggaggaaacagctgtgggaagagcagctgctgtgcctccctgcctctctgcttggccacagctcccctccctctctggctgccctagcactgaactctgatct

SEQ ID NO: 373903 - DNA, 120 bp, Artificial Sequence
  ENSG00000142599_103 (sequence is synthesized)
tcagcagtgagacctagtacctgcctccgcctcactgggaagcaaagccgcagagcaggtgcagctgtgtgtggcatggccagccacaagccagaaaaaccagcaaaccagggccgggaa

SEQ ID NO: 373904 - DNA, 120 bp, Artificial Sequence
  ENSG00000142599_104 (sequence is synthesized)
caatacttcctgggaccagccccggggaccactttggaaatgagcatggcagaggcagccacagggaattttaactaggaaatactgaagtcatgaggagttggcagaagccgcccaagc

SEQ ID NO: 373905 - DNA, 120 bp, Artificial Sequence
  ENSG00000142599_105 (sequence is synthesized)
tgctcagtcataagctgcggaacaaccggagaggctgtgagaagccacatgcaagccgcaattacgagggaggtgcaaatagaagaaggctgtgaagtcaagaaaagccacgtggtgcag

SEQ ID NO: 373906 - DNA, 120 bp, Artificial Sequence
  ENSG00000142599_106 (sequence is synthesized)
ggagtcggggctcggtgagtcccctggggccatggggctcctggcaacttcttcagtttcctgggatgtgtgggggcttgagcctcccagggggaggaagcgaaagtcttgtttaccaga

SEQ ID NO: 373907 - DNA, 120 bp, Artificial Sequence
  ENSG00000142599_107 (sequence is synthesized)
caaagtcctggaggggagctgctttgcccgaggcggtagcttgcctgtgggctgggaagagttctctgttctctccttcgaggggccccagggtggcatcctgctctgggttttgtagca

SEQ ID NO: 373908 - DNA, 120 bp, Artificial Sequence
  ENSG00000142599_108 (sequence is synthesized)
agctcttagcttctggctcagtgcaggctctccaaggcccctcttgctctccaaggctgctgcttgtggtgtcacttccattgtatcaaatctctgctattttaaacttgcaggctcttt

SEQ ID NO: 373909 - DNA, 120 bp, Artificial Sequence
  ENSG00000142599_109 (sequence is synthesized)
cggccgctcaggcctccttttgttttagcaagtgcacttcactccccgggcccccacctgcccgcctgcgccgcccctttccgcgggtccggagttggcggggccctgcgccggaggagg

SEQ ID NO: 373910 - DNA, 120 bp, Artificial Sequence
  ENSG00000142599_110 (sequence is synthesized)
gagccggagcccagtgacaggcgacggcctcttgccgccccggaccccgggcgcttacctgtggctgctggggtcggccgcccgggaccaggctgggagccccgagggttcccttctgga

SEQ ID NO: 373911 - DNA, 120 bp, Artificial Sequence
  ENSG00000142606_0 (sequence is synthesized)
aggcagcctcaactcagccccaagccactgctctcccatcccagtccctggaaatccacccacttggcccagctcaccccaactccaacccactgggacccagtctccaggggcctgact

SEQ ID NO: 373912 - DNA, 120 bp, Artificial Sequence
  ENSG00000142606_1 (sequence is synthesized)
gtgggcggcagccactcctgagtgagcaaaggttcctccgcggtgctctcccgtccagagccctgctgatggggaagtccgaaggcccagtggggatggtggagagcgccggccgtgcag

SEQ ID NO: 373913 - DNA, 120 bp, Artificial Sequence
  ENSG00000142606_2 (sequence is synthesized)
ggcagaagcgcccggggttcctggagggggggctgctgctgctgctgctgctggtgaccgctgccctggtggccttgggtgtcctctacgccgaccgcagagggaagcagctgccacgcc

SEQ ID NO: 373914 - DNA, 120 bp, Artificial Sequence
  ENSG00000142606_3 (sequence is synthesized)
ttgctagccggctgtgcttcttacaggaggagaggacctttgtaaaacgaaaaccccgagggatcccagaggcccaagaggtgagcgaggtctgcaccacccctggctgcgtgatagcag

SEQ ID NO: 373915 - DNA, 120 bp, Artificial Sequence
  ENSG00000142606_4 (sequence is synthesized)
ctgccaggatcctccagaacatggacccgaccacggaaccgtgtgacgacttctaccagtttgcatgcggaggctggctgcggcgccacgtgatccctgagaccaactcaagatacagca

SEQ ID NO: 373916 - DNA, 120 bp, Artificial Sequence
  ENSG00000142606_5 (sequence is synthesized)
tctttgacgtcctccgcgacgagctggaggtcatcctcaaagcggtgctggagaattcgactgccaaggaccggccggctgtggagaaggccaggacgctgtaccgctcctgcatgaacc

SEQ ID NO: 373917 - DNA, 120 bp, Artificial Sequence
  ENSG00000142606_6 (sequence is synthesized)
agagtgtgatagagaagcgaggctctcagcccctgctggacatcttggaggtggtgggaggctggccggtggcgatggacaggtggaacgagaccgtaggactcgagtgggagctggagc

SEQ ID NO: 373918 - DNA, 120 bp, Artificial Sequence
  ENSG00000142606_7 (sequence is synthesized)
ggcagctggcgctgatgaactcacagttcaacaggcgcgtcctcatcgacctcttcatctggaacgacgaccagaactccagccggcacatcatctacatagaccagcccaccttgggca

SEQ ID NO: 373919 - DNA, 120 bp, Artificial Sequence
  ENSG00000142606_8 (sequence is synthesized)
tgccctcccgagagtactacttcaacggcggcagcaaccggaaggtgcgggaagcctacctgcagttcatggtgtcagtggccacgttgctgcgggaggatgcaaacctgcccagggaca

SEQ ID NO: 373920 - DNA, 120 bp, Artificial Sequence
  ENSG00000142606_9 (sequence is synthesized)
gctgcctggtgcaggaggacatggtgcaggtgctggagctggagacacagctggccaaggccacggtaccccaggaggagagacacgacgtcatcgccttgtaccaccggatgggactgg

SEQ ID NO: 373921 - DNA, 120 bp, Artificial Sequence
  ENSG00000142606_10 (sequence is synthesized)
aggagctgcaaagccagtttggcctgaagggatttaactggactctgttcatacaaactgtgctatcctctgtcaaaatcaagctgctgccagatgaggaagtggtggtctatggcatcc

SEQ ID NO: 373922 - DNA, 120 bp, Artificial Sequence
  ENSG00000142606_11 (sequence is synthesized)
acacgagtgaactaccgcaaggcgctgtttggcacaatggtggaggaggtgcgctggcgtgaatgtgtgggctacgtcaacagcaacatggagaacgccgtgggctccctctacgtcagg

SEQ ID NO: 373923 - DNA, 120 bp, Artificial Sequence
  ENSG00000142606_12 (sequence is synthesized)
gaggcgttccctggagacagcaagagcatggtcagagaactcattgacaaggtgcggacagtgtttgtggagacgctggacgagctgggctggatggacgaggagtccaagaagaaggcg

SEQ ID NO: 373924 - DNA, 120 bp, Artificial Sequence
  ENSG00000142606_13 (sequence is synthesized)
caggagaaggccatgagcatccgggagcagatcgggcaccctgactacatcctggaggagatgaacaggcgcctggacgaggagtactccaatctgaacttctcagaggacctgtacttt

SEQ ID NO: 373925 - DNA, 120 bp, Artificial Sequence
  ENSG00000142606_14 (sequence is synthesized)
gagaacagtctgcagaacctcaaggtgggcgcccagcggagcctcaggaagcttcgggaaaaggtggacccaaatctctggatcatcggggcggcggtggtcaatgcgttctactcccca

SEQ ID NO: 373926 - DNA, 120 bp, Artificial Sequence
  ENSG00000142606_15 (sequence is synthesized)
aaccgaaaccagattgtattccctgccgggatcctccagccccccttcttcagcaaggagcagccacaggccttgaactttggaggcattgggatggtgatcgggcacgagatcacgcac

SEQ ID NO: 373927 - DNA, 120 bp, Artificial Sequence
  ENSG00000142606_16 (sequence is synthesized)
ggctttgacgacaatggccggaacttcgacaagaatggcaacatgatggattggtggagtaacttctccacccagcacttccgggagcagtcagagtgcatgatctaccagtacggcaac

SEQ ID NO: 373928 - DNA, 120 bp, Artificial Sequence
  ENSG00000142606_17 (sequence is synthesized)
tactcctgggacctggcagacgaacagaacgtgaacggattcaacacccttggggaaaacattgctgacaacggaggggtgcggcaagcctataaggcctacctcaagtggatggcagag

SEQ ID NO: 373929 - DNA, 120 bp, Artificial Sequence
  ENSG00000142606_18 (sequence is synthesized)
ggtggcaaggaccagcagctgcccggcctggatctcacccatgagcagctcttcttcatcaactatgcccaggtgtggtgcgggtcctaccggcccgagttcgccatccaatccatcaag

SEQ ID NO: 373930 - DNA, 120 bp, Artificial Sequence
  ENSG00000142606_19 (sequence is synthesized)
acagacgtccacagtcccctgaagtacagggtactggggtcgctgcagaacctggccgccttcgcagacacgttccactgtgcccggggcacccccatgcaccccaaggagcgatgccgc

SEQ ID NO: 373931 - DNA, 120 bp, Artificial Sequence
  ENSG00000142606_20 (sequence is synthesized)
gtgtggtagccaaggccctgccgcgctgtgcggcccacgcccacccgctgctcggaggcatctgtgcgaaggtgcagctagcggcgacccagtgtacgtcccgccccggccaaccatgcc

SEQ ID NO: 373932 - DNA, 120 bp, Artificial Sequence
  ENSG00000142606_21 (sequence is synthesized)
aagcctgcctgccaggcctctgcgcctggcctagggtgcagccacctgcctgacacccagggatgagcagtgtccagtgcagtacctggaccggagccccctccacagacacccgcgggg

SEQ ID NO: 373933 - DNA, 120 bp, Artificial Sequence
  ENSG00000142606_22 (sequence is synthesized)
ctcagtgcccccgtcacagctctgtagagacaatcaactgtgtcctgcccaccctccaaggtgcattgtcttccagtatctacagcttcagacttgagctaagtaaatgcttcaaagaaa

SEQ ID NO: 373934 - DNA, 120 bp, Artificial Sequence
  ENSG00000142606_23 (sequence is synthesized)
ggcaactactcctgggacctggcagacgaacagaacgtgagcgctgccaccagcacccaggctgcgggggtaccggagccccagccctggccctgagggagagggaagtcagggccgggg

SEQ ID NO: 373935 - DNA, 120 bp, Artificial Sequence
  ENSG00000142606_24 (sequence is synthesized)
aggtggcagccgcagtcctggtcccaccatccccatgcttccccactcatctctggagggcccactctggggcacctccagggaccagagcccagcatggaaggccccttgggggaaaag

SEQ ID NO: 373936 - DNA, 120 bp, Artificial Sequence
  ENSG00000142606_25 (sequence is synthesized)
catgaggggcagggggcgggagctggacaggatttcaatgctgatgggaggaggggagcacctgctgactcccctcaccccaccctagaaggggcagcctggggatagtggagaccctcc

SEQ ID NO: 373937 - DNA, 120 bp, Artificial Sequence
  ENSG00000142606_26 (sequence is synthesized)
atcccagtccctggaaatccacccacttggcccagctcaccccaactccaacccactgggacccagtctccaggggcctgactgtgggcggcagccactcctgagtgagcaaagctccct

SEQ ID NO: 373938 - DNA, 120 bp, Artificial Sequence
  ENSG00000142606_27 (sequence is synthesized)
gtcctgcctacagcagcagcctgtgcccagccgtgtgtgtcttcaagtgctgcccactgccctgctggctccagaaggtgtcccctccatagtaacagggtcaggggacgaccagagctg

SEQ ID NO: 373939 - DNA, 120 bp, Artificial Sequence
  ENSG00000142606_28 (sequence is synthesized)
gtcaccgcctgtgtgggtacctactgttctggtgtcgcccatcactggcttctgggcttcaacaggaaaggtgggctgggagcccagaagcccaagtggcctccccgacagcgtccctga

SEQ ID NO: 373940 - DNA, 120 bp, Artificial Sequence
  ENSG00000142606_29 (sequence is synthesized)
cctagcgctcaggcccacagctccaagacaaccagcatgagcagcccagggggggggctccactacaggagtcccttgacagcacaggagctgagcctcctgggtccagcttgcgacccc

SEQ ID NO: 373941 - DNA, 120 bp, Artificial Sequence
  ENSG00000142606_30 (sequence is synthesized)
tgtaaattgagggaatcctgacctctgcctcccggtctgtgggatcaagtgtcagaacccctggcagcgccatccctgagcctggcacacaggagatgtgtccactcacagcttattctt

SEQ ID NO: 373942 - DNA, 120 bp, Artificial Sequence
  ENSG00000142609_0 (sequence is synthesized)
gttgccatggagctgcccgccccaaaccacgccgccggcgccgcggagggcaatcgccaaggaccgccgcctgcctgagcagcccggggtgtctgtgcctccggagcccgagaacctggg

SEQ ID NO: 373943 - DNA, 120 bp, Artificial Sequence
  ENSG00000142609_1 (sequence is synthesized)
acccaggccagccagagctaatttctatctcccagcatggaggatgacggcagcctgctccctgaggacgagcttttggccgatgcccttcttttggaagatgaaagagatgaattagag

SEQ ID NO: 373944 - DNA, 120 bp, Artificial Sequence
  ENSG00000142609_2 (sequence is synthesized)
gatccggagtttgacatcaaatgtcttctacaggaagctgaggatgacgtggacccgggacacagcagctcagtgaaagaactagatactgatgctgataaattgaagaagaaaacagct

SEQ ID NO: 373945 - DNA, 120 bp, Artificial Sequence
  ENSG00000142609_3 (sequence is synthesized)
gaggacagaacgcaggcatttcacctgcggcagaacctgagcgccctggataagatgcatgaggagcaagagcttttcactgagaagatgagaggggagctgcgcgcctgtcggcagagg

SEQ ID NO: 373946 - DNA, 120 bp, Artificial Sequence
  ENSG00000142609_4 (sequence is synthesized)
cgggacctgatcgacaagcagcaggaggctgtggcagccgagatcgccacagaggaagaggcgggcaacatggccgctgtgggccgcctccaggccgtgtccagacgcctgtttgcagag

SEQ ID NO: 373947 - DNA, 120 bp, Artificial Sequence
  ENSG00000142609_5 (sequence is synthesized)
ctggagaacgagagagacctgcagtcgaggactgaggccgtgctgaaggagagcgagaacaccatgtggcacatcgagatccaggaggggcgactcgaggccttccggacagctgaccgt

SEQ ID NO: 373948 - DNA, 120 bp, Artificial Sequence
  ENSG00000142609_6 (sequence is synthesized)
gaggaggtggaggccacggggcggcggctccaggtgcgcgcagccgagcagctctgcagagagcaggaggccctggggaaggtggagcggaaccgactgctgaggatcaggaagtccctg

SEQ ID NO: 373949 - DNA, 120 bp, Artificial Sequence
  ENSG00000142609_7 (sequence is synthesized)
aacacccagaaggagctcgggctcaggcaccagaagctgctggaggacgcccggaagaaccacaaggttgccgtgcggttcctgaaggcctccctgggaagaatccgagagcaagagaag

SEQ ID NO: 373950 - DNA, 120 bp, Artificial Sequence
  ENSG00000142609_8 (sequence is synthesized)
aaggaggagatggagtgccacgagtacatgaggcgacgcatggatgcggtggtggcgctgaagggcagcatctccgcgaaccgggacacactgcggaagttccaagcatgggaccgtgcc

SEQ ID NO: 373951 - DNA, 120 bp, Artificial Sequence
  ENSG00000142609_9 (sequence is synthesized)
aaggcagagctggcggagcagagggtccaggctgagaagaaggcgattctggcccagggcagggatgcattcaggcaccttgtccaccagcgccggcgccaggagctggaggcccagaag

SEQ ID NO: 373952 - DNA, 120 bp, Artificial Sequence
  ENSG00000142609_10 (sequence is synthesized)
agggcctttgaggaggagcagaagctcagaaagcaggagatcatcagtcggattctgaaagaggaggctgaggaggaaaagaggaagaaacagcatccccccaccagtgccaggcaccgg

SEQ ID NO: 373953 - DNA, 120 bp, Artificial Sequence
  ENSG00000142609_11 (sequence is synthesized)
ctgaccctgagggacaagacctggaactacatttctgacttttgcaagaagaccacagtcccaaccaacacgtacacactggactacgaggctgctgcaggccccgggccctctcggttg

SEQ ID NO: 373954 - DNA, 120 bp, Artificial Sequence
  ENSG00000142609_12 (sequence is synthesized)
ctggaagtcgtttccagtgagcttatccagggggaccccggggccagctcagaggaggaaacgttagctgagcccgagatctctgggctttggaatgaagactacaagccataccaggtg

SEQ ID NO: 373955 - DNA, 120 bp, Artificial Sequence
  ENSG00000142609_13 (sequence is synthesized)
cccaaggaggacgtggaccgaaagcccgtgggcgggacaaagatggacaaggacatcctggagcgcacggtggagcggctgcggagcagggtggtccacaagcaggtggtgtgggggcgt

SEQ ID NO: 373956 - DNA, 120 bp, Artificial Sequence
  ENSG00000142609_14 (sequence is synthesized)
gagttccaaggacgccccttcaacagcaaaccggagctcctccacttccaggactttgatattggcaaagtgtacaagaaaaagatcacgttggtaaacaccacctacacgatcaactac

SEQ ID NO: 373957 - DNA, 120 bp, Artificial Sequence
  ENSG00000142609_15 (sequence is synthesized)
tgcaagctggtgggcgtggaggagcacctccgggacttcatccacgttgactttgacccccctggccccctgtcagccggaatgtcctgtgaagtgcttgtcaccttcaagccgatgata

SEQ ID NO: 373958 - DNA, 120 bp, Artificial Sequence
  ENSG00000142609_16 (sequence is synthesized)
aacaaggatctagaaggaaatatctcatttttggctcagacgggcgagttttcagttccactgaaatgttcaacaaagaaatgttcgctgtccctcgacaaggagctcattgacttcggc

SEQ ID NO: 373959 - DNA, 120 bp, Artificial Sequence
  ENSG00000142609_17 (sequence is synthesized)
agctacgtggtaggagagaccacgtctcggaccatcacgctgaccaacgttgggggcttgggcacgactttcaagttcctgccagcttcagagccctgtgagatggacgactcccagtct

SEQ ID NO: 373960 - DNA, 120 bp, Artificial Sequence
  ENSG00000142609_18 (sequence is synthesized)
gccctgaaattaagcagtctcctgacctacgaagataaaagcttgtatgacaaagccgccaccagcttctctgagcagcagctagagggcacggagtcctcccaggcggacatgcagagc

SEQ ID NO: 373961 - DNA, 120 bp, Artificial Sequence
  ENSG00000142609_19 (sequence is synthesized)
cggaaggagctggagaagctggacaaggagcaggaggaggagcagcccgcagaaccagagagattaaccacagtgatacctcccagcgaagagcagacggagatcacgctgggggaggta

SEQ ID NO: 373962 - DNA, 120 bp, Artificial Sequence
  ENSG00000142609_20 (sequence is synthesized)
acagaaggggaaattggccccttcagctccatcaaggtgcccatcgtcttcactccggtcgtcccaggcgacgtccaagccaggttcaaagtcacgtttaagaacccccagtgccccacg

SEQ ID NO: 373963 - DNA, 120 bp, Artificial Sequence
  ENSG00000142609_21 (sequence is synthesized)
cggctctaccaggactctgtgctcgtgcacacgcggtcgaaagctgccctgcgcctgaagttcgaggtgtgcaaggagctgagggcccacctggagctcctgcccaagacaggctatatc

SEQ ID NO: 373964 - DNA, 120 bp, Artificial Sequence
  ENSG00000142609_22 (sequence is synthesized)
caggcacagtcgtcctactccgtgcagctcaagttcctgccgcgacactccctcccggaggacgcagggaggtattttgacaaggagacccgagtcctggaggccccgatgaccatatgg

SEQ ID NO: 373965 - DNA, 120 bp, Artificial Sequence
  ENSG00000142609_23 (sequence is synthesized)
gttgccgaccagaacaagccagtgggattcaccgtgcatgccattgtcaccacctcggacctggagctcagtccctcggaggtggattttggctactgcaccatctatgaggccatcagg

SEQ ID NO: 373966 - DNA, 120 bp, Artificial Sequence
  ENSG00000142609_24 (sequence is synthesized)
acggaaatcagcctccacaaccactcgctcctgccccaggagttcgggttcgtcaggcttcccaagtttgtggacgtccaacccaacgatgggtttgggacgatcctgcccctggaaacg

SEQ ID NO: 373967 - DNA, 120 bp, Artificial Sequence
  ENSG00000142609_25 (sequence is synthesized)
ctgcagttctgtgtgatcttccagcccaccaaggccgaggaacacagattccaactgacctgcaagtctgagatcaaccggtgcttcaagctgtcttgccgggctgtaggcgtccaccca

SEQ ID NO: 373968 - DNA, 120 bp, Artificial Sequence
  ENSG00000142609_26 (sequence is synthesized)
cccctggagctgtcccactaccagatcaagtttgccgccacggccctatacgacacctccgtggctacagtgtacgtcatcaactctcacctgagcatgagctcaccgacccactccaag

SEQ ID NO: 373969 - DNA, 120 bp, Artificial Sequence
  ENSG00000142609_27 (sequence is synthesized)
ccccgcattggctcagaggacgcctctcccatggggcccacgtctttcgagttcctgctgcccccagactcgcctatcaccatctcgccctcagtggggaccgtgtggccaggaaagagg

SEQ ID NO: 373970 - DNA, 120 bp, Artificial Sequence
  ENSG00000142609_28 (sequence is synthesized)
tgcctggtccaggtggccttccggccagtgctgcccgagaagctgatccgccaggaagccctcccactcctgaacaaagaaatggagaccaaatctttccgaaagaatatggccccccag

SEQ ID NO: 373971 - DNA, 120 bp, Artificial Sequence
  ENSG00000142609_29 (sequence is synthesized)
aggaaggacctgcatggactgtcattctccgttcttcgagcacagaaccgcgacaagctgttcaaagtctctgtcccccacgtcctggagatgcggaagcgggagctgaggcccagttcc

SEQ ID NO: 373972 - DNA, 120 bp, Artificial Sequence
  ENSG00000142609_30 (sequence is synthesized)
gacgagtaccaggccgcccgagccaccctgctcagagcgttccaggcgaagtttgacacatttgtagttccctgtgttgttgccagtggcgacatcaaagacaggaaggggtcagaaccc

SEQ ID NO: 373973 - DNA, 120 bp, Artificial Sequence
  ENSG00000142609_31 (sequence is synthesized)
ctgagcttcagcccccacaacaccctgtacctggagctgtggtgcccgacggtggcaccatctgttgtggtgacgtcccataaaggcaagaccatctttaacttcggcgacgtcgctgtg

SEQ ID NO: 373974 - DNA, 120 bp, Artificial Sequence
  ENSG00000142609_32 (sequence is synthesized)
gggcaccgcagtatcaagaagatctccatccagaacgtctctcccgaggatctggccctggacttctccctgctgaaccccaacggcccctttgtcctgctgaaccactccagcctgctg

SEQ ID NO: 373975 - DNA, 120 bp, Artificial Sequence
  ENSG00000142609_33 (sequence is synthesized)
cgtgcaggtgggacccaggtcctggtgctttccttctctccccacgagagcatcctggctcaagaaacactggacatcatcaccaagagaggcacgctcaccctcaccctcatgggcact

SEQ ID NO: 373976 - DNA, 120 bp, Artificial Sequence
  ENSG00000142609_34 (sequence is synthesized)
ggcgtggcgtccatgatcacgtgctccattgaaggcagcgtcctcaacatgggctatgtgattgccggagagtctgtgtcctcaggcttcaagctgcagaacaactctctgctccccatc

SEQ ID NO: 373977 - DNA, 120 bp, Artificial Sequence
  ENSG00000142609_35 (sequence is synthesized)
aagttctccatgcacctggacagcctctccagcacccggggccggggccagcagcagctgccgcagttcctcagctcgccctcccagaggacggaggtggtcgggacgcagaatctcaac

SEQ ID NO: 373978 - DNA, 120 bp, Artificial Sequence
  ENSG00000142609_36 (sequence is synthesized)
ggtcagagcgtgttcagcgtggcccccgtcaagggcgtcatggaccccgggaagacacaagacttcactgtcaccttcagccccgaccacgaaagcctctacttctccgacaagctccag

SEQ ID NO: 373979 - DNA, 120 bp, Artificial Sequence
  ENSG00000142609_37 (sequence is synthesized)
gtggtgctctttgaaaagaaaatctcccaccagatcctgctgaagggtgccgcctgtcagcacatgatgttcgtggagggcggcgaccccctggacgtgcccgtggagtctctgacagcg

SEQ ID NO: 373980 - DNA, 120 bp, Artificial Sequence
  ENSG00000142609_38 (sequence is synthesized)
atccctgtatttgaccccaggcacagagaggaagctgaggagctgaggcccatcctggtgaccctggactacatccagtttgacacagacacgccagccccacctgccacccgagagctg

SEQ ID NO: 373981 - DNA, 120 bp, Artificial Sequence
  ENSG00000142609_39 (sequence is synthesized)
caggtgggctgtatccggaccacccagccatctccaaagaagccagaccacccactcatggtgtcggccctgctgcagctaaggggggatgtgaaggagacctacaaggtcatctttgta

SEQ ID NO: 373982 - DNA, 120 bp, Artificial Sequence
  ENSG00000142609_40 (sequence is synthesized)
gcccaggtgttgactggcccctaagcctctgcacagagcaccctcgggccctcctgtccaccctcaaagccctccccaggctgagggccaggtcatactaccctagagcctgggacctgg

SEQ ID NO: 373983 - DNA, 120 bp, Artificial Sequence
  ENSG00000142609_41 (sequence is synthesized)
ccatcctctgccagattccaataggccgccctccacatggcgccacggccacttcctgctgccctggaccccgcaagcccagggacatccaagagcacccctcctgagaccccagactca

SEQ ID NO: 373984 - DNA, 120 bp, Artificial Sequence
  ENSG00000142609_42 (sequence is synthesized)
gaagcagcgagaaggccaggccagccctcagccatcctagccagaccccctcagagcccccagcccccaggagagccctccacagcctgtcaataaattttttgtaggccaacacatgca

SEQ ID NO: 373985 - DNA, 120 bp, Artificial Sequence
  ENSG00000142609_43 (sequence is synthesized)
gactgtgctctgggtggtgaggcgagcgtctgccctccgcagcactaacccccgtgtgctatgggtcacgtcctgcagctttgacccccctggccccctgtcagccggaatgtcctgtga

SEQ ID NO: 373986 - DNA, 120 bp, Artificial Sequence
  ENSG00000142609_44 (sequence is synthesized)
ctggagaacgagagagacctgcagtcgaggactgaggccgtgctgaaggagagcgagtgagtcggtgtgcagccgggactggcagcaggcaggccccagaacgaacagcgagctgggttt

SEQ ID NO: 373987 - DNA, 120 bp, Artificial Sequence
  ENSG00000142609_45 (sequence is synthesized)
tcaaagcccaggagagagacagctgcctcgtcctaaatgctttcctgtggagttgggttggatgcgtcgagttgccttcggcgagtttggcaagaaggggtttgggaaggtgcacgaatt

SEQ ID NO: 373988 - DNA, 120 bp, Artificial Sequence
  ENSG00000142609_46 (sequence is synthesized)
tctcagggcgactgaggggaccctgagctgacctcaagtaggactcccgaaccacacagcccccagccccgggagctgcagccaggtccatgacatccacagcactgaccctgcacgtgc

SEQ ID NO: 373989 - DNA, 120 bp, Artificial Sequence
  ENSG00000142609_47 (sequence is synthesized)
ctcatgcaacctaacatctcagcctcactccactgaagacaccactgagctttgacccagtctctgacctgcactcactgtgatgtagtcacgacccagtctctgacccacacttgctgt

SEQ ID NO: 373990 - DNA, 120 bp, Artificial Sequence
  ENSG00000142609_48 (sequence is synthesized)
gacgtagtttctggcccagtctctgacccacgctcgctgtgatacagtcacgacccaagctggtgtccagtgccctgcactgtggccccacctgtgtgggcagtgggaggggtgcagggg

SEQ ID NO: 373991 - DNA, 120 bp, Artificial Sequence
  ENSG00000142609_49 (sequence is synthesized)
aggacaggacgctgaacccagctgtggctgagcgtggagaacactgtcccctgcgacactcctttgacaactggctctgtcatgcccctctcactgctcagcagcacctgcgccagggtg

SEQ ID NO: 373992 - DNA, 120 bp, Artificial Sequence
  ENSG00000142609_50 (sequence is synthesized)
aggggcttcacagggctaatgaaccccagaaggcctcactttactaggttgatgtgattgtccacttctttaaaaaaaaaaaaaaaaaaagtttttgggctgggcccagtggctcatgcc

SEQ ID NO: 373993 - DNA, 82 bp, Artificial Sequence
  ENSG00000142609_51 (sequence is synthesized)
gaggcaggagaatcgctggagcccacacactccagcctgggcgacagagtgagcaagactctgtcttttaaaaaaaaaaaaa

SEQ ID NO: 373994 - DNA, 78 bp, Artificial Sequence
  ENSG00000142609_52 (sequence is synthesized)
gtgagccaagattgcgccactgccacactccagcctgggcgacagagtgagcaagactctgtcttttaaaaaaaaaaa

SEQ ID NO: 373995 - DNA, 85 bp, Artificial Sequence
  ENSG00000142609_53 (sequence is synthesized)
actaaaaacattcagcggagagtggtggcgcacgcctgtggtcccagtgacttgggaggctgaggccacaagcctgggtgacaga

SEQ ID NO: 373996 - DNA, 120 bp, Artificial Sequence
  ENSG00000142609_54 (sequence is synthesized)
gacgaaaatgtacattcacgttgacgctaaccgaagacttgaaggcacctccagcattggcccagcaggcccagcacgggcggagccgcacagggcggggaagaggctctgcggtgcccc

SEQ ID NO: 373997 - DNA, 120 bp, Artificial Sequence
  ENSG00000142609_55 (sequence is synthesized)
ctggaggggccgggctgcggggggcttctgtctagctctgcagctgtggctgttgttagacgcgcaccagcggggagaggtgccgagaaacgggcgggccctgccctccccatgcctcct

SEQ ID NO: 373998 - DNA, 120 bp, Artificial Sequence
  ENSG00000142609_56 (sequence is synthesized)
gccctgcagcccgccgccatcgggaatcgcttgcgtctcctccttgcttctcttgatcgttttcccacatacgcatcgagatccagaaacctccgtcctcctcctgtctgtcttcgcgtg

SEQ ID NO: 373999 - DNA, 120 bp, Artificial Sequence
  ENSG00000142609_57 (sequence is synthesized)
cggaccacccagccatctccaaagaagaccgttgagttcagcatagacagcgtcgcatccctgcagcacaagggtttctctattgagccctccaggggctccgtggagcgcggccagacg

SEQ ID NO: 374000 - DNA, 120 bp, Artificial Sequence
  ENSG00000142609_58 (sequence is synthesized)
cacacagcctcaatccacgggtggggagcaaagccaccaccccccacccagccccccgggtgcagaatgagccctgggaaagctctaatgggtgcctgtggccccgggaaggaacatggc

SEQ ID NO: 374001 - DNA, 120 bp, Artificial Sequence
  ENSG00000142609_59 (sequence is synthesized)
tctctagccaggggccaaaggcacctgccccaacccctagcctccagccaccagctgacgaggacctgaagtgagtgatgagacccccacaggagccagagaagggtggaaaagccagtt

SEQ ID NO: 374002 - DNA, 120 bp, Artificial Sequence
  ENSG00000142609_60 (sequence is synthesized)
tgtcagacacaactgggacagccacagcttgggaccctgggaccctgggaccctgaggcagagccgcaggggtccggcctgggccgatggtgggtgggggcaaggcgggagcgcaagcct

SEQ ID NO: 374003 - DNA, 120 bp, Artificial Sequence
  ENSG00000142609_61 (sequence is synthesized)
gggtctgtgtgcccctccgcactggctactgtcttcctcgggcgccggtcggcttttgcgtccccacattcaatcccaactgcggctcccgcggttcccgcactggccgcagaggagcca

SEQ ID NO: 374004 - DNA, 120 bp, Artificial Sequence
  ENSG00000142609_62 (sequence is synthesized)
aggcccctctggtgggacccactgtggcccctgtagagtcccctccctacagattgcccggaatgacccatgtggctggaaggactgatgccttcagacacagctggatccaggtgctgc

SEQ ID NO: 374005 - DNA, 120 bp, Artificial Sequence
  ENSG00000142609_63 (sequence is synthesized)
caggaggaggagcagcccgcaggtgagccaggctgccaggccaagccagggtgggcgggcggtgagggcctcagggcagcattccagggggctgaggggcccaggggagggctggaaagt

SEQ ID NO: 374006 - DNA, 120 bp, Artificial Sequence
  ENSG00000142609_64 (sequence is synthesized)
gctgggccggttctccacagcctgtgtgagccgcacttccggtgtgagccgcacttccggtgtgagccgcacttccggtgtgagccgcacttcctgtcctcaccactgcgtggcgtttcc

SEQ ID NO: 374007 - DNA, 120 bp, Artificial Sequence
  ENSG00000142609_65 (sequence is synthesized)
tttcctgagagagcctcgggttctagatccgtccttctgccagtgcacacttgggagcgttcgtggtacacactgttgcgaaggccgttctgcactgccccttggcctgtgtgtgagttc

SEQ ID NO: 374008 - DNA, 120 bp, Artificial Sequence
  ENSG00000142609_66 (sequence is synthesized)
ccacagggcacctggctggggctcatgcctgcatcacagggcatagccagcctcactggcatcagctaataccaaagtgagttctttttatgttgagacagggtctctgtcgcctaggct

SEQ ID NO: 374009 - DNA, 88 bp, Artificial Sequence
  ENSG00000142609_67 (sequence is synthesized)
tcctgagtagctggaactacaggcacgcaccaccgcacctggctagtttttgtatttttttgtagacacagggtttcgccatgtttcc

SEQ ID NO: 374010 - DNA, 120 bp, Artificial Sequence
  ENSG00000142609_68 (sequence is synthesized)
tttgtatttttttgtagacacagggtttcgccatgtttcccaggctggtgtggaactcctgaactcaggctgtctgcccacctcagcctcccaaggtgctggattacaggcatgagccac

SEQ ID NO: 374011 - DNA, 120 bp, Artificial Sequence
  ENSG00000142609_69 (sequence is synthesized)
ctcgcctagcccaccgagttctttttcaaagtggttgtgcaagtttacactcccaccaacagtgtacaagactgtgctgtccagcgtggctgtcactgccacatctggctatttaaactt

SEQ ID NO: 374012 - DNA, 120 bp, Artificial Sequence
  ENSG00000142609_70 (sequence is synthesized)
aaattgatccaaattaaataatagtgaaaattcaggtcctcctccacaagggccacatttcacatgctccatagcgacctgtgggcaacggctgccctactggacagcccagaagcccag

SEQ ID NO: 374013 - DNA, 120 bp, Artificial Sequence
  ENSG00000142609_71 (sequence is synthesized)
ctctgcctggtcacagagggtcctacggggccacactgggcttgagggccttgcttcacatccgcaggagcacgaggtcacacggcccggggctgcttgtctggggggcctgcaccacgg

SEQ ID NO: 374014 - DNA, 120 bp, Artificial Sequence
  ENSG00000142609_72 (sequence is synthesized)
tctgctgttgagatgttgctttttggtttcccagatcaccagtgagattgcgtgtctttccctgggcccatttacaagttgtatcttctttggtgtgacatctctgtttaaggctatccc

SEQ ID NO: 374015 - DNA, 120 bp, Artificial Sequence
  ENSG00000142609_73 (sequence is synthesized)
ttgttcttctgtgggattgtctgtcttcttctcattcattcataggagctcttcatgcacccagattccagccctcctccctgaggaatgttgcaggtgctgcctccgagtctgtggctg

SEQ ID NO: 374016 - DNA, 120 bp, Artificial Sequence
  ENSG00000142609_74 (sequence is synthesized)
ggccttcctctccctttatgacgtcttttctcaaatcaaagttcttcagtccagtctttgcatatttaccagtcatttctattggaatttgttttttatgatttttaggcaatttttttc

SEQ ID NO: 374017 - DNA, 120 bp, Artificial Sequence
  ENSG00000142609_75 (sequence is synthesized)
tcctccagggtcataaagacataggacatcgcttttgtgttgaggtgtatgatccacctcaaattcactcctgcttgtggtggaagtcagggctgaggctcatttcccctggtgcgtgtt

SEQ ID NO: 374018 - DNA, 120 bp, Artificial Sequence
  ENSG00000142609_76 (sequence is synthesized)
tcccctggtgcgtgtttgtgtattccacggcacaagtggactctgctatcccattcgatccattcgttgtccgtgtcaaaaatcaattgaccatccaggcacagtggctcatgcctgtaa

SEQ ID NO: 374019 - DNA, 120 bp, Artificial Sequence
  ENSG00000142611_0 (sequence is synthesized)
agtgtgtggctgcttctggactcaaggaggaggagagagattccgcgagccgacaccatgcgatccaaggcgagggcgaggaagctagccaaaagtgacggtgacgttgtaaataatatg

SEQ ID NO: 374020 - DNA, 120 bp, Artificial Sequence
  ENSG00000142611_1 (sequence is synthesized)
tatgagcccaaccgggacctgctggccagccacagcgcggaggacgaggccgaggacagtgccatgtcgcccatccccgtggggccaccgtcccccttccccaccagcgaggacttcacc

SEQ ID NO: 374021 - DNA, 120 bp, Artificial Sequence
  ENSG00000142611_2 (sequence is synthesized)
cccaaggagggctcgccgtacgaggcccctgtctacattcctgaagacattccgatcccagcagacttcgagctccgagagtcctccatcccaggggctggcctgggggtctgggccaag

SEQ ID NO: 374022 - DNA, 120 bp, Artificial Sequence
  ENSG00000142611_3 (sequence is synthesized)
aggaagatggaagccggggagaggctgggcccctgcgtggtggtgccccgggcggcggcaaaggagacagacttcggatgggagcaaatactgacggacgtggaagtgtcgccccaggaa

SEQ ID NO: 374023 - DNA, 120 bp, Artificial Sequence
  ENSG00000142611_4 (sequence is synthesized)
ggctgcatcacaaagatctccgaagacctgggcagtgagaagttctgcgtggatgcaaatcaggcgggggctggcagctggctcaagtacatccgtgtggcgtgctcctgcgatgaccag

SEQ ID NO: 374024 - DNA, 120 bp, Artificial Sequence
  ENSG00000142611_5 (sequence is synthesized)
aacctcaccatgtgtcagatcagtgagcagatttactataaagtcattaaggacattgagccaggtgaggagctgctggtgcacgtgaaggaaggcgtctaccccctgggcacagtgccg

SEQ ID NO: 374025 - DNA, 120 bp, Artificial Sequence
  ENSG00000142611_6 (sequence is synthesized)
cccggcctggacgaggagcccacgttccgctgtgacgagtgtgacgaactcttccagtccaagctggacctgcggcgccataagaagtacacgtgtggctcagtgggggctgcgctctac

SEQ ID NO: 374026 - DNA, 120 bp, Artificial Sequence
  ENSG00000142611_7 (sequence is synthesized)
gagggcctggctgaggagctcaagcccgagggccttggcggtggcagcggccaagcccacgagtgcaaggactgcgagcggatgttccccaacaagtacagcctggagcagcacatggtc

SEQ ID NO: 374027 - DNA, 120 bp, Artificial Sequence
  ENSG00000142611_8 (sequence is synthesized)
atccacacggaggagcgcgagtacaaatgcgaccagtgtcccaaggccttcaactggaagtccaacctcatccgccaccagatgtcccacgacagcggcaaacgcttcgaatgtgaaaac

SEQ ID NO: 374028 - DNA, 120 bp, Artificial Sequence
  ENSG00000142611_9 (sequence is synthesized)
tgcgtgaaggtgttcacggaccccagcaaccttcagcggcacatccgctcgcagcacgtgggcgctcgggcccacgcctgccccgactgcgggaagaccttcgccacgtcctccggcctc

SEQ ID NO: 374029 - DNA, 120 bp, Artificial Sequence
  ENSG00000142611_10 (sequence is synthesized)
aagcagcacaagcatatccacagcacggtgaagcctttcatatgtgaggtctgccacaagtcctacacgcagttctccaacctgtgccggcacaagcggatgcacgccgactgccgcacg

SEQ ID NO: 374030 - DNA, 120 bp, Artificial Sequence
  ENSG00000142611_11 (sequence is synthesized)
cagatcaagtgcaaggactgtggccagatgttcagcactacctcctccctcaacaagcaccggcgcttctgcgagggcaagaaccattacacgccgggcggcatctttgccccgggcctg

SEQ ID NO: 374031 - DNA, 120 bp, Artificial Sequence
  ENSG00000142611_12 (sequence is synthesized)
cccttgacccccagccccatgatggacaaggcaaaaccctcccccagcctcaatcacgccagcctgggcttcaacgagtactttccctccaggccgcacccggggagcctgcccttctcc

SEQ ID NO: 374032 - DNA, 120 bp, Artificial Sequence
  ENSG00000142611_13 (sequence is synthesized)
acggcgcctcccacgttccccgcactcacccccggcttcccgggcatcttccctccatccttgtacccccggccgcctctgctacctcccacatcgctgctcaagagccccctgaaccac

SEQ ID NO: 374033 - DNA, 120 bp, Artificial Sequence
  ENSG00000142611_14 (sequence is synthesized)
acccaggacgccaagctccccagtcccctggggaacccagccctgcccctggtctccgccgtcagcaacagcagccagggcacgacggcagctgcggggcccgaggagaagttcgagagc

SEQ ID NO: 374034 - DNA, 120 bp, Artificial Sequence
  ENSG00000142611_15 (sequence is synthesized)
cgcctggaggactcctgtgtggagaagctgaagaccaggagcagcgacatgtcggacggcagtgactttgaggacgtcaacaccaccacggggaccgacctggacacgaccacggggacg

SEQ ID NO: 374035 - DNA, 120 bp, Artificial Sequence
  ENSG00000142611_16 (sequence is synthesized)
ggctcggacctggacagcgacgtggacagcgaccctgacaaggacaagggcaagggcaagtccgccgagggccagcccaagtttgggggcggcttggcgcccccgggggccccgaacagc

SEQ ID NO: 374036 - DNA, 120 bp, Artificial Sequence
  ENSG00000142611_17 (sequence is synthesized)
gtggccgaggtgcctgtcttctattcccagcactcattcttcccgccacccgacgagcagctgctgactgcaacgggcgccgccggggactccatcaaggccatcgcatccattgccgag

SEQ ID NO: 374037 - DNA, 120 bp, Artificial Sequence
  ENSG00000142611_18 (sequence is synthesized)
aagtactttggccccggcttcatggggatgcaggagaagaagctgggctcgctcccctaccactcggcgttccccttccagttcctgcccaacttcccccactccctttaccccttcacg

SEQ ID NO: 374038 - DNA, 120 bp, Artificial Sequence
  ENSG00000142611_19 (sequence is synthesized)
gaccgagccctcgcccacaacttgctggtcaaggccgagccaaagtcaccccgggacgccctcaaggtgggcggccccagtgccgagtgcccctttgatctcaccaccaagcccaaagac

SEQ ID NO: 374039 - DNA, 120 bp, Artificial Sequence
  ENSG00000142611_20 (sequence is synthesized)
gtgaagcccatcctgcccatgcccaagggcccctcggcccccgcatccggcgaggagcagccgctggacctgagcatcggcagccgggcccgtgccagccaaaacggcggcgggcgggag

SEQ ID NO: 374040 - DNA, 120 bp, Artificial Sequence
  ENSG00000142611_21 (sequence is synthesized)
ccccgcaagaaccacgtctatggggaacgcaagctgggcgccggcgaggggctgccccaggtgtgcccggcgcggatgccccagcagcccccgctccactacgccaagccctcgcccttc

SEQ ID NO: 374041 - DNA, 120 bp, Artificial Sequence
  ENSG00000142611_22 (sequence is synthesized)
ttcatggaccccatctacagcagggtagaaaagcggaaggtcacagaccccgtgggagccctgaaggagaagtacctgcggccgtccccgctgctcttccacccccagatgtcagccata

SEQ ID NO: 374042 - DNA, 120 bp, Artificial Sequence
  ENSG00000142611_23 (sequence is synthesized)
gagaccatgacagagaagctggagagctttgcagccatgaaggcggactcgggcagctccctgcagcccctcccccaccaccccttcaacttccggtccccacccccaacgctctccgac

SEQ ID NO: 374043 - DNA, 120 bp, Artificial Sequence
  ENSG00000142611_24 (sequence is synthesized)
cccatcctcaggaagggcaaggagcgatacacgtgcaggtactgtgggaagatcttccccagatcagccaatctcaccagacacctgaggacgcacactggggagcagccgtacaggtgt

SEQ ID NO: 374044 - DNA, 120 bp, Artificial Sequence
  ENSG00000142611_25 (sequence is synthesized)
aagtactgcgaccgctccttcagcatctcttcgaacctccagcggcacgtccggaacatccacaacaaggagaagcctttcaagtgccacctgtgcaaccgctgcttcgggcagcagacc

SEQ ID NO: 374045 - DNA, 120 bp, Artificial Sequence
  ENSG00000142611_26 (sequence is synthesized)
aacctggaccggcacctcaagaagcacgagcacgagaacgcaccagtgagccagcaccccggggtcctcacgaaccacctggggaccagcgcgtcctctcccacctcagagtcggacaac

SEQ ID NO: 374046 - DNA, 120 bp, Artificial Sequence
  ENSG00000142611_27 (sequence is synthesized)
cacgcacttttagacgagaaagaagactcttatttctcggaaatcagaaactttattgccaatagtgagatgaaccaagcatcaacgcgaacagagaaacgggcggacatgcagatcgtg

SEQ ID NO: 374047 - DNA, 120 bp, Artificial Sequence
  ENSG00000142611_28 (sequence is synthesized)
gacggcagtgcccagtgtccaggcctagccagtgagaagcaggaggacgtggaggaggaggacgacgatgacctggaggaggacgatgaggacagcctggccgggaagtcgcaggatgac

SEQ ID NO: 374048 - DNA, 120 bp, Artificial Sequence
  ENSG00000142611_29 (sequence is synthesized)
accgtgtcccccgcacccgagccccaggccgcctacgaggatgaggaggatgaggagccagccgcctccctggccgtgggctttgaccacacccgaaggtgtgctgaggaccacgaaggc

SEQ ID NO: 374049 - DNA, 120 bp, Artificial Sequence
  ENSG00000142611_30 (sequence is synthesized)
ggtctgttagctttggagccgatgccgacttttgggaaggggctggacctccgcagagcagctgaggaagcatttgaagttaaagatgtgcttaattccaccttagattctgaggcttta

SEQ ID NO: 374050 - DNA, 120 bp, Artificial Sequence
  ENSG00000142611_31 (sequence is synthesized)
aaacatacactgtgcaggcaggctaagaaccaggcatatgcaatgatgctgtccctttccgaagacactcctctccacaccccctcccagggttctctggacgcttggttgaaggtcact

SEQ ID NO: 374051 - DNA, 120 bp, Artificial Sequence
  ENSG00000142611_32 (sequence is synthesized)
ggagccacgtcggagtctggagcatttcaccccatcaaccacctctgacgggctgggcagccgggggccggtggccagagcgagggcaccagccacgaaggacggaggcgggcggggccc

SEQ ID NO: 374052 - DNA, 120 bp, Artificial Sequence
  ENSG00000142611_33 (sequence is synthesized)
cggagaaccctgtccctgcgtgtggccactcctcagcatcctccccacccaccatggttcattccgacttttccaatggaaactcagatcccaaaagtccctaaagcagtcgtagagtct

SEQ ID NO: 374053 - DNA, 120 bp, Artificial Sequence
  ENSG00000142611_34 (sequence is synthesized)
caccatctccaaggattggtcttgagaacactgttcagtgacggccatgcaggtggccgtccaaagacagccaacggagctgcctcgcagaatcagccagtgggcaggtggacgctctgc

SEQ ID NO: 374054 - DNA, 120 bp, Artificial Sequence
  ENSG00000142611_35 (sequence is synthesized)
tgagacagaagctggtggccactgccgggtgcccgcgtggggtcgcggaagggaatggatagactggtgtgctcaaaagagagagatcactcaaatgatttttataatgaaatgacaaga

SEQ ID NO: 374055 - DNA, 120 bp, Artificial Sequence
  ENSG00000142611_36 (sequence is synthesized)
atagacagtattttttaaaaatcaaaaaatgacttgcaaattgttttttaaaagtaattttgcattgctttgaaatttgagctcatttgcaaacccgagtctgcctgggaacccgcactg

SEQ ID NO: 374056 - DNA, 120 bp, Artificial Sequence
  ENSG00000142611_37 (sequence is synthesized)
tgcctgggtgtattctttatactgtagataatggagaaattttctatctctgtccctatttgtataagccaaggtgatgctgggtgccccgaggcagaacaagaggcgcggggccacacc

SEQ ID NO: 374057 - DNA, 120 bp, Artificial Sequence
  ENSG00000142611_38 (sequence is synthesized)
cgtgaaccatgcagacggccgaagaagtcttaggcagggcgccctgggctgcaggcctgcccgaggctgggatgggaagtgtgcctgccctcgtgtgacatggaattggtgtcaggaccg

SEQ ID NO: 374058 - DNA, 120 bp, Artificial Sequence
  ENSG00000142611_39 (sequence is synthesized)
ccacgtggccttcagaggaatccacaggtccccacccaagatccctcaattatatggggaagtcgagggcctgtggcttggatccgccatgcagagatgtggccgggcacccatcttcct

SEQ ID NO: 374059 - DNA, 120 bp, Artificial Sequence
  ENSG00000142611_40 (sequence is synthesized)
tccctcctctgtccctgcctcggccaccccacgcgggaacccagcgccgtcctctgaaggcagggccttggccacgtcctgggtctcccacctcccacctgaccccagcggctccggtgt

SEQ ID NO: 374060 - DNA, 120 bp, Artificial Sequence
  ENSG00000142611_41 (sequence is synthesized)
cctccacgtggctgccctggggagcaatcccagcggatcgctccgggccaccaagccgcacctgtgcctgagactccggatggacgacacagtcgtcacgtcgctcttcctgcgggttct

SEQ ID NO: 374061 - DNA, 120 bp, Artificial Sequence
  ENSG00000142611_42 (sequence is synthesized)
tggcgagacacagcttgagaacagaagggcgtcgggggaacctgccgcaaggagcagagacagcacagccccccgggcccagccgcctccctctcttgggacgcaacttcttccccactc

SEQ ID NO: 374062 - DNA, 120 bp, Artificial Sequence
  ENSG00000142611_43 (sequence is synthesized)
ggatgggctttaaattattcccataggggccaatttcaaataataatttttttccctgatggaatttaccttaatctgtatataacttgtaattttttctaattcatttcttttcttatt

SEQ ID NO: 374063 - DNA, 120 bp, Artificial Sequence
  ENSG00000142611_44 (sequence is synthesized)
ttatttcctccttaacagtatttttggcattagacattcttattgtgaagaaataatgttaatataagtatctggtgaaggaccaaaaccgtgtgataaggttgtgtgtcgtgtgggagt

SEQ ID NO: 374064 - DNA, 120 bp, Artificial Sequence
  ENSG00000142611_45 (sequence is synthesized)
ggggcgattttttatgtgccaaatacccccgtcccccccatgaatcctgctgtccctgctgccgtttaccagacaatcatatgtttttgttaaatttgcgtttcagttacatttgcattt

SEQ ID NO: 374065 - DNA, 120 bp, Artificial Sequence
  ENSG00000142611_46 (sequence is synthesized)
aagacaagtgttctatttatttcttgtattgtttggaagaaaaaatgatgatagagtcccaaaaagaagagaaaaaaaatgcccaagttgccctttaaaaaaaaagagcgtaaatacaaa

SEQ ID NO: 374066 - DNA, 120 bp, Artificial Sequence
  ENSG00000142611_47 (sequence is synthesized)
caggagtggtgcaagccgccttggtgtgggtttgtgtcacgtgtggacatctcctcaggctttgtgtcacgcgtggacatctcctcaggctgtccccagcggtgacgggaggtgtcctgg

SEQ ID NO: 374067 - DNA, 120 bp, Artificial Sequence
  ENSG00000142611_48 (sequence is synthesized)
ctgctccaggacaaaagacaatcgtctctgtgggtgccgggtggtccaggcttgcactgaagacgtgccacggggaggctcctgcaggaggctcaacccgacggatcacagtgaaaggga

SEQ ID NO: 374068 - DNA, 120 bp, Artificial Sequence
  ENSG00000142611_49 (sequence is synthesized)
ttcctcccacgccagatctgcacaacgaggcaagacaggacccacctgtgcgtgcgctggggccatggggtggccccgccggggcagcgggggagctgcctgcagaagagccagctggcg

SEQ ID NO: 374069 - DNA, 120 bp, Artificial Sequence
  ENSG00000142611_50 (sequence is synthesized)
tgtcgggaaggatccaggatctgcaaacacaactgctcaggccttctcacgcgtttccacaacatcccctgggtcagacccaccaggtaccccgtaggaatttccagtttcccttgatct

SEQ ID NO: 374070 - DNA, 120 bp, Artificial Sequence
  ENSG00000142611_51 (sequence is synthesized)
agatgggattcttataaaaattcaacctcagacataaacaccccatttctgtaaacccaaattatatggtttcttctgcgaaagagtaaggtgtgtgcttttttttttttgcaatatgac

SEQ ID NO: 374071 - DNA, 120 bp, Artificial Sequence
  ENSG00000142611_52 (sequence is synthesized)
cccgtctctctgaagtgggacattcggacggatggagccctcagcgtgtcttttcagcaggagcagaaccgatgagagccgcccttaccgttggtctccggatcccccagtcccatcccg

SEQ ID NO: 374072 - DNA, 120 bp, Artificial Sequence
  ENSG00000142611_53 (sequence is synthesized)
ccgttttcggctgtcttcctaaccgtcctgtcttctcttggcgctctttccttccacctttcccaagagtcctggttgcacgttttaagtcatatattttcgtccccctgaaaatgatgg

SEQ ID NO: 374073 - DNA, 120 bp, Artificial Sequence
  ENSG00000142611_54 (sequence is synthesized)
caagcccagtttctcctgagcattcagacccccaggccccagcacttggcgttttcaggaggccctgttcttagagcccctgacaaaggcagcacttatttcctgggctggtgcgcccca

SEQ ID NO: 374074 - DNA, 120 bp, Artificial Sequence
  ENSG00000142611_55 (sequence is synthesized)
aaacacggccccgacacttagtgtggccccaggccccagcgagcctcgccctcccagttttgctctgcccagcagtgttggtgcccagagatgacaagggccagggagcctggcccgggt

SEQ ID NO: 374075 - DNA, 120 bp, Artificial Sequence
  ENSG00000142611_56 (sequence is synthesized)
gtgagaattcagagattctggcctccagctgtcaccacaccgtaacggggccatgtaactgtgcagcatggacagggatgcgacggggcagctggctgtgtccatggccaggtggccagg

SEQ ID NO: 374076 - DNA, 120 bp, Artificial Sequence
  ENSG00000142611_57 (sequence is synthesized)
gtcagggctgcaagccaggggtccagggcccttccgttcagcccaaatgctgccccaatgctaactccttggattgtcaacccccatcccccaaatggaaattccgaaggaggcctcctc

SEQ ID NO: 374077 - DNA, 120 bp, Artificial Sequence
  ENSG00000142611_58 (sequence is synthesized)
gcacctgccctccgctgctcctcagaccccagcccccagcgagccgacgtccccacccgttcctgctctcatccccaggttgggcacgtggggttcctcctctgtgggcctggcagaccc

SEQ ID NO: 374078 - DNA, 120 bp, Artificial Sequence
  ENSG00000142611_59 (sequence is synthesized)
ttcatgagtgggacccaagatatcactgacttcaacccagaggatcgagcccctgcaccctgcctggggccctggggtgtggagcagtggctggggtgggcgtggtgtggcctgagagac

SEQ ID NO: 374079 - DNA, 120 bp, Artificial Sequence
  ENSG00000142611_60 (sequence is synthesized)
tgcccagctggagaggccttcctttacaaggccacgcgtgcagctgtcccatccagaccccgactggccaagacctccacgtccccagagtccagccctggaaattccaagggccctggc

SEQ ID NO: 374080 - DNA, 120 bp, Artificial Sequence
  ENSG00000142611_61 (sequence is synthesized)
gtcctctgccttccccgcttccccatgagcgtctgcaaaacacttgcctgaatacatatcacgtattttagactcgaagcctcaaagcactggattgtggtcccctgccccctctgtccc

SEQ ID NO: 374081 - DNA, 120 bp, Artificial Sequence
  ENSG00000142611_62 (sequence is synthesized)
gtccccctgcccaagtgactgaaacctactgagctatattcactgtgctgtcctagggggagggagagcagagctcgcccctgcactgcagccttgtgggggagggcaaggctctcctcc

SEQ ID NO: 374082 - DNA, 120 bp, Artificial Sequence
  ENSG00000142611_63 (sequence is synthesized)
cagccagggacgccaggacatagctgctcctggtcagtggaggtcagccgggtatcaaaagccatgaaactgtgtctctgtagcaatgagtgatactgtgacaaaaccatccttgcattc

SEQ ID NO: 374083 - DNA, 120 bp, Artificial Sequence
  ENSG00000142611_64 (sequence is synthesized)
ttcctagaagagttcctctgctccttccattccatttttgtgtttgttttgttcttttctgtcactgatccgtattaccacttttggaaaaaaataaataaataaataaataaaaggcag

SEQ ID NO: 374084 - DNA, 120 bp, Artificial Sequence
  ENSG00000142611_65 (sequence is synthesized)
cttgagtttccaaacgtgtgattcacttgtgaacaaaagtcattctaacaattgccttcagcgtcacgtgcattgccactgcgctttcggcacgagggatgctgagccctggtgtcagag

SEQ ID NO: 374085 - DNA, 120 bp, Artificial Sequence
  ENSG00000142611_66 (sequence is synthesized)
tcgtaatttaaagcgtgtgtgtatatggactttgtcccttaaggtcgatataaagaatcctcgcagaatcacagacctgtgccgcccgccaccttctgccattgttacattacagatttg

SEQ ID NO: 374086 - DNA, 120 bp, Artificial Sequence
  ENSG00000142611_67 (sequence is synthesized)
gtttagttttgttttgttttgttttttcttttagaactgtatagtattgaaaaagaaatcaaatgtaaatgtctggttttcatataatgtttaaaaagaccattgagaaggaggctggcg

SEQ ID NO: 374087 - DNA, 120 bp, Artificial Sequence
  ENSG00000142611_68 (sequence is synthesized)
ctcgccccatgtcccccttgattgtaaattgcttctgttctgtttataagtaaactgtgcatgactcctgcttagcggtcattatcgtgtctgttggtgaaatttttattaaaaggaaaa

SEQ ID NO: 374088 - DNA, 120 bp, Artificial Sequence
  ENSG00000142611_69 (sequence is synthesized)
ttctgtagatgcacttattgaatatgtgattaggatctacgtctgagactaggagtcctgaactgctgacgcgaaagaggcgcagttcccaattaatacggaaatcgctgtgggagaaga

SEQ ID NO: 374089 - DNA, 120 bp, Artificial Sequence
  ENSG00000142611_70 (sequence is synthesized)
atgaaataagacgtgaagtgtaggaaatcatgaaaagaacaattttgcaaattgcattctgatgcttgtgatgaacacaaatgtacttgtgtagagacatttccttaagagaaagcctag

SEQ ID NO: 374090 - DNA, 120 bp, Artificial Sequence
  ENSG00000142611_71 (sequence is synthesized)
gagaagccgatttggaggttaatgctgtagaataggactgtataccaaatgtaatctttccaatgctccaatgaatttatacatgagattgatatgcaataaatctgtgtgcttttctaa

SEQ ID NO: 374091 - DNA, 120 bp, Artificial Sequence
  ENSG00000142611_72 (sequence is synthesized)
aagcacaaggccccatctcaccaggtcagcggagatgctgcctgcctggagctcgggtcccatggggttgggggcgaagatgctgcatcccagtgctgttccctgctcggggccctggaa

SEQ ID NO: 374092 - DNA, 120 bp, Artificial Sequence
  ENSG00000142611_73 (sequence is synthesized)
gaggtgagcgatcgcgcctgagtatgattgatcacggccatttatcttgtgttcaatctatttataaagccgggctgagcagccactgcccgaggcgggaggcgcggccagagagagcgt

SEQ ID NO: 374093 - DNA, 120 bp, Artificial Sequence
  ENSG00000142611_74 (sequence is synthesized)
ccaaagtgctgtgattataggcgtgaacccctgcttcttgaagccggggctgtttctagggacagcttccccaggatgcctttggctctgcagctgggagatccagcaacctccgggaca

SEQ ID NO: 374094 - DNA, 120 bp, Artificial Sequence
  ENSG00000142611_75 (sequence is synthesized)
aaagtgaaattggagtgaaggaaaattgggcttgaggcgcatagaaggacggtctttccgtccccttctggggctcagatttgcagagtgtgtccttagtcgtccgttgggaagctgacg

SEQ ID NO: 374095 - DNA, 120 bp, Artificial Sequence
  ENSG00000142611_76 (sequence is synthesized)
ggcaggggcaccgcggggctgggccagggctgtgcttttgtgagatgcaaactatagtaatgaagggcccagattttttttatttaagaaataaatgtttattagaacttttgaactaaa

SEQ ID NO: 374096 - DNA, 120 bp, Artificial Sequence
  ENSG00000142611_77 (sequence is synthesized)
tgccggccccgcggcctgggggccagggagacccagacaacagagggcaggagacgccggagggtcgggcgcaccgcctgcccaggggacacggggcacactccagggggatccaccagc

SEQ ID NO: 374097 - DNA, 120 bp, Artificial Sequence
  ENSG00000142615_0 (sequence is synthesized)
acagaactcccacggacacaccatgataaggacgctgctgctgtccactttggtggctggagccctcagttgtggggaccccacttacccaccttatgtgactagggtggttggcggtga

SEQ ID NO: 374098 - DNA, 120 bp, Artificial Sequence
  ENSG00000142615_1 (sequence is synthesized)
agaagcgaggcccaacagctggccctggcaggtctccctgcagtacagctccaatggcaagtggtaccacacctgcggagggtccctgatagccaacagctgggtcctgacggctgccca

SEQ ID NO: 374099 - DNA, 120 bp, Artificial Sequence
  ENSG00000142615_2 (sequence is synthesized)
ctgcatcagctcctccaggacctaccgcgtggggctgggccggcacaacctctacgttgcggagtccggctcgctggcagtcagtgtctctaagattgtggtgcacaaggactggaactc

SEQ ID NO: 374100 - DNA, 120 bp, Artificial Sequence
  ENSG00000142615_3 (sequence is synthesized)
ctggcctgcctccctcctgccggcaccattctacccaacaactacccctgctacgtcacgggctggggaaggctgcagaccaacggggctgttcctgatgtcctgcagcagggccggttg

SEQ ID NO: 374101 - DNA, 120 bp, Artificial Sequence
  ENSG00000142615_4 (sequence is synthesized)
ctggttgtggactatgccacctgctccagctctgcctggtggggcagcagcgtgaaaaccagtatgatctgtgctgggggtgatggcgtgatctccagctgcaacggagactctggcggg

SEQ ID NO: 374102 - DNA, 120 bp, Artificial Sequence
  ENSG00000142615_5 (sequence is synthesized)
ccactgaactgtcaggcgtctgacggccggtggcaggtgcacggcatcgtcagcttcgggtctcgcctcggctgcaactactaccacaagccctccgtcttcacgcgggtctccaattac

SEQ ID NO: 374103 - DNA, 120 bp, Artificial Sequence
  ENSG00000142615_6 (sequence is synthesized)
atcgactggatcaattcggtgattgcaaataactaaccaaaagaagtccctgggactgtttcagacttggaaaggtcacagaaggaaaataatataataaagtgacaactatgcaaatca

SEQ ID NO: 374104 - DNA, 120 bp, Artificial Sequence
  ENSG00000142615_7 (sequence is synthesized)
cagctggccctggcaggtgagttgaccacactgtacttctccccgtccctgccccactccctttacatctcccctttgcccttccaccatggcgtctattgtgctggcaaagtgagtatt

SEQ ID NO: 374105 - DNA, 84 bp, Artificial Sequence
  ENSG00000142615_8 (sequence is synthesized)
gaccagcctggccaacatggtgaaacctgcctctactaataatacacaagaactggggaggcttaggcaggaggatcgcttgaa

SEQ ID NO: 374106 - DNA, 120 bp, Artificial Sequence
  ENSG00000142615_9 (sequence is synthesized)
gaggttgtcagggaacagatgggggtctcacagaggcaagggtctcaaccacaccacaccccctctgcttcttctacagggagggggaaggagctctggcctcttagatgtggaaccagc

SEQ ID NO: 374107 - DNA, 120 bp, Artificial Sequence
  ENSG00000142619_0 (sequence is synthesized)
agtgttggggttggcggccacagctaagtccaacaccagcatgtcgctgcagagaatcgtgcgtgtgtccctggagcatcccaccagcgcggtgtgtgtggctggcgtggagaccctcgt

SEQ ID NO: 374108 - DNA, 120 bp, Artificial Sequence
  ENSG00000142619_1 (sequence is synthesized)
ggacatttatgggtcagtgcctgagggcacagaaatgtttgaggtctatgggacgcctggcgtggacatctacatctctcccaacatggagaggggccgggagcgtgcagacaccaggcg

SEQ ID NO: 374109 - DNA, 120 bp, Artificial Sequence
  ENSG00000142619_2 (sequence is synthesized)
gtggcgctttgacgcgactttggagatcatcgtggtcatgaactcccccagcaatgacctcaacgacagccatgttcagatttcctaccactccagccatgagcctctgcccctggccta

SEQ ID NO: 374110 - DNA, 120 bp, Artificial Sequence
  ENSG00000142619_3 (sequence is synthesized)
tgcggtgctctacctcacctgtgttgacatctctctggattgcgacctgaactgtgagggaaggcaggacaggaactttgtagacaagcggcagtgggtctgggggcccagtgggtatgg

SEQ ID NO: 374111 - DNA, 120 bp, Artificial Sequence
  ENSG00000142619_4 (sequence is synthesized)
cggcatcttgctggtgaactgtgaccgtgatgatccgagctgtgatgtccaggacaattgtgaccagcacgtgcactgcctgcaagacctggaagacatgtctgtcatggtcctgcggac

SEQ ID NO: 374112 - DNA, 120 bp, Artificial Sequence
  ENSG00000142619_5 (sequence is synthesized)
gcagggccctgcagccctctttgatgaccacaaacttgtcctccatacctccagctatgatgccaaacgggcacaggtcttccacatctgcggtcctgaggatgtgtgtgaggcctatag

SEQ ID NO: 374113 - DNA, 120 bp, Artificial Sequence
  ENSG00000142619_6 (sequence is synthesized)
gcatgtgctgggccaagataaggtgtcctatgaggtaccccgcttgcatggggatgaggagcgcttcttcgtggaaggcctgtccttccctgatgccggcttcacaggactcatctcctt

SEQ ID NO: 374114 - DNA, 120 bp, Artificial Sequence
  ENSG00000142619_7 (sequence is synthesized)
ccatgtcactctgctggacgactccaacgaggatttctcggcatcccctatcttcactgacactgtggtgttccgagtggcaccctggatcatgacgcccagcactctgccacccctaga

SEQ ID NO: 374115 - DNA, 120 bp, Artificial Sequence
  ENSG00000142619_8 (sequence is synthesized)
ggtgtatgtgtgccgtgtgaggaacaacacgtgttttgtggatgcggtggcagagctggccaggaaggccggctgcaagctgaccatctgcccacaggccgagaaccgcaacgaccgctg

SEQ ID NO: 374116 - DNA, 120 bp, Artificial Sequence
  ENSG00000142619_9 (sequence is synthesized)
gatccaggatgagatggagctgggctacgttcaggcgccgcacaagaccctcccggtggtctttgactccccaaggaatggggaactgcaggatttcccttacaaaagaatcctgggtcc

SEQ ID NO: 374117 - DNA, 120 bp, Artificial Sequence
  ENSG00000142619_10 (sequence is synthesized)
agattttggttacgtgactcgggaaccacgcgacaggtctgtgagtggcctggactcctttgggaacctggaggtcagccctccagtggtggccaatgggaaagagtaccccctggggag

SEQ ID NO: 374118 - DNA, 120 bp, Artificial Sequence
  ENSG00000142619_11 (sequence is synthesized)
gatcctcattgggggcaacctgcctgggtcaagtggccgcagggtcacccaggtggtgcgggacttcctccatgcccagaaggtgcagccccccgtggagctctttgtggactggttggc

SEQ ID NO: 374119 - DNA, 120 bp, Artificial Sequence
  ENSG00000142619_12 (sequence is synthesized)
cgtgggccatgtggatgagtttctgagctttgtccctgcccccgatgggaagggcttccggatgctcctggccagccctggggcctgcttcaagctcttccaggaaaagcagaagtgtgg

SEQ ID NO: 374120 - DNA, 120 bp, Artificial Sequence
  ENSG00000142619_13 (sequence is synthesized)
ggtgctctccaataaagacctcatcaactacaataagtttgtgcagagctgcatcgactggaaccgtgaggtgctgaagcgggagctgggcctggcagagtgtgacatcattgacatccc

SEQ ID NO: 374121 - DNA, 120 bp, Artificial Sequence
  ENSG00000142619_14 (sequence is synthesized)
acagctcttcaagaccgagaggaaaaaagcaacggccttcttccctgacttggtgaacatgctggtgctggggaagcacctgggcatccccaagccctttgggcccatcatcaatggctg

SEQ ID NO: 374122 - DNA, 120 bp, Artificial Sequence
  ENSG00000142619_15 (sequence is synthesized)
ctgctgcctggaggagaaggtgcggtccctgctggagccgctgggcctccactgcaccttcattgatgacttcactccataccacatgctgcatggggaggtgcactgtggcaccaatgt

SEQ ID NO: 374123 - DNA, 120 bp, Artificial Sequence
  ENSG00000142619_16 (sequence is synthesized)
gtgcagaaagcccttctctttcaagtggtggaacatggtgccctgagacagctcccacccaccatcctgtccccctggggcgggcattggcccaggtggtggagacagagacaggcccct

SEQ ID NO: 374124 - DNA, 120 bp, Artificial Sequence
  ENSG00000142619_17 (sequence is synthesized)
gaacgataagcaccaagagaccccaaggctccagatggaacactgagggtgaccgtccctctcagaagccttttccctggaagtgtccatgcctcacctgcaacccatgtggttctcaga

SEQ ID NO: 374125 - DNA, 120 bp, Artificial Sequence
  ENSG00000142619_18 (sequence is synthesized)
cttgaatcttctcggccccccaaaaagaaggacctcatttcttatagcctctcctgtgattcaacacaacccatggagatgtccccttctcactctgaaatcatccatttggggacaaat

SEQ ID NO: 374126 - DNA, 120 bp, Artificial Sequence
  ENSG00000142619_19 (sequence is synthesized)
ccacattggggtctagaaacatccacgtatctcatcagccatcttgtcctgtgcatcctaacagaggaaggatccatgattctgctttggtccaattgcttcctctctgcagaggaacaa

SEQ ID NO: 374127 - DNA, 120 bp, Artificial Sequence
  ENSG00000142619_20 (sequence is synthesized)
ccctaaaaccagaccactccacgcaggacaggcaggagagattcttcctaaagcctcccccataaaaagggagctgtggatccacttagatcagggcggaaccatctttcacccggccaa

SEQ ID NO: 374128 - DNA, 120 bp, Artificial Sequence
  ENSG00000142619_21 (sequence is synthesized)
gctcctgcccagatgttgaccctcacccagcgtgagctgtcacatagtaggagcttctagatgcatgtggaagcaatgagagttgtcccttagccttataaactccccatgatctgacat

SEQ ID NO: 374129 - DNA, 120 bp, Artificial Sequence
  ENSG00000142619_22 (sequence is synthesized)
gcagaaatccagccttgtccagaatcctcctggaatttcttggagacgaaagtatctgggggattgttgggtactagggagactgggtacaagggtgaaaagtagttcccataatacaca

SEQ ID NO: 374130 - DNA, 120 bp, Artificial Sequence
  ENSG00000142619_23 (sequence is synthesized)
tggttgactatggtgatccaccttgtgatggttaatattaggtgtctggagaaggttgcttcattggccctgggacttctctctgcaggaggagagaacgctgcctctcctctggattgg

SEQ ID NO: 374131 - DNA, 120 bp, Artificial Sequence
  ENSG00000142619_24 (sequence is synthesized)
tctcaggctctctgttggcctttggtcagcgtttccacatcctgctctgctgcaggagagggggctaaggggctggatccaccaaggcagctcacagcgggaaaactctgggaatgaacc

SEQ ID NO: 374132 - DNA, 120 bp, Artificial Sequence
  ENSG00000142619_25 (sequence is synthesized)
actgaattcaggggatgggggtgggggggcggttctcgaggtgtgtgccagctacacgtgtgttctgtatgggtccagctgcgtttccatcactcgctaataaatcaacagaaacacaaa

SEQ ID NO: 374133 - DNA, 120 bp, Artificial Sequence
  ENSG00000142621_0 (sequence is synthesized)
gggtgcgagctggagactccgcgggagcgcggccgggaggcttcgccccggagctggcccgacgcctcccgagctggcagggctctcggcggaggtcggagcgtgggcttcctcctcccg

SEQ ID NO: 374134 - DNA, 120 bp, Artificial Sequence
  ENSG00000142621_1 (sequence is synthesized)
ccagggaaaacagagaggatgaaggcctatctaaagagcgcagaaggcttttttgtcctaaataaaagtaccacaattggaaggcatgaaaattcagaccttgttttacagtctcctgac

SEQ ID NO: 374135 - DNA, 120 bp, Artificial Sequence
  ENSG00000142621_2 (sequence is synthesized)
atcgacaaccaccatgcactcattgaatataacgaggcggagtgcagctttgttctccaggacttcaattcccgcaacggcacgtttgtcaacgagtgccacattcaaaacgtggctgtg

SEQ ID NO: 374136 - DNA, 120 bp, Artificial Sequence
  ENSG00000142621_3 (sequence is synthesized)
aagctcatccctggagacatcctgagatttgggtctgcagggctgacctatgaactggtcattgaaaatccacctccggtctctttcccatggatgaggggcccagcaccatggccaggg

SEQ ID NO: 374137 - DNA, 120 bp, Artificial Sequence
  ENSG00000142621_4 (sequence is synthesized)
ccacagccacctcgtgccacacagcagccaaaccaggcccccccaccatcacatatccccttccaccaaggtgtccagccagcaccgatgcaaaggagctggtcccaggcctttcccaga

SEQ ID NO: 374138 - DNA, 120 bp, Artificial Sequence
  ENSG00000142621_5 (sequence is synthesized)
cccaccgtggtcctgccggcctcccacaggcggcctgtgagcgccaacaaggagatgttctcgttcgtggtggacgacgcccgcaagccacccgtcatcaagcaagtgtggaccaatgcc

SEQ ID NO: 374139 - DNA, 120 bp, Artificial Sequence
  ENSG00000142621_6 (sequence is synthesized)
atgaaactgtcagaaaaatcagtggccgaggggattcctggggcagttccccctgcggagatttatgtggaggaggacttggcccagcaggacaaggatgaaataattctgctgctggga

SEQ ID NO: 374140 - DNA, 120 bp, Artificial Sequence
  ENSG00000142621_7 (sequence is synthesized)
aaagaggtcagccgtctctcagattatgaaattgaatccaaatacaaagacgtcataatagcaaacctgcagaatgaagtggctgagctgagtcagaaggtgtcagagaccaccacctcc

SEQ ID NO: 374141 - DNA, 120 bp, Artificial Sequence
  ENSG00000142621_8 (sequence is synthesized)
aggcagaatgagaaggagatctcgcagaagtgtcaggttctggatgaagacatcgatgccaaacagaaagagatccagagcttgaaaagccagatcagtgccctacagaaaggctacagc

SEQ ID NO: 374142 - DNA, 120 bp, Artificial Sequence
  ENSG00000142621_9 (sequence is synthesized)
aaggtgctgtgccagaccctgtcagagcggaactcagaaatcacatccctgaagaatgagggcgagaacttaaagagagacaacgctatcacatcagggatggtgtcatctttgcaaaaa

SEQ ID NO: 374143 - DNA, 120 bp, Artificial Sequence
  ENSG00000142621_10 (sequence is synthesized)
gacatattagcaaaggatgagcaagttcaacaactaaaggaagaggtcagtcacctaaaaagtcagaacaaggacaaggaccaccagctggaagcccttggctctagatgctcggtgcta

SEQ ID NO: 374144 - DNA, 120 bp, Artificial Sequence
  ENSG00000142621_11 (sequence is synthesized)
aaggaagagttaaaacaggaagatgctcacagggagctcagggaagcccaggagaaagagttaaaactctgcaaaacccaaatccaagacatggagaaagaaatgaagaagcttagggca

SEQ ID NO: 374145 - DNA, 120 bp, Artificial Sequence
  ENSG00000142621_12 (sequence is synthesized)
gagctgaggaagagttgtactgaacaaagcgtgatctctaggactctgagagaaaaaagcaaggttgaagagaagcttcaggaggattccagaaggaaattgcttcagctgcaagaaatg

SEQ ID NO: 374146 - DNA, 120 bp, Artificial Sequence
  ENSG00000142621_13 (sequence is synthesized)
gggaacagagagagcgtcattaaaatcaatttggagagggcagtaggtcagctggagcacttcagaagtcaagtcatcaaggccacctatggacgggcgaagccgttccgggacaagccc

SEQ ID NO: 374147 - DNA, 120 bp, Artificial Sequence
  ENSG00000142621_14 (sequence is synthesized)
gtcaccgaccaacagttaatagagaaaattacccaggtcactgaggacaacatcaattttcagcagaaaaagtggaccctccagaaagagacccagctgagcaactccaagcaggaggag

SEQ ID NO: 374148 - DNA, 120 bp, Artificial Sequence
  ENSG00000142621_15 (sequence is synthesized)
accaccgagaacatcgagaagctgaggacgtcgctggacagctgccaggcttgcatgaaaatatcctgttgcagccatgacctgaagaaggaggtcgaccttcttcagcacctccaggtg

SEQ ID NO: 374149 - DNA, 120 bp, Artificial Sequence
  ENSG00000142621_16 (sequence is synthesized)
agcccacctgtctcggggctccagaaggtggtgctggacgtcctgaggcacgcgctgtcctggctggaggaggtggagcagctcctccgggacctcgggatcctgccctccagccccaac

SEQ ID NO: 374150 - DNA, 120 bp, Artificial Sequence
  ENSG00000142621_17 (sequence is synthesized)
aaagatcaagttcaacagttctcaggaaactcagcagtctttactgcaggaaaagctgcgggagcatctggcagagaaggagaagctgaacgaggagaggctagagcaagaggagaagct

SEQ ID NO: 374151 - DNA, 120 bp, Artificial Sequence
  ENSG00000142621_18 (sequence is synthesized)
caaagccaaaatcaggcaactgacggaagagaaggcggtaaggctttggaggagtacattactcaagagagaaacagagcgaaagagactttagaggaagaacggaagagaatgcaagaa

SEQ ID NO: 374152 - DNA, 120 bp, Artificial Sequence
  ENSG00000142621_19 (sequence is synthesized)
ctggagagcctcctggcccagcagaagaaggctttggcgaaaagcattacccaggagaagaacagagtgaaggaagcattagaggaagagcagacaagagtccaagagctggaggaacgc

SEQ ID NO: 374153 - DNA, 120 bp, Artificial Sequence
  ENSG00000142621_20 (sequence is synthesized)
ttggcccgccagaaggaggttttggagagcagcatagcccatgaaaaaagaaaagcaaaggaagccttggagtcggaaaagagaaaagttcaggatctggagaaccatttaacccaacag

SEQ ID NO: 374154 - DNA, 120 bp, Artificial Sequence
  ENSG00000142621_21 (sequence is synthesized)
ggccatggagaaggaaaagaaaaaggtgcaagacctggagaatcgcttaaccaagcagaaagaggaattagaattaaaagagcaaaaagaggacgttttaaataataaattaagtgacgc

SEQ ID NO: 374155 - DNA, 120 bp, Artificial Sequence
  ENSG00000142621_22 (sequence is synthesized)
actggccatggttgaagagactcagaaaacaaaggcaactgaaagtctaaaagcagagagcctcgccttgaaattaaatgaaacattagccgaactggaaactaccaagacaaaaatgat

SEQ ID NO: 374156 - DNA, 120 bp, Artificial Sequence
  ENSG00000142621_23 (sequence is synthesized)
catggtggaagagcggctaatcctgcagcagaagatggtaaaggccctccaggatgagcaggaatcacagagacacgggtttgaagaagagatcatggaatataaggagcaaatcaaaca

SEQ ID NO: 374157 - DNA, 120 bp, Artificial Sequence
  ENSG00000142621_24 (sequence is synthesized)
gcacgcccagacaattgtgagcctcgaagagaaactccagaaagtcactcagcaccataaaaaaatagaaggcgagattgcaacattgaaggacaatgacccagccccaaaggaggaaag

SEQ ID NO: 374158 - DNA, 120 bp, Artificial Sequence
  ENSG00000142621_25 (sequence is synthesized)
gccgcaagaccctctggtggctcccatgacagagagcagtgccaaagacatggcgtacgaacatctgatagatgacttattggctgctcagaaggaaattctgtctcagcaggaagtcat

SEQ ID NO: 374159 - DNA, 120 bp, Artificial Sequence
  ENSG00000142621_26 (sequence is synthesized)
catgaagttaaggaaagaccttaccgaagcccacagcagaatgtcggatttgagaggggagctaaacgagaagcagaagatggaactggagcagaacgtggtgctggtccagcagcagag

SEQ ID NO: 374160 - DNA, 120 bp, Artificial Sequence
  ENSG00000142621_27 (sequence is synthesized)
caaggagctgagtgtgctcaaggagaagatggcccagatgagcagcctggtagaaaagaaagatcgggagctgaaggcccttgaggaggcactcagggcttcccaagagaaacacagact

SEQ ID NO: 374161 - DNA, 120 bp, Artificial Sequence
  ENSG00000142621_28 (sequence is synthesized)
ccagctgaacacagagaaggaacagaagccccggaagaagacccagacgtgtgacacctctgtgcagatagaacccgtccacactgaggccttctccagcagccaagagcagcaatcctt

SEQ ID NO: 374162 - DNA, 120 bp, Artificial Sequence
  ENSG00000142621_29 (sequence is synthesized)
cagcgatctaggggtcaggtgcaaagggtcccggcacgaggaggtcattcagcgtcagaaaaaggccttatctgaacttcgagcgcgaattaaagaactcgagaaggcgcgctcaccaga

SEQ ID NO: 374163 - DNA, 120 bp, Artificial Sequence
  ENSG00000142621_30 (sequence is synthesized)
tcataaagaccaccagaatgaatcatttctagatttaaagaacctcagaatggaaaacaatgtccagaaaatactactggatgcaaaaccggatttgccaactctctcaagaatagagat

SEQ ID NO: 374164 - DNA, 120 bp, Artificial Sequence
  ENSG00000142621_31 (sequence is synthesized)
cctagcgcctcagaatggcctttgcaacgcaaggttcggctcagccatggagaagtcagggaagatggatgtggctgaggctttagagctcagtgaaaagctgtacctggatatgagcaa

SEQ ID NO: 374165 - DNA, 120 bp, Artificial Sequence
  ENSG00000142621_32 (sequence is synthesized)
aaccctcggaagtctcatgaacatcaagaatatgtcaggccacgtgtccatgaaatacctctcccgccaggagagggagaaggtcaaccagcttcgacaaagggacctcgacctggtgtt

SEQ ID NO: 374166 - DNA, 120 bp, Artificial Sequence
  ENSG00000142621_33 (sequence is synthesized)
tgataagatcacccaactcaagaaccagctggggaggaaagaggagctgttgagaggatatgaaaaggacgttgaacagctcaggcggagcaaagtgtccattgagatgtaccagtcgca

SEQ ID NO: 374167 - DNA, 120 bp, Artificial Sequence
  ENSG00000142621_34 (sequence is synthesized)
ggtggcaaagctggaggatgatatctacaaagaggccgaagagaaggccctgctgaaggaggccctggagcgcatggagcaccagctgtgccaggagaagaggatcaacagggccatccg

SEQ ID NO: 374168 - DNA, 120 bp, Artificial Sequence
  ENSG00000142621_35 (sequence is synthesized)
gcagcagaaggttggaaccagaaaagcctccctaaagatggaccaagaaagagagatgctgaggaaagagacctccagcaagtccagccagagccttttgcattctaagcccagtggaaa

SEQ ID NO: 374169 - DNA, 120 bp, Artificial Sequence
  ENSG00000142621_36 (sequence is synthesized)
gtactagagaaacctcgtcccaccaggcctcatgtgatcctctgtgagttcatgtgactcttctgtgtcatctgtgtcaaaatactgagttgcttttgtaagtctttaaagattgttacc

SEQ ID NO: 374170 - DNA, 120 bp, Artificial Sequence
  ENSG00000142621_37 (sequence is synthesized)
ctagtgtttcatttcctagaccagtattttgaacaatattatattttggagactgtggggagaagggttcttctttaaaaatacctatgaatgtacacgaactcaggtatatgaagaata

SEQ ID NO: 374171 - DNA, 120 bp, Artificial Sequence
  ENSG00000142621_38 (sequence is synthesized)
gaagtgtgtaacccagatgtccaggcctggtagatataattatgtggtccacgttgggtcatgatgttcccaaatatcaaacctcctaagacttccaacagactcacacttgagaaaacc

SEQ ID NO: 374172 - DNA, 120 bp, Artificial Sequence
  ENSG00000142621_39 (sequence is synthesized)
taagacttgtactggagcctcagggcagaattgtaaccttggagctctcagggccttgggatagtgaattcaagtctccgttatggcctggcaggatggctcatgcctgtaatctcagca

SEQ ID NO: 374173 - DNA, 68 bp, Artificial Sequence
  ENSG00000142621_40 (sequence is synthesized)
ctttgggaggccgaggcaggcggattataagatcaggagtttgagaccagcctggcaaacatagtgaa

SEQ ID NO: 374174 - DNA, 120 bp, Artificial Sequence
  ENSG00000142621_41 (sequence is synthesized)
aatgagtgaggcaagacagccctgaggatggggaaggacatgatggacggagaagtcagcccagggcaggggcacagtggctcagcttctgaaaccaaagaatggaaaagagggtctctt

SEQ ID NO: 374175 - DNA, 120 bp, Artificial Sequence
  ENSG00000142621_42 (sequence is synthesized)
tctgaccctggttctcctgctgtctgcagggttggccgaaagtgtagaggagcacgaactgagaaacgcaaaagaatcgacaccttgcaactgtgccttcaaagagaaagacaggcaggc

SEQ ID NO: 374176 - DNA, 120 bp, Artificial Sequence
  ENSG00000142621_43 (sequence is synthesized)
cctgccccacctgcctgcagtttgaacggatgacctaagagacaagcacgcgtccagccccgtctgtccattaagagacgagtatttgtagagatggtgaagaacaggatgcagaactca

SEQ ID NO: 374177 - DNA, 120 bp, Artificial Sequence
  ENSG00000142621_44 (sequence is synthesized)
ggaggattccagaaggaaattgcttcagctgcaagaaatggggaacagagagagcgtcattaaaatcaatttggagagggcagtaggtcaggtaggcatgttccagagcccccctcattg

SEQ ID NO: 374178 - DNA, 120 bp, Artificial Sequence
  ENSG00000142621_45 (sequence is synthesized)
gcccacgctctccaatgattgcacccaagcagccagtgggggtgagagaggaggacgcccaaggtagaaagacagacgtgcgttaattctcccatttatctcatgagcagaggctgtctg

SEQ ID NO: 374179 - DNA, 120 bp, Artificial Sequence
  ENSG00000142621_46 (sequence is synthesized)
cagctccccacccccatggacatcgcttaacaggtttctgctgctgggaggcctcccactcgaatagtttacgatgacccgagacccggaccaggcagccaatcccggctcgatgcctgc

SEQ ID NO: 374180 - DNA, 120 bp, Artificial Sequence
  ENSG00000142621_47 (sequence is synthesized)
ccccagttaaccgagctccttgcccccagtggtgtttctagcattttctccttaatgtttttagtcctgacatttaccacaatctttcttccccttgggccccagcagacattacagaca

SEQ ID NO: 374181 - DNA, 120 bp, Artificial Sequence
  ENSG00000142621_48 (sequence is synthesized)
gtgtctataaggaaatgccacttttcttaataaggtaaaaccctggagtgtccaaagtgcgtgctggatggagaagctcccggctgtgggtgagccactccgacctggtctggaggtgct

SEQ ID NO: 374182 - DNA, 120 bp, Artificial Sequence
  ENSG00000142621_49 (sequence is synthesized)
gtttctttgatgctgtggcctgaaatcgccggtggcccttcctggcaaatgtgacacagtcatgggggccggaatgtgcagacgaaagtttaccaaaagctaagggaaagcaaacaggaa

SEQ ID NO: 374183 - DNA, 120 bp, Artificial Sequence
  ENSG00000142621_50 (sequence is synthesized)
accaagatgggagggcatatgaccctgaggaatgtggtcccccaggggcagcccaccctagattcctccacaggggtccctctcctggaaaccatgactccaggggatccacagaatggt

SEQ ID NO: 374184 - DNA, 120 bp, Artificial Sequence
  ENSG00000142621_51 (sequence is synthesized)
ttgcacacacacgtgtgtgtgcgtgtgtgtgtgtgtattactgggaaggagggccccccatgtctcccactgggttctcaggagggtctgtgaactaccaagaaaggttaaaagccagga

SEQ ID NO: 374185 - DNA, 120 bp, Artificial Sequence
  ENSG00000142621_52 (sequence is synthesized)
tctctcaaaccacccagctcagctcccaaagcccttccattttctaccatccaagccttaccaggcagtgtgaccaggcctttgtccctgtaccctaaaattcaaatattcaccactgta

SEQ ID NO: 374186 - DNA, 120 bp, Artificial Sequence
  ENSG00000142621_53 (sequence is synthesized)
accgccagcaccatttctcctgtgggggcgccagccccttatcaagggcagagaacctgcctgtctgggcctcttcctgtgcacattggctacccccaatcttccccctaacacatacct

SEQ ID NO: 374187 - DNA, 120 bp, Artificial Sequence
  ENSG00000142621_54 (sequence is synthesized)
gatttgagggtctgacccgtgctccttgcccaagggccaaggttcttgttatagctctgggcagaggtcatccaggaggagccctggaggtcctgagactgctccaggtctagacttgag

SEQ ID NO: 374188 - DNA, 120 bp, Artificial Sequence
  ENSG00000142621_55 (sequence is synthesized)
agaaaggacaagccctctctctgcctcccagtgccttccctctcctgtatctccaaggccctgctccctgtccaatagtctgcccttccccagccaagtgaccccaggcccgaggccatg

SEQ ID NO: 374189 - DNA, 120 bp, Artificial Sequence
  ENSG00000142621_56 (sequence is synthesized)
tctaagatgacctctccctcccaatggccctgggcagccattcctgtggggagcccctgatggcaatgggggaccatcattcatagggcttcctctacacagtcaattctttgggtgagc

SEQ ID NO: 374190 - DNA, 120 bp, Artificial Sequence
  ENSG00000142621_57 (sequence is synthesized)
tgggaccctccacttggccatgaaaccagaggatggctttgagaacctcatgtcacctggtcttctcctggcagggtcactgcagagatgtccgtaagacgtttcccattagaactcccc

SEQ ID NO: 374191 - DNA, 120 bp, Artificial Sequence
  ENSG00000142621_58 (sequence is synthesized)
tgtgcagtaaatacctgtgtcttgggccccaggttgaggcagtagcccttttggtcccttcaaggctctgctttggagtatttaataaccacgttttgccagtgaactggagactcacgc

SEQ ID NO: 374192 - DNA, 120 bp, Artificial Sequence
  ENSG00000142621_59 (sequence is synthesized)
caggggctgccatgttggtaaattctcagagaaagtcgggctcctttttacctctaactactaatggaatcaggacaccttggacttgtcattctgtaagtccggacttaatgtaactgc

SEQ ID NO: 374193 - DNA, 120 bp, Artificial Sequence
  ENSG00000142621_60 (sequence is synthesized)
tatttcatcagccttaacctgaaaacactagcacccaggaggggctcagtgaaagccactagaagtagaggcccttggcttaaggtgatgtttctgtgtacaggcatccagcaaaggtta

SEQ ID NO: 374194 - DNA, 120 bp, Artificial Sequence
  ENSG00000142621_61 (sequence is synthesized)
gttgggtgtctgagtgtctcctctacaccaggcaccgtagtaggctccagggataccgagatgaacagagtggacatagtcttcaggactcttatgggctcaggcatgaaatggagaaag

SEQ ID NO: 374195 - DNA, 120 bp, Artificial Sequence
  ENSG00000142621_62 (sequence is synthesized)
tgccaacttagcaattacggaagagcgctcccggccccagacttcccattggataattggcagcaagaggctcttctgagggtttgagacatgtgtgtgcactgaccacaggcatcgttc

SEQ ID NO: 374196 - DNA, 120 bp, Artificial Sequence
  ENSG00000142621_63 (sequence is synthesized)
gggttaggcaggcgtgcctaaaaagtaattaaagcctgctgttctcttttcttctgtgggtcccgccactccccgtgagcggtgaagattctgataacgcggaatggtcattcaggcgtg

SEQ ID NO: 374197 - DNA, 120 bp, Artificial Sequence
  ENSG00000142621_64 (sequence is synthesized)
caaaccctgctaagtggtgtttcccgcaccctgccatggaaacgctgcccccacttgccggcccctgctgaccccctgacactgttgccccctctctgctgcagctggagcacttcagaa

SEQ ID NO: 374198 - DNA, 120 bp, Artificial Sequence
  ENSG00000142621_65 (sequence is synthesized)
tccacaaatggtctctttgtctaatttttgtgcggcttatttgggaaattgcccagcttttttggagcaagttgggcagaaatgcttggcttttctatccactttttcctcttgttggag

SEQ ID NO: 374199 - DNA, 120 bp, Artificial Sequence
  ENSG00000142621_66 (sequence is synthesized)
aaacttgttggagaagaaaaaacaaagggcctaaaaaaatgcctcccgggagaacttggcgtgtccaaaaaagatgcctgagcatcttcaattactgactttgagcggcccgcatcccca

SEQ ID NO: 374200 - DNA, 120 bp, Artificial Sequence
  ENSG00000142621_67 (sequence is synthesized)
gccaaaaagaaattgttttcatagcccctatgttatttccagagaaaccaaagaaacattcctgctttttatttgcattttcttgttttggcccagccacaaaaggcggtttccacaccg

SEQ ID NO: 374201 - DNA, 120 bp, Artificial Sequence
  ENSG00000142621_68 (sequence is synthesized)
ttgcttttgactctggaggagcagggacgggaggacttggccacagccctgcggcccccaccctgggacatggcttatcagagcaggcggtggcttctgctttctctggaaatcagcagc

SEQ ID NO: 374202 - DNA, 120 bp, Artificial Sequence
  ENSG00000142621_69 (sequence is synthesized)
tcctgtttggggagtttgtgcaaatgctggcttgtcagcactctttcaaatcaggaaaccacgctttccgaccagcttgtgtgttgatcttggcaggaattctgacgaatggaaaaaaga

SEQ ID NO: 374203 - DNA, 120 bp, Artificial Sequence
  ENSG00000142621_70 (sequence is synthesized)
agtagccacatttgcttctcattgcagccaaactgttgatggtactttggctctggggtttcatagacctaaaagggggttcgctttgaccatcaaaagtccaaattagagtattaaaaa

SEQ ID NO: 374204 - DNA, 120 bp, Artificial Sequence
  ENSG00000142621_71 (sequence is synthesized)
aaaacctgtcaaaacataaaaattttaaaaaagaaaaaaactgagtcctcccaaggcggccaatacgtggcgctgcctgcttcgtggcagagtcaagaacgctgttcctcgaaggtcacg

SEQ ID NO: 374205 - DNA, 120 bp, Artificial Sequence
  ENSG00000142621_72 (sequence is synthesized)
gtctattcccttctccagaaccccctgcttctctgcttgaggcgtaattttccattaaaaaaaaaaacacacacatacaagtgagacacgataactgaagaaaaatgaaacaaaacagag

SEQ ID NO: 374206 - DNA, 120 bp, Artificial Sequence
  ENSG00000142621_73 (sequence is synthesized)
gcaaaaggaaaattaaatcgaaattatgcaaagtctaattacgctgtttaacctccaaggcattttcccatggaaataaccgcgtgattccaggcaagtgacttaccctgtctatgcctc

SEQ ID NO: 374207 - DNA, 120 bp, Artificial Sequence
  ENSG00000142621_74 (sequence is synthesized)
agtttccctatctgtaaaatgaggctaatagggagtacccaccctttagggctgttgtgatcattaaaatgcatgaatatatggaaagtacttggaatagtacctggcacacaataggca

SEQ ID NO: 374208 - DNA, 120 bp, Artificial Sequence
  ENSG00000142621_75 (sequence is synthesized)
tttgatgcaaaaggcaaagaggaatctaagctagattttgttcttattctttctgtattgaagagacgagtatttgtagagatggtgaagaacaggatgcagaactcaaattcccaggtt

SEQ ID NO: 374209 - DNA, 120 bp, Artificial Sequence
  ENSG00000142621_76 (sequence is synthesized)
ggagggacaagaaggcctgggtgagccttctctgagaatcactgagctctgaaccatgaatgaactgcctacctctgtacttcctgttgtataggacaaagaaatccctatctatttaaa

SEQ ID NO: 374210 - DNA, 120 bp, Artificial Sequence
  ENSG00000142621_77 (sequence is synthesized)
cgtgacccatgcaggtggtctcctggatgaggaaactgcgcctcagagagttaagaggcgcccaagtgcacacagcggctgagacgagtatttgtagagatggtgaagaacaggatgcag

SEQ ID NO: 374211 - DNA, 120 bp, Artificial Sequence
  ENSG00000142621_78 (sequence is synthesized)
cccgagcagggtcaccgcctggattacatgtgttgtcgccctttcaggtctgccttcttctccaggccgcacctggcgttcatcagcacgtgggctcctcgtgaccaagggtattgctca

SEQ ID NO: 374212 - DNA, 120 bp, Artificial Sequence
  ENSG00000142621_79 (sequence is synthesized)
tgtgaacatccgaatgactgtctttatttttcaaattacatgtgctgtgttaattttagaataaaaagtagataaaactggagagcaaaattaaagagagaagagaaatgccaccgccaa

SEQ ID NO: 374213 - DNA, 120 bp, Artificial Sequence
  ENSG00000142621_80 (sequence is synthesized)
ctcgtcccaccaggcctcatgtgatcctctctaggacgggccatgttggaccaatctggctaatgacatataaggaaaagctcctgtggagggcttcccttccagcttctctaggtgaaa

SEQ ID NO: 374214 - DNA, 120 bp, Artificial Sequence
  ENSG00000142621_81 (sequence is synthesized)
gcattcacccttggtacctttgtcttgtctcctttctcactcctggagctcagaccagaagctggagcagccaccttggggatcagcagacaccagcagcaggccaaaggatagtggagt

SEQ ID NO: 374215 - DNA, 120 bp, Artificial Sequence
  ENSG00000142621_82 (sequence is synthesized)
agcattagaggaagagcagacaagagtccaagagctggaggaacgcttggcccgccagaaggaggtacgctcggggagatagagtcggctgagccccagtcggcttgagggccatgtgga

SEQ ID NO: 374216 - DNA, 120 bp, Artificial Sequence
  ENSG00000142621_83 (sequence is synthesized)
gcctcccaccatgattctgaggcctccccggccatgtggaacttgctcggtgctaaaggaagagttaaaacaggaagatgctcacagggagctcagggaagcccaggagaaagagttaaa

SEQ ID NO: 374217 - DNA, 120 bp, Artificial Sequence
  ENSG00000142621_84 (sequence is synthesized)
tctcgctgtcgtcatacctcaggagccaagtgcttttggatggtgagggtgcttgtcccgtctctgaagcacctgcccagggcctggcaccagccggcggacactgccttccccatgctg

SEQ ID NO: 374218 - DNA, 120 bp, Artificial Sequence
  ENSG00000142621_85 (sequence is synthesized)
cccatgacccatgctgcccgtgacccatgcaggtggtctcctgggtgagtcctgcctcagacccggtagggtctacacactggaaagtttccccaaagcaagtcacacatgagcagcacc

SEQ ID NO: 374219 - DNA, 120 bp, Artificial Sequence
  ENSG00000142621_86 (sequence is synthesized)
cgggcggcttccaaagctccctgaaagctggcagaggggctttcctgtctgctttgcagttgacatattcatcatccactcctgcagtccacaaggcactggaacagtgacctctaaata

SEQ ID NO: 374220 - DNA, 120 bp, Artificial Sequence
  ENSG00000142621_87 (sequence is synthesized)
gagccagactctccctttccttcactcttgcctaaggtggagcagatcccaaggctggggttaggcaagtcagggaaagaaccacagtcactgtttcttcatgaccgtctccaggccagg

SEQ ID NO: 374221 - DNA, 120 bp, Artificial Sequence
  ENSG00000142621_88 (sequence is synthesized)
gactgggctcacctgagctttgcagccgtgatagggcttattaatgcctctaatagccctgcctggtacgatgatccctattttacagatgaggaaactgcgcctcagagagttaagagg

SEQ ID NO: 374222 - DNA, 120 bp, Artificial Sequence
  ENSG00000142621_89 (sequence is synthesized)
tttatgtgtgtgtgcattctcgtgtgtgtgtacattctcatgtgtgtgtgtgtgtgcacatgtgtaccatgtgcatgagggtttggctgtgtgtgacactatgtgtgtgtgtttgtgtgt

SEQ ID NO: 374223 - DNA, 120 bp, Artificial Sequence
  ENSG00000142621_90 (sequence is synthesized)
gttgcctgcctgagctcagagagagccaaacccccagagaagggtgccccctccaccaaccaggtgagctccttgcagaggcctggccttcatcccacaaaccttgcagaccacaggctc

SEQ ID NO: 374224 - DNA, 120 bp, Artificial Sequence
  ENSG00000142621_91 (sequence is synthesized)
cctggcttgcagcccccaaaaatgaaggcagcgctctgctctggacgtggcctttccagcactcaccactctgaattaaacatcacaggcccccatctgcacatgtcgtggggctgcctc

SEQ ID NO: 374225 - DNA, 120 bp, Artificial Sequence
  ENSG00000142621_92 (sequence is synthesized)
gggcagaggaccgtttccttttacgctgtgccatgccagggagatctgggcagcagcagagtcctgagatgtcctttgatgtacccacaggagagttcgctccttcccgaggcagtgtcc

SEQ ID NO: 374226 - DNA, 120 bp, Artificial Sequence
  ENSG00000142621_93 (sequence is synthesized)
cccagggcttggcaggccaggcccacagcagagacaccaaaccacagaatgggacggcagagggccctaaaaagcccattgtcatgcactggctgaaaatgaaagaaaacctgcagattt

SEQ ID NO: 374227 - DNA, 120 bp, Artificial Sequence
  ENSG00000142621_94 (sequence is synthesized)
cctgggaaagtgtagaggagcacgaactgagaaacgcaaaagaatcgacaccttgcaactgtgccttcaaagagaaagacaggcagagacgagtatttgtagagatggtgaagaacagga

SEQ ID NO: 374228 - DNA, 120 bp, Artificial Sequence
  ENSG00000142621_95 (sequence is synthesized)
gagacagacatgacagccctcctcaaatatttaaagggctgtctcataaaagagaaataaaacatactcaatgagctccaggtgacagaactgagctcagagaccagaaatcacaaggag

SEQ ID NO: 374229 - DNA, 120 bp, Artificial Sequence
  ENSG00000142621_96 (sequence is synthesized)
acagatctccgctgaatataaagacgagttctataataattggaaccttccagagaaggcatggactttgtgctttaaaagaatcgacagaataattagagaatagactttaccctgtcc

SEQ ID NO: 374230 - DNA, 120 bp, Artificial Sequence
  ENSG00000142621_97 (sequence is synthesized)
ttgaaggtgggggataagggggctgggtaaatatgtattcctgaatgtctgttattttgctacttgtttttttgtctaggaattagaattaaaagagcaaaaagaggacgttttaaataa

SEQ ID NO: 374231 - DNA, 120 bp, Artificial Sequence
  ENSG00000142621_98 (sequence is synthesized)
gacatggcgtacgaacatctgattgagtctacaaagaagtctatcctcaaagaactgacagttttcagagaaacaaacgtatgaatgggaaagatccagaaagcagcacgtaaagaagga

SEQ ID NO: 374232 - DNA, 120 bp, Artificial Sequence
  ENSG00000142621_99 (sequence is synthesized)
ggcgccgatgggatgcagtggagggattcagaagctcccccaagaggagaaccacctgcctgacccttgcaccaaatcctagtgaccgaagtctaatgtcacagggtttttaccccaaaa

SEQ ID NO: 374233 - DNA, 120 bp, Artificial Sequence
  ENSG00000142621_100 (sequence is synthesized)
agacaaggatactcagcctccgcattgtgaaaagttcctgactcctcctcctgtttaaaatctagaaacggtggtgcccatgacttggagaagactcagcaccacccagctctgctctgg

SEQ ID NO: 374234 - DNA, 120 bp, Artificial Sequence
  ENSG00000142621_101 (sequence is synthesized)
tccacttccttggcgtgtgaacatgcttgaattctaaggttttatcctcaagttggaagatttgtggttgcagccaagaacacactcacgtggacacacacgcatgcatgcacacacaga

SEQ ID NO: 374235 - DNA, 120 bp, Artificial Sequence
  ENSG00000142621_102 (sequence is synthesized)
atatactatatctatgtagttattttcattctgatgatcaccagtctttttgtttgtttgtttgacatgcaacctgccagtgttttactttaattcataataaacacagtaccttctaaa

SEQ ID NO: 374236 - DNA, 120 bp, Artificial Sequence
  ENSG00000142623_0 (sequence is synthesized)
agaactcacacttcttcctggcaaagaagtgcccaggacgggagctggggagccagggctgatctaggaggctgggagccaggtgacaggatggccccaaagagagttgtgcagctgtcc

SEQ ID NO: 374237 - DNA, 120 bp, Artificial Sequence
  ENSG00000142623_1 (sequence is synthesized)
ctgaagatgcctacccatgccgtgtgtgtggtgggagtcgaggcacatgtggacattcacagtgatgtgcccaagggtgccaacagcttcagggtctctggaagctccggggtggaggtc

SEQ ID NO: 374238 - DNA, 120 bp, Artificial Sequence
  ENSG00000142623_2 (sequence is synthesized)
ttcatggtctacaaccgcacacgtgtgaaagagcccataggcaaggcccgttggccgctagacactgatgcagacatggtcgtatctgtgggcacagccagtaaggaattaaaggacttc

SEQ ID NO: 374239 - DNA, 120 bp, Artificial Sequence
  ENSG00000142623_3 (sequence is synthesized)
aaggtgagggtctcctactttggggagcaggaagaccaagctctgggccgcagcgtgctttacctcactggcgtcgatatttcccttgaggttgacacaggccgcacaggcaaggtgaag

SEQ ID NO: 374240 - DNA, 120 bp, Artificial Sequence
  ENSG00000142623_4 (sequence is synthesized)
aggagccaaggggacaagaaaacctggcgctggggccctgagggctatggggctatcttgctggtgaactgtgaccgggacaatcacaggtccgcagagcctgacctcacccacagctgg

SEQ ID NO: 374241 - DNA, 120 bp, Artificial Sequence
  ENSG00000142623_5 (sequence is synthesized)
ctgatgtcgctggctgacctgcaggacatgtccccaatgctgctgagctgcaatggccccgacaagctcttcgacagccacaagcttgtcttgaacgtgcccttttctgattccaaaaga

SEQ ID NO: 374242 - DNA, 120 bp, Artificial Sequence
  ENSG00000142623_6 (sequence is synthesized)
gtgagggtcttctgtgccaggggtgggaattctctctcggactacaaacaggtgctggggccccagtgtctgtcctatgaagttgagcgacagccaggggagcaggagatcaagttctat

SEQ ID NO: 374243 - DNA, 120 bp, Artificial Sequence
  ENSG00000142623_7 (sequence is synthesized)
gtggaggggctgaccttccccgatgccgatttcctagggctggtttccctcagtgtcagcctggtggacccggggaccctgcccgaggtgaccctcttcacagacactgtgggcttccgc

SEQ ID NO: 374244 - DNA, 120 bp, Artificial Sequence
  ENSG00000142623_8 (sequence is synthesized)
atggccccctggatcatgacgcccaacactcagcctcctgaggagctgtatgtgtgcagagtgatggacactcatggctccaatgagaaattcctggaggacatgtcttatctgacattg

SEQ ID NO: 374245 - DNA, 120 bp, Artificial Sequence
  ENSG00000142623_9 (sequence is synthesized)
aaagccaactgcaagctgaccatctgccctcaagttgaaaatcgaaatgaccgctggatccaggacgagatggagtttggctacatcgaggcccctcacaaatccttccccgtggtcttt

SEQ ID NO: 374246 - DNA, 120 bp, Artificial Sequence
  ENSG00000142623_10 (sequence is synthesized)
gactcccccaggaacaggggcctgaaagatttcccctataagaggatcctgggtcctgactttggatatgttacccgggagatcccgctccctggtccctccagccttgactccttcggc

SEQ ID NO: 374247 - DNA, 120 bp, Artificial Sequence
  ENSG00000142623_11 (sequence is synthesized)
aacctggacgtcagcccgcccgtcacggtgggcggcacggaataccccctgggccggatcctcatcgggagcagcttccccaagtccggtgggcggcagatggccagggcagtgcggaac

SEQ ID NO: 374248 - DNA, 120 bp, Artificial Sequence
  ENSG00000142623_12 (sequence is synthesized)
ttcctgaaggcacagcaggtgcaggcacccgtggagctctactcggactggctctctgtgggccatgtggacgagtttctgacctttgtgcctacctctgaccaaaagggcttccggctg

SEQ ID NO: 374249 - DNA, 120 bp, Artificial Sequence
  ENSG00000142623_13 (sequence is synthesized)
ctcctggctagccccagcgcttgcctcaaactcttccaagagaagaaagaagagggttatggggaggcagcccagtttgatgggttaaaacaccaggcaaaaagaagcattaatgagatg

SEQ ID NO: 374250 - DNA, 120 bp, Artificial Sequence
  ENSG00000142623_14 (sequence is synthesized)
ctggcagacagacacctccagagagacaatcttcatgcacagaaatgcattgactggaaccgtaatgtgctgaagcgggagctgggcctggcagagagtgacatcgtggacattccccag

SEQ ID NO: 374251 - DNA, 120 bp, Artificial Sequence
  ENSG00000142623_15 (sequence is synthesized)
ctcttcttcctgaaaaacttctacgcggaagccttcttcccagacatggttaacatggtggtcttaggcaagtacctgggcatccccaagccctacgggcccatcatcaatggccgctgc

SEQ ID NO: 374252 - DNA, 120 bp, Artificial Sequence
  ENSG00000142623_16 (sequence is synthesized)
gaggagaaggtgcagtccctgctggagcctctgggcctgcactgcatcttcattgatgactacttgtcctaccacgagctgcagggggagatccactgtggcaccaacgtgcgcaggaag

SEQ ID NO: 374253 - DNA, 120 bp, Artificial Sequence
  ENSG00000142623_17 (sequence is synthesized)
ccctttcccttcaaatggtggaacatggtgccctgagcctgcccccacccgccatcctctctgccctcttgctagggaaccctgccagggtgaaggcaaggaacaaccacctggcctcca

SEQ ID NO: 374254 - DNA, 120 bp, Artificial Sequence
  ENSG00000142623_18 (sequence is synthesized)
ttctcttgggggagtcttggcactttgcaaacatcctggccaccatgggcaccaggacacagggatggataccacctaccctcgcctctggaatggcctacccaacccgagaagaatgca

SEQ ID NO: 374255 - DNA, 120 bp, Artificial Sequence
  ENSG00000142623_19 (sequence is synthesized)
cctcattcttccctggcctctttcccacccacagcccccagaggctctagatcaacaatgttagcatgttccagaatggctgtgggaggcctagggagatgggccccacttagaattgct

SEQ ID NO: 374256 - DNA, 120 bp, Artificial Sequence
  ENSG00000142623_20 (sequence is synthesized)
cccccttcattctgatgcctccctggggaacaaggataatgactttgcatctgcacctggaacggggcctgggggacctggggtctggtgtgccaggcaccaggctgcctctgctcttgg

SEQ ID NO: 374257 - DNA, 120 bp, Artificial Sequence
  ENSG00000142623_21 (sequence is synthesized)
aaaactaggaaaggggatcagaaacatcctctccccgctctaggtttcttctcccaaaggggacccaaggctgtgacacttacctccacccccatccagcacccttcagctgtgtgtgga

SEQ ID NO: 374258 - DNA, 120 bp, Artificial Sequence
  ENSG00000142623_22 (sequence is synthesized)
caaacaaggacagaaaaacccagtgtccaagggccaatttaaatagaaaaaaagacaacaaaattttaatagctgactccgacctcagaagagtgattgctacctttctggaaagacttt

SEQ ID NO: 374259 - DNA, 120 bp, Artificial Sequence
  ENSG00000142623_23 (sequence is synthesized)
aattaccagagctggcttctcccagctcagaaatgctgagaagccaacgtgaggcctgaggacacacaaaggatgacggggcaggaggggatgaggtcagggtagcagagtgtgtgacga

SEQ ID NO: 374260 - DNA, 120 bp, Artificial Sequence
  ENSG00000142623_24 (sequence is synthesized)
cggatttgggggcctagaggtgtccgtggttcctgggctgggattttggactctggatttgaagggagctggagcttccagatgtagcaggggtagggggccagatgttagaagagggtg

SEQ ID NO: 374261 - DNA, 120 bp, Artificial Sequence
  ENSG00000142623_25 (sequence is synthesized)
tgtgtgttgggaggaaattaggttatctctgaaggtggagtttaatttcctttaatagtctttaattattccccttcattctgcaggcagtgggaggggaaggcttgcccggtctctctc

SEQ ID NO: 374262 - DNA, 120 bp, Artificial Sequence
  ENSG00000142623_26 (sequence is synthesized)
agcaacccagggaccctgcacatagcttaggtttcatccctgaataaaccgctgtgcaggcccatgtcccctcccacagtagggaagacagctgccacgggaggttaatagcccggagtg

SEQ ID NO: 374263 - DNA, 120 bp, Artificial Sequence
  ENSG00000142623_27 (sequence is synthesized)
aggtcactgagacatgcacaggcaggctggttcagctgggctgcagggcacgggcaggaggaagccagcctaccctcttcccccactgccagtgaggccattgtagggcagttggcccta

SEQ ID NO: 374264 - DNA, 120 bp, Artificial Sequence
  ENSG00000142623_28 (sequence is synthesized)
gggcttcggtccatctaggttttcagtggcccctgctgagacctcacactgagccaactactgtcactgttttaaccaacaaaagctagcctggaactgctatggttaaagtgggtgagc

SEQ ID NO: 374265 - DNA, 120 bp, Artificial Sequence
  ENSG00000142623_29 (sequence is synthesized)
gggaacctgaaaatccccttctggaaggttctacagaactctatttgcaagctcctgctttaacctgagcgtcctctgctcaggatcataccccagcctgcactgagtcaagaaggagaa

SEQ ID NO: 374266 - DNA, 120 bp, Artificial Sequence
  ENSG00000142623_30 (sequence is synthesized)
ggaggctctgaaggggccgggggtgtgagctggggttgggactcccctgagaaagagctgtgggtaggaagggagtgagcattgcagagatagggctgggggtcggggccacactgagtg

SEQ ID NO: 374267 - DNA, 120 bp, Artificial Sequence
  ENSG00000142623_31 (sequence is synthesized)
tgggaagctctggagttgctgctgggccatcgaggggccctggtgttggctctgagaatgttctgggtgaccagtcacctactttctgatcaataaaaatgtcgacatgcatttcttaca

SEQ ID NO: 374268 - DNA, 120 bp, Artificial Sequence
  ENSG00000142623_32 (sequence is synthesized)
ggacttcagagactgggggggtctccaggcctcctgtgcctctaagtagggctgtcaggatgtgtccctcatcacctctgcctccgccatctctgaaggtgatggccgtgcaggcttagg

SEQ ID NO: 374269 - DNA, 120 bp, Artificial Sequence
  ENSG00000142623_33 (sequence is synthesized)
gacacctccagagagacaatcttcatgcacaggtgagaggcaggaccaccagctgctctaaggggtcctttcccttccagggagaagaagccccaggaactgggttgggtcagagattca

SEQ ID NO: 374270 - DNA, 120 bp, Artificial Sequence
  ENSG00000142623_34 (sequence is synthesized)
gcgctggagctctcatggtcctgggggctgctggggcctgcaggtgggatagagcctctgccttcaggaacccacagtctgatggaagagacagagccatgccctcagagagctcccagc

SEQ ID NO: 374271 - DNA, 120 bp, Artificial Sequence
  ENSG00000142623_35 (sequence is synthesized)
ctaatgagggagacccggccccacgctggggcaatgacctattttcacagaagcaaatctgagcctctcatctgagaagtctggtgaaatgcgagagacacggtggggaaataggacctt

SEQ ID NO: 374272 - DNA, 120 bp, Artificial Sequence
  ENSG00000142623_36 (sequence is synthesized)
gaggggcccagaggtggggtgggtaagattcagggggatcctgtgggaacaggtgaagcaaggtgtcaggaaggggcagggctcaccccaaggataaaaaatgcctgccccatgcaaggc

SEQ ID NO: 374273 - DNA, 120 bp, Artificial Sequence
  ENSG00000142623_37 (sequence is synthesized)
gaaggggctagcacagagtcggtgctcagttaatggcaggagggcccttaccccttcccggtagtgcccagcgctttctcctaagctgctgagaagggacaggagcatcagccatgctgt

SEQ ID NO: 374274 - DNA, 120 bp, Artificial Sequence
  ENSG00000142623_38 (sequence is synthesized)
ggctggggctgggacagtgtgttgtgctgacaagaacatttgcatccagaaactgcctgggttcgaaccccagctttggcacatcctagccttgtgcacttgagcaggttgcctgagcct

SEQ ID NO: 374275 - DNA, 120 bp, Artificial Sequence
  ENSG00000142623_39 (sequence is synthesized)
cagtttcccccggacagcaatggtttctattgcacaaagctgttgtgaggcttgaaggagctagcgggcccagagggctccacacgggcccagcgcacagtaggtgcttggccagtgtta

SEQ ID NO: 374276 - DNA, 120 bp, Artificial Sequence
  ENSG00000142627_0 (sequence is synthesized)
attaaggactcggggcaggaggggcagaagttgcgcgcaggccggcgggcgggagcggacaccgaggccggcgtgcaggcgtgcgggtgtgcgggagccgggctcggggggatcggaccg

SEQ ID NO: 374277 - DNA, 120 bp, Artificial Sequence
  ENSG00000142627_1 (sequence is synthesized)
agagcgagaagcgcggcatggagctccaggcagcccgcgcctgcttcgccctgctgtggggctgtgcgctggccgcggccgcggcggcgcagggcaaggaagtggtactgctggactttg

SEQ ID NO: 374278 - DNA, 120 bp, Artificial Sequence
  ENSG00000142627_2 (sequence is synthesized)
ctgcagctggaggggagctcggctggctcacacacccgtatggcaaagggtgggacctgatgcagaacatcatgaatgacatgccgatctacatgtactccgtgtgcaacgtgatgtctg

SEQ ID NO: 374279 - DNA, 120 bp, Artificial Sequence
  ENSG00000142627_3 (sequence is synthesized)
gcgaccaggacaactggctccgcaccaactgggtgtaccgaggagaggctgagcgtatcttcattgagctcaagtttactgtacgtgactgcaacagcttccctggtggcgccagctcct

SEQ ID NO: 374280 - DNA, 120 bp, Artificial Sequence
  ENSG00000142627_4 (sequence is synthesized)
gcaaggagactttcaacctctactatgccgagtcggacctggactacggcaccaacttccagaagcgcctgttcaccaagattgacaccattgcgcccgatgagatcaccgtcagcagcg

SEQ ID NO: 374281 - DNA, 120 bp, Artificial Sequence
  ENSG00000142627_5 (sequence is synthesized)
acttcgaggcacgccacgtgaagctgaacgtggaggagcgctccgtggggccgctcacccgcaaaggcttctacctggccttccaggatatcggtgcctgtgtggcgctgctctccgtcc

SEQ ID NO: 374282 - DNA, 120 bp, Artificial Sequence
  ENSG00000142627_6 (sequence is synthesized)
gtgtctactacaagaagtgccccgagctgctgcagggcctggcccacttccctgagaccatcgccggctctgatgcaccttccctggccactgtggccggcacctgtgtggaccatgccg

SEQ ID NO: 374283 - DNA, 120 bp, Artificial Sequence
  ENSG00000142627_7 (sequence is synthesized)
tggtgccaccggggggtgaagagccccgtatgcactgtgcagtggatggcgagtggctggtgcccattgggcagtgcctgtgccaggcaggctacgagaaggtggaggatgcctgccagg

SEQ ID NO: 374284 - DNA, 120 bp, Artificial Sequence
  ENSG00000142627_8 (sequence is synthesized)
cctgctcgcctggattttttaagtttgaggcatctgagagcccctgcttggagtgccctgagcacacgctgccatcccctgagggtgccacctcctgcgagtgtgaggaaggcttcttcc

SEQ ID NO: 374285 - DNA, 120 bp, Artificial Sequence
  ENSG00000142627_9 (sequence is synthesized)
gggcacctcaggacccagcgtcgatgccttgcacacgacccccctccgccccacactacctcacagccgtgggcatgggtgccaaggtggagctgcgctggacgccccctcaggacagcg

SEQ ID NO: 374286 - DNA, 120 bp, Artificial Sequence
  ENSG00000142627_10 (sequence is synthesized)
ggggccgcgaggacattgtctacagcgtcacctgcgaacagtgctggcccgagtctggggaatgcgggccgtgtgaggccagtgtgcgctactcggagcctcctcacggactgacccgca

SEQ ID NO: 374287 - DNA, 120 bp, Artificial Sequence
  ENSG00000142627_11 (sequence is synthesized)
ccagtgtgacagtgagcgacctggagccccacatgaactacaccttcaccgtggaggcccgcaatggcgtctcaggcctggtaaccagccgcagcttccgtactgccagtgtcagcatca

SEQ ID NO: 374288 - DNA, 120 bp, Artificial Sequence
  ENSG00000142627_12 (sequence is synthesized)
accagacagagccccccaaggtgaggctggagggccgcagcaccacctcgcttagcgtctcctggagcatccccccgccgcagcagagccgagtgtggaagtacgaggtcacttaccgca

SEQ ID NO: 374289 - DNA, 120 bp, Artificial Sequence
  ENSG00000142627_13 (sequence is synthesized)
agaagggagactccaacagctacaatgtgcgccgcaccgagggtttctccgtgaccctggacgacctggccccagacaccacctacctggtccaggtgcaggcactgacgcaggagggcc

SEQ ID NO: 374290 - DNA, 120 bp, Artificial Sequence
  ENSG00000142627_14 (sequence is synthesized)
agggggccggcagcaaggtgcacgaattccagacgctgtccccggagggatctggcaacttggcggtgattggcggcgtggctgtcggtgtggtcctgcttctggtgctggcaggagttg

SEQ ID NO: 374291 - DNA, 120 bp, Artificial Sequence
  ENSG00000142627_15 (sequence is synthesized)
gcttctttatccaccgcaggaggaagaaccagcgtgcccgccagtccccggaggacgtttacttctccaagtcagaacaactgaagcccctgaagacatacgtggacccccacacatatg

SEQ ID NO: 374292 - DNA, 120 bp, Artificial Sequence
  ENSG00000142627_16 (sequence is synthesized)
catgctgaagacatcctcggggaagaaggaggtgccggtggccatcaagacgctgaaagccggctacacagagaagcagcgagtggacttcctcggcgaggccggcatcatgggccagtt

SEQ ID NO: 374293 - DNA, 120 bp, Artificial Sequence
  ENSG00000142627_17 (sequence is synthesized)
cagccaccacaacatcatccgcctagagggcgtcatctccaaatacaagcccatgatgatcatcactgagtacatggagaatggggccctggacaagttccttcgggagaaggatggcga

SEQ ID NO: 374294 - DNA, 120 bp, Artificial Sequence
  ENSG00000142627_18 (sequence is synthesized)
gttcagcgtgctgcagctggtgggcatgctgcggggcatcgcagctggcatgaagtacctggccaacatgaactatgtgcaccgtgacctggctgcccgcaacatcctcgtcaacagcaa

SEQ ID NO: 374295 - DNA, 120 bp, Artificial Sequence
  ENSG00000142627_19 (sequence is synthesized)
cctggtctgcaaggtgtctgactttggcctgtcccgcgtgctggaggacgaccccgaggccacctacaccaccagtggcggcaagatccccatccgctggaccgccccggaggccatttc

SEQ ID NO: 374296 - DNA, 120 bp, Artificial Sequence
  ENSG00000142627_20 (sequence is synthesized)
ctaccggaagttcacctctgccagcgacgtgtggagctttggcattgtcatgtgggaggtgatgacctatggcgagcggccctactgggagttgtccaaccacgaggtgatgaaagccat

SEQ ID NO: 374297 - DNA, 120 bp, Artificial Sequence
  ENSG00000142627_21 (sequence is synthesized)
caatgatggcttccggctccccacacccatggactgcccctccgccatctaccagctcatgatgcagtgctggcagcaggagcgtgcccgccgccccaagttcgctgacatcgtcagcat

SEQ ID NO: 374298 - DNA, 120 bp, Artificial Sequence
  ENSG00000142627_22 (sequence is synthesized)
cctggacaagctcattcgtgcccctgactccctcaagaccctggctgactttgacccccgcgtgtctatccggctccccagcacgagcggctcggagggggtgcccttccgcacggtgtc

SEQ ID NO: 374299 - DNA, 120 bp, Artificial Sequence
  ENSG00000142627_23 (sequence is synthesized)
cgagtggctggagtccatcaagatgcagcagtatacggagcacttcatggcggccggctacactgccatcgagaaggtggtgcagatgaccaacgacgacatcaagaggattggggtgcg

SEQ ID NO: 374300 - DNA, 120 bp, Artificial Sequence
  ENSG00000142627_24 (sequence is synthesized)
gctgcccggccaccagaagcgcatcgcctacagcctgctgggactcaaggaccaggtgaacactgtggggatccccatctgagcctcgacagggcctggagccccatcggccaagaatac

SEQ ID NO: 374301 - DNA, 120 bp, Artificial Sequence
  ENSG00000142627_25 (sequence is synthesized)
ttgaagaaacagagtggcctccctgctgtgccatgctgggccactggggactttatttatttctagttctttcctccccctgcaacttccgctgaggggtctcggatgacaccctggcct

SEQ ID NO: 374302 - DNA, 120 bp, Artificial Sequence
  ENSG00000142627_26 (sequence is synthesized)
gaactgaggagatgaccagggatgctgggctgggccctctttccctgcgagacgcacacagctgagcacttagcaggcaccgccacgtcccagcatccctggagcaggagccccgccaca

SEQ ID NO: 374303 - DNA, 120 bp, Artificial Sequence
  ENSG00000142627_27 (sequence is synthesized)
gccttcggacagacatatgggatattcccaagccgaccttccctccgccttctcccacatgaggccatctcaggagatggagggcttggcccagcgccaagtaaacagggtacctcaagc

SEQ ID NO: 374304 - DNA, 120 bp, Artificial Sequence
  ENSG00000142627_28 (sequence is synthesized)
cccatttcctcacactaagagggcagactgtgaacttgactgggtgagacccaaagcggtccctgtccctctagtgccttctttagaccctcgggccccatcctcatccctgactggcca

SEQ ID NO: 374305 - DNA, 120 bp, Artificial Sequence
  ENSG00000142627_29 (sequence is synthesized)
aacccttgctttcctgggcctttgcaagatgcttggttgtgttgaggtttttaaatatatattttgtactttgtggagagaatgtgtgtgtgtggcagggggccccgccagggctgggga

SEQ ID NO: 374306 - DNA, 120 bp, Artificial Sequence
  ENSG00000142627_30 (sequence is synthesized)
cagagggtgtcaaacattcgtgagctggggactcagggaccggtgctgcaggagtgtcctgcccatgccccagtcggccccatctctcatccttttggataagtttctattctgtcagtg

SEQ ID NO: 374307 - DNA, 120 bp, Artificial Sequence
  ENSG00000142627_31 (sequence is synthesized)
ttaaagattttgttttgttggacatttttttcgaatcttaatttattattttttttatatttattgttagaaaatgacttatttctgctctggaataaagttgcagatgattcaaaccga

SEQ ID NO: 374308 - DNA, 120 bp, Artificial Sequence
  ENSG00000142627_32 (sequence is synthesized)
aggggctctgtctgtgactgtgcccacctcccctatacctgtgcccaccttccccccacacctgcacccacctcctctacaactgtgcccacttctccccaatacctgtacccacctcct

SEQ ID NO: 374309 - DNA, 120 bp, Artificial Sequence
  ENSG00000142632_0 (sequence is synthesized)
acacaatacccaggagcttgccttgctcggctctggggccatgctgacatgctgacatcgccccctgaggacttggctgcaaccccagagcccccagggtgtcccggagccctggaccgt

SEQ ID NO: 374310 - DNA, 120 bp, Artificial Sequence
  ENSG00000142632_1 (sequence is synthesized)
gctggcagctggacggagctccctggctgagggccaggtgggtggcagagcaaaagaggaatggactgtgggccacctgctaccctccagccccacctgactgggccacctggcactgcc

SEQ ID NO: 374311 - DNA, 120 bp, Artificial Sequence
  ENSG00000142632_2 (sequence is synthesized)
caccaccctgtagcagtgtgccagcaggagagtctgtcctttgcagagctgcccgccctgaagcccccgagcccagtgtgtctggaccttttccctgttgccccagaggagcttcgggct

SEQ ID NO: 374312 - DNA, 120 bp, Artificial Sequence
  ENSG00000142632_3 (sequence is synthesized)
cctggcagccgctggtccctggggacccctgcccctctccaagggttgctatggccattatccccaggaggctcagatacagagatcaccagcggggggatgcggcccagcagggctggc

SEQ ID NO: 374313 - DNA, 120 bp, Artificial Sequence
  ENSG00000142632_4 (sequence is synthesized)
agctggccacactgtcctggtgcccagcccccagctctggagggaccctggagtccccgacacacacagccacagcgccgggccagccacggctcggagaagaagtctgcctggcgcaag

SEQ ID NO: 374314 - DNA, 120 bp, Artificial Sequence
  ENSG00000142632_5 (sequence is synthesized)
atgcgggtgtaccagcgtgaagaggtccccggctgccccgaggcccacgctgtcttcctagagcctggccaggtagtgcaagagcaggccctgagcacagaggagcccagggtggagttg

SEQ ID NO: 374315 - DNA, 120 bp, Artificial Sequence
  ENSG00000142632_6 (sequence is synthesized)
tctgggtccacccgagtgagcctcgaaggtcctgagcggaggcgcttctcggcatcggagctgatgacccggctgcactcttctctgcgcctggggcggaattcagcagcccgggcactc

SEQ ID NO: 374316 - DNA, 120 bp, Artificial Sequence
  ENSG00000142632_7 (sequence is synthesized)
atctctgggtcaggcaccggagcagcccgggaagggaaagcatctggaatggaggctcgaagtgtagagatgagcggggaccgggtgtcgcggccagcccctggtgactcacgagagggc

SEQ ID NO: 374317 - DNA, 120 bp, Artificial Sequence
  ENSG00000142632_8 (sequence is synthesized)
gattggtccgagcccaggctagacacacaggaagagccgcctttggggtccaggagcaccaacgagcggcgccagtctcgattcctccttaactccgtcctctatcaggaatacagcgac

SEQ ID NO: 374318 - DNA, 120 bp, Artificial Sequence
  ENSG00000142632_9 (sequence is synthesized)
gaatacagcgacgtggccagcgcccgcgaactgcggcggcagcagcgcgaggaggagggcccgggggacgaggccgagggcgcagaggaggggccggggccgccgcgggccaacctctcc

SEQ ID NO: 374319 - DNA, 120 bp, Artificial Sequence
  ENSG00000142632_10 (sequence is synthesized)
ttccgggcgcagcgctcggcgcgaggctccaccttctcgctgtggcaggatatccccgacgtacgcggcagcggcgtcctggccacgctgagcctgcgggactgcaagctgcaggaggcc

SEQ ID NO: 374320 - DNA, 120 bp, Artificial Sequence
  ENSG00000142632_11 (sequence is synthesized)
aagtttgagctgatcacctccgaggcctcctacatccacagcctgtcggtggctgtgggccacttcttaggctctgccgagctgagcgagtgtctgggggcgcaggacaagcagtggctg

SEQ ID NO: 374321 - DNA, 120 bp, Artificial Sequence
  ENSG00000142632_12 (sequence is synthesized)
ttttccaaactgcccgaggtcaagagcaccagcgagaggttcctgcaggacctggagcagcggctggaggcagatgtgctgcgcttcagcgtgtgcgacgtggtgctggaccactgcccg

SEQ ID NO: 374322 - DNA, 120 bp, Artificial Sequence
  ENSG00000142632_13 (sequence is synthesized)
ccaggttccctggcatcctggctcgcctggaggagtctcctgtgtgccagcgtctgccccttacctccttccttatcctgcccttccagaggatcacccgcctcaagatgttggtggaga

SEQ ID NO: 374323 - DNA, 120 bp, Artificial Sequence
  ENSG00000142632_14 (sequence is synthesized)
acatcctgaagcggacagcacagggctctgaagacgaagacatggccaccaaggccttcaatgcgctcaaggagctggtgcaggagtgcaatgctagtgtacagtccatgaagaggacag

SEQ ID NO: 374324 - DNA, 120 bp, Artificial Sequence
  ENSG00000142632_15 (sequence is synthesized)
aggaactcatccacctgagcaagaagatccactttgagggcaagattttcccgctgatctctcaggcccgctggctggttcggcatggagagttggtagagctggcaccactgcctgcag

SEQ ID NO: 374325 - DNA, 120 bp, Artificial Sequence
  ENSG00000142632_16 (sequence is synthesized)
caccccctgccaagctgaagctgtccagcaaggcagtctacctccacctcttcaatgactgcttgctgctctctcggcggaaggagctagggaagtttgccgttttcgtccatgccaaga

SEQ ID NO: 374326 - DNA, 120 bp, Artificial Sequence
  ENSG00000142632_17 (sequence is synthesized)
tggctgagctgcaggtgcgggacctgagcctgaagctgcagggcatccccggccacgtgttcctcctccagctcctccacgggcagcacatgaagcaccagttcctgctgcgggcccgga

SEQ ID NO: 374327 - DNA, 120 bp, Artificial Sequence
  ENSG00000142632_18 (sequence is synthesized)
cggaaagtgagaagcagcgatggatctcagccttgtgcccctccagcccccaggaggacaaggaggtcatcagtgagggggaagattgcccccaggttcagtgtgttaggacatacaagg

SEQ ID NO: 374328 - DNA, 120 bp, Artificial Sequence
  ENSG00000142632_19 (sequence is synthesized)
cactgcacccagatgagctgaccttggagaagactgacatcctgtcagtgaggacctggaccagtgacggctggctggaaggggtccgcctggcagatggtgagaaggggtgggtgcccc

SEQ ID NO: 374329 - DNA, 120 bp, Artificial Sequence
  ENSG00000142632_20 (sequence is synthesized)
aggcctatgtggaagagatcagcagcctcagcgcccgcctccgaaacctccgggagaataagcgagtcacaagtgccaccagcaaactgggggaggctcctgtgtgatgggcagccatgg

SEQ ID NO: 374330 - DNA, 120 bp, Artificial Sequence
  ENSG00000142632_21 (sequence is synthesized)
cctaggaccccacctccatgcctggctcctggatggtcctggaggggcctgcagtgtctccattccccaagctgctcctgctggcacttcgcttctgtggccttggcattgagggcacag

SEQ ID NO: 374331 - DNA, 120 bp, Artificial Sequence
  ENSG00000142632_22 (sequence is synthesized)
gctggacacaggaatgggggcgcctccagagggtctctccgtcctcatgctcctcagtgtccacacttcaaggccaaggatagtttcttcctctgacatggggaccataacaggtgatca

SEQ ID NO: 374332 - DNA, 120 bp, Artificial Sequence
  ENSG00000142632_23 (sequence is synthesized)
ctgatacctggcaaagactggggccctctcctttctatgtcctcaatcctgcctgactcttggtccttctggcagggacctggctggggaacgttctggtgctgatggtgctgggaccta

SEQ ID NO: 374333 - DNA, 120 bp, Artificial Sequence
  ENSG00000142632_24 (sequence is synthesized)
tatgtatatttatatatatctggggtcttgtctaccacctcccctggtcagagcctgagtgggtgctggttgctgtgtcttgtctgtaaataaactcctatcatgcctttgcttggagtc

SEQ ID NO: 374334 - DNA, 120 bp, Artificial Sequence
  ENSG00000142632_25 (sequence is synthesized)
tgtgatccatctgatgctgcccccacccccacagtcctattttcccagctaaagaccaggagagtctccggctggctcccaactggggctttgcatttctctagagttcatctctgagct

SEQ ID NO: 374335 - DNA, 120 bp, Artificial Sequence
  ENSG00000142632_26 (sequence is synthesized)
gtaagggtgaccagggggcagggggacgattgtgtatcagctaggctgcttttggctgcaagtaacaaaatatcagatacaaataggcttaaacattaaagagatttgattagttcttta

SEQ ID NO: 374336 - DNA, 120 bp, Artificial Sequence
  ENSG00000142632_27 (sequence is synthesized)
tacctgccctatgtcaccaaccaggcctaccaggagcgcacctaccagcgcctgctgtagggctgggggctctgaaaggggcgggggcgtggagggagtctcaggcaggtgtaggcactg

SEQ ID NO: 374337 - DNA, 120 bp, Artificial Sequence
  ENSG00000142632_28 (sequence is synthesized)
agggctgggtgacgtaaggtgactctgggaggggaggggtccctgaaaaggtctctgtgaccaggataaggtgagatgcaaccccaaagggcagtaaggatgtgctgagaagccccctga

SEQ ID NO: 374338 - DNA, 120 bp, Artificial Sequence
  ENSG00000142632_29 (sequence is synthesized)
ggaccccgtggatggccagggttgtggatcccaggaattcaggcctacctgtgattccagagtcctccccattttccagcctggagaaccccaggttccctggcatcctggctcgcctgg

SEQ ID NO: 374339 - DNA, 120 bp, Artificial Sequence
  ENSG00000142632_30 (sequence is synthesized)
gaaaggcttgcacaatttcccgcggcgggacgtgggtcgccgggcccgcccggcgccagattaggagtggggctagagaaggggcgaggacgcgaggtgtggcgtcctggggtctgggga

SEQ ID NO: 374340 - DNA, 120 bp, Artificial Sequence
  ENSG00000142634_0 (sequence is synthesized)
gagtgtcaggaagaggaagagcgcggccggcggcgctgcgctgagagcaggggcccggccaaggcgagtgccgcgcgggccaccatggccacggacgagctggccaccaagctgagccgg

SEQ ID NO: 374341 - DNA, 80 bp, Artificial Sequence
  ENSG00000142634_1 (sequence is synthesized)
tgagccggcggctgcagatggagggcgagggcggcggcgagaccccggagcagcccgggctgaacggggcagcggcggcg

SEQ ID NO: 374342 - DNA, 120 bp, Artificial Sequence
  ENSG00000142634_2 (sequence is synthesized)
tgcgagctgagcgccaagctgctgcggcgcgcagacctcaaccagggcatcggcgagccccagtcgcccagccgccgcgtcttcaacccctacaccgagttcaaggagttctccaggaag

SEQ ID NO: 374343 - DNA, 120 bp, Artificial Sequence
  ENSG00000142634_3 (sequence is synthesized)
cagatcaaggacatggagaagatgttcaagcagtatgatgccgggcgggacggcttcatcgacctgatggagctaaaactcatgatggagaaacttggggcccctcagacccacctgggc

SEQ ID NO: 374344 - DNA, 120 bp, Artificial Sequence
  ENSG00000142634_4 (sequence is synthesized)
ctgaaaaacatgatcaaggaggtggatgaggactttgacagcaagctgagcttccgggagttcctcctgatcttccgcaaggcggcggccggggagcttcaggaggacagcgggctgtgc

SEQ ID NO: 374345 - DNA, 120 bp, Artificial Sequence
  ENSG00000142634_5 (sequence is synthesized)
gtgctggcccgcctctctgagatcgacgtctccagtgagggtgtcaagggggccaagagcttctttgaggccaaggtccaggccatcaacgtgtccagccgcttcgaggaggagatcaag

SEQ ID NO: 374346 - DNA, 120 bp, Artificial Sequence
  ENSG00000142634_6 (sequence is synthesized)
gcagagcaggaggaaaggaagaagcaggcggaggagatgaagcagcggaaagcggccttcaaggagctgcagtccacctttaagtagcgggggctgcagccgaccgccctgctccggccc

SEQ ID NO: 374347 - DNA, 120 bp, Artificial Sequence
  ENSG00000142634_7 (sequence is synthesized)
cagtgtggtgggcgagggtggcgcatgggaggccgagcctgaatccttgcctgtgtctgacgggaccactactaaaaacctaaaaatatctgtgaatggagcaagttcaggggtcttatg

SEQ ID NO: 374348 - DNA, 120 bp, Artificial Sequence
  ENSG00000142634_8 (sequence is synthesized)
gaggtggcccggcccctccccgctcccttccactctgcacgaggccgccacaccggcgctggctccctgcccggcccggccctccctggcaatccctgggctctcttgcacccctaactg

SEQ ID NO: 374349 - DNA, 120 bp, Artificial Sequence
  ENSG00000142634_9 (sequence is synthesized)
ccccctgcctgctccggcactgccccaggcccagctcctggccctaggtccctcccagccccatgtgcctgccgcctgccctccacacatccctgtccccccaacccgggaacccctgcc

SEQ ID NO: 374350 - DNA, 120 bp, Artificial Sequence
  ENSG00000142634_10 (sequence is synthesized)
ccctggggccccctgccagccccttcccaggctgggagacggcagaagagatagaatcagggctgcccccacagagtgggacccaaggggctaattggaggcacgaggggacccctcccc

SEQ ID NO: 374351 - DNA, 120 bp, Artificial Sequence
  ENSG00000142634_11 (sequence is synthesized)
agggccttttcctcctctgcgtcttccatctactgaaatgggagagggggtggggagcttctgttctggtgaagggacccgggcaggcccccagcaccccatgctgacttggagaacccc

SEQ ID NO: 374352 - DNA, 120 bp, Artificial Sequence
  ENSG00000142634_12 (sequence is synthesized)
agatctctggggcccagccaggcagggtgtgggggcagctgtgccaatctacctcacaggcccaccccctgccgggcatgccgtgggatcatgggcagggaaggctctgggggtcggaga

SEQ ID NO: 374353 - DNA, 120 bp, Artificial Sequence
  ENSG00000142634_13 (sequence is synthesized)
caccgctgcttagcacccccagccagaacaccctgagggtctcggggctctggagagagtggggcgggaggaagaattggcaccttcctagggaaggagacgagcgcttcgccttgattc

SEQ ID NO: 374354 - DNA, 120 bp, Artificial Sequence
  ENSG00000142634_14 (sequence is synthesized)
tccgagaagcctccgagaagtgctttaagtgtgtttgcatgcgccaggcggtgggcagcgggggcctgtccagccctctcccgccatccttccccaagtgacgtccactgccttgtcacc

SEQ ID NO: 374355 - DNA, 120 bp, Artificial Sequence
  ENSG00000142634_15 (sequence is synthesized)
agcgacctgcctgtcatgcccaccccctgaggaagcatggggaccctaacaccctggtgccctgcaccagacaggccgtggtcaggcccaggccaccggccgggttctgccacagcttcc

SEQ ID NO: 374356 - DNA, 120 bp, Artificial Sequence
  ENSG00000142634_16 (sequence is synthesized)
cacgtgcttgctgacatgcgtgtgcctgtgtgtggtgtctgttgctgtgtcgtgaaactgtgaccatcactcagtccaaacaagtgagtggccctcgaggccacagttatgcaactttca

SEQ ID NO: 374357 - DNA, 120 bp, Artificial Sequence
  ENSG00000142634_17 (sequence is synthesized)
gtgtgtgtcataacgacgtcactgctttttaaactcgataactctttattttagtaaaatgcccaggagtcctggaagctacgcggacttgcagaggttttattttttggccttagaatc

SEQ ID NO: 374358 - DNA, 120 bp, Artificial Sequence
  ENSG00000142634_18 (sequence is synthesized)
tgcagaaattaggaggcaccgagcccagcgcagcagcctcggacccggattgcgtttgccttagcggatatgtttatacagatgaatataaaatgtttttttctttgggctttttgcttc

SEQ ID NO: 374359 - DNA, 120 bp, Artificial Sequence
  ENSG00000142634_19 (sequence is synthesized)
ttttttcccccccttctcaccttcccttctccccgaccccaccccccaaaaaagctacttcttcattccgtggtacgattattttttttaactaaaggaagataaaattctatattctta

SEQ ID NO: 374360 - DNA, 120 bp, Artificial Sequence
  ENSG00000142655_0 (sequence is synthesized)
agtcaggcctcagaaagatggcgtcctcggagcaggcagagcagccgagccagccaagctctactccaggaagtgaaaatgtgctgcctcgagagccgctgattgccacggcagtgaagt

SEQ ID NO: 374361 - DNA, 120 bp, Artificial Sequence
  ENSG00000142655_1 (sequence is synthesized)
ttctacagaattcccgggtccgccagagcccacttgcaaccaggagagcattcctaaagaagaaagggctgacagatgaagagattgatatggccttccagcagtcgggcactgctgccg

SEQ ID NO: 374362 - DNA, 120 bp, Artificial Sequence
  ENSG00000142655_2 (sequence is synthesized)
atgagccttcgtccttgggcccagccacacaggtggttcctgtccagccccctcacctcatatctcagccatacagtcccgcaggctcccgatggcgagattacggcgccctggccatca

SEQ ID NO: 374363 - DNA, 120 bp, Artificial Sequence
  ENSG00000142655_3 (sequence is synthesized)
tcatggcaggcattgcatttggctttcaccagctctacaagaaatacctgctccccctcatcctgggcggccgagaggacagaaagcagctggagaggatggaggccggtctctctgagc

SEQ ID NO: 374364 - DNA, 120 bp, Artificial Sequence
  ENSG00000142655_4 (sequence is synthesized)
tgagtggcagcgtggcccagacagtgactcagttacagacgaccctcgcctccgtccaggagctgctgattcagcagcagcagaagatccaggagcttgcccacgagctggccgctgcca

SEQ ID NO: 374365 - DNA, 120 bp, Artificial Sequence
  ENSG00000142655_5 (sequence is synthesized)
aggccaccacatccaccaactggatcctggagtcccagaatatcaacgaactcaagtccgaaattaactccttgaaagggcttcttttaaatcggaggcagttccctccatccccatcag

SEQ ID NO: 374366 - DNA, 120 bp, Artificial Sequence
  ENSG00000142655_6 (sequence is synthesized)
ccccgaagatcccctcctggcagatcccagtcaagtcaccgtcaccctccagccctgcggccgtgaaccaccacagcagcagcgacatctcacctgtcagcaacgagtccacgtcgtcct

SEQ ID NO: 374367 - DNA, 120 bp, Artificial Sequence
  ENSG00000142655_7 (sequence is synthesized)
cgcctgggaaggagggccacagccccgagggctccacggtcacctaccacttgctgggcccccaggaggaaggcgagggggtggtggacgtcaagggccaggtgcggatggaggtgcaag

SEQ ID NO: 374368 - DNA, 120 bp, Artificial Sequence
  ENSG00000142655_8 (sequence is synthesized)
gaggaggagaagagggaggacaaggaggacgaggaggatgaggaggatgatgatgtgagccatgtggacgaggaggactgcctgggggtgcagagggaggaccgccggggcggggatggg

SEQ ID NO: 374369 - DNA, 120 bp, Artificial Sequence
  ENSG00000142655_9 (sequence is synthesized)
cagatcaacgagcaggtggagaagctgcggcggcccgagggcgccagcaacgagagtgagcgggactagggctgcgcctgctgcctccagccctgaggatggcatctagtgtgcccgtgc

SEQ ID NO: 374370 - DNA, 120 bp, Artificial Sequence
  ENSG00000142655_10 (sequence is synthesized)
gtggccataccctgcctccctctctggccctgggagggcagcttggagcccaggtagggggcagagctgtcctcagctgcactgcggcctggtggcagtgtggggagtcacacttctgtc

SEQ ID NO: 374371 - DNA, 120 bp, Artificial Sequence
  ENSG00000142655_11 (sequence is synthesized)
cacctggcctcctctcgcctggccgccagccccagccccagccccagccccaggcccagctgcctttggctttgatctcaagtcaggctgaaggcagcgaagcctcggggcccaagcccc

SEQ ID NO: 374372 - DNA, 120 bp, Artificial Sequence
  ENSG00000142655_12 (sequence is synthesized)
tccccagccccctctcccggacagacgccttgcccagggtgtgtttgctgagtgtcttgactaccgtgacaccacgcatggccagagctagcgtccctactgcctcccgactcctcagtg

SEQ ID NO: 374373 - DNA, 120 bp, Artificial Sequence
  ENSG00000142655_13 (sequence is synthesized)
gaggaggagctgcggtccctctggtgtctgccatccccctccctccctgggcccggccctggacccgtcaggtgcctgtccccagccccaaccccactcatgccccgtcgtcctcccaga

SEQ ID NO: 374374 - DNA, 120 bp, Artificial Sequence
  ENSG00000142655_14 (sequence is synthesized)
caaatgaaaccacgctgcgcttccgatgcccccgcttgccgtgtaatggttcagctaatcccatggcgagatgggggctcactccggaggaggagccaggcagcagggccttcctgacca

SEQ ID NO: 374375 - DNA, 120 bp, Artificial Sequence
  ENSG00000142655_15 (sequence is synthesized)
acagccagctctgtccttccccccaggaaacacatgttcatttgtgtgatcatgtatagacctcagaacggaagataggactgtatataattgtaataaataccagttgccactatttaa

SEQ ID NO: 374376 - DNA, 120 bp, Artificial Sequence
  ENSG00000142655_16 (sequence is synthesized)
ctcccccacaccctcgcccggggtcccgagccaacccttgctcctcaggtcttcgaggcaggaggcggccacgccgtgctgttcgcggctgtagttgcggcgcagcagacacggctttag

SEQ ID NO: 374377 - DNA, 120 bp, Artificial Sequence
  ENSG00000142655_17 (sequence is synthesized)
agtccggatctcgccagattctggtaccccggcgtccccggtcacctccatcctccacaaggtgggacctgcccaccttcgagaagtcgcgggaggccggagcggcggtccttctactcg

SEQ ID NO: 374378 - DNA, 120 bp, Artificial Sequence
  ENSG00000142655_18 (sequence is synthesized)
acccccttccgcagcctgccgggagatgtagttcgttccgcagcaaatcacacccaagctctactccaggaagtgaaaatgtgctgcctcgagagccgctgttttcagagcccaagcctg

SEQ ID NO: 374379 - DNA, 120 bp, Artificial Sequence
  ENSG00000142655_19 (sequence is synthesized)
attgccacggcagtgaagtttctacagaattcccgggtccgccagagcccacttgcaaccaggagagcattcctaaagaagaaaggtacaggttccacagggctgtgcagcacggcctac

SEQ ID NO: 374380 - DNA, 120 bp, Artificial Sequence
  ENSG00000142655_20 (sequence is synthesized)
agggggactggggctggggcagatggaagccacggtgcaaggcaggtgctgagctgccaggacttcctagagctgcccactcatggggcagtggggctgaggcgaaccccccagtggggc

SEQ ID NO: 374381 - DNA, 120 bp, Artificial Sequence
  ENSG00000142655_21 (sequence is synthesized)
atgcaggtttctttcctgacaatggagcggcaagatgacacgattcgggtaattaagcacggatgacttagtccagtccatcatggcaaaggcagcattcagtagcagagtcggcccatt

SEQ ID NO: 374382 - DNA, 120 bp, Artificial Sequence
  ENSG00000142655_22 (sequence is synthesized)
aagcagccccttctctgcccctcccctctccctctgtctccactctatgtggtgacttcatttatctgctctgagaatctgttcacatttgcaaatgaagccgccgtcatttcggtttaa

SEQ ID NO: 374383 - DNA, 120 bp, Artificial Sequence
  ENSG00000142655_23 (sequence is synthesized)
catgggtgcgcatggccacacctgccggggagtatgaagaatcagctcgaatggagatcaggaggaacaggaaggatcgtcgcaggcctgaagctcggcagagggattagatttgacaga

SEQ ID NO: 374384 - DNA, 120 bp, Artificial Sequence
  ENSG00000142655_24 (sequence is synthesized)
ggaagccagtgaagacagggaaacaacatcgcctttcatttagattgccacggcagtgaagtttctacagaattcccgggtccgccagagcccacttgcaaccaggagagcattcctaaa

SEQ ID NO: 374385 - DNA, 120 bp, Artificial Sequence
  ENSG00000142657_0 (sequence is synthesized)
ccctcactcgtcctccgcgcgtcgccgctcttcggttctgctctgtccgccgccatggcccaagctgacatcgcgctgatcggattggccgtcatgggccagaacttaattctgaacatg

SEQ ID NO: 374386 - DNA, 120 bp, Artificial Sequence
  ENSG00000142657_1 (sequence is synthesized)
aatgaccacggctttgtggtctgtgcttttaataggactgtctccaaagttgatgatttcttggccaatgaggcaaagggaaccaaagtggtgggtgcccagtccctgaaagagatggtc

SEQ ID NO: 374387 - DNA, 120 bp, Artificial Sequence
  ENSG00000142657_2 (sequence is synthesized)
tccaagctgaagaagccccggcggatcatcctcctggtgaaggctgggcaagctgtggatgatttcatcgagaaattggtaccattgttggatactggtgacatcatcattgacggagga

SEQ ID NO: 374388 - DNA, 120 bp, Artificial Sequence
  ENSG00000142657_3 (sequence is synthesized)
aattctgaatatagggacaccacaagacggtgccgagacctcaaggccaagggaattttatttgtggggagcggagtcagtggtggagaggaaggggcccggtatggcccatcgctcatg

SEQ ID NO: 374389 - DNA, 120 bp, Artificial Sequence
  ENSG00000142657_4 (sequence is synthesized)
ccaggagggaacaaagaagcgtggccccacatcaagaccatcttccaaggcattgctgcaaaagtgggaactggagaaccctgctgtgactgggtgggagatgagggagcaggccacttc

SEQ ID NO: 374390 - DNA, 120 bp, Artificial Sequence
  ENSG00000142657_5 (sequence is synthesized)
gtgaagatggtgcacaacgggatagagtatggggacatgcagctgatctgtgaggcataccacctgatgaaagacgtgctgggcatggcgcaggacgagatggcccaggcctttgaggat

SEQ ID NO: 374391 - DNA, 120 bp, Artificial Sequence
  ENSG00000142657_6 (sequence is synthesized)
tggaataagacagagctagactcattcctgattgaaatcacagccaatattctcaagttccaagacaccgatggcaaacacctgctgccaaagatcagggacagcgcggggcagaagggc

SEQ ID NO: 374392 - DNA, 120 bp, Artificial Sequence
  ENSG00000142657_7 (sequence is synthesized)
acagggaagtggaccgccatctccgccctggaatacggcgtacccgtcaccctcattggagaagctgtctttgctcggtgcttatcatctctgaaggatgagagaattcaagctagcaaa

SEQ ID NO: 374393 - DNA, 120 bp, Artificial Sequence
  ENSG00000142657_8 (sequence is synthesized)
aagctgaagggtccccagaagttccagtttgatggtgataagaaatcattcctggaggacattcggaaggcactctacgcttccaagatcatctcttacgctcaaggctttatgctgcta

SEQ ID NO: 374394 - DNA, 120 bp, Artificial Sequence
  ENSG00000142657_9 (sequence is synthesized)
gcatttgatcgaaacccggaacttcagaacctcctactggacgacttctttaagtcagctgttgaaaactgccaggactcctggcggcgggcagtcagcactggggtccaggctggcatt

SEQ ID NO: 374395 - DNA, 120 bp, Artificial Sequence
  ENSG00000142657_10 (sequence is synthesized)
cccatgccctgttttaccactgccctctccttctatgacgggtacagacatgagatgcttccagccagcctcatccaggctcagcgggattacttcggggctcacacctatgaactcttg

SEQ ID NO: 374396 - DNA, 120 bp, Artificial Sequence
  ENSG00000142657_11 (sequence is synthesized)
gccaaaccagggcagtttatccacaccaactggacaggccatggtggcaccgtgtcatcctcgtcatacaatgcctgatcatgctgctcctgtcaccctccacgattccacagaccagga

SEQ ID NO: 374397 - DNA, 120 bp, Artificial Sequence
  ENSG00000142657_12 (sequence is synthesized)
cattccatgtgcctcatggcactgccacctggccctttgccctattttctgttcagttttttaaaagtgttgtaagagactcctgaggaagacacacagtttatttgtaaagtagctctg

SEQ ID NO: 374398 - DNA, 120 bp, Artificial Sequence
  ENSG00000142657_13 (sequence is synthesized)
tgagagccaccatgccctctgcccttgcctcttgggactgaccaggagctgctcatgtgcgtgagagtgggaaccatctccttgcggcagtggcttccgcgtgccccgtgtgctggtgcg

SEQ ID NO: 374399 - DNA, 120 bp, Artificial Sequence
  ENSG00000142657_14 (sequence is synthesized)
gttcccatcacgcagacaggaagggtgtttgcgcactctgatcaactggaacctctgtatcatgcggctgaattccctttttcctttactcaataaaagctacatcagactgatgctctt

SEQ ID NO: 374400 - DNA, 120 bp, Artificial Sequence
  ENSG00000142657_15 (sequence is synthesized)
tctccagattcttagtctcacctcggccacatggagccattatccccattggcagaaagatttttctttaaaaaaaaagactagaataacacaagaaaccacatttaggattatgcttca

SEQ ID NO: 374401 - DNA, 120 bp, Artificial Sequence
  ENSG00000142657_16 (sequence is synthesized)
ctcagaggaggcaggcagggaggacacaccaggggctttaatacactgggcatgttttctttctccaattgggcaatgggtacatggacgttcactgtaacgtgctttttctttcgtctt

SEQ ID NO: 374402 - DNA, 120 bp, Artificial Sequence
  ENSG00000142657_17 (sequence is synthesized)
ttttttttttttttttttttttgctcctggcaagctgtgcgtgacattctttatggctttttgtatgtcaaatacttcatactaaactttctagagaattaaactttaatgatgggctca

SEQ ID NO: 374403 - DNA, 120 bp, Artificial Sequence
  ENSG00000142657_18 (sequence is synthesized)
ggtttgggagcttacgggtctcctggccgtgctttgctaatgtgctctgttgctgctcgtggcatttttgtatggaaaggagaagcaccctgtaggcgtgggcgggccgatcccgaactt

SEQ ID NO: 374404 - DNA, 120 bp, Artificial Sequence
  ENSG00000142657_19 (sequence is synthesized)
agtcctgcggagtgtgcctgtgggtccgtgaggttcacagcccgaatgaacgaattagtgtcttaagtagagaagaagggtgcgggaggagaacccttgctggctgtgtagagctctaac

SEQ ID NO: 374405 - DNA, 120 bp, Artificial Sequence
  ENSG00000142657_20 (sequence is synthesized)
gggggcccgcgggaggcgcggaggaaagtgcagactcccagtcacggccaaatgtggaaggaccggacccctgggttgcagcgcgtcgagcggtgctgactctttcctttgttctgtttc

SEQ ID NO: 374406 - DNA, 120 bp, Artificial Sequence
  ENSG00000142657_21 (sequence is synthesized)
gagacaacacttctggtggccagaaattcagtataaccaggttcagaacaaacacaactgactctgggttagcataaaactcaaccagcaggagcagaagtccccaggcagacgcgagca

SEQ ID NO: 374407 - DNA, 120 bp, Artificial Sequence
  ENSG00000142657_22 (sequence is synthesized)
aggaagttggctgcttttagccgatctgagccataacataggtgaggagggaggggccaatagctaggagcaatttattcatcacggactcaagtatatgtgagaagctgtctttgctcg

SEQ ID NO: 374408 - DNA, 120 bp, Artificial Sequence
  ENSG00000142657_23 (sequence is synthesized)
cgagtgcgcacaggactgaacgagcacgcccggtccctgctccggagcggaggacacgacgcggacccgcacggtgcaccgcagtgacctgaggaaggagcgacgggcgctcgcgccaaa

SEQ ID NO: 374409 - DNA, 120 bp, Artificial Sequence
  ENSG00000142661_0 (sequence is synthesized)
attcttctcccggtgcccgctgagccgagggcaagaagagaacaaggaccctctcggcctcaggaatcttctccccagagactcctaagtgggcacactgcttctgttgttgctctcgta

SEQ ID NO: 374410 - DNA, 120 bp, Artificial Sequence
  ENSG00000142661_1 (sequence is synthesized)
accatgactctgccgcacagcttgggaggtgcgggggacccccggcccccccaggccatggaggttcacaggctggagcaccggcaggaggaggagcagaaggaggagcggcagcacagc

SEQ ID NO: 374411 - DNA, 120 bp, Artificial Sequence
  ENSG00000142661_2 (sequence is synthesized)
ctgcgcatgggctcctctgtgcggaggcggaccttccgcagcagcgaagaagagcatgagttcagcgccgcggactacgccctggcagcagccctggctctgacggcctcctccgagctg

SEQ ID NO: 374412 - DNA, 120 bp, Artificial Sequence
  ENSG00000142661_3 (sequence is synthesized)
tcttgggaagcccagctgagacgccagacctctgccgtggagctggaggagcgagggcagaagcgggtgggcttcggcaatgactgggagaggactgagatcgccttcctgcagacccac

SEQ ID NO: 374413 - DNA, 120 bp, Artificial Sequence
  ENSG00000142661_4 (sequence is synthesized)
cggctgctgcgccagaggcgggactggaagacgctgaggcggcggacagaggagaaggtccaggaggccaaggagctgagggagctgtgctacggccgcgggccctggttctggatccct

SEQ ID NO: 374414 - DNA, 120 bp, Artificial Sequence
  ENSG00000142661_5 (sequence is synthesized)
cttcgctcccacgccgtctgggagcacaccacggtcctgctgacctgcactgtccaggcctcaccaccaccccaggtcacctggtacaaaaatgacacacggattgatccccgcctcttt

SEQ ID NO: 374415 - DNA, 120 bp, Artificial Sequence
  ENSG00000142661_6 (sequence is synthesized)
cgtgccggaaaataccgaatcaccaacaactacgggctgctgtccctggagattaggagatgcgccattgaggactcagcaacttacactgtgcgagtgaagaacgcccacggccaggcc

SEQ ID NO: 374416 - DNA, 120 bp, Artificial Sequence
  ENSG00000142661_7 (sequence is synthesized)
tcctccttcgccaaagtcctcgtccgcacttacctggggaaggatgctggcttcgattcagagatcttcaaaagatcgacgtttggccccagcgtggaattcacctcggtgctgaagcca

SEQ ID NO: 374417 - DNA, 120 bp, Artificial Sequence
  ENSG00000142661_8 (sequence is synthesized)
gtctttgctcgtgagaaggaacccttctccctgtcatgcttgttttcggaagatgtgttagatgctgagagcatccagtggttccgagatgggagcctactgaggtcctcgagacgtcgg

SEQ ID NO: 374418 - DNA, 120 bp, Artificial Sequence
  ENSG00000142661_9 (sequence is synthesized)
aagatcctctacacagaccgccaggcatccctgaaggtgtcctgcacctacaaggaggacgaggggctctacatggtccgggtgccctcgcccttcggaccccgggaacagagcacctac

SEQ ID NO: 374419 - DNA, 120 bp, Artificial Sequence
  ENSG00000142661_10 (sequence is synthesized)
gtgcttgtgagagatgccgaggccgagaaccccggggccccaggctccccactgaacgtccgatgcctggatgtgaacagagactgcctcatcctgacttgggccccgcccagtgacacc

SEQ ID NO: 374420 - DNA, 120 bp, Artificial Sequence
  ENSG00000142661_11 (sequence is synthesized)
cggggcaaccccatcactgcctacaccattgagcggtgccagggcgagtctggggaatggatcgcctgccatgaggcccccggagggacttgtcggtgcccaatccaaggcctcgtcgaa

SEQ ID NO: 374421 - DNA, 120 bp, Artificial Sequence
  ENSG00000142661_12 (sequence is synthesized)
ggtcagagctatcggttccgggtgagagccatcagcagggtaggcagcagcgtcccctccaaggcctcagagttggttgtcatgggtgaccatgatgcagcccggaggaagacagagatc

SEQ ID NO: 374422 - DNA, 120 bp, Artificial Sequence
  ENSG00000142661_13 (sequence is synthesized)
ccctttgatctgggaaacaagatcaccatcagcacagacgcttttgaagatactgtgaccatcccctcaccgccaaccaatgtccatgccagcgagatccgagaggcctatgtggttctg

SEQ ID NO: 374423 - DNA, 120 bp, Artificial Sequence
  ENSG00000142661_14 (sequence is synthesized)
gcctgggaggagcccagcccccgggacagagcaccactgacgtactccctggagaagtcagtcataggtagtggcacctgggaggccatcagctcggaaagccctgtgagatccccgaga

SEQ ID NO: 374424 - DNA, 120 bp, Artificial Sequence
  ENSG00000142661_15 (sequence is synthesized)
ttcgccgttctggacctggagaaaaagaagtcgtatgtcttcagagtgcgagcaatgaaccagtatggcctgagcgatccctcggagcccagcgaacccatcgccttgcggggcccgcca

SEQ ID NO: 374425 - DNA, 120 bp, Artificial Sequence
  ENSG00000142661_16 (sequence is synthesized)
gctaccctccctcctccagctcaagttcaagctttcagagacacacagacctctgtctccctgacatgggatcctgtgaaagacccagagctcctgggttattacatctactcccggaag

SEQ ID NO: 374426 - DNA, 120 bp, Artificial Sequence
  ENSG00000142661_17 (sequence is synthesized)
gtggggacatctgagtggcaaacagttaacaacaaacccatccaaggcaccaggtttacagttcccgggctgaggacggggaaggagtacgagttttgtgtcaggtcagtcagcgaggct

SEQ ID NO: 374427 - DNA, 120 bp, Artificial Sequence
  ENSG00000142661_18 (sequence is synthesized)
ggggtaggcgagagctcagccgccaccgagcccatcagggtcaagcaggctctggctaccccgtctgccccatatggctttgccctcctgaactgcgggaagaatgaaatggtcattggg

SEQ ID NO: 374428 - DNA, 120 bp, Artificial Sequence
  ENSG00000142661_19 (sequence is synthesized)
tggaaaccccccaagcgtcgtggaggtggcaagatcctgggctacttcctggaccagcatgactcggaagagctggactggcatgcggtcaatcagcagcccatccccacccgggtctgc

SEQ ID NO: 374429 - DNA, 120 bp, Artificial Sequence
  ENSG00000142661_20 (sequence is synthesized)
aaggtcagtgaccttcatgaaggccacttctatgagttccgtgcccgggctgccaactgggcaggtgttggcgagctgtcggcacccagcagcctgtttgagtgcaaagagtggacaatg

SEQ ID NO: 374430 - DNA, 120 bp, Artificial Sequence
  ENSG00000142661_21 (sequence is synthesized)
ccccagccaggccccccgtacgatgtacgggcatccgaggtgcgggccacatccctggtgctgcagtgggaacccccactgtatatgggggctgggcctgtcacaggctatcacgtcagt

SEQ ID NO: 374431 - DNA, 120 bp, Artificial Sequence
  ENSG00000142661_22 (sequence is synthesized)
ttccaggaggaaggctctgagcagtggaagccggtcaccccaggccccatctctggcacccacctgagggtttccgacttgcagccaggaaagagttacgtgttccaggtacaggccatg

SEQ ID NO: 374432 - DNA, 120 bp, Artificial Sequence
  ENSG00000142661_23 (sequence is synthesized)
aattcagctggtctggggcaaccgtccatgcccactgatcccgtgctcctggaggacaagccaggtgcccatgagatcgaggttggtgtggatgaagagggctttatctatttggctttt

SEQ ID NO: 374433 - DNA, 120 bp, Artificial Sequence
  ENSG00000142661_24 (sequence is synthesized)
gaagcccctgaagcccccgactcctcagagtttcagtggtccaaagactacaagggcccactggacccccagagggtcaagatcgaggataaagttaacaagtccaaggtcatcctgaaa

SEQ ID NO: 374434 - DNA, 120 bp, Artificial Sequence
  ENSG00000142661_25 (sequence is synthesized)
gaacccggcctcgaggatttgggcacctactcagtcatagtcactgatgccgatgaagacatctccgcaagccacacgctaaccgaggaagagctggagaagctgaagaagctgagtcat

SEQ ID NO: 374435 - DNA, 120 bp, Artificial Sequence
  ENSG00000142661_26 (sequence is synthesized)
gagatcagaaacccagtgatcaaactgatctccggctggaacattgacatcctggagcgaggggaggtgcggctttggctggaagtagaaaagttatctccagccgctgagctacatcta

SEQ ID NO: 374436 - DNA, 120 bp, Artificial Sequence
  ENSG00000142661_27 (sequence is synthesized)
atcttcaacaacaaggagatcttcagctcgccgaaccgcaaaatcaattttgaccgagagaagggcctggtggaagtgatcatccagaacttgtctgaggaggacaaagggtcgtacacc

SEQ ID NO: 374437 - DNA, 120 bp, Artificial Sequence
  ENSG00000142661_28 (sequence is synthesized)
gctcaactccaagatggaaaagccaaaaaccagattaccttgacactggtggatgacgattttgacaagcttctgaggaaggcagatgctaagagaagggactggaagagaaaacagggt

SEQ ID NO: 374438 - DNA, 120 bp, Artificial Sequence
  ENSG00000142661_29 (sequence is synthesized)
ccctattttgagcggccgttgcagtggaaggtcacggaggactgccaagtgcagctgacgtgcaaggtgaccaacaccaagaaggagactcgctttcagtggttcttccagagggcagag

SEQ ID NO: 374439 - DNA, 120 bp, Artificial Sequence
  ENSG00000142661_30 (sequence is synthesized)
atgccagatggtcagtatgacccagagacgggaacgggacttctctgcattgaagagttgtccaaaaaggacaagggaatttacagagcgatggtttctgacgatcgaggggaggacgac

SEQ ID NO: 374440 - DNA, 120 bp, Artificial Sequence
  ENSG00000142661_31 (sequence is synthesized)
accatattggacctcacgggtgacgccctggatgccatcttcaccgagttgggcaggattggtgccctctctgcaactccactgaaaatccaggggaccgaggaagggatccggatcttc

SEQ ID NO: 374441 - DNA, 120 bp, Artificial Sequence
  ENSG00000142661_32 (sequence is synthesized)
agcaaggtcaagtactacaacgtggagtacatgaaaaccacctggttccacaaagacaaacgtctggagagtggtgatcggataaggacgggcaccaccctggatgagatctggcttcac

SEQ ID NO: 374442 - DNA, 120 bp, Artificial Sequence
  ENSG00000142661_33 (sequence is synthesized)
atcctggaccccaaagactcagacaagggcaaatacactctggaaatagctgcagggaaggaagtccggcagctctcaacagatctctcagggcaagcttttgaggatgcaatggctgaa

SEQ ID NO: 374443 - DNA, 120 bp, Artificial Sequence
  ENSG00000142661_34 (sequence is synthesized)
caccagagactgaaaaccttggccatcatcgagaagaatcgtgccaaagtggtgagaggtctgccggatgtggccactatcatggaagataagaccctgtgcttgacttgcatcgtctca

SEQ ID NO: 374444 - DNA, 120 bp, Artificial Sequence
  ENSG00000142661_35 (sequence is synthesized)
ggagaccccacccctgaaatctcttggctgaagaatgaccagcctgtcaccttccttgaccgataccgcatggaagtgagggggacagaggtcaccatcaccattgagaaggtcaacagt

SEQ ID NO: 374445 - DNA, 120 bp, Artificial Sequence
  ENSG00000142661_36 (sequence is synthesized)
gaagacagcggccgctacggcgtcttcgtcaagaacaagtatggctccgagacgggccaggtcaccatcagtgtgttcaagcacggggacgagcccaaggagctgaagagcatgtgacag

SEQ ID NO: 374446 - DNA, 120 bp, Artificial Sequence
  ENSG00000142661_37 (sequence is synthesized)
cgtgtgtccaggcacagtctgagtctagtctacatggaccagtagggacaacctgtaccagggtcacagcctggcacaggctacaggggtggggcagaaggaaaggggacaagatagaac

SEQ ID NO: 374447 - DNA, 120 bp, Artificial Sequence
  ENSG00000142661_38 (sequence is synthesized)
ccaggatgtgagggtgggggtggagcggatgcaccaaagtggagaagcaaagatctttctggggtcctgagtggcttccaggagagcgggatgaaccctggacctggagtaggagacccg

SEQ ID NO: 374448 - DNA, 120 bp, Artificial Sequence
  ENSG00000142661_39 (sequence is synthesized)
gatgcactggggctatctaacagtactggcatctgataggtagaggtcaggtacgctgctaaacactgcagctcccaccacatagaattatccgaccccagatgtcaaaagtgccaaggg

SEQ ID NO: 374449 - DNA, 120 bp, Artificial Sequence
  ENSG00000142661_40 (sequence is synthesized)
ccatgagccctgccataaactgatacatcgcacccctcttttaggatcccatagtttcaattcatgtaagttcaacagacacctgaagtctagcatgtgggaggctgaggatggagctgg

SEQ ID NO: 374450 - DNA, 120 bp, Artificial Sequence
  ENSG00000142661_41 (sequence is synthesized)
gaacacaaaggcagctgataagcaggttctgcttgcaaagaggcctcagtccagtgggagaaacagacctgggcgcaaacaactccaggacaaggcaggacatgataaagattataaagc

SEQ ID NO: 374451 - DNA, 120 bp, Artificial Sequence
  ENSG00000142661_42 (sequence is synthesized)
aggtccaaggaaagtgccgccagtggtccaaggagggagacagagggtcgtcccaacagggggaggtagggctttgaaaacaccttcatccaggctgggcgaggtggctcacgcctgtaa

SEQ ID NO: 374452 - DNA, 120 bp, Artificial Sequence
  ENSG00000142661_43 (sequence is synthesized)
ggcaggtgcctgtaatcccggctattcagaaggccgaggtgggagaatccgttgaacctgggaggcggaggttgtgatgagccaagattgagccaaaaaaaaattagcagaattggtgtt

SEQ ID NO: 374453 - DNA, 120 bp, Artificial Sequence
  ENSG00000142661_44 (sequence is synthesized)
gggccctgaaaaattagtccgattttgtggtggtaatgggagaaggacatcccaggagcagggtctggtgggaggaaagggaaggaggaggctaaggctgcccaggaggccttggatacc

SEQ ID NO: 374454 - DNA, 120 bp, Artificial Sequence
  ENSG00000142661_45 (sequence is synthesized)
aggcttggagctggtaacctccagggcttccagcacggggcctctgcctggtgtgacagataccggctggcctcacttgatggatctcagtactgagctgggcatttctctgccccccaa

SEQ ID NO: 374455 - DNA, 120 bp, Artificial Sequence
  ENSG00000142661_46 (sequence is synthesized)
cttttttctttttaaaaataagatggggagtgttcataaaattatagatgtttgttgtaaaattttggaaaaccctggaaattatagagaaaataaacataatctatactcccaacacca

SEQ ID NO: 374456 - DNA, 120 bp, Artificial Sequence
  ENSG00000142661_47 (sequence is synthesized)
acacggtaagagggagagcccaggtttgaacaagtctatctgattccaaagcctaaggtccttcttagcactcttcagcctgtttagataactggggaaggggagggtgggtgctctccc

SEQ ID NO: 374457 - DNA, 120 bp, Artificial Sequence
  ENSG00000142661_48 (sequence is synthesized)
agaagcatattcattcagtaaactcagagcatctattttgtgccactctgcacggtactgaacgtacaaagatgatgaagtggtctctgtgggccttgggagcccatgttcaaggcagga

SEQ ID NO: 374458 - DNA, 120 bp, Artificial Sequence
  ENSG00000142661_49 (sequence is synthesized)
ccattggaaaacagcatccctcatgcttgacccggatggggcaggacattgatgaatcgtgatggagggggtgactatgggatgcttcaaaaaaaaggcttcctggaggagatgacattt

SEQ ID NO: 374459 - DNA, 120 bp, Artificial Sequence
  ENSG00000142661_50 (sequence is synthesized)
aactgaagcacatggacatttccaagaaaaatagagtaaggcagggatcaagaggcagagggaaaaccattagcaagaattcagagtccagaggccagcagaggagacacatggtgacca

SEQ ID NO: 374460 - DNA, 120 bp, Artificial Sequence
  ENSG00000142661_51 (sequence is synthesized)
gttcccagggcccccagtctgaggagggaggcccagcctagccctctggaggctccaacctgatggggggagggacatccctgctttctgaaccccctgtctgaggggggagacacaatt

SEQ ID NO: 374461 - DNA, 120 bp, Artificial Sequence
  ENSG00000142661_52 (sequence is synthesized)
ggctctctggagacccccatgtgatggaagaggcacagccctgtcctctggaaaccctgtttgaggagggaagcacattcagggtcggggggatgcagccttgctttctgagaccccagt

SEQ ID NO: 374462 - DNA, 120 bp, Artificial Sequence
  ENSG00000142661_53 (sequence is synthesized)
atgaggagggaggcacagccctgcctgctggtgccctgaggctgaggtgggcagatgcagccctaatctcagggagcccccagccaatcctgcaagagccatttactcccctccttctgg

SEQ ID NO: 374463 - DNA, 76 bp, Artificial Sequence
  ENSG00000142661_54 (sequence is synthesized)
cttttataaagaaaagaggtttaatcagctcacagttctgcgacctatacaggcttctttttctggggaggcctca

SEQ ID NO: 374464 - DNA, 120 bp, Artificial Sequence
  ENSG00000142661_55 (sequence is synthesized)
tctgcgacctatacaggcttctttttctggggaggcctcaggaaacttatgattatggcggaaggcgagggggaaggaagcatgtcttacatggcgggagcaggagagggagaaagagca

SEQ ID NO: 374465 - DNA, 120 bp, Artificial Sequence
  ENSG00000142661_56 (sequence is synthesized)
aagcaggaagtgctacacacttccaaacaagcagatctcatgagaacttgctccctatcttgacaacagcaaagcggacatccgcccccatgatccaatctcctcccacgaggtccctcc

SEQ ID NO: 374466 - DNA, 120 bp, Artificial Sequence
  ENSG00000142661_57 (sequence is synthesized)
aaccagatcacccctcttcctgcaccaggcatccttgaaagggggccataatgataatgaagcccagcatttcacaatatttaccctgcgccaggtactgttctggcatttttcatatgt

SEQ ID NO: 374467 - DNA, 120 bp, Artificial Sequence
  ENSG00000142661_58 (sequence is synthesized)
gaggtcatctagttctacctgcaagcctaaatgtgtaggactattatttttattattttacagatgaagaaactgaggcatggagaggttacataacttgccaaagccccttgtagctta

SEQ ID NO: 374468 - DNA, 120 bp, Artificial Sequence
  ENSG00000142661_59 (sequence is synthesized)
gtaaatggcaggactgggacttgaacccagatggtctttttcaacaaactttgttgagaatgtgctatttgcaggactccatggatagagatgaccatgccttggtctcatccctccagg

SEQ ID NO: 374469 - DNA, 120 bp, Artificial Sequence
  ENSG00000142661_60 (sequence is synthesized)
agcttaaacccagagagaggtggggagggcagagcagtggagagctttggagccagggaggcctgagttcaggctccataccacccctcaccctttctgtatcagtcagggttctctaga

SEQ ID NO: 374470 - DNA, 120 bp, Artificial Sequence
  ENSG00000142661_61 (sequence is synthesized)
gggacagactaataggatagatgtatataggaaagggagtttattaaggactattgactcacacaatcacaaagtaaagtcgtacaaccggctgtttgcaagctgaggagcgaggaagcc

SEQ ID NO: 374471 - DNA, 120 bp, Artificial Sequence
  ENSG00000142661_62 (sequence is synthesized)
ggaagccaacagtgcagccttcagtttgtggccgaaggcctgagagctcctggcaaaccactggtgtaagtcccagtccaaaagctaaagaacttggagtccaattttcaaggtcaggaa

SEQ ID NO: 374472 - DNA, 120 bp, Artificial Sequence
  ENSG00000142661_63 (sequence is synthesized)
cttggagtccaattttcaaggtcaggaagcatccaacatggaagaaagatgaaggcctggctgagaagagctccctgcaaaacaagatttgctctaggagaacgttgataggtgaagaga

SEQ ID NO: 374473 - DNA, 120 bp, Artificial Sequence
  ENSG00000142661_64 (sequence is synthesized)
gagaaagaggtccacaattgggtcttatcaagaagggacaggatgagaaggacatttttctctaagctagagcatccttgcgtgtctctggatgacaattctctttgagggctctgaaag

SEQ ID NO: 374474 - DNA, 120 bp, Artificial Sequence
  ENSG00000142661_65 (sequence is synthesized)
gactcggtgtttttgcatcccagcattagtgcaggtattaacagccacatgttctttttcaaggacaaagcccaaagtcttgaagatgtaccatgtggcgctgggtttggggttggctgc

SEQ ID NO: 374475 - DNA, 120 bp, Artificial Sequence
  ENSG00000142661_66 (sequence is synthesized)
ctttgctttaaattagaacctttcctagcgtatttgcgttttaagggtggatctggaaaagcaaacatcctttaaaactcttaggtctaccccctccacggtgtcatctcaggcattgcc

SEQ ID NO: 374476 - DNA, 120 bp, Artificial Sequence
  ENSG00000142661_67 (sequence is synthesized)
atgggatcaagggcaatatttttaggaagaattgacctgaaccttcaaattctaccacgctggtgaccacttattccacaaagttgttctagcaagtttgggaatgtctccaggctgttt

SEQ ID NO: 374477 - DNA, 120 bp, Artificial Sequence
  ENSG00000142661_68 (sequence is synthesized)
ccgccaccgagcccatcagggtcaagcaggctctgggtgagtccaagggcaggtccagcctgcaaacctccctgggctgggcagggagctggggctcatagatcacatcttggagggccc

SEQ ID NO: 374478 - DNA, 120 bp, Artificial Sequence
  ENSG00000142661_69 (sequence is synthesized)
agtcctggtggccagtggcacatacgccctctgagggaaactggagctggccctggctgccctttcctttgggaaggaagtaaccatggcttgaggccatgggatggggcctgagcagct

SEQ ID NO: 374479 - DNA, 120 bp, Artificial Sequence
  ENSG00000142661_70 (sequence is synthesized)
ctggggggtggggaagccctcagacccagaaacctgaggctccgatgccctcctgaggcacagatactactggctcagggaaaaacccctggagtagggcaggcaccaactagaggaggc

SEQ ID NO: 374480 - DNA, 120 bp, Artificial Sequence
  ENSG00000142661_71 (sequence is synthesized)
tcgtcagctccctcaggccccactgtccaatccagccacccctagggagcagctgtcctcacctccttacctccctgtagctaccccgtctgccccatatggctttgccctcctgaactg

SEQ ID NO: 374481 - DNA, 120 bp, Artificial Sequence
  ENSG00000142661_72 (sequence is synthesized)
cagaagtctcaagttcccctgcctcagccatcgagatcattttccagtgcagacccaccttgaacagaactgtttagagccaccaagcttgagctgggattgcttgagctcaggagtttg

SEQ ID NO: 374482 - DNA, 84 bp, Artificial Sequence
  ENSG00000142661_73 (sequence is synthesized)
caccaagcttgagctgggattgcttgagctcaggagtttgggagtttgagaccagtctgcaacatgttcaaaaccctgtcttgg

SEQ ID NO: 374483 - DNA, 120 bp, Artificial Sequence
  ENSG00000142669_0 (sequence is synthesized)
gtcgtctcccggcagtgcagctgccgctaccgccgccctctgcccgccggcccgtctgtctacccccagcatgagcggcctgcgcgtctacagcacgtcggtcaccggctcccgcgaaat

SEQ ID NO: 374484 - DNA, 120 bp, Artificial Sequence
  ENSG00000142669_1 (sequence is synthesized)
caagtcccagcagagcgaggtgacccgaatcctggatgggaagcgcatccaataccagctagtggacatctcccaggacaacgccctgagggatgagatgcgagccttggcaggcaaccc

SEQ ID NO: 374485 - DNA, 120 bp, Artificial Sequence
  ENSG00000142669_2 (sequence is synthesized)
caaggccaccccaccccagattgtcaacggggaccagtactgtggggactatgagctcttcgtggaggctgtggaacaaaacacgctgcaggagttcctgaagctggcttgagtcaagcc

SEQ ID NO: 374486 - DNA, 120 bp, Artificial Sequence
  ENSG00000142669_3 (sequence is synthesized)
cacactccccccagccttcacctggccatgaaggaccttttgaccaactccctgtcattcctaacctaaccttagagtccctcccccaatgcaggccacttctcctccctcctctctaaa

SEQ ID NO: 374487 - DNA, 120 bp, Artificial Sequence
  ENSG00000142669_4 (sequence is synthesized)
tgtagtcccctctcctccatctaaaggcaacattccttacccattagtctcagaaattgtcttaagcaacagccccaaatgctggctgcccccagccaagcattggggccgccatcctgc

SEQ ID NO: 374488 - DNA, 120 bp, Artificial Sequence
  ENSG00000142669_5 (sequence is synthesized)
ctggcactggctgatgggcacctctgttggttccatcagccagagctctgccaaaggccccgcagtccctctcccaggaggaccctagaggcaattaaatgatgtcctgttccattggca

SEQ ID NO: 374489 - DNA, 120 bp, Artificial Sequence
  ENSG00000142669_6 (sequence is synthesized)
gtactgtggggtatgggctgggggacgggggggtggggggagtgttggaagaggactctagccagggtcatatctgccacaaagcacttgggccccctgcattcaggtgaccacccctcg

SEQ ID NO: 374490 - DNA, 120 bp, Artificial Sequence
  ENSG00000142675_0 (sequence is synthesized)
aaattccggcgacagcagggcaaaacaggagctgattcgagctggcagagctgggccatggaaccggtagagacctggacccccggaaaggtggcaacttggctgagaggtcttgacgac

SEQ ID NO: 374491 - DNA, 120 bp, Artificial Sequence
  ENSG00000142675_1 (sequence is synthesized)
tccctgcaggactatccctttgaggactggcagctgcctggcaagaacctgctccagctctgcccccaaagcctcgaggctctggctgtgcggtctctgggacaccaggagctcatcctg

SEQ ID NO: 374492 - DNA, 120 bp, Artificial Sequence
  ENSG00000142675_2 (sequence is synthesized)
ggcggggtggaacagctccaggccctgagctccaggctacagacagagaacctgcaaagcctgacagagggacttctgggggcaacccatgacttccagagcatagtccaaggctgcctg

SEQ ID NO: 374493 - DNA, 120 bp, Artificial Sequence
  ENSG00000142675_3 (sequence is synthesized)
ggggactgtgccaagacccctattgatgtcctctgtgcagctgtggagctgttgcatgaagctgacgccctcctcttctggctcagcaggtacctcttctcccacttaaatgatttctca

SEQ ID NO: 374494 - DNA, 120 bp, Artificial Sequence
  ENSG00000142675_4 (sequence is synthesized)
gcatgccaggagatccgagacttgttggaggagctgagccaggtcttgcatgaggatggtccagcggctgagaaggagggcacagtcctgaggatctgcagccacgtggctgggatctgc

SEQ ID NO: 374495 - DNA, 120 bp, Artificial Sequence
  ENSG00000142675_5 (sequence is synthesized)
cacaacatcctggtctgctgccccaaggagctgctggaacagaaggccgtgctcgagcaggtgcagctggacagtccattgggcctagaaattcacaccaccagcaattgccagcacttt

SEQ ID NO: 374496 - DNA, 120 bp, Artificial Sequence
  ENSG00000142675_6 (sequence is synthesized)
gtgtcccaagtggacacccaggttcccactgactcccgactgcagatccagcctggagacgaggttgtccagatcaacgagcaggtggtggtgggatggccccgtaagaacatggtgagg

SEQ ID NO: 374497 - DNA, 120 bp, Artificial Sequence
  ENSG00000142675_7 (sequence is synthesized)
gaactgctgcgggagccagccggactcagcttagtgctgaagaagatcccgataccggagacccccccacagacgccccctcaggtcctggactccccgcaccagaggagcccatcactg

SEQ ID NO: 374498 - DNA, 120 bp, Artificial Sequence
  ENSG00000142675_8 (sequence is synthesized)
tctctggccccactgtctcccagggccccatctgaagacgtctttgcctttgacctgtcttcaaaccccagtcccggacccagccctgcctggacagactctgcctcccttggccctgag

SEQ ID NO: 374499 - DNA, 120 bp, Artificial Sequence
  ENSG00000142675_9 (sequence is synthesized)
cccctgcccatccccccggaacccccagccatactcccagcaggggtagcagggactccagggctccctgaatcccctgacaagagtcctgttggtcggaagaaatcaaaaggcctggcg

SEQ ID NO: 374500 - DNA, 120 bp, Artificial Sequence
  ENSG00000142675_10 (sequence is synthesized)
cggcgggtgtcatgccgtgagctgggccggccggactgtgacggctggctcctgttgcgaaaggcaccgggcggcttcatgggcccgcgctggcgccgccgctggtttgtgctcaaggga

SEQ ID NO: 374501 - DNA, 120 bp, Artificial Sequence
  ENSG00000142675_11 (sequence is synthesized)
cacacgctctactggtaccgccagccccaggatgagaaggctgagggcctcatcaatgtctccaactatagtctggaaagtggacatgatcagaagaagaaatatgtgtttcagctcacc

SEQ ID NO: 374502 - DNA, 120 bp, Artificial Sequence
  ENSG00000142675_12 (sequence is synthesized)
catgatgtgtacaaacccttcatcttcgctgctgataccctgacagatctgagcatgtgggtgcgtcatctcattacctgcatctccaagtaccagtctccaggccgggcccccccaccc

SEQ ID NO: 374503 - DNA, 120 bp, Artificial Sequence
  ENSG00000142675_13 (sequence is synthesized)
cgagaggaagactgctacagtgagaccgaagcagaggacccggacgatgaggctgggtcccactcagcctcgcccagccctgctcaagctgggagtcccctccatggagacacatcacct

SEQ ID NO: 374504 - DNA, 120 bp, Artificial Sequence
  ENSG00000142675_14 (sequence is synthesized)
gcagccacccccacacagcgcagcccacggacctcctttggctctctgacagacagcagtgaagaggcactggaaggaatggtacgggggctgaggcagggtggcgtgtccctcctaggc

SEQ ID NO: 374505 - DNA, 120 bp, Artificial Sequence
  ENSG00000142675_15 (sequence is synthesized)
cagccacagcccctgacccaggaacagtggcggagctctttcatgcggcgcaaccgagaccctcagctcaatgagcgagtgcaccgtgtgcgggcgctacagagcacactcaaggcaaag

SEQ ID NO: 374506 - DNA, 120 bp, Artificial Sequence
  ENSG00000142675_16 (sequence is synthesized)
ctgcaggagctgcaggtcctagaagaagtgctgggtgaccctgagctgacaggagagaagttccgccagtggaaggagcagaaccgggagctgtactcagagggcctgggggcctgggga

SEQ ID NO: 374507 - DNA, 120 bp, Artificial Sequence
  ENSG00000142675_17 (sequence is synthesized)
gtggcacaggctgaaggcagctcccacatcttgacctctgactccacagaacagtccccccactccctgccctctgaccctgaagagcactcccatctctgccccctgacctcagagagc

SEQ ID NO: 374508 - DNA, 120 bp, Artificial Sequence
  ENSG00000142675_18 (sequence is synthesized)
agcctccgacctcctgacctctgaccctggccagcactctagctcctgacctttgacccgagggccacctcaaccccagcttctgacgtgtccaggacagagcatccctggattctgttc

SEQ ID NO: 374509 - DNA, 120 bp, Artificial Sequence
  ENSG00000142675_19 (sequence is synthesized)
agggtgggaagtagtactgctagtcatggtctcaccccgagctgacccctctgcctgggctttgtgccaccctctcccttgccaaagaagaaactctccccccaaatcctccaacctctg

SEQ ID NO: 374510 - DNA, 120 bp, Artificial Sequence
  ENSG00000142675_20 (sequence is synthesized)
gggccacagccctgcccctccagttccttggcagttctcccccaaaccaggtctgtacaggtgttctttattttacatgagggctactttccaaccaaataaagtcaatttttctaagaa

SEQ ID NO: 374511 - DNA, 120 bp, Artificial Sequence
  ENSG00000142675_21 (sequence is synthesized)
attacagccaaagttaaattgatattgatgtatgatgtctttactgtctgtttccccagtgcctagaacagggcttggcatgtggtaggcacatgacaaataagtcctgtgctaatctct

SEQ ID NO: 374512 - DNA, 120 bp, Artificial Sequence
  ENSG00000142675_22 (sequence is synthesized)
ttagatgtctcaatcatctcctttactctaaaccaaaacccatcagagcaggtattatccccaagtctctgaggtgagtaattggtgagtaattggctctgagtggttaagcatagtccc

SEQ ID NO: 374513 - DNA, 120 bp, Artificial Sequence
  ENSG00000142675_23 (sequence is synthesized)
ttctgattcagcaggtgtggggtgaggcctgataatttgcatttctaacaagttctccggtgagtctgctgctgctggtctgggggccacttttaagaacccatgtcctatactttcctg

SEQ ID NO: 374514 - DNA, 120 bp, Artificial Sequence
  ENSG00000142675_24 (sequence is synthesized)
cttctcaactcagtggcctcatctgtgaaatgggcagaacagcctgggtgtcagagttgtcattagggttagactagagggaaaagagctttgcaggcatgaagaaccatcccaaaaggt

SEQ ID NO: 374515 - DNA, 120 bp, Artificial Sequence
  ENSG00000142675_25 (sequence is synthesized)
aagggtgatggggtagcagtgggaggtgtggcaagtggctggggcgcccagaatccagcctctctgggctgtgggtgggcacgcccaggctgagtgatgctcctccactacctggcagtg

SEQ ID NO: 374516 - DNA, 120 bp, Artificial Sequence
  ENSG00000142675_26 (sequence is synthesized)
tgagtgggaggaaccctcacctgagcctgtgcctttcctgggatgggggctaggaactcaaatgccctaggccactccctggcctcccaaaaacccactgctgctcctcaccccagactg

SEQ ID NO: 374517 - DNA, 120 bp, Artificial Sequence
  ENSG00000142675_27 (sequence is synthesized)
ataacctgtgaatcagcccaggatcgagtatgaggattgagacgggcgagaaaggaggagaggaggccctgccactgggatggtccagcggctgagaaggagggcacagtcctgaggatc

SEQ ID NO: 374518 - DNA, 120 bp, Artificial Sequence
  ENSG00000142675_28 (sequence is synthesized)
ttttttttttttttggctgtttctctgatatctttggctcccctttcctggcttagaggcatcctttggccacatctcctaccctgaccccagattccagccctgagctccagaaacaga

SEQ ID NO: 374519 - DNA, 120 bp, Artificial Sequence
  ENSG00000142675_29 (sequence is synthesized)
gactattgtcatccttggcctccttcagggcgtgggagagaaaaacagatcttggctcttgttcagatatggtgagccaggcgtggtggcttaggtctgtaatcccagcactttgggagg

SEQ ID NO: 374520 - DNA, 120 bp, Artificial Sequence
  ENSG00000142676_0 (sequence is synthesized)
ctcttcctgctctccatcatggcgcaggatcaaggtgaaaaggagaaccccatgcgggaacttcgcatccgcaaactctgtctcaacatctgtgttggggagagtggagacagactgacg

SEQ ID NO: 374521 - DNA, 120 bp, Artificial Sequence
  ENSG00000142676_1 (sequence is synthesized)
cgagcagccaaggtgttggagcagctcacagggcagacccctgtgttttccaaagctagatacactgtcagatcctttggcatccggagaaatgaaaagattgctgtccactgcacagtt

SEQ ID NO: 374522 - DNA, 120 bp, Artificial Sequence
  ENSG00000142676_2 (sequence is synthesized)
cgaggggccaaggcagaagaaatcttggagaagggtctaaaggtgcgggagtatgagttaagaaaaaacaacttctcagatactggaaactttggttttgggatccaggaacacatcgat

SEQ ID NO: 374523 - DNA, 120 bp, Artificial Sequence
  ENSG00000142676_3 (sequence is synthesized)
ctgggtatcaaatatgacccaagcattggtatctacggcctggacttctatgtggtgctgggtaggccaggtttcagcatcgcagacaagaagcgcaggacaggctgcattggggccaaa

SEQ ID NO: 374524 - DNA, 120 bp, Artificial Sequence
  ENSG00000142676_4 (sequence is synthesized)
atccttcctggcaaataaattcccgtttctatccaaaagagcaataaaaagttttcagtgaaatgtgcaattctgttgtgtgttctgtgaaaggatcctggccatattcaagtccttgga

SEQ ID NO: 374525 - DNA, 120 bp, Artificial Sequence
  ENSG00000142676_5 (sequence is synthesized)
cctcaagccacttaaagcttcgatgggagtagctggtaacaaccccgtcatcctctgattggatgccagtatttcctggcagatccaagtccaagcttcatagcattcattgcctgtgct

SEQ ID NO: 374526 - DNA, 120 bp, Artificial Sequence
  ENSG00000142676_6 (sequence is synthesized)
tgccacaccttggttgatgtgctgtggtgcagtagccccatttggaggggagggtttggttgatgttggggtttgaatttagagccttggttaagcagggtgcagtgctcctgtgttcca

SEQ ID NO: 374527 - DNA, 120 bp, Artificial Sequence
  ENSG00000142676_7 (sequence is synthesized)
ggaggccccctgctattcagtgattctgttctgtactagaaattttatcagcattgatgcgtcatgaaggaatgacaggctttggtgtgatggttgagattaaatttagacttaactgtt

SEQ ID NO: 374528 - DNA, 120 bp, Artificial Sequence
  ENSG00000142676_8 (sequence is synthesized)
ctgggtatcaaatatgacccaagcattggtatctacggcctggacttctatgtggtatgaatatttaatcttttcccgctcctggtctgtgaggagaggggaatctttatttcatatgtg

SEQ ID NO: 374529 - DNA, 120 bp, Artificial Sequence
  ENSG00000142676_9 (sequence is synthesized)
gtatgttggtgttcacatgttgagttgcagctttgaatattgtctgcctttgtgttctcctcccccttggggaaatgtgcctcatttgtggcaaatgtaggggtgcagctctgaacaagg

SEQ ID NO: 374530 - DNA, 120 bp, Artificial Sequence
  ENSG00000142676_10 (sequence is synthesized)
tggacaagatccctgctgttggggaacttgcagtcgaggatctgtaaagcacccacatggcttaaaggtggatgaaggaaactgttccctccagccagtgatttgaaactttggagagag

SEQ ID NO: 374531 - DNA, 120 bp, Artificial Sequence
  ENSG00000142676_11 (sequence is synthesized)
gcactgaggctgttctccccctggttcttcctatagaaacagctttgggtgatgcagtggtttgctcaggaagggggttttaacatagaaatgaccttttgtgttactgccgtgttttgg

SEQ ID NO: 374532 - DNA, 120 bp, Artificial Sequence
  ENSG00000142676_12 (sequence is synthesized)
tccaacaataaaactgaatagcctaaatcagaagtcctgactagtgtggaacctgaaagatggtggcaccctcattagacagacaagtaataagacttggatactcacaggatgttggag

SEQ ID NO: 374533 - DNA, 120 bp, Artificial Sequence
  ENSG00000142676_13 (sequence is synthesized)
gaacagcacacctttgggaagcatttttgagctgaagcagaaggaagaaaatatatatatttgtgcttctcagagttgtatgttttctacactgctggtgtggcaatagatttttaaatg

SEQ ID NO: 374534 - DNA, 120 bp, Artificial Sequence
  ENSG00000142676_14 (sequence is synthesized)
ttacttttaaaaagaaaaatggagatttgggagcagtaatggaggatcctcagcaccactggaaaataggctgggttaggggggtgctgaaagttccagcctccaaagcaaacttacagt

SEQ ID NO: 374535 - DNA, 120 bp, Artificial Sequence
  ENSG00000142676_15 (sequence is synthesized)
atggctgtgtgttgcgtgggatgctggtggcagctttgtcagacacagatcatgggtcttgctccagaatccattgggctgccaagtgactctttgaagatctgtctgtaatgtgtgagt

SEQ ID NO: 374536 - DNA, 120 bp, Artificial Sequence
  ENSG00000142676_16 (sequence is synthesized)
atcatggcggtgagtagctgggacctggatttgctttcctttatccgtcgccatccatggcaggccgagcctgcgggggctacttcgcccgcagcccgaggaatatggagcccgcaatgc

SEQ ID NO: 374537 - DNA, 120 bp, Artificial Sequence
  ENSG00000142676_17 (sequence is synthesized)
ctgctggcccaaaactagcagagccgttcgagccaaggacgcagggttgaattctgtcactttccctgccatcgttttaggagcggctccgggcacttgcccggagtgctcagaagcacg

SEQ ID NO: 374538 - DNA, 120 bp, Artificial Sequence
  ENSG00000142676_18 (sequence is synthesized)
ggccttacaatgggggcgctctttgttaccctgagcctcttagggttcgatctcagtgtccgtatcttttaacactcaataactgtcctgagttttctcttcacccgttccgttcgtgga

SEQ ID NO: 374539 - DNA, 120 bp, Artificial Sequence
  ENSG00000142676_19 (sequence is synthesized)
ggaaggataggttccgagctgtcttcttcccttgatgtcccctaaacattataccttttaaacattcagggtcttcgttacgatttgggatgagcagaaataaaaatgctgtgcagatag

SEQ ID NO: 374540 - DNA, 120 bp, Artificial Sequence
  ENSG00000142677_0 (sequence is synthesized)
agccctctctctgtgcacggcagagtagaggccaagggagggctctgtgccagccccgatgaggacgctgctgaccatcttgactgtgggatccctggctgctcacgcccctgaggaccc

SEQ ID NO: 374541 - DNA, 120 bp, Artificial Sequence
  ENSG00000142677_1 (sequence is synthesized)
ctcggatctgctccagcacgtgaaattccagtccagcaactttgaaaacatcctgacgtgggacagcgggccggagggcaccccagacacggtctacagcatcgagtataagacgtacgg

SEQ ID NO: 374542 - DNA, 120 bp, Artificial Sequence
  ENSG00000142677_2 (sequence is synthesized)
agagagggactgggtggcaaagaagggctgtcagcggatcacccggaagtcctgcaacctgacggtggagacgggcaacctcacggagctctactatgccagggtcaccgctgtcagtgc

SEQ ID NO: 374543 - DNA, 120 bp, Artificial Sequence
  ENSG00000142677_3 (sequence is synthesized)
gggaggccggtcagccaccaagatgactgacaggttcagctctctgcagcacactaccctcaagccacctgatgtgacctgtatctccaaagtgagatcgattcagatgattgttcatcc

SEQ ID NO: 374544 - DNA, 120 bp, Artificial Sequence
  ENSG00000142677_4 (sequence is synthesized)
tacccccacgccaatccgtgcaggcgatggccaccggctaaccctggaagacatcttccatgacctgttctaccacttagagctccaggtcaaccgcacctaccaaatgcaccttggagg

SEQ ID NO: 374545 - DNA, 120 bp, Artificial Sequence
  ENSG00000142677_5 (sequence is synthesized)
gaagcagagagaatatgagttcttcggcctgacccctgacacagagttccttggcaccatcatgatttgcgttcccacctgggccaaggagagtgccccctacatgtgccgagtgaagac

SEQ ID NO: 374546 - DNA, 120 bp, Artificial Sequence
  ENSG00000142677_6 (sequence is synthesized)
actgccagaccggacatggacctactccttctccggagccttcctgttctccatgggcttcctcgtcgcagtactctgctacctgagctacagatatgtcaccaagccgcctgcacctcc

SEQ ID NO: 374547 - DNA, 120 bp, Artificial Sequence
  ENSG00000142677_7 (sequence is synthesized)
caactccctgaacgtccagcgagtcctgactttccagccgctgcgcttcatccaggagcacgtcctgatccctgtctttgacctcagcggccccagcagtctggcccagcctgtccagta

SEQ ID NO: 374548 - DNA, 120 bp, Artificial Sequence
  ENSG00000142677_8 (sequence is synthesized)
ctcccagatcagggtgtctggacccagggagcccgcaggagctccacagcggcatagcctgtccgagatcacctacttagggcagccagacatctccatcctccagccctccaacgtgcc

SEQ ID NO: 374549 - DNA, 120 bp, Artificial Sequence
  ENSG00000142677_9 (sequence is synthesized)
acctccccagatcctctccccactgtcctatgccccaaacgctgcccctgaggtcgggcccccatcctatgcacctcaggtgacccccgaagctcaattcccattctacgccccacaggc

SEQ ID NO: 374550 - DNA, 120 bp, Artificial Sequence
  ENSG00000142677_10 (sequence is synthesized)
catctctaaggtccagccttcctcctatgcccctcaagccactccggacagctggcctccctcctatggggtatgcatggaaggttctggcaaagactcccccactgggacactttctag

SEQ ID NO: 374551 - DNA, 120 bp, Artificial Sequence
  ENSG00000142677_11 (sequence is synthesized)
catgttaggtggcctttctctgcaggaggtgacctccttggctatggaggaatcccaagaagcaaaatcattgcaccagcccctggggatttgcacagacagaacatctgacccaaatgt

SEQ ID NO: 374552 - DNA, 120 bp, Artificial Sequence
  ENSG00000142677_12 (sequence is synthesized)
gctacacagtggggaggaagggacaccacagtacctaaagggccagctccccctcctctcctcagtccagatcgagggccaccccatgtccctccctttgcaacctccttcccgtccatg

SEQ ID NO: 374553 - DNA, 120 bp, Artificial Sequence
  ENSG00000142677_13 (sequence is synthesized)
ttccccctcggaccaaggtccaagtccctggggcctgctggagtcccttgtgtgtcccaaggatgaagccaagagcccagcccctgagacctcagacctggagcagcccacagaactgga

SEQ ID NO: 374554 - DNA, 120 bp, Artificial Sequence
  ENSG00000142677_14 (sequence is synthesized)
ttctcttttcagaggcctggccctgactgtgcagtgggagtcctgaggggaatgggaaaggcttggtgcttcctccctgtccctacccagtgtcacatccttggctgtcaatcccatgcc

SEQ ID NO: 374555 - DNA, 120 bp, Artificial Sequence
  ENSG00000142677_15 (sequence is synthesized)
tgcccacgccacacactctgcgatctggcctcagacgggtgcccttgagagaagcagagggagtggcatgcagggcccctgccatgggtgcgctcctcaccggagcaaagcagcatgata

SEQ ID NO: 374556 - DNA, 120 bp, Artificial Sequence
  ENSG00000142677_16 (sequence is synthesized)
aggactgcagcgggggagctctggggagcagcttgtgtagacaagcgcgtgctcgctgagccctgcaaggcagaaatgacagtgcaaggaggaaatgcagggaaactcccgaggtccaga

SEQ ID NO: 374557 - DNA, 120 bp, Artificial Sequence
  ENSG00000142677_17 (sequence is synthesized)
gccccacctcctaacaccatggattcaaagtgctcagggaatttgcctctccttgccccattcctggccagtttcacaatctagctcgacagagcatgaggcccctgcctcttctgtcat

SEQ ID NO: 374558 - DNA, 120 bp, Artificial Sequence
  ENSG00000142677_18 (sequence is synthesized)
tgttcaaaggtgggaagagagcctggaaaagaaccaggcctggaaaagaaccagaaggaggctgggcagaaccagaacaacctgcacttctgccaaggccagggccagcaggacggcagg

SEQ ID NO: 374559 - DNA, 120 bp, Artificial Sequence
  ENSG00000142677_19 (sequence is synthesized)
actctagggaggggtgtggcctgcagctcattcccagccagggcaactgcctgacgttgcacgatttcagcttcattcctctgatagaacaaagcgaaatgcaggtccaccagggaggga

SEQ ID NO: 374560 - DNA, 120 bp, Artificial Sequence
  ENSG00000142677_20 (sequence is synthesized)
gacacacaagccttttctgcaggcaggagtttcagaccctatcctgagaatggggtttgaaaggaaggtgagggctgtggcccctggacgggtacaataacacactgtactgatgtcaca

SEQ ID NO: 374561 - DNA, 120 bp, Artificial Sequence
  ENSG00000142677_21 (sequence is synthesized)
actttgcaagctctgccttgggttcagcccatctgggctcaaattccagcctcaccactcacaagctgtgtgacttcaaacaaatgaaatcagtgcccagaacctcggtttcctcatctg

SEQ ID NO: 374562 - DNA, 120 bp, Artificial Sequence
  ENSG00000142677_22 (sequence is synthesized)
taatgtggggatcataacacctacctcatggagttgtggtgaagatgaaatgaagtcatgtctttaaagtgcttaatagtgcctggtacatgggcagtgcccaataaacggtagctattt

SEQ ID NO: 374563 - DNA, 120 bp, Artificial Sequence
  ENSG00000142684_0 (sequence is synthesized)
gatcggcccggaagtgctcacacgtgtgctccctgccctgctcctggccccttggccggccgggctgtttctggccatgggtcgctcccgccggacaggcgcgcaccgagcgcactctct

SEQ ID NO: 374564 - DNA, 120 bp, Artificial Sequence
  ENSG00000142684_1 (sequence is synthesized)
agcccggcagatgaaggcgaagcggcggcggccggacttggatgagattcaccgcgagctgcggcctcagggatccgcacgaccccagcccgacccaaacgccgagttcgaccccgacct

SEQ ID NO: 374565 - DNA, 120 bp, Artificial Sequence
  ENSG00000142684_2 (sequence is synthesized)
ggtacttcatcgattccaccaacctgaagacccacttccgatccaaagaccacaagaaaaggctgaagcagctgagcgtcgagccctacagtcaggaagaggcggagagggcagcgggta

SEQ ID NO: 374566 - DNA, 120 bp, Artificial Sequence
  ENSG00000142684_3 (sequence is synthesized)
tgggatcctatgtgccccccaggcggctggcagtgcccacggaagtgtccactgaggtccctgagatggatacctctacctgacatggcctgaagatgcagggcagaggaattgcccatg

SEQ ID NO: 374567 - DNA, 120 bp, Artificial Sequence
  ENSG00000142684_4 (sequence is synthesized)
gacagtgacgcaaggactaggctgggagggagcgtgccaaccccttttgcctctgggtttggggagcggagggcctcttcttggtgccctgccccaaataaaggaactggacaaagagaa

SEQ ID NO: 374568 - DNA, 120 bp, Artificial Sequence
  ENSG00000142686_0 (sequence is synthesized)
gcagacgccgcctgactccgcagtccgggactggggctgggcgcgctgcccgggagccccgcacccacgcctggaccgcggagacgcccaggccgaggaacccccagcccagggactaga

SEQ ID NO: 374569 - DNA, 120 bp, Artificial Sequence
  ENSG00000142686_1 (sequence is synthesized)
caccaccagggccgggcggagccagagccagacgcgccggagcgggcgcctctacgccgctagatgttcgccatccagccagggctagctgaggggggccaattcctgggggacccacct

SEQ ID NO: 374570 - DNA, 120 bp, Artificial Sequence
  ENSG00000142686_2 (sequence is synthesized)
cctggattatgtcagcccgagctccaaccagacagcaactccaacttcatggcaagtgccaaggatgctaacgagaattggcatgggatgccaggcagagtggaacctatcctgaggagg

SEQ ID NO: 374571 - DNA, 120 bp, Artificial Sequence
  ENSG00000142686_3 (sequence is synthesized)
agctcctctgagtcaccctctgacaaccaagccttccaggcccctggatcccctgaggaaggggtgcgcagccccccagagggggcagagattcccggggctgagcctgagaagatgggt

SEQ ID NO: 374572 - DNA, 120 bp, Artificial Sequence
  ENSG00000142686_4 (sequence is synthesized)
ggtgctggcacagtctgctcccctctggaggacaacggctatgccagcagttccctgagcattgacagccgtagcagcagtcctgagcctgcctgtgggaccccgcgaggccctggccct

SEQ ID NO: 374573 - DNA, 120 bp, Artificial Sequence
  ENSG00000142686_5 (sequence is synthesized)
cccgatccccttctgccctcagtggcccaggctgtgcagcacttacaagtccaggagcgctacaaagagcaggagaaggaaaagcaccacgtgcacttggtgatgtaccgtcgcctggca

SEQ ID NO: 374574 - DNA, 120 bp, Artificial Sequence
  ENSG00000142686_6 (sequence is synthesized)
ctgctccagtggatccggggcctgcagcatcagttgattgaccagcaggcccgactgcaggagagcttcgacaccatcctagacaaccggaaggagcttattcgctgtctccagcagagg

SEQ ID NO: 374575 - DNA, 120 bp, Artificial Sequence
  ENSG00000142686_7 (sequence is synthesized)
gcagcaccatccaggccccaggaccaggcctaagggtgtgcctccacaagtgtgcaagggtatatgtatatatttgcaggcatgtgtgaggcgcactagtaagtacataatttgctggca

SEQ ID NO: 374576 - DNA, 120 bp, Artificial Sequence
  ENSG00000142686_8 (sequence is synthesized)
tgattgcaggtaggcatgagtgtgtatgtgctaacatgtaggctggtgtgtgtaggcatgtgtgaataagcatgtataaatgagcttaagtgtgctgtgtgcacatgtgtacacacagct

SEQ ID NO: 374577 - DNA, 120 bp, Artificial Sequence
  ENSG00000142686_9 (sequence is synthesized)
aatttatctgcagacctatatgtgagcatgtaagagtgaacatatgtgtgtgtgtgtagtatgtaagaatgaggaactcggtatgtgcatgtgtagacaggtacccagcagtgtgtgtat

SEQ ID NO: 374578 - DNA, 120 bp, Artificial Sequence
  ENSG00000142686_10 (sequence is synthesized)
gtgcacatgtttggccacaggcatgggaggtgtatgttaggagcatgtgtgtttgtaggcagactcatgagcaggtgtgtgcaaatacatatccagctgcactgtgggtgtccacccaca

SEQ ID NO: 374579 - DNA, 120 bp, Artificial Sequence
  ENSG00000142686_11 (sequence is synthesized)
ccttgtgttcctcatggcctaccccagcctttcttctccactgggtcccactgttccctggagacagagggctagcatgctgtcatttatctgaaggttgtggctgacccattctcctgg

SEQ ID NO: 374580 - DNA, 120 bp, Artificial Sequence
  ENSG00000142686_12 (sequence is synthesized)
gatttcccaggccacctctcctttccctttccctcacttaacccagacttgctcagctgaggctattgtccctgatgttggctttacttgtaggaggtttagtggctgctctggcctgcc

SEQ ID NO: 374581 - DNA, 120 bp, Artificial Sequence
  ENSG00000142686_13 (sequence is synthesized)
atggaattttggctgcaattttggcagtgtgtggagaactggtatcaggaaagggaaccaggagtagtgatgaagatgatggtggggatggggacagaggacataggggactgtccctct

SEQ ID NO: 374582 - DNA, 120 bp, Artificial Sequence
  ENSG00000142686_14 (sequence is synthesized)
tgaactctgcctttgggcacatgggagatggggacaggaaagatgataacagtggaaccctgtgaagaataggagaatgggaattctaaaataccagttcccaaacaaaccatctctcca

SEQ ID NO: 374583 - DNA, 120 bp, Artificial Sequence
  ENSG00000142686_15 (sequence is synthesized)
ttggaaaaggagctgttgcaaaccgtgttcatttaagcttctgatgaaaagcaatgtatgtttataagcttgcaagtaacagacaagatgttccaaggccgatgaggaaaatatcgcttc

SEQ ID NO: 374584 - DNA, 120 bp, Artificial Sequence
  ENSG00000142686_16 (sequence is synthesized)
cctgtctctgcctctaccttgctgtgcctctctggctttagcagcattggatgttgaattggtttggttcatttctctgaagtcggactgtcaggaggagccagaggttggctttctggg

SEQ ID NO: 374585 - DNA, 120 bp, Artificial Sequence
  ENSG00000142686_17 (sequence is synthesized)
atgtgaaggggacagtgtcagcctaagcctctggagatgcttaggatgctgaattttaaccccttctttcactgcatggcccttcaaacagggattggcaggctccgcgagttacagagt

SEQ ID NO: 374586 - DNA, 120 bp, Artificial Sequence
  ENSG00000142686_18 (sequence is synthesized)
gggtgagtcttggagagaaccaacgactaaggtagcttagctctctgctttgttcttgggagccaagagaatgcaagatcctggtgggtgagcagtggtatgaagaggggacactggtgg

SEQ ID NO: 374587 - DNA, 120 bp, Artificial Sequence
  ENSG00000142686_19 (sequence is synthesized)
gtgaacagtggcatggaagtcactgatgcagcctctggccctcagtctccctatcggcaaagtggggggctcttcctatctctaaagagtttcatccctgacaggtggatgggtgaaaga

SEQ ID NO: 374588 - DNA, 120 bp, Artificial Sequence
  ENSG00000142686_20 (sequence is synthesized)
tccagagagtgggggtgaggggtgggccctgaagactttttgtctgtagctcttgcatattgagtgtataaacccggcttctggaccaacccaagatgaataaactggggcagaaaatta

SEQ ID NO: 374589 - DNA, 85 bp, Artificial Sequence
  ENSG00000142686_21 (sequence is synthesized)
actggttatgtagaatttgaggagactatggttggttgcagggttggatagcagttggatctgggctgaagacagatctgagagt

SEQ ID NO: 374590 - DNA, 120 bp, Artificial Sequence
  ENSG00000142686_22 (sequence is synthesized)
tgcacaaaatcagaagacagcctggctctgaggacggaggaaaaaccctttgcaggagactgagaatgaacaggctagatgttcgccatccagccagggctagctgaggggggccaattc

SEQ ID NO: 374591 - DNA, 120 bp, Artificial Sequence
  ENSG00000142687_0 (sequence is synthesized)
gtttccggccgccgtcgctgtccagggaggctgaggcgagaggtagctgtccgggtggggagcccgcactaccttcttcctcttcctcctcctcctccgggtgaggggagcgaaggttgg

SEQ ID NO: 374592 - DNA, 120 bp, Artificial Sequence
  ENSG00000142687_1 (sequence is synthesized)
gggtccccgagcccatggaccaggaggaggcggaggccgccgagagccggggccccgctatgtggccctgagccccgtgtactggttctgcctgtctggagggccatggagaagaggctg

SEQ ID NO: 374593 - DNA, 120 bp, Artificial Sequence
  ENSG00000142687_2 (sequence is synthesized)
ggagtcaagccaaatcctgcttcctggattttatcaggatattattggcagacatctgcgaagtggttgagaagcctgtacctgttttatacttgcttttgcttcagcgttctgtggttg

SEQ ID NO: 374594 - DNA, 120 bp, Artificial Sequence
  ENSG00000142687_3 (sequence is synthesized)
tcaacagatgccagtgagagcaggtgccagcaggggaagacacaatttggagttggcctgagatctgggggagaaaatcacctctggcttcttgaaggaaccccctctctccagtcatgt

SEQ ID NO: 374595 - DNA, 120 bp, Artificial Sequence
  ENSG00000142687_4 (sequence is synthesized)
tgggctgcctgctgccaggactctgcctgccatgtcttttggtggctagaagggatgtgcattcaggcagactgcagcaggccccagagctgccgggcttttaggacacactcctccaat

SEQ ID NO: 374596 - DNA, 120 bp, Artificial Sequence
  ENSG00000142687_5 (sequence is synthesized)
tccatgctggtgtttttaaaaaaattccaaactgcagatgatttgggctttctacctgaagatgatgtaccacatcttctggggctaggttggaactgggcatcttggaggcagagccca

SEQ ID NO: 374597 - DNA, 120 bp, Artificial Sequence
  ENSG00000142687_6 (sequence is synthesized)
cccagagctgcactcagacctgctgtatcttccagtgaccagcagagcttaatcaggaagcttcagaagagaggtagtcccagtgacgtagttacacctatagtgacacagcattctaaa

SEQ ID NO: 374598 - DNA, 120 bp, Artificial Sequence
  ENSG00000142687_7 (sequence is synthesized)
gtgaatgactccaacgaattaggtggtctgactaccagtggctctgcagaggtccacaaggcgattacaatttccagtcccctaaccacagacctgactgcagagctgtctggtgggcca

SEQ ID NO: 374599 - DNA, 120 bp, Artificial Sequence
  ENSG00000142687_8 (sequence is synthesized)
aagaatgtatcagtgcaacctgaaatatcagagggtcttgctactacgcccagcactcaacaagtaaaaagttctgagaaaacccagattgctgtcccccagccagtggctccctcctac

SEQ ID NO: 374600 - DNA, 120 bp, Artificial Sequence
  ENSG00000142687_9 (sequence is synthesized)
agttatgctacccctaccccccaggcctctttccagagcacctcagcaccatacccagttataaaggaactggtggtatctgctggagagagtgtccagataaccctgcctaagaatgaa

SEQ ID NO: 374601 - DNA, 120 bp, Artificial Sequence
  ENSG00000142687_10 (sequence is synthesized)
gttcaattaaatgcatatgttctccaagaaccacctaaaggagaaacctacacctacgactggcagctgattactcatcctagagactacagtggagaaatggaagggaaacattcccag

SEQ ID NO: 374602 - DNA, 120 bp, Artificial Sequence
  ENSG00000142687_11 (sequence is synthesized)
atcctcaaactatcgaagctcactccaggcctgtatgaattcaaagtgattgtagagggtcaaaatgcccatggggaaggctatgtgaacgtgacagtcaagccagagccccgtaagaat

SEQ ID NO: 374603 - DNA, 120 bp, Artificial Sequence
  ENSG00000142687_12 (sequence is synthesized)
cggccccccattgctattgtgtcacctcagttccaggagatctctttgccaaccacttctacagtcattgatggcagtcaaagcactgatgatgataaaatcgttcagtaccattgggaa

SEQ ID NO: 374604 - DNA, 120 bp, Artificial Sequence
  ENSG00000142687_13 (sequence is synthesized)
gaacttaaggggcctctaagagaagagaagatttctgaagatacagccatattaaaactaagtaaactcgtccctgggaactacactttcagcttgactgtagtagactctgatggagct

SEQ ID NO: 374605 - DNA, 120 bp, Artificial Sequence
  ENSG00000142687_14 (sequence is synthesized)
accaactctactactgcaaacctgacagtgaacaaagctgtggattacccccctgtggccaacgcaggccccaaccaagtgatcaccctgccccaaaactccatcaccctctttgggaac

SEQ ID NO: 374606 - DNA, 120 bp, Artificial Sequence
  ENSG00000142687_15 (sequence is synthesized)
cagagcactgatgatcatggcatcaccagctatgagtggtcactcagcccaagcagcaaagggaaagtggtggagatgcagggtgttagaacaccaaccttacagctctctgcgatgcaa

SEQ ID NO: 374607 - DNA, 120 bp, Artificial Sequence
  ENSG00000142687_16 (sequence is synthesized)
gaaggagactacacttaccagctcacagtgactgacacaataggacagcaggccactgctcaagtgactgttattgtgcaacctgaaaacaataagcctcctcaggcagatgcaggccca

SEQ ID NO: 374608 - DNA, 120 bp, Artificial Sequence
  ENSG00000142687_17 (sequence is synthesized)
gataaagagctgacccttcctgtggatagcacaaccctggatggcagcaagagctcagatgatcagaaaattatctcatatctctgggaaaaaacacagggacctgatggggtgcagctc

SEQ ID NO: 374609 - DNA, 120 bp, Artificial Sequence
  ENSG00000142687_18 (sequence is synthesized)
gagaatgctaacagcagtgttgctactgtgactgggctgcaagtggggacctatgtgttcaccttgactgtcaaagatgagaggaacctgcaaagccagagctctgtgaatgtcattgtc

SEQ ID NO: 374610 - DNA, 120 bp, Artificial Sequence
  ENSG00000142687_19 (sequence is synthesized)
cagatgacaagggaatagtcagctacctctggactcgagatgaggggagcccagcagcaggggaggtgttaaatcactctgaccatcaccctatcctttttctttcaaacctggttgagg

SEQ ID NO: 374611 - DNA, 120 bp, Artificial Sequence
  ENSG00000142687_20 (sequence is synthesized)
gaacctacacttttcacctgaaagtgaccgatgcaaagggtgagagtgacacagaccggaccactgtggaggtgaaacctgatcccaggaaaaacaacctggtggagatcatcttggata

SEQ ID NO: 374612 - DNA, 120 bp, Artificial Sequence
  ENSG00000142687_21 (sequence is synthesized)
tcaacgtcagtcagctaactgagaggctgaaggggatgttcatccgccagattggggtcctcctgggggtgctggattccgacatcattgtgcaaaagattcagccgtacacggagcaga

SEQ ID NO: 374613 - DNA, 120 bp, Artificial Sequence
  ENSG00000142687_22 (sequence is synthesized)
gcaccaaaatggtattttttgttcaaaacgagcctccccaccagatcttcaaaggccatgaggtggcagcgatgctcaagagtgagctgcggaagcaaaaggcagactttttgatattca

SEQ ID NO: 374614 - DNA, 120 bp, Artificial Sequence
  ENSG00000142687_23 (sequence is synthesized)
gagccttggaagtcaacactgtcacatgtcagctgaactgttccgaccatggccactgtgactcgttcaccaaacgctgtatctgtgaccctttttggatggagaatttcatcaaggtgc

SEQ ID NO: 374615 - DNA, 120 bp, Artificial Sequence
  ENSG00000142687_24 (sequence is synthesized)
agctgagggatggagacagcaactgtgagtggagcgtgttatatgttatcattgctacctttgtcattgttgttgccttgggaatcctgtcttggactgtgatctgttgttgtaagaggc

SEQ ID NO: 374616 - DNA, 120 bp, Artificial Sequence
  ENSG00000142687_25 (sequence is synthesized)
aaaaaggaaaacccaagaggaaaagcaagtacaagatcctggatgccacggatcaggaaagcctggagctgaagccaacctcccgagcaggcatcaaacagaaaggccttttgctaagta

SEQ ID NO: 374617 - DNA, 120 bp, Artificial Sequence
  ENSG00000142687_26 (sequence is synthesized)
gcagcctgatgcactccgagtcagagctggacagcgatgatgccatctttacatggccagaccgagagaagggcaaactcctgcatggtcagaatggctctgtacccaacgggcagaccc

SEQ ID NO: 374618 - DNA, 120 bp, Artificial Sequence
  ENSG00000142687_27 (sequence is synthesized)
ctctgaaggccaggagcccgcgggaggagatcctgtagccacctggtctgtctcctcagggcagggcccagcacactgcccggccagtcctcctacctcccgagtctgcgggcagctgct

SEQ ID NO: 374619 - DNA, 120 bp, Artificial Sequence
  ENSG00000142687_28 (sequence is synthesized)
gtcccagcatctgctggtcatttcgccctgacagtcccaaccagaacccctgggacttgaatccagagacgtcctccaggaacccctcaacgaagctgtgaatgaagaggtttcctcttt

SEQ ID NO: 374620 - DNA, 120 bp, Artificial Sequence
  ENSG00000142687_29 (sequence is synthesized)
aaacctgtctggtgggcccccagatatcctcacctcagggcctcctttttttgcaaactcctcccctcccccgagggcagacccagccagctgctaagctctgcagctccccagtggaca

SEQ ID NO: 374621 - DNA, 120 bp, Artificial Sequence
  ENSG00000142687_30 (sequence is synthesized)
gtgtcattgtgcccagagtgctgcaaggtgaggcctgctgtgctgcccgcacacctgagtgcaaaaccaagcactgtgggcatggtgtttccctctctggggtagagtacgccctctcgc

SEQ ID NO: 374622 - DNA, 120 bp, Artificial Sequence
  ENSG00000142687_31 (sequence is synthesized)
ttccctctctggggtagagtacgccctctcgctgggcaaagaggaagtggcacccctcccctcaccacagatgctgagatggtagcatagaaatgatggccgggcgcggtggctcacgcc

SEQ ID NO: 374623 - DNA, 120 bp, Artificial Sequence
  ENSG00000142687_32 (sequence is synthesized)
aaaaaaaagaaatgatatctggcccccccttaacactggagccccactcccttctcccatccggcccgagattagggaggattgactgtgtcagggatggcgggtggcctctctcgctgc

SEQ ID NO: 374624 - DNA, 120 bp, Artificial Sequence
  ENSG00000142687_33 (sequence is synthesized)
cagggcccttgtcagagcagccaggctggacagacggcctccctcctctccatctgaccggcacctgctgcttcggggcttaggccaccgctccctgtccccagaggagatagccccaga

SEQ ID NO: 374625 - DNA, 120 bp, Artificial Sequence
  ENSG00000142687_34 (sequence is synthesized)
tggactggaatgttgtggcatgagagcgcatgtgtgcgatggccccgctgtggtcccctctctgtccctccatctgtatgtgttctgtgtcccttgcatgtgtgcgtgttagagtgagcg

SEQ ID NO: 374626 - DNA, 120 bp, Artificial Sequence
  ENSG00000142687_35 (sequence is synthesized)
cgtatgcatcaactcattgggctcttggctgctcacaaggcaaatttgacttggaaagactttcatctccttggaaccaagacttcctgagtccccctcaccctggccctgttccaccat

SEQ ID NO: 374627 - DNA, 120 bp, Artificial Sequence
  ENSG00000142687_36 (sequence is synthesized)
ggttatctgggtattggggaatggaaactttgggggagtgactttttaaagagacacttataatttctactactgcactactgtccattgtgggatgattaaacatggtatttaactgtg

SEQ ID NO: 374628 - DNA, 120 bp, Artificial Sequence
  ENSG00000142687_37 (sequence is synthesized)
gggctcaggggaggggcaagcgggacgggcgatgtcagcggctgcgctggccggatgttgggtccggaggtggcgcccctggctcggccagggcagccagctgcttctgtccttgcagtg

SEQ ID NO: 374629 - DNA, 120 bp, Artificial Sequence
  ENSG00000142687_38 (sequence is synthesized)
gggtattgcccgagtctgggggctggggctcgagcgaaggaggcaaggtgcagactgcctctggagagcgggcggcgagaggctgggggcccagattccttcgctttgtactggttctgc

SEQ ID NO: 374630 - DNA, 120 bp, Artificial Sequence
  ENSG00000142687_39 (sequence is synthesized)
taattctgggaatttgggagcaagagcctacctagtgcctgcagctcacccattggtcctttctgtccttggccttcatcttcttttctctgggaagatggagataatcattctcttgca

SEQ ID NO: 374631 - DNA, 120 bp, Artificial Sequence
  ENSG00000142687_40 (sequence is synthesized)
tcaaaattgataacctctggcgggattccaggaactctttggcttctggtctcatagtggttgtgtccaactgacagtagttgcagttagtgaagagcattagctgactctccttgtgct

SEQ ID NO: 374632 - DNA, 120 bp, Artificial Sequence
  ENSG00000142687_41 (sequence is synthesized)
ctctcctgtgattaacagactgaaaactaggaacaaattggaaagacgacctcccagaacaatctgttcatttttccagctatttggaaaacagtgtctgcaaatataagcaaagctatt

SEQ ID NO: 374633 - DNA, 120 bp, Artificial Sequence
  ENSG00000142687_42 (sequence is synthesized)
aggtctgtgcactctctctgtggaaggctgctgtcactagcccctcctgagtgtgtcactaacagcccactgtgcttgcaaagcattttgttcccttttgcctgatgaagactgagggtc

SEQ ID NO: 374634 - DNA, 120 bp, Artificial Sequence
  ENSG00000142687_43 (sequence is synthesized)
agatttgccctgagctgcactggacaaaatgcctccaggacccacttcgcgtgctacttccgcttggcgggggtgctgggcctgttgttttcctttgcctgggcattctcctcatgtttc

SEQ ID NO: 374635 - DNA, 120 bp, Artificial Sequence
  ENSG00000142687_44 (sequence is synthesized)
gtctgtgctttatgggcagagatgagacccaggcccgtgtctgccagctgaccacctttcagccagccttgttctcctgtcttcctatctttatcatttggcaagtcctcagcttctgtc

SEQ ID NO: 374636 - DNA, 120 bp, Artificial Sequence
  ENSG00000142687_45 (sequence is synthesized)
agtgtcttagggcagataggagggcatttccttgcacaaacagtaagatgactttgagtgatggcactgggagatcagggcaggtagtaggccttccttcctccgctgggctgggtcacc

SEQ ID NO: 374637 - DNA, 120 bp, Artificial Sequence
  ENSG00000142687_46 (sequence is synthesized)
tggcgagggtttcactcatcatggatgccatgggacaggtatcattggtttatgagagctagactctataaagcgattcctaaacactctgcaagtagaactatttttatataaagcatt

SEQ ID NO: 374638 - DNA, 120 bp, Artificial Sequence
  ENSG00000142687_47 (sequence is synthesized)
tattaaacacttttcatgcttaaagctttgtgttagggagaggctatgggggtatagggagtcatcagacacaggctgtgctctcagtctagtgagggagaaaagacacacagtagcaga

SEQ ID NO: 374639 - DNA, 120 bp, Artificial Sequence
  ENSG00000142687_48 (sequence is synthesized)
agagaacaggctcacagcagtctggactctgcaccaagcagctcgatccaccaacactgtcaaggtggagactggaggtggtggggcttgaaatgagcccaggaaaccagagcagtgagg

SEQ ID NO: 374640 - DNA, 120 bp, Artificial Sequence
  ENSG00000142687_49 (sequence is synthesized)
gcgggcggggcatttcacccaggaatattgagaatgagggcctggaggtgaaatgtgcaaaacccacccctcacactgcagccaaggtttttatcatgttactctgatcatgtttttcac

SEQ ID NO: 374641 - DNA, 120 bp, Artificial Sequence
  ENSG00000142687_50 (sequence is synthesized)
cccctgacattcttcaatgacttactatttctagcacaaaaagctagaacttttggtctggtagatgtggcctttgtgagcttacatcagtttgcttttctggaatctttctctttgctg

SEQ ID NO: 374642 - DNA, 120 bp, Artificial Sequence
  ENSG00000142687_51 (sequence is synthesized)
tttctggaatctttctctttgctgatctccctcttttctaaacaagttcttctggttcatccagtaatctctttcttttttaaaaatgtggcgacaaggtcttgctctgtcacccaggct

SEQ ID NO: 374643 - DNA, 90 bp, Artificial Sequence
  ENSG00000142687_52 (sequence is synthesized)
gtcacccaggctggagtgcagtggtatagtcatagctcactgcaacctccagctcctgagctcaagtggtcctcctgcttcagcctccca

SEQ ID NO: 374644 - DNA, 120 bp, Artificial Sequence
  ENSG00000142687_53 (sequence is synthesized)
ttaacctcctcaagttgtgctcacctttctctcacatgcctgggtcggcatttctctcgctgtctcatgattagttatgtttgcctgtctccccacccatcagtgaaatccctgagggca

SEQ ID NO: 374645 - DNA, 120 bp, Artificial Sequence
  ENSG00000142687_54 (sequence is synthesized)
ggggctgtctcattcatctgtggatatggagcgggaccactatgtgccaggccctgtgccagacactgcttatattgtggtgaatcaaacggacagacttcactcttgtgtagcttatgt

SEQ ID NO: 374646 - DNA, 120 bp, Artificial Sequence
  ENSG00000142687_55 (sequence is synthesized)
cagacagacattaagcaaactcacaaatacataaaatatgctcataaaaggcctttatgaagaaaaacacttaagctgagacctggataagtgggagctagccagataaagctgcaggaa

SEQ ID NO: 374647 - DNA, 120 bp, Artificial Sequence
  ENSG00000142687_56 (sequence is synthesized)
atagcattccaggcaaaggaacaaaactggtgcagacccagctgctagaaggagcagagagcatttgaggaggtagaagaaggtgacatgatggacaggttcaccttcccacagagtaag

SEQ ID NO: 374648 - DNA, 120 bp, Artificial Sequence
  ENSG00000142687_57 (sequence is synthesized)
gggtgagtgacccaaggctcaatggatgagcagggtccctgctgaggacttctcttgagtacaatggggagccactgatagctttttaaggggatgaatggtgggatttggtttacattt

SEQ ID NO: 374649 - DNA, 120 bp, Artificial Sequence
  ENSG00000142687_58 (sequence is synthesized)
attattatttgagacagagtctcactcttatcacccaggcaggagtgcagtggtgcgatcaaggcccactgcagtcttgacctcctgggctcaggtgatccttccacctcagcttcctaa

SEQ ID NO: 374650 - DNA, 88 bp, Artificial Sequence
  ENSG00000142687_59 (sequence is synthesized)
gctcaggtgatccttccacctcagcttcctccccaggtttttttgttgttgttgttgttgttttgtatttttggtagagacggggttt

SEQ ID NO: 374651 - DNA, 87 bp, Artificial Sequence
  ENSG00000142687_60 (sequence is synthesized)
gtgatctgcctgccttggttggcacccggtcttggtttatattttaaaaagacaactgtgtagctgggcgtggtggtgggtgcctgt

SEQ ID NO: 374652 - DNA, 120 bp, Artificial Sequence
  ENSG00000142687_61 (sequence is synthesized)
gtgcctgtaatcccagctactcgagaggccaaggcaggagaattgctagaacctgggggtgtgaaggtttcagtgaactgagatcactccaacctgggcaataaagccagactctgtctc

SEQ ID NO: 374653 - DNA, 120 bp, Artificial Sequence
  ENSG00000142687_62 (sequence is synthesized)
tgctgtgtcagagagggttgtttccttgaagggggaaacccttagcaaggtgcctcatgatatctgactccatattcactcacatgctgaactgggtgttagaacaccaaccttacagct

SEQ ID NO: 374654 - DNA, 120 bp, Artificial Sequence
  ENSG00000142687_63 (sequence is synthesized)
acaacaagtgaagacaggctggaagtgtctttctagtggcctcctgactgctccagttttgtccagtcgagatgagaaaggcaggcaccatgcccaaggtgggtctcgaggacatttcac

SEQ ID NO: 374655 - DNA, 120 bp, Artificial Sequence
  ENSG00000142687_64 (sequence is synthesized)
tgaaactgcacactcctgctgtgccagcactcagcggccttgctgacctagggtgcagctaaaagctcattctccagagcctgagttctttgtgctttcctgcctaccatgtcattccac

SEQ ID NO: 374656 - DNA, 120 bp, Artificial Sequence
  ENSG00000142687_65 (sequence is synthesized)
ccatagagggaggtgataaaatattccaaatttgaaaggtaaagaaaagagaatgtcactgagtggcctgaaccaaagctcatggatactggagatgaagaaccagcaggagaccccagg

SEQ ID NO: 374657 - DNA, 120 bp, Artificial Sequence
  ENSG00000142687_66 (sequence is synthesized)
tcctttgggatacagtctgatgaatttagttagaatttacatttctggacactaacagtatgactcctgaaacaggggacgttctgtctctgctccctacttggttgctaaccagggcag

SEQ ID NO: 374658 - DNA, 120 bp, Artificial Sequence
  ENSG00000142687_67 (sequence is synthesized)
ttttcaagtttgcttgagaagccaagcttattacctgagatttaagaatgccagagccaacagcactgtctttaaatatttccagagttgttcacagctttctaaaagtatttaatgaat

SEQ ID NO: 374659 - DNA, 120 bp, Artificial Sequence
  ENSG00000142687_68 (sequence is synthesized)
gatcagcgccggctcggagaggccccggctgggatgcaggggagggcccgaagggggctgagctcaccaggctgcggccccgagcggcgaagtcttctcccagcgcgatgctccgggagc

SEQ ID NO: 374660 - DNA, 120 bp, Artificial Sequence
  ENSG00000142687_69 (sequence is synthesized)
ctcgggccgctgctcacgccgcgttgcccactcctggctccaggctgctgcagctccacccccacccccgcaccgctcttgacgaatccgcggctgcttcactccgggctctggccaatg

SEQ ID NO: 374661 - DNA, 120 bp, Artificial Sequence
  ENSG00000142687_70 (sequence is synthesized)
atattcactcacatgctgaactggtacgtaatagcccagtaccatcttaggtctttggtttagaaaactaaatcgtttttaccagagtcggaattattgtgtgatgtgattcctggagtc

SEQ ID NO: 374662 - DNA, 120 bp, Artificial Sequence
  ENSG00000142687_71 (sequence is synthesized)
atttgcattcagaaatttaaaaaatactgggccagacataaccctcaggttactttacctctgagggtgcaacctcttctcctcaaaatgtactggttctgcctgtctggagggccatgg

SEQ ID NO: 374663 - DNA, 120 bp, Artificial Sequence
  ENSG00000142687_72 (sequence is synthesized)
atttgcattcagaaatttaaaaaatactgggccagacataaccctcaggttactttacctctgagggtgcaacctcttctcctcaaaagtaagaaagtgtgtttggtcaaagtcacaaag

SEQ ID NO: 374664 - DNA, 120 bp, Artificial Sequence
  ENSG00000142687_73 (sequence is synthesized)
ctgttagtagcagaactgcaactaaaactcagagatcttcttgtctgcgggctggtactctttccattctaccacatagtgtactggttctgcctgtctggagggccatggagaagaggc

SEQ ID NO: 374665 - DNA, 120 bp, Artificial Sequence
  ENSG00000142694_0 (sequence is synthesized)
attcaagcctgggccctggaaggaggggtggacagtcccctcccttccagtccagcatgggtctggggaagagaagcagctttgcctggaaggggcctcctaggagggggagcggtggtt

SEQ ID NO: 374666 - DNA, 120 bp, Artificial Sequence
  ENSG00000142694_1 (sequence is synthesized)
tctagctcaggctttaggatcagagagcagcagattcaaatcctgacggttttggtaaagtcaattcaatctctccaagactccgtttatttgatctgcgaagtggggataatggtatca

SEQ ID NO: 374667 - DNA, 120 bp, Artificial Sequence
  ENSG00000142694_2 (sequence is synthesized)
cgtcgcagggttgtcaggcggagctggtaggggagctgccccccagagcagcatggatgccccgcgaagggacatggagttgctcagcaacagcctggctgcctacgcgcacatccgcgc

SEQ ID NO: 374668 - DNA, 120 bp, Artificial Sequence
  ENSG00000142694_3 (sequence is synthesized)
caaccccgagagcttcggcctctacttcgtgctgggcgtctgcttcggcctgctgctcaccctctgcctgctcgtcatcagcatctcgtgggcgccccgcccgcggccccggggcccggc

SEQ ID NO: 374669 - DNA, 120 bp, Artificial Sequence
  ENSG00000142694_4 (sequence is synthesized)
ctgccgggccccgagctgtccgcagagccggacgggcccctcaacgtcaacgtcttcacgtcggcggaggagctggagcgggcgcagcggctggaggagcgcgaacggatcctgcgggag

SEQ ID NO: 374670 - DNA, 120 bp, Artificial Sequence
  ENSG00000142694_5 (sequence is synthesized)
atctggcgcaccgggcagccggacctgctgggcacaggcacgctggggcccagccccacggccacgggcaccctgggccgcatgcactattactgatgggccccggctcccgctgcaagg

SEQ ID NO: 374671 - DNA, 120 bp, Artificial Sequence
  ENSG00000142694_6 (sequence is synthesized)
cgctcggggtaccggacctgcacatgagctcagagctaccccacaccttcggactgcctcggcccccacagctcccaggtgctactgggcgtggaccgccaccccctgagaggctccctt

SEQ ID NO: 374672 - DNA, 120 bp, Artificial Sequence
  ENSG00000142694_7 (sequence is synthesized)
ccccagtcctgccagaagaccccgggggcggggagggggcagcatgcagggtccccactccctctctggggtcgatgaagaggtgaagtgaccaaatgaaagaaagctgcattctcagtg

SEQ ID NO: 374673 - DNA, 120 bp, Artificial Sequence
  ENSG00000142698_0 (sequence is synthesized)
acagctggggagccagcccggtggccctgggcgggcgaatctcctcagaatcgcgggcctggtccccacccccaacacgcttgtatgcccgcccctcccgacgccgccttgctgggtgcc

SEQ ID NO: 374674 - DNA, 120 bp, Artificial Sequence
  ENSG00000142698_1 (sequence is synthesized)
aagaaccaaccgaagcagccagaactcctcagtgaaaggcctgctttatgttcccggggcagtgaggagggggcttctcccttcccattgtccagactcagcccccgaaagagagggctc

SEQ ID NO: 374675 - DNA, 120 bp, Artificial Sequence
  ENSG00000142698_2 (sequence is synthesized)
agccttcccaccagccctggagaggaggaagggactgactacgccagcaagctctggagctcagcagtggcaaagatgagatctccttgttggtggaacaggagttcctaagcctcacca

SEQ ID NO: 374676 - DNA, 120 bp, Artificial Sequence
  ENSG00000142698_3 (sequence is synthesized)
aagagcactcgatcctggtcgaagagagttctggggagctggaggtacccggcagctctcccgaggggaccagagagctggctccctgcattcttgcccctcctctagtggcaggcagta

SEQ ID NO: 374677 - DNA, 120 bp, Artificial Sequence
  ENSG00000142698_4 (sequence is synthesized)
atgagcgccccagagcctccatcattgtcggagacaagcttctgaagcagaaggtggccatgcccgttatcagcagcaggcaggactgtgattctgccacttctactgtcacagacattc

SEQ ID NO: 374678 - DNA, 120 bp, Artificial Sequence
  ENSG00000142698_5 (sequence is synthesized)
tgtgtgccgccgaggtcaagagcagcaaggggacagaggacaggggccgcatcctaggtgactccaacttgcaagtcagcaagcttctgtcccagttcccactgaagtccactgagacat

SEQ ID NO: 374679 - DNA, 120 bp, Artificial Sequence
  ENSG00000142698_6 (sequence is synthesized)
ccaaggtccctgacaacaagaatgtgctggacaagacaagggtcaccaaggacttcctacaggacaacctgttcagtggccctggacccaaggagcccacagggctgagcccatttctgc

SEQ ID NO: 374680 - DNA, 120 bp, Artificial Sequence
  ENSG00000142698_7 (sequence is synthesized)
tgctgcctccccgacctcctcctgcacgtcctgacaagctccctgagctccctgctcagaagaggcagctcccagtgtttgccaagatctgttccaagcccaaggctgaccctgctgtgg

SEQ ID NO: 374681 - DNA, 120 bp, Artificial Sequence
  ENSG00000142698_8 (sequence is synthesized)
acgcctgtggtgaggagggttgctgtgacgcagtgggcaccgcatcactgaccctgccgcccaagaaacctacatgtccagccgagaagaacttgctctatgagttccttggggccacca

SEQ ID NO: 374682 - DNA, 120 bp, Artificial Sequence
  ENSG00000142698_9 (sequence is synthesized)
agaacccaagcgggcagccgagacttcgaaacaaagtggaagtggatgggccggagctgaaatttaacgcacctgtgacggttgctgacaagaacaacccgaagtacacagggaatgttt

SEQ ID NO: 374683 - DNA, 120 bp, Artificial Sequence
  ENSG00000142698_10 (sequence is synthesized)
tcactccacactttcctacagccatgacctcagcaaccctgaaccagccactctggctcaacctgaactatccacctccaccagtgttcacgaatcactctaccttcttgcagtatcagg

SEQ ID NO: 374684 - DNA, 120 bp, Artificial Sequence
  ENSG00000142698_11 (sequence is synthesized)
gcctgtacccacagcaggcagcgaggatgccctatcagcaggctttgcacccgcagctgggatgttactcccaacaggtgatgccatacaacccacagcagatgggacagcagatcttcc

SEQ ID NO: 374685 - DNA, 120 bp, Artificial Sequence
  ENSG00000142698_12 (sequence is synthesized)
gctcttcctacacccctctgctgagctacatcccttttgtccagcccaattatccctaccctcagaggacacctccaaagatgtctgccaacccccgagaccctcccctaatggcaggag

SEQ ID NO: 374686 - DNA, 120 bp, Artificial Sequence
  ENSG00000142698_13 (sequence is synthesized)
atggaccgcagtacctctttccccaaggatatgggttcggctcgacatccggagggcccttgatgcacagcccctatttttcttccagtgggaatggcataaacttttagatctcctctt

SEQ ID NO: 374687 - DNA, 120 bp, Artificial Sequence
  ENSG00000142698_14 (sequence is synthesized)
ctcccttctcctcccttagcccttggatcaggactaggggctctgatttttggattctgcaaaagcttggtatgaagtttggaaaagcaaggttctgaccaggtcacagacaaaacagca

SEQ ID NO: 374688 - DNA, 120 bp, Artificial Sequence
  ENSG00000142698_15 (sequence is synthesized)
agaccagattcatctattggccaacactgacacaaaaatagccctcctcacacatggcacaagctacacacacacacacacacatgaccctcatattcatacttgcttgctcaaccactt

SEQ ID NO: 374689 - DNA, 120 bp, Artificial Sequence
  ENSG00000142698_16 (sequence is synthesized)
atgcatctatatttagctaacatgagtgatttttgtttttgtttttgttggtaaaatagaagtaagacacttaattttagaaagtttgtattttatgataaaagtatgagctacttgaaa

SEQ ID NO: 374690 - DNA, 120 bp, Artificial Sequence
  ENSG00000142698_17 (sequence is synthesized)
gcgcaccgagccgttgcgtttgaaacccacagaaagaattcccccgctcgacgacggcgagggtgtgggagctactggcaggcaaattggtgggagccgcccggcccagcctgccttgcc

SEQ ID NO: 374691 - DNA, 120 bp, Artificial Sequence
  ENSG00000142698_18 (sequence is synthesized)
gagtcagcgcgctcttgagccgctgggcccttcccggtgcccgcctggcagcgcggcgcggctggggcaggggtctgctgggggccggggactaagggctgtgggcccatccacacacgc

SEQ ID NO: 374692 - DNA, 120 bp, Artificial Sequence
  ENSG00000142698_19 (sequence is synthesized)
ctcatcccttctttccgggggcagcagagcagcagcgggagaccgggagcaggaggggtagggcgagagaaaagcaggacctgggccgggggtgggagtcgggccgttgacgctcgctct

SEQ ID NO: 374693 - DNA, 120 bp, Artificial Sequence
  ENSG00000142698_20 (sequence is synthesized)
gcgaggggctccctgggaacgcccaggcgagcgcctcctgcggggccccgccccccgagtgcctacaatggtgccaggcccgcacccagtcctccgcgtggcttagcgggacagcatggg

SEQ ID NO: 374694 - DNA, 120 bp, Artificial Sequence
  ENSG00000142698_21 (sequence is synthesized)
ctgagcccaggcgccgaaagttgtcacggcggcgtcgcaagggggcagtgccagggactgtggggagagccagccctccccttccagctgttcccagatgtcattctgcccgcccaggcg

SEQ ID NO: 374695 - DNA, 120 bp, Artificial Sequence
  ENSG00000142698_22 (sequence is synthesized)
cctggttcctgagctccgcagcattccactgttcctaagctactggtttttgttgacttttaaatattttcttctaagggagagggggagggaggcaaaagtcaggaaagagcaaataaa

SEQ ID NO: 374696 - DNA, 120 bp, Artificial Sequence
  ENSG00000142698_23 (sequence is synthesized)
aacaaatcaaaataagccctcccctccccaaaagaaagctgtcctccacccacccctcccacacaaatagaaggcctctgaacctaaccaccttgctggagcgaaagccagacagaactg

SEQ ID NO: 374697 - DNA, 120 bp, Artificial Sequence
  ENSG00000142698_24 (sequence is synthesized)
acccacttctgccaagccccatcctcatctccctttctggtgaatgaggggtggtggtggttgtgttctagccctgggtggacagaggggcttccagaaagagaggaggaggatggccag

SEQ ID NO: 374698 - DNA, 120 bp, Artificial Sequence
  ENSG00000142698_25 (sequence is synthesized)
cgggaatgggcttccttcatcctcggccctggtggccaagggcccctgcgccctgggcccattccccagatacatctggatccaccaggacacaccccaagacagcctagacaagacttg

SEQ ID NO: 374699 - DNA, 120 bp, Artificial Sequence
  ENSG00000142698_26 (sequence is synthesized)
ccatgaaatctggaagagagttcaaggcctgcctgaggcctcacagccctggacctccatggagcagctctctgtccctgtggttggaactctaagaggcaatgagctcagctttcaaga

SEQ ID NO: 374700 - DNA, 120 bp, Artificial Sequence
  ENSG00000142700_0 (sequence is synthesized)
attgagagtctggcagcgccgggcaactgggccccggctgcgcgcagcgtccggcgcgcaccgcgaggggacccggcacggcgagagtcaggtcgcgggttccaaccacgcggcccgcag

SEQ ID NO: 374701 - DNA, 120 bp, Artificial Sequence
  ENSG00000142700_1 (sequence is synthesized)
acgagcctccgacccggatttctgaagggagggttggactgcgctgcgttctgaggggtccggaagttcggacatggtgactgaaggagggtgacgtggtcagataaggggccgggggca

SEQ ID NO: 374702 - DNA, 120 bp, Artificial Sequence
  ENSG00000142700_2 (sequence is synthesized)
aagggaagcggccaagagctccagcgtcgccagtggagccgggaggcgcgtgcagcgccagcggaggaggaggatcccggagcccaaggtcctgtcatggagctgcgctcggagctgccc

SEQ ID NO: 374703 - DNA, 120 bp, Artificial Sequence
  ENSG00000142700_3 (sequence is synthesized)
cggcaacagcgacggggccgcctgtggcgtcggtggcgtcggtggcggcagccgcggcggccgctgcatcgctaccggtgagcgtggcaggcggcttgctgcgggggccgccactgttgc

SEQ ID NO: 374704 - DNA, 120 bp, Artificial Sequence
  ENSG00000142700_4 (sequence is synthesized)
ggcttgctgcgggggccgccactgttgctgcgggcagccgagaagtacccgcggacccccaagtgcgcgcgctgtcgcaaccatggcgtggtgtcggccctcaagggccacaaacgctac

SEQ ID NO: 374705 - DNA, 120 bp, Artificial Sequence
  ENSG00000142700_5 (sequence is synthesized)
tgtcgctggaaggactgcctgtgcgccaagtgcacgctcatcgcggagcgccagcgtgtcatggcggcgcaggtggcgctgcgcaggcagcaggcgcaggaggagaacgaggcgcgcgag

SEQ ID NO: 374706 - DNA, 120 bp, Artificial Sequence
  ENSG00000142700_6 (sequence is synthesized)
ctgcagctgctctacggcactgccgaggggctggcgctggccgccgccaacggcatcatccccccgaggcccgcctacgaggtcttcggttcagtgtgcgccgccgacggcgggggacct

SEQ ID NO: 374707 - DNA, 120 bp, Artificial Sequence
  ENSG00000142700_7 (sequence is synthesized)
ggagcgggagcgcccgcggggaccggaggcggagcagctggcgcagggggctcagaggccaagttgcagaagtttgacctgtttcctaagacgctgctgcaggcaggccgcccgggcagc

SEQ ID NO: 374708 - DNA, 120 bp, Artificial Sequence
  ENSG00000142700_8 (sequence is synthesized)
ccgctgccgccgccggtgaagcccttatcacccgacggcgcagactcggggcccgggacgtcgtccccagaggtgcggcccggctcaggctcggagaacggcgatggcgagtccttttct

SEQ ID NO: 374709 - DNA, 120 bp, Artificial Sequence
  ENSG00000142700_9 (sequence is synthesized)
ggttcgcccctagctcgggcctccaaagaggcaggtggcagctgcccaggcagcgctggccctggcggcggcggcgaggaggacagcccgggctccgctagccctctgggctctgaatcc

SEQ ID NO: 374710 - DNA, 120 bp, Artificial Sequence
  ENSG00000142700_10 (sequence is synthesized)
ggttcagaggctgacaaagaagagggtgaggccgcgccggcgccagggctgggcggaggctcgggtccacggcagcggacgccgctggatatcttgacacgcgtgttcccaggccaccgg

SEQ ID NO: 374711 - DNA, 120 bp, Artificial Sequence
  ENSG00000142700_11 (sequence is synthesized)
cgaggcgtcctggagctggtgttgcagggctgcggcggcgacgtggtgcaggccatcgagcaggtgctgaaccaccaccgtgggggcctggcggccggcctgggccctgcggcgccccca

SEQ ID NO: 374712 - DNA, 120 bp, Artificial Sequence
  ENSG00000142700_12 (sequence is synthesized)
gggcccgccgcacctccgcaccacagacccttgctggccggcgccatggcgcctggggcgctgggctcgctgagcagccgctcggccttctcgccgctgcagcccaacgccagtcacttc

SEQ ID NO: 374713 - DNA, 120 bp, Artificial Sequence
  ENSG00000142700_13 (sequence is synthesized)
ctcggccttctcgccgctgcagcccaacgccagtcacttcggtgccgacgcgggcgcctacccgctgggcgcgccgctcggcctcagccccctgcgcctggcctactccgcggcggcggc

SEQ ID NO: 374714 - DNA, 120 bp, Artificial Sequence
  ENSG00000142700_14 (sequence is synthesized)
gcacagccgcggtctggccttcatggcgccctactccactgccggcttggtgcccacgctcggcttccgcccacccatggactacgcctttagcgatctcatgcgtgaccgctcggccgc

SEQ ID NO: 374715 - DNA, 120 bp, Artificial Sequence
  ENSG00000142700_15 (sequence is synthesized)
cgctgctgcggcggtgcacaaggagccgacctacggcggcggcctgtacgggcctatggtcaacggcgctccggagaagcagtagggcgaggggcctggcagccggccggtccccaaaca

SEQ ID NO: 374716 - DNA, 120 bp, Artificial Sequence
  ENSG00000142700_16 (sequence is synthesized)
ggaaccccagccctgttcccgcgggccatcgacccctcttcgcccagcgctctctctgcgccctggctgggcgtcttctcactctaaggtggtttttgggttttgtttaggagggtgggt

SEQ ID NO: 374717 - DNA, 120 bp, Artificial Sequence
  ENSG00000142700_17 (sequence is synthesized)
ggggaaggctgagcaaagggggagcagctacagacaggtgcaggtgttctcggagggggtgcgcggcctgggtcctcatctcctacctccggatccctcttccagcctcacccggccccc

SEQ ID NO: 374718 - DNA, 120 bp, Artificial Sequence
  ENSG00000142700_18 (sequence is synthesized)
tttccaaaaggctgggaattcatgagaattcagaggctgcgacagcagcgcaggctcctgcggctccttagctgtgctcatccggctctcagtggatggcaggataatccgagagtcttt

SEQ ID NO: 374719 - DNA, 120 bp, Artificial Sequence
  ENSG00000142700_19 (sequence is synthesized)
tctgtgtctccccagccctcacttttaaaaaatttaaatattcgctctaacaaatataaatttaggatgtataaatctcttggcactgagtctttgggacacacatatatatcgatacaa

SEQ ID NO: 374720 - DNA, 120 bp, Artificial Sequence
  ENSG00000142700_20 (sequence is synthesized)
ttgtaaaaaaaaaaaaaggaaacaagttttaaggtgcactttcctcgttgcggtatttgtcgctctctttgttgcttatgccgataagcatgggtttccttggtgcagtgtgtttttata

SEQ ID NO: 374721 - DNA, 120 bp, Artificial Sequence
  ENSG00000142700_21 (sequence is synthesized)
tataaatctatatataatctatacatatatatatacaagccagtgtataatgttataaaatggaattctaagttattaattgtaatctgtaggtgacctcggtattaacgtgaaaaacat

SEQ ID NO: 374722 - DNA, 120 bp, Artificial Sequence
  ENSG00000142700_22 (sequence is synthesized)
acattcaaaacaagcaaaaaaagggacaaaatggaaaaaaattagactatgcgcgcattgtacttatcaggtttagagattaaatatattggaaactcgggatgaatcctgcccacctgc

SEQ ID NO: 374723 - DNA, 120 bp, Artificial Sequence
  ENSG00000142700_23 (sequence is synthesized)
ccctcttgcctgcggctggtctgtccctaaggagccgtcaaggtgcgcactgaagcaggaacagagcgacgtgtgactgagccagaaccgcccgctcgcgggcccatcctcgcctcccgg

SEQ ID NO: 374724 - DNA, 120 bp, Artificial Sequence
  ENSG00000142700_24 (sequence is synthesized)
gactcgccaaacgccctgactgaagggcccgcagcggaaaacgctgctgcagagcagcactttgtgctttcctttgcatagatatgagctagaaataaatgttattttctaagaaaacaa

SEQ ID NO: 374725 - DNA, 120 bp, Artificial Sequence
  ENSG00000142700_25 (sequence is synthesized)
gcttgggttcctcaaggcggcgctttggcctagcgcgcggtgtgctcctcaccaggtctctcccctctcccaccttctttcccgtcaggtcctgtcatggagctgcgctcggagctgccc

SEQ ID NO: 374726 - DNA, 120 bp, Artificial Sequence
  ENSG00000142731_0 (sequence is synthesized)
accaccagcctagctcggacggcaagcggcgggagattttcaaaatgggagcccagaggcaccgcccaggcctcggaaggtgtcagggagaactttccgtggtttcagcgtcgtcgcctg

SEQ ID NO: 374727 - DNA, 120 bp, Artificial Sequence
  ENSG00000142731_1 (sequence is synthesized)
gagcggcggtttagagagccgagcctgatgggcgccaaggccggctggctgcttggagcgctgcctcgaagggactgcgtgaaggaagctaatccggagaacccaggccagagcctggaa

SEQ ID NO: 374728 - DNA, 120 bp, Artificial Sequence
  ENSG00000142731_2 (sequence is synthesized)
atatggcgacctgcatcggggagaagatcgaggattttaaagttggaaatctgcttggtaaaggatcatttgctggtgtctacagagctgagtccattcacactggtttggaagttgcaa

SEQ ID NO: 374729 - DNA, 120 bp, Artificial Sequence
  ENSG00000142731_3 (sequence is synthesized)
tcaaaatgatagataagaaagccatgtacaaagcaggaatggtacagagagtccaaaatgaggtgaaaatacattgccaattgaaacatccttctatcttggagctttataactattttg

SEQ ID NO: 374730 - DNA, 120 bp, Artificial Sequence
  ENSG00000142731_4 (sequence is synthesized)
aagatagcaattatgtgtatctggtattagaaatgtgccataatggagaaatgaacaggtatctaaagaatagagtgaaacccttctcagaaaatgaagctcgacacttcatgcaccaga

SEQ ID NO: 374731 - DNA, 120 bp, Artificial Sequence
  ENSG00000142731_5 (sequence is synthesized)
tcatcacagggatgttgtatcttcattctcatggtatactacaccgggacctcacactttctaacctcctactgactcgtaatatgaacatcaagattgctgattttgggctggcaactc

SEQ ID NO: 374732 - DNA, 120 bp, Artificial Sequence
  ENSG00000142731_6 (sequence is synthesized)
aactgaaaatgccacatgaaaagcactatacattatgtggaactcctaactacatttcaccagaaattgccactcgaagtgcacatggccttgaatctgatgtttggtccctgggctgta

SEQ ID NO: 374733 - DNA, 120 bp, Artificial Sequence
  ENSG00000142731_7 (sequence is synthesized)
tgttttatacattacttatcgggagaccacccttcgacactgacacagtcaagaacacattaaataaagtagtattggcagattatgaaatgccatcttttttgtcaatagaggccaagg

SEQ ID NO: 374734 - DNA, 120 bp, Artificial Sequence
  ENSG00000142731_8 (sequence is synthesized)
accttattcaccagttacttcgtagaaatccagcagatcgtttaagtctgtcttcagtattggaccatccttttatgtcccgaaattcttcaacaaaaagtaaagatttaggaactgtgg

SEQ ID NO: 374735 - DNA, 120 bp, Artificial Sequence
  ENSG00000142731_9 (sequence is synthesized)
aagactcaattgatagtgggcatgccacaatttctactgcaattacagcttcttccagtaccagtataagtggtagtttatttgacaaaagaagacttttgattggtcagccactcccaa

SEQ ID NO: 374736 - DNA, 120 bp, Artificial Sequence
  ENSG00000142731_10 (sequence is synthesized)
ataaaatgactgtatttccaaagaataaaagttcaactgatttttcttcttcaggagatggaaacagtttttatactcagtggggaaatcaagaaaccagtaatagtggaaggggaagag

SEQ ID NO: 374737 - DNA, 120 bp, Artificial Sequence
  ENSG00000142731_11 (sequence is synthesized)
taattcaagatgcagaagaaaggccacattctcgataccttcgtagagcttattcctctgatagatctggcacttctaatagtcagtctcaagcaaaaacatatacaatggaacgatgtc

SEQ ID NO: 374738 - DNA, 120 bp, Artificial Sequence
  ENSG00000142731_12 (sequence is synthesized)
actcagcagaaatgctttcagtgtccaaaagatcaggaggaggtgaaaatgaagagaggtactcacccacagacaacaatgccaacatttttaacttctttaaagaaaagacatccagta

SEQ ID NO: 374739 - DNA, 120 bp, Artificial Sequence
  ENSG00000142731_13 (sequence is synthesized)
gttctggatcttttgaaagacctgataacaatcaagcactctccaatcatctttgtccaggaaaaactccttttccatttgcagacccgacacctcagactgaaaccgtacaacagtggt

SEQ ID NO: 374740 - DNA, 120 bp, Artificial Sequence
  ENSG00000142731_14 (sequence is synthesized)
ttgggaatctgcaaataaatgctcatttaagaaaaactactgaatatgacagcatcagcccaaaccgggacttccagggccatccagatttgcagaaggacacatcaaaaaatgcctgga

SEQ ID NO: 374741 - DNA, 120 bp, Artificial Sequence
  ENSG00000142731_15 (sequence is synthesized)
atgtgtttttggctcagatcctctttctgaacagagcaagactaggggtatggagccaccatggggttatcagaatcgtacattaagaagcattacatctccgttggttgctcacaggtt

SEQ ID NO: 374742 - DNA, 120 bp, Artificial Sequence
  ENSG00000142731_16 (sequence is synthesized)
aaaaccaatcagacagaaaaccaaaaaggctgtggtgagcatacttgattcagaggaggtgtgtgtggagcttgtaaaggagtatgcatctcaagaatatgtgaaagaagttcttcagat

SEQ ID NO: 374743 - DNA, 120 bp, Artificial Sequence
  ENSG00000142731_17 (sequence is synthesized)
atctagtgatggaaatacgatcactatttattatccaaatggtggtagaggttttcctcttgctgatagaccaccctcacctactgacaacatcagtaggtacagctttgacaatttacc

SEQ ID NO: 374744 - DNA, 120 bp, Artificial Sequence
  ENSG00000142731_18 (sequence is synthesized)
agaaaaatactggcgaaaatatcaatatgcttccaggtttgtacagcttgtaagatctaaatctcccaaaatcacttattttacaagatatgctaaatgcattttgatggagaattctcc

SEQ ID NO: 374745 - DNA, 120 bp, Artificial Sequence
  ENSG00000142731_19 (sequence is synthesized)
tggtgctgattttgaggtttggttttatgatggggtaaaaatacacaaaacagaagatttcattcaggtgattgaaaagacagggaagtcttacactttaaaaagtgaaagtgaagttaa

SEQ ID NO: 374746 - DNA, 120 bp, Artificial Sequence
  ENSG00000142731_20 (sequence is synthesized)
tagcttgaaagaggagataaaaatgtatatggaccatgctaatgagggtcatcgtatttgtttagcactggaatccataatttcagaagaggaaaggaaaactaggagtgctcccttttt

SEQ ID NO: 374747 - DNA, 120 bp, Artificial Sequence
  ENSG00000142731_21 (sequence is synthesized)
cccaataatcataggaagaaaacctggtagtactagttcacctaaggccttatcacctcctccttctgtggattcaaattacccaacgagagagagagcatctttcaacagaatggtcat

SEQ ID NO: 374748 - DNA, 120 bp, Artificial Sequence
  ENSG00000142731_22 (sequence is synthesized)
gcatagtgctgcttctccaacacaggcaccaatccttaatccctctatggttacaaatgaaggacttggtcttacaactacagcttctggaacagacatctcttctaatagtctaaaaga

SEQ ID NO: 374749 - DNA, 120 bp, Artificial Sequence
  ENSG00000142731_23 (sequence is synthesized)
ttgtcttcctaaatcagcacaacttttgaaatctgtttttgtgaaaaatgttggttgggctacacagttaactagtggagctgtgtgggttcagtttaatgatgggtcccagttggttgt

SEQ ID NO: 374750 - DNA, 120 bp, Artificial Sequence
  ENSG00000142731_24 (sequence is synthesized)
gcaggcaggagtgtcttctatcagttatacctcaccaaatggtcaaacaactaggtatggagaaaatgaaaaattaccagactacatcaaacagaaattacagtgtctgtcttccatcct

SEQ ID NO: 374751 - DNA, 120 bp, Artificial Sequence
  ENSG00000142731_25 (sequence is synthesized)
tttgatgttttctaatccgactcctaattttcattgattaaaactcctttcagacatataagtttaataaataacttttttgttgactttcaagtaaagtgattttttttaatttaacat

SEQ ID NO: 374752 - DNA, 120 bp, Artificial Sequence
  ENSG00000142731_26 (sequence is synthesized)
aaagtcttcagaaagcctttctatgaaagaattttaacctataatgtaaaggatgtattctgagagaacaaagcagaatgaaacttgagtcacttactaaatatagtggatataaaatag

SEQ ID NO: 374753 - DNA, 120 bp, Artificial Sequence
  ENSG00000142731_27 (sequence is synthesized)
aacacctgactttgctcttagaccataacccccgaacttactatgttcatatatttgtattgaacaatcttttaaaagcaaaaatgtaaatgatgtgtagtttatttgtgcttttattgt

SEQ ID NO: 374754 - DNA, 120 bp, Artificial Sequence
  ENSG00000142731_28 (sequence is synthesized)
tttccctgcgtctcagacatgttgagaatcatggacaaaacctgctggaattttggaatttttgaagatgtaaataatgtgtatttatgttataagtaacatatgtaaacatgtatattt

SEQ ID NO: 374755 - DNA, 120 bp, Artificial Sequence
  ENSG00000142731_29 (sequence is synthesized)
acatgtatatttgttttatatttatttttgtaacaccagtgtctgatgaaacatttttgcaaatgcattttataaaaaaataaatatagtgataagttacattatcttttgattcattta

SEQ ID NO: 374756 - DNA, 120 bp, Artificial Sequence
  ENSG00000142731_30 (sequence is synthesized)
tttttaaataacttaccagtaaactcactttttaaattttgttgcctgttgaggagccaattaaattttaaatattaattttgcaaatgttaaatacattgtttctctattatctgaaaa

SEQ ID NO: 374757 - DNA, 120 bp, Artificial Sequence
  ENSG00000142731_31 (sequence is synthesized)
gggaaggggagcgaacgaagctaacggctgcggggcgggcaccgaggtgcttagggagggtcccaacggcccagacccctgctgtttaggggcggagcggcccgcccctcaagagacaag

SEQ ID NO: 374758 - DNA, 120 bp, Artificial Sequence
  ENSG00000142731_32 (sequence is synthesized)
ctgccatggttaagtactcctaagtattatgtatgtcagagctgttctagtaaacaaaagaattattactgattttgggttttttttttttttaggtgagcatacttgattcagaggagg

SEQ ID NO: 374759 - DNA, 120 bp, Artificial Sequence
  ENSG00000142731_33 (sequence is synthesized)
tatgtgggtttttaaaattcaacacagtcagttttaaagatgtgtatgtatataactatacatataaattgcacagcggagtatacatgtcaaatcatattaatcaaaatttatctagcc

SEQ ID NO: 374760 - DNA, 120 bp, Artificial Sequence
  ENSG00000142731_34 (sequence is synthesized)
cttggaggtaagatataaattttgtagaagtgaccaaggacactgaatttttgtatattttaatttattatgccctttcacatttcagctttataactattttgaagatagcaattatgt

SEQ ID NO: 374761 - DNA, 120 bp, Artificial Sequence
  ENSG00000142733_0 (sequence is synthesized)
acaagtgaaggcagggcagcgttggcgggcgctcccttgagaagtccaggtggcgggcacctccgagccgattcccaggatcccccaagtggctctgagctgccgatcaccggatgcccc

SEQ ID NO: 374762 - DNA, 120 bp, Artificial Sequence
  ENSG00000142733_1 (sequence is synthesized)
agattcctgggacccaatcccggatttcagaacctcaggaccttgcaagtccgagctaggatttctccctggactttagattcctggaacgggacgtcaggccgtattccggatccctag

SEQ ID NO: 374763 - DNA, 120 bp, Artificial Sequence
  ENSG00000142733_2 (sequence is synthesized)
atcccgtgggagattctccgattccgaacggattccagatcccaagattcctgatctgccggcccaggctcctgccccgcccccggttcccagtgcgcggcgccccgcgcctgagcgccc

SEQ ID NO: 374764 - DNA, 120 bp, Artificial Sequence
  ENSG00000142733_3 (sequence is synthesized)
cgcgcggagccggccgctcagcgtggtctacgtgctgacccgggagccgcagcccgggctcgagcctcgggagggaaccgaggcggagccgctgcccctgcgctgcctgcgcgaggcttg

SEQ ID NO: 374765 - DNA, 120 bp, Artificial Sequence
  ENSG00000142733_4 (sequence is synthesized)
cgcgcaggtcccccggccgcggccgcccccgcagctgcgcagcctgcccttcgggacgctggagctaggcgacaccgcggctctggatgccttctacaacgcggatgtggtggtgctgga

SEQ ID NO: 374766 - DNA, 120 bp, Artificial Sequence
  ENSG00000142733_5 (sequence is synthesized)
ggtgagcagctcgctggtacagccctccctgttctaccaccttggtgtgcgtgagagcttcagcatgaccaacaatgtgctcctctgctcccaggccgacctccctgacctgcaggccct

SEQ ID NO: 374767 - DNA, 120 bp, Artificial Sequence
  ENSG00000142733_6 (sequence is synthesized)
gcgggaggatgttttccagaagaactcggattgcgttggcagctacacactgatcccctatgtggtgacggccactggtcgggtgctgtgtggtgatgcaggccttctgcggggcctggc

SEQ ID NO: 374768 - DNA, 120 bp, Artificial Sequence
  ENSG00000142733_7 (sequence is synthesized)
tgatgggctggtacaggctggagtggggaccgaggccctgctcactcccctggtgggccggcttgcccgcctgctggaggccacacccacagactcttgtggctatttccgggagaccat

SEQ ID NO: 374769 - DNA, 120 bp, Artificial Sequence
  ENSG00000142733_8 (sequence is synthesized)
tcggcgggacatccggcaggcgcgggagcggttcagtgggccacagctgcggcaggagctggctcgcctgcagcggagactggacagcgtggagctgctgagccccgacatcatcatgaa

SEQ ID NO: 374770 - DNA, 120 bp, Artificial Sequence
  ENSG00000142733_9 (sequence is synthesized)
cttgctgctctcctaccgcgatgtgcaggactactcggccatcattgagctggtggagacgctgcaggccttgcccacctgtgatgtggccgagcagcataatgtctgcttccactacac

SEQ ID NO: 374771 - DNA, 120 bp, Artificial Sequence
  ENSG00000142733_10 (sequence is synthesized)
ttttgccctcaaccggaggaacaggcctggggaccgggcgaaggccctgtctgtgctgctgccgctggtacagcttgagggctctgtggcgcccgatctgtactgcatgtgtggccgtat

SEQ ID NO: 374772 - DNA, 120 bp, Artificial Sequence
  ENSG00000142733_11 (sequence is synthesized)
ctacaaggacatgttcttcagctcgggtttccaggatgctgggcaccgggagcaggcctatcactggtatcgcaaggcttttgacgtagagcccagccttcactcaggcatcaatgcagc

SEQ ID NO: 374773 - DNA, 120 bp, Artificial Sequence
  ENSG00000142733_12 (sequence is synthesized)
tgtgctcctcattgctgccgggcagcactttgaggattccaaagagctccggctaataggcatgaagctgggctgcctgctggcccgcaaaggctgcgtggagaagatgcagtattactg

SEQ ID NO: 374774 - DNA, 120 bp, Artificial Sequence
  ENSG00000142733_13 (sequence is synthesized)
ggatgtgggtttctacctgggagcccagatcctcgccaatgaccccacccaggtggtgctggctgcagagcagctgtataagctcaatgcccccatatggtacctggtgtccgtgatgga

SEQ ID NO: 374775 - DNA, 120 bp, Artificial Sequence
  ENSG00000142733_14 (sequence is synthesized)
gaccttcctgctctaccagcacttcaggcccacgccagagccccctggagggccaccacgccgtgcccacttctggctccacttcttgctacagtcctgccaaccattcaagacagcctg

SEQ ID NO: 374776 - DNA, 120 bp, Artificial Sequence
  ENSG00000142733_15 (sequence is synthesized)
tgcccagggcgaccagtgcttggtgctggtcctggagatgaacaaggtgctgctgcctgcaaagctcgaggttcggggtactgacccagtaagcacagtgaccctgagcctgctggagcc

SEQ ID NO: 374777 - DNA, 120 bp, Artificial Sequence
  ENSG00000142733_16 (sequence is synthesized)
tgagacccaggacattccctccagctggaccttcccagtcgcctccatatgcggagtcagcgcctcaaagcgcgacgagcgctgctgcttcctctatgcactccccccggctcaggacgt

SEQ ID NO: 374778 - DNA, 120 bp, Artificial Sequence
  ENSG00000142733_17 (sequence is synthesized)
ttggagtttgattatgagtacacggagacgggcgagcggctggtgctgggcaagggcacgtatggggtggtgtacgcgggccgcgatcgccacacgagggtgcgcatcgccatcaaggag

SEQ ID NO: 374779 - DNA, 120 bp, Artificial Sequence
  ENSG00000142733_18 (sequence is synthesized)
atcccggagcgggacagcaggttctctcagcccctgcatgaagagatcgctcttcacagacgcctgcgccacaagaacatagtgcgctatctgggctcagctagccagggcggctacctt

SEQ ID NO: 374780 - DNA, 120 bp, Artificial Sequence
  ENSG00000142733_19 (sequence is synthesized)
aagatcttcatggaggaagtgcctggaggcagcctgtcctccttgctgcggtcggtgtggggacccctgaaggacaacgagagcaccatcagtttctacacccgccagatcctgcaggga

SEQ ID NO: 374781 - DNA, 120 bp, Artificial Sequence
  ENSG00000142733_20 (sequence is synthesized)
cttggctacttgcacgacaaccacatcgtgcacagggacataaaaggggacaatgtgctgatcaacaccttcagtgggctgctcaagatttctgacttcggcacctccaagcggctggca

SEQ ID NO: 374782 - DNA, 120 bp, Artificial Sequence
  ENSG00000142733_21 (sequence is synthesized)
ggcatcacaccttgcactgagaccttcacaggaactctgcagtatatggccccagaaatcattgaccagggcccacgcgggtatgggaaagcagctgacatctggtcactgggctgcact

SEQ ID NO: 374783 - DNA, 120 bp, Artificial Sequence
  ENSG00000142733_22 (sequence is synthesized)
gtcattgagatggccacaggtcgcccccccttccacgagctcgggagcccacaggctgccatgtttcaggtgggtatgtacaaggtccatccgccaatgcccagctctctgtcggccgag

SEQ ID NO: 374784 - DNA, 120 bp, Artificial Sequence
  ENSG00000142733_23 (sequence is synthesized)
gcccaagcctttctcctccgaacttttgagccagacccccgcctccgagccagcgcccagacactgctgggggaccccttcctgcagcctgggaaaaggagccgcagccccagctcccca

SEQ ID NO: 374785 - DNA, 120 bp, Artificial Sequence
  ENSG00000142733_24 (sequence is synthesized)
cgacatgctccacggccctcagatgccccttctgccagtcccactccttcagccaactcaaccacccagtctcagacattcccgtgccctcaggcaccctctcagcacccacccagcccc

SEQ ID NO: 374786 - DNA, 120 bp, Artificial Sequence
  ENSG00000142733_25 (sequence is synthesized)
ccgaagcgctgcctcagttatgggggcaccagccagctccgggtgcccgaggagcctgcggccgaggagcctgcgtctccggaggagagttcggggctgagcctgctgcaccaggagagc

SEQ ID NO: 374787 - DNA, 120 bp, Artificial Sequence
  ENSG00000142733_26 (sequence is synthesized)
aagcgtcgggccatgctggccgcagtattggagcaggagctgccagcgctggcggagaatctgcaccaggagcagaagcaagagcagggggcccgtctgggcagaaaccatgtggaagag

SEQ ID NO: 374788 - DNA, 120 bp, Artificial Sequence
  ENSG00000142733_27 (sequence is synthesized)
ctgctgcgctgcctcggggcacacatccacactcccaaccgccggcagctcgcccaggagctgcgggcgctgcaaggacggctgagggcccagggccttgggcctgcgcttctgcacaga

SEQ ID NO: 374789 - DNA, 120 bp, Artificial Sequence
  ENSG00000142733_28 (sequence is synthesized)
ccgctgtttgccttcccggatgcggtgaagcagatcctccgcaagcgccagatccgtccacactggatgttcgttctggactcactgctcagccgtgctgtgcgggcagccctgggtgtg

SEQ ID NO: 374790 - DNA, 120 bp, Artificial Sequence
  ENSG00000142733_29 (sequence is synthesized)
ctaggaccggaggtggagaaggaggcggtctcaccgaggtcagaggagctgagtaatgaaggggactcccagcagagcccaggccagcagagcccgcttccggtggagcccgagcagggc

SEQ ID NO: 374791 - DNA, 120 bp, Artificial Sequence
  ENSG00000142733_30 (sequence is synthesized)
cccgctcctctgatggtgcagctgagcctcttgagggcagagactgatcggctgcgcgaaatcctggcggggaaggaacgggagtaccaggccctggtgcagcgggctctacagcggctg

SEQ ID NO: 374792 - DNA, 120 bp, Artificial Sequence
  ENSG00000142733_31 (sequence is synthesized)
aatgaggaagcccggacctatgtcctggccccagagcctccaactgctctttcaacggaccagggcctggtgcagtggctacaggaactgaatgtggattcaggcaccatccaaatgctg

SEQ ID NO: 374793 - DNA, 120 bp, Artificial Sequence
  ENSG00000142733_32 (sequence is synthesized)
ttgaaccatagcttcaccctccacactctgctcacctatgccactcgagatgacctcatctacacccgcatcaggggagggatggtatgccgcatctggagggccatcttggcacagcga

SEQ ID NO: 374794 - DNA, 120 bp, Artificial Sequence
  ENSG00000142733_33 (sequence is synthesized)
gcaggatccacaccagtcacctctggaccctgagagctgaatgagggcatcataggccagacaggcccaaggatggatgaatggagaggacaaaggcagcttctgacacaccagccccag

SEQ ID NO: 374795 - DNA, 120 bp, Artificial Sequence
  ENSG00000142733_34 (sequence is synthesized)
gacctggggcgactggaggaagccaggcgagtggggcccaggactggttccagtgagagaaaccaaccacaggcacccaagcactaccagacaaagcgtattaaacagaacacttttgaa

SEQ ID NO: 374796 - DNA, 120 bp, Artificial Sequence
  ENSG00000142733_35 (sequence is synthesized)
tgaacatcgaatggggccggtgggggccaggcgggacaggggcaggcaggcgccggtgggggcgtgactaaatggacatctcccataccggcaccgcctggggcctgcccagagccgggc

SEQ ID NO: 374797 - DNA, 89 bp, Artificial Sequence
  ENSG00000142733_36 (sequence is synthesized)
acacaccagccccaggacctggggcgactggaggaagccagaaatagcatctcgctttgtggacaagcaatctgcctgcctcagcctcc

SEQ ID NO: 374798 - DNA, 120 bp, Artificial Sequence
  ENSG00000142733_37 (sequence is synthesized)
agctaatttttaaaattttgtcgagatggggtctcattatgttgctcagactggtcttgaactcttgggctaaagcaatccttctgcctcagcctcccaaagcattgggattacaggcgt

SEQ ID NO: 374799 - DNA, 120 bp, Artificial Sequence
  ENSG00000142733_38 (sequence is synthesized)
ggtgagaccaaggctcctgggatgggttccttttgcctggttttgcctttttctcctctcctacaaaagccctccctggggacctgggcaccttgaccacttgtgaatgtggcatttggt

SEQ ID NO: 374800 - DNA, 120 bp, Artificial Sequence
  ENSG00000142733_39 (sequence is synthesized)
gcctccccatgccctgttctggcaactctaacttggacttgttgtgtcctctcagtgcggggtttatctatgttcatgcctgtgaggtaggcataaaagtaggagagccaggattcaaac

SEQ ID NO: 374801 - DNA, 120 bp, Artificial Sequence
  ENSG00000142733_40 (sequence is synthesized)
gatgcggtgagggcgccttctggtagttagagctgcccaacaacaggtagtgagttccccgtgcctggtgaggtgccaggacttgacgttcccagattccctgtctcctctgtgaagatc

SEQ ID NO: 374802 - DNA, 120 bp, Artificial Sequence
  ENSG00000142733_41 (sequence is synthesized)
aggcctgcagcaaaaaaccgtctgcccagtcctagcttcccaggccttccctggacctcaagcccgcccaccccactcgcctcccgccgaagactttctaggcctttccaactcaagccc

SEQ ID NO: 374803 - DNA, 120 bp, Artificial Sequence
  ENSG00000142748_0 (sequence is synthesized)
agcaagatggatctactgtggatcctgccctccctgtggcttctcctgcttggggggcctgcctgcctgaagacccaggaacaccccagctgcccaggacccagggaactggaagccagc

SEQ ID NO: 374804 - DNA, 120 bp, Artificial Sequence
  ENSG00000142748_1 (sequence is synthesized)
aaagttgtcctcctgcccagttgtcccggagctccaggaagtcctggggagaagggagccccaggtcctcaagggccacctggaccaccaggcaagatgggccccaagggtgagccagga

SEQ ID NO: 374805 - DNA, 120 bp, Artificial Sequence
  ENSG00000142748_2 (sequence is synthesized)
gatccagtgaacctgctccggtgccaggaaggccccagaaactgccgggagctgttgagccagggcgccaccttgagcggctggtaccatctgtgcctacctgagggcagggccctccca

SEQ ID NO: 374806 - DNA, 120 bp, Artificial Sequence
  ENSG00000142748_3 (sequence is synthesized)
gtcttttgtgacatggacaccgaggggggcggctggctggtgtttcagaggcgccaggatggttctgtggatttcttccgctcttggtcctcctacagagcaggttttgggaaccaagag

SEQ ID NO: 374807 - DNA, 120 bp, Artificial Sequence
  ENSG00000142748_4 (sequence is synthesized)
agctggaagactttaatggtaaccgtactttcgcccactatgcgaccttccgcctcctcggtgaggtagaccactaccagctggcactgggcaagttctcagagggcactgcaggggatt

SEQ ID NO: 374808 - DNA, 120 bp, Artificial Sequence
  ENSG00000142748_5 (sequence is synthesized)
ccctgagcctccacagtgggaggccctttaccacctatgacgctgaccacgattcaagcaacagcaactgtgcagtgattgtccacggtgcctggtggtatgcatcctgttaccgatcaa

SEQ ID NO: 374809 - DNA, 120 bp, Artificial Sequence
  ENSG00000142748_6 (sequence is synthesized)
atctcaatggtcgctatgcagtgtctgaggctgccgcccacaaatatggcattgactgggcctcaggccgtggtgtgggccacccctaccgcagggttcggatgatgcttcgatagggca

SEQ ID NO: 374810 - DNA, 120 bp, Artificial Sequence
  ENSG00000142748_7 (sequence is synthesized)
ctctggcagccagtgcccttatctctcctgtacagcttccggatcgtcagccaccttgcctttgccaaccacctctgcttgcctgtccacatttaaaaataaaatcattttagccctttc

SEQ ID NO: 374811 - DNA, 120 bp, Artificial Sequence
  ENSG00000142748_8 (sequence is synthesized)
gaagggcctgggtaccctatgatggccctcctacagggtatggaaggctgggaggagtgggaaggattcggaaaagggcctgggtaccggctccactggtggctcagcgctggggtgctg

SEQ ID NO: 374812 - DNA, 120 bp, Artificial Sequence
  ENSG00000142748_9 (sequence is synthesized)
agacatcagagccaacactcatcccttctctggggcaggagatccagtgaacctgctccggtgccaggaaggtgaggcagcccttgcaggagccaggaacttgggatcacatggtgttgg

SEQ ID NO: 374813 - DNA, 120 bp, Artificial Sequence
  ENSG00000142748_10 (sequence is synthesized)
gtgttggcagacccccaagtgtggccaagatcctccccacagcctcctcagaacccttcttcagggacctgaaggagccaagagggtccctagggtcccacacttgttccagtgcctggg

SEQ ID NO: 374814 - DNA, 120 bp, Artificial Sequence
  ENSG00000142748_11 (sequence is synthesized)
agtgagcctaaggggagcagaggaaggaggctggatcctttcccagtgctgccactgcccccatgaatgacccagggcaatcctgtctcctctgtgggccttagtttccgcatctgagaa

SEQ ID NO: 374815 - DNA, 120 bp, Artificial Sequence
  ENSG00000142748_12 (sequence is synthesized)
tctgtgctgaggggccacgacaaaggagcaaggaacctactctgtgccagctccaggctgggcacccggcatcctaagatcaactctgccaggtaagtggtttcatccccattctgctga

SEQ ID NO: 374816 - DNA, 120 bp, Artificial Sequence
  ENSG00000142748_13 (sequence is synthesized)
ggaggaaagggaggttcagagaggataagatatttgcccgcaatcacaaagtgagtgaagggtgaaactgggatttgaacctctggctccaagtctcttgtttctttttggtcctgggca

SEQ ID NO: 374817 - DNA, 120 bp, Artificial Sequence
  ENSG00000142748_14 (sequence is synthesized)
ggccacctggaccaccaggcaagatgggccccaagggtgagccaggtgagtaagtggggctggaggcctccccgctttctttgcctctgtccctggactctagggtgggatctctgcttg

SEQ ID NO: 374818 - DNA, 120 bp, Artificial Sequence
  ENSG00000142748_15 (sequence is synthesized)
gctgctgtgcctatgatggctctctcacaggggaatggatggctgggaggagtgggaaggattaggagaagggcctggctaccctatgatggccctcctattggggatggagggctggga

SEQ ID NO: 374819 - DNA, 120 bp, Artificial Sequence
  ENSG00000142751_0 (sequence is synthesized)
agtctagttagtatcggcctgttatctccttttgcgcgacacggtctcagctgttccgcctgaggcgagtgacgctggccgccaacgaggtatacgtactgggaccctcgccctcagtct

SEQ ID NO: 374820 - DNA, 120 bp, Artificial Sequence
  ENSG00000142751_1 (sequence is synthesized)
cgtctccggcgcggctacctgccccgttttccctgtgagttgacctgctccgggccgcgggccgccaatggcaggggccgctccgaccacggccttcgggcaggcggtgatcggcccgcc

SEQ ID NO: 374821 - DNA, 120 bp, Artificial Sequence
  ENSG00000142751_2 (sequence is synthesized)
gggctcagggaagaccacgtactgcctgggcatgagtgagttcctgcgcgcgctgggccggcgcgtggcggtggtgaacctggacccggccaacgaggggctgccgtacgagtgtgccgt

SEQ ID NO: 374822 - DNA, 120 bp, Artificial Sequence
  ENSG00000142751_3 (sequence is synthesized)
ggacgtgggcgagctggtggggctgggcgacgtgatggacgcgctgcgcctggggcccaacggcggcctgctctactgcatggagtacctggaagccaacctggactggctgcgtgccaa

SEQ ID NO: 374823 - DNA, 120 bp, Artificial Sequence
  ENSG00000142751_4 (sequence is synthesized)
gctcgaccccctccgcggccactacttcctcttcgactgcccaggccaggtggagctctgcacgcatcacggcgccttgcgcagcatcttctcccaaatggcgcagtgggacctcaggct

SEQ ID NO: 374824 - DNA, 120 bp, Artificial Sequence
  ENSG00000142751_5 (sequence is synthesized)
gactgccgtccacctcgtggattctcactactgcacagaccctgccaagttcatttcagtactgtgtacctccctggccaccatgctgcacgtggaactgccccacatcaacctcctttc

SEQ ID NO: 374825 - DNA, 120 bp, Artificial Sequence
  ENSG00000142751_6 (sequence is synthesized)
caagatggacctcattgagcattatgggaagctggccttcaacctggactactacacagaggttctggacctctcctacctgcttgaccacctggcttctgaccctttcttccgccacta

SEQ ID NO: 374826 - DNA, 120 bp, Artificial Sequence
  ENSG00000142751_7 (sequence is synthesized)
ccgccagctcaatgagaagctagtgcagctcatcgaagactatagccttgtctcctttatccctctcaacatccaggacaaggagagcatccagcgagtcctgcaggctgtggataaagc

SEQ ID NO: 374827 - DNA, 120 bp, Artificial Sequence
  ENSG00000142751_8 (sequence is synthesized)
caatggatactgtttcagagcccaagagcagcgaagcttggaagccatgatgtctgccgcaatgggagccgacttccatttctcttccacactgggcatccaggagaagtacctggcacc

SEQ ID NO: 374828 - DNA, 120 bp, Artificial Sequence
  ENSG00000142751_9 (sequence is synthesized)
ctcgaaccagtcagtggagcaggaagccatgcagctgtagcaacaaggtggaccctggagagcaggatgcataatccagcactggggaaagtggaggctcctgatgcaggctgcagaccc

SEQ ID NO: 374829 - DNA, 120 bp, Artificial Sequence
  ENSG00000142751_10 (sequence is synthesized)
aagagcaagtcctcccagccagagctggcgggctggcaaggggatattcagctctgcaaaggacttctggccaaaaagccagacatggtgccaagcagaacaccccccatactgtcagtg

SEQ ID NO: 374830 - DNA, 120 bp, Artificial Sequence
  ENSG00000142751_11 (sequence is synthesized)
gtgtccgtgagctctgggccctgccaccagaaagtcgagcactggtcctagtcaggctgtgatgaaatgtgctacaatacaagagtttattttctactttttgtgacttccaaacttttc

SEQ ID NO: 374831 - DNA, 120 bp, Artificial Sequence
  ENSG00000142751_12 (sequence is synthesized)
ttcagtcttccgggcccaggggtttggggaagaatgagggagtgtcacctagccttggaataatcagtatttccccaaagcatataattcacattcagtcacataggatttacattcagt

SEQ ID NO: 374832 - DNA, 120 bp, Artificial Sequence
  ENSG00000142751_13 (sequence is synthesized)
ctccagtcatgtgtttttattaatcttcagtttttggttctgaggtttgttttttaaaagatggggtcttgctatatggcccaggctggactcaaactcctgggctcatgtgatcttccc

SEQ ID NO: 374833 - DNA, 120 bp, Artificial Sequence
  ENSG00000142751_14 (sequence is synthesized)
gcctcagacgcctgagtaactgggactacaggtgtgagccaccatgtcccacaattttcagttttaacagagcctcaagcttcagctttcacaggcaacacttcctaactagaactttgt

SEQ ID NO: 374834 - DNA, 120 bp, Artificial Sequence
  ENSG00000142751_15 (sequence is synthesized)
taatgttttatattcactgtatttgttttatggttttattctattgttgacaagtgttaactagttttccatttacagtagtggttaaaagtttacttcaaggctgggtgcggtggctca

SEQ ID NO: 374835 - DNA, 62 bp, Artificial Sequence
  ENSG00000142751_16 (sequence is synthesized)
gtgaaaccccatctctaccaaaaaatttttttaattagctgggcataggtggcgcgtcagag

SEQ ID NO: 374836 - DNA, 69 bp, Artificial Sequence
  ENSG00000142751_17 (sequence is synthesized)
ggtgtacttcaaaaatgaaatacaaggctgggcgtgttcactcatgcctgtaagcccagcactttggga

SEQ ID NO: 374837 - DNA, 120 bp, Artificial Sequence
  ENSG00000142751_18 (sequence is synthesized)
agtaagttgtgtaaagaaaaatattaattatataatatggcagttcctatgagagtgtggcaaaaatcaagagggcttggaagttttttctttgctcttgcaactggctggatgcagttc

SEQ ID NO: 374838 - DNA, 120 bp, Artificial Sequence
  ENSG00000142751_19 (sequence is synthesized)
atatatttttcaaccagtaggtggcaccccaacctaattttttgcagttgtaacctggtggcagaaggggcaggactgatggcttgggcaagactgttatgccaagttttatttgcatgt

SEQ ID NO: 374839 - DNA, 80 bp, Artificial Sequence
  ENSG00000142751_20 (sequence is synthesized)
ggcttgggcaagactgttatgccaagttttatttgcatgtatttggactttctttttttggagacaaagtctctctctgt

SEQ ID NO: 374840 - DNA, 120 bp, Artificial Sequence
  ENSG00000142751_21 (sequence is synthesized)
acaggcgtgagccactgcacccggccacatttggacttattaacacatatgaagtgcttggtattttagagtgcttccacacacacaatcctcattagagatagacaggatggggagaat

SEQ ID NO: 374841 - DNA, 120 bp, Artificial Sequence
  ENSG00000142751_22 (sequence is synthesized)
tcctcattagagatagacaggatggggagaattaataagccattgcccgtgttacagtgaggaagcagaaagatgagaagtttgaactttggtcagcctggctttctcataacccatttt

SEQ ID NO: 374842 - DNA, 120 bp, Artificial Sequence
  ENSG00000142751_23 (sequence is synthesized)
gctgactaaattgcgagtatccctcctttggtatatttattggtgagaagtcacagcccttgtcccacaggttttgcagccaatcaggagaaagaaattaggcacctgtaaagtattact

SEQ ID NO: 374843 - DNA, 120 bp, Artificial Sequence
  ENSG00000142751_24 (sequence is synthesized)
gaatcatagatagttcaccagtggtttgggcagttggcaaattaatttagggacatctgttctgaaacagcattgaaataggactgactgctttgctttctggttgtggcagccagagcc

SEQ ID NO: 374844 - DNA, 120 bp, Artificial Sequence
  ENSG00000142751_25 (sequence is synthesized)
aaaggcagatgaatgaggggctatgaggaggctactgtggctggaacagtatgaaagcaacctcagctcccacgcctggctgtaaaggggataataactgggtgctgcttcccagcctct

SEQ ID NO: 374845 - DNA, 120 bp, Artificial Sequence
  ENSG00000142751_26 (sequence is synthesized)
ttcatctgagaagttcaaagcacctcacccctattaacaccccacagagtaggtaggaagtaccaatagagcaagccaggaaaactgaggccaggaggcacagcctggggctagctgtga

SEQ ID NO: 374846 - DNA, 120 bp, Artificial Sequence
  ENSG00000142751_27 (sequence is synthesized)
atcacctgtggggcctagagcccaggaatcctgacgcccaggctactggacaaatcctttatcagggcattagggtgggtgctatgcttttgaaagcagtaccaacggctgtggtcgtgg

SEQ ID NO: 374847 - DNA, 120 bp, Artificial Sequence
  ENSG00000142751_28 (sequence is synthesized)
gttttgatgcttgccactcacagaggccccagctctcaccataacaaaccaaatgggggctggaaggcatcctttacaactttatggtctcgtatgcaagcaccctcagcattctctgca

SEQ ID NO: 374848 - DNA, 120 bp, Artificial Sequence
  ENSG00000142751_29 (sequence is synthesized)
cccatggagtggagatgggtgggagtaatccaaggcctttattttcaggccatggtttgacagcaagggtattttcttccccaataaacgtagcttctgtctaccttccactggcagcaa

SEQ ID NO: 374849 - DNA, 120 bp, Artificial Sequence
  ENSG00000142751_30 (sequence is synthesized)
aatgattttctgttctctgcatatactgaggggatctgcacagtgcagaaaggaagatgtccgagatccaagtgaggcctgttcagtgtgaaatgtctagggtagaagaaagaccatcct

SEQ ID NO: 374850 - DNA, 120 bp, Artificial Sequence
  ENSG00000142751_31 (sequence is synthesized)
ccattatggctggcatgtggcagtcatccttaagattatttttaaatttcctaataaatataggaaagtaaaaaacttagaaaatgaaagagaaggccgagcacggtggctcacgcctgt

SEQ ID NO: 374851 - DNA, 120 bp, Artificial Sequence
  ENSG00000142751_32 (sequence is synthesized)
ggcgggctgatcacctgaggtcaggagtgtaagacaagcctgaccaacatggtgaaaacctgtctctgctaaaaatacaaaaaaatgagcagggcatggtggcatgcgcctgtaattcca

SEQ ID NO: 374852 - DNA, 62 bp, Artificial Sequence
  ENSG00000142751_33 (sequence is synthesized)
aacctgtctctgctaaaaatacaaaaaaatgagcagggcatggtggcatgcgcctgtaatca

SEQ ID NO: 374853 - DNA, 120 bp, Artificial Sequence
  ENSG00000142751_34 (sequence is synthesized)
aagatggaaagtacatctcaaaaaaaaaaaaaacgaaaatgagtcacccagaatcccataacggaaactttctatggggtcatctgtttaagagaaaaataaattctatattcaaatgta

SEQ ID NO: 374854 - DNA, 120 bp, Artificial Sequence
  ENSG00000142751_35 (sequence is synthesized)
tcctatgaagtagatacctgcctatatagctagtaaatagcagagccagcaggtaaaaccaaatgctttttttcttagtaacttcattttactgtgtcaagaaatatttgagtgcatgag

SEQ ID NO: 374855 - DNA, 120 bp, Artificial Sequence
  ENSG00000142751_36 (sequence is synthesized)
tgcacaaaggaaaaaaggaaaaaggaacctcgtcctcaggtctttagcctgatactggttgctcctgaacactggtttctctctttagccttcaacctggactactacacagaggttctg

SEQ ID NO: 374856 - DNA, 120 bp, Artificial Sequence
  ENSG00000142751_37 (sequence is synthesized)
tagaatgaagcagacatctcagctgaagccttcaacctggactactacacagaggttctggacctctcctacctgcttgaccacctggcttctgaccctttcttccgccactaccgccag

SEQ ID NO: 374857 - DNA, 120 bp, Artificial Sequence
  ENSG00000142765_0 (sequence is synthesized)
agctgctggctgggctgcctgttgagtcagccttcttccctcacggctcttctcccggtccctgaaactcggctgccaggggagctggagccacctgcgaaggtgtcctcccatactgga

SEQ ID NO: 374858 - DNA, 120 bp, Artificial Sequence
  ENSG00000142765_1 (sequence is synthesized)
cccctacaggaagctccgtgtgcccagctggggcacagccccagctgatgccccagaggggccacccatcgcaagaggggctttgggctctgccctccctccccatggcgcatgggccaa

SEQ ID NO: 374859 - DNA, 120 bp, Artificial Sequence
  ENSG00000142765_2 (sequence is synthesized)
agcctgagactgaaggactgttggacctcagcttcctgacagaggaggagcaggaggccattgctggcgtcctccaacgagatgcccgcctgcgccagctggaggaggggcgggtcagca

SEQ ID NO: 374860 - DNA, 120 bp, Artificial Sequence
  ENSG00000142765_3 (sequence is synthesized)
agctccgggcctcagtggcagaccctgggcagctgaagatcctgacaggggactggttccaggaagcacgctcccagcggcaccacaatgcccacttcggctctgaccttgtccgagcgt

SEQ ID NO: 374861 - DNA, 120 bp, Artificial Sequence
  ENSG00000142765_4 (sequence is synthesized)
ctatgcgcaggaagaagagcaccaggggagaccaggctccaggccacgacagggaggctgaggctgctgtgaaagagaaggaagaggggccagagcccaggctcaccattgatgaggccc

SEQ ID NO: 374862 - DNA, 120 bp, Artificial Sequence
  ENSG00000142765_5 (sequence is synthesized)
ctcaggagaggctcagggagactgaggcttcagatcctgaggaggcgtcccaggcccaggaagatcctggccaaggagaccaacaggtctgtgccgaggaggctgacccggagctggagc

SEQ ID NO: 374863 - DNA, 120 bp, Artificial Sequence
  ENSG00000142765_6 (sequence is synthesized)
ccgcgtcggggggagagcaggagccgcggccccagcaagcccagaccaaggccgcgtcccagatcctggagaatggggaggaggccccggggcccgacccctctctcgaccgcatgctca

SEQ ID NO: 374864 - DNA, 120 bp, Artificial Sequence
  ENSG00000142765_7 (sequence is synthesized)
gcacttcgcgctgcactacgagccgggcgccgccgagctgcgcgtgcacgtgatccagtgccagggcctggccgccgcccggcgccgccgctcggacccctacgtcaaaagctacctcct

SEQ ID NO: 374865 - DNA, 120 bp, Artificial Sequence
  ENSG00000142765_8 (sequence is synthesized)
cccggataagcagagcaagcgcaagacggcggtgaagaaacggaatctgaatccggttttcaacgagactctccggtactccgtcccgcaggccgagcttcagggccgcgtgctgagcct

SEQ ID NO: 374866 - DNA, 120 bp, Artificial Sequence
  ENSG00000142765_9 (sequence is synthesized)
gtctgtgtggcaccgcgaaagcctgggtcgcaacatctttctgggcgaagttgaagtgcccctggacacgtgggactggggctctgagcccacctggctccccctgcagccccgggtccc

SEQ ID NO: 374867 - DNA, 120 bp, Artificial Sequence
  ENSG00000142765_10 (sequence is synthesized)
accctctcccgacgaccttccgagccgcgggttactcgccctgtccctcaagtacgtccccgccggctccgagggcgcaggactgcccccgagcggggagctgcacttctgggtgaagga

SEQ ID NO: 374868 - DNA, 120 bp, Artificial Sequence
  ENSG00000142765_11 (sequence is synthesized)
ggctcgggacctcctgccgctgcgggcaggatccctggacacttacgtacaatgcttcgtgctgcctgatgacagccaggccagccgccagcgtacaagggttgtgcgacgcagcctcag

SEQ ID NO: 374869 - DNA, 120 bp, Artificial Sequence
  ENSG00000142765_12 (sequence is synthesized)
ccctgtgttcaatcacaccatggtgtacgatggctttgggcctgctgacctgcgccaggcttgtgccgagctctccctctgggaccatggggccctggccaaccgccagctggggggcac

SEQ ID NO: 374870 - DNA, 120 bp, Artificial Sequence
  ENSG00000142765_13 (sequence is synthesized)
acgcctcagcctgggcaccggcagcagctatgggctgcaggtgccctggatggattccacacctgaggagaagcagctgtggcaagccctcctggagcagccgtgcgaatgggtggatgg

SEQ ID NO: 374871 - DNA, 120 bp, Artificial Sequence
  ENSG00000142765_14 (sequence is synthesized)
ccttctacccctcagaaccaacctggcccccaggacgtagccccaccaagcctctctctctggacccccatctcagggcctgcccttggctaaagtcaataaagtctattctaagagcaa

SEQ ID NO: 374872 - DNA, 120 bp, Artificial Sequence
  ENSG00000142765_15 (sequence is synthesized)
gtgtgtgcatgtctctcgtgggcatgggtccgggtctgtgtctgcagagggccctttctgggggaacagctgtgcatgcgcctgtctttatgcaggtgtctgtgtgcatgtgcgaccata

SEQ ID NO: 374873 - DNA, 120 bp, Artificial Sequence
  ENSG00000142765_16 (sequence is synthesized)
tctatgcctacatggacccgcgtgtgcacatgtgtctgtgtgttccatcgctgcagtcctgtgtggccctacctcagggtgtgtgcatgtgtgtctcttgcttcttccactgtgtctcca

SEQ ID NO: 374874 - DNA, 120 bp, Artificial Sequence
  ENSG00000142765_17 (sequence is synthesized)
agtgtgttcaagggctagtgtatgcatgtgtgcatgagtgtctctcaccccaccttgagctcagccatcctggggtggcaccctacccatacccggccaagtgtttggggagaaaagggc

SEQ ID NO: 374875 - DNA, 120 bp, Artificial Sequence
  ENSG00000142765_18 (sequence is synthesized)
tcatggccccaggcgaagcccggccggccacggccccttccccgagggcgctaggacccctaggttctgcccctgcaggccccgccgtctcttctagccgcaccccatccgggtctgcag

SEQ ID NO: 374876 - DNA, 120 bp, Artificial Sequence
  ENSG00000142765_19 (sequence is synthesized)
ttccctcacggctcttctcccggtccctgaaactcggctgccaggggagctggagccacctgcgaaggtgtcctcccatactggacccctacaggtaacacgtgtcggtgccagggtccc

SEQ ID NO: 374877 - DNA, 120 bp, Artificial Sequence
  ENSG00000142765_20 (sequence is synthesized)
ctgccagggtccagagacgcaggcactgccacctggtatcctgagcaccctccagcaccttggggttgggggaggtgggcacatgtctggaactggaacagctggacagatggacagacc

SEQ ID NO: 374878 - DNA, 120 bp, Artificial Sequence
  ENSG00000142765_21 (sequence is synthesized)
gccgcggccccagcaagcccaggtaggcgggagtggcccgtggctgctctcaacatccggagcggactccgggcggggagcgctcctgcccagggctgcgagccgcccgcgacccagggc

SEQ ID NO: 374879 - DNA, 120 bp, Artificial Sequence
  ENSG00000142765_22 (sequence is synthesized)
cacagcccagcccaccattcacagggtctcggcctcctcgtcctcatcttcaaaatgggaacaacagcgttattgggaggcgtgcgattaagcgagacaatccctgtaaagcgcttagca

SEQ ID NO: 374880 - DNA, 120 bp, Artificial Sequence
  ENSG00000142765_23 (sequence is synthesized)
cgaggcctggcacgtgttcgggatggtggctgggggagcccacaggcaggggagaaggctctgggagggcccctcctcacctcgggttctcacctccccagctacgtcaaaagctacctc

SEQ ID NO: 374881 - DNA, 120 bp, Artificial Sequence
  ENSG00000142765_24 (sequence is synthesized)
gagcggggagctgcacttctgggtgaaggaggctcgggacctcctgccgctgcgggcaggatccctggacacttacgtacaatggtgaggagtgctggccctccgggcttcccattcttt

SEQ ID NO: 374882 - DNA, 120 bp, Artificial Sequence
  ENSG00000142765_25 (sequence is synthesized)
tgcctgcagtggagtgcccaacctccacaaacccttactaatcaacctttgatcacgcagcctgggctttcaccactgagcaggggtgaaggggacggtttgagcaaaggcctggagtca

SEQ ID NO: 374883 - DNA, 120 bp, Artificial Sequence
  ENSG00000142765_26 (sequence is synthesized)
gggaagttgaggacacctttgaggagctgcatttcagcgtgactggcgcctataggacttgttgaaaagctgaggctgagggctgcaagggtccttccatagagaacctgggaggccagg

SEQ ID NO: 374884 - DNA, 120 bp, Artificial Sequence
  ENSG00000142765_27 (sequence is synthesized)
ctgtggggcttggctgggaacttatagttcagtgtaagcttctaggggacttctaggggtgcctccaggtgctgcccccactgttagagagtgaaatggaggtgggcgggtcacttctgg

SEQ ID NO: 374885 - DNA, 120 bp, Artificial Sequence
  ENSG00000142765_28 (sequence is synthesized)
gtgtccactctgatgcagccagaggctgcagtacagaggtactgtacttctgagcaacactgtattttgcagagggggttcccaggctttgaaaaccttggaaacaggccaggcacggtg

SEQ ID NO: 374886 - DNA, 73 bp, Artificial Sequence
  ENSG00000142765_29 (sequence is synthesized)
aatcccagctacttgagagactgaggcgggagaatcactcgaacccagaaacagagcgagactcgatctcaaa

SEQ ID NO: 374887 - DNA, 120 bp, Artificial Sequence
  ENSG00000142765_30 (sequence is synthesized)
gcaaaacagagcgagactcgatctcaaaaaataaaaaaaaaccttggaaactgcttgaggaggggtggtggtggagcaacagggagataataaaagtcactgagccagcgagaatagcag

SEQ ID NO: 374888 - DNA, 90 bp, Artificial Sequence
  ENSG00000142765_31 (sequence is synthesized)
agggagataataaaagtcactgagccagcgagaatagcagaactgcatttcagagacattgctctgcagccctgtgaataggagttgtaa

SEQ ID NO: 374889 - DNA, 64 bp, Artificial Sequence
  ENSG00000142765_32 (sequence is synthesized)
acaggcatgagccaccgcgcccggctattattattttttttaagatggccgcagtctcctgggc

SEQ ID NO: 374890 - DNA, 70 bp, Artificial Sequence
  ENSG00000142765_33 (sequence is synthesized)
cgcccggccaggagctgtaacttttaaagccaggagacctgagaggaggctggtgcaaaggtcccagggc

SEQ ID NO: 374891 - DNA, 120 bp, Artificial Sequence
  ENSG00000142765_34 (sequence is synthesized)
caggagacctgagaggaggctggtgcaaaggtcccagggcagtgagggtctaaggccaggcaggcaggagccaggggacatggacatatgtgagagagaatgagtgggacgtggtgactg

SEQ ID NO: 374892 - DNA, 120 bp, Artificial Sequence
  ENSG00000142765_35 (sequence is synthesized)
aggggacccgggcggccggggggtggacccgttccgatgcgtagcccctgcctgcccctccctcgccgcgggacccaccgctgcagccccccagcctgccacctatgacccgggtctgaa

SEQ ID NO: 374893 - DNA, 120 bp, Artificial Sequence
  ENSG00000142765_36 (sequence is synthesized)
gcctccgcgctgcccgcggccccgacgtgagccctgcgagcggccctgactcccacccactcccgtccgcagctgagcggcagccagatgagcctgtcaggcgacgcggaggcggtgcag

SEQ ID NO: 374894 - DNA, 120 bp, Artificial Sequence
  ENSG00000142765_37 (sequence is synthesized)
gcggggctaggtggcaagggcagccagtaacgtcattgcccggaggatcggcggagggggcccattaactcgttatccagtgttgtcagcctcgtggtgggcgtggtgatagtgcaggtc

SEQ ID NO: 374895 - DNA, 120 bp, Artificial Sequence
  ENSG00000142765_38 (sequence is synthesized)
cccattaatgcccttaggggctccccagaattccatcatggtaggaacgcggtaggacctgcctcagccaactcgcgcagcatctacgcgggccaccagcagtgctccactaaagctcac

SEQ ID NO: 374896 - DNA, 120 bp, Artificial Sequence
  ENSG00000142784_0 (sequence is synthesized)
aaacagaggaggaggagggaggggagtgcgtgtgtgagagcgcgcgagggagtgtgagtgtgtgtgagcgcgggtgtgaggcggtgcgcaggggcgggcggaggcgctgtccggccccgg

SEQ ID NO: 374897 - DNA, 120 bp, Artificial Sequence
  ENSG00000142784_1 (sequence is synthesized)
cgggcggggagcatgggaaggggctagaactgctcgagccccccagccccctccccgggatccgcgccccccttcccgggagaggggccgccccccccggacggacatgggctcctgaag

SEQ ID NO: 374898 - DNA, 120 bp, Artificial Sequence
  ENSG00000142784_2 (sequence is synthesized)
tcctgaagttgcgccgctgccggtcgggggaagagacctgacaggtaattaaatgtgtattttgtggacctgggcttggctggaatgctcaggggtcctgaagatcctattatagcttcc

SEQ ID NO: 374899 - DNA, 120 bp, Artificial Sequence
  ENSG00000142784_3 (sequence is synthesized)
ttctgttgaaccattaagaaaagatggcgaaagtcaacataactagagacctcatccgtaggcagatcaaggagcggggtgccctgagctttgagcggcgctaccatgtcactgacccct

SEQ ID NO: 374900 - DNA, 120 bp, Artificial Sequence
  ENSG00000142784_4 (sequence is synthesized)
ttatccggcggctgggcctggaagcagagctgcagggtcactcaggatgtgtcaactgtctggagtggaatgagaaaggagacttgctggcctctggttccgatgaccagcacacgattg

SEQ ID NO: 374901 - DNA, 120 bp, Artificial Sequence
  ENSG00000142784_5 (sequence is synthesized)
tgtgggacccgctgcaccacaagaagctgctctccatgcacacgggacacaccgcaaatatcttctctgtcaagttcctgcctcacgctggggaccgcatcttgatcacgggggcagccg

SEQ ID NO: 374902 - DNA, 120 bp, Artificial Sequence
  ENSG00000142784_6 (sequence is synthesized)
actctaaggtgcatgtgcacgacctgacagtaaaggagaccatccacatgtttggagaccacacaaaccgggtgaagcgcatcgccacagcgcccatgtggcccaacacattctggagtg

SEQ ID NO: 374903 - DNA, 120 bp, Artificial Sequence
  ENSG00000142784_7 (sequence is synthesized)
ctgctgaggatgggcttatccgccagtatgaccttcgagagaacagcaaacactcggaggtgctgattgacctgacagagtactgtggccagctggtggaggccaagtgcctcactgtca

SEQ ID NO: 374904 - DNA, 120 bp, Artificial Sequence
  ENSG00000142784_8 (sequence is synthesized)
acccccaggacaacaactgcctggcagttggggccagcgggcccttcgtgaggctctatgacatccgcatgatccataaccacagaaagagcatgaagcagagcccttcagcgggtgtgc

SEQ ID NO: 374905 - DNA, 120 bp, Artificial Sequence
  ENSG00000142784_9 (sequence is synthesized)
acaccttctgtgaccggcagaaaccccttccggacggtgcagcccagtattacgtagcaggtcacctgccagtgaagcttcctgactacaacaaccgtttgagagtgctggttgccacct

SEQ ID NO: 374906 - DNA, 120 bp, Artificial Sequence
  ENSG00000142784_10 (sequence is synthesized)
atgtgaccttcagccccaatggcacagagctactagtcaacatggggggggaacaggtctatttgtttgacttgacttacaagcagcggccgtacaccttcctcttgcctagaaaatgcc

SEQ ID NO: 374907 - DNA, 120 bp, Artificial Sequence
  ENSG00000142784_11 (sequence is synthesized)
actcctcgggggtccagaatggcaagatgtccaccaacggtgtgtccaacggtgtgtccaatggcctgcaccttcatagcaatggcttccggctgccggagagtaggggacatgtcagcc

SEQ ID NO: 374908 - DNA, 120 bp, Artificial Sequence
  ENSG00000142784_12 (sequence is synthesized)
cccaagtagagctaccaccatacctggagcgtgtgaaacagcaagccaatgaggcttttgcctgccagcagtggacccaagccattcagctttacagcaaggctgtgcagagggcccctc

SEQ ID NO: 374909 - DNA, 120 bp, Artificial Sequence
  ENSG00000142784_13 (sequence is synthesized)
acaatgccatgctttatggaaaccgagcagcagcctacatgaagcgcaagtgggatggtgaccactatgatgccctgagggactgcctcaaggccatctccctaaacccatgccacctga

SEQ ID NO: 374910 - DNA, 120 bp, Artificial Sequence
  ENSG00000142784_14 (sequence is synthesized)
aggcacactttcgcctggcccgctgcctctttgagctcaagtatgtggctgaagccctggagtgcctggacgacttcaaagggaaatttccggagcaggcccacagcagcgcttgtgatg

SEQ ID NO: 374911 - DNA, 120 bp, Artificial Sequence
  ENSG00000142784_15 (sequence is synthesized)
cattgggccgcgacatcacagctgccctcttctctaaaaatgatggtgaggagaagaagggacctggtggcggcgccccagtccgcctccgcagcacgagccgcaaggactccatctcag

SEQ ID NO: 374912 - DNA, 120 bp, Artificial Sequence
  ENSG00000142784_16 (sequence is synthesized)
aggatgaaatggtgctgcgggagcgaagctacgactatcagttccgctactgcggccactgcaacaccaccacggatatcaaagaggccaatttctttggcagcaacgctcagtatatcg

SEQ ID NO: 374913 - DNA, 120 bp, Artificial Sequence
  ENSG00000142784_17 (sequence is synthesized)
atgagtccattgtcaactgcctgcagccacaccccagctactgcttcctggccaccagtggcatcgatcctgttgtgcggctctggaacccccgaccagagagtgaagacctcacaggcc

SEQ ID NO: 374914 - DNA, 120 bp, Artificial Sequence
  ENSG00000142784_18 (sequence is synthesized)
gagtcgtggaagatatggagggtgcttcacaggccaaccagcggcgcatgaatgcagacccgttggaggtgatgctgctcaacatgggctaccggatcacgggcctgagcagtgggggtg

SEQ ID NO: 374915 - DNA, 120 bp, Artificial Sequence
  ENSG00000142784_19 (sequence is synthesized)
ccggggcctctgatgatgaggacagctctgagggccaggtgcagtgccggcccagctagaccctccagccctggtccccagcccctgctactggctggaccctctgccctgggcaggagg

SEQ ID NO: 374916 - DNA, 120 bp, Artificial Sequence
  ENSG00000142784_20 (sequence is synthesized)
tcaggggattctgttttggtttgtcttccccaccacccttttttttcatttcccctgttttgtttgttagtttggcgttaggggtggaggttgctacaacttgctggctttcggactctg

SEQ ID NO: 374917 - DNA, 120 bp, Artificial Sequence
  ENSG00000142784_21 (sequence is synthesized)
ggctgattgtcccctgactatccccagccctgaaaaaaagagcaggaggggacacccctccatatgcccccccccatctcctgctttcatgtccctggagggctctggcctgcctcaaaa

SEQ ID NO: 374918 - DNA, 120 bp, Artificial Sequence
  ENSG00000142784_22 (sequence is synthesized)
ccccttctgcctcaggtggggaggaacaagctgaactgtcttcagggactgtcctgccctttagctggcagcagcaggaggagtgggattcccaattggtaagggctcgccttggcctgt

SEQ ID NO: 374919 - DNA, 120 bp, Artificial Sequence
  ENSG00000142784_23 (sequence is synthesized)
tgccactcttgctccctagcctgcaaggctagctcccctgtggtcttcaggaaaggttttgaaaaaggatgggtcccaccctccctccagagccaccagtgttagagcggagcccaaagg

SEQ ID NO: 374920 - DNA, 120 bp, Artificial Sequence
  ENSG00000142784_24 (sequence is synthesized)
aaggatgggagccctggagtgggcaagaccaggccacctgctgaggtcgctgtggagcaccctcgctcctctcctggctactagctctggccctgcacctactctcactggccacctctg

SEQ ID NO: 374921 - DNA, 120 bp, Artificial Sequence
  ENSG00000142784_25 (sequence is synthesized)
gaggctctgcctttcccaagggccctggcagagggtggggcactgcaccttaccccacccatccatgccagcacttctgcactacggccattctcctcttgggcgctcctcagcctcact

SEQ ID NO: 374922 - DNA, 120 bp, Artificial Sequence
  ENSG00000142784_26 (sequence is synthesized)
gtgacctttctgccagagctcccagccaggcctactctgctgaggtggcgcttcctgctaagggcccttctctgccctttctgccctccttcccatcccacatgctgagccgccacaaag

SEQ ID NO: 374923 - DNA, 120 bp, Artificial Sequence
  ENSG00000142784_27 (sequence is synthesized)
accaaagaagtgatggcttttctctgtcccctgctgctctgaggggagaggggtgggtctcctgagccactcagatgggaaagtcccttactcggcccctccctccccagcagccccaag

SEQ ID NO: 374924 - DNA, 120 bp, Artificial Sequence
  ENSG00000142784_28 (sequence is synthesized)
ctttacactggatgcagcgatcaacccaccactcaccaggcctctcctcccctctgcccccggctcttagctccagctgctccaggtagttggttcatccttccccctctctccctccct

SEQ ID NO: 374925 - DNA, 120 bp, Artificial Sequence
  ENSG00000142784_29 (sequence is synthesized)
gcttccccttcagtgcttacttggctccagccctccagctgcagcccctggggaaaagcagcctcccttctcctctccctccactccctcgctccctccctcagcccctgtctctgccag

SEQ ID NO: 374926 - DNA, 120 bp, Artificial Sequence
  ENSG00000142784_30 (sequence is synthesized)
gtgcctcctctcagtcaggcttcagagcagccctggagacaggagggccatgttaaaagctttttcacagttttaagaagacaagtggagggtgaggatagtggtggggggtctggcacc

SEQ ID NO: 374927 - DNA, 120 bp, Artificial Sequence
  ENSG00000142784_31 (sequence is synthesized)
atctcattgctttaatcccagcaacacaggtggcagcttctcccccttccttcccaccccagtccctcttcccacccctctcttctagcttggtaatgaagtatatttattggtgaagga

SEQ ID NO: 374928 - DNA, 120 bp, Artificial Sequence
  ENSG00000142784_32 (sequence is synthesized)
aacagctgctgctgcttctcctgctgctgggacctgctcccctgtctcttctccgtgacctttctctagccagggagaagggagagcaggagtattggggctgggccctggggcccaagg

SEQ ID NO: 374929 - DNA, 120 bp, Artificial Sequence
  ENSG00000142784_33 (sequence is synthesized)
accagctgggtcccctttgctttcttgtgttccagccacctgccatttcctccctgcctcccaccctccctccctgccccctgtcctgcttcccaccccctgcctgcccagcctgggccc

SEQ ID NO: 374930 - DNA, 120 bp, Artificial Sequence
  ENSG00000142784_34 (sequence is synthesized)
tgcagtgtggagagacacataagccttactgtcctctgggggcaggagccgagcctttttgttgctccgctcccaggagagtgagggtgacgcaattgattaaaaccattttgttctagg

SEQ ID NO: 374931 - DNA, 120 bp, Artificial Sequence
  ENSG00000142784_35 (sequence is synthesized)
gtcttggaaccaaagtgagggcacctggtccctcacctctgtagctctatgacttagtaaccacacctctactggacagaatgaggcctgccttgaagggtcaccgtgagcagcggccac

SEQ ID NO: 374932 - DNA, 120 bp, Artificial Sequence
  ENSG00000142784_36 (sequence is synthesized)
ccagcccagcagggctgagtgcagagcccagctctcatggctgtgatttgtaatcatcagctttcactctctggctgttttctcatcagtaaaataagggacttggaatcttagtggttt

SEQ ID NO: 374933 - DNA, 120 bp, Artificial Sequence
  ENSG00000142784_37 (sequence is synthesized)
ttcaaaccattttacattgtgacccaatatacacatgattacttgtagatatgtgtgtgtgtatatatatataaaaaaaatgaacaaaagttttacacaataatatttacccttgctaca

SEQ ID NO: 374934 - DNA, 120 bp, Artificial Sequence
  ENSG00000142784_38 (sequence is synthesized)
cgaggccctgaagaggagggtgcagcccagttggcagcgggaggttgagtggggagtgttggggcataatggtttcagagaagaatctcaaatccctgctctgcctctgtacccttgggc

SEQ ID NO: 374935 - DNA, 120 bp, Artificial Sequence
  ENSG00000142784_39 (sequence is synthesized)
aaatggcttcacctttgtcagcctctaaagttttttaatctatgaaatgaccaacctgccatgcccatttatgaggccataacaaggactaataagataacccaagtagagcctccagcg

SEQ ID NO: 374936 - DNA, 120 bp, Artificial Sequence
  ENSG00000142784_40 (sequence is synthesized)
cagtgcctgaactactccttcatcccccacctccttctccctctgtctgcatgtgccagagcttggtttctttatctgcattcaaggaacctccctctgcttgagagtatgaggcagcag

SEQ ID NO: 374937 - DNA, 120 bp, Artificial Sequence
  ENSG00000142784_41 (sequence is synthesized)
ccctccaaggctgggaatcttggcacatctgttttgtgctcaaaactgtgccctgtgtactaagggacaaactctgtgtttcagacaccatcatccccacccctcatttgtagatgtact

SEQ ID NO: 374938 - DNA, 88 bp, Artificial Sequence
  ENSG00000142784_42 (sequence is synthesized)
tcagacaccatcatccccacccctcatttgtagatgtactttctttgggtaggtgagacacatgaacatgaatcaagaatctctccat

SEQ ID NO: 374939 - DNA, 120 bp, Artificial Sequence
  ENSG00000142784_43 (sequence is synthesized)
caggagtttgagaccagcctggacagcatagacccccatctctacaaaaaatgttttaaattatctgggtgtggtgacgtgcacctgtagtcccagctattcaggaggttgacattggag

SEQ ID NO: 374940 - DNA, 120 bp, Artificial Sequence
  ENSG00000142784_44 (sequence is synthesized)
agccatgatcatgccactgtactccagcttgggtgacagaatgagaccctgtctctaagaaaaaaaaagaatccatcaagatgccctctaaatgtcagtggtgtgtgaggggcaggggga

SEQ ID NO: 374941 - DNA, 120 bp, Artificial Sequence
  ENSG00000142784_45 (sequence is synthesized)
gtgtgtgaggggcagggggagtctggatgccagaagcctggaactgctcaggggaggcttaaaacagggtattttggagacccgagagatgatgtaagatgatcctggcccaaggaggta

SEQ ID NO: 374942 - DNA, 120 bp, Artificial Sequence
  ENSG00000142784_46 (sequence is synthesized)
ataatgaactataggggagactgtcttggagaaatccaggtagtcgctggccctaggtttaagagaacagtgaccagggctatatacctggaggaattctgggtcaagtgcacaccccag

SEQ ID NO: 374943 - DNA, 120 bp, Artificial Sequence
  ENSG00000142784_47 (sequence is synthesized)
cgtgtgggggactgagtggctgcagacttccttgctccccctttacctaggccatgcagcctctacttgaggctgtagggcagtaccccacctgacctccctgccctttgcccccccgcc

SEQ ID NO: 374944 - DNA, 120 bp, Artificial Sequence
  ENSG00000142789_0 (sequence is synthesized)
cctatcatcacaaaactcatgatgctccggctgctcagttccctcctccttgtggccgttgcctcaggctatggcccaccttcctctcactcttccagccgcgttgtccatggtgaggat

SEQ ID NO: 374945 - DNA, 120 bp, Artificial Sequence
  ENSG00000142789_1 (sequence is synthesized)
gcggtcccctacagctggccctggcaggtttccctgcagtatgagaaaagtggaagcttctaccacacgtgtggcggtagcctcatcgcccccgattgggttgtgactgccggccactgc

SEQ ID NO: 374946 - DNA, 120 bp, Artificial Sequence
  ENSG00000142789_2 (sequence is synthesized)
atctcgagggatctgacctaccaggtggtgttgggtgagtacaaccttgctgtgaaggagggccccgagcaggtgatccccatcaactctgaggagctgtttgtgcatccactctggaac

SEQ ID NO: 374947 - DNA, 120 bp, Artificial Sequence
  ENSG00000142789_3 (sequence is synthesized)
gatgccgtccagctcgcctcactccctcccgctggtgacatccttcccaacaagacaccctgctacatcaccggctggggccgtctctataccaatgggccactcccagacaagctgcag

SEQ ID NO: 374948 - DNA, 120 bp, Artificial Sequence
  ENSG00000142789_4 (sequence is synthesized)
caggcccggctgcccgtggtggactataagcactgctccaggtggaactggtggggttccaccgtgaagaaaaccatggtgtgtgctggagggtacatccgctccggctgcaacggtgac

SEQ ID NO: 374949 - DNA, 120 bp, Artificial Sequence
  ENSG00000142789_5 (sequence is synthesized)
tctggaggacccctcaactgccccacagaggatggtggctggcaggtccacggtgtgaccagctttgtttctgcctttggctgcaacttcatctggaagcccacggtgttcactcgagtc

SEQ ID NO: 374950 - DNA, 120 bp, Artificial Sequence
  ENSG00000142789_6 (sequence is synthesized)
tccgccttcatcgactggattgaggagaccatagcaagccactagaaccaaggcccagctggcagtgctgatcgatcccacatcctgaataaagaataaagatctctcagaaaattccaa

SEQ ID NO: 374951 - DNA, 120 bp, Artificial Sequence
  ENSG00000142789_7 (sequence is synthesized)
ccagacaagaggctgcctggtgggggacagaccatagcaagccactagaaccaaggcccagctggcagtgctgatcgatcccacatcctgaataaagaataaagatctctcagaaaattc

SEQ ID NO: 374952 - DNA, 120 bp, Artificial Sequence
  ENSG00000142789_8 (sequence is synthesized)
ctcctctacttgtccctccatgacccacagccaagtctgagtaggctccaactctgagtagggacgtagggacatagggacatagggacaggggagctgagtccagcagcctgtgcccag

SEQ ID NO: 374953 - DNA, 120 bp, Artificial Sequence
  ENSG00000142789_9 (sequence is synthesized)
gtcccacacactgaggattgaagccagcagagcctttaaggaccatcaccaccaaacctgtctccctacagaggggatggcagtgttcagggaggggcaggaactctgccaaggccactt

SEQ ID NO: 374954 - DNA, 120 bp, Artificial Sequence
  ENSG00000142794_0 (sequence is synthesized)
gggaagttacggcgaagtccacccagcgtttctcaggcaatctgaaggcaaatcctgtttagacccaggcgaaggttcctggtgacccaggctctcaccagccaattgtcccttgccgtc

SEQ ID NO: 374955 - DNA, 120 bp, Artificial Sequence
  ENSG00000142794_1 (sequence is synthesized)
ctcctgagggtatctggagcttcagtgctgtgtgctcttggcctccacactggggatgccactgactcccactgtccagggcttccagtggactctccgaggccctgatgtagaaacttc

SEQ ID NO: 374956 - DNA, 120 bp, Artificial Sequence
  ENSG00000142794_2 (sequence is synthesized)
ctctccgaggccctgatgtagaaacttccccattcggtgcaccaagagcagcctcacatggtgtgggccgacatcaagagctgcgagatccaacagtccctggccccacctcttctgcca

SEQ ID NO: 374957 - DNA, 120 bp, Artificial Sequence
  ENSG00000142794_3 (sequence is synthesized)
cagagatgaacattctagaaatcaacaagaaatcgcgcccccagctggcagagaacaaacagcagttcagaaacctcaaacagaaatgtcttgtaactcaagtggcctacttcctggcca

SEQ ID NO: 374958 - DNA, 120 bp, Artificial Sequence
  ENSG00000142794_4 (sequence is synthesized)
agtggcctacttcctggccaaccggcaaaataattacgactatgaagactgcaaagacctcataaaatctatgctgagggatgagcggctgctcacagaagagaagcttgcagaggagct

SEQ ID NO: 374959 - DNA, 120 bp, Artificial Sequence
  ENSG00000142794_5 (sequence is synthesized)
ccctcctcactccggatgagccggacaactcccagggacgggacctccgagaacagctggctgagggatgtaggctggcacagcacctcgtccaaaagctcagcccagaaaatgatgacg

SEQ ID NO: 374960 - DNA, 120 bp, Artificial Sequence
  ENSG00000142794_6 (sequence is synthesized)
caaaagctcagcccagaaaatgatgacgatgaggatgaagatgttaaagttgaggaggctgagaaagtacaggaattatatgcccccagggaggtgcagaaggctgaagaaaaggaagtc

SEQ ID NO: 374961 - DNA, 120 bp, Artificial Sequence
  ENSG00000142794_7 (sequence is synthesized)
gtgtgccatcacttgttcaaatagccaccacccttgtgagtccaaccagccttacgggaacaccagaatcacatttgaggaagaccaagtcgactcaactctcattgactcatcctctca

SEQ ID NO: 374962 - DNA, 120 bp, Artificial Sequence
  ENSG00000142794_8 (sequence is synthesized)
ccaagtcgactcaactctcattgactcatcctctcatgatgaatggttggatgctgtatgcattatcccagaaaatgaaagtgatcatgagcaagaggaagaaaaagggccagtgtctcc

SEQ ID NO: 374963 - DNA, 120 bp, Artificial Sequence
  ENSG00000142794_9 (sequence is synthesized)
ccaggagtcctgggatgaaggtgattggactctctcaattcctcctgacatgtctgcctcataccagtctgacaggagcacctttcactcagtagaggaacagcaagtcggcttggctct

SEQ ID NO: 374964 - DNA, 120 bp, Artificial Sequence
  ENSG00000142794_10 (sequence is synthesized)
tcactcagtagaggaacagcaagtcggcttggctcttgacataggcagacattggtgtgatcaagtgaaaaaggaggaccaagaggccacaagtcccaggctcagcagggagctgctgga

SEQ ID NO: 374965 - DNA, 120 bp, Artificial Sequence
  ENSG00000142794_11 (sequence is synthesized)
tagattttattcaactccttttgagtacctggaactgcctgacttatgccagccctacagaagtgacttttactcattgcaggaacaacaccttggcttggctcttgacttggacagaat

SEQ ID NO: 374966 - DNA, 120 bp, Artificial Sequence
  ENSG00000142794_12 (sequence is synthesized)
caaggcccaccatgccccaggctcagcagagagctgccggaggtagtagagcctgaggacttgcaggactcactggatagatggtattcgactcctttcagttatccagaactgcctgat

SEQ ID NO: 374967 - DNA, 120 bp, Artificial Sequence
  ENSG00000142794_13 (sequence is synthesized)
tcttgacgtggatgaaattgaaaagtaccaagaaggggaagaagatcaaaagccaccatgccccaggctcaacgaggtgctgatggaagcagaagagcctgaagtcttgcaggactcact

SEQ ID NO: 374968 - DNA, 120 bp, Artificial Sequence
  ENSG00000142794_14 (sequence is synthesized)
aacttactttcaactacatgcctcattccagcagtatagaagtgccttttactcatttgaggaacaggacgtcagcttggcccttgacgtggacaataggttttttactttgacagtgat

SEQ ID NO: 374969 - DNA, 120 bp, Artificial Sequence
  ENSG00000142794_15 (sequence is synthesized)
aaggcaccacctggccttccagatgggagtcatattcccacactaagcagcccttactaagctgagagatgtcattgctgcaggcaggacgtataggcacatgtaggtttgaatgaaact

SEQ ID NO: 374970 - DNA, 120 bp, Artificial Sequence
  ENSG00000142794_16 (sequence is synthesized)
gtagttccctttggaagcccagtcataggatgggaaagtgggcatggctctattcctattctcagaccatgccagtggccacctgtgctcagtctgaagacgttggacccaagttaggtg

SEQ ID NO: 374971 - DNA, 120 bp, Artificial Sequence
  ENSG00000142794_17 (sequence is synthesized)
tgacacgttcacacgactatgtagcacatgccgggagtgatctgccagacattctaatttgaaccagatatctctgggtagctacaaagttcctcaggggtttcattttgcaggcatgtc

SEQ ID NO: 374972 - DNA, 72 bp, Artificial Sequence
  ENSG00000142794_18 (sequence is synthesized)
gctacaaagttcctcaggggtttcattttgcaggcatgtctctgagcttctatacctgctcaaggtcatgaa

SEQ ID NO: 374973 - DNA, 120 bp, Artificial Sequence
  ENSG00000142794_19 (sequence is synthesized)
tggctgaggattgtatttcagaaccactgactgctcttgacagttgttaacccactaggctcctttgagtagagaagccatagtccttcagcctccaattgatatcaatacttaggaaga

SEQ ID NO: 374974 - DNA, 120 bp, Artificial Sequence
  ENSG00000142794_20 (sequence is synthesized)
cagcctccaattgatatcaatacttaggaagaccacagctagacggacaaacagcattgggaggccttagtcctgctcctttcaattccatcctgtaaagaacaggagtcaggagccgct

SEQ ID NO: 374975 - DNA, 120 bp, Artificial Sequence
  ENSG00000142794_21 (sequence is synthesized)
aacaggagtcaggagccgctggcaagagacagcatgtcacctgggactctgccagtgcagaatatgaacaatgccatgttcttgcagaaaatgcttagcctgagtttcataggaggtaat

SEQ ID NO: 374976 - DNA, 120 bp, Artificial Sequence
  ENSG00000142794_22 (sequence is synthesized)
caggacaactgacctgtctccttcacacagtccacgtcaccacgaatcacacaacaaaaaggaggagagatattttgggttcagaagaagtaaatgataatgtagctacatttctttagt

SEQ ID NO: 374977 - DNA, 84 bp, Artificial Sequence
  ENSG00000142794_23 (sequence is synthesized)
tatttcctcatctttttgttgttgtcattgattttggtgacatggacttgtttgtagaggacaggtcagctgtctggctcaatg

SEQ ID NO: 374978 - DNA, 120 bp, Artificial Sequence
  ENSG00000142794_24 (sequence is synthesized)
catgattaaattcagcctaaacgtttcatcaagaacactacagagtcgatactgtgagtttccaacctcagcccatctgtgggcagagaaggtctagtttgtccatcagcattatcatga

SEQ ID NO: 374979 - DNA, 66 bp, Artificial Sequence
  ENSG00000142794_25 (sequence is synthesized)
atgaagtatttgggagagtggtttttcaaagtagaaatgtcctgtattccagtgatcatcctctaa

SEQ ID NO: 374980 - DNA, 120 bp, Artificial Sequence
  ENSG00000142794_26 (sequence is synthesized)
caaagtagaaatgtcctgtattccagtgatcatcctctaaacgttttatcatttattaatcatccctgcctgtgtctattattatattcatatctctacgctggaaatttgctgcctcaa

SEQ ID NO: 374981 - DNA, 86 bp, Artificial Sequence
  ENSG00000142794_27 (sequence is synthesized)
attatattcatatctctacgctggaaatttgctgcctcaatgtttactgtgcctttgtttttgctagtgtgtgttgttgaaaaaaa

SEQ ID NO: 374982 - DNA, 120 bp, Artificial Sequence
  ENSG00000142794_28 (sequence is synthesized)
gacagcggcggtactgggatgggtaggtgaggatcccgagactgagtgagcttctgcgcgcggtgcttttgggaacgcgggactggcaacctgcggcgccaggagctgggccgaggcgcg

SEQ ID NO: 374983 - DNA, 75 bp, Artificial Sequence
  ENSG00000142794_29 (sequence is synthesized)
aggaagaaaaagggccagtgtctcccagatcatctggaaggttttgttgtctaatctctgttggttatatcttct

SEQ ID NO: 374984 - DNA, 120 bp, Artificial Sequence
  ENSG00000142794_30 (sequence is synthesized)
gtgggccgacatcaagagctgcgagatccaacaggtcctgggggagtaggagccagtgcaaggagagaagtccagtgagaaaggcaaatggatgacatcagacccaggggctgaggtccc

SEQ ID NO: 374985 - DNA, 120 bp, Artificial Sequence
  ENSG00000142794_31 (sequence is synthesized)
cagctgcagctgggtagcttctggagtggacagggagcaacagggaagttcgtggcctggtgttctgggatgcattgtctcatctcgttcttgtgagcaccagaacttatccaaagacaa

SEQ ID NO: 374986 - DNA, 120 bp, Artificial Sequence
  ENSG00000142794_32 (sequence is synthesized)
gactcagtgtctctggcaacagtgggccagagacagaatgtgtgaatttcagaggaggaggaaggggttgtaccccatggaaacagtatatggttttacagtagcgcatctttctctaat

SEQ ID NO: 374987 - DNA, 120 bp, Artificial Sequence
  ENSG00000142794_33 (sequence is synthesized)
tctttctctaataactggttagtgtgttcctgttaatggaaaatattggtggtgtaagtttccccactgttctcatcttcatgtaaatttgttcatttccttccttccttccttccttcc

SEQ ID NO: 374988 - DNA, 120 bp, Artificial Sequence
  ENSG00000142794_34 (sequence is synthesized)
tgtcattggaggacagcgtggagtgcagagagacatgctttgaaatgggattgatccagtcctccttccttcactaccacatgaatgctgggcagcccaggatcacactcactgcaccct

SEQ ID NO: 374989 - DNA, 120 bp, Artificial Sequence
  ENSG00000142794_35 (sequence is synthesized)
caactcagaccgttacctggcacactggcctcactcttgtcggagactgagctattggcagtgccttcagctctgagctcaggcacctcgaacattgtttttgtcgttaaggatcctaaa

SEQ ID NO: 374990 - DNA, 120 bp, Artificial Sequence
  ENSG00000142794_36 (sequence is synthesized)
acagggagccttgggaggagcccgaatcactgatggaatcggacagtgcatggagatggttcagcaggacgaggtgctgaaaactcacccctgtgtgacctcaagtaagccacgtaactc

SEQ ID NO: 374991 - DNA, 120 bp, Artificial Sequence
  ENSG00000142794_37 (sequence is synthesized)
tgtgaacctgcagttttatcatttttaaaataaagaaacatgacagattttcattatgacacagaatgtcaggtctcccagatgccagaaaatacatttacttaaagccgttgatacgtc

SEQ ID NO: 374992 - DNA, 120 bp, Artificial Sequence
  ENSG00000142794_38 (sequence is synthesized)
agcagcctcacatggtgtgggccgacatcaagagctgcgagatccaacagaaatgtgattgataacagtaaagccacactcctcgcatgcctgaaatacccctcattgtcttcttcaggt

SEQ ID NO: 374993 - DNA, 120 bp, Artificial Sequence
  ENSG00000142794_39 (sequence is synthesized)
ggcaagggctctgaaacagccacataaagcccttgtagataaggatggtcaaataaaataatattatatctgtaaaaactcagatcttggtaagatttactagttgggaatccagtgtta

SEQ ID NO: 374994 - DNA, 120 bp, Artificial Sequence
  ENSG00000142794_40 (sequence is synthesized)
gcggctggtgatgggcaagccaggtgtgccaggtccaggatgcacatgaggagcgtttgtagccatcactgaatcacctcctgactagcggggcaagcctcaaatgaaccgcaggatttc

SEQ ID NO: 374995 - DNA, 120 bp, Artificial Sequence
  ENSG00000142794_41 (sequence is synthesized)
gtgacattgaaggtgggggctccaccgatgctcttcgtttgaagatgcacggtcagttccccatcctgcagcagtgagtccaggaccacagtacatttctggccccgcagtgtcagccta

SEQ ID NO: 374996 - DNA, 120 bp, Artificial Sequence
  ENSG00000142794_42 (sequence is synthesized)
ttcacgaaaaagcttgaccagtctttgccaaccaggacaccaaccttagctggcgtgatgttcacgaaggtttttccctgggacggcggcccagatggaggaaaatataacctgttggga

SEQ ID NO: 374997 - DNA, 120 bp, Artificial Sequence
  ENSG00000142794_43 (sequence is synthesized)
atataacctgttgggaaactggttctgcctggatggtgttgtacaaacaagcgataaacaatgaggaatgtgcttagatgtattgggaaagagatgggtctgtggcattgtcacaagggt

SEQ ID NO: 374998 - DNA, 120 bp, Artificial Sequence
  ENSG00000142794_44 (sequence is synthesized)
cagctcccatcaaggaagatccagagacattctccttaccaagacgttaagaaatgcacaggtgaggagaacagcggcatgcgtgtaaaggtcctgtggcacccatcctctgcaggctgg

SEQ ID NO: 374999 - DNA, 120 bp, Artificial Sequence
  ENSG00000142794_45 (sequence is synthesized)
catctagagataaggcgggagggatttccttgagaggcagggatatgtggtggttactaatcattcgaatcattgtgaggtgtctgggaatgtaatggatgggaaatctactaagaaatc

SEQ ID NO: 375000 - DNA, 120 bp, Artificial Sequence
  ENSG00000142794_46 (sequence is synthesized)
aacttagtaataattagaaaagctctagttctgaggacagagacctgatggagtcaccatagtgggaatttatgacctggcatccggttcagatacctggagcttcttgagtgagggaag

SEQ ID NO: 375001 - DNA, 120 bp, Artificial Sequence
  ENSG00000142794_47 (sequence is synthesized)
attggatcccttgaggaagagtgaagccttcaatgctgccaccagtgtatgctgtaaatcttcctccaggccttccccagaaggccctgaagccatttatgtgggtgactgaggaaaggg

SEQ ID NO: 375002 - DNA, 120 bp, Artificial Sequence
  ENSG00000142794_48 (sequence is synthesized)
aaatactcagagcttctgtggcttgttggattctggctctgaagaatgctaaactaagggcacctgtggtggccatgaaaatgcactacttgcatctccagctgcaggaggcctaacgaa

SEQ ID NO: 375003 - DNA, 120 bp, Artificial Sequence
  ENSG00000142794_49 (sequence is synthesized)
tcagcagccccagctgctacactccgaatggaggacttgatgacatttcccctggatctgcactagcccatgaggaggaaagcctcctatcaagtcctcccagcagaacacccatgatga

SEQ ID NO: 375004 - DNA, 120 bp, Artificial Sequence
  ENSG00000142794_50 (sequence is synthesized)
ctcatgaggatgttgaaagtgttttcctgtgtcaactgtgactttctttcttcaaagtctgttttgttcctgcacattaactgatttatatcaaataagagaataaatgcctagactccc

SEQ ID NO: 375005 - DNA, 120 bp, Artificial Sequence
  ENSG00000142798_0 (sequence is synthesized)
ctgctggcgctgctgctgcacgggcggctgctggcggtgacccatgggctgagggcatacgatggcttgtctctgcctgaggacatagagaccgtcacagcaagccaaatgcgctggaca

SEQ ID NO: 375006 - DNA, 120 bp, Artificial Sequence
  ENSG00000142798_1 (sequence is synthesized)
cattcgtacctttctgatgatgaggacatgctggctgacagcatctcaggagacgacctgggcagtggggacctgggcagcggggacttccagatggtttatttccgagccctggtgaat

SEQ ID NO: 375007 - DNA, 120 bp, Artificial Sequence
  ENSG00000142798_2 (sequence is synthesized)
ttcactcgctccatcgagtacagccctcagctggaggatgcaggctccagagagttccgagaggtgtccgaggctgtggtagacacgctggagtcggagtacttgaaaattcccggagac

SEQ ID NO: 375008 - DNA, 120 bp, Artificial Sequence
  ENSG00000142798_3 (sequence is synthesized)
caggttgtcagtgtggtgttcatcaaggagctggatggctgggtttttgtggagctggatgtgggctcggaagggaatgcggatggggctcagattcaggagatgctgctcagggtcatc

SEQ ID NO: 375009 - DNA, 120 bp, Artificial Sequence
  ENSG00000142798_4 (sequence is synthesized)
tccagcggctctgtggcctcctacgtcacctctccccagggattccagttccgacgcctgggcacagtgccccagttcccaagagcctgcacggaggccgagtttgcctgccacagctac

SEQ ID NO: 375010 - DNA, 120 bp, Artificial Sequence
  ENSG00000142798_5 (sequence is synthesized)
aatgagtgtgtggccctggagtatcgctgtgaccggcggcccgactgcagggacatgtctgatgagctcaattgtgaggagccagtcctgggtatcagccccacattctctctccttgtg

SEQ ID NO: 375011 - DNA, 120 bp, Artificial Sequence
  ENSG00000142798_6 (sequence is synthesized)
gagacgacatctttaccgccccggccagagacaaccatcatgcgacagccaccagtcacccacgctcctcagcccctgcttcccggttccgtcaggcccctgccctgtgggccccaggag

SEQ ID NO: 375012 - DNA, 120 bp, Artificial Sequence
  ENSG00000142798_7 (sequence is synthesized)
gccgcatgccgcaatgggcactgcatccccagagactacctctgcgacggacaggaggactgcgaggacggcagcgatgagctagactgtggccccccgccaccctgtgagcccaacgag

SEQ ID NO: 375013 - DNA, 120 bp, Artificial Sequence
  ENSG00000142798_8 (sequence is synthesized)
ttcccctgcgggaatggacattgtgccctcaagctgtggcgctgcgatggtgactttgactgtgaggaccgaactgatgaagccaactgccccaccaagcgtcctgaggaagtgtgcggg

SEQ ID NO: 375014 - DNA, 120 bp, Artificial Sequence
  ENSG00000142798_9 (sequence is synthesized)
cccacacagttccgatgcgtctctaccaacatgtgcatcccagccagcttccactgtgacgaggagagcgactgtcctgaccggagcgacgagtttggctgcatgcccccccaggtggtg

SEQ ID NO: 375015 - DNA, 120 bp, Artificial Sequence
  ENSG00000142798_10 (sequence is synthesized)
acacctccccgggagtccatccaggcttcccggggccagacagtgaccttcacctgcgtggccattggcgtccccacccccatcatcaattggaggctcaactggggccacatcccctct

SEQ ID NO: 375016 - DNA, 120 bp, Artificial Sequence
  ENSG00000142798_11 (sequence is synthesized)
catcccagggtgacagtgaccagcgagggtggccgtggcacactgatcatccgtgatgtgaaggagtcagaccagggtgcctacacctgtgaggccatgaacgcccggggcatggtgttt

SEQ ID NO: 375017 - DNA, 120 bp, Artificial Sequence
  ENSG00000142798_12 (sequence is synthesized)
ggcattcctgacggtgtccttgagctcgtcccacaacgaggcccctgccctgacggccacttctacctggagcacagcgccgcctgcctgccctgcttctgctttggcatcaccagcgtg

SEQ ID NO: 375018 - DNA, 120 bp, Artificial Sequence
  ENSG00000142798_13 (sequence is synthesized)
tgccagagcacccgccgcttccgggaccagatcaggctgcgctttgaccaacccgatgacttcaagggtgtgaatgtgacaatgcctgcgcagcccggcacgccacccctctcctccacg

SEQ ID NO: 375019 - DNA, 120 bp, Artificial Sequence
  ENSG00000142798_14 (sequence is synthesized)
cagctgcagatcgacccatccctgcacgagttccagctagtcgacctgtcccgccgcttcctcgtccacgactccttctgggctctgcctgaacagttcctgggcaacaaggtggactcc

SEQ ID NO: 375020 - DNA, 120 bp, Artificial Sequence
  ENSG00000142798_15 (sequence is synthesized)
tatggcggctccctgcgttacaacgtgcgctacgagttggcccgtggcatgctggagccagtgcagcggccggacgtggtcctcatgggtgccgggtaccgcctcctctcccgaggccac

SEQ ID NO: 375021 - DNA, 120 bp, Artificial Sequence
  ENSG00000142798_16 (sequence is synthesized)
acacccacccaacctggtgctctgaaccagcgccaggtccagttctctgaggagcactgggtccatgagtctggccggccggtgcagcgcgcggagctgctgcaggtgctgcagagcctg

SEQ ID NO: 375022 - DNA, 120 bp, Artificial Sequence
  ENSG00000142798_17 (sequence is synthesized)
gaggccgtgctcatccagaccgtgtacaacaccaagatggccagcgtgggacttagcgacatcgccatggataccaccgtcacccatgccaccagccatggccgtgcccacagtgtggag

SEQ ID NO: 375023 - DNA, 120 bp, Artificial Sequence
  ENSG00000142798_18 (sequence is synthesized)
gagtgcagatgccccattggctattctggcttgtcctgcgagagctgtgatgcccacttcactcgggtgcctggtgggccctacctgggcacctgctctggttgcaattgcaatggccat

SEQ ID NO: 375024 - DNA, 120 bp, Artificial Sequence
  ENSG00000142798_19 (sequence is synthesized)
gccagctcctgtgaccctgtgtatggccactgcctgaattgccagcacaacacggaggggccacagtgcaacaagtgcaaggctggcttctttggggacgccatgaaggccacggccact

SEQ ID NO: 375025 - DNA, 120 bp, Artificial Sequence
  ENSG00000142798_20 (sequence is synthesized)
tcctgccggccctgcccttgcccatacatcgatgcctcccgcagattctcagacacttgcttcctggacacggatggccaagccacatgtgacgcctgtgccccaggctacactggccgc

SEQ ID NO: 375026 - DNA, 120 bp, Artificial Sequence
  ENSG00000142798_21 (sequence is synthesized)
cgctgtgagagctgtgcccccggatacgagggcaaccccatccagcccggcgggaagtgcaggcccgtcaaccaggagattgtgcgctgtgacgagcgtggcagcatggggacctccggg

SEQ ID NO: 375027 - DNA, 120 bp, Artificial Sequence
  ENSG00000142798_22 (sequence is synthesized)
gaggcctgccgctgtaagaacaatgtggtggggcgcttgtgcaatgaatgtgctgacggctctttccacctgagtacccgaaaccccgatggctgcctcaagtgcttctgcatgggtgtc

SEQ ID NO: 375028 - DNA, 120 bp, Artificial Sequence
  ENSG00000142798_23 (sequence is synthesized)
agtcgccactgcaccagctcttcatggagccgtgcccagttgcatggggcctctgaggagcctggtcacttcagcctgaccaacgccgcaagcacccacaccaccaacgagggcatcttc

SEQ ID NO: 375029 - DNA, 120 bp, Artificial Sequence
  ENSG00000142798_24 (sequence is synthesized)
tcccccacgcccggggaactgggattctcctccttccacagactcttatctggaccctacttctggagcctcccttcacgcttcctgggggacaaggtgacctcctatggaggagagctg

SEQ ID NO: 375030 - DNA, 120 bp, Artificial Sequence
  ENSG00000142798_25 (sequence is synthesized)
cgcttcacagtgacccagaggtcccagccgggctccacacccctgcacgggcagccgttggtggtgctgcaaggtaacaacatcatcctagagcaccatgtggcccaggagcccagcccc

SEQ ID NO: 375031 - DNA, 120 bp, Artificial Sequence
  ENSG00000142798_26 (sequence is synthesized)
ggccagcccagcaccttcattgtgcctttccgggagcaagcatggcagcggcccgatgggcagccagccacacgggagcacctgctgatggcactggcaggcatcgacaccctcctgatc

SEQ ID NO: 375032 - DNA, 120 bp, Artificial Sequence
  ENSG00000142798_27 (sequence is synthesized)
cgagcatcctacgcccagcagcccgctgagagcagggtctctggcatcagcatggacgtggctgtgcccgaggaaaccggccaggaccccgcgctggaagtggaacagtgctcctgccca

SEQ ID NO: 375033 - DNA, 120 bp, Artificial Sequence
  ENSG00000142798_28 (sequence is synthesized)
cccgggtaccgtgggccgtcctgccaggactgtgacacaggctacacacgcacgcccagtggcctctacctgggtacctgtgaacgctgcagctgccatggccactcagaggcctgcgag

SEQ ID NO: 375034 - DNA, 120 bp, Artificial Sequence
  ENSG00000142798_29 (sequence is synthesized)
ccagaaacaggtgcctgccagggctgccagcatcacacggagggccctcggtgtgagcagtgccagccaggatactacggggacgcccagcgggggacaccacaggactgccagctgtgc

SEQ ID NO: 375035 - DNA, 120 bp, Artificial Sequence
  ENSG00000142798_30 (sequence is synthesized)
ccctgctacggagaccctgctgccggccaggctgcccacacttgttttctggacacagacggccaccccacctgtgatgcgtgctccccaggccacagtgggcgtcactgtgagaggtgc

SEQ ID NO: 375036 - DNA, 120 bp, Artificial Sequence
  ENSG00000142798_31 (sequence is synthesized)
gcccctggctactatggcaaccccagccagggccagccatgccagagagacagccaggtgccagggcccataggctgcaactgtgacccccaaggcagcgtcagcagccagtgtgatgct

SEQ ID NO: 375037 - DNA, 120 bp, Artificial Sequence
  ENSG00000142798_32 (sequence is synthesized)
gctggtcagtgccagtgcaaggcccaggtggaaggcctcacttgcagccactgccggccccaccacttccacctgagtgccagcaacccagacggctgcctgccctgcttctgtatgggc

SEQ ID NO: 375038 - DNA, 120 bp, Artificial Sequence
  ENSG00000142798_33 (sequence is synthesized)
atcacccagcagtgcgccagctctgcctacacacgccacctgatctccacccactttgcccctggggacttccaaggctttgccctggtgaacccacagcgaaacagccgcctgacagga

SEQ ID NO: 375039 - DNA, 120 bp, Artificial Sequence
  ENSG00000142798_34 (sequence is synthesized)
gaattcactgtggaacccgtgcccgagggtgcccagctctcttttggcaactttgcccaactcggccatgagtccttctactggcagctgccggagacataccagggagacaaggtggcg

SEQ ID NO: 375040 - DNA, 120 bp, Artificial Sequence
  ENSG00000142798_35 (sequence is synthesized)
gcctacggtgggaagttgcgatacaccctctcctacacagcaggcccacagggcagcccactctctgaccccgatgtgcagatcacgggcaacaacatcatgctagtggcctcccagcca

SEQ ID NO: 375041 - DNA, 120 bp, Artificial Sequence
  ENSG00000142798_36 (sequence is synthesized)
gcgctgcagggccctgagaggaggagctacgagatcatgttccgagaggaattctggcgccggcccgatgggcagccggccacacgcgagcacctcctgatggcactggccgacctggat

SEQ ID NO: 375042 - DNA, 120 bp, Artificial Sequence
  ENSG00000142798_37 (sequence is synthesized)
gagctcctgatccgggccacgttctcctccgtgccgctggcggccagcatcagcgcagtcagcctggaggtcgcccagccggggccctcaaacagaccccgcgccctcgaggtggaggag

SEQ ID NO: 375043 - DNA, 120 bp, Artificial Sequence
  ENSG00000142798_38 (sequence is synthesized)
tgccgctgcccgccaggctacatcggtctgtcctgccaggactgtgcccccggctacacgcgcaccgggagtgggctctacctcggccactgcgagctatgtgaatgcaatggccactca

SEQ ID NO: 375044 - DNA, 120 bp, Artificial Sequence
  ENSG00000142798_39 (sequence is synthesized)
gacctgtgccacccagagactggggcctgctcgcaatgccagcacaacgccgcaggggagttctgcgagctttgtgcccctggctactacggagatgccacagccgggacgcctgaggac

SEQ ID NO: 375045 - DNA, 120 bp, Artificial Sequence
  ENSG00000142798_40 (sequence is synthesized)
tgccagccctgtgcctgcccactgaccaacccagagaacatgttttcccgcacctgtgagagcctgggagccggcgggtaccgctgcacggcctgcgaacccggctacactggccagtac

SEQ ID NO: 375046 - DNA, 120 bp, Artificial Sequence
  ENSG00000142798_41 (sequence is synthesized)
tgtgagcagtgtggcccaggttacgtgggtaaccccagtgtgcaagggggccagtgcctgccagagacaaaccaagccccactggtggtcgaggtccatcctgctcgaagcatagtgccc

SEQ ID NO: 375047 - DNA, 120 bp, Artificial Sequence
  ENSG00000142798_42 (sequence is synthesized)
caaggtggctcccactccctgcggtgtcaggtcagtgggagcccaccccactacttctattggtcccgtgaggatgggcggcctgtgcccagcggcacccagcagcgacatcaaggctcc

SEQ ID NO: 375048 - DNA, 120 bp, Artificial Sequence
  ENSG00000142798_43 (sequence is synthesized)
gagctccacttccccagcgtccagccctcggatgctggggtctacatttgcacctgccgtaatctccaccaatccaataccagccgggcagagctgctggtcactgaggctccaagcaag

SEQ ID NO: 375049 - DNA, 120 bp, Artificial Sequence
  ENSG00000142798_44 (sequence is synthesized)
cccatcacagtgactgtggaggagcagcggagccagagcgtgcgccccggagctgacgtcaccttcatctgcacagccaaaagcaagtccccagcctataccctggtgtggacccgcctg

SEQ ID NO: 375050 - DNA, 120 bp, Artificial Sequence
  ENSG00000142798_45 (sequence is synthesized)
cacaacgggaaactgcccacccgagccatggatttcaatggcatcctgaccattcgcaacgtccagctgagtgatgcaggcacctacgtgtgcaccggctccaacatgtttgccatggac

SEQ ID NO: 375051 - DNA, 120 bp, Artificial Sequence
  ENSG00000142798_46 (sequence is synthesized)
cagggcacagccactctacatgtgcaggcctcgggcaccttgtccgcccccgtggtctccatccatccgccacagctcacagtgcagcccgggcaactggcggagttccgctgcagcgcc

SEQ ID NO: 375052 - DNA, 120 bp, Artificial Sequence
  ENSG00000142798_47 (sequence is synthesized)
acagggagccccacgcccaccctcgagtggacagggggccccggcggccagctccctgcgaaggcacaaatccacggcggcatcctgcgcctgccagctgtcgagcccacggatcaggcc

SEQ ID NO: 375053 - DNA, 120 bp, Artificial Sequence
  ENSG00000142798_48 (sequence is synthesized)
cagtacttgtgccgagcccacagcagcgctgggcagcaggtggccagggctgtgctccacgtgcatgggggcggtgggcccagagtccaagtgagcccagagaggacccaggtccacgca

SEQ ID NO: 375054 - DNA, 120 bp, Artificial Sequence
  ENSG00000142798_49 (sequence is synthesized)
ggccgcaccgtcaggctgtactgcagggctgcaggcgtgcctagcgccaccatcacctggaggaaggaagggggcagcctcccaccacaggcccggtcagagcgcacagacatcgcgaca

SEQ ID NO: 375055 - DNA, 120 bp, Artificial Sequence
  ENSG00000142798_50 (sequence is synthesized)
ctgctcatcccagccatcacgactgctgacgccggcttctacctctgcgtggccaccagccctgcaggcactgcccaggcccggatccaagtggttgtcctttcagcctcagatgccagc

SEQ ID NO: 375056 - DNA, 120 bp, Artificial Sequence
  ENSG00000142798_51 (sequence is synthesized)
ccaccgccggtcaagattgagtcctcatcgccttctgtgacagaagggcaaacactcgacctcaactgtgtggtggcagggtcagcccatgcccaggtcacctggtacaggcgagggggt

SEQ ID NO: 375057 - DNA, 120 bp, Artificial Sequence
  ENSG00000142798_52 (sequence is synthesized)
agcctgcctccccacacccaggtgcacggctcccgtctgcggctcccccaggtctcaccagctgattctggagaatatgtgtgccgtgtggagaatggatcgggccccaaggaggcctcc

SEQ ID NO: 375058 - DNA, 120 bp, Artificial Sequence
  ENSG00000142798_53 (sequence is synthesized)
attactgtgtctgtgctccacggcacccattctggccccagctacaccccagtgcccggcagcacccggcccatccgcatcgagccctcctcctcacacgtggcggaagggcagaccctg

SEQ ID NO: 375059 - DNA, 120 bp, Artificial Sequence
  ENSG00000142798_54 (sequence is synthesized)
gatctgaactgcgtggtgcccgggcaggcccacgcccaggtcacgtggcacaagcgtgggggcagcctccctgcccggcaccagacccacggctcgctgctgcggctgcaccaggtgacc

SEQ ID NO: 375060 - DNA, 120 bp, Artificial Sequence
  ENSG00000142798_55 (sequence is synthesized)
ccggccgactcaggcgagtatgtgtgccatgtggtgggcacctccggccccctagaggcctcagtcctggtcaccatcgaagcctctgtcatccctggacccatcccacctgtcaggatc

SEQ ID NO: 375061 - DNA, 120 bp, Artificial Sequence
  ENSG00000142798_56 (sequence is synthesized)
gagtcttcatcctccacagtggccgagggccagaccctggatctgagctgcgtggtggcagggcaggcccacgcccaggtcacatggtacaagcgtgggggcagcctccctgcccggcac

SEQ ID NO: 375062 - DNA, 120 bp, Artificial Sequence
  ENSG00000142798_57 (sequence is synthesized)
caggttcgtggctcccgcctgtacatcttccaggcctcacctgccgatgcgggacagtacgtctgccgggccagcaacggcatggaggcctccatcacggtcacagtaactgggacccag

SEQ ID NO: 375063 - DNA, 120 bp, Artificial Sequence
  ENSG00000142798_58 (sequence is synthesized)
cgcaagtggcggaagggcagaccctggatctgaactgcgtggtgcccgggcagtcccatgcccaggtcacgtggcacaagcgtgggggcagcctccctgtccggcaccagacccacggct

SEQ ID NO: 375064 - DNA, 120 bp, Artificial Sequence
  ENSG00000142798_59 (sequence is synthesized)
ccctgctgagactctaccaagcgtcccccgccgactcgggcgagtacgtgtgccgagtgttgggcagctccgtgcctctagaggcctctgtcctggtcaccattgagcctgcgggctcag

SEQ ID NO: 375065 - DNA, 120 bp, Artificial Sequence
  ENSG00000142798_60 (sequence is synthesized)
tgcctgcacttggggtcacccccacggtccggatcgagtcatcgtcttcgcaagtggccgaggggcagaccctggacctgaactgcctcgttgctggtcaggcccatgcccaggtcacgt

SEQ ID NO: 375066 - DNA, 120 bp, Artificial Sequence
  ENSG00000142798_61 (sequence is synthesized)
ggcacaagcgcgggggcagcctcccggcccggcaccaggtgcatggctcgaggctacgcctgctccaggtgaccccagctgattcaggggagtacgtgtgccgtgtggtcggcagctcag

SEQ ID NO: 375067 - DNA, 120 bp, Artificial Sequence
  ENSG00000142798_62 (sequence is synthesized)
gtacccaggaagcctcagtccttgtcaccatccagcagcgccttagtggctcccactcccagggtgtggcgtaccccgtccgcatcgagtcctcctcagcctccctggccaatggacaca

SEQ ID NO: 375068 - DNA, 120 bp, Artificial Sequence
  ENSG00000142798_63 (sequence is synthesized)
ccctggacctcaactgcctggttgccagccaggctccccacaccatcacctggtataagcgtggaggcagcttacccagccggcaccagatcgtgggctcccggctgcggatccctcagg

SEQ ID NO: 375069 - DNA, 120 bp, Artificial Sequence
  ENSG00000142798_64 (sequence is synthesized)
tgactccggcagactcgggcgagtacgtgtgtcacgtcagtaacggtgcaggctcccgggagacctcgctcatcgtcaccatccagggcagcggttcctcccacgtgcccagcgtctccc

SEQ ID NO: 375070 - DNA, 120 bp, Artificial Sequence
  ENSG00000142798_65 (sequence is synthesized)
caccgatcaggatcgagtcgtcttcccccacggtggtggaagggcagaccttggatctgaactgcgtggtcgccaggcagccccaggctatcatcacatggtacaagcgtgggggcagcc

SEQ ID NO: 375071 - DNA, 120 bp, Artificial Sequence
  ENSG00000142798_66 (sequence is synthesized)
ttccctcccgacaccagacccatggctcccacctgcggttgcaccaaatgtctgtggctgactcgggcgagtatgtgtgccgggccaacaacaacatcgatgccctggaggcctccatcg

SEQ ID NO: 375072 - DNA, 120 bp, Artificial Sequence
  ENSG00000142798_67 (sequence is synthesized)
tcatctccgtctcccctagcgccggcagcccctccgcccctggcagctccatgcccatcagaattgagtcatcctcctcacacgtggccgaaggggagaccctggatctgaactgcgtgg

SEQ ID NO: 375073 - DNA, 120 bp, Artificial Sequence
  ENSG00000142798_68 (sequence is synthesized)
tccccgggcaggcccatgcccaggtcacttggcacaagcgtgggggcagcctccccagtcaccatcagacccgcggctcacggctgcggctgcaccatgtgtccccggccgactcgggtg

SEQ ID NO: 375074 - DNA, 120 bp, Artificial Sequence
  ENSG00000142798_69 (sequence is synthesized)
aatacgtgtgccgggtgatgggcagctctggccccctggaggcctcagtcctggtcaccatcgaagcctctggctcaagtgctgtccacgtccccgccccaggtggagccccacccatcc

SEQ ID NO: 375075 - DNA, 120 bp, Artificial Sequence
  ENSG00000142798_70 (sequence is synthesized)
gcatcgagccctcctcctcccgagtggcagaagggcagaccctggatctgaagtgcgtggtgcccgggcaggcccacgcccaggtcacgtggcacaagcgtggaggaaacctccctgccc

SEQ ID NO: 375076 - DNA, 120 bp, Artificial Sequence
  ENSG00000142798_71 (sequence is synthesized)
ggcaccaggtccacggcccactgctgaggctgaaccaggtgtccccggctgactctggcgagtactcgtgccaagtgaccggaagctcaggcaccctggaggcatctgtcctggtcacaa

SEQ ID NO: 375077 - DNA, 120 bp, Artificial Sequence
  ENSG00000142798_72 (sequence is synthesized)
ttgagccctccagcccaggacccattcctgctccaggactggcccagcccatctacatcgaggcctcctcttcacacgtgactgaagggcagactctggatctgaactgtgtggtgcccg

SEQ ID NO: 375078 - DNA, 120 bp, Artificial Sequence
  ENSG00000142798_73 (sequence is synthesized)
ggcaggcccatgcccaggtcacgtggtacaagcgcgggggcagcctccccgcccggcaccagacccatggctcccagctgcggctccacctcgtctcccctgccgactcaggcgagtatg

SEQ ID NO: 375079 - DNA, 120 bp, Artificial Sequence
  ENSG00000142798_74 (sequence is synthesized)
tgtgtcgtgcagccagcggcccaggccctgagcaagaagcctccttcacagtcaccgtcccgcccagtgaggggtcttcctaccgccttaggagcccggtcatctccatcgacccgccca

SEQ ID NO: 375080 - DNA, 120 bp, Artificial Sequence
  ENSG00000142798_75 (sequence is synthesized)
gcagcaccgtgcagcagggccaggatgccagcttcaagtgcctcatccatgacggggcagcccccatcagcctcgagtggaagacccggaaccaggagctggaggacaacgtccacatca

SEQ ID NO: 375081 - DNA, 120 bp, Artificial Sequence
  ENSG00000142798_76 (sequence is synthesized)
gtcccaatggctccatcatcaccatcgtgggcacccggcccagcaaccacggtacctaccgctgcgtggcctccaatgcctacggtgtggcccagagtgtggtgaacctcagtgtgcacg

SEQ ID NO: 375082 - DNA, 120 bp, Artificial Sequence
  ENSG00000142798_77 (sequence is synthesized)
ggccccctacagtgtccgtgctccccgagggccccgtgtgggtgaaagtgggaaaggctgtcaccctggagtgtgtcagtgccggggagccccgctcctctgctcgttggacccggatca

SEQ ID NO: 375083 - DNA, 120 bp, Artificial Sequence
  ENSG00000142798_78 (sequence is synthesized)
gcagcacccctgccaagttggagcagcggacatatgggctcatggacagccacgcggtgctgcagatttcatcagctaaaccatcagatgcgggcacttatgtgtgccttgctcagaatg

SEQ ID NO: 375084 - DNA, 120 bp, Artificial Sequence
  ENSG00000142798_79 (sequence is synthesized)
cactaggcacagcacagaagcaggtggaggtgatcgtggacacgggcgccatggccccaggggcccctcaggtccaagctgaagaagctgagctgactgtggaggctggacacacggcca

SEQ ID NO: 375085 - DNA, 120 bp, Artificial Sequence
  ENSG00000142798_80 (sequence is synthesized)
ccttgcgctgctcagccacaggcagccccgcgcccaccatccactggtccaagctgcgttccccactgccctggcagcaccggctggaaggtgacacactcatcataccccgggtagccc

SEQ ID NO: 375086 - DNA, 120 bp, Artificial Sequence
  ENSG00000142798_81 (sequence is synthesized)
agcaggactcgggccagtacatctgcaatgccactagccctgctgggcacgctgaggccaccatcatcctgcacgtggagagcccaccatatgccaccacggtcccagagcacgcttcgg

SEQ ID NO: 375087 - DNA, 120 bp, Artificial Sequence
  ENSG00000142798_82 (sequence is synthesized)
tgcaggcaggggagacggtgcagctccagtgcctggctcacgggacacccccactcaccttccagtggagccgcgtgggcagcagccttcctgggagggcgaccgccaggaacgagctgc

SEQ ID NO: 375088 - DNA, 120 bp, Artificial Sequence
  ENSG00000142798_83 (sequence is synthesized)
tgcactttgagcgtgcagcccctgaggactcaggccgctaccgctgccgggtcaccaacaaggtgggctcagccgaggcctttgcccagctgctcgtccaaggccctcccggctctctcc

SEQ ID NO: 375089 - DNA, 120 bp, Artificial Sequence
  ENSG00000142798_84 (sequence is synthesized)
ctgccacctccatcccagcagggtccacgcccaccgtgcaggtcacgcctcagctagagaccaagagcattggggccagcgttgagttccactgtgctgtgcccagcgaccggggtaccc

SEQ ID NO: 375090 - DNA, 120 bp, Artificial Sequence
  ENSG00000142798_85 (sequence is synthesized)
agctccgttggttcaaggaagggggtcagctgcctccgggtcacagcgtgcaggatggggtgctccgaatccagaacttggaccagagctgccaagggacgtatatatgccaggcccatg

SEQ ID NO: 375091 - DNA, 120 bp, Artificial Sequence
  ENSG00000142798_86 (sequence is synthesized)
gaccttgggggaaggcccaggccagtgcccagctggttatccaagccctgccctcggtgctcatcaacatccggacctctgtgcagaccgtggtggttggccacgccgtggagttcgaat

SEQ ID NO: 375092 - DNA, 120 bp, Artificial Sequence
  ENSG00000142798_87 (sequence is synthesized)
gcctggcactgggtgaccccaagcctcaggtgacatggagcaaagttggagggcacctgcggccaggcattgtgcagagcggaggtgtcgtcaggatcgcccacgtagagctggctgatg

SEQ ID NO: 375093 - DNA, 120 bp, Artificial Sequence
  ENSG00000142798_88 (sequence is synthesized)
cgggacagtatcgctgcactgccaccaacgcagctggcaccacacaatcccacgtcctgctgcttgtgcaagccttgccccagatctcaatgccccaagaagtccgtgtgcctgctggtt

SEQ ID NO: 375094 - DNA, 120 bp, Artificial Sequence
  ENSG00000142798_89 (sequence is synthesized)
ctgcagctgtcttcccctgcatagcctcaggctaccccactcctgacatcagctggagcaagctggatggcagcctgccacctgacagccgcctggagaacaacatgctgatgctgccct

SEQ ID NO: 375095 - DNA, 120 bp, Artificial Sequence
  ENSG00000142798_90 (sequence is synthesized)
cagtccgaccccaggacgcaggtacctacgtctgcaccgccactaaccgccagggcaaggtcaaagcctttgcccacctgcaggtgccagagcgggtggtgccctacttcacgcagaccc

SEQ ID NO: 375096 - DNA, 120 bp, Artificial Sequence
  ENSG00000142798_91 (sequence is synthesized)
cctactccttcctaccgctgcccaccatcaaggatgcctacaggaagttcgagatcaagatcaccttccggcccgactcagccgatgggatgctgctgtacaatgggcagaagcgagtcc

SEQ ID NO: 375097 - DNA, 120 bp, Artificial Sequence
  ENSG00000142798_92 (sequence is synthesized)
cagggagccccaccaacctggccaaccggcagcccgacttcatctccttcggcctcgtggggggaaggcccgagttccggttcgatgcaggctcaggcatggccaccatccgccatccca

SEQ ID NO: 375098 - DNA, 120 bp, Artificial Sequence
  ENSG00000142798_93 (sequence is synthesized)
caccactggccctgggccatttccacaccgtgaccctgctgcgcagcctcacccagggctccctgattgtgggtgacctggccccggtcaatgggacctcccagggcaagttccagggcc

SEQ ID NO: 375099 - DNA, 120 bp, Artificial Sequence
  ENSG00000142798_94 (sequence is synthesized)
tggatctgaacgaggaactctacctgggtggctatcctgactatggtgccatccccaaggcggggctgagcagcggcttcataggctgtgtccgggagctgcgcatccagggcgaggaga

SEQ ID NO: 375100 - DNA, 120 bp, Artificial Sequence
  ENSG00000142798_95 (sequence is synthesized)
tcgtcttccatgacctcaacctcacggcgcacggcatctcccactgccccacctgtcgggaccggccctgccagaatggcggtcagtgccatgactctgagagcagcagctacgtgtgcg

SEQ ID NO: 375101 - DNA, 120 bp, Artificial Sequence
  ENSG00000142798_96 (sequence is synthesized)
tctgcccagctggcttcaccgggagccgctgtgagcactcgcaggccctgcactgccatccagaggcctgtgggcccgacgccacctgtgtgaaccggcctgacggtcgaggctacacct

SEQ ID NO: 375102 - DNA, 120 bp, Artificial Sequence
  ENSG00000142798_97 (sequence is synthesized)
gccgctgccacctgggccgctcggggttgcggtgtgaggaaggtgtgacagtgaccaccccctcgctgtcgggtgctggctcctacctggcactgcccgccctcaccaacacacaccacg

SEQ ID NO: 375103 - DNA, 120 bp, Artificial Sequence
  ENSG00000142798_98 (sequence is synthesized)
agctacgcctggacgtggagttcaagccactcgcccctgacggggtcctgctgttcagcggggggaagagcgggcctgtggaggacttcgtgtccctggcgatggtgggcggccacctgg

SEQ ID NO: 375104 - DNA, 120 bp, Artificial Sequence
  ENSG00000142798_99 (sequence is synthesized)
agttccgctatgagttggggtcagggctggccgttctgcggagcgccgagccgctggccctgggccgctggcaccgtgtgtctgcagagcgtctcaacaaggacggcagcctgcgggtga

SEQ ID NO: 375105 - DNA, 120 bp, Artificial Sequence
  ENSG00000142798_100 (sequence is synthesized)
atggtggacgccctgtgctgcgctcctcgcccggcaagagccagggcctcaacctgcacaccctgctctacctggggggtgtggagccttccgtgccactgtccccggccaccaacatga

SEQ ID NO: 375106 - DNA, 120 bp, Artificial Sequence
  ENSG00000142798_101 (sequence is synthesized)
gcgctcacttccgcggctgtgtgggcgaggtgtcagtgaatggcaaacggctggacctcacctacagtttcctaggcagccagggcatcgggcaatgctatgatagctccccatgtgagc

SEQ ID NO: 375107 - DNA, 120 bp, Artificial Sequence
  ENSG00000142798_102 (sequence is synthesized)
gccagccttgccaacatggtgccacgtgcatgcccgctggcgagtatgagttccagtgcctgtgtcgagatggattcaaaggagacctgtgtgagcacgaggagaacccctgccagctcc

SEQ ID NO: 375108 - DNA, 120 bp, Artificial Sequence
  ENSG00000142798_103 (sequence is synthesized)
gtgaaccctgtctgcatgggggcacctgccagggcacccgctgcctctgcctccctggcttctctggcccacgctgccaacaaggctctggacatggcatagcagagtccgactggcatc

SEQ ID NO: 375109 - DNA, 120 bp, Artificial Sequence
  ENSG00000142798_104 (sequence is synthesized)
ttgaaggcagcgggggcaatgatgcccctgggcagtacggagcctatttccacgatgatggcttcctcgccttccctggccatgtcttctccaggagcctgcccgaggtgcccgagacca

SEQ ID NO: 375110 - DNA, 120 bp, Artificial Sequence
  ENSG00000142798_105 (sequence is synthesized)
tcgagctggaggttcggaccagcacagccagtggcctcctgctctggcagggtgtggaggtgggagaggccggccaaggcaaggacttcatcagcctcgggcttcaagacgggcaccttg

SEQ ID NO: 375111 - DNA, 120 bp, Artificial Sequence
  ENSG00000142798_106 (sequence is synthesized)
tcttcaggtaccagctgggtagtggggaggcccgcctggtctctgaggaccccatcaatgacggcgagtggcaccgggtgacagcactgcgggagggccgcagaggttccatccaagtcg

SEQ ID NO: 375112 - DNA, 120 bp, Artificial Sequence
  ENSG00000142798_107 (sequence is synthesized)
acggtgaggagctggtcagcggccggtccccaggtcccaacgtggcagtcaacgccaagggcagcgtctacatcggcggagcccctgacgtggccacgctgaccgggggcagattctcct

SEQ ID NO: 375113 - DNA, 120 bp, Artificial Sequence
  ENSG00000142798_108 (sequence is synthesized)
caggcatcacaggctgtgtcaagaacctggtgctgcactcggcccgacccggcgccccgcccccacagcccctggacctgcagcaccgcgcccaggccggggccaacacacgcccctgcc

SEQ ID NO: 375114 - DNA, 120 bp, Artificial Sequence
  ENSG00000142798_109 (sequence is synthesized)
cctcgtaggcacctgcctgccccacacggactcccgggccacgccccagcccgacaatgtcgagtatattattattaatattattatgaatttttgtaagaaaccgaggcgatgccacgc

SEQ ID NO: 375115 - DNA, 120 bp, Artificial Sequence
  ENSG00000142798_110 (sequence is synthesized)
tttgctgctaccgccctgggctggactggaggtgggcatgccaccctcacacacacagctgggcaaagccacaaggctggccagcaaggcaggttggatgggagtgggcacctcagaaag

SEQ ID NO: 375116 - DNA, 120 bp, Artificial Sequence
  ENSG00000142798_111 (sequence is synthesized)
tcaccaggacttggggtcaggaacagtggctgggtgggcccagaactgcccccactgtccccctacccaccgatggagcccccagatagagctgggtggcctgtttctgcagcccttggg

SEQ ID NO: 375117 - DNA, 120 bp, Artificial Sequence
  ENSG00000142798_112 (sequence is synthesized)
cagttctcactcctaggagagccaacctcggcttgtgggctggtgccccacagctacctgagacgggcatcgcaggagtctctgccacccactcaggattgggaattgtctttagtgccg

SEQ ID NO: 375118 - DNA, 120 bp, Artificial Sequence
  ENSG00000142798_113 (sequence is synthesized)
gctgtggagcaaaaggcagctcacccctgggcaggcggtccccatccccaccagctcgtttttcagcacccccacccacctccacccagcccctggcacctcctctggcagactccccct

SEQ ID NO: 375119 - DNA, 120 bp, Artificial Sequence
  ENSG00000142798_114 (sequence is synthesized)
cctaccacgtcctcctggcctgcattcccaccccctcctgccagcacacagcctggggtccctccctcaggggctgtaagggaaggcccaccccaactcttaccaggagctgctacaggc

SEQ ID NO: 375120 - DNA, 120 bp, Artificial Sequence
  ENSG00000142798_115 (sequence is synthesized)
agagcccagcactgatagggccccgcccaccgggccccgcccaccccaggccacatccccacccatctggaagtgaaggcccagggactcctccaacagacaacggacggacggatgccg

SEQ ID NO: 375121 - DNA, 120 bp, Artificial Sequence
  ENSG00000142798_116 (sequence is synthesized)
ctggtgctcaggaagagctagtgccttaggtgggggaaggcaggactcacgactgagagagagaggagggggatatgaccaccctgccccatctgcaggagcctgaagatccagctcaag

SEQ ID NO: 375122 - DNA, 120 bp, Artificial Sequence
  ENSG00000142798_117 (sequence is synthesized)
tgccatcctgccagtggcccccagactgtggggttgggacgcctggcctctgtgtcctagaagggaccctcctgtggtctttgtcttgatttttcttaataaacggtgctatccccgcca

SEQ ID NO: 375123 - DNA, 120 bp, Artificial Sequence
  ENSG00000142798_118 (sequence is synthesized)
taagagcagggaacagagatgagaaaggcagagaggcacaaggcccagaccctgttccctaggaatccccctaaatgtgtcagaataaagagaattattccattttgccttgcttgtgtc

SEQ ID NO: 375124 - DNA, 120 bp, Artificial Sequence
  ENSG00000142798_119 (sequence is synthesized)
tagcatagagtaaaaggggcttgatacatatttcaagggagggaagaaggatatggatggagtgtgtgagtgctcagatgaaccgatgaagattgaatcagtgtgaaccgggcatggtgg

SEQ ID NO: 375125 - DNA, 120 bp, Artificial Sequence
  ENSG00000142798_120 (sequence is synthesized)
cacctgtagtcccacctactcaggaggctaagctgggagcattgcttgagcgcatgaattctaggctgtggtgagccgtgatcacacctgtgaatacaaccaagaccctttgtctaaaaa

SEQ ID NO: 375126 - DNA, 120 bp, Artificial Sequence
  ENSG00000142798_121 (sequence is synthesized)
aaaaaaaaaaagaagtggacacgtgagtgagtaaatgcataagacctgacaagtgagtgtgtttgtgagtgaatgcatgaaaaagtgaatgaggagtgaatgaatgctggagcttcagtg

SEQ ID NO: 375127 - DNA, 120 bp, Artificial Sequence
  ENSG00000142798_122 (sequence is synthesized)
ggcctgggttgagggacctcgtggagtaactgccatcatggcaggagccctggctgcccctcagtcctgccccaatccctcagccctccctctccagaagcccccagacctctgggcctc

SEQ ID NO: 375128 - DNA, 120 bp, Artificial Sequence
  ENSG00000142798_123 (sequence is synthesized)
ccctgcggggcctgctctgccccgctgcccagaccctgcggggaaatcaggcagcatctggtggaagccgagacctgggcatggggggcagggcatgggggacagggcaggggctgcccg

SEQ ID NO: 375129 - DNA, 120 bp, Artificial Sequence
  ENSG00000142798_124 (sequence is synthesized)
ggtcccctttcagtgtctctgccataggctcccaacttgggcttgcacaccactagaaacagggagctcactactcctgagtctgccccatcgatctttacacaatcttggcttggtaga

SEQ ID NO: 375130 - DNA, 120 bp, Artificial Sequence
  ENSG00000142798_125 (sequence is synthesized)
accaggtatgggactggaggacagacaggccaagaagaggaagcgggtccctgggtggcggaggttattgggggagggctagaggctcccctgagatcaggaagccctggaccccattgc

SEQ ID NO: 375131 - DNA, 120 bp, Artificial Sequence
  ENSG00000142798_126 (sequence is synthesized)
acagatgtatagtgcagtggttagaaaccagaatctaggactgactaacctgggtgtgaattctggctccaccacttagcttgtgacctcggacaagttacttaacctctctgtgctata

SEQ ID NO: 375132 - DNA, 120 bp, Artificial Sequence
  ENSG00000142798_127 (sequence is synthesized)
tcccagcaccccaccccccggtcctgccccagctcatacttcttgggcctggatgactgcaggtaccagctgggtagtggggaggcccgcctggtctctgaggaccccatcaatgacggc

SEQ ID NO: 375133 - DNA, 120 bp, Artificial Sequence
  ENSG00000142798_128 (sequence is synthesized)
gagtggcaccgggtgacagcactgcggtaagggaccctgccgggcactcgggatggggcccagcgttctggagtggggcaggacgccccctaccatgggcagagaggcaggtattgagct

SEQ ID NO: 375134 - DNA, 120 bp, Artificial Sequence
  ENSG00000142798_129 (sequence is synthesized)
ctgtggagacagaacttgaagccaggggaggggagaacccaccagccagggctcgggcttccatctcggactgaactccgctgggggcaggcgagtgccccaggagtgggaggaaacctg

SEQ ID NO: 375135 - DNA, 120 bp, Artificial Sequence
  ENSG00000142798_130 (sequence is synthesized)
aggtgaggaagggtgatggtttggagtaagttgcaggtaacagctgtttgccacggtcctcgcagcctctggagatctggacagggccccagcagcactgtgacagggctgtcgggagga

SEQ ID NO: 375136 - DNA, 120 bp, Artificial Sequence
  ENSG00000142798_131 (sequence is synthesized)
ctcagcctcctgagtagctgggaatacaagtgtctgccaccacccctggctaaattttttgcatttttagtagaggcggggtttcactacgttggccatggctggtcttgaactcctgac

SEQ ID NO: 375137 - DNA, 120 bp, Artificial Sequence
  ENSG00000142798_132 (sequence is synthesized)
tgggattacaggcatgagcccccacgcccggcccccagtcccatcttattacccaggtgcccaccccattacccgccaccaggtgctccccctccaacactgtccagtctctgaagaacc

SEQ ID NO: 375138 - DNA, 120 bp, Artificial Sequence
  ENSG00000142798_133 (sequence is synthesized)
gctccccctccaacactgtccagtctctgaagaacctgcagacacacagagtccctcgactgcttcccctgcagtcctccctgtggcctcttctggctcccgccttgctctgctcagttc

SEQ ID NO: 375139 - DNA, 120 bp, Artificial Sequence
  ENSG00000142798_134 (sequence is synthesized)
cctcctccaaggcctcccaggaggctggcctggccctcactagcccagccccccggggtgtgatgggcagacctctggcatcaggacccccctccctccagagtcacctccgtgtctttt

SEQ ID NO: 375140 - DNA, 120 bp, Artificial Sequence
  ENSG00000142798_135 (sequence is synthesized)
cactggcctatgtgccccccagaggcctgtgggcccgacgccacctgtgtgaaccggcctgacggtcgaggctacacctgccgctgccacctgggccgctcggggttgcggtgtgaggaa

SEQ ID NO: 375141 - DNA, 120 bp, Artificial Sequence
  ENSG00000142798_136 (sequence is synthesized)
ggtgaggggagccaggcctgagacccccagggtcctagtgtcagctggggaggctgggtggggcactctgaggccatgatgggccctacggatgataaaacgattcccaagccagaggat

SEQ ID NO: 375142 - DNA, 120 bp, Artificial Sequence
  ENSG00000142798_137 (sequence is synthesized)
ctcgaagtcacctggccacatgtctgcccagcctgagccccttattgagtgagggcccccaaagaggacccctgtcatattggagctcctcccagccccgtgtgcaagggcaggggggct

SEQ ID NO: 375143 - DNA, 120 bp, Artificial Sequence
  ENSG00000142798_138 (sequence is synthesized)
cctgtgccactgcagctggtgccaactggtcctgagcctctgggcctggagagtgaggcaggcaagggtcccagaggaaggcagagtagctggaccccacccgagggtccaggatcccca

SEQ ID NO: 375144 - DNA, 120 bp, Artificial Sequence
  ENSG00000142798_139 (sequence is synthesized)
cctcccaacccaacctgggctgcacaccaggcaccctccctccctgccccagctcatgaaccttggggagccactgttcctctatctgcccggaccacgtatatcccattcccacctgcc

SEQ ID NO: 375145 - DNA, 120 bp, Artificial Sequence
  ENSG00000142798_140 (sequence is synthesized)
ctgccaacactcgttttgtgtcccagaccaggagattgtgcgctgtgacgagcgtggcagcatggggacctccggggaggcctgccgctgtaaggcaacaagactgaaactccgtctcaa

SEQ ID NO: 375146 - DNA, 120 bp, Artificial Sequence
  ENSG00000142798_141 (sequence is synthesized)
ggtgagagcagagagggcagggggtacagacaagtggcgcagagggtggcagagaggtccccggtgccatcactgttatctcactctggctgcgtggtccacacccgtctgtccccagtg

SEQ ID NO: 375147 - DNA, 120 bp, Artificial Sequence
  ENSG00000142798_142 (sequence is synthesized)
agacggatggatgctgagatctggcagctcctgtccagctttgctgcccaaccccaaccccctccccaggggctctctcctcatccccagcctgcagctgctctgcgagcagcacctcct

SEQ ID NO: 375148 - DNA, 120 bp, Artificial Sequence
  ENSG00000142798_143 (sequence is synthesized)
ccttcttcttcctcctcctcctcctcttcctcagcttctctgtctttctcaccaggctctcagttctctctctcctacgaaggcttctctctgcttcctggaagcctctattactggcag

SEQ ID NO: 375149 - DNA, 120 bp, Artificial Sequence
  ENSG00000142798_144 (sequence is synthesized)
ctgccccgggccttcctgggggacaaggtggcggcctacggtgggaagttgcgatacaccctctcctacacagcaggcccacagggcagcccactctctgaccccgatgtgcagatcacg

SEQ ID NO: 375150 - DNA, 120 bp, Artificial Sequence
  ENSG00000142856_0 (sequence is synthesized)
gtttcctttggcggattttctgttttcggaagttgctgggttcgttttattcagcggcagtggtgctttcccgaatctcagaatgcctgttaaaagatcactgaagttggatggtctgtt

SEQ ID NO: 375151 - DNA, 120 bp, Artificial Sequence
  ENSG00000142856_1 (sequence is synthesized)
agaagaaaattcatttgatccttcaaaaatcacaaggaagaaaagtgttataacttattctccaacaactggaacttgtcaaatgagtctatttgcttctcccacaagttctgaagagca

SEQ ID NO: 375152 - DNA, 120 bp, Artificial Sequence
  ENSG00000142856_2 (sequence is synthesized)
aaagcacagaaatggactatcaaatgaaaagagaaaaaaattgaatcaccccagtttaactgaaagcaaagaatctacaacaaaagacaatgatgaattcatgatgttgctatcaaaagt

SEQ ID NO: 375153 - DNA, 120 bp, Artificial Sequence
  ENSG00000142856_3 (sequence is synthesized)
acatttcttaaaaagagaaatgcagaaaaccaaagaactaatgacaaaagtgaataaacaaaaactgtttgaaaagagtacaggacttcctcacaaagcatcacgtcatcttgacagcta

SEQ ID NO: 375154 - DNA, 120 bp, Artificial Sequence
  ENSG00000142856_4 (sequence is synthesized)
tgaattccttaaagccattttaaactgaggcattaagaagaaatgcactcaccatgagcaccaacttctgcatctgcctgatcatatttaaaggaacagagaaatatttgtaattaatct

SEQ ID NO: 375155 - DNA, 120 bp, Artificial Sequence
  ENSG00000142856_5 (sequence is synthesized)
gcccagtaaataccagctcgtagcagttggcaggtgcatgtctagataaaatttcttgcagctaatttaaactttctacacgcaccagtagataatctcaatgtaaataatacatttctt

SEQ ID NO: 375156 - DNA, 120 bp, Artificial Sequence
  ENSG00000142856_6 (sequence is synthesized)
cttggctctttaatgtaagccaacatggagaggaagatcttgacttatattctgtaccacatacacttctgtggacttttagcatttgtgggtagacttaataaagcatgtataaaagtg

SEQ ID NO: 375157 - DNA, 90 bp, Artificial Sequence
  ENSG00000142856_7 (sequence is synthesized)
gttttcggaagttgctgggttcgttttattcagcggcagtggtgctttcccgaatctcagaatgccttttgctcccttccgttcactgca

SEQ ID NO: 375158 - DNA, 120 bp, Artificial Sequence
  ENSG00000142856_8 (sequence is synthesized)
taatcatcatgaatcctttttagtggttttcttttttcctcagagatccctgttctgaagtatgttcttttagaagatcacaaatctcatttgaaaagctttatattgcatttagcagaa

SEQ ID NO: 375159 - DNA, 120 bp, Artificial Sequence
  ENSG00000142856_9 (sequence is synthesized)
gatgatatctgatgagatcaacttctctgatgattgaactttttaaatgtcttttgaaatgcaatcttcaacataagatttgaattttgtctttttattaaaatttctttttgagaatac

SEQ ID NO: 375160 - DNA, 120 bp, Artificial Sequence
  ENSG00000142856_10 (sequence is synthesized)
ttgagaaagaaatactattctgcaaaatatgaatggcacccaatgatgatacttttactcaccaacttgaaagagccacaataactttgaaattttgtaccataatgaacttgagaaata

SEQ ID NO: 375161 - DNA, 120 bp, Artificial Sequence
  ENSG00000142856_11 (sequence is synthesized)
tattcttcaggcagcttgaaagaaatgaaagatcgttggttttcaggaataaacaaattagtaaaggaacatcaagatgatattaaaaaccaagggtctgtatgcaaaccataatgctat

SEQ ID NO: 375162 - DNA, 120 bp, Artificial Sequence
  ENSG00000142856_12 (sequence is synthesized)
gttagggcaacaaagtgaaatttgaaccatgcattgaaaatacagaaaagggctctcagtagcaatgcatatctacttttcagcacaagtaggatgtttatgagaattccattttgtcta

SEQ ID NO: 375163 - DNA, 120 bp, Artificial Sequence
  ENSG00000142856_13 (sequence is synthesized)
ggatgaagaaagtggtagaattatttctcccaaaatctgctcagcaaatagtttatctccaaagattatgaaggcttcttcagtgattcagaaagtgtggaaaagaatgccttgaaaaaa

SEQ ID NO: 375164 - DNA, 120 bp, Artificial Sequence
  ENSG00000142856_14 (sequence is synthesized)
ttaacagttgtataacacttaaaaaaccattcatgggaatttggttgccttcaaggtgggaaaaagattcatgatgttgctatcaaaagttgagaaattgtcagaagaaatcatggagat

SEQ ID NO: 375165 - DNA, 120 bp, Artificial Sequence
  ENSG00000142856_15 (sequence is synthesized)
aagatgcagagcccttctccaaacgatccggctagaaatctaggaagcgctgatccggagcgcacagagacagctgtgttgctcctctatcgcgggggtggtatggccagagtagtgaga

SEQ ID NO: 375166 - DNA, 120 bp, Artificial Sequence
  ENSG00000142856_16 (sequence is synthesized)
gaaggtgctctgttacaccagcaggaaataggtgctgtcctgggcctagaactccccgctcgctcctttgctcgcgcacacccggatccttcgtcgcggggaggatgtttccgcccggcc

SEQ ID NO: 375167 - DNA, 120 bp, Artificial Sequence
  ENSG00000142856_17 (sequence is synthesized)
actttttaatgattgcttttttctctgtcttacaaactcctgctcatcctttaaggtcagcctcagatgtcacaacctctgtgaagctctccccagctctcctagcatcacgtcatcttg

SEQ ID NO: 375168 - DNA, 120 bp, Artificial Sequence
  ENSG00000142856_18 (sequence is synthesized)
tcacctttctaatttagtttaaccttgtgaaatttcactgtgttttgttcaggtggaaacattttatttacattatcagatttggtattgtcttcctgtaagaaaatagggatatagctt

SEQ ID NO: 375169 - DNA, 120 bp, Artificial Sequence
  ENSG00000142856_19 (sequence is synthesized)
tggagctttagttgaacttatattaatctagtcttatcaacaacaggagggcatctgacatcagttagaggctgattggaaagaactgttgagctgacgacgctaactttaaaagtcaga

SEQ ID NO: 375170 - DNA, 120 bp, Artificial Sequence
  ENSG00000142856_20 (sequence is synthesized)
tttagacgtgacgacttttaggagaaacaacagaaattccccctatgctttaacattctgggtttatctggagataaaaaatgaagccattaattttgatagcacaaatatacattaatg

SEQ ID NO: 375171 - DNA, 120 bp, Artificial Sequence
  ENSG00000142856_21 (sequence is synthesized)
tacaactatagtcctcagctctttataatgattcagctatcatgtatgccatatgtgaatcataacctttcctattaataatgttaatgctcttgttttacacgattcgtcattgttttg

SEQ ID NO: 375172 - DNA, 120 bp, Artificial Sequence
  ENSG00000142856_22 (sequence is synthesized)
gggtatgcatttcagctgctaaaaatgcttacttgagatttgtctaggatttaagtaaaaataaactgatttattacttttcaaagccttttaaataatttctttcatgatttaaatttt

SEQ ID NO: 375173 - DNA, 120 bp, Artificial Sequence
  ENSG00000142856_23 (sequence is synthesized)
ttatactttaacagaagtatgataatttttctttcaaataaaatcagtagaaaaaattttaaactatagatttggactcacttaatagcaattaggtgtttaagaggtgtaaataacttg

SEQ ID NO: 375174 - DNA, 120 bp, Artificial Sequence
  ENSG00000142856_24 (sequence is synthesized)
cttaaagccattttaaactgagaaacctgacagtactcctgatatcaccgtggccaacttccctacctgcacaactgctccagccctctgtcacacttcagtgattattcctcttgacct

SEQ ID NO: 375175 - DNA, 120 bp, Artificial Sequence
  ENSG00000142856_25 (sequence is synthesized)
agcaacccagaggccacagccagagtgctaagaccatcaaaagatgggaagagaaaaacattttggctaatgataacgggatattgggatactttagtaacaatgtggatgaatcacttg

SEQ ID NO: 375176 - DNA, 120 bp, Artificial Sequence
  ENSG00000142856_26 (sequence is synthesized)
ggtaacacaaggatgaggcttagtatgaacaaagcgctgtgtattatgacagtttgaaacctaataaggacacaaaatataaggcaagttatgataaatgatacaagttcagactcttct

SEQ ID NO: 375177 - DNA, 120 bp, Artificial Sequence
  ENSG00000142856_27 (sequence is synthesized)
aagttctggccaataacaagtacaaacaaggattgtgcatccaatgaggatcaaagtatcaacttgattggtggtggaattgataacccccaacatggcaggctctctagtagaagcttg

SEQ ID NO: 375178 - DNA, 120 bp, Artificial Sequence
  ENSG00000142856_28 (sequence is synthesized)
gggtaactaaggtagattgccttaaagcagaaatgcaacctcttctttctcacactaagtttaaatcttgaattctgtgcactttactgaacctaaaagctggatcttttaaatagaccc

SEQ ID NO: 375179 - DNA, 120 bp, Artificial Sequence
  ENSG00000142856_29 (sequence is synthesized)
tacaggacttcctcacaaaggcattaaggctgacttgcccattaccagattttcccaaaggaccgagttcctgcatagaggagactgttatcactaaaccatgtttgtaaatttctaata

SEQ ID NO: 375180 - DNA, 120 bp, Artificial Sequence
  ENSG00000142856_30 (sequence is synthesized)
tttaaatgaaaactcagtttaaaaaatatataatacatagtatctatataagtatgttatatactactgtgtgttatattctattctacgtagtcattgtccaattctgtttcttggcag

SEQ ID NO: 375181 - DNA, 120 bp, Artificial Sequence
  ENSG00000142856_31 (sequence is synthesized)
cttggcaggagctacattagctctttatatttcctgaggtattaaaaacttcattagctttttaactaattttgggaaattcatattgcctaaaaaatagattaaagcttatttttgttg

SEQ ID NO: 375182 - DNA, 120 bp, Artificial Sequence
  ENSG00000142856_32 (sequence is synthesized)
gcgatgcgagcgatgagctggatggcctccttcatgtagaaccggccgtccccgcccaccaccagcgtggcctcctgccgctgcgccggctccacggtggagatgatactctggatgaag

SEQ ID NO: 375183 - DNA, 120 bp, Artificial Sequence
  ENSG00000142856_33 (sequence is synthesized)
ttctccgcgtagttggcgctgctctggaacaccttcacccgcttccgcagcccgctcgtgcccggcttctggtcctgttttattttggatgtcgacaaaagccctgattaccatgctgcc

SEQ ID NO: 375184 - DNA, 120 bp, Artificial Sequence
  ENSG00000142856_34 (sequence is synthesized)
aaaagtaaatgatgaaactacatttgaagctaagaatggaaaataattgaaagaattgaaagtggccaagataggaagaacccagaactggtacagaatgatagttttgaaagtcaagtt

SEQ ID NO: 375185 - DNA, 120 bp, Artificial Sequence
  ENSG00000142856_35 (sequence is synthesized)
taatggatacatccaatgcttctcatggattttatttggctgatgcacctaatttcagttgtttttcagaataaagactttttctttgaggaatgtgagagaactctgaatttcacaatg

SEQ ID NO: 375186 - DNA, 120 bp, Artificial Sequence
  ENSG00000142856_36 (sequence is synthesized)
caactcttctaagcaaattggaaaactgcactgaaaatcctgaattttgacatgtagctccctcaagagaaaaactacgagatgctttaaaaaaatgctgctgggtttttactctacgat

SEQ ID NO: 375187 - DNA, 120 bp, Artificial Sequence
  ENSG00000142856_37 (sequence is synthesized)
gaaaaagaaggttaattcaaggaggaccaagacttcagatttcttaggttgtgctacagtagtctttgaccacaatgcagatttgattaaatcttgtaaggatgccgtaaaactggcaac

SEQ ID NO: 375188 - DNA, 120 bp, Artificial Sequence
  ENSG00000142856_38 (sequence is synthesized)
attttctgttttcggaagttgctgggttcgttttattcagcggcagtggtgctttcccgaatctcagaatgcctgttaaaagatcactgaagttggatggtctgttagaagaaaatttct

SEQ ID NO: 375189 - DNA, 120 bp, Artificial Sequence
  ENSG00000142856_39 (sequence is synthesized)
tgaaaatgtatattctgaaatagaatcaggctaactatagcatgttgaaatgagaatttatagccttagagctgctattagtataaaacaagacttcaggttgttttaatttcattttgc

SEQ ID NO: 375190 - DNA, 120 bp, Artificial Sequence
  ENSG00000142864_0 (sequence is synthesized)
gaagacggcccccctctctcggcccggccatcttgtgggaagagctgaagcaggcgctcttggctcggcgcggcccgctgcaatccgtggaggaacgcgccgccgagccaccatcatgcc

SEQ ID NO: 375191 - DNA, 120 bp, Artificial Sequence
  ENSG00000142864_1 (sequence is synthesized)
tgggcacttacaggaaggcttcggctgcgtggtcaccaaccgattcgaccagttatttgacgacgaatcggaccccttcgaggtgctgaaggcagcagagaacaagaaaaaagaagccgg

SEQ ID NO: 375192 - DNA, 120 bp, Artificial Sequence
  ENSG00000142864_2 (sequence is synthesized)
cgggggcggcgttgggggccctggggccaagagcgcagctcaggccgcggcccagaccaactccaacgcggcaggcaaacagctgcgcaaggagtcccagaaagaccgcaagaacccgct

SEQ ID NO: 375193 - DNA, 120 bp, Artificial Sequence
  ENSG00000142864_3 (sequence is synthesized)
gccccccagcgttggcgtggttgacaagaaagaggagacgcagccgcccgtggcgcttaagaaagaaggaataagacgagttggaagaagacctgatcaacaacttcagggtgaagggaa

SEQ ID NO: 375194 - DNA, 120 bp, Artificial Sequence
  ENSG00000142864_4 (sequence is synthesized)
aataattgatagaagaccagaaaggcgaccacctcgtgaacgaagattcgaaaagccacttgaagaaaagggtgaaggaggcgaattttcagttgatagaccgattattgaccgacctat

SEQ ID NO: 375195 - DNA, 120 bp, Artificial Sequence
  ENSG00000142864_5 (sequence is synthesized)
tcgaggtcgtggtggtcttggaagaggtcgagggggccgtggacgtggaatgggccgaggagatggatttgattctcgtggcaaacgtgaatttgataggcatagtggaagtgatagatc

SEQ ID NO: 375196 - DNA, 120 bp, Artificial Sequence
  ENSG00000142864_6 (sequence is synthesized)
tggcctgaagcacgaggacaaacgtggaggtagcggatctcacaactggggaactgtcaaagacgaattaactgacttggatcaatcaaatgtgactgaggaaacacctgaaggtgaaga

SEQ ID NO: 375197 - DNA, 120 bp, Artificial Sequence
  ENSG00000142864_7 (sequence is synthesized)
acatcatccagtggcagacactgaaaataaggagaatgaagttgaagaggtaaaagaggagggtccaaaagagatgactttggatgagtggaaggctattcaaaataaggaccgggcaaa

SEQ ID NO: 375198 - DNA, 120 bp, Artificial Sequence
  ENSG00000142864_8 (sequence is synthesized)
agtagaatttaatatccgaaaaccaaatgaaggtgctgatgggcagtggaagaagggatttgttcttcataaatcaaagagtgaagaggctcatgctgaagattcggttatggaccatca

SEQ ID NO: 375199 - DNA, 120 bp, Artificial Sequence
  ENSG00000142864_9 (sequence is synthesized)
tttccggaagccagcaaatgatataacgtctcagctggagatcaattttggagaccttggccgcccaggacgtggcggcaggggaggacgaggtggacgtgggcgtggtgggcgcccaaa

SEQ ID NO: 375200 - DNA, 120 bp, Artificial Sequence
  ENSG00000142864_10 (sequence is synthesized)
ccgtggcagcaggaccgacaagtcaagtgcttctgctcctgatgtggatgacccagaggcattcccagctctggcttaactggatgccataagacaaccctggttcctttgtgaaccctt

SEQ ID NO: 375201 - DNA, 120 bp, Artificial Sequence
  ENSG00000142864_11 (sequence is synthesized)
ctgttcaaagcttttgcatgcttaaggattccaaacgactaagaaattaaaaaaaaaaagactgtcattcataccattcacacctaaagactgaattttatctgttttaaaaatgaactt

SEQ ID NO: 375202 - DNA, 120 bp, Artificial Sequence
  ENSG00000142864_12 (sequence is synthesized)
ctcccgctacacagaagtaacaaatatggtagtcagttttgtatttagaaatgtattggtagcagggatgttttcataattttcagagattatgcattcttcatgaatacttttgtattg

SEQ ID NO: 375203 - DNA, 120 bp, Artificial Sequence
  ENSG00000142864_13 (sequence is synthesized)
ctgcttgcaaatatgcatttccaaacttgaaatataggtgtgaacagtgtgtaccagtttaaagctttcacttcatttgtgttttttaattaaggatttagaagttcccccaattacaaa

SEQ ID NO: 375204 - DNA, 120 bp, Artificial Sequence
  ENSG00000142864_14 (sequence is synthesized)
ctggttttaaatattggacatactggttttaatacctgctttgcatattcacacatggtcaactgggacatgttaaactttgatttgtcaaattttatgctgtgtggaatactaactata

SEQ ID NO: 375205 - DNA, 120 bp, Artificial Sequence
  ENSG00000142864_15 (sequence is synthesized)
tgtattttaacttagttttaatattttcatttttggggaaaaatcttttttcacttctcatgatagctgttatatatatatgctaaatctttatatacagaaatatcagtacttgaacaa

SEQ ID NO: 375206 - DNA, 120 bp, Artificial Sequence
  ENSG00000142864_16 (sequence is synthesized)
attcaaagcacatttggtttattaacccttgctccttgcatggctcattaggttcaaattataactgatttacattttcagctatatttactttttaaatgcttgagtttcccattttaa

SEQ ID NO: 375207 - DNA, 120 bp, Artificial Sequence
  ENSG00000142864_17 (sequence is synthesized)
aatctaaactagacatcttaattggtgaaagttgtttaaactacttattgttggtaggcacatcgtgtcaagtgaagtagttttataggtatgggttttttctcccccttcaccagggtg

SEQ ID NO: 375208 - DNA, 120 bp, Artificial Sequence
  ENSG00000142864_18 (sequence is synthesized)
ggtggaataagttgatttggccaatgtgtaatatttaaactgttctgtaaaataagtgtctggccatttggtatgatttctgtgtgtgaaaggtcccaaaatcaaaatggtacatccata

SEQ ID NO: 375209 - DNA, 120 bp, Artificial Sequence
  ENSG00000142864_19 (sequence is synthesized)
atcagccaccatttaacccttccttgttctaaaacaaaaaccaaagggcgctggttggtagggtgaggtgggggagtattttaatttttggaatttgggaagcagacagctttactttgt

SEQ ID NO: 375210 - DNA, 120 bp, Artificial Sequence
  ENSG00000142864_20 (sequence is synthesized)
aaggttggaacagcagcactatacatgaaatataaaccaaaaacctttactgtttctaaatttcctagattgctattatttggttgtaagttgagtattccacagaaagtggtaattatc

SEQ ID NO: 375211 - DNA, 120 bp, Artificial Sequence
  ENSG00000142864_21 (sequence is synthesized)
tcttctctcttcctccattagaaaattaggtaaataatggattcctataatgggagcatcaccacttattaaaacacacatagaatgatgaattaaaaaagttttctaggattgtctttt

SEQ ID NO: 375212 - DNA, 120 bp, Artificial Sequence
  ENSG00000142864_22 (sequence is synthesized)
attctgccacatttattgataaacagtgaaggaatttttaaaaaatttttaagaattgtttgtcacgtcatttttagaaatgttctacctgtatatggtaatgtccagttttaaaaatat

SEQ ID NO: 375213 - DNA, 120 bp, Artificial Sequence
  ENSG00000142864_23 (sequence is synthesized)
tggacatcttcaatcttaaacatttctatttagctgattggttctcacatatacttctaaaagaaacttttatgttataagagttactttttggataagatttattaatctcagttacct

SEQ ID NO: 375214 - DNA, 120 bp, Artificial Sequence
  ENSG00000142864_24 (sequence is synthesized)
actattctgacattttaggaaggaggtaattgtttttaatgatggataaacttgtgctggtgttttggatcttatgatgctgagcatgttctgcactggtgctaatgtctaatataattt

SEQ ID NO: 375215 - DNA, 120 bp, Artificial Sequence
  ENSG00000142864_25 (sequence is synthesized)
tatatttacacacatacgtgctacccagagattaatttagtccatatgaactattgacccattgttcattgagacagcaacatacgcactcctaaatcagtgtgtttagacttttcaagt

SEQ ID NO: 375216 - DNA, 120 bp, Artificial Sequence
  ENSG00000142864_26 (sequence is synthesized)
atctaactcatttccaaacatgtaccatgttttataaacctcttgatttccagcaacatactatagaaaacacctgctactcaaaacacaacttctcagtgtcatccattgctgtcgtga

SEQ ID NO: 375217 - DNA, 120 bp, Artificial Sequence
  ENSG00000142864_27 (sequence is synthesized)
atctgatggatataaatttgcctcctagttcactttgtgtcaagagctaaaactgtgaacctaactttctcttattggtgggtaataactgaaaataaagatttattttcatgctcactt

SEQ ID NO: 375218 - DNA, 120 bp, Artificial Sequence
  ENSG00000142864_28 (sequence is synthesized)
cttaaaagtcataaaaacaatcaaataggatcatgtttattgtcatgtgtttcctggtttctgacctgtgtgcacacccctgtgtgtttataatttttaaattgaattttatatggggtt

SEQ ID NO: 375219 - DNA, 120 bp, Artificial Sequence
  ENSG00000142864_29 (sequence is synthesized)
tttatttgctaaaaaccaggctgttgaatcacatttgggaagggtacttatcttaatgactaatgacttaattgggaaagttgaattcttgtaaaatacaaaatccaaggacttcttgga

SEQ ID NO: 375220 - DNA, 120 bp, Artificial Sequence
  ENSG00000142864_30 (sequence is synthesized)
tttaatctgattgtcacttcttagcagatcacttttttgataatgaaagttaagcatactgaatgctacttttgattgacaaactggctataatagtctaggggaaaaatccctaaacag

SEQ ID NO: 375221 - DNA, 120 bp, Artificial Sequence
  ENSG00000142864_31 (sequence is synthesized)
ataaagattcctaaagtaatggtggcagctgatgtttcagtgaacttttatcttgatgcgtttaaatggaagtaatgccagacctgagatttttaaggcatttttacagcttgtattgaa

SEQ ID NO: 375222 - DNA, 120 bp, Artificial Sequence
  ENSG00000142864_32 (sequence is synthesized)
atgattggagacatggtttctttattagctattttgagacctgtggagttaagcaagacttttaaaaattggcaccatatacatctagttagttcctttactcttatttttttaaataaa

SEQ ID NO: 375223 - DNA, 120 bp, Artificial Sequence
  ENSG00000142864_33 (sequence is synthesized)
agtagtacacatcatttccagggttgtaaatatatttggggcttgtttttggtatggatttaaaaggaggatattaagtattcattctaattttgttatttttctagttgccagagatgg

SEQ ID NO: 375224 - DNA, 120 bp, Artificial Sequence
  ENSG00000142864_34 (sequence is synthesized)
ttgcactgaaatagaacagggagttgcatacaaagcctaaatgtgtattggatttcgaaaatactaggttggtgcaattggttttgtaccaacctaacatgtctttaggaaagtaccatc

SEQ ID NO: 375225 - DNA, 120 bp, Artificial Sequence
  ENSG00000142864_35 (sequence is synthesized)
atgtggaaggaaacaacaggtgttaaaaggttcaaaggaatgagaaataggaagttactagaacctaactgatgttgaccttagaggtaagattattcaggtatattagtggacctccag

SEQ ID NO: 375226 - DNA, 120 bp, Artificial Sequence
  ENSG00000142864_36 (sequence is synthesized)
tccaatggtatagcaaattccagggatctcaggtgcatgcaattttactttctaaagtaaacacttagaaaatagattataacccagacgttttggattatactgagacaaatatgtaaa

SEQ ID NO: 375227 - DNA, 120 bp, Artificial Sequence
  ENSG00000142864_37 (sequence is synthesized)
taagttttagcaagtctgaacatgtaccagcgagatcttcaggttaactaagaaaagcccagaaacttcattatttactgtgctttgtatggcataactggtaacaaggcagtaaaatga

SEQ ID NO: 375228 - DNA, 120 bp, Artificial Sequence
  ENSG00000142864_38 (sequence is synthesized)
tacatatttgaactggaccatagtaattaaatgatttatcaatatcatttgcaagataattgtcaggttgagttaatagtaagtggcagcttcccagaaatttgggttatttggcctaag

SEQ ID NO: 375229 - DNA, 120 bp, Artificial Sequence
  ENSG00000142864_39 (sequence is synthesized)
ctgtgccctgggattacctcttcatcttccttgacttttaagttcaaatttggaggttatgtgaagtgattgaaataaatctttcaggctgaggaagtcggtaatttcaagaatatagtg

SEQ ID NO: 375230 - DNA, 120 bp, Artificial Sequence
  ENSG00000142864_40 (sequence is synthesized)
aaaacaaggttgtaatctaaacatgagaagcttaagtttaggaaatggttagaatataaattgctaaagccatcatgattttggccacagatgaaaatatgaacactggaaatgagcgcc

SEQ ID NO: 375231 - DNA, 120 bp, Artificial Sequence
  ENSG00000142864_41 (sequence is synthesized)
ccacagatgaaaatatgaacactggaaatgagcgccatttaaatgagatgctgtatgtaagccaggggtcagcaaagttcagcctgtgacctggtgtgtgtgggggtgtgtgtgtgtgtg

SEQ ID NO: 375232 - DNA, 120 bp, Artificial Sequence
  ENSG00000142864_42 (sequence is synthesized)
gaatggtttttaggcttgtataggattaaaaaaaaaaaaaacccacagaaaaatgtaggcagcccagcataagataccgcctttcacagaaatgtttgctgaccccggaactgtcactct

SEQ ID NO: 375233 - DNA, 66 bp, Artificial Sequence
  ENSG00000142864_43 (sequence is synthesized)
ctttcacagaaatgtttgctgaccccggaactgtcactctcgggttacaagagtttgtttctttga

SEQ ID NO: 375234 - DNA, 72 bp, Artificial Sequence
  ENSG00000142864_44 (sequence is synthesized)
ctgggattacaggtgtgcaccaccacagacagctaattttacaggtgtacaccaccacaccctagcactgta

SEQ ID NO: 375235 - DNA, 120 bp, Artificial Sequence
  ENSG00000142864_45 (sequence is synthesized)
catagcactgtactccagtctgggtgacacactgtctgaaaaataaaagtttagttctaggtacaaattaagtggtctacccaacaggaagctgtgaaattagaagtaattttaaagcat

SEQ ID NO: 375236 - DNA, 120 bp, Artificial Sequence
  ENSG00000142864_46 (sequence is synthesized)
actttacacctctatataatcaaagtaagggcaagataaaacttgttagtaaaacatgttttattattttttagataggtagcctgcaacataaaatatattttgaaagctgttaagggg

SEQ ID NO: 375237 - DNA, 120 bp, Artificial Sequence
  ENSG00000142864_47 (sequence is synthesized)
tgtataatctgttaaaaaataccatgattagtatttcacatttagtgactcagatccctttgtgtaagtcctttgcgttgtgcaaagaggtttttctatgagatgagaattatgaacact

SEQ ID NO: 375238 - DNA, 120 bp, Artificial Sequence
  ENSG00000142864_48 (sequence is synthesized)
tcatataggtaaattccataggttgagctggggcagaaattaatggctcctggagattgcatctttttttttttttttttgagcttagaattcccatttggacagaatttagcttttgtg

SEQ ID NO: 375239 - DNA, 120 bp, Artificial Sequence
  ENSG00000142864_49 (sequence is synthesized)
ctgttgattacttctgtactaaactggtagccaattgttcacttctaaatggaagggaaaaagttacccacacaagttagaaaatgatttaccgaattatttttttgagttagtatgtat

SEQ ID NO: 375240 - DNA, 120 bp, Artificial Sequence
  ENSG00000142864_50 (sequence is synthesized)
atactgttttaaatcagtaatgtttgttccttttgctgcccatttgggagtatgtggcaattcctagtgctcttgtatgacattactcttcttgagacttgtatatgcaagaaagtatat

SEQ ID NO: 375241 - DNA, 120 bp, Artificial Sequence
  ENSG00000142864_51 (sequence is synthesized)
ataaaagatgcctggtggtaactttgtatctgagttctgattcattatggacttttagaaatctatttagataattggttcatactaggtgctcaattactctgaccttgtgtggcttaa

SEQ ID NO: 375242 - DNA, 120 bp, Artificial Sequence
  ENSG00000142864_52 (sequence is synthesized)
tccttaaatagttgctttaggtgttactgggtggaagcatggaaagtgaagggctaatattaaggatttttatgtattactgagtagggaaagtgggaagtagcttatctttggacagtt

SEQ ID NO: 375243 - DNA, 120 bp, Artificial Sequence
  ENSG00000142864_53 (sequence is synthesized)
gtattactttgcactaatcaccttgtttgcagttgtagctgattcagttctagattttaggaccaaaaagatctctaatttaaagaaacagtttttatatacctagaatgaagattctgt

SEQ ID NO: 375244 - DNA, 120 bp, Artificial Sequence
  ENSG00000142864_54 (sequence is synthesized)
ttaaagcggttttggttaacttggttcttgacatttgcctaaaattttgttggattgggactaaaatgttctattagccaatgaataacgtccaagtaaatttttgttttattttgggaa

SEQ ID NO: 375245 - DNA, 120 bp, Artificial Sequence
  ENSG00000142864_55 (sequence is synthesized)
aaattaaaaatgtggtttaggagaagataggctgaggattttacataagagggtagtttttaaacaaggtagtgtttttaagaaatgtgtattttagtattcgtaaagccagttctagat

SEQ ID NO: 375246 - DNA, 120 bp, Artificial Sequence
  ENSG00000142864_56 (sequence is synthesized)
tgtattactgataaatgatcatttaagagttcataagtatgaattccatattccttacttgtctctaattagcaaacactgaattcctggtctctaccaagttgcttagttacataggaa

SEQ ID NO: 375247 - DNA, 120 bp, Artificial Sequence
  ENSG00000142864_57 (sequence is synthesized)
aatctttctctaaaagattacaaggttaattttctcaattaaaatcataaatttaaaatacttttatgtaatatcagctctctaccaggtataaaacttgaaaaccttttcacagggaga

SEQ ID NO: 375248 - DNA, 120 bp, Artificial Sequence
  ENSG00000142864_58 (sequence is synthesized)
agcgcatggactgaggtgcggggaagccggcccctcaccgaagctttccgtagttacggaggagcttgggggtccatcgctgcttactgcgcagagctgctcctttgaggtgctgttgtt

SEQ ID NO: 375249 - DNA, 120 bp, Artificial Sequence
  ENSG00000142864_59 (sequence is synthesized)
tcaggctcctgtcctgccgtcttgtcccacgacggcgcggagtatccccgctgaaaagcagggggtcgttccaggccatcagacgtgtggagtaagctgcaggaataagacgagttggaa

SEQ ID NO: 375250 - DNA, 120 bp, Artificial Sequence
  ENSG00000142864_60 (sequence is synthesized)
agaatgtgagagcttatggtatttttgtatgaagaacttttcagctacatgtaaatggacctagatgcctttctttttctttctttccttagagagtcccccaaatacattcagaaacaa

SEQ ID NO: 375251 - DNA, 120 bp, Artificial Sequence
  ENSG00000142864_61 (sequence is synthesized)
aattaagttttgtcgtgtttgaaaatgttcagatgtgacttgaattgtatttataatttttgttttaaaatttcacatgggttatttgtctgttaaagctttacataggatcatttgggg

SEQ ID NO: 375252 - DNA, 120 bp, Artificial Sequence
  ENSG00000142864_62 (sequence is synthesized)
cagataatttgctttataaggaaaataaactgtattatcacatattctaagaaatttagtcctttgatcaatttgtaattatgttttatgtggtagagttactttttcctaaaaagctgt

SEQ ID NO: 375253 - DNA, 120 bp, Artificial Sequence
  ENSG00000142867_0 (sequence is synthesized)
tgcctgcgcctgagcctctacgagagggaaggaacgctgctccgagctccgcgtcgcgtcgcgtagattcgcgtcgccgtcgacctcagaggcggggccggaagcgctacggtttgaccc

SEQ ID NO: 375254 - DNA, 120 bp, Artificial Sequence
  ENSG00000142867_1 (sequence is synthesized)
ccgagtccctctgttcccgaaggggcggccgtctttctcccgacccgctccgcctcctctccttcttccccattacccggaggccgaagcccccagccagggcggggcggcgcagcccga

SEQ ID NO: 375255 - DNA, 120 bp, Artificial Sequence
  ENSG00000142867_2 (sequence is synthesized)
gctcccggacccggaagaagcgccatctcccgcctccaccatggagcccaccgcaccgtccctcaccgaggaggacctcactgaagtgaagaaggacgccttagaaaatttacgtgtata

SEQ ID NO: 375256 - DNA, 120 bp, Artificial Sequence
  ENSG00000142867_3 (sequence is synthesized)
cctgtgtgagaaaatcatagctgagagacattttgatcatctacgtgcaaaaaaaatactcagtagagaagacactgaagaaatttcttgtcgaacatcaagtagaaaaagggctggaaa

SEQ ID NO: 375257 - DNA, 120 bp, Artificial Sequence
  ENSG00000142867_4 (sequence is synthesized)
attgttagactacttacaggaaaacccaaaaggtctggacacccttgttgaatctattcggcgagaaaaaacacagaacttcctgatacagaagattacagatgaagtgctgaaacttag

SEQ ID NO: 375258 - DNA, 120 bp, Artificial Sequence
  ENSG00000142867_5 (sequence is synthesized)
aaatataaaactagaacatctgaaaggactaaaatgtagcagttgtgaaccttttccagatggagccacgaacaacctctccagatcaaattcagatgagagtaatttctctgaaaaact

SEQ ID NO: 375259 - DNA, 120 bp, Artificial Sequence
  ENSG00000142867_6 (sequence is synthesized)
gagggcatccactgtcatgtaccatccagaaggagaatccagcacgacgccctttttttctactaattcttctctgaatttgcctgttctagaagtaggcagaactgaaaataccatctt

SEQ ID NO: 375260 - DNA, 120 bp, Artificial Sequence
  ENSG00000142867_7 (sequence is synthesized)
ctcttcaactacacttcccagacctggggacccaggggctcctcctttgccaccagatctacagttagaagaagaaggaacttgtgcaaactctagtgagatgtttcttcccttaagatc

SEQ ID NO: 375261 - DNA, 120 bp, Artificial Sequence
  ENSG00000142867_8 (sequence is synthesized)
acgtactgtttcacgacaatgacactttattgccttttaatttttaatgatgacaaaaaatgttttaaagaatatgactttttataaaatggctgtaatcatttgtttacatttgatgca

SEQ ID NO: 375262 - DNA, 120 bp, Artificial Sequence
  ENSG00000142867_9 (sequence is synthesized)
tgtcttttaaaatgcaatgtaagcatactttgtaaataggatttttagaattaaaaaagcatacttctaggatagctaactgtaaatcatgttgatcatgtactttttagtaatttcttt

SEQ ID NO: 375263 - DNA, 120 bp, Artificial Sequence
  ENSG00000142867_10 (sequence is synthesized)
ttttcctttttaaggtctttcagtacttttttaaatattttctattttaagactgattttaatagggaatatatctctatttgagaatagacccttactaggaagaacgttttttcctca

SEQ ID NO: 375264 - DNA, 120 bp, Artificial Sequence
  ENSG00000142867_11 (sequence is synthesized)
agctgttcctgttcagtaataaaaccggtcactgatgggaaaactgccaatatagaaaaataaaaatctcttttccactccattgtcgtataggcatgtaaacagcctctttttgatact

SEQ ID NO: 375265 - DNA, 120 bp, Artificial Sequence
  ENSG00000142867_12 (sequence is synthesized)
ggaggaacacttgatggagtgtgagccacctaagatctcggtttgccaaaattcatttctaattaaccttactaattatactactttgttaggattttcacattcttggcttaatcattt

SEQ ID NO: 375266 - DNA, 120 bp, Artificial Sequence
  ENSG00000142867_13 (sequence is synthesized)
ttaggattttcacattcttggcttaatcattttcattcctaaagaaaaatatcttggcctaaacctcagttattacatgtaatttgatgaggtattttttccttttttcttttttttttt

SEQ ID NO: 375267 - DNA, 120 bp, Artificial Sequence
  ENSG00000142867_14 (sequence is synthesized)
ccaggctggagtgcagtggcgcattctaggctcactgcaacttctgcctcccatgcttacgtgatcctctcacctcagcctctcaagtaatatagctgagactacaagtgtgtgccacca

SEQ ID NO: 375268 - DNA, 74 bp, Artificial Sequence
  ENSG00000142867_15 (sequence is synthesized)
tctcaagtaatatagctgagactacaagtgtgtgccaccatgcctcactaatttttgtattatttttgtagaga

SEQ ID NO: 375269 - DNA, 120 bp, Artificial Sequence
  ENSG00000142867_16 (sequence is synthesized)
acagacacgagccacctcacctagcctgatgagatttttaaaaaatattttctctgtacttttcattctcttttaatgaggaccaatgtacagttgaaataactggaacaaattattttt

SEQ ID NO: 375270 - DNA, 120 bp, Artificial Sequence
  ENSG00000142867_17 (sequence is synthesized)
ggtgtgtgtgacaattctgtttttaatgctatttgaacaagtgggccattagccagatttgtctttttgttgtaaaacaaaatttgactaattttacatgtttataaatcttatgctctc

SEQ ID NO: 375271 - DNA, 120 bp, Artificial Sequence
  ENSG00000142867_18 (sequence is synthesized)
actgtttgtttttatttaaattacaattttatctgtttcctgacattgtctcctatatatttctattattaattgcaaaaacatagaaatggaaattttgctatcaacaataaaattttt

SEQ ID NO: 375272 - DNA, 120 bp, Artificial Sequence
  ENSG00000142867_19 (sequence is synthesized)
ttaaagtagtgagtgctattttggagttccaaattttcagtaggaagtatctaaaactttttttaatacgtgccattatctatagaaaacattacttcaggttgtgagattgagttgcat

SEQ ID NO: 375273 - DNA, 120 bp, Artificial Sequence
  ENSG00000142867_20 (sequence is synthesized)
ttctggatggactgatgaatttatccgacatgaagaagattggcatattagctttaaaaatttttaaagattggattttttttagtataagcactttctaaggattatagagaaatgttt

SEQ ID NO: 375274 - DNA, 120 bp, Artificial Sequence
  ENSG00000142867_21 (sequence is synthesized)
cacctccaatgcatagcaaaaatagtggtgttagaaagaaaataggttacatttaaggaaggtgctttaaaaagcagaagcagactttaaaattaaatttgtggacacctttttaaaaat

SEQ ID NO: 375275 - DNA, 120 bp, Artificial Sequence
  ENSG00000142867_22 (sequence is synthesized)
tgaatcaaagattataatttagatatacaataacacctatatatagataagttttaacactgagttttctttcagactgttttctaactacatagacaataaaattaagctttgcataaa

SEQ ID NO: 375276 - DNA, 120 bp, Artificial Sequence
  ENSG00000142867_23 (sequence is synthesized)
tggcaagggtcatgcatggtggaagggcagaagatggaagagcaagggagggcaagagtgtgaaagagaagaaaaaggagtcgaactcccaaaataactaacccattcccgtgataatgg

SEQ ID NO: 375277 - DNA, 120 bp, Artificial Sequence
  ENSG00000142867_24 (sequence is synthesized)
gcgcagcccgagctcccggacccggaagaagcgccatctcccgcctccaccatggagcccaccgcaccgtccctcaccgaggaggacctcactgaagtgaagaaggacgtgagtaacgca

SEQ ID NO: 375278 - DNA, 120 bp, Artificial Sequence
  ENSG00000142867_25 (sequence is synthesized)
gctgtgcccagggcgggcgggggcgggctgcagcccagcgggagacgaaagcggaagcctggagtccgaggacaaggaggatcctccaggtcggaggagcggaaagtcctagcacaggag

SEQ ID NO: 375279 - DNA, 120 bp, Artificial Sequence
  ENSG00000142867_26 (sequence is synthesized)
gactgtggcgagccctgcatccgagggaccttggtggcagtgatcctccagtgatctgtcaatccaggttttacatcgctaaacgcagagcttgggctttgttgccaagtggtgttttga

SEQ ID NO: 375280 - DNA, 120 bp, Artificial Sequence
  ENSG00000142867_27 (sequence is synthesized)
ttcttgcccactcctcacccatctcctcatgctttccccccaactgggttcttggagatgcttcgttagggactggcggctcagattcatccttaagtcaggctgcctaggctgctcact

SEQ ID NO: 375281 - DNA, 120 bp, Artificial Sequence
  ENSG00000142867_28 (sequence is synthesized)
cagcctagagcgaaggctgtaccaggtgaaggatcccaagcagtggaccaaaaatgtgaagctcttttgcataagggggcttgaggaagctcaacagctgaaagcacaacctggaattcc

SEQ ID NO: 375282 - DNA, 120 bp, Artificial Sequence
  ENSG00000142867_29 (sequence is synthesized)
cctagtaagcagacgcccacatatttaaattggggttgggggagtgaatacacgtagctgagaattaatgtacaggtaaacgtcgaaaatattcagtagctaaattatgctcttctcgga

SEQ ID NO: 375283 - DNA, 120 bp, Artificial Sequence
  ENSG00000142867_30 (sequence is synthesized)
ggtgcagaaccacataaaccttcatatttattcgtaacgaatggctttgttgagatatgacattctttttcctttgcgtttacttgttttgtcagatgagacctatatgagtatcactaa

SEQ ID NO: 375284 - DNA, 120 bp, Artificial Sequence
  ENSG00000142867_31 (sequence is synthesized)
aatactttatctgaagtcaaatgaaaaacagaaactcaacatgaaacgtgttcttattgaacactgcagtacttttacaaagtcattttgatgaactggacaggatggcaactttttaaa

SEQ ID NO: 375285 - DNA, 120 bp, Artificial Sequence
  ENSG00000142867_32 (sequence is synthesized)
tgttcatccacttcaaatcccttcctcttccctgtaaggtttattacactgtactcacaattggtgtgactcaccagcagaaggaaactggatatgactgggagttgtgcttagtttcct

SEQ ID NO: 375286 - DNA, 120 bp, Artificial Sequence
  ENSG00000142867_33 (sequence is synthesized)
cattcaacagagatttatggagcacttgctatatggaaagcactggccttgggtctggaaggatacaaaaaaatgaagatcagtttcctgctttacattctagttgagataagaatggaa

SEQ ID NO: 375287 - DNA, 120 bp, Artificial Sequence
  ENSG00000142867_34 (sequence is synthesized)
cataaataactactgtagaataaatgttgtcttattcatggtgagtgccagtaaaaccttgaacttccaagagctaggcctcctatgttccagatgctgtgtcacacagtttacaatgtt

SEQ ID NO: 375288 - DNA, 120 bp, Artificial Sequence
  ENSG00000142867_35 (sequence is synthesized)
cccacttaaccttcgcaacaacctctaaagaagataattgccattcccattttacagctaataaaacaggaactgagaaattacaagtggaaggaaataagatctgtatacaagtacaga

SEQ ID NO: 375289 - DNA, 120 bp, Artificial Sequence
  ENSG00000142867_36 (sequence is synthesized)
tgtgaagagtggcttccaggccttagaaaatttacgtgtatacctgtgtgagaaaatcatagctgagagacattttgatcatctacgtgcaaaaaaaatactcagtagagaagacactga

SEQ ID NO: 375290 - DNA, 80 bp, Artificial Sequence
  ENSG00000142871_0 (sequence is synthesized)
agaccgcgagcgagagcgcccccgagcagcgcccgcgccctccgcgccttctccgccgggacctcgagcgaaagacgccc

SEQ ID NO: 375291 - DNA, 120 bp, Artificial Sequence
  ENSG00000142871_1 (sequence is synthesized)
ccgcgccgccaccccgaccccgctgcgcacggcctgtccgctgcacaccagcttgttggcgtcttcgtcgccgcgctcgccccgggctactcctgcgcgccacaatgagctcccgcatcg

SEQ ID NO: 375292 - DNA, 120 bp, Artificial Sequence
  ENSG00000142871_2 (sequence is synthesized)
ccagggcgctcgccttagtcgtcacccttctccacttgaccaggctggcgctctccacctgccccgctgcctgccactgccccctggaggcgcccaagtgcgcgccgggagtcgggctgg

SEQ ID NO: 375293 - DNA, 120 bp, Artificial Sequence
  ENSG00000142871_3 (sequence is synthesized)
tccgggacggctgcggctgctgtaaggtctgcgccaagcagctcaacgaggactgcagcaaaacgcagccctgcgaccacaccaaggggctggaatgcaacttcggcgccagctccaccg

SEQ ID NO: 375294 - DNA, 120 bp, Artificial Sequence
  ENSG00000142871_4 (sequence is synthesized)
ctctgaaggggatctgcagagctcagtcagagggcagaccctgtgaatataactccagaatctaccaaaacggggaaagtttccagcccaactgtaaacatcagtgcacatgtattgatg

SEQ ID NO: 375295 - DNA, 120 bp, Artificial Sequence
  ENSG00000142871_5 (sequence is synthesized)
gcgccgtgggctgcattcctctgtgtccccaagaactatctctccccaacttgggctgtcccaaccctcggctggtcaaagttaccgggcagtgctgcgaggagtgggtctgtgacgagg

SEQ ID NO: 375296 - DNA, 120 bp, Artificial Sequence
  ENSG00000142871_6 (sequence is synthesized)
atagtatcaaggaccccatggaggaccaggacggcctccttggcaaggagctgggattcgatgcctccgaggtggagttgacgagaaacaatgaattgattgcagttggaaaaggcagct

SEQ ID NO: 375297 - DNA, 120 bp, Artificial Sequence
  ENSG00000142871_7 (sequence is synthesized)
cactgaagcggctccctgtttttggaatggagcctcgcatcctatacaaccctttacaaggccagaaatgtattgttcaaacaacttcatggtcccagtgctcaaagacctgtggaactg

SEQ ID NO: 375298 - DNA, 120 bp, Artificial Sequence
  ENSG00000142871_8 (sequence is synthesized)
gtatctccacacgagttaccaatgacaaccctgagtgccgccttgtgaaagaaacccggatttgtgaggtgcggccttgtggacagccagtgtacagcagcctgaaaaagggcaagaaat

SEQ ID NO: 375299 - DNA, 120 bp, Artificial Sequence
  ENSG00000142871_9 (sequence is synthesized)
ccagctgaccaggactgtgaagatgcggttccgctgcgaagatggggagacattttccaagaacgtcatgatgatccagtcctgcaaatgcaactacaactgcccgcatgccaatgaagc

SEQ ID NO: 375300 - DNA, 120 bp, Artificial Sequence
  ENSG00000142871_10 (sequence is synthesized)
agcgtttcccttctacaggctgttcaatgacattcacaaatttagggactaaatgctacctgggtttccagggcacacctagacaaacaagggagaagagtgtcagaatcagaatcatgg

SEQ ID NO: 375301 - DNA, 120 bp, Artificial Sequence
  ENSG00000142871_11 (sequence is synthesized)
agaaaatgggcgggggtggtgtgggtgatgggactcattgtagaaaggaagccttgctcattcttgaggagcattaaggtatttcgaaactgccaagggtgctggtgcggatggacacta

SEQ ID NO: 375302 - DNA, 120 bp, Artificial Sequence
  ENSG00000142871_12 (sequence is synthesized)
atgcagccacgattggagaatactttgcttcatagtattggagcacatgttactgcttcattttggagcttgtggagttgatgactttctgttttctgtttgtaaattatttgctaagca

SEQ ID NO: 375303 - DNA, 120 bp, Artificial Sequence
  ENSG00000142871_13 (sequence is synthesized)
tattttctctaggcttttttccttttggggttctacagtcgtaaaagagataataagattagttggacagtttaaagcttttattcgtcctttgacaaaagtaaatgggagggcattcca

SEQ ID NO: 375304 - DNA, 120 bp, Artificial Sequence
  ENSG00000142871_14 (sequence is synthesized)
tcccttcctgaagggggacactccatgagtgtctgtgagaggcagctatctgcactctaaactgcaaacagaaatcaggtgttttaagactgaatgttttatttatcaaaatgtagcttt

SEQ ID NO: 375305 - DNA, 120 bp, Artificial Sequence
  ENSG00000142871_15 (sequence is synthesized)
tggggagggaggggaaatgtaatactggaataatttgtaaatgattttaattttatattcagtgaaaagattttatttatggaattaaccatttaataaagaaatatttacctaatatct

SEQ ID NO: 375306 - DNA, 120 bp, Artificial Sequence
  ENSG00000142871_16 (sequence is synthesized)
gagtgtatgccattcggtatttttagaggtgctccaaagtcattaggaacaacctagctcacgtactcaattattcaaacaggacttattgggatacagcagtgaattaagctattaaaa

SEQ ID NO: 375307 - DNA, 120 bp, Artificial Sequence
  ENSG00000142871_17 (sequence is synthesized)
taagataatgattgcttttataccttcagtagagaaaagtctttgcatataaagtaatgtttaaaaaacatgtattgaacacgacattgtatgaagcacaataaagattctgaagctaaa

SEQ ID NO: 375308 - DNA, 120 bp, Artificial Sequence
  ENSG00000142871_18 (sequence is synthesized)
gtgtcgggacctcttggtgggagcagccttccgaggtggccgggctggacgagatcagaggctccccgtcgatagggtcggagacccccgtccctcactgcggcagccgcggcgcccctc

SEQ ID NO: 375309 - DNA, 120 bp, Artificial Sequence
  ENSG00000142875_0 (sequence is synthesized)
acatgcatagctcttagcttctgtgtaagaagttgtgagctccttctggaaacatttgcagttacattaagtaaagtgtaaatgcacatgaatggcagcttatagagaaccaccttgtaa

SEQ ID NO: 375310 - DNA, 120 bp, Artificial Sequence
  ENSG00000142875_1 (sequence is synthesized)
ccagtatacaggtacaactacagctcttcagaaattggaaggttttgctagccggttatttcatagacactctaaaggtactgcacatgatcagaaaacagctctggaaaatgacagcct

SEQ ID NO: 375311 - DNA, 120 bp, Artificial Sequence
  ENSG00000142875_2 (sequence is synthesized)
tcatttctctgaacatactgccttatgggacagatcaatgaaagagtttctagccaaagccaaagaagactttttgaaaaaatgggagaatccaactcagaataatgccggacttgaaga

SEQ ID NO: 375312 - DNA, 120 bp, Artificial Sequence
  ENSG00000142875_3 (sequence is synthesized)
ttttgaaaggaaaaaaacccttggaacaggttcatttggaagagtcatgttggtaaaacacaaagccactgaacagtattatgccatgaagatcttagataagcagaaggttgttaaact

SEQ ID NO: 375313 - DNA, 120 bp, Artificial Sequence
  ENSG00000142875_4 (sequence is synthesized)
gaagcaaatagagcatactttgaatgagaaaagaatattacaggcagtgaattttcctttccttgttcgactggagtatgcttttaaggataattctaatttatacatggttatggaata

SEQ ID NO: 375314 - DNA, 120 bp, Artificial Sequence
  ENSG00000142875_5 (sequence is synthesized)
tgtccctgggggtgaaatgttttcacatctaagaagaattggaaggttcagtgagccccatgcacggttctatgcagctcagatagtgctaacattcgagtacctccattcactagacct

SEQ ID NO: 375315 - DNA, 120 bp, Artificial Sequence
  ENSG00000142875_6 (sequence is synthesized)
catctacagagatctaaaacctgaaaatctcttaattgaccatcaaggctatatccaggtcacagactttgggtttgccaaaagagttaaaggcagaacttggacattatgtggaactcc

SEQ ID NO: 375316 - DNA, 120 bp, Artificial Sequence
  ENSG00000142875_7 (sequence is synthesized)
agagtatttggctccagaaataattctcagcaagggctacaataaggcagtggattggtgggcattaggagtgctaatctatgaaatggcagctggctatcccccattctttgcagacca

SEQ ID NO: 375317 - DNA, 120 bp, Artificial Sequence
  ENSG00000142875_8 (sequence is synthesized)
accaattcagatttatgaaaagattgtttctggaaaggtccgattcccatcccacttcagttcagatctcaaggaccttctacggaacctgctgcaggtggatttgaccaagagatttgg

SEQ ID NO: 375318 - DNA, 120 bp, Artificial Sequence
  ENSG00000142875_9 (sequence is synthesized)
aaatctaaagaatggtgtcagtgatataaaaactcacaagtggtttgccacgacagattggattgctatttaccagaggaaggttgaagctccattcataccaaagtttagaggctctgg

SEQ ID NO: 375319 - DNA, 120 bp, Artificial Sequence
  ENSG00000142875_10 (sequence is synthesized)
agataccagcaactttgatgactatgaagaagaagatatccgtgtctctataacagaaaaatgtgcaaaagaatttggtgaattttaaagaggaacaagatgacatctgagctcacactc

SEQ ID NO: 375320 - DNA, 120 bp, Artificial Sequence
  ENSG00000142875_11 (sequence is synthesized)
agtgtttgcactctgttgagagataaggtagagctgagaccgtccttgttgaagcagttacctagttccttcattccaacgactgagtgaggtctttattgccatcatcccgtgtgcgca

SEQ ID NO: 375321 - DNA, 120 bp, Artificial Sequence
  ENSG00000142875_12 (sequence is synthesized)
ctctgcatccacctatgtaacaaggcaccgctaagcaagcattgtctgtgccataacacagtactagaccactttcttacttctctttgggttgtctttctcctctcctatatccatttc

SEQ ID NO: 375322 - DNA, 120 bp, Artificial Sequence
  ENSG00000142875_13 (sequence is synthesized)
ttccttttccaatttcattggttttctctaaacagtgctccattttattttgttggtgtttcagatgggcagtgttatggctacgtgatatttgaagggaaggataagtgttgctttcag

SEQ ID NO: 375323 - DNA, 120 bp, Artificial Sequence
  ENSG00000142875_14 (sequence is synthesized)
tagttattgccaatattgttgttggtcaatggcttgaagataaactttctaataattattatttctttgagtagctcagacttggttttgccaaaactcttggtaatttttgaagataga

SEQ ID NO: 375324 - DNA, 120 bp, Artificial Sequence
  ENSG00000142875_15 (sequence is synthesized)
ctgtcttatcaccaaggaaatttatacaaattaagactaactttcttggaattcactattctggcaataaattttggtagactaatacagtacagctagacccagaaatttggaaggctg

SEQ ID NO: 375325 - DNA, 120 bp, Artificial Sequence
  ENSG00000142875_16 (sequence is synthesized)
tagatcagaggttctagttccctttccctccttttatatcctcctctccttgagtaatgaagtgaccagcctgtgtagtgtgacaaacgtgtctcattcagcaggaaaaactaatgatat

SEQ ID NO: 375326 - DNA, 120 bp, Artificial Sequence
  ENSG00000142875_17 (sequence is synthesized)
ggatcatcacccagattctctcacttggtaccagcatttctgtaggtattagagaagagttctaagttttctaaaccttaactgttccttaaggattttagccagtattttaatagaaca

SEQ ID NO: 375327 - DNA, 120 bp, Artificial Sequence
  ENSG00000142875_18 (sequence is synthesized)
cctcatcataaactttttaaaggaaaataagcaaactaaaaagaacattggtttagataaatacttatactttgcaaagtcaaaaatggcttgatttttggaaacaatatagaggtattc

SEQ ID NO: 375328 - DNA, 120 bp, Artificial Sequence
  ENSG00000142875_19 (sequence is synthesized)
atatttaaatgagggtttacatttgttttgttttgtaaccgttaaaaagaagttgtttccagctaattattgtggtgtactatatttgtgagcctagggtaggggcactgctgcaacttc

SEQ ID NO: 375329 - DNA, 120 bp, Artificial Sequence
  ENSG00000142875_20 (sequence is synthesized)
tgctttcatcccatgcctcatcaatgaggaaagggaacaaagtgtataaaactgccacaattgtattttaattttgaggtatgatattttcagatatttcataatttctaacctctgttc

SEQ ID NO: 375330 - DNA, 120 bp, Artificial Sequence
  ENSG00000142875_21 (sequence is synthesized)
tctcagtaaacagaatgtctgatcgatcatgcagatacaatgttggtatttgagaggttagtttttttcctacacttttttttgccaactgacttaacaacattgctgtcaggtggaaat

SEQ ID NO: 375331 - DNA, 120 bp, Artificial Sequence
  ENSG00000142875_22 (sequence is synthesized)
ttcaagcacttttgcacatttagttcagtgtttgttgagaatccatggcttaacccacttgttttgctatttttttctttgcttttaattttccccatctgattttatctctgcgtttca

SEQ ID NO: 375332 - DNA, 120 bp, Artificial Sequence
  ENSG00000142875_23 (sequence is synthesized)
gtgacctaccttaaaacaacacacgagaagagttaaactgggttcattttaatgatcaatttacctgcatataaaatttatttttaatcaagctgatcttaatgtatataatcattctat

SEQ ID NO: 375333 - DNA, 120 bp, Artificial Sequence
  ENSG00000142875_24 (sequence is synthesized)
ttgctttattatcggtgcaggtaggtcattaacaccacttcttttcatctgtaccacaccctggtgaaacctttgaagacataaaaaaaacctgtctgagatgttctttctaccaatcta

SEQ ID NO: 375334 - DNA, 120 bp, Artificial Sequence
  ENSG00000142875_25 (sequence is synthesized)
tatgtctttcggttatcaagtgtttctgcatggtaatgtcatgtaaatgctgatattgatttcactggtccatctatatttaaaacgtgcaagaaaaaaataaaatactctgctctagca

SEQ ID NO: 375335 - DNA, 120 bp, Artificial Sequence
  ENSG00000142875_26 (sequence is synthesized)
agttttgtgtaacaaaggcatatcgtcatgttaataaatttaaaacatcattcgtataaaatattttaattttcttgtatttcatttagacccaagaacatgctgaccaatgtgttctat

SEQ ID NO: 375336 - DNA, 120 bp, Artificial Sequence
  ENSG00000142875_27 (sequence is synthesized)
atgtaaactacaaattctatggtagctttgttgtatattattgtaaaattattttaataagtcatggggatgacaatttgattattacaatttagttttcagtaatcaaaaagatttcta

SEQ ID NO: 375337 - DNA, 120 bp, Artificial Sequence
  ENSG00000142875_28 (sequence is synthesized)
tgaattctaaaaaatatttttttctatgaaattactagtgcccagctgtagaatctaccttaggtagatgatccctagacatacgttggttttgagggctattcagccattccattttac

SEQ ID NO: 375338 - DNA, 120 bp, Artificial Sequence
  ENSG00000142875_29 (sequence is synthesized)
tctctatttaaaggccgtgagcaagcttgtcatgagcaaatatgtcaagggagtcaatttctgaccaatcaagtacactaaattagaatatttttaaagtatgtaacattcccagtttca

SEQ ID NO: 375339 - DNA, 120 bp, Artificial Sequence
  ENSG00000142875_30 (sequence is synthesized)
gccacaatttagccaagaataagataaaaacttgaataagaagtaagtagcataaatcagtatttaacctaaaattacatatttgaaacagaagatattatgttatgctcagtaaataat

SEQ ID NO: 375340 - DNA, 120 bp, Artificial Sequence
  ENSG00000142875_31 (sequence is synthesized)
taagagatggcattgtgtaagaaggagccctagactgaaagtcaagacatctgaatttcaggctggaaaactatcagtatgatctcagcctcagttctcttgtctgtaaaatggaagaac

SEQ ID NO: 375341 - DNA, 120 bp, Artificial Sequence
  ENSG00000142875_32 (sequence is synthesized)
tggattaggcagtttgtaagattcctcctaactttcacagtcgatgacaagattgtctttttatctgatattttgaagggtatattgctttgaagtaagtctcaataaggcaatatattt

SEQ ID NO: 375342 - DNA, 120 bp, Artificial Sequence
  ENSG00000142875_33 (sequence is synthesized)
tagggcatctttcttcttatctctgacagtgttcttaaaattatttgaatatcataagagccttggtgtctgtcctaattcctttctcactcaccgatgctgaatacccagttgaatcaa

SEQ ID NO: 375343 - DNA, 120 bp, Artificial Sequence
  ENSG00000142875_34 (sequence is synthesized)
actgtcaacctaccaaaaacgatattgtggcttatgggtattgctgtctcattcttggtatattcttgtgttaactgcccattggcctgaaaatactcattgtaagcctgaaaaaaaaaa

SEQ ID NO: 375344 - DNA, 120 bp, Artificial Sequence
  ENSG00000142875_35 (sequence is synthesized)
tctttcccactgttttttctgcttgttgtaagaatcaaatgaaataatgtatgtgaaagcaccttgtaaactgtaacctatcaatgtaaaatgttaaggtgtgttgttatttcattaatt

SEQ ID NO: 375345 - DNA, 120 bp, Artificial Sequence
  ENSG00000142875_36 (sequence is synthesized)
acttctttgtttagaatggaatttcctatgcactactgtagctaggaaatgctgaaaacaactgtgttttttaattaatcaataactgcaaaattaaagtaccttcaatggataagacaa

SEQ ID NO: 375346 - DNA, 120 bp, Artificial Sequence
  ENSG00000142875_37 (sequence is synthesized)
attctgctgtttgctccttgccaggttcaacatgggattgtcacgcaaatcatcagatgcatctgcttgctcctcttcagaaatatctgtgaaagagtttctagccaaagccaaagaaga

SEQ ID NO: 375347 - DNA, 120 bp, Artificial Sequence
  ENSG00000142875_38 (sequence is synthesized)
gtctgcccgccgccgccactgctgctgccaccgccgtcgccgccgccgccgccgccgccgctgctgctgccggtgctaaggagttcgctggagccctttcctcagacccggcccggtctt

SEQ ID NO: 375348 - DNA, 120 bp, Artificial Sequence
  ENSG00000142875_39 (sequence is synthesized)
cgcgcccggactcctggcgccagcgctaggcgcactcaccgctctgacgggtgcagacgcgggagttgtcccagactgtggagtggcgggcacggccccagccccccttcccttccctga

SEQ ID NO: 375349 - DNA, 120 bp, Artificial Sequence
  ENSG00000142875_40 (sequence is synthesized)
attctgctgtttgctccttgccaggttcaacatgggattgtcacgcaaatcatcagatgcatctgcttgctcctcttcagaaatatctgattttgtgaaagagtttctagccaaagccaa

SEQ ID NO: 375350 - DNA, 120 bp, Artificial Sequence
  ENSG00000142875_41 (sequence is synthesized)
attctgctgtttgctccttgccaggttcaacatgggattgtcacgcaaatcatcagatgcatctgcttgctcctcttcagaaatatctgattcctttgtgaaagagtttctagccaaagc

SEQ ID NO: 375351 - DNA, 120 bp, Artificial Sequence
  ENSG00000142875_42 (sequence is synthesized)
gtgtttacaccatcggttcttctccctctagagattagcataactccctttgctgttggattgttattttgagcaatatgttttggaaaggttggttttcatcatgagtgcttgctcctc

SEQ ID NO: 375352 - DNA, 120 bp, Artificial Sequence
  ENSG00000142875_43 (sequence is synthesized)
acattttctccctgccattttgagttgttctagtggtatatgaaggaggctgggataactagcttgaaagaaattcagtctagttatagacatctttggcattaatctgatgtttactag

SEQ ID NO: 375353 - DNA, 120 bp, Artificial Sequence
  ENSG00000142875_44 (sequence is synthesized)
tgatatctcatgctaggcagttatgctttgcttctaggggcttctctttttaaaacaaaagaaagctcttttcgttttctgtgtgctgcatgctccagtgtgtgtgtttacaccatcggt

SEQ ID NO: 375354 - DNA, 120 bp, Artificial Sequence
  ENSG00000142875_45 (sequence is synthesized)
tcttctccctctagagattagcataactccctttgctgttggattgttattttgagcaatatgttttggaaaggttggttttcatcatgagtgcacgcaaatcatcagatgcatctgctt

SEQ ID NO: 375355 - DNA, 120 bp, Artificial Sequence
  ENSG00000142875_46 (sequence is synthesized)
tattactgatggcctttttacagtcactattttgtcctaaattaatttctgactttcttacattactttctagtatgttttcaggaacagaatttttgttatgacatttgaaattatcaa

SEQ ID NO: 375356 - DNA, 120 bp, Artificial Sequence
  ENSG00000142875_47 (sequence is synthesized)
agtggtttctttatagaacaatattagagaatcttagagatttgagaaggttcttagagatactaaatagctctttaatgtatcatggtgataaatatacattttatcacaatagatgac

SEQ ID NO: 375357 - DNA, 120 bp, Artificial Sequence
  ENSG00000142875_48 (sequence is synthesized)
gaaaagattgtttctggaaagcagaacttttgatatgaacaaaacaaaactttgagaaaaattaacagacaaggcagtgatttatttttgaagaatttgagaagtgtagactctcaagag

SEQ ID NO: 375358 - DNA, 120 bp, Artificial Sequence
  ENSG00000142875_49 (sequence is synthesized)
gactaaaggtcatatgaagaatgatgagagaaccaaaatacattaaaatcacaaatggaagaagaatattttactaatacaaaaactaagaatgtaaatgttataataattgtttcaaat

SEQ ID NO: 375359 - DNA, 120 bp, Artificial Sequence
  ENSG00000142875_50 (sequence is synthesized)
agaaaaactgctttagttaaaattaatgtgtcttcatttttatgcattggcctcgatttgccaatcattctctattggttaaattttatattcagctgtttatgaatatatattcatttt

SEQ ID NO: 375360 - DNA, 120 bp, Artificial Sequence
  ENSG00000142875_51 (sequence is synthesized)
atatcaaactttaaaattttgtatctaataatcagcatatattctaaaatcataacagtctaaatcctgggcaccttagaagaatgacaccagaaaaccttattatatcacaatattctg

SEQ ID NO: 375361 - DNA, 120 bp, Artificial Sequence
  ENSG00000142875_52 (sequence is synthesized)
ttttccccttcatttatttagaaatatgacaggatatttggtgtacttttgttttttaactaaaagtaccagattatctctccccatgtgggatataaaattatccccatctcttactcc

SEQ ID NO: 375362 - DNA, 120 bp, Artificial Sequence
  ENSG00000142875_53 (sequence is synthesized)
ctttactcatctaaagtagaagtcatgaaagtggaatttttgccattaaaaggctctgtattatgtgaagttagattgtattaaccatttcccaataaatcatctgtttcaaaactcaaa

SEQ ID NO: 375363 - DNA, 120 bp, Artificial Sequence
  ENSG00000142875_54 (sequence is synthesized)
aatatcagtgaggtccacagctagcagtaagagctggtgtaattgaaagacgtttaggtgcaatcattctgctgtttgctccttgccaggttcaacatgggattgttgaaagagtttcta

SEQ ID NO: 375364 - DNA, 120 bp, Artificial Sequence
  ENSG00000142875_55 (sequence is synthesized)
ttcacattgcaaaaatattattgtctctctggttagtggctaaaagccaaattggaaactaactagttttttaaattttttaaattgtgcaaattattaaaaatccaatttggtcttata

SEQ ID NO: 375365 - DNA, 120 bp, Artificial Sequence
  ENSG00000142875_56 (sequence is synthesized)
accatcggttcttctccctctagagattagcataactccctttgctgttggattgttattttgagcaatatgttttggaaaggttggttttcatcatgagtgtgaaagagtttctagcca

SEQ ID NO: 375366 - DNA, 120 bp, Artificial Sequence
  ENSG00000142892_0 (sequence is synthesized)
aggtgcgggaagtctgaagccggtaaacatggccgtcaccgacagcctcagccgggctgcgactgtcttggcaactgtgttgctcttgtccttcggcagcgtggccgctagtcatatcga

SEQ ID NO: 375367 - DNA, 120 bp, Artificial Sequence
  ENSG00000142892_1 (sequence is synthesized)
ggatcaagcagaacaattctttagaagtggccatacaaacaactgggctgttctggtgtgtacatcccgattctggtttaattatcgacatgttgcaaataccctttctgtttatagaag

SEQ ID NO: 375368 - DNA, 120 bp, Artificial Sequence
  ENSG00000142892_2 (sequence is synthesized)
tgtcaagaggctaggtattcctgacagtcacattgtcctaatgcttgcagatgatatggcctgtaatcctagaaatcccaaaccagctacagtgtttagtcacaagaatatggaactaaa

SEQ ID NO: 375369 - DNA, 120 bp, Artificial Sequence
  ENSG00000142892_3 (sequence is synthesized)
tgtgtatggagatgatgtggaagtggattatagaagttacgaggtaactgtggagaattttttacgggtattaactgggaggatcccacctagtactcctcggtcaaaacgtcttctttc

SEQ ID NO: 375370 - DNA, 120 bp, Artificial Sequence
  ENSG00000142892_4 (sequence is synthesized)
tgatgacagaagcaatattctaatttatatgacagggcatggtggaaatggtttcttaaaatttcaagattctgaagaaattaccaacatagaactcgcggatgcttttgaacaaatgtg

SEQ ID NO: 375371 - DNA, 120 bp, Artificial Sequence
  ENSG00000142892_5 (sequence is synthesized)
gcagaaaagacgctacaatgagctactgtttattattgatacttgccaaggagcatccatgtatgaacgattttattctcctaacataatggctctagctagtagtcaagtgggagaaga

SEQ ID NO: 375372 - DNA, 120 bp, Artificial Sequence
  ENSG00000142892_6 (sequence is synthesized)
ttcactctcgcatcaacctgatcctgcaattggagtccatcttatggatagatacacattttatgtcttggaatttttggaagaaattaacccagctagccaaactaatatgaatgacct

SEQ ID NO: 375373 - DNA, 120 bp, Artificial Sequence
  ENSG00000142892_7 (sequence is synthesized)
ttttcaggtatgtcccaaaagtctgtgtgtgtctactcctggacatcgcactgatctttttcagagggatcctaaaaatgtactgataactgatttctttggaagtgtacggaaagtgga

SEQ ID NO: 375374 - DNA, 120 bp, Artificial Sequence
  ENSG00000142892_8 (sequence is synthesized)
aattacaacagagactattaaattgcaacaggattcagaaatcatggaaagcagctataaggaagaccagatggatgagaaactaatggaacctctgaaatatgctgaacaacttcctgt

SEQ ID NO: 375375 - DNA, 120 bp, Artificial Sequence
  ENSG00000142892_9 (sequence is synthesized)
agctcagataatacaccagaaaccgaagctgaaagactggcatcctcctgggggctttattctgggattatgggcacttattatcatggttttcttcaaaacttatggaattaagcatat

SEQ ID NO: 375376 - DNA, 120 bp, Artificial Sequence
  ENSG00000142892_10 (sequence is synthesized)
gaagttcattttttagacttgatgatgaatgaagaatgcatggaggactgcaaacttggataataatttatgtcattatatatttttaaaaatgtgtttctcttgtatgaattggaaata

SEQ ID NO: 375377 - DNA, 120 bp, Artificial Sequence
  ENSG00000142892_11 (sequence is synthesized)
agtataaggaaactaaatttgaatcaactattaattttataacttaaagaaaaataattgttaatgcaactgcttaatggcactaaatatattccagttttgtattttgtgtattataaa

SEQ ID NO: 375378 - DNA, 120 bp, Artificial Sequence
  ENSG00000142892_12 (sequence is synthesized)
agcgaatgagacagagatcagaatacattgactgtttttgaaaatagtaatttccccttatccccttttcatttggaaaagaaacaattgtgaagacattaaattctcactaacagaagt

SEQ ID NO: 375379 - DNA, 120 bp, Artificial Sequence
  ENSG00000142892_13 (sequence is synthesized)
aactttggttaattattttttgtatatcctcccaatcttttgacttatgcacatattttttcccaatatggagatcatatggaatgtactattttgtaatgtcttttttcattttacaat

SEQ ID NO: 375380 - DNA, 120 bp, Artificial Sequence
  ENSG00000142892_14 (sequence is synthesized)
gtattatcaaccttttccctctcaaaaatacattgtgaatgactgcatagtattcactttatgaatatttaattcatttcacagtcttctattgttggaccacttacattgtaccaaatg

SEQ ID NO: 375381 - DNA, 120 bp, Artificial Sequence
  ENSG00000142892_15 (sequence is synthesized)
ttttcctttggtttattctttaatgtattaatattttactgctggtcactcatggaatcctgcagctttaattaaaagcaaagatgaaaaattggttttttaatctatggcactgacaat

SEQ ID NO: 375382 - DNA, 120 bp, Artificial Sequence
  ENSG00000142892_16 (sequence is synthesized)
ctccaggaccttatatgtttgttgtcagtttatttgggaaattttagacctttgataatttcacgtactgactgctcaagagaaacataccccattgtttttcatttgtaagcgttctgt

SEQ ID NO: 375383 - DNA, 120 bp, Artificial Sequence
  ENSG00000142892_17 (sequence is synthesized)
gatcttctacaattggtcacgtcctcttcattttccatcttgaaagagagagccaacaaggactttatttcattctgttttaggtaaacctccttgcccactggctgtatctatactttc

SEQ ID NO: 375384 - DNA, 120 bp, Artificial Sequence
  ENSG00000142892_18 (sequence is synthesized)
cttgagaaaaatcccataaagtggatggacctgtgaagaaaatgtatgcttatggcctagccttcatgtctggctgatgtatcctataaggcagtaagccccttttctagtctctggtaa

SEQ ID NO: 375385 - DNA, 120 bp, Artificial Sequence
  ENSG00000142892_19 (sequence is synthesized)
gaaataatattgagactgtgctatgaccaacccctgatgttgttttttcttttcaaacttttgcatatgagtagaggaaaagcctaaaagttaagtatttatgtctggggggataccttc

SEQ ID NO: 375386 - DNA, 120 bp, Artificial Sequence
  ENSG00000142892_20 (sequence is synthesized)
aggtgtcttatctgttttatgcaagaatttatgtgttcatctttattcagtgcaaagatttttttttaaattttgtttataattgtaggtaacattaagacaactcttcctccacaagaa

SEQ ID NO: 375387 - DNA, 120 bp, Artificial Sequence
  ENSG00000142892_21 (sequence is synthesized)
aacctcctaaaattaatattccttaagatttgtttttccttttgcacttataatattaccttttaattgcatgcaagattgtcatacttttcaaaaggcaaaggattgactgtgttatct

SEQ ID NO: 375388 - DNA, 120 bp, Artificial Sequence
  ENSG00000142892_22 (sequence is synthesized)
ccctagttagaacaaatgatattgaggctttttgccagctctgaatctttattttaattgatctttttattgatgtgttatataaatgaggaagaaaaattttgtctgattatgtgaagg

SEQ ID NO: 375389 - DNA, 120 bp, Artificial Sequence
  ENSG00000142892_23 (sequence is synthesized)
atctttctgtacatgaaaagaagggaaaataaacttgcaattgaatagactgattatagtagcactgagacacaaaaagattgaccatgttgccctccagacactcatacaaggtcgtgg

SEQ ID NO: 375390 - DNA, 120 bp, Artificial Sequence
  ENSG00000142892_24 (sequence is synthesized)
acaccacggtgaggcggagctatttagggtggtaaaggaattatgattgttcttgagccaaagtaatttagtttgaatataatgaaacataccctgtaaagactgctagaaagtaaaagg

SEQ ID NO: 375391 - DNA, 120 bp, Artificial Sequence
  ENSG00000142892_25 (sequence is synthesized)
attcgtcttcagaggttgtagaaggtgcccttcttagttaaaaccaaactgggaaaagtaatactggataaaatattcaggataaattttgcctcagcagaatttcaaagggcagttgtt

SEQ ID NO: 375392 - DNA, 120 bp, Artificial Sequence
  ENSG00000142892_26 (sequence is synthesized)
cctctgtttcattattgaatcttcagaatatagttaaagccaaaagcttaaaatatgttaaatgtttcacttataaccataatctttttacatagagcatactctgccttcataataact

SEQ ID NO: 375393 - DNA, 120 bp, Artificial Sequence
  ENSG00000142892_27 (sequence is synthesized)
aaatcctctgcatgtggtagatgagtacgtttaggaaatattgtcagtgcaattaaatggcctacactttaaacagtatcataaaaacaaatccttaaatatattctacttgagtcacaa

SEQ ID NO: 375394 - DNA, 120 bp, Artificial Sequence
  ENSG00000142892_28 (sequence is synthesized)
aagctgaacaacagaaaggtgttttgtttttgcctttctcacagtgttgtggtgagaatcagatgagatagtattttgactaaacacttctgaaattgtaaatatatggtggcattattg

SEQ ID NO: 375395 - DNA, 120 bp, Artificial Sequence
  ENSG00000142892_29 (sequence is synthesized)
ttcttatgtcggcttaggaggataccaaaggggaagttaatggtcacagtgcacttatgtagctttctaagctactcaatgtgattcttgttctctttgctgttctttttctcctccccc

SEQ ID NO: 375396 - DNA, 120 bp, Artificial Sequence
  ENSG00000142892_30 (sequence is synthesized)
atggtgtccttcagagagaaaaggaatgtagataaatgaatccctgcagatgtgtcctgacatttcagggagggacagggtataatgatgccatcctgcaaaggcagcctgtgtgagaaa

SEQ ID NO: 375397 - DNA, 120 bp, Artificial Sequence
  ENSG00000142892_31 (sequence is synthesized)
aagaaatcaaataatgtggattttaaaattacgaaagacattcatttgcagtttatgaaaggaaaatgtagtttggatacaaagctgattaaattggatcaagaaatattagaattaaat

SEQ ID NO: 375398 - DNA, 120 bp, Artificial Sequence
  ENSG00000142892_32 (sequence is synthesized)
gcaaaaaataatccatgcatttatggttttgatttttatatattcccagctagttgaaaatgatgattcccacaagaagcataactcagcttgtttctgcttactgagtattttctacta

SEQ ID NO: 375399 - DNA, 120 bp, Artificial Sequence
  ENSG00000142892_33 (sequence is synthesized)
tggtatatattgataacatttcttccattatgtatgttgtataccagagttacagttactgtgggaatcataatttgaaattttgactcctgtgtttctggaatctttacaacaaatgtt

SEQ ID NO: 375400 - DNA, 120 bp, Artificial Sequence
  ENSG00000142892_34 (sequence is synthesized)
gcattaacatataacttttttcagttgactttaccaaaattaagcccatctttagtagatactgttttaacatgtgaaagaaatacgttataaacataccacaagatatggctataaaac

SEQ ID NO: 375401 - DNA, 120 bp, Artificial Sequence
  ENSG00000142892_35 (sequence is synthesized)
aatgagatcagtatccatttttgctttaaagaattggccttattgcttcagtgtcacatctcatactcaagggcatttactacaaagaaagagttctccaatattgctgttctgttgctg

SEQ ID NO: 375402 - DNA, 120 bp, Artificial Sequence
  ENSG00000142892_36 (sequence is synthesized)
cctgccctatttacacatgtacctgctacttaaataggaaagcctttcaattcatggacaatacaccttggtggtaaccaggcttttatttttatttttttttcttagtgtaaaaactgt

SEQ ID NO: 375403 - DNA, 120 bp, Artificial Sequence
  ENSG00000142892_37 (sequence is synthesized)
actgttttggaaatgtgctgtgaaatattaggtttaactgtgtagatcctagaataaggggatttatatagatgaagttgtaaccaagaaactggttattaaaaatttatttactccaaa

SEQ ID NO: 375404 - DNA, 120 bp, Artificial Sequence
  ENSG00000142892_38 (sequence is synthesized)
acagagactattaaattgcaacaggattcagaaatcatggaaagcaggtattcatcttaaaccattatttgaatagaatactagtctcacagtttgtacatttttttgaaacattgtatt

SEQ ID NO: 375405 - DNA, 120 bp, Artificial Sequence
  ENSG00000142892_39 (sequence is synthesized)
aagaggcaaaagttggtgtttgtaaataaaattacacatttatacccagtcttcactttatgtaggctgtatgcttttcagatttatatgtaaaaactatcaatattagtggaaactaag

SEQ ID NO: 375406 - DNA, 120 bp, Artificial Sequence
  ENSG00000142892_40 (sequence is synthesized)
atcatcgttaggattatgttggagctccaaaagacaatcttgctagtggttcagtttgatacttgccacaaaggcctaaaacttttcccataactggctatcccagcgccataattttct

SEQ ID NO: 375407 - DNA, 120 bp, Artificial Sequence
  ENSG00000142892_41 (sequence is synthesized)
gttaggcctcctggtaacattagggaaaggaatgagaagtgtaaaccaggtactgccttggggagtgaattgtatgtgagtgagcagtgagtgagtacagacatttgtaagagagaggaa

SEQ ID NO: 375408 - DNA, 120 bp, Artificial Sequence
  ENSG00000142892_42 (sequence is synthesized)
gttgggagacattggttcactttgggtatgtgaattttagaaatacttataatttgttttattttctctgtaaccatttttaaaggtaaaatactttattagaaataaataatgggtcag

SEQ ID NO: 375409 - DNA, 120 bp, Artificial Sequence
  ENSG00000142892_43 (sequence is synthesized)
tcaatagctactttcttgaaatatataatggcatatgttgttagccatgaaactttgttatttgtgattatctgttgctatctattagaaactcatactatagggaacttttttggattg

SEQ ID NO: 375410 - DNA, 120 bp, Artificial Sequence
  ENSG00000142892_44 (sequence is synthesized)
aaaaatggcaatatatacaattacagcaattttcaaaatttcaaagatttgtaattgagcttatgaatgttgtaggaataaattcaaacactggcacaagatgcttttctttgattctag

SEQ ID NO: 375411 - DNA, 120 bp, Artificial Sequence
  ENSG00000142892_45 (sequence is synthesized)
ttacaacagtttctttttttttaattgatgtataatatttgtacatatttttggggtacatgtgatattttgatacctgtgtacagtgtttaatgattaaatcagggtaactggaatatc

SEQ ID NO: 375412 - DNA, 120 bp, Artificial Sequence
  ENSG00000142910_0 (sequence is synthesized)
gactttgagcgtccggcggtcgcagagccaggaggcggaggcgcgcgggccagcctgggccccagcccacaccttcaccagggcccaggagccaccatgtggcgatgtccactggggcta

SEQ ID NO: 375413 - DNA, 120 bp, Artificial Sequence
  ENSG00000142910_1 (sequence is synthesized)
ctgctgttgctgccgctggctggccacttggctctgggtgcccagcagggtcgtgggcgccgggagctagcaccgggtctgcacctgcggggcatccgggacgcgggaggccggtactgc

SEQ ID NO: 375414 - DNA, 120 bp, Artificial Sequence
  ENSG00000142910_2 (sequence is synthesized)
caggagcaggacctgtgctgccgcggccgtgccgacgactgtgccctgccctacctgggcgccatctgttactgtgacctcttctgcaaccgcacggtctccgactgctgccctgacttc

SEQ ID NO: 375415 - DNA, 120 bp, Artificial Sequence
  ENSG00000142910_3 (sequence is synthesized)
tgggacttctgcctcggcgtgccacccccttttcccccgatccaaggatgtatgcatggaggtcgtatctatccagtcttgggaacgtactgggacaactgtaaccgttgcacctgccag

SEQ ID NO: 375416 - DNA, 120 bp, Artificial Sequence
  ENSG00000142910_4 (sequence is synthesized)
gagaacaggcagtggcagtgtgaccaagaaccatgcctggtggatccagacatgatcaaagccatcaaccagggcaactatggctggcaggctgggaaccacagcgccttctggggcatg

SEQ ID NO: 375417 - DNA, 120 bp, Artificial Sequence
  ENSG00000142910_5 (sequence is synthesized)
accctggatgagggcattcgctaccgcctgggcaccatccgcccatcttcctcggtcatgaacatgcatgaaatttatacagtgctgaacccaggggaggtgcttcccacagccttcgag

SEQ ID NO: 375418 - DNA, 120 bp, Artificial Sequence
  ENSG00000142910_6 (sequence is synthesized)
gcctctgagaagtggcccaacctgattcatgagcctcttgaccaaggcaactgtgcaggctcctgggccttctccacagcagctgtggcatccgatcgtgtctcaatccattctctggga

SEQ ID NO: 375419 - DNA, 120 bp, Artificial Sequence
  ENSG00000142910_7 (sequence is synthesized)
cacatgacgcctgtcctgtcgccccagaacctgctgtcttgtgacacccaccagcagcagggctgccgcggtgggcgtctcgatggtgcctggtggttcctgcgtcgccgaggggtggtg

SEQ ID NO: 375420 - DNA, 120 bp, Artificial Sequence
  ENSG00000142910_8 (sequence is synthesized)
tctgaccactgctaccccttctcgggccgtgaacgagacgaggctggccctgcgcccccctgtatgatgcacagccgagccatgggtcggggcaagcgccaggccactgcccactgcccc

SEQ ID NO: 375421 - DNA, 120 bp, Artificial Sequence
  ENSG00000142910_9 (sequence is synthesized)
ccgcctcggctccaacgacaaggagatcatgaaggagctgatggagaatggccctgtccaagccctcatggaggtgcatgaggacttcttcctatacaagggaggcatctacagccacac

SEQ ID NO: 375422 - DNA, 120 bp, Artificial Sequence
  ENSG00000142910_10 (sequence is synthesized)
gccagtgagccttgggaggccagagagataccgccggcatgggacccactcagtcaagatcacaggatggggagaggagacgctgccagatggaaggacgctcaaatactggactgcggc

SEQ ID NO: 375423 - DNA, 120 bp, Artificial Sequence
  ENSG00000142910_11 (sequence is synthesized)
caactcctggggcccagcctggggcgagaggggccacttccgcatcgtgcgcggcgtcaatgagtgcgacatcgagagcttcgtgctgggcgtctggggccgcgtgggcatggaggacat

SEQ ID NO: 375424 - DNA, 120 bp, Artificial Sequence
  ENSG00000142910_12 (sequence is synthesized)
gggtcatcactgaggctgcgggcaccacgcggggtccggcctgggatccaggctaagggccggcggaagaggccccaatggggcggtgaccccagcctcgcccgacagagcccggggcgc

SEQ ID NO: 375425 - DNA, 120 bp, Artificial Sequence
  ENSG00000142910_13 (sequence is synthesized)
gctaatcccggcgcgggttccgctgacgcagcgccccgcctgggagccgcgggcaggcgagactggcggagcccccagacctcccagtggggacggggcagggcctggcctgggaagagc

SEQ ID NO: 375426 - DNA, 120 bp, Artificial Sequence
  ENSG00000142910_14 (sequence is synthesized)
ctggcctgggaagagcacagctgcagatcccaggcctctggcgcccccactcaagactaccaaagccaggacacctcaagtctccagccccactaccccaccccactcctgtattctttt

SEQ ID NO: 375427 - DNA, 120 bp, Artificial Sequence
  ENSG00000142910_15 (sequence is synthesized)
ttttttttttttagacagggtcttgctccgttgcccaggttggagtgcagtggcccatcagggctcactgtaacctccgactcctgggttcaagtgaccctcccacctcagcctctcaag

SEQ ID NO: 375428 - DNA, 60 bp, Artificial Sequence
  ENSG00000142910_16 (sequence is synthesized)
ggctcaagcggctgtattcttattcttcagatatttatttttcttttcactgttttaaaa

SEQ ID NO: 375429 - DNA, 120 bp, Artificial Sequence
  ENSG00000142910_17 (sequence is synthesized)
gcacacatgcatactcatgcatgtatacacgcatgctgtgctgtggggcacgtccagcaggccactcctacacccagatttgactgtgtgtgcgctcagccactgtgcgtctctcccacc

SEQ ID NO: 375430 - DNA, 120 bp, Artificial Sequence
  ENSG00000142910_18 (sequence is synthesized)
ctccctgctgggccctcttgaactcacagctccaggaaactgggagactcatccctggtgttccagggagtctctgctgcccaccatctctgccccccagggcccaggagccaccatgtg

SEQ ID NO: 375431 - DNA, 120 bp, Artificial Sequence
  ENSG00000142910_19 (sequence is synthesized)
agaacctcagggatgctggccctgtgccctgctcctccaagggcctggaccatcccctactacaaggctgtgtgtccctggacaagttactccccttctctgggcctctgttccctgctt

SEQ ID NO: 375432 - DNA, 120 bp, Artificial Sequence
  ENSG00000142910_20 (sequence is synthesized)
ccacaggatgtgctgtgctggaagaactgatgctcagattgaatttcgtggtcttggcatcagctcccccctgatctctccagcctgggaaaaatgctgttggtctcagtacagctgggt

SEQ ID NO: 375433 - DNA, 120 bp, Artificial Sequence
  ENSG00000142910_21 (sequence is synthesized)
tagggcccaaggggacagggggtcaccttggtattttgggaagggaaggacacacactcctccagttctggccagagggcagcagttctcggaaataaatgccggttcagcggaacccca

SEQ ID NO: 375434 - DNA, 120 bp, Artificial Sequence
  ENSG00000142910_22 (sequence is synthesized)
agggaggagagggcttctcccttcccaccagtgggaccctctgggagaggaatgaaaaccaggcccaaagtgaaagggtgaggaaggggagcttcagcaggcctggaccgggacatgtgc

SEQ ID NO: 375435 - DNA, 120 bp, Artificial Sequence
  ENSG00000142910_23 (sequence is synthesized)
cggagcatttgtccatcagtggcaggcagcggggaggcaggggctggcaggagtggccctccctgcggagacttcggccttgggtgaccagaccctggccctgcccttattcccctgggc

SEQ ID NO: 375436 - DNA, 120 bp, Artificial Sequence
  ENSG00000142910_24 (sequence is synthesized)
ctctggctattttctgcctcttgctgtttgtgttggcagactgcctggtcacgggaccctactgcctcttccctcccctgagggaaagctaaggcctgaagaaagctaaggccgatcaga

SEQ ID NO: 375437 - DNA, 120 bp, Artificial Sequence
  ENSG00000142910_25 (sequence is synthesized)
aggtgcagaggaaagaggcaggggttgagaatggaaagctgagggacctggcctggccacttctctgtgcctggcctcagctgcctcatctgggaagcaggactagtcaccaccgccacc

SEQ ID NO: 375438 - DNA, 120 bp, Artificial Sequence
  ENSG00000142910_26 (sequence is synthesized)
ccgccccgccccaccacctgatacctgggaggcactaaatggtgcttggttcttcaacacaagtcaaaattggaggcagctggaatcctgcagcagcaggagggctcaagattaaactgc

SEQ ID NO: 375439 - DNA, 120 bp, Artificial Sequence
  ENSG00000142910_27 (sequence is synthesized)
agaaggccctggacttggtggccctccagtgccaatgggcacctgaggggcaggccagggcagagcaggaggcagacagggcaacctttatcttgcagacagtgctgaacccaggggagg

SEQ ID NO: 375440 - DNA, 120 bp, Artificial Sequence
  ENSG00000142910_28 (sequence is synthesized)
caaggagatcatgaaggagctgatggagaatggccctgtccaaggtaaacccccttatccagcaccctggttccagaagcttgtgcctgcttgagagtgggcacagtagcacaagtggcc

SEQ ID NO: 375441 - DNA, 120 bp, Artificial Sequence
  ENSG00000142910_29 (sequence is synthesized)
tgcacagcattcagcagcatgtccagtagggccaggagtaggggtccccccctcccacaggcagcacctggagggagcacttagagctttggtatggagggaccctggtgcctgggcaca

SEQ ID NO: 375442 - DNA, 120 bp, Artificial Sequence
  ENSG00000142910_30 (sequence is synthesized)
tctcaatagactcaggctccagtgcctgtgccaacgggctgagtggaccctaccttgacatctgcccacagccctcatggaggtgcatgaggacttcttcctatacaagggaggcatcta

SEQ ID NO: 375443 - DNA, 120 bp, Artificial Sequence
  ENSG00000142910_31 (sequence is synthesized)
gctaggggctctggagcctgccttgggttcttacaacctctctaaaaagccaggactgctctcatcatttcaatagggagaaaactgagactcagaaagagaaaggacttgccctgggtc

SEQ ID NO: 375444 - DNA, 120 bp, Artificial Sequence
  ENSG00000142910_32 (sequence is synthesized)
gaattgaaggttgggagcctctgaaggcttttttaggaactgttccttccttacattgggataaaataactccaatatgaagagagcctcaagagtttctcaacctctccccacctcagc

SEQ ID NO: 375445 - DNA, 120 bp, Artificial Sequence
  ENSG00000142910_33 (sequence is synthesized)
acctgtcccagctctgcctgacccaccgagtgacctgggaggtcgctcccctggcctcagtttccctatccgatttagggaatatagatgttaggatcactgacttcaatgaactcggtg

SEQ ID NO: 375446 - DNA, 120 bp, Artificial Sequence
  ENSG00000142910_34 (sequence is synthesized)
aaatgtgctttacggtgggaattggcggtctctaagatacccatattctcagagtgtcttccttctggcccttggcacctacccctccctggatccccaagtgagggagggcaggtggat

SEQ ID NO: 375447 - DNA, 120 bp, Artificial Sequence
  ENSG00000142910_35 (sequence is synthesized)
gtgtggtcccatagaactggcccctaggaggtgggtctctggaggacccaggttccctcctcttctgctcaccttgcctccacttgtccccttggtgccccaccccctcccatgctgggc

SEQ ID NO: 375448 - DNA, 120 bp, Artificial Sequence
  ENSG00000142910_36 (sequence is synthesized)
ctgggtgcaccgacttacagatgtgagagtgagggagatgcagagaggtacagagacctgcctgagccctaagggtgtacccaaccctccaaaggcaactgggggctggatggggcaggt

SEQ ID NO: 375449 - DNA, 120 bp, Artificial Sequence
  ENSG00000142910_37 (sequence is synthesized)
ttccgggattggagctcctgagagcaggtagacccagctcccttccccctcctctgctctgcccacagatggggagaggagacgctgccagatggaaggacgctcaaatactggactgcg

SEQ ID NO: 375450 - DNA, 120 bp, Artificial Sequence
  ENSG00000142910_38 (sequence is synthesized)
agcaaagctgatggatgcactgacatttccaggggaagctctgtagaatctgggactcttccctgcccctctgggaactttactctccagcaagactgaagaagctccttggttagaatt

SEQ ID NO: 375451 - DNA, 120 bp, Artificial Sequence
  ENSG00000142910_39 (sequence is synthesized)
ctaatttggcccagggaaagggcaacctcccacattttctcccaatcctgtctcttttccagacacggaaggtgctggccgcacctgctgactcactcttgggctgataaggcacatatg

SEQ ID NO: 375452 - DNA, 120 bp, Artificial Sequence
  ENSG00000142920_0 (sequence is synthesized)
gcgtgggggtctgtggctgctgggctggcggggcgcaggccgcgggacccgagcccggggaagcgagagagcggaggcgccgaggatccgattcactccctggggagacctatgggccga

SEQ ID NO: 375453 - DNA, 120 bp, Artificial Sequence
  ENSG00000142920_1 (sequence is synthesized)
agccgtgtaaatgcgttttaagcagaggcctcggctccgcaactgccactcctcctcggggtgttgcacaagtttcgaggtcaccggcgaccccccctagcagcgcgcctggctctggcc

SEQ ID NO: 375454 - DNA, 120 bp, Artificial Sequence
  ENSG00000142920_2 (sequence is synthesized)
cccgcgaaggaggacggagtttggagcttgcggcccccacccaccgcgtggcgtccccaggcacgcctagaattctagcacctcaggatcagtccagcccccatttacaattggggaaac

SEQ ID NO: 375455 - DNA, 120 bp, Artificial Sequence
  ENSG00000142920_3 (sequence is synthesized)
tgcggctccgaaagggtcagagggtacccgaggtcaagcagtagagagcggactcgaacttaagctcttgctcttaggctgagacgccttgatgtggccaccggctaccctctagtgtgt

SEQ ID NO: 375456 - DNA, 120 bp, Artificial Sequence
  ENSG00000142920_4 (sequence is synthesized)
tgcatactttctaaggcggcggctgcagcagcggctccatccagcccgtcagctcctcctgcaaggcatggctggctacctgagtgaatcggactttgtgatggtggaggagggcttcag

SEQ ID NO: 375457 - DNA, 120 bp, Artificial Sequence
  ENSG00000142920_5 (sequence is synthesized)
tacccgagacctgctgaaggaactcactctgggggcctcacaggccaccacggacgaggtagctgccttcttcgtggctgacctgggtgccatagtgaggaagcacttttgctttctgaa

SEQ ID NO: 375458 - DNA, 120 bp, Artificial Sequence
  ENSG00000142920_6 (sequence is synthesized)
gtgcctgccacgagtccggcccttttatgctgtcaagtgcaacagcagcccaggtgtgctgaaggttctggcccagctggggctgggctttagctgtgccaacaaggcagagatggagtt

SEQ ID NO: 375459 - DNA, 120 bp, Artificial Sequence
  ENSG00000142920_7 (sequence is synthesized)
ggtccagcatattggaatccctgccagtaagatcatctgcgccaacccctgtaagcaaattgcacagatcaaatatgctgccaagcatgggatccagctgctgagctttgacaatgagat

SEQ ID NO: 375460 - DNA, 120 bp, Artificial Sequence
  ENSG00000142920_8 (sequence is synthesized)
ggagctggcaaaggtggtaaagagccaccccagtgccaagatggttctgtgcattgctaccgatgactcccactccctgagctgcctgagcctaaagtttggagtgtcactgaaatcctg

SEQ ID NO: 375461 - DNA, 120 bp, Artificial Sequence
  ENSG00000142920_9 (sequence is synthesized)
cagacacctgcttgaaaatgcgaagaagcaccatgtggaggtggtgggtgtgagttttcacattggcagtggctgtcctgaccctcaggcctatgctcagtccatcgcagacgcccggct

SEQ ID NO: 375462 - DNA, 120 bp, Artificial Sequence
  ENSG00000142920_10 (sequence is synthesized)
cgtgtttgaaatgggcaccgagctgggtcacaagatgcacgttctggaccttggtggtggcttccctggcacagaaggggccaaagtgagatttgaagagattgcttccgtgatcaactc

SEQ ID NO: 375463 - DNA, 120 bp, Artificial Sequence
  ENSG00000142920_11 (sequence is synthesized)
agccttggacctgtacttcccagagggctgtggcgtggacatctttgctgagctggggcgctactacgtgacctcggccttcactgtggcagtcagcatcattgccaagaaggaggttct

SEQ ID NO: 375464 - DNA, 120 bp, Artificial Sequence
  ENSG00000142920_12 (sequence is synthesized)
gctagaccagcctggcagggaggaggaaaatggttccacctccaagaccatcgtgtaccaccttgatgagggcgtgtatgggatcttcaactcagtcctgtttgacaacatctgccctac

SEQ ID NO: 375465 - DNA, 120 bp, Artificial Sequence
  ENSG00000142920_13 (sequence is synthesized)
ccccatcctgcagaagaaaccatccacggagcagcccctgtacagcagcagcctgtggggcccggcggttgatggctgtgattgcgtggctgagggcctgtggctgccgcaactacacgt

SEQ ID NO: 375466 - DNA, 120 bp, Artificial Sequence
  ENSG00000142920_14 (sequence is synthesized)
aggggactggctggtctttgacaacatgggcgcctacactgtgggcatgggttcccccttttgggggacccaggcctgccacatcacctatgccatgtcccgggtggcctgggaagcgct

SEQ ID NO: 375467 - DNA, 120 bp, Artificial Sequence
  ENSG00000142920_15 (sequence is synthesized)
gcgaaggcagctgatggctgcagaacaggaggatgacgtggagggtgtgtgcaagcctctgtcctgcggctgggagatcacagacaccctgtgcgtgggccctgtcttcaccccagcgag

SEQ ID NO: 375468 - DNA, 120 bp, Artificial Sequence
  ENSG00000142920_16 (sequence is synthesized)
catcatgtgagtgggcctcgttccccccggagaatcccagcggggcctcagagatgcatctgggagaggtggggaagatggcaggcaagggtacccttggccaggactctggtgcccacc

SEQ ID NO: 375469 - DNA, 120 bp, Artificial Sequence
  ENSG00000142920_17 (sequence is synthesized)
ctgccacccccgcgctccacctgcagtgtttctgccctgtaaataggaccagtcttacactcgctgtagttcaagtatgcaacataaatcctgttccttccagctgtgtctgcctcctct

SEQ ID NO: 375470 - DNA, 120 bp, Artificial Sequence
  ENSG00000142920_18 (sequence is synthesized)
gcagtgcaaggggcctggtcagccaggtgtgggggtgttcttggggtctcctttggtctccttcccacctttgtaaatataatgcaaataaataaatatttaggtttttaaaaactgcag

SEQ ID NO: 375471 - DNA, 120 bp, Artificial Sequence
  ENSG00000142920_19 (sequence is synthesized)
cggaatctggcagtttgattcacaaagcagcctgggctaggcctggggcaggatttccccatcactcactgatgagcccacaccctctgctttagtcctgagccctggctgcagcgtgtg

SEQ ID NO: 375472 - DNA, 120 bp, Artificial Sequence
  ENSG00000142920_20 (sequence is synthesized)
cctcccccactagtactcaccttatctgactcatctctctcctcctcatgggcctccaggcctggtgccataaggaaggggctgctgtcagggactgagatgggcagttacgtagctcat

SEQ ID NO: 375473 - DNA, 120 bp, Artificial Sequence
  ENSG00000142920_21 (sequence is synthesized)
agctgtggaaattcatactgaagatacagagccaagaaatgggtgtgtgggaggttttgagtggaccctgcacccttgctctccctgcaggttggcaaggcagtcagagtaaagcagaca

SEQ ID NO: 375474 - DNA, 120 bp, Artificial Sequence
  ENSG00000142920_22 (sequence is synthesized)
cctggtggtcgcttttgcttctttgggcagtgcctgttagaacagggctggccacggagtattgctgtgtccagtgccgacagccctggcatcccctgagactggcagtgcttatcagga

SEQ ID NO: 375475 - DNA, 120 bp, Artificial Sequence
  ENSG00000142920_23 (sequence is synthesized)
caaaggctccttcacactgccgggttcccaaattatgccccggggtgtgtgagctgttgagcaaaggagttcagattttagagtccccctcagtggctgcaggggactctaaatattttt

SEQ ID NO: 375476 - DNA, 120 bp, Artificial Sequence
  ENSG00000142920_24 (sequence is synthesized)
ctgcaggggactctaaatatttttctgctgcaattaaaagatttgagatgtaattcatatgcaatcatcaaattcacccttttaaatgcagaagcctgggtgcagtggctcacacctgta

SEQ ID NO: 375477 - DNA, 67 bp, Artificial Sequence
  ENSG00000142920_25 (sequence is synthesized)
gctgaggcaggagaatcacttgaacagggaggtggaggtcgcagtgagcccgagaccctgcctcaaa

SEQ ID NO: 375478 - DNA, 120 bp, Artificial Sequence
  ENSG00000142920_26 (sequence is synthesized)
gcctcaaataaagaaataaataaataaagtggagaagttagtggtttctggtgtattcagagttgtgtaaccatcaccctagaaagaaatcccatacccattagcagtcactctccattt

SEQ ID NO: 375479 - DNA, 120 bp, Artificial Sequence
  ENSG00000142920_27 (sequence is synthesized)
ttcccattccccagtccctgatgacacaaatctaccttccatctctatggatttgcttattctggacattgtattgtgatggattttctatcttcacttgagcttctctctaggtaagcc

SEQ ID NO: 375480 - DNA, 120 bp, Artificial Sequence
  ENSG00000142920_28 (sequence is synthesized)
tgaccatcctgcttcagtatctcagccagtcctggtgggaactgtacgtggctttgaggtcatctcatgaggcaatgtggcatgggtttggagtgaacgaggtgctttctcaaagccagg

SEQ ID NO: 375481 - DNA, 120 bp, Artificial Sequence
  ENSG00000142920_29 (sequence is synthesized)
ggtgtctcccttttccaggtgggatctagttttcggtatcttgacaataaataggctgaaagcttgggacatcaaaagactcagggcaatcagaaagggttactctactaccccgtgatc

SEQ ID NO: 375482 - DNA, 120 bp, Artificial Sequence
  ENSG00000142920_30 (sequence is synthesized)
catcaaagccacgatttacaggtattaccatgccagtaattgtctatcagactctgagacttcttccatctcagatctccaagcactcatacttcttttgcggagagggacataggtttt

SEQ ID NO: 375483 - DNA, 120 bp, Artificial Sequence
  ENSG00000142920_31 (sequence is synthesized)
ctgctggaaccaggcatctgctgtgaaaagcgcaggaatcctgggaagatctcatggctggctacagtgagacccaggtgtagctgattccctcttctgagcaagtccactgagggggca

SEQ ID NO: 375484 - DNA, 120 bp, Artificial Sequence
  ENSG00000142920_32 (sequence is synthesized)
ttctgtggcttttgaaatgacagtggctgtcatggagtttggatggatttctcactggagcctttctagtgtttcatgttccatttgcagcaaggatgtgaaatttacttttccaagaaa

SEQ ID NO: 375485 - DNA, 120 bp, Artificial Sequence
  ENSG00000142920_33 (sequence is synthesized)
gatacacgcagaacttgatgtggcttacttgaggataatagttaatagtcattttttcccagttatttgtttttgtttcttatttcaatctttttctaaagagaagaaaaaagcctgaaa

SEQ ID NO: 375486 - DNA, 120 bp, Artificial Sequence
  ENSG00000142920_34 (sequence is synthesized)
tgtggagaatggtaaggggcttcaggcttgtgcaggcgaatctaagcaggggtctcctggacccctggctgcatgggcactgcctcctccaagctccctgctgagcgacccactggcagt

SEQ ID NO: 375487 - DNA, 120 bp, Artificial Sequence
  ENSG00000142920_35 (sequence is synthesized)
ggctcctcatgcctcctggctgccttggaagtcagatgttcctgttggcctatcacagacccatccttccctggggcatcacctgaggaacatcctcttcccaatgcctccctacaaccc

SEQ ID NO: 375488 - DNA, 120 bp, Artificial Sequence
  ENSG00000142920_36 (sequence is synthesized)
acctgtgcctcctgaagcccctcctgcgcgcacactcactctctctcattctctccttcaaggagttaacagatctgagcttccatcttctcatactcaggactggccccttcttcccct

SEQ ID NO: 375489 - DNA, 120 bp, Artificial Sequence
  ENSG00000142920_37 (sequence is synthesized)
ttcccctccacagtccatcctccactcagcagccagatgccgtacctcctgggattccgtttcaccaagaatgaaatttaaagtccttggccagctggctctctgactcccacacttccc

SEQ ID NO: 375490 - DNA, 120 bp, Artificial Sequence
  ENSG00000142920_38 (sequence is synthesized)
tctcacgcactgggtcctggccacactggcctcccctctgttcttcaaacactccactgctgggcatgcatttactgtcccctctctagaatgatcttcctgggttatctgtgggcctca

SEQ ID NO: 375491 - DNA, 120 bp, Artificial Sequence
  ENSG00000142920_39 (sequence is synthesized)
ctcacttcattcaggttctgtgcaaatgttttctttaggtgaagccttctggatcaccctttagaaaatagcatgtcctagtctctctcttttctcttaactagttttctttttcttcat

SEQ ID NO: 375492 - DNA, 120 bp, Artificial Sequence
  ENSG00000142920_40 (sequence is synthesized)
agtacctaccaccactcaacatactctataacataactccataatgtgttccataacacaagggcaactgtcagcccttctagaatgtgagctctaggctcttggaataaacctgattta

SEQ ID NO: 375493 - DNA, 120 bp, Artificial Sequence
  ENSG00000142920_41 (sequence is synthesized)
ttttttcactgctgtgtccttattacctagaacggagtaggtgttcaaaaagtatatgctggatgggcaaatgaataaacatgtctgaatctgtctgaataaacatgctcttaacctgtc

SEQ ID NO: 375494 - DNA, 120 bp, Artificial Sequence
  ENSG00000142920_42 (sequence is synthesized)
acagatcagctgcctcctcaggaagggtccctagggccctcatcttatcctttcgcttatttggtacgcaatccttgctatttgcaagagaggggctcaatttatccccaattctttgtc

SEQ ID NO: 375495 - DNA, 120 bp, Artificial Sequence
  ENSG00000142920_43 (sequence is synthesized)
cttgcccccaaacctgcccctcctatgttgcctttttacccagccctccaaggtcagaaacgggggattcctttcctgctgccccctctccctcaccgcccacatctaggcattaccaag

SEQ ID NO: 375496 - DNA, 120 bp, Artificial Sequence
  ENSG00000142920_44 (sequence is synthesized)
ctctgtgaattctgcctccttaaataagcctccagtgtgcttatgtggaacctcgctttctagttcagtcttcctctctccaaaggccccctgatctcccggtctcatgccaccccctcc

SEQ ID NO: 375497 - DNA, 120 bp, Artificial Sequence
  ENSG00000142920_45 (sequence is synthesized)
aaaggtatcatagtcctgttcaaaatctgaatttggcaattctccactgcctacaggatcaagtcagagcttccctgcctccatagccccattcccagctttccccacagtatatattat

SEQ ID NO: 375498 - DNA, 120 bp, Artificial Sequence
  ENSG00000142920_46 (sequence is synthesized)
gctccttcggagctgaatgactcaatttgcatttcccaatgatgctgtgtgcccaatgatgctattaccatgcctttgcccaggctgttccttctgcctgcagcatccttctctcagcct

SEQ ID NO: 375499 - DNA, 120 bp, Artificial Sequence
  ENSG00000142920_47 (sequence is synthesized)
ctcccctctttacccctttctagtcattccttgcttctcatcagtgttgcctttcctgatcgccccaggcagattttctattttctttctccatgcccctgcattgcaccttgtagaaac

SEQ ID NO: 375500 - DNA, 120 bp, Artificial Sequence
  ENSG00000142920_48 (sequence is synthesized)
cctgctggaaaatgggggtatggggaggaactgggcagaaacgagggaaacttgagatttgagattctgcttctgtgtaatccaacttgacaagtagctgttggctgctggtcccacgtg

SEQ ID NO: 375501 - DNA, 120 bp, Artificial Sequence
  ENSG00000142920_49 (sequence is synthesized)
agggatgtgcttggcacctggctgtggccataagtgaggctgggctttcctagaggagctcacagccctgagggaggcacagagaagcagacaggcccttgtgataatactgtgcctggt

SEQ ID NO: 375502 - DNA, 120 bp, Artificial Sequence
  ENSG00000142920_50 (sequence is synthesized)
ggaagtgcagagccctccctgaggcccaggcctccctgaggaagtgggagtcaactacaggagtgggtggtaggacttcccagaagaaaggaacggagagcaagtgtggtgcattcaagg

SEQ ID NO: 375503 - DNA, 120 bp, Artificial Sequence
  ENSG00000142920_51 (sequence is synthesized)
ctcgcatggagagtggctgtgactgcagagggaggcagggctagatctgggaagggcttgaaggccgagtgacacgctttgacagcagtgggaggcatggaccagtttgaagcaggggca

SEQ ID NO: 375504 - DNA, 120 bp, Artificial Sequence
  ENSG00000142920_52 (sequence is synthesized)
taacacagtctgatttgcactttggaaagaccaccctagttcctgtatagactgaggacaagggcagatgcagaaagagatgaccagttaggtggctgctgtgtgacacaggagagactt

SEQ ID NO: 375505 - DNA, 120 bp, Artificial Sequence
  ENSG00000142920_53 (sequence is synthesized)
ggtctgcctgcttgctgagccttggtctttccatctagaaaataagcgtaacagtagccctgcctgccccaccaggctagtgctgggatccagtgaggcaagaggcatgcaagatggggg

SEQ ID NO: 375506 - DNA, 120 bp, Artificial Sequence
  ENSG00000142920_54 (sequence is synthesized)
agtcacatccagtgaaccctgacatcaggccttacgttaggtgtcgtatgactatttcacccacacaacactctgtgggggtcagcgttatcacagagaggtcattcttctgaggtcacg

SEQ ID NO: 375507 - DNA, 120 bp, Artificial Sequence
  ENSG00000142920_55 (sequence is synthesized)
cagctagtcagtggtgaagggtccctcttttggggtagggagagggccacagaaagcaggagcagtttgcccaggcacattcaattcctctgctgtgtccagtctcaggactgtcaccaa

SEQ ID NO: 375508 - DNA, 120 bp, Artificial Sequence
  ENSG00000142920_56 (sequence is synthesized)
agctgagacctgaaggctaaggaggaattagatgagagttgatgatacaggcagagagacaaggatggatccaggctggggagaggacatgtgtaagagcccaaaaggtggccatagtgg

SEQ ID NO: 375509 - DNA, 120 bp, Artificial Sequence
  ENSG00000142920_57 (sequence is synthesized)
atggctcaggtgtgtgggccagtgtgtccaggagtgggtggaagaggcgggtagagccagatcttgcagggcctgagagcagagggaaatggctggcagctcaagggcagggatttgttt

SEQ ID NO: 375510 - DNA, 120 bp, Artificial Sequence
  ENSG00000142920_58 (sequence is synthesized)
tttggaaagatgaatctgggtcctggctgagaactgtctggagagggcacgagcagatcagggagactgaaatggtgttacccatggggatggagaccatggggcacatgaggatgttca

SEQ ID NO: 375511 - DNA, 120 bp, Artificial Sequence
  ENSG00000142920_59 (sequence is synthesized)
gaagctgggctcagcagggctcaactgggtgtgggaacaagattgccaactgtttacaactctgatagtggagccattgatcaacatgggtatgtaggaggagaagcagtttgtgggatt

SEQ ID NO: 375512 - DNA, 120 bp, Artificial Sequence
  ENSG00000142920_60 (sequence is synthesized)
gtttgagagaatgggatatgattttatttgaagtcccaagcctggggtatgatgaatgtgggctttcgagtgagagttgggttcagtcctagttctactacctactagggatgtgatctt

SEQ ID NO: 375513 - DNA, 120 bp, Artificial Sequence
  ENSG00000142920_61 (sequence is synthesized)
aggtaggtcacttctctctctggggaactgattgattacatcatcaatgcaacggggatggtaatgcctccctcatggggtttttgggaagatacaaatagataatataagtgcctggca

SEQ ID NO: 375514 - DNA, 120 bp, Artificial Sequence
  ENSG00000142920_62 (sequence is synthesized)
tgatgtctggcatgtagtaaatgctcgatacatgtggatttctttcccttgttgaggggtggggaccacacgggagtaggaagcagttggggaggggtcagcagcctgtccctgcccctg

SEQ ID NO: 375515 - DNA, 120 bp, Artificial Sequence
  ENSG00000142920_63 (sequence is synthesized)
ccctcagctgagctcgggctcacgtgagagccctctgcccaatggggctgcgtctccaggtacagggccctgccagtcccatgctggctacttgcagcacccctctctcacccctaggga

SEQ ID NO: 375516 - DNA, 120 bp, Artificial Sequence
  ENSG00000142920_64 (sequence is synthesized)
ccgtgtaaatgcgttttaaggcgagtgcggaaagtggcctggggagcctcggggagcggacgccctccgccctggtgctgacctgcctccctgccccttctgcctcctgtcagcagaggc

SEQ ID NO: 375517 - DNA, 120 bp, Artificial Sequence
  ENSG00000142920_65 (sequence is synthesized)
cctgaaatccagaatttcagaactgggaaggctctccaaaacaattcatccattttacagagggagcaactgactcggagaggcagtgacatttgggcatacggtgccttgtctccgtct

SEQ ID NO: 375518 - DNA, 120 bp, Artificial Sequence
  ENSG00000142920_66 (sequence is synthesized)
gaaatccgggattcttgactttctccacccttgcccagtgaaccccgggcttgtgctgggggcgggttgtgacgggattgggatccctggcctcgggaggcgagtggggcagcagagccg

SEQ ID NO: 375519 - DNA, 120 bp, Artificial Sequence
  ENSG00000142920_67 (sequence is synthesized)
ccttagcataacgtttggcaccaagtgggcatgagtaaaaaagtgttgcatgaaagggaaactgagtcccagggaagcaactctggaagggtcccttccacatttaagtaatgtggtctc

SEQ ID NO: 375520 - DNA, 120 bp, Artificial Sequence
  ENSG00000142920_68 (sequence is synthesized)
acccacagcctcatacatgtttggcctttagcacatctacaatgaacagttgtccatagggataggttgcagtgtcagtgggactagcttaaggcttcattgagcacctgtgtttggaag

SEQ ID NO: 375521 - DNA, 120 bp, Artificial Sequence
  ENSG00000142920_69 (sequence is synthesized)
gcagtgagctgtaggtcatagcttctgcctttagggagtttacccttttctagaatggacagatgcatatgcagttctgataccttggaagcatatgcaaatgcagtgggagcatttaaa

SEQ ID NO: 375522 - DNA, 120 bp, Artificial Sequence
  ENSG00000142920_70 (sequence is synthesized)
agcagagttgccttattggtttggggaaggtggcatttgagtgaaactttaaggattttgccagacacaggagtggggagggtattctgcaggacatggtgggaacaaaggtttgaaggt

SEQ ID NO: 375523 - DNA, 120 bp, Artificial Sequence
  ENSG00000142920_71 (sequence is synthesized)
gggaaaatgatccagcctacagctggagttttagccgcattgaggggagggattggggctagatcagagccttgaatgccaggctgaggagtttgccttctgccctgtaggcttggggag

SEQ ID NO: 375524 - DNA, 120 bp, Artificial Sequence
  ENSG00000142920_72 (sequence is synthesized)
gcccagaaaacttagcagcagggtagctctgtggccagtactgaacctgggtcaggtacttggaaggatcacggatggcatgcacagggtgcgagctggatggggtctcacattcatcca

SEQ ID NO: 375525 - DNA, 120 bp, Artificial Sequence
  ENSG00000142937_0 (sequence is synthesized)
gttttacaaaccgaaccgtgaatctttgcggtttctctttccagccagcgccgagcgatgggcatctctcgggacaactggcacaagcgccgcaaaaccgggggcaagagaaagccctac

SEQ ID NO: 375526 - DNA, 120 bp, Artificial Sequence
  ENSG00000142937_1 (sequence is synthesized)
cacaagaagcggaagtatgagttggggcgcccagctgccaacaccaagattggcccccgccgcatccacacagtccgtgtgcggggaggtaacaagaaataccgtgccctgaggttggac

SEQ ID NO: 375527 - DNA, 120 bp, Artificial Sequence
  ENSG00000142937_2 (sequence is synthesized)
gtggggaatttctcctggggctcagagtgttgtactcgtaaaacaaggatcatcgatgttgtctacaatgcatctaataacgagctggttcgtaccaagaccctggtgaagaattgcatc

SEQ ID NO: 375528 - DNA, 120 bp, Artificial Sequence
  ENSG00000142937_3 (sequence is synthesized)
tgggccgcaagaagggagccaagctgactcctgaggaagaagagattttaaacaaaaaacgatctaaaaaaattcagaagaaatatgatgaaaggaaaaagaatgccaaaatcagcagtc

SEQ ID NO: 375529 - DNA, 120 bp, Artificial Sequence
  ENSG00000142937_4 (sequence is synthesized)
tcctggaggagcagttccagcagggcaagcttcttgcgtgcatcgcttcaaggccgggacagtgtggccgagcagatggctatgtgctagagggcaaagagttggagttctatcttagga

SEQ ID NO: 375530 - DNA, 120 bp, Artificial Sequence
  ENSG00000142937_5 (sequence is synthesized)
aaatcaaggcccgcaaaggcaaataaatccttgttttgtcttcacccatgtaataaaggtgtttattgttttgttcccacatttatgttgcctgaatatatgactgttttctctgcttta

SEQ ID NO: 375531 - DNA, 120 bp, Artificial Sequence
  ENSG00000142937_6 (sequence is synthesized)
ggttgagctcaatcaggccccatcctgcttcacagcctactgaggagtccagacgccccgacccccggccagggacagccacgaggagtggtggccctcgggtttcggccgcccagcccg

SEQ ID NO: 375532 - DNA, 120 bp, Artificial Sequence
  ENSG00000142937_7 (sequence is synthesized)
tctctgggggctgcgaaggctctgggctccgggttccgggccgcgggctgcgggctccgagcggcgccaacatggctgccgcgaggaggaggccccggcctggccgcacgtgtatgatga

SEQ ID NO: 375533 - DNA, 120 bp, Artificial Sequence
  ENSG00000142937_8 (sequence is synthesized)
caactcggtaatgctgcatactcccgagtgcgcggtggggaagccaaccttggagagctgagcgtgcgaccggcccggcgcgggggtctccgggagctggcgagtcgctagcaccgagtc

SEQ ID NO: 375534 - DNA, 120 bp, Artificial Sequence
  ENSG00000142937_9 (sequence is synthesized)
ggctgaggaaggccagcactggggtgtgcagggttcgagaaagctcccagggcctgccttccttccctgagctcatatatttgtatccccttttcagactcctgaggaagaagagatttt

SEQ ID NO: 375535 - DNA, 120 bp, Artificial Sequence
  ENSG00000142937_10 (sequence is synthesized)
ccaattccattgccttccactctttttcaacgcagccgcacccacatctcatcctaaacgaccgcagcagcctctgaaactagtctaaacacgcccagatctgccgacgccgcagacccc

SEQ ID NO: 375536 - DNA, 120 bp, Artificial Sequence
  ENSG00000142937_11 (sequence is synthesized)
cttcccccagcccagggtcggaggcgagtcgccgggggtcggcagaggtcagcagcctgcgagaccctcctaggctcgtggccctaggcgcggcagctgacacgcatctctcgggacaac

SEQ ID NO: 375537 - DNA, 120 bp, Artificial Sequence
  ENSG00000142937_12 (sequence is synthesized)
cgggcgtgagtcaccgtgcccgacctgctctgatctttctgaactctgcagcctgagagattggggctggtaaagactgcgggttgccaaacataactagaaacgtgggttagggggttg

SEQ ID NO: 375538 - DNA, 120 bp, Artificial Sequence
  ENSG00000142937_13 (sequence is synthesized)
tggaagacgaactgatgccccatggcttgtaaaggctgagagttcccttatttctccttaaggcctcatggggctgaagaacctggaggagtgtgccagggccatttgtcctccagttta

SEQ ID NO: 375539 - DNA, 120 bp, Artificial Sequence
  ENSG00000142937_14 (sequence is synthesized)
gagtgaggccctttgggagtgggtgggaaaacgcacctaaacggtcttaagattcaccaagtgggcctggcgcggtggctcacgcctataagcccagcacgttgggaggccgaggcgggc

SEQ ID NO: 375540 - DNA, 120 bp, Artificial Sequence
  ENSG00000142937_15 (sequence is synthesized)
tgaggtcaggagttcgagtccagcctgggcaacagagcgagactctcagtaaaaaaaaagattcaagtgcttttagcaagtagtctgtggcttagaccaaggcatttgaagtttctcctt

SEQ ID NO: 375541 - DNA, 120 bp, Artificial Sequence
  ENSG00000142937_16 (sequence is synthesized)
tggggagttctctccacccaggctgtcctgctccaatctctttttttgagattgggtctctgttgctcaggctggagtgccagtggcgtgatcttggttcactgcagcctccgcctcctg

SEQ ID NO: 375542 - DNA, 120 bp, Artificial Sequence
  ENSG00000142937_17 (sequence is synthesized)
gcacttttcccttgtctcagttcctttgactgccagccatgcagtctaaagggttcactgataacaggctgcgagcacaaaggggaacgtttggtcaccctattcgtatgaagctgaaat

SEQ ID NO: 375543 - DNA, 120 bp, Artificial Sequence
  ENSG00000142937_18 (sequence is synthesized)
gggaagcattgggtagaagagtctgcataggcccgtgcttggagtctttgtatttggggaagtctctgcccaggctgagggggctgtctcagtgatgaaaactttgtccagttctgctac

SEQ ID NO: 375544 - DNA, 120 bp, Artificial Sequence
  ENSG00000142937_19 (sequence is synthesized)
tgacagtaagtgaagataaagtgtgtctgaggagacagctggcttcatgcttgcccccagggtacctgaacccacagagattcttaagcgggtggagaggtttgggtagggccaccttgt

SEQ ID NO: 375545 - DNA, 120 bp, Artificial Sequence
  ENSG00000142937_20 (sequence is synthesized)
cgttgtgctaaggatcacctactctcttgcagcgtgcatcgcttcaaggccgggacagtgtggccgagcagatggctatgtgctagagggcaaagagttggagttctatcttaggaaaat

SEQ ID NO: 375546 - DNA, 120 bp, Artificial Sequence
  ENSG00000142945_0 (sequence is synthesized)
aaactgcggcggtttacgcggcgttaagacttcgtagggttagcgaaattgaggtttcttggtattgcgcgtttctcttccttgctgactctccgaatggccatggactcgtcgcttcag

SEQ ID NO: 375547 - DNA, 120 bp, Artificial Sequence
  ENSG00000142945_1 (sequence is synthesized)
gcccgcctgtttcccggtctcgctatcaagatccaacgcagtaatggtttaattcacagtgccaatgtaaggactgtgaacttggagaaatcctgtgtttcagtggaatgggcagaagga

SEQ ID NO: 375548 - DNA, 120 bp, Artificial Sequence
  ENSG00000142945_2 (sequence is synthesized)
ggtgccacaaagggcaaagagattgattttgatgatgtggctgcaataaacccagaactcttacagcttcttcccttacatccgaaggacaatctgcccttgcaggaaaatgtaacaatc

SEQ ID NO: 375549 - DNA, 120 bp, Artificial Sequence
  ENSG00000142945_3 (sequence is synthesized)
cagaaacaaaaacggagatccgtcaactccaaaattcctgctccaaaagaaagtcttcgaagccgctccactcgcatgtccactgtctcagagcttcgcatcacggctcaggagaatgac

SEQ ID NO: 375550 - DNA, 120 bp, Artificial Sequence
  ENSG00000142945_4 (sequence is synthesized)
atggaggtggagctgcctgcagctgcaaactcccgcaagcagttttcagttcctcctgcccccactaggccttcctgccctgcagtggctgaaataccattgaggatggtcagcgaggag

SEQ ID NO: 375551 - DNA, 120 bp, Artificial Sequence
  ENSG00000142945_5 (sequence is synthesized)
atggaagagcaagtccattccatccgaggcagctcttctgcaaaccctgtgaactcagttcggaggaaatcatgtcttgtgaaggaagtggaaaaaatgaagaacaagcgagaagagaag

SEQ ID NO: 375552 - DNA, 120 bp, Artificial Sequence
  ENSG00000142945_6 (sequence is synthesized)
aaggcccagaactctgaaatgagaatgaagagagctcaggagtatgacagtagttttccaaactgggaatttgcccgaatgattaaagaatttcgggctactttggaatgtcatccactt

SEQ ID NO: 375553 - DNA, 120 bp, Artificial Sequence
  ENSG00000142945_7 (sequence is synthesized)
actatgactgatcctatcgaagagcacagaatatgtgtctgtgttaggaaacgcccactgaataagcaagaattggccaagaaagaaattgatgtgatttccattcctagcaagtgtctc

SEQ ID NO: 375554 - DNA, 120 bp, Artificial Sequence
  ENSG00000142945_8 (sequence is synthesized)
ctcttggtacatgaacccaagttgaaagtggacttaacaaagtatctggagaaccaagcattctgctttgactttgcatttgatgaaacagcttcgaatgaagttgtctacaggttcaca

SEQ ID NO: 375555 - DNA, 120 bp, Artificial Sequence
  ENSG00000142945_9 (sequence is synthesized)
gcaaggccactggtacagacaatctttgaaggtggaaaagcaacttgttttgcatatggccagacaggaagtggcaagacacatactatgggcggagacctctctgggaaagcccagaat

SEQ ID NO: 375556 - DNA, 120 bp, Artificial Sequence
  ENSG00000142945_10 (sequence is synthesized)
gcatccaaagggatctatgccatggcctcccgggacgtcttcctcctgaagaatcaaccctgctaccggaagttgggcctggaagtctatgtgacattcttcgagatctacaatgggaag

SEQ ID NO: 375557 - DNA, 120 bp, Artificial Sequence
  ENSG00000142945_11 (sequence is synthesized)
gatgatgtcatcaagatgatcgacatgggcagcgcctgcagaacctctgggcagacatttgccaactccaattcctcccgctcccacgcgtgcttccaaattattcttcgagctaaaggg

SEQ ID NO: 375558 - DNA, 120 bp, Artificial Sequence
  ENSG00000142945_12 (sequence is synthesized)
agaatgcatggcaagttctctttggtagatctggcagggaatgagcgaggcgcggacacttccagtgctgaccggcagacccgcatggagggcgcagaaatcaacaagagtctcttagcc

SEQ ID NO: 375559 - DNA, 120 bp, Artificial Sequence
  ENSG00000142945_13 (sequence is synthesized)
ctgaaggagtgcatcagggccctgggacagaacaaggctcacaccccgttccgtgagagcaagctgacacaggtgctgagggactccttcattggggagaactctaggacttgcatgatt

SEQ ID NO: 375560 - DNA, 120 bp, Artificial Sequence
  ENSG00000142945_14 (sequence is synthesized)
gccacgatctcaccaggcataagctcctgtgaatatactttaaacaccctgagatatgcagacagggtcaaggagctgagcccccacagtgggcccagtggagagcagttgattcaaatg

SEQ ID NO: 375561 - DNA, 120 bp, Artificial Sequence
  ENSG00000142945_15 (sequence is synthesized)
gaaacagaagagatggaagcctgctctaacggggcgctgattccaggcaatttatccaaggaagaggaggaactgtcttcccagatgtccagctttaacgaagccatgactcagatcagg

SEQ ID NO: 375562 - DNA, 120 bp, Artificial Sequence
  ENSG00000142945_16 (sequence is synthesized)
gagctggaggagaaggctatggaagagctcaaggagatcatacagcaaggaccagactggcttgagctctctgagatgaccgagcagccagactatgacctggagacctttgtgaacaaa

SEQ ID NO: 375563 - DNA, 120 bp, Artificial Sequence
  ENSG00000142945_17 (sequence is synthesized)
gcggaatctgctctggcccagcaagccaagcatttctcagccctgcgagatgtcatcaaggccttgcgcctggccatgcagctggaagagcaggctagcagacaaataagcagcaagaaa

SEQ ID NO: 375564 - DNA, 120 bp, Artificial Sequence
  ENSG00000142945_18 (sequence is synthesized)
cggccccagtgacgactgcaaataaaaatctgtttggtttgacacccagcctcttccctggccctccccagagaactttgggtacctggtgggtctaggcagggtctgagctgggacagg

SEQ ID NO: 375565 - DNA, 120 bp, Artificial Sequence
  ENSG00000142945_19 (sequence is synthesized)
ttctggtaaatgccaagtatgggggcatctgggcccagggcagctggggagggggtcagagtgacatgggacactccttttctgttcctcagttgtcgccctcacgagaggaaggagctc

SEQ ID NO: 375566 - DNA, 120 bp, Artificial Sequence
  ENSG00000142945_20 (sequence is synthesized)
ttagttacccttttgtgttgcccttctttccatcaaggggaatgttctcagcatagagctttctccgcagcatcctgcctgcgtggactggctgctaatggagagctccctggggttgtc

SEQ ID NO: 375567 - DNA, 120 bp, Artificial Sequence
  ENSG00000142945_21 (sequence is synthesized)
ctggctctggggagagagacggagcctttagtacagctatctgctggctctaaaccttctacgcctttgggccgagcactgaatgtcttgtactttaaaaaaatgtttctgagacctctt

SEQ ID NO: 375568 - DNA, 120 bp, Artificial Sequence
  ENSG00000142945_22 (sequence is synthesized)
tctactttactgtctccctagagatcctagaggatccctactgttttctgttttatgtgtttatacattgtatgtaacaataaagagaaaaaataaatcagctgtttaagtgtgtggaaa

SEQ ID NO: 375569 - DNA, 120 bp, Artificial Sequence
  ENSG00000142945_23 (sequence is synthesized)
ggaagccgtaactggggaagtttctgggcccagaagaaaatgtaggtagtcttagggttaggtagcagctgtcaggaacttgcccctgcccataagatcctaaagggcccccatttgact

SEQ ID NO: 375570 - DNA, 120 bp, Artificial Sequence
  ENSG00000142945_24 (sequence is synthesized)
ctcaccagacagttagaacttgtttcctcctccgtgtcagccatcaagaggtgcttggggggctgtgcccagcaggacctcactgcccagcagatcagcaggggagccaagtggcctaga

SEQ ID NO: 375571 - DNA, 120 bp, Artificial Sequence
  ENSG00000142945_25 (sequence is synthesized)
tctgctgtggagtacccgactgtttgcctgcctgtctgccctcctcttcacctcattctcatcactgacgtctaccattggcttggaaatcagaaacccatatccatctagatgattgat

SEQ ID NO: 375572 - DNA, 120 bp, Artificial Sequence
  ENSG00000142945_26 (sequence is synthesized)
ggacctatttcaccttgtacagaaacttggaggtttgcccctgaccaccctcgagatcgtgcagcactgactggctactgctctcggttctccaggtcttcgaagccgctccactcgcat

SEQ ID NO: 375573 - DNA, 120 bp, Artificial Sequence
  ENSG00000142945_27 (sequence is synthesized)
tcaggcccgcctgtttcccggtctcgctatcaagatccaacgcagtaatggtgaggagcggggtccctaggtcaaggggactcgtgagcggtttaattcacagtgccaatgtaaggactg

SEQ ID NO: 375574 - DNA, 120 bp, Artificial Sequence
  ENSG00000142945_28 (sequence is synthesized)
gtcccaatcctctccgggccctgctggagagtcagctgggtgaggggcttttccagtccagctttagttttctctctccttggctgaaggcaaggttgccattccatccccttggagcct

SEQ ID NO: 375575 - DNA, 120 bp, Artificial Sequence
  ENSG00000142945_29 (sequence is synthesized)
caagcctcgaagcctgggcggtgccacattcctctggtgagtaccaagggggtgctgtgggatctgagacctccttgtttcctcagggtcaaggagctgagcccccacagtgggcccagt

SEQ ID NO: 375576 - DNA, 120 bp, Artificial Sequence
  ENSG00000142945_30 (sequence is synthesized)
atccccttggagcctcaagcctcgaagcctgggcggtgccacattcctctgttatccaaggaagaggaggaactgtcttcccagatgtccagctttaacgaagccatgactcagatcagg

SEQ ID NO: 375577 - DNA, 120 bp, Artificial Sequence
  ENSG00000142949_0 (sequence is synthesized)
ctccagcttcggctccggctcgggctcgggctccggctccggctccggctccggctccagctcgggtggcggtggcgggagcgggaccaggtggaggcggcggcggcagaggagtgggag

SEQ ID NO: 375578 - DNA, 120 bp, Artificial Sequence
  ENSG00000142949_1 (sequence is synthesized)
aggtggaggcggcggcggcagaggagtgggagcagcggccctagcggcttgcggggggacatgcggaccgacggcccctggataggcggaaggagtggaggccctggtgcccggcccttg

SEQ ID NO: 375579 - DNA, 120 bp, Artificial Sequence
  ENSG00000142949_2 (sequence is synthesized)
gtgctgagtatccagcaagagtgaccggggtgaagaagcaaagactcggttgattgtcctgggctgtggctggctgtggagctagagccctggatggcccctgagccagccccagggagg

SEQ ID NO: 375580 - DNA, 120 bp, Artificial Sequence
  ENSG00000142949_3 (sequence is synthesized)
acgatggtgccccttgtgcctgcactggtgatgcttggtttggtggcaggcgcccatggtgacagcaaacctgtcttcattaaagtccctgaggaccagactgggctgtcaggaggggta

SEQ ID NO: 375581 - DNA, 120 bp, Artificial Sequence
  ENSG00000142949_4 (sequence is synthesized)
gcctccttcgtgtgccaagctacaggagaacccaagccgcgcatcacatggatgaagaaggggaagaaagtcagctcccagcgcttcgaggtcattgagtttgatgatggggcagggtca

SEQ ID NO: 375582 - DNA, 120 bp, Artificial Sequence
  ENSG00000142949_5 (sequence is synthesized)
gtgcttcggatccagccattgcgggtgcagcgagatgaagccatctatgagtgtacagctactaacagcctgggtgagatcaacactagtgccaagctctcagtgctcgaagaggaacag

SEQ ID NO: 375583 - DNA, 120 bp, Artificial Sequence
  ENSG00000142949_6 (sequence is synthesized)
ctgccccctgggttcccttccatcgacatggggcctcagctgaaggtggtggagaaggcacgcacagccaccatgctatgtgccgcaggcggaaatccagaccctgagatttcttggttc

SEQ ID NO: 375584 - DNA, 120 bp, Artificial Sequence
  ENSG00000142949_7 (sequence is synthesized)
aaggacttccttcctgtagaccctgccacgagcaacggccgcatcaagcagctgcgttcaggtgccttgcagatagagagcagtgaggaatccgaccaaggcaagtacgagtgtgtggcg

SEQ ID NO: 375585 - DNA, 120 bp, Artificial Sequence
  ENSG00000142949_8 (sequence is synthesized)
accaactcggcaggcacacgttactcagcccctgcgaacctgtatgtgcgagtgcgccgcgtggctcctcgtttctccatccctcccagcagccaggaggtgatgccaggcggcagcgtg

SEQ ID NO: 375586 - DNA, 120 bp, Artificial Sequence
  ENSG00000142949_9 (sequence is synthesized)
aacctgacatgcgtggcagtgggtgcacccatgccctacgtgaagtggatgatgggggccgaggagctcaccaaggaggatgagatgccagttggccgcaacgtcctggagctcagcaat

SEQ ID NO: 375587 - DNA, 120 bp, Artificial Sequence
  ENSG00000142949_10 (sequence is synthesized)
gtcgtacgctctgccaactacacctgtgtggccatctcctcgctgggcatgatcgaggccacagcccaggtcacagtgaaagctcttccaaagcctccgattgatcttgtggtgacagag

SEQ ID NO: 375588 - DNA, 120 bp, Artificial Sequence
  ENSG00000142949_11 (sequence is synthesized)
acaactgccaccagtgtcaccctcacctgggactctgggaactcggagcctgtaacctactatggcatccagtaccgcgcagcgggcacggagggcccctttcaggaggtggatggtgtg

SEQ ID NO: 375589 - DNA, 120 bp, Artificial Sequence
  ENSG00000142949_12 (sequence is synthesized)
gccaccacccgctacagcattggcggcctcagccctttctcggaatatgccttccgcgtgctggcggtgaacagcatcgggcgagggccgcccagcgaggcagtgcgggcacgcacggga

SEQ ID NO: 375590 - DNA, 120 bp, Artificial Sequence
  ENSG00000142949_13 (sequence is synthesized)
gaacaggcgccctccagcccaccgcgccgcgtgcaggcacgcatgctgagcgccagcaccatgctggtgcagtgggagcctcccgaggagcccaacggcctggtgcggggataccgcgtc

SEQ ID NO: 375591 - DNA, 120 bp, Artificial Sequence
  ENSG00000142949_14 (sequence is synthesized)
tactatactccggactcccgccgccccccgaacgcctggcacaagcacaacaccgacgcggggctcctcacgaccgtgggcagcctgctgcctggcatcacctacagcctgcgcgtgctt

SEQ ID NO: 375592 - DNA, 120 bp, Artificial Sequence
  ENSG00000142949_15 (sequence is synthesized)
gccttcaccgccgtgggcgatggccctcccagccccaccatccaggtcaagacgcagcagggagtgcctgcccagcccgcggacttccaggccgaggtggagtcggacaccaggatccag

SEQ ID NO: 375593 - DNA, 120 bp, Artificial Sequence
  ENSG00000142949_16 (sequence is synthesized)
ctctcgtggctgctgccccctcaggagcggatcatcatgtatgaactggtgtactgggcggcagaggacgaagaccaacagcacaaggtgaccttcgacccaacctcctcctacacacta

SEQ ID NO: 375594 - DNA, 120 bp, Artificial Sequence
  ENSG00000142949_17 (sequence is synthesized)
gaggacctgaagcctgacacactctaccgcttccagctggctgcacgctcggatatgggggtgggcgtcttcacccccaccattgaggcccgcacagcccagtccaccccctccgcccct

SEQ ID NO: 375595 - DNA, 120 bp, Artificial Sequence
  ENSG00000142949_18 (sequence is synthesized)
ccccagaaggtgatgtgtgtgagcatgggctccaccacggtccgggtaagttgggtcccgccgcctgccgacagccgcaacggcgttatcacccagtactccgtggcctacgaggcggtg

SEQ ID NO: 375596 - DNA, 120 bp, Artificial Sequence
  ENSG00000142949_19 (sequence is synthesized)
gacggcgaggaccgcgggcggcatgtggtggatggcatcagccgtgagcactccagctgggacctggtgggcctggagaagtggacggagtaccgggtgtgggtgcgggcacacacagac

SEQ ID NO: 375597 - DNA, 120 bp, Artificial Sequence
  ENSG00000142949_20 (sequence is synthesized)
gtgggccccggccccgagagcagcccggtgctggtgcgcaccgatgaggacgtgcccagcgggcctccgcggaaggtggaggtggagccactgaactccactgctgtgcatgtctactgg

SEQ ID NO: 375598 - DNA, 120 bp, Artificial Sequence
  ENSG00000142949_21 (sequence is synthesized)
aagctgcctgtccccagcaagcagcatggccagatccgcggctaccaggtcacctacgtgcggctggagaatggcgagccccgtggactccccatcatccaagacgtcatgctagccgag

SEQ ID NO: 375599 - DNA, 120 bp, Artificial Sequence
  ENSG00000142949_22 (sequence is synthesized)
gcccagtggcggccagaggagtccgaggactatgaaaccactatcagcggcctgaccccggagaccacctactccgttactgttgctgcctataccaccaagggggatggtgcccgcagc

SEQ ID NO: 375600 - DNA, 120 bp, Artificial Sequence
  ENSG00000142949_23 (sequence is synthesized)
aagcccaaaattgtcactacaacaggtgcagtcccaggccggcccaccatgatgatcagcaccacggccatgaacactgcgctgctccagtggcacccacccaaggaactgcctggcgag

SEQ ID NO: 375601 - DNA, 120 bp, Artificial Sequence
  ENSG00000142949_24 (sequence is synthesized)
ctgctgggctaccggctgcagtactgccgggccgacgaggcgcggcccaacaccatagatttcggcaaggatgaccagcacttcacagtcaccggcctgcacaaggggaccacctacatc

SEQ ID NO: 375602 - DNA, 120 bp, Artificial Sequence
  ENSG00000142949_25 (sequence is synthesized)
ttccggcttgctgccaagaaccgggctggcttgggtgaggagttcgagaaggagatcaggacccccgaggacctgcccagcggcttcccccaaaacctgcatgtgacaggactgaccacg

SEQ ID NO: 375603 - DNA, 120 bp, Artificial Sequence
  ENSG00000142949_26 (sequence is synthesized)
tctaccacagaactggcctgggacccgccagtgctggcggagaggaacgggcgcatcatcagctacaccgtggtgttccgagacatcaacagccaacaggagctgcagaacatcacgaca

SEQ ID NO: 375604 - DNA, 120 bp, Artificial Sequence
  ENSG00000142949_27 (sequence is synthesized)
gacacccgctttacccttactggcctcaagccagacaccacttacgacatcaaggtccgcgcatggaccagcaaaggctctggcccactcagccccagcatccagtcccggaccatgccg

SEQ ID NO: 375605 - DNA, 120 bp, Artificial Sequence
  ENSG00000142949_28 (sequence is synthesized)
gtggagcaagtgtttgccaagaacttccgggtggcggctgcaatgaagacgtctgtgctgctcagctgggaggttcccgactcctataagtcagctgtgccctttaagattctgtacaat

SEQ ID NO: 375606 - DNA, 120 bp, Artificial Sequence
  ENSG00000142949_29 (sequence is synthesized)
gggcagagtgtggaggtggacgggcactcgatgcggaagctgatcgcagacctgcagcccaacacagagtactcgtttgtgctgatgaaccgtggcagcagcgcagggggcctgcagcac

SEQ ID NO: 375607 - DNA, 120 bp, Artificial Sequence
  ENSG00000142949_30 (sequence is synthesized)
ctggtgtccatccgcacagcccccgacctcctgcctcacaagccgctgcctgcctctgcctacatagaggacggccgcttcgatctctccatgccccatgtgcaagacccctcgcttgtc

SEQ ID NO: 375608 - DNA, 120 bp, Artificial Sequence
  ENSG00000142949_31 (sequence is synthesized)
aggtggttctacattgttgtggtgcccattgaccgtgtgggcgggagcatgctgacgccaaggtggagcacacccgaggaactggagctggacgagcttctagaagccatcgagcaaggc

SEQ ID NO: 375609 - DNA, 120 bp, Artificial Sequence
  ENSG00000142949_32 (sequence is synthesized)
tgaagccatatgtggctgctcaactggatgtgctcccggagacctttaccttgggggacaagaagaactaccggggcttctacaaccggcccctgtctccggacttgagctaccagtgct

SEQ ID NO: 375610 - DNA, 120 bp, Artificial Sequence
  ENSG00000142949_33 (sequence is synthesized)
ttgtgcttgcctccttgaaggaacccatggaccagaagcgctatgcctccagcccctactcggatgagatcgtggtccaggtgacaccagcccagcagcaggaggagccggagatgctgt

SEQ ID NO: 375611 - DNA, 120 bp, Artificial Sequence
  ENSG00000142949_34 (sequence is synthesized)
gggtgacgggtcccgtgctggcagtcatcctcatcatcctcattgtcatcgccatcctcttgttcaaaaggaaaaggacccactctccgtcctctaaggatgagcagtcgatcggactga

SEQ ID NO: 375612 - DNA, 120 bp, Artificial Sequence
  ENSG00000142949_35 (sequence is synthesized)
aggactccttgctggcccactcctctgaccctgtggagatgcggaggctcaactaccagaccccaggtatgcgagaccacccacccatccccatcaccgacctggcggacaacatcgagc

SEQ ID NO: 375613 - DNA, 120 bp, Artificial Sequence
  ENSG00000142949_36 (sequence is synthesized)
gcctcaaagccaacgatggcctcaagttctcccaggagtatgagtccatcgaccctggacagcagttcacgtgggagaattcaaacctggaggtgaacaagcccaagaaccgctatgcga

SEQ ID NO: 375614 - DNA, 120 bp, Artificial Sequence
  ENSG00000142949_37 (sequence is synthesized)
atgtcatcgcctacgaccactctcgagtcatccttacctctatcgatggcgtccccgggagtgactacatcaatgccaactacatcgatggctaccgcaagcagaatgcctacatcgcca

SEQ ID NO: 375615 - DNA, 120 bp, Artificial Sequence
  ENSG00000142949_38 (sequence is synthesized)
cgcagggccccctgcccgagaccatgggtgatttctggaggatggtgtgggaacagcgcacggccactgtggtcatgatgacacggctggaggagaagtcccgggtaaaatgtgatcagt

SEQ ID NO: 375616 - DNA, 120 bp, Artificial Sequence
  ENSG00000142949_39 (sequence is synthesized)
actggccagcccgtggcaccgagacctgtggccttattcaggtgaccctgttggacacagtggagctggccacatacactgtgcgcaccttcgcactccacaagagtggctccagtgaga

SEQ ID NO: 375617 - DNA, 120 bp, Artificial Sequence
  ENSG00000142949_40 (sequence is synthesized)
agcgcgagctgcgtcagtttcagttcatggcctggccagaccatggagttcctgagtacccaactcccatcctggccttcctacgacgggtcaaggcctgcaaccccctagacgcagggc

SEQ ID NO: 375618 - DNA, 120 bp, Artificial Sequence
  ENSG00000142949_41 (sequence is synthesized)
ccatggtggtgcactgcagcgcgggcgtgggccgcaccggctgcttcatcgtgattgatgccatgttggagcggatgaagcacgagaagacggtggacatctatggccacgtgacctgca

SEQ ID NO: 375619 - DNA, 120 bp, Artificial Sequence
  ENSG00000142949_42 (sequence is synthesized)
tgcgatcacagaggaactacatggtgcagacggaggaccagtacgtgttcatccatgaggcgctgctggaggctgccacgtgcggccacacagaggtgcctgcccgcaacctgtatgccc

SEQ ID NO: 375620 - DNA, 120 bp, Artificial Sequence
  ENSG00000142949_43 (sequence is synthesized)
acatccagaagctgggccaagtgcctccaggggagagtgtgaccgccatggagctcgagttcaagttgctggccagctccaaggcccacacgtcccgcttcatcagcgccaacctgccct

SEQ ID NO: 375621 - DNA, 120 bp, Artificial Sequence
  ENSG00000142949_44 (sequence is synthesized)
gcaacaagttcaagaaccggctggtgaacatcatgccctacgaattgacccgtgtgtgtctgcagcccatccgtggtgtggagggctctgactacatcaatgccagcttcctggatggtt

SEQ ID NO: 375622 - DNA, 120 bp, Artificial Sequence
  ENSG00000142949_45 (sequence is synthesized)
atagacagcagaaggcctacatagctacacaggggcctctggcagagagcaccgaggacttctggcgcatgctatgggagcacaattccaccatcatcgtcatgctgaccaagcttcggg

SEQ ID NO: 375623 - DNA, 120 bp, Artificial Sequence
  ENSG00000142949_46 (sequence is synthesized)
agatgggcagggagaaatgccaccagtactggccagcagagcgctctgctcgctaccagtactttgttgttgacccgatggctgagtacaacatgccccagtatatcctgcgtgagttca

SEQ ID NO: 375624 - DNA, 120 bp, Artificial Sequence
  ENSG00000142949_47 (sequence is synthesized)
aggtcacggatgcccgggatgggcagtcaaggacaatccggcagttccagttcacagactggccagagcagggcgtgcccaagacaggcgagggattcattgacttcatcgggcaggtgc

SEQ ID NO: 375625 - DNA, 120 bp, Artificial Sequence
  ENSG00000142949_48 (sequence is synthesized)
ataagaccaaggagcagtttggacaggatgggcctatcacggtgcactgcagtgctggcgtgggccgcaccggggtgttcatcactctgagcatcgtcctggagcgcatgcgctacgagg

SEQ ID NO: 375626 - DNA, 120 bp, Artificial Sequence
  ENSG00000142949_49 (sequence is synthesized)
gcgtggtcgacatgtttcagaccgtgaagaccctgcgtacacagcgtcctgccatggtgcagacagaggaccagtatcagctgtgctaccgtgcggccctggagtacctcggcagctttg

SEQ ID NO: 375627 - DNA, 120 bp, Artificial Sequence
  ENSG00000142949_50 (sequence is synthesized)
accactatgcaacgtaactaccgctcccctctcctccgccacccccgccgtggggctccggaggggacccagctcctctgagccataccgaccatcgtccagccctcctacgcagatgct

SEQ ID NO: 375628 - DNA, 120 bp, Artificial Sequence
  ENSG00000142949_51 (sequence is synthesized)
gtcactggcagagcacagcccacggggatcacagcgtttcaggaacgttgccacaccaatcagagagcctagaacatccctgggcaagtggatggcccagcaggcaggcactgtggccct

SEQ ID NO: 375629 - DNA, 120 bp, Artificial Sequence
  ENSG00000142949_52 (sequence is synthesized)
tctgtccaccagacccacctggagcccgcttcaagctctctgttgcgctcccgcatttctcatgcttcttctcatggggtggggttggggcaaagcctcctttttaatacattaagtggg

SEQ ID NO: 375630 - DNA, 120 bp, Artificial Sequence
  ENSG00000142949_53 (sequence is synthesized)
gtagactgagggattttagcctcttccctctgatttttcctttcgcgaatccgtatctgcagaatgggccactgtaggggttggggtttattttgttttgtttttttttttcttgagttc

SEQ ID NO: 375631 - DNA, 120 bp, Artificial Sequence
  ENSG00000142949_54 (sequence is synthesized)
actttggatccttattttgtatgacttctgctgaaggacagaacattgccttcctcgtgcagagctggggctgccagcctgagcggaggctcggccgtgggccgggaggcagtgctgatc

SEQ ID NO: 375632 - DNA, 120 bp, Artificial Sequence
  ENSG00000142949_55 (sequence is synthesized)
cggctgctcctccagcccttcagacgagatcctgtttcagctaaatgcagggaaactcaatgtttttttaagttttgttttccctttaaagcctttttttaggccacattgacagtggtg

SEQ ID NO: 375633 - DNA, 120 bp, Artificial Sequence
  ENSG00000142949_56 (sequence is synthesized)
ggcggggagaagatagggaacactcatccctggtcgtctatcccagtgtgtgtttaacattcacagcccagaaccacagatgtgtctgggagagcctggcaaggcattcctcatcaccat

SEQ ID NO: 375634 - DNA, 88 bp, Artificial Sequence
  ENSG00000142949_57 (sequence is synthesized)
aataaaaaacgagtcagcccttggcttctgcttcaaaccctcaagaggggaagcaactccgtgtgcctggggttcccgagggagctgc

SEQ ID NO: 375635 - DNA, 120 bp, Artificial Sequence
  ENSG00000142949_58 (sequence is synthesized)
ggaagcaactccgtgtgcctggggttcccgagggagctgctggctgacctgggcccacagagcctggctttggtccccagcattgcagtatggtgtggtgtttgtaggctgtggggtctg

SEQ ID NO: 375636 - DNA, 120 bp, Artificial Sequence
  ENSG00000142949_59 (sequence is synthesized)
gctgtgtggccaaggtgaatagcacaggttagggtgtgtgccacaccccatgcacctcagggccaagcgggggcgtggctggcctttcaggtccaggccagtgggcctggtagcacatgt

SEQ ID NO: 375637 - DNA, 120 bp, Artificial Sequence
  ENSG00000142949_60 (sequence is synthesized)
ctgtcctcagagcaggggccagatgattttcctccctggtttgcagctgttttcaaagcccccgataatcgctcttttccactccaagatgccctcataaaccaatgtggcaagactact

SEQ ID NO: 375638 - DNA, 120 bp, Artificial Sequence
  ENSG00000142949_61 (sequence is synthesized)
ggacttctatcaatggtactctaatcagtccttattatcccagcttgctgaggggcagggagagcgcctcttcctctgggcagcgctatctagataggtaagtgggggcggggaagggtg

SEQ ID NO: 375639 - DNA, 120 bp, Artificial Sequence
  ENSG00000142949_62 (sequence is synthesized)
catagctgttttagctgagggacgtggtgccgacgtccccaaacctagctaggctaagtcaagatcaacattccagggttggtaatgttggatgatgaaacattcatttttaccttgtgg

SEQ ID NO: 375640 - DNA, 120 bp, Artificial Sequence
  ENSG00000142949_63 (sequence is synthesized)
atgctagtgctgtagagttcactgttgtacacagtctgttttctatttgttaagaaaaactacagcatcattgcataattcttgatggtaataaatttgaataatcagatttcttacaaa

SEQ ID NO: 375641 - DNA, 120 bp, Artificial Sequence
  ENSG00000142949_64 (sequence is synthesized)
agagctgtgctgcacctgccgggctctctgcccagagcccttggtgcagacacgcaagggactgccatgggcccagtctcttctccttcctgcttctttctgcagcagcagcaacagctc

SEQ ID NO: 375642 - DNA, 120 bp, Artificial Sequence
  ENSG00000142949_65 (sequence is synthesized)
ttccttgcaggcccatggggaagcagccactcttgggagcatttgtatcttttgtaggtcttgccgcatgggcccggagccccatgggaatttggagccatccaatccgacttcttggtg

SEQ ID NO: 375643 - DNA, 120 bp, Artificial Sequence
  ENSG00000142949_66 (sequence is synthesized)
tatgtgcatgtgtgtgtgcacacacgggcacacttatctgtgtgtaaatgcatgcatacctggcctggctttccttcagtacatcctcctgcctgccgcagcatggtgggctccagaacc

SEQ ID NO: 375644 - DNA, 120 bp, Artificial Sequence
  ENSG00000142949_67 (sequence is synthesized)
accatggctctgggctttggggtagtaaggcctcaggaacggaccaggccaggtgagcctatcctctggccaggtcttcctggagccttcctggaggaacccttgtgttcagctgtgagc

SEQ ID NO: 375645 - DNA, 120 bp, Artificial Sequence
  ENSG00000142949_68 (sequence is synthesized)
ccctgtggttatgttgcctcgggtgagcacctggtgtgttccagatgttctttgctgggagcgagtggacagtgtgctttctggaagtccaagttcccagcagagaggaacctggggact

SEQ ID NO: 375646 - DNA, 120 bp, Artificial Sequence
  ENSG00000142949_69 (sequence is synthesized)
gttttggggtttccaatctctgctatgctcacagcctaggggtgactaaagctggccaccttgccctttcctgagaacacactgggtctggtatacatgtgcccagaaggggccctgaga

SEQ ID NO: 375647 - DNA, 120 bp, Artificial Sequence
  ENSG00000142949_70 (sequence is synthesized)
gcccagaaggggccctgagagccccttctaccctcatactgtcccctcacctagccttcttgtacagatggatgtcattaaaagttaaactgttgaccgggtgtggtggctcacgcctgt

SEQ ID NO: 375648 - DNA, 120 bp, Artificial Sequence
  ENSG00000142949_71 (sequence is synthesized)
tatgtgcgaggtcttgccgcatgggcccggagccccatgggaatttggagccatccaatccgacttcttggtgtatgtgcatgtgtgtgtgcacacacgggcacacttatctgtgtgtaa

SEQ ID NO: 375649 - DNA, 120 bp, Artificial Sequence
  ENSG00000142949_72 (sequence is synthesized)
gggaggggaggcgttctgcctcagacaccacccaccaagctccccagggccttcctttcctgaacacaggcccaggtcaactcatctttctggttcaggtgtaatggcctaaagtggggg

SEQ ID NO: 375650 - DNA, 120 bp, Artificial Sequence
  ENSG00000142949_73 (sequence is synthesized)
gatgtcacttacgggataactgaggcccaaatcccagcctttggggctgtctccaaagcagctgaaaccttcacaggctaagatgggagaagcagccctgtctaagatttgaaaggtcaa

SEQ ID NO: 375651 - DNA, 120 bp, Artificial Sequence
  ENSG00000142949_74 (sequence is synthesized)
gattgggcagattggtgtaaaagatactcaaagtagaatcagcaagactccacgttggctggacattggcatgattggggcctaggaggagtcaggacaggttgtgctgactaggggtgg

SEQ ID NO: 375652 - DNA, 120 bp, Artificial Sequence
  ENSG00000142949_75 (sequence is synthesized)
tcaaagacctggtgccccacctccacctgttcccccatgtcgaccctccccaccaagtgagaggcctgggccagaggggtgggcagggccagtcctgggctcttacccgtggcgggcaga

SEQ ID NO: 375653 - DNA, 120 bp, Artificial Sequence
  ENSG00000142949_76 (sequence is synthesized)
gggagccttccgtgtgcctcaccagggacagatgatctaaggaaactgtatcagggcctttcctgggggagtggggtgctgaggcaggaccctcaagtttgctgtgcccacctgagctag

SEQ ID NO: 375654 - DNA, 120 bp, Artificial Sequence
  ENSG00000142949_77 (sequence is synthesized)
ctattgtgtctgtacttcatgaccactccatctacacacttggtgcccgggatgacgatggctgtgagtctcccatggtgactgccaccggtgaggggcaggagggctgtctgcaggcag

SEQ ID NO: 375655 - DNA, 120 bp, Artificial Sequence
  ENSG00000142949_78 (sequence is synthesized)
atgcgatggagcccagctcctgtcacgtctgctgccaccgacctgggcgtcccacccctcctgggaggaaggaagcctctcttccatcttgagagacctgccaggcagggcctagtgccc

SEQ ID NO: 375656 - DNA, 120 bp, Artificial Sequence
  ENSG00000142949_79 (sequence is synthesized)
ccactcagcaccccgccaccaaaacaggctccacatgctcatggcacaacaccgccctctgtcctctcccaccctccgccatccctgtcgccgcatgtgctgctgtctccatgccaccag

SEQ ID NO: 375657 - DNA, 120 bp, Artificial Sequence
  ENSG00000142949_80 (sequence is synthesized)
ttccaagtgctccatggtcacacatgttcacatgtgcacatacatgcgttggggctttctctgccacactgctcaagcctcacactaatgctgcctgtgtatgccctacctcccctaggt

SEQ ID NO: 375658 - DNA, 120 bp, Artificial Sequence
  ENSG00000142949_81 (sequence is synthesized)
ccagggcccctgtcatacctgggagaacaccagccacccttgggggagctgccgcctatgttactgtctcctttgacaccccagctgcttgtcagcatggcctcaggcgcccgttattac

SEQ ID NO: 375659 - DNA, 120 bp, Artificial Sequence
  ENSG00000142949_82 (sequence is synthesized)
gcgtgtgtggactgaaacccaaaagccagaaactctctgcatgtgtccctcatggagccatatggtctctagtctctgtttttcaaaatttgcaggactgatgactgattggacagtggt

SEQ ID NO: 375660 - DNA, 120 bp, Artificial Sequence
  ENSG00000142949_83 (sequence is synthesized)
agctgctggggccagggtggagccctgccctcctcagagcctggcctacctgtgccaggactaccagccttccccctttctctagggacctggctgcgggccacagctgtctaaaacagg

SEQ ID NO: 375661 - DNA, 120 bp, Artificial Sequence
  ENSG00000142949_84 (sequence is synthesized)
aggagaacacgaggtcaacagcagagagatctgatgagacggagcagtgatcgcgaggtagagggagcaaggactgatgactgattggacagtggtgcaggagggaaggtctctgcatgt

SEQ ID NO: 375662 - DNA, 120 bp, Artificial Sequence
  ENSG00000142959_0 (sequence is synthesized)
agttcatcttccacacgggctgctgcccagagcaggtaggcaggtatgggatgggggtgagagtgccctgggccctggtagttctagttaatcagcttccaaagcaaggccccaaggaat

SEQ ID NO: 375663 - DNA, 120 bp, Artificial Sequence
  ENSG00000142959_1 (sequence is synthesized)
agcagtggatttgggctggagctgcgtctcttgtccgcagcagttcaggatctggttatccctagccctgcaggctgaagaggagcttgaggaaacctcatgcatgaagggacacagatc

SEQ ID NO: 375664 - DNA, 120 bp, Artificial Sequence
  ENSG00000142959_2 (sequence is synthesized)
tcagttctaccttgtccaactctagcctggctttgcccatgtactgctcagttctgcagggggtggggtgtacttttctgctctgcaggctcctacccccttgtccactgacgcagggtg

SEQ ID NO: 375665 - DNA, 120 bp, Artificial Sequence
  ENSG00000142959_3 (sequence is synthesized)
aaggctggggtgtgtgagaccagagtggaagggaggttgtctggagaactaaacgacagccctgggggcaactcttgtgacctcctgccccaggctcccagcaccatgacggtttcatac

SEQ ID NO: 375666 - DNA, 120 bp, Artificial Sequence
  ENSG00000142959_4 (sequence is synthesized)
actctcaaagtggcggaggcccgcttcggaggtttctctggcctgcttctccgctggaggggaagcatctacaagctcctctacaaggaattcctcctctttggggccttgtacgctgtg

SEQ ID NO: 375667 - DNA, 120 bp, Artificial Sequence
  ENSG00000142959_5 (sequence is synthesized)
cttagcatcacctaccggctgctgctgacccaggagcagaggtacgtgtatgctcaggtggcccggtactgcaaccgctcagcagacctcattcccttgtcctttgtattgggtttctat

SEQ ID NO: 375668 - DNA, 120 bp, Artificial Sequence
  ENSG00000142959_6 (sequence is synthesized)
gtgactctcgtggtgaaccgctggtggtcccagtacacaagcatcccgctgccagaccagctgatgtgcgtcatctcggctagcgtgcacggcgtggaccagcggggccgcctgctgcgc

SEQ ID NO: 375669 - DNA, 120 bp, Artificial Sequence
  ENSG00000142959_7 (sequence is synthesized)
cgcaccctcatccgctacgcgaacctggcgtccgtgctggtgctgcgctcggtcagcacccgcgtgcttaagcgcttccccaccatggagcacgtggtggacgcaggtttcatgtcccag

SEQ ID NO: 375670 - DNA, 120 bp, Artificial Sequence
  ENSG00000142959_8 (sequence is synthesized)
gaagagaggaaaaagtttgagagcctgaaatccgacttcaacaagtactgggtcccctgcgtctggttcaccaacctggcggcccaggcccggagggacgggcgaatacgtgacgatatc

SEQ ID NO: 375671 - DNA, 120 bp, Artificial Sequence
  ENSG00000142959_9 (sequence is synthesized)
gctctctgtctacttttggaagagctgaacaagtaccgagccaagtgcagcatgctattccactatgactggatcagcatccccctcgtctacacccaagtggtgaccatagccgtctac

SEQ ID NO: 375672 - DNA, 120 bp, Artificial Sequence
  ENSG00000142959_10 (sequence is synthesized)
acccggacatgtacgtgcctctcaccactctgctgcagttcttcttctatgctggctggctcaaggtggctgaacagatcatcaacccatttggtgaggatgatgacgactttgagacaa

SEQ ID NO: 375673 - DNA, 120 bp, Artificial Sequence
  ENSG00000142959_11 (sequence is synthesized)
atcagctcatagaccgcaacttgcaggtgtccctgctatccgtggacgaaatgtaccagaaccttccccccgctgagaaggaccagtactgggatgaggaccagccgcagccaccctaca

SEQ ID NO: 375674 - DNA, 120 bp, Artificial Sequence
  ENSG00000142959_12 (sequence is synthesized)
ctgtggccacggcggccgagtctctgcggccctcattcctgggctccaccttcaacctgcgcatgagcgacgaccctgagcagagcctgcaggtggaggcgtcccccggatctggtcggc

SEQ ID NO: 375675 - DNA, 120 bp, Artificial Sequence
  ENSG00000142959_13 (sequence is synthesized)
gccgcgcagaccccgttgctcggccgcttcctgggcgtaggggcgccctccccggccatcagcctccggaacttcggccgcgtgcgaggcaccccccgccccccgcatctgctgcgcttc

SEQ ID NO: 375676 - DNA, 120 bp, Artificial Sequence
  ENSG00000142959_14 (sequence is synthesized)
tgcgcttccgggcggaggagggcggcgaccccgaggccgcagcccgcatcgaggaggaatcggcggagtccggggacgaggccctggagccctgaggtctcgcctgcccccgcccggttt

SEQ ID NO: 375677 - DNA, 120 bp, Artificial Sequence
  ENSG00000142959_15 (sequence is synthesized)
cccccacccactgccctccttccctcccgtgcccggtcctgccagccagctctattagagcagcttttcctgtgtgccttgaaggccagagcatttagggacagaacttgaaagagaaga

SEQ ID NO: 375678 - DNA, 120 bp, Artificial Sequence
  ENSG00000142959_16 (sequence is synthesized)
tggcgaaaagggcctgagccagggctgggaatgtgtccactttggtgggagagaaggtcggttgcttgggggacgtgaagctagaaaaataaatgagcccaggcatagaggactagagcc

SEQ ID NO: 375679 - DNA, 120 bp, Artificial Sequence
  ENSG00000142959_17 (sequence is synthesized)
caggtgcacggttagcttcacagcaacagggagctaggccattggttctcaaacttaaggaaggatcagcatcacggaaggtcttgtcaaaagagtgctgggcaccactcccagcatttc

SEQ ID NO: 375680 - DNA, 120 bp, Artificial Sequence
  ENSG00000142959_18 (sequence is synthesized)
tggcacgttagatttgggatggcgcccaataacttgcatttctaacaagttcccaggtgatgctgtgctgcttgtccaggaaacacaatttgagagtcatgtgaaacgtgcttgaagggg

SEQ ID NO: 375681 - DNA, 120 bp, Artificial Sequence
  ENSG00000142959_19 (sequence is synthesized)
tataccttaccctggtaaccttactcaaaagaagggtcagtgtgtgctgggggacttttgccttgtttgtaatgttaaagtttttgtttacattgagaatatattcaagtttttgtttaa

SEQ ID NO: 375682 - DNA, 120 bp, Artificial Sequence
  ENSG00000142961_0 (sequence is synthesized)
gcggcgtggcggggccggggcggagctggcgtcgcccggggcaggagggcagccgcggccggcaggacaggcagacggacaggctgacaggagagagaacaggcactgcgggacctgcag

SEQ ID NO: 375683 - DNA, 120 bp, Artificial Sequence
  ENSG00000142961_1 (sequence is synthesized)
acctgcaggagaaaggcgatcctgtggctgggaatgtgaccccacggccagaagaggacccggtatcctcaggtccgagcccctggacagcagccccaggcccagctggccatggccctg

SEQ ID NO: 375684 - DNA, 120 bp, Artificial Sequence
  ENSG00000142961_2 (sequence is synthesized)
tgcctgaagcaggtgttcgccaaggacaagacgttccggccgcggaagcgctttgagccgggcacacagcgctttgagctgtacaagaaggcacaggcctctctcaagtcgggcctggac

SEQ ID NO: 375685 - DNA, 120 bp, Artificial Sequence
  ENSG00000142961_3 (sequence is synthesized)
ctgcgcagtgtggtgaggctaccacccggggagaacatcgacgactggatcgccgtgcacgtggtggacttcttcaaccgcatcaacctcatctacggcactatggcggagcgctgcagt

SEQ ID NO: 375686 - DNA, 120 bp, Artificial Sequence
  ENSG00000142961_4 (sequence is synthesized)
gagaccagctgcccggtcatggccggcgggccccgctacgagtaccgctggcaggacgagcgccagtaccggcggcccgccaagctctctgcgccgcgctatatggcattgctcatggac

SEQ ID NO: 375687 - DNA, 120 bp, Artificial Sequence
  ENSG00000142961_5 (sequence is synthesized)
tggatcgaaggcctcatcaacgacgaagaggtctttcccacgcgtgttggagttcccttccctaagaacttccagcaggtctgcaccaagatcctgacccgcctcttccgagtctttgtc

SEQ ID NO: 375688 - DNA, 120 bp, Artificial Sequence
  ENSG00000142961_6 (sequence is synthesized)
catgtctacatccaccacttcgatagcatcctcagcatgggggcagaggcgcacgtcaacacctgctacaagcacttctactacttcatccgcgagttcagtctggtggaccagcgggag

SEQ ID NO: 375689 - DNA, 120 bp, Artificial Sequence
  ENSG00000142961_7 (sequence is synthesized)
ctggagccactgagggagatgacagagcggatctgccactgagcccaggtctggacttttttggccatcagatggacgatctgaacatagggtggctggcagaggggacccccaggagcc

SEQ ID NO: 375690 - DNA, 120 bp, Artificial Sequence
  ENSG00000142961_8 (sequence is synthesized)
tgaaggaatctgaaggcactggaatcactccacacacccaaagcctctggacttctggttctcaggagtctgcctacctgtcgccctgaccgcttgtggatggagaaggggagagcatct

SEQ ID NO: 375691 - DNA, 120 bp, Artificial Sequence
  ENSG00000142961_9 (sequence is synthesized)
aggcaggcaaacagaagggaagtggagttaaacctctggcatgaagtctgggagtagggtaggctagggggtttcttctatgacacttgacccttccatgctggttcccaagcctattgg

SEQ ID NO: 375692 - DNA, 120 bp, Artificial Sequence
  ENSG00000142961_10 (sequence is synthesized)
aggaatgtgggtgtggccgaggtgatggcaagaaaggtgcaagaaagtgagcagtctgcctgtgagtgagcacagatgccggggtgtgtgtgtgtgtgtgtgattttcactgtggggtgt

SEQ ID NO: 375693 - DNA, 120 bp, Artificial Sequence
  ENSG00000142961_11 (sequence is synthesized)
atggatggataaatagattgggaccatcagaccatgggaccatcagaccatgaccactgtaggagtgatgacagctcagcgtccccactcagtgtatctgaccatgtgtgtaagtgcaca

SEQ ID NO: 375694 - DNA, 120 bp, Artificial Sequence
  ENSG00000142961_12 (sequence is synthesized)
aaaatgtggttgtagatgttgctctacattcaaaccttccaggctacactcttccatcagcatgagtcctggagagctgggggaacgtaggaagaggagccttgccttgagttcctaaac

SEQ ID NO: 375695 - DNA, 120 bp, Artificial Sequence
  ENSG00000142961_13 (sequence is synthesized)
cgacccactgcagacacaggctctgattctcttacccagagatgcccatgagctgacattttactcatccctctgcctccaagaaggcctgtattatacgtgtcctcctgggggttggag

SEQ ID NO: 375696 - DNA, 120 bp, Artificial Sequence
  ENSG00000142961_14 (sequence is synthesized)
atgatccctcaagtacacaaaggtcccctggcccttcatctgggaatcatatactccactctagctcccagaatctacagacctggctcctcggatctgaagcccagcacaaaataatct

SEQ ID NO: 375697 - DNA, 120 bp, Artificial Sequence
  ENSG00000142961_15 (sequence is synthesized)
ccccgtccaaggagcttgtggaacttgaattgggaactttggagtcttgtctcccatcccagcacattgaggatgtagttggtgaatggactcttccaggcatggagatcctccatccta

SEQ ID NO: 375698 - DNA, 120 bp, Artificial Sequence
  ENSG00000142961_16 (sequence is synthesized)
aaagtacctgcctccttcccagccatccctgacacattccagccagttggatctcacagcacagctatccacagggagactgggatgttcacgcagcactccattactcagtacctccat

SEQ ID NO: 375699 - DNA, 120 bp, Artificial Sequence
  ENSG00000142961_17 (sequence is synthesized)
acccagccctatacgcagacccacaggtggggaaactgaggcaggaacagggttctgccctcccagagcctccactctgggatgccagaatggaaagccagagggaacctgagaatcatc

SEQ ID NO: 375700 - DNA, 120 bp, Artificial Sequence
  ENSG00000142961_18 (sequence is synthesized)
cagtcttactgtctcaatgtacatacggggaaactgaagccaggagaagaagagggagaaactgtccagggcctcacagggaggcattcatggagctggagaaaccagggatcctgaccg

SEQ ID NO: 375701 - DNA, 120 bp, Artificial Sequence
  ENSG00000142961_19 (sequence is synthesized)
cagggcccatcaattgctacatagagatacacatggaaagagggtttaacagaccctctctaggacacaactgtttctgctttgagcaataatttctaacctgaggccaacatgtcccac

SEQ ID NO: 375702 - DNA, 120 bp, Artificial Sequence
  ENSG00000142961_20 (sequence is synthesized)
tgccccttgggttggctggggttgtttcctgagccaagcatccaatatcatgccccactcaatggcctagaagctgcctgtactttggggaaacagatggagctcttgggcccagccagc

SEQ ID NO: 375703 - DNA, 120 bp, Artificial Sequence
  ENSG00000142961_21 (sequence is synthesized)
tgggcctgggacttctgcctctgccgcctccagagtggcctggcagctttgccagaggctgtggagcgagggtagtaggagcttttcccagagtgctgtgacttgcatgatggattctag

SEQ ID NO: 375704 - DNA, 120 bp, Artificial Sequence
  ENSG00000142961_22 (sequence is synthesized)
gctgtggcaagggctgatttctgggatagggggagggttggaaaatttatttttatgaaacagagggaagactttattgttgttatttttggtaaaataaaaggcaaactaaagcagcca

SEQ ID NO: 375705 - DNA, 120 bp, Artificial Sequence
  ENSG00000142961_23 (sequence is synthesized)
tgtcaggcgggctcctctgggtcctacgaccttcctggccctgggagctggtttgaggttgcagggaagccgggggtgggcgtgggtggctgcgcgccgcgaggagagcgtggagtcttc

SEQ ID NO: 375706 - DNA, 120 bp, Artificial Sequence
  ENSG00000142961_24 (sequence is synthesized)
gcctctactttttctcttcgacctctgtcctagagagagtcccaggatggattctgggttcaaactggggccatcctctggcccagatcctgggccaggcccaaggagtggtagatgtag

SEQ ID NO: 375707 - DNA, 120 bp, Artificial Sequence
  ENSG00000142961_25 (sequence is synthesized)
cctagcagggggctaaatatcagaaacaggtagggtcagcctgctgtcttcatttgagaagcccagatccgcacccagggaacgagcaaggcactgccactccaggagtgaaaggatagc

SEQ ID NO: 375708 - DNA, 120 bp, Artificial Sequence
  ENSG00000142961_26 (sequence is synthesized)
catcactgggaaatgggggctaggacggggaacggcagtggttcagggagagacagaggttctgtgacagatagaaactcagtgagggcatgggggtggggagtgaagggagttaaccct

SEQ ID NO: 375709 - DNA, 120 bp, Artificial Sequence
  ENSG00000142961_27 (sequence is synthesized)
gtggctagaagagcacctgccctgcacccaccccctgagcttacattttcctggaaagagacccaggccttgaagttccacaggagtaaggtggaactctagctcactggtcaggacacc

SEQ ID NO: 375710 - DNA, 120 bp, Artificial Sequence
  ENSG00000142961_28 (sequence is synthesized)
ccagttgctgtgcggagtcagtgtgttggggacaggaagcaggttgggctgtttggtggagaagatgcttccactgtccctccactcccctcctcttctctgtctccaccagaccattga

SEQ ID NO: 375711 - DNA, 120 bp, Artificial Sequence
  ENSG00000142961_29 (sequence is synthesized)
tgagccagtgcaggaaaatggtcttttactcttggtcatgagctgagccccaccttatcccagttcccagttctgcttgtaacttgctatgtggacacaggctcctcaagtcctcttttt

SEQ ID NO: 375712 - DNA, 120 bp, Artificial Sequence
  ENSG00000142961_30 (sequence is synthesized)
aggcctcagtttcctcatctgggcctcagtttccccatctgtacaagtgagttgggccagctgatctatcagggctattttaactctaagattctagtctaagctttccttaaagcctga

SEQ ID NO: 375713 - DNA, 120 bp, Artificial Sequence
  ENSG00000142961_31 (sequence is synthesized)
acactgactttgtgccaggccttgtcctaagctgggggtgggttggggatggagtggagactgcaatgaccaaaagcagcctctacccaaggagaaggagatctgagttcaggagaggag

SEQ ID NO: 375714 - DNA, 120 bp, Artificial Sequence
  ENSG00000142961_32 (sequence is synthesized)
gctgtgggaggaggtagcagccaatctgaggatgtgtggtcaggcaggtggagggataagaaaacatgcagaggcaaaagagtgggggcgtgttcaggaatcaggaagaagcccagggtg

SEQ ID NO: 375715 - DNA, 120 bp, Artificial Sequence
  ENSG00000142961_33 (sequence is synthesized)
gttggtgtggggaggtgggaagtggggcaggaaaggtaggacaaggtgctgaatgccagggtgggggcctatttctaactgtcataaagggggccatgcaatgtggggagcccaggagcc

SEQ ID NO: 375716 - DNA, 120 bp, Artificial Sequence
  ENSG00000142961_34 (sequence is synthesized)
ccgcctaattgcagtgtgagggattttggaagcacttgccccaagcagagtttaaaatggagatggcaaatgaagcgcagaaatctctttgctctggaaactggggtcccaccctgggga

SEQ ID NO: 375717 - DNA, 120 bp, Artificial Sequence
  ENSG00000142961_35 (sequence is synthesized)
cttctttgggtgagaagtcgaagagtcgggatggatgagatgacctttcacatctgtgagtttttttcaagagaacaagttcctgctgaatggcctgtttctactctccaagctgctctc

SEQ ID NO: 375718 - DNA, 120 bp, Artificial Sequence
  ENSG00000142961_36 (sequence is synthesized)
attttaccagactgcccccatcctggcctgcctttgtgggttcaaggaaggacctttgtctcaaacagctccccagctagtttgacttcttgccagaagtaatacccctccccgaaatat

SEQ ID NO: 375719 - DNA, 120 bp, Artificial Sequence
  ENSG00000142961_37 (sequence is synthesized)
gtgccatccctttgcttttacccaggtgtcacctggttcccaccctcccttccccaatcctgtcccagggttaccagagatgtgagaaaggacagtgctccagcgtcagaggtcaagccc

SEQ ID NO: 375720 - DNA, 120 bp, Artificial Sequence
  ENSG00000142961_38 (sequence is synthesized)
aggctttggccataagcaagcctcagggtagggctaaaggctagagtcagggctcacacttgccagagcccaggtcagaggtcagccaggaaccagaatgcaattcttagcttatactca

SEQ ID NO: 375721 - DNA, 120 bp, Artificial Sequence
  ENSG00000142961_39 (sequence is synthesized)
gccttagtgctcagtctaggggcaggggcagtgtgcttagtgggtggctaaattctagttttggtaggtacatgggtctgcatttcccagtagctcacacactcacagttgagatgagat

SEQ ID NO: 375722 - DNA, 120 bp, Artificial Sequence
  ENSG00000142961_40 (sequence is synthesized)
gactcaggtcttagaaacctagctatagcagagtgacccaggacctggatgggctaaatccatggtgatacaggggtcacccagtaagccagtggtagagctgggactagaacccaggac

SEQ ID NO: 375723 - DNA, 120 bp, Artificial Sequence
  ENSG00000142961_41 (sequence is synthesized)
tcctgcctctgagcctagggccctgatcactgtctcccaaaatttgttctgaatctgggatccttaaattctaggaggcaaagtaaatttgcctgagctctagatgggccctcctgggtg

SEQ ID NO: 375724 - DNA, 120 bp, Artificial Sequence
  ENSG00000142961_42 (sequence is synthesized)
catctgactatactcttctacctcccagtgccaggcacatagtagttgctagaggaatgtctactgagtgtcaggtgcaacgggaggagccagtggcttgttcagatttggggctggagg

SEQ ID NO: 375725 - DNA, 120 bp, Artificial Sequence
  ENSG00000142961_43 (sequence is synthesized)
aggctggcttgaggggaaggatctccagctgttgtcagaggaagcgacgccctcattggcctgccgccctccccctcctccagtgcttgcagccacactcagaagccgcccagctggcag

SEQ ID NO: 375726 - DNA, 120 bp, Artificial Sequence
  ENSG00000142961_44 (sequence is synthesized)
cgggagggccctttcctctttcagggtgaaaaaaaaggaaaggacatttttggtagaaaagttccctgctgctccctgggaatccccggtggccggatggactacgggatatcccagagg

SEQ ID NO: 375727 - DNA, 120 bp, Artificial Sequence
  ENSG00000142961_45 (sequence is synthesized)
aagccgaaagccacccccgacccccctccaccctgcccccagcacaatgctgcgaggctctcccacgttgcaccagctggccaagggggctcccagaggtcatctcgtccaagcccctgt

SEQ ID NO: 375728 - DNA, 120 bp, Artificial Sequence
  ENSG00000142961_46 (sequence is synthesized)
agctctgcaatgaaagcagaaaagagacaaagcaagatgggaggactgtgggggcttagcaagggggactaacatagcctggaaagagggcggggcactggacctaggggctgaggactt

SEQ ID NO: 375729 - DNA, 120 bp, Artificial Sequence
  ENSG00000142961_47 (sequence is synthesized)
agattccaggcagaggatgcagaggttgagcaaaggctgagaggtgacagggaaatgatgaattgggaagtcagagcccagatgataaggccttgaccgccagctcccctatgcccttgt

SEQ ID NO: 375730 - DNA, 120 bp, Artificial Sequence
  ENSG00000142973_0 (sequence is synthesized)
aggtcagatgaaggctaggtggctggaactgcaaccatggtgcccagcttcctctccctgagcttctcctccttgggcctgtgggcttctgggctgatcttggtcttaggctttctcaag

SEQ ID NO: 375731 - DNA, 120 bp, Artificial Sequence
  ENSG00000142973_1 (sequence is synthesized)
ctcatccacctgctgctgcggaggcagacgttggctaaggctatggacaaattcccagggcctcccacccactggctttttggacatgccctcgagatccaggagacggggagcctggac

SEQ ID NO: 375732 - DNA, 120 bp, Artificial Sequence
  ENSG00000142973_2 (sequence is synthesized)
aaagtggtgtcctgggcccaccagttcccgtatgcccacccactctggttcggacagttcattggcttcctgaacatctatgagcctgactatgccaaagctgtgtacagccgtggggac

SEQ ID NO: 375733 - DNA, 120 bp, Artificial Sequence
  ENSG00000142973_3 (sequence is synthesized)
cctaaggcccctgatgtgtatgacttcttcctccagtggattgggagaggcctgctggttcttgaggggcccaagtggttgcagcaccgcaagctgctcacacctggctttcattatgat

SEQ ID NO: 375734 - DNA, 120 bp, Artificial Sequence
  ENSG00000142973_4 (sequence is synthesized)
gtgctgaagccctatgtggccgtgttcactgagtctacacgtatcatgctggacaagtgggaagagaaagctcgggagggtaagtcctttgacatcttctgcgatgtgggtcacatggcg

SEQ ID NO: 375735 - DNA, 120 bp, Artificial Sequence
  ENSG00000142973_5 (sequence is synthesized)
ctgaacacactcatgaagtgcacctttggaagaggagacaccggcctgggccacagggacagcagctactaccttgcagtcagcgatctcactctgttgatgcagcagcgccttgtgtcc

SEQ ID NO: 375736 - DNA, 120 bp, Artificial Sequence
  ENSG00000142973_6 (sequence is synthesized)
ttccagtaccataatgacttcatctactggctcaccccacatggccgccgcttcctgcgggcctgccaggtggcccatgaccatacagaccaggtcatcagggagcggaaggcagccctg

SEQ ID NO: 375737 - DNA, 120 bp, Artificial Sequence
  ENSG00000142973_7 (sequence is synthesized)
caggatgagaaggtgcggaagaagatccagaaccggaggcacctggacttcctggacattctcctgggtgcccgggatgaagatgacatcaaactgtcagatgcagacctccgggctgaa

SEQ ID NO: 375738 - DNA, 120 bp, Artificial Sequence
  ENSG00000142973_8 (sequence is synthesized)
gtggacacattcatgtttgaaggccatgacaccaccaccagtggtatctcctggtttctctactgcatggccctgtaccctgagcaccagcatcgttgtagagaggaggtccgcgagatc

SEQ ID NO: 375739 - DNA, 120 bp, Artificial Sequence
  ENSG00000142973_9 (sequence is synthesized)
ggacttcttccagtgggatgatctgggcaaaatgacttatctgaccatgtgcatcaaggagagcttccgcctctacccacctgtgccccaggtgtaccgccagctcagcaagcctgtcac

SEQ ID NO: 375740 - DNA, 120 bp, Artificial Sequence
  ENSG00000142973_10 (sequence is synthesized)
ctttgtggatggccggtctctacctgcaggaagcctgatctctatgcatatctatgccctccataggaacagtgctgtatggcccgaccctgaggtctttgactctctgcgcttttccac

SEQ ID NO: 375741 - DNA, 120 bp, Artificial Sequence
  ENSG00000142973_11 (sequence is synthesized)
tgagaatgcatccaaacgccatccctttgcctttatgcccttctctgctgggcccaggaactgcattgggcagcagtttgccatgagtgagatgaaggtggtcacagccatgtgcttgct

SEQ ID NO: 375742 - DNA, 120 bp, Artificial Sequence
  ENSG00000142973_12 (sequence is synthesized)
ccgctttgagttctctctggacccctcacggctgcccatcaagatgccccagcttgtcctgcgctccaagaatggctttcacctccacctgaagccactgggccctgggtctgggaagta

SEQ ID NO: 375743 - DNA, 120 bp, Artificial Sequence
  ENSG00000142973_13 (sequence is synthesized)
gctctgatgagaatggggtcccagatggctcaggctgtgacctccctgggcaccaccctccccaggctgggtgtggaggagttggggccccctgccttcaggaggcttgtagtttagaag

SEQ ID NO: 375744 - DNA, 120 bp, Artificial Sequence
  ENSG00000142973_14 (sequence is synthesized)
ggaagtaggcattaccatagacgactcctagaggacagtgctatgtaaaaatgtgtgtctataaatgtttatcatgcatgtattctagagctcattcatttattcaacaaacatttggtg

SEQ ID NO: 375745 - DNA, 120 bp, Artificial Sequence
  ENSG00000142973_15 (sequence is synthesized)
agcacctatttcgttcgagaaacttcatttatctcctataattggcaaacttaaaaatgcagcagaaacttacattccaaccttagagactcatagtgagcacaaggaaagttttgccct

SEQ ID NO: 375746 - DNA, 120 bp, Artificial Sequence
  ENSG00000142973_16 (sequence is synthesized)
gagattcatggttatggctgggtaccaccaaatagaagaatggcttaggggagtgccccttcactgagatgtgtttctttgttgaactttgtgtgtgtgtgtttagaatataacagacat

SEQ ID NO: 375747 - DNA, 120 bp, Artificial Sequence
  ENSG00000142973_17 (sequence is synthesized)
aagaaaaaattacctaaatgaagactgtacaaaataataaataattctgaagcagactctcttgtaaccatcactgaagtcaagaaatatggaatatggtatcactgatgtgtcttctgc

SEQ ID NO: 375748 - DNA, 120 bp, Artificial Sequence
  ENSG00000142973_18 (sequence is synthesized)
cgtgtcctttgtctcacatctggcaatgtcatctgacacaagttcctggacccaggctttgtgggtgcagctgagatacagaaactgagttatcctgtcctaaggaaggagctcactcag

SEQ ID NO: 375749 - DNA, 120 bp, Artificial Sequence
  ENSG00000142973_19 (sequence is synthesized)
cctgctcagcccttgggaagggcgatgcccatcctgtcctgaaccatcctggaaatcaggtgaggtggcggctgctatcctgttacccccagtgtcataccttttgtggtggtggggggt

SEQ ID NO: 375750 - DNA, 120 bp, Artificial Sequence
  ENSG00000142973_20 (sequence is synthesized)
aattcttggttgtccttgcgggagattgggtcacctgccaccatctggctcaaaaatgggagtttagctcttgttgcccagcctggagtgcagggctgtgatcttggctcactgcaacct

SEQ ID NO: 375751 - DNA, 120 bp, Artificial Sequence
  ENSG00000142973_21 (sequence is synthesized)
ctcccaagtagctggtattacaggcacagctacaaggaacacccttcattggtctctgggtataattataggaattgggtatgtggctagaagaagaatcactgggtggtgaggtttgtg

SEQ ID NO: 375752 - DNA, 120 bp, Artificial Sequence
  ENSG00000142973_22 (sequence is synthesized)
agtttatactcctcatagaaataggtgtaagatattgttaagacgcactatcttagcatgagacgggacttcttccaaccctcctatggaacagatgggcagactgaggacctgagaagg

SEQ ID NO: 375753 - DNA, 120 bp, Artificial Sequence
  ENSG00000142973_23 (sequence is synthesized)
aatctacttgcccaggatcacacattgaagttttctatgggactcttaaaggaagaactaagactactgggtggaagcttccaagaactttggcttccacaaatcacactgccaagatgg

SEQ ID NO: 375754 - DNA, 120 bp, Artificial Sequence
  ENSG00000142973_24 (sequence is synthesized)
ctctgtgcctttagtcaaatctttgcacttttggggaagagctcaggctttgcgttcagagagccctgggtctaaatcccagccccacaacatattgatcaattcttctacctctgagcc

SEQ ID NO: 375755 - DNA, 120 bp, Artificial Sequence
  ENSG00000143001_0 (sequence is synthesized)
agcgctggacacctggagctgcccgaggacgcggaggagaggtggggcgggcgtcaccaccggagtggagggcgaggcccgggtcccgcgctcccctgggcgccccacggcagcctcaga

SEQ ID NO: 375756 - DNA, 120 bp, Artificial Sequence
  ENSG00000143001_1 (sequence is synthesized)
gcgccggggtgaggcctggctcggtccctgcgcaccgggtgcgggcggcggagagggcgcggctggtgagccctgggagggcccaggagccagacctcggttttgcgggctggggagcag

SEQ ID NO: 375757 - DNA, 120 bp, Artificial Sequence
  ENSG00000143001_2 (sequence is synthesized)
gccagacctcggttttgcgggctggggagcagggctcgggggcagcggccaggcccctccgcccctaacacccgcgcctcctgcagacccgagggtcgccgctggtagggtcgctcagcc

SEQ ID NO: 375758 - DNA, 120 bp, Artificial Sequence
  ENSG00000143001_3 (sequence is synthesized)
ctggcgtcctccaccaccacaccttcacctgcgcccggctccctgcgcgcctggacagcgcctgctgcccgcctcccgatggccctgccccagatgtgtgacgggagccacttggcctcc

SEQ ID NO: 375759 - DNA, 120 bp, Artificial Sequence
  ENSG00000143001_4 (sequence is synthesized)
accctccgctattgcatgacagtcagcggcacagtggttctggtggccgggacgctctgcttcgcttggtggagcgaaggggatgcaaccgcccagcctggccagctggccccacccacg

SEQ ID NO: 375760 - DNA, 120 bp, Artificial Sequence
  ENSG00000143001_5 (sequence is synthesized)
ctgcggtgcaggtggcctgctgctgctcattggcctgctgtggtccgtcaaggccagcatcccagggccacctcgatgggacccctatcacctctccagagacctgtactacctcactgt

SEQ ID NO: 375761 - DNA, 120 bp, Artificial Sequence
  ENSG00000143001_6 (sequence is synthesized)
ggagtcctcagagaaggagagctgcaggacccccaaagtggttgacatccccacttacgaggaagccgtgagcttcccagtggccgaggggcccccaacaccacctgcataccctacgga

SEQ ID NO: 375762 - DNA, 120 bp, Artificial Sequence
  ENSG00000143001_7 (sequence is synthesized)
ggaagccctggagccaagtggatcgagggatgccctgctcagcacccagcccgcctggcctccacccagctatgagagcatcagccttgctcttgatgccgtttctgcggagacgacacc

SEQ ID NO: 375763 - DNA, 120 bp, Artificial Sequence
  ENSG00000143001_8 (sequence is synthesized)
gagtgccacacgctcctgctcaggcctggttcagactgcacggggaggaagttaaaggctcctagcaggtcctgaatccagagacaaaaatgccgtgccttctccagagtcttatgcagt

SEQ ID NO: 375764 - DNA, 120 bp, Artificial Sequence
  ENSG00000143001_9 (sequence is synthesized)
gcctgggacacagtaggcactcagcaaacgttcgttgttgaaggctgttctatttatctattgctgtataacaaaccaccccagaatttagtggcttaaaataaatcccattttattatg

SEQ ID NO: 375765 - DNA, 120 bp, Artificial Sequence
  ENSG00000143006_0 (sequence is synthesized)
acttgctctgcagctcccagaggtggtggttgtgttacgaaggctgaccctgccaatggccgacaaaatggtgcgcacccccaagtgctcgagatgcaggaaccatggcttcctggtgcc

SEQ ID NO: 375766 - DNA, 120 bp, Artificial Sequence
  ENSG00000143006_1 (sequence is synthesized)
cgtcaagggacacgcgggcaaatgccgctggaagcagtgcctctgcgagaagtgctacctgatctccgagcgccagaagatcatggccgcgcagaaggtgctcaagacgcaggccgccga

SEQ ID NO: 375767 - DNA, 80 bp, Artificial Sequence
  ENSG00000143006_2 (sequence is synthesized)
agacgcaggccgccgaggaggagcaggaggcggccctgtgtgcgcaggggcccaagcaggcctccggggctgcggccgcc

SEQ ID NO: 375768 - DNA, 120 bp, Artificial Sequence
  ENSG00000143006_3 (sequence is synthesized)
gccgcttgcttcttcgagcagcccccgcggggccggaaccccggcccgagagccctccagccggttctgggcggccgcagccacgtggagccgagcgagcgagccgccgtggcgatgccc

SEQ ID NO: 375769 - DNA, 120 bp, Artificial Sequence
  ENSG00000143006_4 (sequence is synthesized)
ccacgtggagccgagcgagcgagccgccgtggcgatgcccagccttgcgggacccccttttggggcggaggccgcaggcagtggctaccctggccccctagacctgcgcaggccgatgcg

SEQ ID NO: 375770 - DNA, 120 bp, Artificial Sequence
  ENSG00000143006_5 (sequence is synthesized)
gaccgtgcccggcccactgttcaccgactttgtgcgccctctgaacatcaacccggaccgtgcactgggccctgagtaccctggtggctccagcatgcacccctactgcccgttcccgct

SEQ ID NO: 375771 - DNA, 120 bp, Artificial Sequence
  ENSG00000143006_6 (sequence is synthesized)
gggctacctggacgcccctcctggcgtccccctgcagcagggcttccggcatgtgtcccgcagccagtaccaaggcggaggcttggtgtcagaaccaggaggagacttccagccaagcta

SEQ ID NO: 375772 - DNA, 120 bp, Artificial Sequence
  ENSG00000143006_7 (sequence is synthesized)
cgccaccaccacctccatcatctttctcactgaccgtcctgtttgatactgacaaggagaacactgatgaccaggatgcagaggtactgtcgggtgagcccagccagccatcgtctcagg

SEQ ID NO: 375773 - DNA, 120 bp, Artificial Sequence
  ENSG00000143006_8 (sequence is synthesized)
agcagtccgactaggccccaggcccgccctcctggccagcagagtggggcactggggggcaacagcaacagttttcttgtcttcattcagtgatatgtagggaggaaggaggttgatagc

SEQ ID NO: 375774 - DNA, 120 bp, Artificial Sequence
  ENSG00000143006_9 (sequence is synthesized)
atagatggcaactgattcccagtttaagataggaggaaggagagcaatttctaagtttcaatcctgcgctgtacagttgaagaagagtgtggaggaagctattaccaggggagggccagg

SEQ ID NO: 375775 - DNA, 120 bp, Artificial Sequence
  ENSG00000143006_10 (sequence is synthesized)
gctctgaggagtgggcgctgggagaagctcccatttaggaatgaatttaactgtccttgggttacactaccatttattggaacaagccccagaggcagtatttgatttcctcaggcccca

SEQ ID NO: 375776 - DNA, 120 bp, Artificial Sequence
  ENSG00000143006_11 (sequence is synthesized)
ctctaggacaggaggcaccatctatttcagccttctgctgcctttgcctggtcctccaggttgctgggggcaccacagacatcaagattccagttcatccaggtggctggagccagcagc

SEQ ID NO: 375777 - DNA, 120 bp, Artificial Sequence
  ENSG00000143006_12 (sequence is synthesized)
caggaccagggtcgttgacagcaggttctgcagcatcctgccttgctgctctgtcccccacatcttcctggccacagccccttgcccctcctctaaggggttttactagcaagcatcctg

SEQ ID NO: 375778 - DNA, 120 bp, Artificial Sequence
  ENSG00000143006_13 (sequence is synthesized)
gctgctggggctacttcattccccctccataaagtttcagccattatgggcactggttttaaaaaatttattagtttgactatttgatgtttttatagtgattgccaactttaaaaagta

SEQ ID NO: 375779 - DNA, 120 bp, Artificial Sequence
  ENSG00000143006_14 (sequence is synthesized)
ggctgttcataagcactgatgcagtccctagggaatagaatggtgcttctgatcacctgtgacatgaacagtttcttctgtgaggacagttggctattgaaataaaatgagcaatggaaa

SEQ ID NO: 375780 - DNA, 120 bp, Artificial Sequence
  ENSG00000143006_15 (sequence is synthesized)
ctagacctgcgcaggccgatgcggaccgtgcccggcccactgttcaccgactttggtaagtcgtggccttggtcccgcggtcgactcccggagctggcagcccaggccagcccggatggg

SEQ ID NO: 375781 - DNA, 120 bp, Artificial Sequence
  ENSG00000143006_16 (sequence is synthesized)
gagctggcataggggttcggggtggagagaagtttttccacgggtaacggaccttccgctttgagaaacccttcttcgaacagggatttggattgggtaacttttcgcaaaaaggaaacg

SEQ ID NO: 375782 - DNA, 120 bp, Artificial Sequence
  ENSG00000143006_17 (sequence is synthesized)
agaaacagaaaggaatgggcggttcagagggcttttaacatttagctgtagtttgtgccattccggcatgcaagaacaaaatggcgtccagtcgacttagcagtgcttcctcctccgggg

SEQ ID NO: 375783 - DNA, 120 bp, Artificial Sequence
  ENSG00000143006_18 (sequence is synthesized)
taacagaattttcctgccggcacgttagcgcaaggacgcctgcgcactcttccctcccggttcgcggtcgggaggctcctcccctcagctccgccctggcccagtgcgcctgcgcacctc

SEQ ID NO: 375784 - DNA, 120 bp, Artificial Sequence
  ENSG00000143013_0 (sequence is synthesized)
ggggctgggaggaggtgccgcgaggggtggagcgcgcagcggagcctgctctcggagttttgacagtaccggagctgaaattgtcagcggcggcaagcgcaggaaagttgagaggagctc

SEQ ID NO: 375785 - DNA, 120 bp, Artificial Sequence
  ENSG00000143013_1 (sequence is synthesized)
gtggccccagaacaaagcttgagaaaaaccatggtgaatccgggcagcagctcgcagccgcccccggtgacggccggctccctctcctggaagcggtgcgcaggctgcgggggcaagatt

SEQ ID NO: 375786 - DNA, 120 bp, Artificial Sequence
  ENSG00000143013_2 (sequence is synthesized)
gcggaccgctttctgctctatgccatggacagctattggcacagccggtgcctcaagtgctcctgctgccaggcgcagctgggcgacatcggcacgtcctgttacaccaaaagtggcatg

SEQ ID NO: 375787 - DNA, 120 bp, Artificial Sequence
  ENSG00000143013_3 (sequence is synthesized)
atcctttgcagaaatgactacattaggttatttggaaatagcggtgcttgcagcgcttgcggacagtcgattcctgcgagtgaactcgtcatgagggcgcaaggcaatgtgtatcatctt

SEQ ID NO: 375788 - DNA, 120 bp, Artificial Sequence
  ENSG00000143013_4 (sequence is synthesized)
aagtgttttacatgctctacctgccggaatcgcctggtcccgggagatcggtttcactacatcaatggcagtttattttgtgaacatgatagacctacagctctcatcaatggccatttg

SEQ ID NO: 375789 - DNA, 120 bp, Artificial Sequence
  ENSG00000143013_5 (sequence is synthesized)
atgcagaatgcgtgccttcatctcagatttgttcatcacaggtggatcccatgtgtcttcagtagacaagtcacctttgtagctagcaccagtgccagctccatgccattgcaccttctt

SEQ ID NO: 375790 - DNA, 120 bp, Artificial Sequence
  ENSG00000143013_6 (sequence is synthesized)
tagtcttgattgcccttcccgcatttattggtgtattaaaatgactgaatatgaacattaaggactccatgaacctgggctaatgggagactgtagagaaaatgaaaaaagatccaccag

SEQ ID NO: 375791 - DNA, 120 bp, Artificial Sequence
  ENSG00000143013_7 (sequence is synthesized)
aggacatcttggggagggggagggagctgggggggagggaaatgactaatgaagctaattaaaagaagcattcaaatctgctttctaccctcattaacaattagcagggcactggccaga

SEQ ID NO: 375792 - DNA, 120 bp, Artificial Sequence
  ENSG00000143013_8 (sequence is synthesized)
gtttgtaccctgtgttttaccttaacaacattctatttgctctttgtatatttaagtgttgtaaggaaacgtgtttcaatcaaaactgaccatgagataaaggaaagagatgtggctttt

SEQ ID NO: 375793 - DNA, 120 bp, Artificial Sequence
  ENSG00000143013_9 (sequence is synthesized)
gtgatattctatcacaaacacttattgtatctctgtaaaatacaatgtatgtatgcatgtaagtgtttttgtcctaatgttgctactcccatggcaaagaaaaaaaaaagaatgaaaaaa

SEQ ID NO: 375794 - DNA, 120 bp, Artificial Sequence
  ENSG00000143013_10 (sequence is synthesized)
gcagcagcgattgcagcagttgctgccgctgcgccgcgcctgaagccgcgccgcgcgggccgagggctcctgcagctgctcgcgcgcagtcggaggcggagaaggacgaagactgagact

SEQ ID NO: 375795 - DNA, 120 bp, Artificial Sequence
  ENSG00000143013_11 (sequence is synthesized)
gacacttctgctcccggccgcccggcacttacgcgggggccccccaacccgccccagagcaacgcgatttaaaaaaaaaaaaaaagccgcccttagccccctcctcccctttcctgcttc

SEQ ID NO: 375796 - DNA, 120 bp, Artificial Sequence
  ENSG00000143013_12 (sequence is synthesized)
tgcgagaactccctccctccctccagctccgccagcccaggcgccccttccctggaagccgagcggcttcgctcgcatttcaccgccgccgcctctcgcaatattgcaatataggggaaa

SEQ ID NO: 375797 - DNA, 120 bp, Artificial Sequence
  ENSG00000143013_13 (sequence is synthesized)
gaaaaaaaaaaatcttttatttgtgatattttcagagacatttgctctagtatggtgtatttaaataataaaaacttaaaagaaaaaatatttaatggtgtttgggtttaaacactgctt

SEQ ID NO: 375798 - DNA, 120 bp, Artificial Sequence
  ENSG00000143013_14 (sequence is synthesized)
tttctcttctgtattttgaagaaatttagtttttattgttgttgaataacaagctcactttaaatttgaaggagttgagggaggtggagtgtatatttatttagctctgggccagtaagg

SEQ ID NO: 375799 - DNA, 120 bp, Artificial Sequence
  ENSG00000143013_15 (sequence is synthesized)
tattcttcaaattacttaaccacgccattattggcaggggtacaaagtagtttctaacagggtcctttctataagtcaagaatattctgttaacagcatttcgttacacttctatatcac

SEQ ID NO: 375800 - DNA, 120 bp, Artificial Sequence
  ENSG00000143013_16 (sequence is synthesized)
agtaagtcttttgtgtttataaatacttgagtgtccactattttgtttattctttttctcaatagcaaacaaagccttgggtattgatgaaaagtatgtataaaaaaaaatacggcacaa

SEQ ID NO: 375801 - DNA, 120 bp, Artificial Sequence
  ENSG00000143013_17 (sequence is synthesized)
ccatcctgttctcttattgagtttatagcttttgaaggaagtcacaatttctaagtcatacctgtacatattttgaagctcacttagttgtagggacccagagctctttttttatggtga

SEQ ID NO: 375802 - DNA, 120 bp, Artificial Sequence
  ENSG00000143013_18 (sequence is synthesized)
tctttgattggtgaagtagccatttcctggtgacccttaggctcgtgtggttggctgtaaggtgtttattttgttttgctcctacacttctttactgactgcgtttccgtatgtattttg

SEQ ID NO: 375803 - DNA, 120 bp, Artificial Sequence
  ENSG00000143013_19 (sequence is synthesized)
ggggaagattctgacttcatttagtcttagtcttgagatactgagttgctggttgcaggcagcagagtgtccaccacagtgcctgcactgcccgcagagctgccctccggaaagcatgca

SEQ ID NO: 375804 - DNA, 120 bp, Artificial Sequence
  ENSG00000143013_20 (sequence is synthesized)
gatgtgagcaaatttcaactacaacttccatcacaggctaataaaaccaggtgtgtgaacgctactattttaaattttcttttttaagatggcattttattttgttccagaaaagcgcct

SEQ ID NO: 375805 - DNA, 120 bp, Artificial Sequence
  ENSG00000143013_21 (sequence is synthesized)
gatgtagaccctccctctgagaatagccgtggagccatgtagagaggtgtagctcagcacatctcaactaccagtcagcttccctttgagaacttctgtgctcacttcctgttttcagag

SEQ ID NO: 375806 - DNA, 120 bp, Artificial Sequence
  ENSG00000143013_22 (sequence is synthesized)
attccagggcaggggaaaaaaaaaatcagttgaacttcaaacctcctagaggagattgtaaaggcatagagttgaggtgaatagttttgttagaaccttataaaaataaaatgcaagaaa

SEQ ID NO: 375807 - DNA, 120 bp, Artificial Sequence
  ENSG00000143013_23 (sequence is synthesized)
ataatatgaagaaatcacatatatatgtttgaattagatgtctgtttgaattagatccttggggaatttcttcaaactagttctggttcttatatttgttttttttcctttaaggaactt

SEQ ID NO: 375808 - DNA, 120 bp, Artificial Sequence
  ENSG00000143013_24 (sequence is synthesized)
tctgaaggaagttagactgcgatggtaaagggggaaatgggttaatgagattgcaggcattttctatattctttttggcataagcacttatgtccctgatatgtacaaattcaaaggagg

SEQ ID NO: 375809 - DNA, 120 bp, Artificial Sequence
  ENSG00000143013_25 (sequence is synthesized)
tggttaataactttagtaaataatatattgtcgcatttaatgatgtggagggctaaggtcattacggactttaaataaactattatatggctggttcctcaagcactgctgcgtatttaa

SEQ ID NO: 375810 - DNA, 120 bp, Artificial Sequence
  ENSG00000143013_26 (sequence is synthesized)
taatgagcttctaaaagcatttcttaagttgcagacctataagattacaaatgtcactcatgttagtataatccacatgcaagtgatgaagccttctctttgatgtgctaaattggagaa

SEQ ID NO: 375811 - DNA, 120 bp, Artificial Sequence
  ENSG00000143013_27 (sequence is synthesized)
ggactaatggagctatgaatatacaatagaacatatttaagtagtagtcttgctttaggtaaaacactttcttgaaaccagaggcatttcaaacaataaaacccggctctaatggggatg

SEQ ID NO: 375812 - DNA, 120 bp, Artificial Sequence
  ENSG00000143013_28 (sequence is synthesized)
ctctgtgtggatagaaagctactaaaaacactcaggtttattctgatgtgagcagcgattgtgtgcagttcctcccccaatctcaacattgcttaggaaaaaaaaaaatctatgagttta

SEQ ID NO: 375813 - DNA, 120 bp, Artificial Sequence
  ENSG00000143013_29 (sequence is synthesized)
ttccacctttcatccattgcatttgtgatgttattagttagcaagatggacactgttctttagaaaggacttatttaatattaaccacgtcatagagcaagatggcccccagtccctaca

SEQ ID NO: 375814 - DNA, 120 bp, Artificial Sequence
  ENSG00000143013_30 (sequence is synthesized)
agcaagtgcaattaaaaataaaagcaaatgttactgagccctgctgaactcctgataaaaaaaattatgtttatggtacatataaatgtctcaatcatgcaaattgtcactcttgttaat

SEQ ID NO: 375815 - DNA, 120 bp, Artificial Sequence
  ENSG00000143013_31 (sequence is synthesized)
gaaacaattttgtaaaaagatagtcctctaaaagggtttaatgttttttacctatctaactgtctaattagatttacacatcccgcaaggcaggggagcctgaagcttttccaaaccaaa

SEQ ID NO: 375816 - DNA, 120 bp, Artificial Sequence
  ENSG00000143013_32 (sequence is synthesized)
tcgtttgccactagaaactattttcagctcttcatgatttattaggaaatagtttaacccggactgtagtgtcttataaaatacaaaacgagaaaactgacacaccaaaatgaagtctgt

SEQ ID NO: 375817 - DNA, 120 bp, Artificial Sequence
  ENSG00000143013_33 (sequence is synthesized)
gaaattgtcatcctcttaatattacctgtatttaaattctttcttttgcccttattaacactgatatttgaaacaactaatcatctaaaaggaagctcttaaagggctttaaatgtcaat

SEQ ID NO: 375818 - DNA, 120 bp, Artificial Sequence
  ENSG00000143013_34 (sequence is synthesized)
atagtaagattctaatgtgcactactatttatataaaatatttcttagggcccataaatcatataataaacagtgaacccaagagctacatatggagtctagtgaagagttcccatgtag

SEQ ID NO: 375819 - DNA, 120 bp, Artificial Sequence
  ENSG00000143013_35 (sequence is synthesized)
cctaactaattgtatttaaattgaggagatccaaaaaccccatcacccttcaccccaaagaccccttcacccttcaccagggaattctatcctgggtgctgtcccacctatgaccccttc

SEQ ID NO: 375820 - DNA, 120 bp, Artificial Sequence
  ENSG00000143013_36 (sequence is synthesized)
aagaggccattggaaaaaggccatttacaagttaatgttacttatagctttgttactaagactcacctattgttagtgcagccaagtcacagaagtgcttattgcagttaaatagcaatt

SEQ ID NO: 375821 - DNA, 120 bp, Artificial Sequence
  ENSG00000143013_37 (sequence is synthesized)
tgtttccatgaaactgcaattaaagtattactgagcagccattttagattggcagtgctctgaacgcatgttaaacagccagctactcccacttgcagagtctgagatctgactagcagc

SEQ ID NO: 375822 - DNA, 120 bp, Artificial Sequence
  ENSG00000143013_38 (sequence is synthesized)
aaagtgtagcacattcgccgatgctgggtacctagttaaagaggcatttgtagccctctgctcccatcgtgaacatgctgagagcaatgacaagtcagggctgatttttggaaggtgaac

SEQ ID NO: 375823 - DNA, 120 bp, Artificial Sequence
  ENSG00000143013_39 (sequence is synthesized)
ttgcaacttacctcaagtgaatactgttttcagttgtgcaagaagtgctttatgctagtagatatgtgcatgtttcctagagggaatgttttcaagttcagattgattctgctgagaatg

SEQ ID NO: 375824 - DNA, 120 bp, Artificial Sequence
  ENSG00000143013_40 (sequence is synthesized)
gacggcaactcggaggcctcaagccaataatgtactacaggccctgacatgttacagctgtgtaaacagggccattctatttcctaaatcacaactaataaagcagaggatgaaaatcaa

SEQ ID NO: 375825 - DNA, 120 bp, Artificial Sequence
  ENSG00000143013_41 (sequence is synthesized)
ggagctcgtggccccagaacaaagcttgagaaaagtaaacaggcggctgctgccggcgagcctcccttcttccctctccccctcagcctccttcccgcccttgccctgctgtttccttcc

SEQ ID NO: 375826 - DNA, 120 bp, Artificial Sequence
  ENSG00000143013_42 (sequence is synthesized)
agcagctccgcggggaggaggggaatgggcttgctctctctccggcgattactaacttttgcatcgcccctgttttgtctttctctccctgtccccttcccgccctctgcagaccatggt

SEQ ID NO: 375827 - DNA, 120 bp, Artificial Sequence
  ENSG00000143028_0 (sequence is synthesized)
gacccggcggccaagttcgctgcgagtttgacagaagtttgaatccgagtcgggggctttctgctgccggcggggcaccgcggcggccgcagcctctgagagcacgaacagcagcgcccc

SEQ ID NO: 375828 - DNA, 120 bp, Artificial Sequence
  ENSG00000143028_1 (sequence is synthesized)
agcacgaacagcagcgcccccgcgtcccagccagccagccagccagactggactccggcccaccgacggccgctcgcgctccggccccgctcgcctgctctgccccggacctgcagctcc

SEQ ID NO: 375829 - DNA, 120 bp, Artificial Sequence
  ENSG00000143028_2 (sequence is synthesized)
ccgcctcccggccagagagccaagccaccacgccgcgcccagcgctcgccgcgccagcatgtcctcgaccgagagcgccggccgcacggcggacaagtcgccgcgccagcaggtggaccg

SEQ ID NO: 375830 - DNA, 120 bp, Artificial Sequence
  ENSG00000143028_3 (sequence is synthesized)
cctactcgtggggctgcgctggcggcggctggaggagccgctgggcttcatcaaagttctccagtggctctttgctattttcgccttcgggtcctgtggctcctacagcggggagacagg

SEQ ID NO: 375831 - DNA, 120 bp, Artificial Sequence
  ENSG00000143028_4 (sequence is synthesized)
agcaatggttcgctgcaacaacgaagccaaggacgtgagctccatcatcgttgcatttggctatcccttcaggttgcaccggatccaatatgagatgcccctctgcgatgaagagtccag

SEQ ID NO: 375832 - DNA, 120 bp, Artificial Sequence
  ENSG00000143028_5 (sequence is synthesized)
ctccaagaccatgcacctcatgggggacttctctgcacccgccgagttcttcgtgacccttggcatcttttccttcttctataccatggctgccctagttatctacctgcgcttccacaa

SEQ ID NO: 375833 - DNA, 120 bp, Artificial Sequence
  ENSG00000143028_6 (sequence is synthesized)
cctctacacagagaacaaacgcttcccgctggtggacttctgtgtgactgtctccttcaccttcttctggctggtagctgcagctgcctggggcaagggcctgaccgatgtcaagggggc

SEQ ID NO: 375834 - DNA, 120 bp, Artificial Sequence
  ENSG00000143028_7 (sequence is synthesized)
cacacgaccatccagcttgacagcagccatgtcagtgtgccatggagaggaagcagtgtgcagtgccggggccacgccctctatgggcctggccaacatctccgtgctctttggctttat

SEQ ID NO: 375835 - DNA, 120 bp, Artificial Sequence
  ENSG00000143028_8 (sequence is synthesized)
caacttcttcctgtgggccgggaactgttggtttgtgttcaaggagaccccgtggcatggacagggccagggccaggaccaggaccaggaccaggaccagggccagggtcccagccagga

SEQ ID NO: 375836 - DNA, 120 bp, Artificial Sequence
  ENSG00000143028_9 (sequence is synthesized)
gagtgcagctgagcagggagcagtggagaagcagtaagcagccccccacctggctattcccgaactggacagcacctcttcaaccacctccggcttccaggacctttctcttcctcctcc

SEQ ID NO: 375837 - DNA, 120 bp, Artificial Sequence
  ENSG00000143028_10 (sequence is synthesized)
tccaattcccctcccccatcattctggtctttgagctttgagacgatgggcaggcatcagctgttggaaacctgggcagccctctcagtggcttcctatcctccttcttgctggagccat

SEQ ID NO: 375838 - DNA, 120 bp, Artificial Sequence
  ENSG00000143028_11 (sequence is synthesized)
gaatggcaggagctcagtgcttcttgtgcagtgcctggacccaggtatcttacttggggtcttacttgtacccttacagtctctgagaaccagcctctgctgcaggtgagggttgggggc

SEQ ID NO: 375839 - DNA, 120 bp, Artificial Sequence
  ENSG00000143028_12 (sequence is synthesized)
aggaaaccagtgctctgagactggttcctagcagccacctttctgtcaacctgtccggcttcaacaatattagggggaagggaaatcagctagtagccttcccctctggtcccttgtgtg

SEQ ID NO: 375840 - DNA, 120 bp, Artificial Sequence
  ENSG00000143028_13 (sequence is synthesized)
gaggccccaatagtggtttggcgacccctcctcagtggctgtcatctagtccctgcgtctgatctccagtcatcccatgactcagtgtgccttccactgtcttctctggcctctgcctgc

SEQ ID NO: 375841 - DNA, 120 bp, Artificial Sequence
  ENSG00000143028_14 (sequence is synthesized)
ccacagaatccaccatgtgtgaaccagagaggtccaccagcctagaaaacagcccttcagagggtcctgatgaggccttcctggactcagctgggagcaagataaattgcaactgagttg

SEQ ID NO: 375842 - DNA, 120 bp, Artificial Sequence
  ENSG00000143028_15 (sequence is synthesized)
taaactctactttagaaacgccctatcttcctccctgtcctccttcttggtctcacacttgggactcaaaaatgtggagtcaggacctgcctcctaatccccttacttctctgtccatct

SEQ ID NO: 375843 - DNA, 120 bp, Artificial Sequence
  ENSG00000143028_16 (sequence is synthesized)
cccttccccagcatcgtgcatctgaggcatttgagatcctttttgaagtctgtccaggccttccttttattcctgtggggccagacaggggcttaggaagggccaaaggaccatcatgag

SEQ ID NO: 375844 - DNA, 120 bp, Artificial Sequence
  ENSG00000143028_17 (sequence is synthesized)
gctaagttgccccagagccccaggatggatgggcccattttttccttattccctgctcagttttttcccctgctccttctctagtccttctttcatatttctccttctcatcttgaaaac

SEQ ID NO: 375845 - DNA, 120 bp, Artificial Sequence
  ENSG00000143028_18 (sequence is synthesized)
aggatgttccctcttcccttgctgtcccatttctcccctgtgtccttatttctcccagtctctatcccctctcaagtccagggcaggccgatgctattggtgcttcttcactttgggacc

SEQ ID NO: 375846 - DNA, 120 bp, Artificial Sequence
  ENSG00000143028_19 (sequence is synthesized)
cagttccatatttgtctttagtgtatatcctcttcctgatacctccttcagtccctctctgggccccaaggctgagaatcagtgttaactgggtaaggatcatttgcttcctacccagct

SEQ ID NO: 375847 - DNA, 120 bp, Artificial Sequence
  ENSG00000143028_20 (sequence is synthesized)
caatctgccctggccatagggcttcccagggaaggaagaagagggaagaatccgaccactttccaatccagtgccaattggcccactaagcatcctaaaggtgaatgtgccctgtgccaa

SEQ ID NO: 375848 - DNA, 120 bp, Artificial Sequence
  ENSG00000143028_21 (sequence is synthesized)
tctctcctcaggactgagtcaacccccttcaacctcctcacctctctaaacaccatccatagtaacatgtgcattactggggtacctaggagtcaggacttttgacttcaggccagtcat

SEQ ID NO: 375849 - DNA, 120 bp, Artificial Sequence
  ENSG00000143028_22 (sequence is synthesized)
ttcctcccgatggggaaagggtgagatttacatccccaaatgcttgagtccctcagtgaaagaattagtttttgtttgtttgtttaagattttggggaagagatttgaggaggaaagaaa

SEQ ID NO: 375850 - DNA, 120 bp, Artificial Sequence
  ENSG00000143028_23 (sequence is synthesized)
ggagatggggtgagagggtttttaagtctgaaactctctgtcatgagctgtccccatggttactcaaggacaaggggggacagttttgcctacagctccagagacacagagaacaaaggg

SEQ ID NO: 375851 - DNA, 120 bp, Artificial Sequence
  ENSG00000143028_24 (sequence is synthesized)
gtgaccttcatttttcttcaagccggcctctgtgggggtctgtgagcagcttctactggatctttgtttggattctgtgtctgtatttataatttatttgaaatgtgctgggtagtgttc

SEQ ID NO: 375852 - DNA, 120 bp, Artificial Sequence
  ENSG00000143028_25 (sequence is synthesized)
tcatttgggggctgaagttagcaactgggccttcagctagggaaagcagttgcgggcagggggtggggggagattatattcactcctgccaaggactcccagcccaggactctctttaga

SEQ ID NO: 375853 - DNA, 120 bp, Artificial Sequence
  ENSG00000143028_26 (sequence is synthesized)
gcaaggaagcctcgttctctttcttctcaagaggctctcttgttctccatcaggagagccttgatttaggctacggcctcactctctatggccaccctaagaggaaaggctacttcacct

SEQ ID NO: 375854 - DNA, 120 bp, Artificial Sequence
  ENSG00000143028_27 (sequence is synthesized)
cattacctccagagggctgggcagggccaagtgcctcataggactcatgttctctccaaccagggctggcatcactgctttgcaaagtggggcctgaggtagaagaaggtgtctggtttc

SEQ ID NO: 375855 - DNA, 120 bp, Artificial Sequence
  ENSG00000143028_28 (sequence is synthesized)
tccagctgctgtaggaggctaatgggcagggtacttgccctttgtcccactagactctaacccagcaccagggtgcccacctaggacctttcctggacatgagtttccttcactatcata

SEQ ID NO: 375856 - DNA, 120 bp, Artificial Sequence
  ENSG00000143028_29 (sequence is synthesized)
gtcatgagcctcctacttctgggattgcagatcaggggtggggggagaatgttgcatgttgttttctggtgcttgttattatatatttgaataaacagtgctgcaagtacttgccatgaa

SEQ ID NO: 375857 - DNA, 120 bp, Artificial Sequence
  ENSG00000143028_30 (sequence is synthesized)
tgcagaggttttgtgttagtcatcttaaggaggctacctgtggtccccaagtcatgcccaatggagagatctggcaactgtccatttcctgcctcttcatctcccttgcagacaccactc

SEQ ID NO: 375858 - DNA, 120 bp, Artificial Sequence
  ENSG00000143028_31 (sequence is synthesized)
agtcaaccttgtattcatttggctatttggtccagcagcctgaggctggaagataaatggaagccatgggtttctacctaggaagaacttgattaaaggggatcctcactctcccccact

SEQ ID NO: 375859 - DNA, 120 bp, Artificial Sequence
  ENSG00000143032_0 (sequence is synthesized)
agcggcggcaacattgtttggtgtttattttgttttacgatcgatagctttcttcgctggttcggggcggctgctgaacggcggagtggcgtggacctcatgtagcaatgacaatggaag

SEQ ID NO: 375860 - DNA, 120 bp, Artificial Sequence
  ENSG00000143032_1 (sequence is synthesized)
gggccagcgggtcgagttttggaatagacacgattttgtccagtgccagttcaggcagcccaggcatgatgaatggagatttccgcccgctcggtgaggccaggaccgcggattttagga

SEQ ID NO: 375861 - DNA, 120 bp, Artificial Sequence
  ENSG00000143032_2 (sequence is synthesized)
gtcaggccaccccatctccctgttcggagattgataccgtagggacggcgccttcttctcctatctcagtcaccatggagcccccggagccgcatctggtagcagacgcgacccagcatc

SEQ ID NO: 375862 - DNA, 120 bp, Artificial Sequence
  ENSG00000143032_3 (sequence is synthesized)
atcaccacctccaccacagccagcagccgccgccgccggccgcggccccgacgcaaagtttgcagcctttgccccaacagcagcagccgctgccgccacagcagccgccgccgccgcccc

SEQ ID NO: 375863 - DNA, 120 bp, Artificial Sequence
  ENSG00000143032_4 (sequence is synthesized)
cccagcagctgggctcggccgcctcggcccccaggacttccacgtcttcttttttaattaaggacatcttgggcgacagcaaacctctggcggcatgtgcaccctacagcaccagcgtat

SEQ ID NO: 375864 - DNA, 120 bp, Artificial Sequence
  ENSG00000143032_5 (sequence is synthesized)
cctctccccaccacaccccgaagcaggagagcaacgcagtgcacgagagcttcaggccaaagctcgagcaggaggacagcaagaccaaactcgacaagcgggaggattcccagagcgaca

SEQ ID NO: 375865 - DNA, 120 bp, Artificial Sequence
  ENSG00000143032_6 (sequence is synthesized)
tcaaatgccacgggacaaaggaggaaggagaccgggagattacgagtagccgtgagagtccccctgtgagagccaagaagcctcgaaaagcaaggacagctttttccgaccaccagctca

SEQ ID NO: 375866 - DNA, 120 bp, Artificial Sequence
  ENSG00000143032_7 (sequence is synthesized)
atcaactggagcgtagctttgagcggcagaagtacctgagcgtgcaggatcgcatggacctggctgcagcgctcaacctcactgacacccaagtcaagacctggtaccagaaccgcagga

SEQ ID NO: 375867 - DNA, 120 bp, Artificial Sequence
  ENSG00000143032_8 (sequence is synthesized)
gtggaagcggcagacagcggtgggcctggagttgctggccgaggcagggaactactcggcgctgcagaggatgtttccatcgccttatttctatcacccaagcctgctgggcagcatgga

SEQ ID NO: 375868 - DNA, 120 bp, Artificial Sequence
  ENSG00000143032_9 (sequence is synthesized)
cagcactacggcggcggcggctgccgctgccatgtacagcagcatgtaccggactcctccagcaccccatccccagctgcagcggcccctggtgccccgtgtgctcatccacggcctagg

SEQ ID NO: 375869 - DNA, 120 bp, Artificial Sequence
  ENSG00000143032_10 (sequence is synthesized)
gcctgggggacagccagcccttaatccattgtccagccccatcccaggcaccccacacccccggtgaaaacattgcagcgaaggcactgcaatcccttccccatatccctgcccaacccg

SEQ ID NO: 375870 - DNA, 120 bp, Artificial Sequence
  ENSG00000143032_11 (sequence is synthesized)
gactgctgcccgtcctctccctgctccaggccactaggcctcccttgcagccaactctggaaggcagaggagtaagagaggaagatgcttaccagtgggcaggggacccccaaagaggag

SEQ ID NO: 375871 - DNA, 120 bp, Artificial Sequence
  ENSG00000143032_12 (sequence is synthesized)
ccagccctctgctctccatctccccacccctagaaacagggctggaaatctcccccacagcagtgtgactggtgaaaatgctgaccccacacagagtgcaaccagtaagtgaaaacatca

SEQ ID NO: 375872 - DNA, 120 bp, Artificial Sequence
  ENSG00000143032_13 (sequence is synthesized)
acaaaaacaaaacctcaaattctttttcaaaaatgactttagggacaagcaggagggagggaggggggagggctaaggagggaagaaagaagggcacggagcggaaacagcacaggcaga

SEQ ID NO: 375873 - DNA, 120 bp, Artificial Sequence
  ENSG00000143032_14 (sequence is synthesized)
gtgaactatatatggacagcctcaagtgctgaggcaaagggcgttgccgaggacattccgtctgccccagagaaaagaggagggtaactgagaactttgcactgatttctcatgaccttt

SEQ ID NO: 375874 - DNA, 120 bp, Artificial Sequence
  ENSG00000143032_15 (sequence is synthesized)
tttcttttggaaaagtggcatgctccataatatgaaaaaaatgtacatttgaaagactgagtgataagtgatatatcatatttattatatgttgtccaaaaagagtcacttatatacgtt

SEQ ID NO: 375875 - DNA, 120 bp, Artificial Sequence
  ENSG00000143032_16 (sequence is synthesized)
agtaaaaacatgatttttcttttcatgtcttttcgattcagtaaaataaatgcttagacaaaaatatagatttttttgtgattgaaaattacaaaaataaagtttatctttttttaacaa

SEQ ID NO: 375876 - DNA, 120 bp, Artificial Sequence
  ENSG00000143033_0 (sequence is synthesized)
agtccgcgggaaaccaaaatggcgaggggctgtattgaagtgggctgtgtttgaggccggtgtaagaacgctcattctacccccaacccttgtctccaaggacctcggtttgtgcgtgca

SEQ ID NO: 375877 - DNA, 120 bp, Artificial Sequence
  ENSG00000143033_1 (sequence is synthesized)
tatgtgccgggtacccggtggggcgggtgcccagtaagtgctcggactcgcaggggaagcgcccacggggacggattggttgttttttcctgtatgaagcggttggcaccactgaagtga

SEQ ID NO: 375878 - DNA, 120 bp, Artificial Sequence
  ENSG00000143033_2 (sequence is synthesized)
ccgaatgagagactctacaggggcaggtaattcactggtccacaagcggtctcctttacgtcgaaaccaaaagaccccaacatccttgaccaagctgtctttacaggatggacataaagc

SEQ ID NO: 375879 - DNA, 120 bp, Artificial Sequence
  ENSG00000143033_3 (sequence is synthesized)
caaaaagccagcatgtaaatttgaagagggtcaggatgtcctagctagatggtcagatggcttgttttatcttggcactatcaaaaagataaacatattgaaacagagctgcttcatcat

SEQ ID NO: 375880 - DNA, 120 bp, Artificial Sequence
  ENSG00000143033_4 (sequence is synthesized)
atttgaagacagttctaaatcctgggttctctggaaggacattcaaacaggagccactggaagtggggaaatggtctgtacaatatgtcaagaagagtattcagaagctcccaatgaaat

SEQ ID NO: 375881 - DNA, 120 bp, Artificial Sequence
  ENSG00000143033_5 (sequence is synthesized)
ggttatatgtgacaagtgtggccaaggatatcatcagttgtgtcacacacctcatattgattccagtgtgattgattcagatgaaaaatggctctgtcggcagtgtgtttttgcaacaac

SEQ ID NO: 375882 - DNA, 120 bp, Artificial Sequence
  ENSG00000143033_6 (sequence is synthesized)
aacaaagaggggtggtgcacttaagaaaggaccaaatgccaaagcattgcaagtcatgaagcagacattaccctatagtgtggcagaccttgaatgggatgcaggtcataaaaccaatgt

SEQ ID NO: 375883 - DNA, 120 bp, Artificial Sequence
  ENSG00000143033_7 (sequence is synthesized)
ccagcagtgttactgctattgtggaggccctggagactggtatttgaagatgctacagtgctgcaaatgtaagcagtggtttcatgaggcttgtgtgcaatgccttcaaaagccaatgct

SEQ ID NO: 375884 - DNA, 120 bp, Artificial Sequence
  ENSG00000143033_8 (sequence is synthesized)
atttggagacagattttatacgtttatatgctctgtctgcagttctggaccagaatacctcaaacgtctaccattacagtgggtagatatagcacacctatgcctttacaacctaagtgt

SEQ ID NO: 375885 - DNA, 120 bp, Artificial Sequence
  ENSG00000143033_9 (sequence is synthesized)
tattcataagaagaaatactttgattctgaacttgagcttatgacatacattaatgaaaactgggatagattgcaccctggagagctggcagacacaccaaaatctgaaagatatgagca

SEQ ID NO: 375886 - DNA, 120 bp, Artificial Sequence
  ENSG00000143033_10 (sequence is synthesized)
tgttctggaggcattaaatgattacaagaccatgtttatgtctgggaaagaaataaagaagaagaagcatttgtttgggttgcgaattcgtgttcctcctgtgccaccaaatgtggcttt

SEQ ID NO: 375887 - DNA, 120 bp, Artificial Sequence
  ENSG00000143033_11 (sequence is synthesized)
caaagcagagaaagaacctgaaggaacatctcatgaatttaaaattaaaggcagaaaggcatccaaacctatatctgattcaagggaagtaagcaatggcatagaaaaaaaaggaaagaa

SEQ ID NO: 375888 - DNA, 120 bp, Artificial Sequence
  ENSG00000143033_12 (sequence is synthesized)
aaaatctgtaggtcgtccacctggcccatatacaagaaaaatgattcaaaaaactgctgagccacttttggataaggaatcaatttcagagaatcctactttggatttaccttgttctat

SEQ ID NO: 375889 - DNA, 120 bp, Artificial Sequence
  ENSG00000143033_13 (sequence is synthesized)
agggagaactgagggaactgcacattcatccaatacctcagatgtggatttcacgggtgcttccagtgcaaaagaaactacctcgtctagcatttccaggcattatggattatctgactc

SEQ ID NO: 375890 - DNA, 120 bp, Artificial Sequence
  ENSG00000143033_14 (sequence is synthesized)
cagaaaaagaacgcgtacaggaagatcttggcctgctgcaataccacatttgcggagaagaagaggtcgtcttccaagaagagcactccagactcagaactcagaaattgtaaaagatga

SEQ ID NO: 375891 - DNA, 120 bp, Artificial Sequence
  ENSG00000143033_15 (sequence is synthesized)
tgaaggcaaagaagattatcagtttgatgaactcaacacagagattctgaataacttagcagatcaggagttacaactcaatcatctaaagaactccattaccagttattttggtgctgc

SEQ ID NO: 375892 - DNA, 120 bp, Artificial Sequence
  ENSG00000143033_16 (sequence is synthesized)
tgaacattatgttcactgcactctgattttctgtaggtacagttcaaagccctaaaggagtctggcttttactatctttcttaaaaaaaaaaaaaagtcaaaaaaattcaaaaaagggga

SEQ ID NO: 375893 - DNA, 120 bp, Artificial Sequence
  ENSG00000143033_17 (sequence is synthesized)
tgatactagccttaacatgtacctgtcaatgttatggatattgtcataaaaaggtatcttttaaaaatcagaacagagacttaattttttaaatcttaagatttgtagaatgtttctagg

SEQ ID NO: 375894 - DNA, 120 bp, Artificial Sequence
  ENSG00000143033_18 (sequence is synthesized)
ataggatattaaaaatgattgaaacccatgcatggtgttagacaatttttctaattattccattgagtcagttttttgtgattagtgattatcagagcaaacatcatgtagatagcacaa

SEQ ID NO: 375895 - DNA, 120 bp, Artificial Sequence
  ENSG00000143033_19 (sequence is synthesized)
gtatttggagaaacgttgtttgttttgttaccaaaatgttggaaaaatttatttcaataccttttagatttcataaagtgcagtgtatataatgcctactgaaagactgtaaaatattga

SEQ ID NO: 375896 - DNA, 120 bp, Artificial Sequence
  ENSG00000143033_20 (sequence is synthesized)
aattttctttcaagcaaagtgtaaaaaaatatattgagcctgtaaattgctctgtgactagacttcattgtcgtcttaatatattcttgcatgtgcatatatatacacacgtgtatatat

SEQ ID NO: 375897 - DNA, 120 bp, Artificial Sequence
  ENSG00000143033_21 (sequence is synthesized)
atgtgtgtgattatgtgacctatgcaatacaaattatgggaatgggcagctttggagtatatatcccataattcttttttcaggaatagttgcagtatttacacagcagcatttcttctc

SEQ ID NO: 375898 - DNA, 120 bp, Artificial Sequence
  ENSG00000143033_22 (sequence is synthesized)
aggcttttattgggtgctgttgcttgctatgtatgaagagaaatgtgtcagacaagtttagtgtgttctgaagaagggtgtgaacaacagtgttcatgggcttttagaatgcttttcact

SEQ ID NO: 375899 - DNA, 120 bp, Artificial Sequence
  ENSG00000143033_23 (sequence is synthesized)
tttagtccttgtaactcagctgttcagtacctaaaacaaattcaaataatatgaacattatctcctactagaagtaacgttttcaagttttcatggcacattatgattgtaaatgtctct

SEQ ID NO: 375900 - DNA, 120 bp, Artificial Sequence
  ENSG00000143033_24 (sequence is synthesized)
catttttaacagtaagtctataggagtcccgtgaagattcctgaaatgtctgtagtaactgttagtcatgtttgaataagtgtagtatgaacaaagtattttattgcacagggttaacaa

SEQ ID NO: 375901 - DNA, 120 bp, Artificial Sequence
  ENSG00000143033_25 (sequence is synthesized)
acagtatgttgccagctgaggctactgctgttttattacaacattacctcttgtttttataaagtgtaccaagatttaaattgataactttattttacttgtaaaaaaaaagtttctttt

SEQ ID NO: 375902 - DNA, 120 bp, Artificial Sequence
  ENSG00000143033_26 (sequence is synthesized)
atcaccagtgttacagttgtcttctgtttctttttgttttgttttatttgttttcctttttagccaaagagtgaacagaagattttcttattttggtggctattcattttacttttaaaa

SEQ ID NO: 375903 - DNA, 120 bp, Artificial Sequence
  ENSG00000143033_27 (sequence is synthesized)
gtgattggtggattttagactaattatgggggaatttgccaccaaaataaaaaatatgtaaagtgtagtgattacagagtggttaaaatgtgggttagtacttatttattccattaattg

SEQ ID NO: 375904 - DNA, 120 bp, Artificial Sequence
  ENSG00000143033_28 (sequence is synthesized)
attatttgactgtttataaagaaagttgctttatttctttaaacatcttcaaaagatgatcctttcttgtcacattatagccaaaagaagcagagaacttcattgtctgcatttggttcc

SEQ ID NO: 375905 - DNA, 120 bp, Artificial Sequence
  ENSG00000143033_29 (sequence is synthesized)
tggttggccaggtataaatgagctttacaaaagtgcaaattaaaaactgttacttctgtttacctccaccaaaacttgattttcccctagctattaatttaaggttgcctttcctgcagc

SEQ ID NO: 375906 - DNA, 120 bp, Artificial Sequence
  ENSG00000143033_30 (sequence is synthesized)
tgcaatattttgaataacacacagagtttgtgttgatttttgaatgtttgtttatatctaggggtaatgaaaaatgtaaatcccgtgtatccttattcactccacctgtatcatattatt

SEQ ID NO: 375907 - DNA, 120 bp, Artificial Sequence
  ENSG00000143033_31 (sequence is synthesized)
tcattttccccaaagtcctttaattctaactgaacaccagcagtatttttagaaatttttctttaacatacttggaagatgatttatccagctgaactgtctttagacgtaattattgtg

SEQ ID NO: 375908 - DNA, 120 bp, Artificial Sequence
  ENSG00000143033_32 (sequence is synthesized)
aatgtctgttttattttctcatggtggttcacatggctctgatgttcagtttgtatttttggaattgctttacttagaaattaaaacagaccaacattaaatgtgtgtattttttaaaga

SEQ ID NO: 375909 - DNA, 120 bp, Artificial Sequence
  ENSG00000143033_33 (sequence is synthesized)
agttctggggacaaataagtttggtatggatatcaggaccagccttctcatcctcctgtgtgtttgttgcctgttgactctggaaatttgtagaaggaggagctggcagacacaccaaaa

SEQ ID NO: 375910 - DNA, 120 bp, Artificial Sequence
  ENSG00000143033_34 (sequence is synthesized)
ttttactttttttactctagatttcttttctttgtaaagtgttgattgaataattttttagcaattgaaagtgatgtaagttgtgtctatcagctttttgagaggtaatccatatgtaga

SEQ ID NO: 375911 - DNA, 120 bp, Artificial Sequence
  ENSG00000143033_35 (sequence is synthesized)
tcccaatagttgttaatattcatttgaaatatttttgctttctagagtacaaatgtatttttcatgtttgtgtggaaatttgctgtgtacacagagaaaaagtataccattgtttagaag

SEQ ID NO: 375912 - DNA, 120 bp, Artificial Sequence
  ENSG00000143033_36 (sequence is synthesized)
tttacttggcttaagtaaaaataggttatttatgcttggctttatttcttttatttatcctcatgcctgatgtcatcttcactaagtaacatccacttgtattgctaaattaataaggct

SEQ ID NO: 375913 - DNA, 120 bp, Artificial Sequence
  ENSG00000143033_37 (sequence is synthesized)
gttcagtgttgaatgttataaatgaaactttcagatatcctttagacctaaattcttactcatatttctagttcttttgaacattcagaataccatacagtagaagagagataggtataa

SEQ ID NO: 375914 - DNA, 120 bp, Artificial Sequence
  ENSG00000143033_38 (sequence is synthesized)
aatgcttacagtaagtacttacaaatctttgttgtattttacatattttatcaacagataggatttaacccatgaatcaaatagtttggttaagtatggtatattctgtagcttatatcc

SEQ ID NO: 375915 - DNA, 120 bp, Artificial Sequence
  ENSG00000143033_39 (sequence is synthesized)
ggaagtgaaaacacaaaaatcttgattttaagttatatttttttaaagccagaccctctttgaatgcacttgaagaagtaatttgtggccaggtgcggtggctttcgcctgtaatcccag

SEQ ID NO: 375916 - DNA, 120 bp, Artificial Sequence
  ENSG00000143033_40 (sequence is synthesized)
ccgaggtgggtggatctcctgaggtctggagtttaagaccagcctggccaacacggtgaaaccacgtttctactaaaaatacaaaaaaatttagcctagcgtggtggtgggcgcctgtaa

SEQ ID NO: 375917 - DNA, 120 bp, Artificial Sequence
  ENSG00000143033_41 (sequence is synthesized)
tactccttttattttctgggcctctaggatttatctcctgctttctttttcaatgctgtcacctattatttctgactaaggtttttctctttataaatccactctgagatggaattcttt

SEQ ID NO: 375918 - DNA, 120 bp, Artificial Sequence
  ENSG00000143033_42 (sequence is synthesized)
tttccctaaatcccttttgaaatatttctaacagatgacactaaatatgggaaagcatattgggaccaaaaatataccattctttgttcttctttcttcctttaaaaagttagttgccat

SEQ ID NO: 375919 - DNA, 120 bp, Artificial Sequence
  ENSG00000143033_43 (sequence is synthesized)
gtttaaaaagaaaagtggacatgtgctcttctcctttctggtcctatcccttcctccccatcatatcctactgtagactggctctggggcagataaaaatcaaggaaagcaaggggaagt

SEQ ID NO: 375920 - DNA, 120 bp, Artificial Sequence
  ENSG00000143033_44 (sequence is synthesized)
gaatttttgtagtattgggtgggctttcaagtataagggccttatatatgaaagttaagttagggtctactatgtatatgtgttcagtttttaaaattttagttaatttttttaaaaatt

SEQ ID NO: 375921 - DNA, 120 bp, Artificial Sequence
  ENSG00000143036_0 (sequence is synthesized)
ctggcggggaggaacctggaccctgctccagtgctggggcggaggcgggggagacgcgggccgcggggcgcaaacttggggtcgtcctcaggtgcacctccaggtgtttatcatgggcta

SEQ ID NO: 375922 - DNA, 120 bp, Artificial Sequence
  ENSG00000143036_1 (sequence is synthesized)
ctcggtggtggctggagccgcgggaagactcctctttggctatgacagctttggcaacatgtgtggcaagaagaactcccccgtggaaggggcccctctttcagggcaggacatgaccct

SEQ ID NO: 375923 - DNA, 120 bp, Artificial Sequence
  ENSG00000143036_2 (sequence is synthesized)
aaaaaaacacgtgttctttatgaattcctgcaacctggaagtcaaaggtacgcagctcaaccgcatggccctctgtgtatccaactgccctgaagagcagcttgactccctggaagaggt

SEQ ID NO: 375924 - DNA, 120 bp, Artificial Sequence
  ENSG00000143036_3 (sequence is synthesized)
ccagttctttgcaaacaccagtgggtccttcctgtgtgtttatagtttgaattccttcaactatacccacagtccaaaagcagactcactgtgtcccaggctaccagttcctccaagcaa

SEQ ID NO: 375925 - DNA, 120 bp, Artificial Sequence
  ENSG00000143036_4 (sequence is synthesized)
gtcatttcccttatttaaccgatgtgtccctcaaacacctgagtgctactccctatttgcatctgttttgataaatgatgttgacaccctccaccgaattctaagtggaatcatgtcggg

SEQ ID NO: 375926 - DNA, 120 bp, Artificial Sequence
  ENSG00000143036_5 (sequence is synthesized)
aagagatacaatccttggcctgtgtatcctcgcattagccttgtctttggccatgatgtttaccttcagattcatcaccacccttctggttcacattttcatttcattggttattttggg

SEQ ID NO: 375927 - DNA, 120 bp, Artificial Sequence
  ENSG00000143036_6 (sequence is synthesized)
attgttgtttgtctgcggtgttttatggtggctgtattatgactataccaacgacctcagcatagaattggacacagaaagggaaaatatgaagtgcgtgctggggtttgctatcgtatc

SEQ ID NO: 375928 - DNA, 120 bp, Artificial Sequence
  ENSG00000143036_7 (sequence is synthesized)
cacaggcatcacggcagtgctgctcgtcttgatttttgttctcagaaagagaataaaattgacagttgagcttttccaaatcacaaataaagccatcagcagtgctcccttcctgctgtt

SEQ ID NO: 375929 - DNA, 120 bp, Artificial Sequence
  ENSG00000143036_8 (sequence is synthesized)
catcctcattttcttctgggtcctctgggtggctgtgctgctgagcctgggaactgcaggagctgcccaggttatggaaggcggccaagtggaatataagcccctttcgggcattcggta

SEQ ID NO: 375930 - DNA, 120 bp, Artificial Sequence
  ENSG00000143036_9 (sequence is synthesized)
catgtggtcgtaccatttaattggcctcatctggactagtgaattcatccttgcgtgccagcaaatgactatagctggggcagtggttacttgttatttcaacagaagtaaaaatgatcc

SEQ ID NO: 375931 - DNA, 120 bp, Artificial Sequence
  ENSG00000143036_10 (sequence is synthesized)
tcctgatcatcccatcctttcgtctctctccattctcttcttctaccatcaaggaaccgttgtgaaagggtcatttttaatctctgtggtgaggattccgagaatcattgtcatgtacat

SEQ ID NO: 375932 - DNA, 120 bp, Artificial Sequence
  ENSG00000143036_11 (sequence is synthesized)
gcaaaacgcactgaaagaacagcagcatggtgcattgtccaggtacctgttccgatgctgctactgctgtttctggtgtcttgacaaatacctgctccatctcaaccagaatgcatatac

SEQ ID NO: 375933 - DNA, 120 bp, Artificial Sequence
  ENSG00000143036_12 (sequence is synthesized)
tacaactgctattaatgggacagatttctgtacatcagcaaaagatgcattcaaaatcttgtccaagaactcaagtcactttacatctattaactgctttggagacttcataatttttct

SEQ ID NO: 375934 - DNA, 120 bp, Artificial Sequence
  ENSG00000143036_13 (sequence is synthesized)
aggaaaggtgttagtggtgtgtttcactgtttttggaggactcatggcttttaactacaatcgggcattccaggtgtgggcagtccctctgttattggtagctttttttgcctacttagt

SEQ ID NO: 375935 - DNA, 120 bp, Artificial Sequence
  ENSG00000143036_14 (sequence is synthesized)
agcccatagttttttatctgtgtttgaaactgtgctggatgcacttttcctgtgttttgctgttgatctggaaacaaatgatggatcgtcagaaaagccctactttatggatcaagaatt

SEQ ID NO: 375936 - DNA, 120 bp, Artificial Sequence
  ENSG00000143036_15 (sequence is synthesized)
tctgagtttcgtaaaaaggagcaacaaattaaacaatgcaagggcacagcaggacaagcactcattaaggaatgaggagggaacagaactccaggccattgtgagatagatacccattta

SEQ ID NO: 375937 - DNA, 120 bp, Artificial Sequence
  ENSG00000143036_16 (sequence is synthesized)
ggtatctgtacctggaaaacatttccttctaagagccatttacagaatagaagatgagaccactagagaaaagttagtgaatttttttttaaaagacctaataaaccctattcttcctca

SEQ ID NO: 375938 - DNA, 120 bp, Artificial Sequence
  ENSG00000143036_17 (sequence is synthesized)
ccccggccccggctcgcgggcgctgcgtctccgcgtacaggaggcggcggcggctcccagtcaccggcccccgccggcgagcgcacgatgcactgcctgggcgccgagtacctggtttct

SEQ ID NO: 375939 - DNA, 120 bp, Artificial Sequence
  ENSG00000143036_18 (sequence is synthesized)
tggtttctgcagaaggagcccctaggcaaagggagtggcgaccccagatttataggaaatgcacagatacggcatggttattcctgttctttctcttttggactggtttggtgtttatca

SEQ ID NO: 375940 - DNA, 120 bp, Artificial Sequence
  ENSG00000143036_19 (sequence is synthesized)
aggacagaaaaactcttctaaaaccatgtttatatgcatcaacttacaaagtacactatgtaagaactgaggtaagtttgtaagtgcacaactaataaataaacctttttaagataagga

SEQ ID NO: 375941 - DNA, 120 bp, Artificial Sequence
  ENSG00000143036_20 (sequence is synthesized)
aaggcccacaattaagaccagtgagaagcaatgctctaacacattcttctgtttcatctatttcctagacacgtgttctttatgaattcctgcaacctggaagtcaaagggtccttcctg

SEQ ID NO: 375942 - DNA, 120 bp, Artificial Sequence
  ENSG00000143036_21 (sequence is synthesized)
tctctaaggacccgcactgtgggaggctgattactgcagtagactccacactgatttccttacgatgtgtctgaaggggtgtacaaaagggttaatttgtatatcatgaaataaaaaact

SEQ ID NO: 375943 - DNA, 120 bp, Artificial Sequence
  ENSG00000143036_22 (sequence is synthesized)
ttcatcctttatccaaaccaaaaggaatgacaacaacccaagcagaatgcatatactacaactgctattaatgggacagatttctgtacatcagcaaaagatgcattcaaaatcttgtcc

SEQ ID NO: 375944 - DNA, 120 bp, Artificial Sequence
  ENSG00000143061_0 (sequence is synthesized)
ttccaaaactgttctctggagctataagtggattgccagaaatgagagattaggagctgggagaagaggaagcgccttgtgttgtgtctcctggaggctgccgacatgaagtgctttttc

SEQ ID NO: 375945 - DNA, 120 bp, Artificial Sequence
  ENSG00000143061_1 (sequence is synthesized)
ccggtgctgagctgtctggctgtgctgggtgtggtgtcagcacagcggcaggtcaccgttcaggaaggacccttgtaccgcacggagggctcccacatcactatctggtgcaatgtgagt

SEQ ID NO: 375946 - DNA, 120 bp, Artificial Sequence
  ENSG00000143061_2 (sequence is synthesized)
ggctaccagggaccttctgagcagaatttccagtggtccatttacctgccttcgtcgccagagcgagaggtgcagatcgtcagcaccatggactcttccttcccctatgccatctacacc

SEQ ID NO: 375947 - DNA, 120 bp, Artificial Sequence
  ENSG00000143061_3 (sequence is synthesized)
cagcgcgtccgcggagggaagatcttcatagaaagagtccaggggaactcaaccctattgcacatcacagatcttcaggcccgggatgccggggagtatgaatgccacacacccagcact

SEQ ID NO: 375948 - DNA, 120 bp, Artificial Sequence
  ENSG00000143061_4 (sequence is synthesized)
gataagcaatactttgggagttacagtgcaaagatgaacctagtggtgatcccagactccctgcagaccactgccatgccccagactctgcacagagtggagcaggacccgctggagctc

SEQ ID NO: 375949 - DNA, 120 bp, Artificial Sequence
  ENSG00000143061_5 (sequence is synthesized)
acttgtgaggtggcctcagagaccattcagcacagccacctgtctgtggcctggctccggcagaaagttggcgagaagcccgtggaggtcatctccctgagccgagatttcatgcttcac

SEQ ID NO: 375950 - DNA, 120 bp, Artificial Sequence
  ENSG00000143061_6 (sequence is synthesized)
tccagcagcgaatatgcccagaggcagagcctgggggaggtgcggctggacaagctggggaggaccaccttccgcctcaccatcttccacctgcagccttctgaccagggcgaattctac

SEQ ID NO: 375951 - DNA, 120 bp, Artificial Sequence
  ENSG00000143061_7 (sequence is synthesized)
tgcgaggccgccgagtggatccaggatccggatgggtcgtggtatgctatgacccgaaagcgttccgagggagccgtggtcaacgtccagccaactgacaaagaattcactgttcggctg

SEQ ID NO: 375952 - DNA, 120 bp, Artificial Sequence
  ENSG00000143061_8 (sequence is synthesized)
gagacagagaagcggctgcacacggtgggcgagccggtggagttcagatgcatcctggaggctcagaatgttcccgaccgttactttgctgtctcctgggccttcaacagctcgctcatc

SEQ ID NO: 375953 - DNA, 120 bp, Artificial Sequence
  ENSG00000143061_9 (sequence is synthesized)
gccaccatgggtcctaacgctgtgcctgtcctcaacagcgaatttgctcaccgggaagccaggggacagcttaaggtggccaaagagagcgacagtgtctttgtgctgaagatctaccac

SEQ ID NO: 375954 - DNA, 120 bp, Artificial Sequence
  ENSG00000143061_10 (sequence is synthesized)
ctccgccaggaagatagcgggaaatacaactgccgggtgactgagcgagagaaaaccgtgaccggggaattcattgataaggagagcaagcgtcccaagaacatccccatcatagtcctc

SEQ ID NO: 375955 - DNA, 120 bp, Artificial Sequence
  ENSG00000143061_11 (sequence is synthesized)
cccctcacagataactgggtagttaaagtcccccagcaccaccagctcctgtcccaaggccacttggagagcagcatctccgtggaggtggccagcaatgccagcgtcatccttgagggc

SEQ ID NO: 375956 - DNA, 120 bp, Artificial Sequence
  ENSG00000143061_12 (sequence is synthesized)
gaggacctgcgcttctcctgcagtgtccgcacggcaggcaggccgcagggtcgcttctctgtcatctggcagcttgtggacaggcagaaccgccgcagcaatatcatgtggctagaccgg

SEQ ID NO: 375957 - DNA, 120 bp, Artificial Sequence
  ENSG00000143061_13 (sequence is synthesized)
gatggcaccgtgcagccaggctcgtcctactgggagcgcagcagctttgggggcgtccagatggagcaggtgcagcccaactcgttcagcctgggcatcttcaacagcaggaaggaggac

SEQ ID NO: 375958 - DNA, 120 bp, Artificial Sequence
  ENSG00000143061_14 (sequence is synthesized)
gagggccagtatgaatgccatgtgactgaatgggtgcgggcagtggatggcgagtggcagattgttggggagcgccgggccagcactcccatctccatcacagctcttgaaatgggcttc

SEQ ID NO: 375959 - DNA, 120 bp, Artificial Sequence
  ENSG00000143061_15 (sequence is synthesized)
gcagtcacagccatctcccggacaccgggggtgacctacagcgactcctttgacttgcagtgtatcatcaaaccccactaccctgcctgggtccccgtgtcggtgacatggcggttccag

SEQ ID NO: 375960 - DNA, 120 bp, Artificial Sequence
  ENSG00000143061_16 (sequence is synthesized)
ggtgggcacggtggagttccatgacttggtgaccttcacccgggacggaggggtccagtggggggacaggtcctccagcttccgaacccgaactgccatcgagaaggctgagtccagcaa

SEQ ID NO: 375961 - DNA, 120 bp, Artificial Sequence
  ENSG00000143061_17 (sequence is synthesized)
caacgtccgcctaagcatcagccgagccagtgacacggaagcaggcaagtaccagtgtgtggcagagctgtggcggaagaactacaacaacacctggacgcgactggcggagaggacctc

SEQ ID NO: 375962 - DNA, 120 bp, Artificial Sequence
  ENSG00000143061_18 (sequence is synthesized)
caacctgctggagatcagggtgctgcagccagtgacaaagctgcaggtgagcaaatcgaagaggaccctcaccctggtggaaaacaagcccattcagttgaactgctcagtcaagtctca

SEQ ID NO: 375963 - DNA, 120 bp, Artificial Sequence
  ENSG00000143061_19 (sequence is synthesized)
gactagccagaactcccactttgcggtgctctggtatgtccacaagccctcggatgccgatggcaagcttatcctgaagaccacccacaactccgcctttgaatacggtacttacgccga

SEQ ID NO: 375964 - DNA, 120 bp, Artificial Sequence
  ENSG00000143061_20 (sequence is synthesized)
ggaggagggcctgagagccaggctccagtttgagaggcatgtgtcggggggcctgttcagcctcaccgtccagagagccgaggtcagcgacagcggcagctactactgccacgtggagga

SEQ ID NO: 375965 - DNA, 120 bp, Artificial Sequence
  ENSG00000143061_21 (sequence is synthesized)
gtggctgctgagccccaactacgcctggtacaagctggcagaggaggtttctgggcgcacagaagtcactgtgaaacagccagacagccgcctgaggctcagccaagcccaggggaacct

SEQ ID NO: 375966 - DNA, 120 bp, Artificial Sequence
  ENSG00000143061_22 (sequence is synthesized)
gtcggttctggagacccggcaggtacagctggagtgtgtggttctcaaccgcaccagcataacctcccagctcatggtggaatggtttgtatggaagcccaaccaccctgagcgggagac

SEQ ID NO: 375967 - DNA, 120 bp, Artificial Sequence
  ENSG00000143061_23 (sequence is synthesized)
tgtggcccgcttgagccgtgacgccaccttccactatggagagcaggcagccaagaacaatctgaaggggcggctgcatttggagagtccttcccccggcgtgtaccgtctcttcatcca

SEQ ID NO: 375968 - DNA, 120 bp, Artificial Sequence
  ENSG00000143061_24 (sequence is synthesized)
gaacgtggctgtgcaggacagcgggacctacagctgccatgtggaggagtggctgcccagccccagtggcatgtggtataagcgggcagaggacaccgctgggcagacagctctgacagt

SEQ ID NO: 375969 - DNA, 120 bp, Artificial Sequence
  ENSG00000143061_25 (sequence is synthesized)
catgcgaccagatgcttccctgcaggtggacacagtggtccccaatgccacggtctctgagaaggcagctttccagctggactgtagcatcgtgtcccgctccagccaggactcccgctt

SEQ ID NO: 375970 - DNA, 120 bp, Artificial Sequence
  ENSG00000143061_26 (sequence is synthesized)
cgctgtggcctggtattccctgaggactaaagctggggggaaaaggagcagccctggcctggaagaacaggaagaggaaagggaggaggaggaggaggaggacgacgacgacgacgacga

SEQ ID NO: 375971 - DNA, 120 bp, Artificial Sequence
  ENSG00000143061_27 (sequence is synthesized)
cccaacagagcggacggccctgctgagcgtgggcccagatgctgtctttggcccagagggcagtccttgggagggcaggcttcgcttccagaggctctccccggtgctctaccggctcac

SEQ ID NO: 375972 - DNA, 120 bp, Artificial Sequence
  ENSG00000143061_28 (sequence is synthesized)
agtgctgcaggcaagcccccaagatacaggcaattactcctgccatgtggaggagtggctgcccagccctcagaaggaatggtaccggctgacggaggaggagtcagcccccatcggcat

SEQ ID NO: 375973 - DNA, 120 bp, Artificial Sequence
  ENSG00000143061_29 (sequence is synthesized)
ccgtgttctagatacaagtcccaccctccagtccatcatctgctccaacgacgcactcttctacttcgtcttcttctaccctttccccatctttggcattcttatcatcaccatccttct

SEQ ID NO: 375974 - DNA, 120 bp, Artificial Sequence
  ENSG00000143061_30 (sequence is synthesized)
ggtgcgtttcaagagccggaactccagcaagaactctgatgggaagaatggggtgcctctgctgtggatcaaagagccacacctcaactactcccctacttgcctggagccccctgttct

SEQ ID NO: 375975 - DNA, 120 bp, Artificial Sequence
  ENSG00000143061_31 (sequence is synthesized)
cagtatccatccaggggccatagactaagcgggtgatgccccagcggatgttggccacggaggagctgaggctctccctttctctgtgattggacagttgacagcacccaaactctgggg

SEQ ID NO: 375976 - DNA, 120 bp, Artificial Sequence
  ENSG00000143061_32 (sequence is synthesized)
gcggggactcgggaggggccgcagcgcggctgctggtgccgttgcgggagaagaggaagcggcgcgtcccctgaggcgtgcgcctggatggactgaaggacggtccgacgcgcgcggagg

SEQ ID NO: 375977 - DNA, 120 bp, Artificial Sequence
  ENSG00000143061_33 (sequence is synthesized)
gagagggccaggggcgagaaatctgctcgcgctggggtaccgcttcagggctgccgaacgccaacttgcttcgtgtgccctaggcaggcgtggggcaggtggcgcctccgtgacctacca

SEQ ID NO: 375978 - DNA, 120 bp, Artificial Sequence
  ENSG00000143061_34 (sequence is synthesized)
ccatggatggaaacggactttttggtgaagaaacccaaacggttgatgccaggcagggtgatttggccgtcaaaggttttgacgaaacctgccctgttctctctggggaatccgaatgag

SEQ ID NO: 375979 - DNA, 120 bp, Artificial Sequence
  ENSG00000143061_35 (sequence is synthesized)
ggagatcacagacaccttcactgagaagccaaggacatttctgtataatcagtggatgaaaggattttctcagacccttttttccgtgcttctggaggattaatccactacagtctgcaa

SEQ ID NO: 375980 - DNA, 120 bp, Artificial Sequence
  ENSG00000143061_36 (sequence is synthesized)
tttcagtggaaactgcaaggcacacgatgtggcaggagccgggagcgacttccgaattgttgtggacccttcctgtagcataggggagttttcacacttgcctccactcctccccttccc

SEQ ID NO: 375981 - DNA, 120 bp, Artificial Sequence
  ENSG00000143061_37 (sequence is synthesized)
gacagactgcctctcggtggcagtcttggttggttagctatttgcgcgcaaatgttgtgatcctgccattatagatttcttgtttctgtttttagtaatgtagtgagtagctccaggtgc

SEQ ID NO: 375982 - DNA, 120 bp, Artificial Sequence
  ENSG00000143061_38 (sequence is synthesized)
cacatctactcacagatttatctagtattctcagatagatgttacagggcttcttattctttgtaatgtactctttttaaatccctttagtttaccctttttggattccttaatgtggac

SEQ ID NO: 375983 - DNA, 120 bp, Artificial Sequence
  ENSG00000143061_39 (sequence is synthesized)
gaatttctcttacgtacaactgacagcaaaaggaagggcgaactttctagtgacaaggaatctcttccaagactttgtttttgcacatttgaaaatgccacccatggatcaaaatatacc

SEQ ID NO: 375984 - DNA, 120 bp, Artificial Sequence
  ENSG00000143061_40 (sequence is synthesized)
caaacgttttttactttcttaacaagacttaagaattgtgtgtagtgtgggcaaaatttgtatgttgtcttttccctcagctggagttattggaaccactttgtagtcaagacgaaagca

SEQ ID NO: 375985 - DNA, 120 bp, Artificial Sequence
  ENSG00000143061_41 (sequence is synthesized)
ctgaattttgcttcaaagaactgtgtatgtacaagagaaatcctgcataaccccattaggagtagatggtgcccggcctatctgtcagggaggcaaaaaaggcttcatcccatccttgcc

SEQ ID NO: 375986 - DNA, 120 bp, Artificial Sequence
  ENSG00000143061_42 (sequence is synthesized)
aaaaaataagaaaactgtcttggagaatgggtcagaagccccaaacggcacacactttccaaattaaagtgggcaggggctgcttttagcagctgctgacctgcagatttgtcaaagcca

SEQ ID NO: 375987 - DNA, 120 bp, Artificial Sequence
  ENSG00000143061_43 (sequence is synthesized)
gtgactagagaaggaagggagaaaggctggctgttggcttgctctgagctgcaaggatggtctctaactgattaactgtgagcaggtgggcctgtgtcttcaggtgctttgccaaactct

SEQ ID NO: 375988 - DNA, 120 bp, Artificial Sequence
  ENSG00000143061_44 (sequence is synthesized)
taaaagaaagtgtccagtgaacttggaagtgggcccctgagctgagcacagggccaaagcagccatggcagacacctgacggagggcacggggctggctgacactaagtttggtgggaca

SEQ ID NO: 375989 - DNA, 120 bp, Artificial Sequence
  ENSG00000143061_45 (sequence is synthesized)
gtgaggggtgggaggggggtttccagggcctggtgttggagagtgcagagaaatatctacctccctggaggtgtgaagactaggtttttcttcttccttccaattagattttccttaatt

SEQ ID NO: 375990 - DNA, 120 bp, Artificial Sequence
  ENSG00000143061_46 (sequence is synthesized)
atagtgatgtcttccttattcatttttctctccctgcctctcactgccataagaatatcagcctgggggcagtccagacgcagccctttgtcatcctttctgtttgcctagtctcagcag

SEQ ID NO: 375991 - DNA, 120 bp, Artificial Sequence
  ENSG00000143061_47 (sequence is synthesized)
actgtgatcacaaggcattgtctgtgggatttttcctttccctttcttgatctctcttgtggttctaggttgtttggttgttcattgttatggtggctttttattttaacgccccttgag

SEQ ID NO: 375992 - DNA, 120 bp, Artificial Sequence
  ENSG00000143061_48 (sequence is synthesized)
ccccatgatggctggtgtcaccctgttcttttacactgttgggccaggtgctgcttgtccttcttagggcatcatcaattgcaaatatttccttttgctccctttatgaagatgttctta

SEQ ID NO: 375993 - DNA, 120 bp, Artificial Sequence
  ENSG00000143061_49 (sequence is synthesized)
tacccttgctttcccatatttttctggccaagcatgccatctcctttactctgggaacttacatcctgaatcccaagagggggtcacagtttggaaaaagtcatcagggattctggaact

SEQ ID NO: 375994 - DNA, 120 bp, Artificial Sequence
  ENSG00000143061_50 (sequence is synthesized)
aagtctgataaaagattccagtgaagccctgttctgagaacgagcagactgcaggggaggccatgggattccccaggccagtgtctgtgctgatccttcaagggtctgcaggtatgcagg

SEQ ID NO: 375995 - DNA, 120 bp, Artificial Sequence
  ENSG00000143061_51 (sequence is synthesized)
tggcctgggctgctcggcagatactttgctgattcccagctgaggggagcatggtggcgattgctcagccattttctgacagacacacagacctgccttttctcccccaagtataccgta

SEQ ID NO: 375996 - DNA, 120 bp, Artificial Sequence
  ENSG00000143061_52 (sequence is synthesized)
ccctcctgtgagacagtgtgtgcaggcaccaccaccttaatcctgctgttgcctgacatgctgattctcatttattatgctgcatcaacacattagaggtacaggagcggctcagtcatg

SEQ ID NO: 375997 - DNA, 120 bp, Artificial Sequence
  ENSG00000143061_53 (sequence is synthesized)
aaaaaagaaggtcttttgccccatttctttatttcagagatgtgggctttcagtgggaatttgctgactcctactttataggctgagtcaatgagggaagatgactggcgtttcctctgt

SEQ ID NO: 375998 - DNA, 120 bp, Artificial Sequence
  ENSG00000143061_54 (sequence is synthesized)
ctaaatgggaggttgccagagcgctggctgggactaggatgtgtaactaagatttcagtttgaaatcttagatttcagttcacggcgataaagaagtaggtgctgcacacaaatatgtaa

SEQ ID NO: 375999 - DNA, 120 bp, Artificial Sequence
  ENSG00000143061_55 (sequence is synthesized)
agcaattgtaggaaatttgaaaggaaaaaaagaaaccgaagccagtattttaataattgctttttctgtgtattttgtattgggctgggggatagcatcaaaggttgaactttttgagct

SEQ ID NO: 376000 - DNA, 120 bp, Artificial Sequence
  ENSG00000143061_56 (sequence is synthesized)
ttctatgaaaaaccccaggaccttctttctttggccatttctatggaaatgcgatgtcagatggatggtaatggtgccctccagtggctgtgagacctcattgcgcattgtctactggag

SEQ ID NO: 376001 - DNA, 120 bp, Artificial Sequence
  ENSG00000143061_57 (sequence is synthesized)
ctttagtcttctgagacggaggaaaactgctgaatactctggattcatctatgtctacaatgttgcatttatgaaaaactacactgtgctaggcgcattctaggacatgaatatgaccac

SEQ ID NO: 376002 - DNA, 120 bp, Artificial Sequence
  ENSG00000143061_58 (sequence is synthesized)
accctctttcaccgggtgtttctgtagcaagttttcatattcttttcaaacaatggtttctctgcgttaattattgaggaaaaaaaaagatggggtaagaaaactacccatgcatgatgt

SEQ ID NO: 376003 - DNA, 120 bp, Artificial Sequence
  ENSG00000143061_59 (sequence is synthesized)
agagagctgttgatttgtttctgtttttttaaaggaaaactatttgtaagatgttgcactaaaacattttatatacacttcagagacctgtagtaaattatgttgaaaatacggctgttt

SEQ ID NO: 376004 - DNA, 80 bp, Artificial Sequence
  ENSG00000143067_0 (sequence is synthesized)
agtgaggagtcagccgggcagccagccagcgagccagccagccagccagccagccagccagccaaccagccagccagcgg

SEQ ID NO: 376005 - DNA, 120 bp, Artificial Sequence
  ENSG00000143067_1 (sequence is synthesized)
gcagacgcgctgcggtgcggggctcgggccggggcgctcggtgccctagctcctcgccgcgccagccgcctcgcaggtaggagcgtggctgtggctgggctcaaccgcctcccggggatg

SEQ ID NO: 376006 - DNA, 120 bp, Artificial Sequence
  ENSG00000143067_2 (sequence is synthesized)
gggctgatcgggaccagacccgaccgctgcggggatggggtgtgtgttcgagtgcggtggcggaacggctgggcgaagttgtgcctcgtaaagtggaccgttgtccgctcccctggggcg

SEQ ID NO: 376007 - DNA, 120 bp, Artificial Sequence
  ENSG00000143067_3 (sequence is synthesized)
cagggccccgggcttatggggtgctctcgcgcccccaaagccaggactgagctccctcaggggtatgtggcgaggggcggggaggaggaggctgagacttgagggaggagacagcgatgc

SEQ ID NO: 376008 - DNA, 120 bp, Artificial Sequence
  ENSG00000143067_4 (sequence is synthesized)
aagagggaataggaccgtcccgccgaccaccgaagggggcatcagagaccctcggagaaaccaagcccagggaggagcttggaaggcaaggagaagggattcctggtcacctcccttgct

SEQ ID NO: 376009 - DNA, 120 bp, Artificial Sequence
  ENSG00000143067_5 (sequence is synthesized)
cttttcttcctggatgaaacaagaagataatcagggtgtctgtgcacaccaggactcagaagacaaagggatgggttctgattttgaggactctgaggacagggaaggggacccagaaga

SEQ ID NO: 376010 - DNA, 120 bp, Artificial Sequence
  ENSG00000143067_6 (sequence is synthesized)
aagagaaatgggctctaatccacatgacacaaacaagagagaaggccatccggagccggagatgggctccaacccacaggactcaaggcacagggaagcagtgcccgacatctgcacaga

SEQ ID NO: 376011 - DNA, 120 bp, Artificial Sequence
  ENSG00000143067_7 (sequence is synthesized)
ggggcagctgagtgaggaagaaggcgtttctgtccgtggggaagaggatgaccaatccggtgtagctgacatggcgatgttcccaggactgtctgagtctgacagcatatcccggagcct

SEQ ID NO: 376012 - DNA, 120 bp, Artificial Sequence
  ENSG00000143067_8 (sequence is synthesized)
ccgggaggacgacgacgagagtgctggggagaaccggctggaggaggaagaggagcagccggcccctcccgtacttccctggaggcgacatctctccctggggagtcggcaccgaggtga

SEQ ID NO: 376013 - DNA, 120 bp, Artificial Sequence
  ENSG00000143067_9 (sequence is synthesized)
caagcccgcccaccgccgcttccaccggctccaccaccccatggccgtggacctcggggagctggatagcctggtggccagcatcatggacgcgcccaccatctgccccgactgcgggga

SEQ ID NO: 376014 - DNA, 120 bp, Artificial Sequence
  ENSG00000143067_10 (sequence is synthesized)
gagcttcagtcctggcgccgccttcctgcagcaccagcgcattcaccgcctggctgaggccgctgccgccgccagcctggagcccttcggcctggcgggcgagtgcgacgcgatggtggg

SEQ ID NO: 376015 - DNA, 120 bp, Artificial Sequence
  ENSG00000143067_11 (sequence is synthesized)
catgatgggggtgggtgtggcggggggcttcggggccgggcccccgctggcccggcccccgcgcgaaaagcccttccgctgcggggagtgcggcaagggcttcagccgcaacacctacct

SEQ ID NO: 376016 - DNA, 120 bp, Artificial Sequence
  ENSG00000143067_12 (sequence is synthesized)
gaccaaccacctgcgcctgcacacgggcgagcggcccaacctgtgcgccgactgcggcaagagcttcagctggcgcgccgacctgctcaagcaccggcgcctgcacacgggcgagaagcc

SEQ ID NO: 376017 - DNA, 120 bp, Artificial Sequence
  ENSG00000143067_13 (sequence is synthesized)
gagaagccctacccgtgccccgagtgcggcgaggccttcagcctcagctcgcatctgttgagccaccggcgcgcgcacgcggcggccagcggcgcgggggcggcggcgctgcggcccttc

SEQ ID NO: 376018 - DNA, 120 bp, Artificial Sequence
  ENSG00000143067_14 (sequence is synthesized)
ggagtgcggcaagggcttcgtgcgccgttcgcacctggccaaccaccagcgcatccacacgggcgagaagccgcacggctgtggcgagtgcggcaagcgcttcagctggcgctcggactt

SEQ ID NO: 376019 - DNA, 120 bp, Artificial Sequence
  ENSG00000143067_15 (sequence is synthesized)
ggtgaagcaccagcgcgtgcacacgggcgagaagccctacatgtgctccgagtgcggcgagaccttcagcgtcagctcgcacctcttcacgcacaagcgcacgcactcgggtgagcggcc

SEQ ID NO: 376020 - DNA, 120 bp, Artificial Sequence
  ENSG00000143067_16 (sequence is synthesized)
ctacgtgtgccgcgagtgcgggaagggcttcgggcgtaactcgcacctggtgaaccacctgcgcgtgcacaccggcgagaagcccttccgctgtggccagtgcgagaagcgcttcagcga

SEQ ID NO: 376021 - DNA, 120 bp, Artificial Sequence
  ENSG00000143067_17 (sequence is synthesized)
cttctccacgctcacgcagcaccagcgcacgcacacgggcgagaagccctacacgtgcatcgagtgcggcaagagctttatccagagctcccacctgatccgccaccgccgcatccacac

SEQ ID NO: 376022 - DNA, 120 bp, Artificial Sequence
  ENSG00000143067_18 (sequence is synthesized)
gggcaacaagccgcacaagtgtgcgggctgcggcaaaggcttccgctataaaacgcacctcgcgcagcaccagaagctgcacctgtgttaggggctgggtccgcgggaggctgccgtctg

SEQ ID NO: 376023 - DNA, 120 bp, Artificial Sequence
  ENSG00000143067_19 (sequence is synthesized)
gggagcctgtggggggtagatatcctgggactgacccaggggaaggaagtggggaaggggcgggagggacaatctgagagtgactggggagcctttggtgtttggggtttcctgaagtgg

SEQ ID NO: 376024 - DNA, 120 bp, Artificial Sequence
  ENSG00000143067_20 (sequence is synthesized)
gaggagtgttgagtaagttggtctttcccggtgctatacttgcctcctctccacggaagaattgttcaggagatgcgcttggggtgatgacttccttaaatacacgctgtagggggtgaa

SEQ ID NO: 376025 - DNA, 120 bp, Artificial Sequence
  ENSG00000143067_21 (sequence is synthesized)
gagcttggaggaccaggcactttgaggaagggcagttcgtgggctggggtgggaacaggatggcgggcaatagactagggtaggccgcgatggcctgtagaaggttgcggggagagggtt

SEQ ID NO: 376026 - DNA, 120 bp, Artificial Sequence
  ENSG00000143067_22 (sequence is synthesized)
taaatgagggttatggggcgaaataaaaccaagtataagtgattctatcttggtcccaccaagagtttgcccgatctccacacatcacctgttgtctcacaaaaagtaggggaaccttgt

SEQ ID NO: 376027 - DNA, 120 bp, Artificial Sequence
  ENSG00000143067_23 (sequence is synthesized)
ctattttgaggcatccaaggggaagtgggctgaaaaacgccacactcatttcaaggggcaatgtctggggtttagaaattcatttataactggttctctgatgtgggaaatcctgattct

SEQ ID NO: 376028 - DNA, 120 bp, Artificial Sequence
  ENSG00000143067_24 (sequence is synthesized)
gtcccgggttctttgctacttccttgaaaatactctagcttcatgctgggtcaaggtggtttacctggatgacccccctcccccgccctcgcccatcccaggtgtgtgccacacccagta

SEQ ID NO: 376029 - DNA, 120 bp, Artificial Sequence
  ENSG00000143067_25 (sequence is synthesized)
tttctttcaggtctcaactgtggtgttttaagtgcagggaaaaggaacaatcacagctatgtgtgactttccttttcccacctcaccttgatgtaggtgtttcaagtgaactttagacca

SEQ ID NO: 376030 - DNA, 120 bp, Artificial Sequence
  ENSG00000143067_26 (sequence is synthesized)
acagttgcccagtgacctgctaaaaagtcaactagctcagagttttgctggcctttatgtgagaaatccaagaaagtgttcacttttttgggatgcgagactccttggtctcatttgcct

SEQ ID NO: 376031 - DNA, 120 bp, Artificial Sequence
  ENSG00000143067_27 (sequence is synthesized)
tcactttgcatttgttagtgacctccactaacccccacttccatgcatattgacgagggatctagtctaagtaagaatgtcttttgcctgcgcgtggaggcacagtagaaatctcaaggc

SEQ ID NO: 376032 - DNA, 120 bp, Artificial Sequence
  ENSG00000143067_28 (sequence is synthesized)
tttacccagaagagcccagtcagggagaggtgtaaatgcaaaattgccaaatagcacaaacaatgaatgttttctggttgttatatagatgccaaaatagcactttgatatttgcaaagt

SEQ ID NO: 376033 - DNA, 120 bp, Artificial Sequence
  ENSG00000143067_29 (sequence is synthesized)
gctttatgctttttaataattgttagctgtttctcacatcattgtgagttagatcagtattatgaccgctgtcttagggaaggcctgggaacaggagtgtgcaggctgtcctgaagagag

SEQ ID NO: 376034 - DNA, 120 bp, Artificial Sequence
  ENSG00000143067_30 (sequence is synthesized)
gctgaggacagtgtgaataattgtagcctgaccttttgcattctccagctcagctgctaggaagacttacttgtcatgatttatataataaaattaaggacactgaaaattcttatgctt

SEQ ID NO: 376035 - DNA, 120 bp, Artificial Sequence
  ENSG00000143067_31 (sequence is synthesized)
gatgaaaaacttaaggctagcctagaagggccaaacatgtccttattgacaaagctggtctttgtcgcctaattagggtatcctagctatgttccatttctagtaaggggctgtagttag

SEQ ID NO: 376036 - DNA, 120 bp, Artificial Sequence
  ENSG00000143067_32 (sequence is synthesized)
atgactcttgtatagatttcagttacttatgctgaagatccctgtgctaggttagcctttagaagttagagttgtggaaagcagtattgttttcttctctagtgattgttaccctacaca

SEQ ID NO: 376037 - DNA, 120 bp, Artificial Sequence
  ENSG00000143067_33 (sequence is synthesized)
tttcatggaagcatcttcacaaaatatcagacacagtggaagggggaaaaaaagctacgagattgtttttacacttttagcaaagtttctgtggatgctagtaatttatacttgatcagt

SEQ ID NO: 376038 - DNA, 120 bp, Artificial Sequence
  ENSG00000143067_34 (sequence is synthesized)
tgtattctagtaaagaacctctttggggactgtaggaaagcatgtttttgtggttataaaaacacttaaaaatcctgataattctgggcttgtataatgcctgttgatcttgccctctta

SEQ ID NO: 376039 - DNA, 120 bp, Artificial Sequence
  ENSG00000143067_35 (sequence is synthesized)
atcagtttattgttattcacaaatgcaaataggttttcaaactacagacagttttgaaagacattaattctcattttcttctagtcaggagtaatacaagcaaacaagtgtccgttttga

SEQ ID NO: 376040 - DNA, 120 bp, Artificial Sequence
  ENSG00000143067_36 (sequence is synthesized)
attctgatttgtaatctgaatactaaacatattagacccacctgaaaataatatagccaatttctaggtaatcttactgctttgtgggtttctttccatgtacatctacctcttccagct

SEQ ID NO: 376041 - DNA, 120 bp, Artificial Sequence
  ENSG00000143067_37 (sequence is synthesized)
gttttaagttttctcaagtctgtgcctatgaaatctcatccaacttttgattattcatggattgattatccgctttttttttgcttttttgctgccattgctatgcctggtctcgtctgc

SEQ ID NO: 376042 - DNA, 120 bp, Artificial Sequence
  ENSG00000143067_38 (sequence is synthesized)
atcaaatatactacatatcagcaactttagagaatgggttcaacagggagtggagagtgaagctaatgtaaaatagtttagtggcagtgggaatctttggacttcatttacctctctcat

SEQ ID NO: 376043 - DNA, 120 bp, Artificial Sequence
  ENSG00000143067_39 (sequence is synthesized)
tatttctattaccatggataaaaaagtcagctgctacgttgatatcccttctatgagcacattcttagcagaagaaaacaatccaactaccaacacccgactctattggtgcatttaaaa

SEQ ID NO: 376044 - DNA, 120 bp, Artificial Sequence
  ENSG00000143067_40 (sequence is synthesized)
tgtgattccattttttcttacaattcttcagggaacttacctgcattaagtgaggttaaatgcattcaggaggttgtttgtttcttctatctagttttagaataatatttcttcggcaaa

SEQ ID NO: 376045 - DNA, 120 bp, Artificial Sequence
  ENSG00000143067_41 (sequence is synthesized)
ccctgctaactgcggttcacccttgaaaacgttaatctgaggactttttccaccaactcattaatgatggtggaagcaagtgtattatttgtttcctggagaatttgatgaagagcagtc

SEQ ID NO: 376046 - DNA, 120 bp, Artificial Sequence
  ENSG00000143067_42 (sequence is synthesized)
ttcctctgctgccctttactaagcaaaacctggagcaatttaaataggctaaatggttttgattaaatcttgagctccgagttggaaggagaaaatgagaagttaaccccttgagccatg

SEQ ID NO: 376047 - DNA, 120 bp, Artificial Sequence
  ENSG00000143067_43 (sequence is synthesized)
tggtctctttacaatcaagagactgtacatatgtgaaaaaatacaaattaaggacctgtgttcatagacaatctaaactgtgtttctgaagtttgtgcacatttttcttcactgtaatgt

SEQ ID NO: 376048 - DNA, 120 bp, Artificial Sequence
  ENSG00000143067_44 (sequence is synthesized)
tattttacagctgtttgttaaaatagtgaataatttaatgatcctaaaagtaacaggtttcgtgtgagtgtgcttgtatacgtgagatttgccttattttcaggttgttttatttaacga

SEQ ID NO: 376049 - DNA, 120 bp, Artificial Sequence
  ENSG00000143067_45 (sequence is synthesized)
tggttccttggacagcattctggtgttcagcaaccaatatggaatatttgtcattaaatccatatcagtcttttaccatgtcattcttctttgccacacattaaatgtcactcagctcta

SEQ ID NO: 376050 - DNA, 120 bp, Artificial Sequence
  ENSG00000143079_0 (sequence is synthesized)
agccgctgtggatggggagtggaggcggaggggagcggagcccggagcgtcgtggaaagcattggacacatttccaccatgctaatggcattttaaatatatttggcaattttcccaatt

SEQ ID NO: 376051 - DNA, 120 bp, Artificial Sequence
  ENSG00000143079_1 (sequence is synthesized)
ttttactgaagaaaactgtaagtttatacttgaggactgaagtgtgactctgccgattatcaggctttcaagatgaatctggaaaaactcagcaagcctgaactcctgacactatttagt

SEQ ID NO: 376052 - DNA, 120 bp, Artificial Sequence
  ENSG00000143079_2 (sequence is synthesized)
attcttgaaggagagcttgaagcaagggaccttgttatagaagccttaaaggcccaacacagagatactttcattgaagaacgctatggaaaatataacatcagtgatcctttaatggct

SEQ ID NO: 376053 - DNA, 120 bp, Artificial Sequence
  ENSG00000143079_3 (sequence is synthesized)
ctacagagagattttgaaacactgaaggagaaaaatgatggcgaaaagcagccagtctgcacaaatccactctctattcttaaggttgtgatgaagcagtgcaagaacatgcaggagcgc

SEQ ID NO: 376054 - DNA, 120 bp, Artificial Sequence
  ENSG00000143079_4 (sequence is synthesized)
atgctgtcccagctggctgctgctgagagcaggcaccgaaaggtgatcctagaccttgaggaagaaaggcagcggcatgcacaggatacggctgaaggagatgatgtcacctacatgcta

SEQ ID NO: 376055 - DNA, 120 bp, Artificial Sequence
  ENSG00000143079_5 (sequence is synthesized)
gagaaggaaagagagaggctgactcaacagttggaatttgaaaaatcccaagtgaaaaagtttgaaaaagaacagaagaagctctctagtcagctggaagaggagcgctcccgccacaag

SEQ ID NO: 376056 - DNA, 120 bp, Artificial Sequence
  ENSG00000143079_6 (sequence is synthesized)
cagctctcatccatgctagtgcttgagtgcaagaaagccaccaacaaggcagccgaggaaggacagaaggcaggagagctgagcctgaaattggagaaggagaagagccgggtgagtaaa

SEQ ID NO: 376057 - DNA, 120 bp, Artificial Sequence
  ENSG00000143079_7 (sequence is synthesized)
ctggaagaagagttggcagctgagagaaagagaggcttgcagactgaggcccaggtagagaagcagttatcagagtttgacatcgaaagggaacaactgagagcaaaactgaaccgagaa

SEQ ID NO: 376058 - DNA, 120 bp, Artificial Sequence
  ENSG00000143079_8 (sequence is synthesized)
gagaaccggaccaaaaccctgaaagaagaaatggaaagtttaaagaagatagtgaaggacctagaggcttcccaccagcacagtagccctaatgagcaattgaagaaaccagtaaccgtg

SEQ ID NO: 376059 - DNA, 120 bp, Artificial Sequence
  ENSG00000143079_9 (sequence is synthesized)
tccaaaggcacagcaactgagcctctcatgctaatgtctgtgttttgccaaacagagagttttccagcagaaagaacccatgggagcaacatagccaagatgacaaacactgggctgcct

SEQ ID NO: 376060 - DNA, 120 bp, Artificial Sequence
  ENSG00000143079_10 (sequence is synthesized)
ggtcctgccactcctgcttactcatatgcaaaaaccaatggccattgtgacccagagatacaaactaccagggagctgactgcaggcaacaatgtagaaaaccaggtgcctccacgggaa

SEQ ID NO: 376061 - DNA, 120 bp, Artificial Sequence
  ENSG00000143079_11 (sequence is synthesized)
aaatctgtggcattggcccaagagaaaccagtggagaatggtgggtgtcctgtggggattgagactccagtcccaatgcccagtcccctctcttccagtgggagctcactgtctcccagc

SEQ ID NO: 376062 - DNA, 120 bp, Artificial Sequence
  ENSG00000143079_12 (sequence is synthesized)
agcactgcctcctcctctctaacatcctctccttgctcttcgccggtactcactaagcgtttattggggtcatcagctagcagccctggctaccagtcatcgtaccaagtagggatcaac

SEQ ID NO: 376063 - DNA, 120 bp, Artificial Sequence
  ENSG00000143079_13 (sequence is synthesized)
caacggttccatgcagctcgccacaaatttcagtcccaagcagatcaggaccaacaagccagtggcctacagagccctccatccagggatttatcccccaccctcatagacaactctgcc

SEQ ID NO: 376064 - DNA, 120 bp, Artificial Sequence
  ENSG00000143079_14 (sequence is synthesized)
gccaagcagctggcccgaaacacagtcactcaggtgctctccagattcactagccaacaagggccaatcaagccagtctctcccaacagctctccctttggcacagactatcgaaatcta

SEQ ID NO: 376065 - DNA, 120 bp, Artificial Sequence
  ENSG00000143079_15 (sequence is synthesized)
gccaacactgccaatccaagaggtgacacaagccattcacctactccagggaaagtgtccagtcccctgagccccctgtctccaggaatcaagtccccaaccatccccagagctgagaga

SEQ ID NO: 376066 - DNA, 120 bp, Artificial Sequence
  ENSG00000143079_16 (sequence is synthesized)
ggaaaccctccacccatcccacccaagaaacctggcctcaccccttctccatctgctaccactccattgaccaaaactcattcccaggcagcctctttgaccactgcagaagaccttgcc

SEQ ID NO: 376067 - DNA, 120 bp, Artificial Sequence
  ENSG00000143079_17 (sequence is synthesized)
agcagctgctcttccaatactgttgtagcaaatggtaaggatgttgagttacttttgcctaccagcagctagtccctaggagggagtctccacgtttgacattccatcagatttcgtcca

SEQ ID NO: 376068 - DNA, 120 bp, Artificial Sequence
  ENSG00000143079_18 (sequence is synthesized)
aaagctcagtcagacttctgagtcagattatgttatttattttgatagtagctgaaaccatctgtataatacatttagtatatttcaccattttgtatttttttaagtagaaactgagta

SEQ ID NO: 376069 - DNA, 120 bp, Artificial Sequence
  ENSG00000143079_19 (sequence is synthesized)
gtttggatttttatggctcacatctttttactgaagccagaaaggcacctcaaagatgtctcaagctcagcagtcaccgtcatgttgtgatgaagaaagcgaatcaccaggtggtgattt

SEQ ID NO: 376070 - DNA, 120 bp, Artificial Sequence
  ENSG00000143079_20 (sequence is synthesized)
gctatctatttgagaactagaatcactcaacactcattttgaattatgcagaagtggttcatgcagatttttattccagatgaacatgttttaaaagtgcctgaaatatgactgccatat

SEQ ID NO: 376071 - DNA, 120 bp, Artificial Sequence
  ENSG00000143079_21 (sequence is synthesized)
gaatgtgattctgcagcaaaaaacacaaaatagatcatttaattacagaaaatgagatcctctgtgaattctgaatgttaaaaaccaacactgcttttaatcctcttttaatgttttaat

SEQ ID NO: 376072 - DNA, 120 bp, Artificial Sequence
  ENSG00000143079_22 (sequence is synthesized)
acaagctttgtgttctgaaacaaggctgcataagtagaatgggaatccttctaaaggtgggtgtgaactcaccacaagctgagctttatagagcccttgagaaaccctcctgagcactaa

SEQ ID NO: 376073 - DNA, 120 bp, Artificial Sequence
  ENSG00000143079_23 (sequence is synthesized)
gcagttggggtgctgattttcttgtacttttgaaaaattaagtcactcccagtttcctgcataagttcttgaacagaatgaaatcacatctccattcaaaaaatgtctcaagcatctact

SEQ ID NO: 376074 - DNA, 120 bp, Artificial Sequence
  ENSG00000143079_24 (sequence is synthesized)
caaaaagcaataacttgaaattcactctgtaatattataggtcagtcagaattatacaagttttaccaaattgttacacttattctccaagctgccagaacctggtatctgtatctgtaa

SEQ ID NO: 376075 - DNA, 120 bp, Artificial Sequence
  ENSG00000143079_25 (sequence is synthesized)
aaccaaattaacttttgcttaaatgggaagtatacatatatctgtatagatacattacccctttacatgtttaacatacacacacttaaacacataaatactagtgtgattatatctttg

SEQ ID NO: 376076 - DNA, 120 bp, Artificial Sequence
  ENSG00000143079_26 (sequence is synthesized)
gagtttgcaatatagcataaaggacaagtagaactgcacattaagattacctaccgaagcaactagatgtggctgggacacaatcaaaggaggaattttgtccacaggaaggtgaggaaa

SEQ ID NO: 376077 - DNA, 87 bp, Artificial Sequence
  ENSG00000143079_27 (sequence is synthesized)
gagtatcactttgggaggctgagatgggaggatctcttgagaccaggtgttcaagaccagcctcatcaacatagtgagaccccatct

SEQ ID NO: 376078 - DNA, 120 bp, Artificial Sequence
  ENSG00000143079_28 (sequence is synthesized)
tgttcaagaccagcctcatcaacatagtgagaccccatctctattaaaaaaataaataggcagagctaaactaaccccagtgtcacaaaactcaactggtcatataaatgagtgaaacag

SEQ ID NO: 376079 - DNA, 120 bp, Artificial Sequence
  ENSG00000143079_29 (sequence is synthesized)
gcctctcacacaagcgatgtaaaacagctgggagcagtgggagctgtggcaaactaaagtgcccaagccgcatttaaaaagggcatctgttcagctccatctgcttgctgcggtgcaaga

SEQ ID NO: 376080 - DNA, 120 bp, Artificial Sequence
  ENSG00000143079_30 (sequence is synthesized)
atgctaaaccaggattaccagttcttcacattttttgaaatccaaattttcatgagaaacattctcatttttaaatatcaagaagtgattttaaaatgtttaaatggtgctggttaaaca

SEQ ID NO: 376081 - DNA, 120 bp, Artificial Sequence
  ENSG00000143079_31 (sequence is synthesized)
aacacgtctgcagctggatttagcttgcaagctgccaagttgcaacctctttcattctagaaacttctgtcattttcatcatagcaagtctatgcggacaaaagcctccaaactttccaa

SEQ ID NO: 376082 - DNA, 120 bp, Artificial Sequence
  ENSG00000143079_32 (sequence is synthesized)
ctgtgtaggccagtacagctggcaaggttcatagaatataatggctatccccctctgccaaataagactatccacaacccagctcagacacagtggttatatgattttgtgtccatacag

SEQ ID NO: 376083 - DNA, 120 bp, Artificial Sequence
  ENSG00000143079_33 (sequence is synthesized)
gagaggccttggtgtcttcacatacattctctgagccaacatctatccagcagccctgacctcctgctataatttaagtctatttccttttaatctaataagagttgatagtaaaaaggc

SEQ ID NO: 376084 - DNA, 120 bp, Artificial Sequence
  ENSG00000143079_34 (sequence is synthesized)
aggtgatggaaatcagtgtataaatcacaatggagtatattggcaactccacagcttatagtttgataaaggcaaatacatgaaaaataaaaatgctactaatgccccaaggtgtctatc

SEQ ID NO: 376085 - DNA, 120 bp, Artificial Sequence
  ENSG00000143079_35 (sequence is synthesized)
aaaatgatgtagggggtatcttaaactgtccaaggcaatcatgcattgaactttattcctatgcagagccaaaacgaatagtgttgataaaatagctaaactttctaaactggagaggag

SEQ ID NO: 376086 - DNA, 120 bp, Artificial Sequence
  ENSG00000143079_36 (sequence is synthesized)
gctacagtgccagagagttattgtctcttttgctttaaatggtaatcttaaaagttgcattgtgctcttcctttgttttgggatagatatatatagagagagatactataaggaagttta

SEQ ID NO: 376087 - DNA, 120 bp, Artificial Sequence
  ENSG00000143079_37 (sequence is synthesized)
tttcttaggaagtgcactgaataatgtatttcttttacagtgtaatatgggggtggggatatgcgaaagaaatgtgtatttttgctagttgcctaccttctgagataaataagcacaatc

SEQ ID NO: 376088 - DNA, 120 bp, Artificial Sequence
  ENSG00000143079_38 (sequence is synthesized)
ttgcaatggatccaataacccagttaggtattatagattagtatttaagtttgctgtagattgtgtgtgtgtgtgctaagtaaaagttccatgattcacaattttagtattaacccatgt

SEQ ID NO: 376089 - DNA, 120 bp, Artificial Sequence
  ENSG00000143079_39 (sequence is synthesized)
tgcaaaagctgttactggccaacagattgtaatgatgtgtaccatataacacaagcattaactaggcattaacgtttgtaaagccaaatataccatgcagaagtcttcatttttatagca

SEQ ID NO: 376090 - DNA, 120 bp, Artificial Sequence
  ENSG00000143079_40 (sequence is synthesized)
gactgcattaaaacaagttaaatcttgctgtttggggggaaatagtcttgtttgtacaaagtgaaaaatggcacaatttgggcatattttgttgggaagagggggtggtgtagagggagc

SEQ ID NO: 376091 - DNA, 120 bp, Artificial Sequence
  ENSG00000143079_41 (sequence is synthesized)
acttgactgtggctttgacaaaacaaatgaagtcaatgacccatccaggttagactccataaggaactaagacattgattttctttagagtcttagagctggaaaaagcctttacaataa

SEQ ID NO: 376092 - DNA, 120 bp, Artificial Sequence
  ENSG00000143079_42 (sequence is synthesized)
tccagtctgtgattttttaaaccttttggtggttctggacctttttgagaatcttagaaaagccatggagtttatccctagaaaaatgaatatgcctatatgcaaaatttgtttgatggc

SEQ ID NO: 376093 - DNA, 120 bp, Artificial Sequence
  ENSG00000143079_43 (sequence is synthesized)
ttcataggatccaaagaccctgaagccatccatggctcatgtatttctgcttaagaaagcataatcttgttctgctctctcattttacaaatgattaatgcatcccttttcaactactcc

SEQ ID NO: 376094 - DNA, 120 bp, Artificial Sequence
  ENSG00000143079_44 (sequence is synthesized)
agcgctgttgctgctgcaatgttagcaaatgcaagccagagagaagcacttgaaaatcctttgatgtctaaaaaatgttcaaatagtgtggatgtttacatatctgaagttttcagcatt

SEQ ID NO: 376095 - DNA, 120 bp, Artificial Sequence
  ENSG00000143079_45 (sequence is synthesized)
tcagcatttaagcaaattaatgatcatttcaacaaatactagcatatccggtttcccttaatagcctgtcagcagtgctgccttgtcaatttgtgtgtgtgtgtgtgtatgtgtgtgtgt

SEQ ID NO: 376096 - DNA, 120 bp, Artificial Sequence
  ENSG00000143079_46 (sequence is synthesized)
tcataaggagtgcttctgatgcttagtccttgaaatggaacttcaactgtctttcaaaacactggcttcaaaataggatgtgttttcctaatgaatcagaagtgggcaatgagcattgtt

SEQ ID NO: 376097 - DNA, 120 bp, Artificial Sequence
  ENSG00000143079_47 (sequence is synthesized)
ccacaggaataatttttaatttaatttctataaaactagttgagaaatgagagcctgtccacccaccatttgtgtatcagtggccaattcattagtaaaaataaaggaggggaaaggaga

SEQ ID NO: 376098 - DNA, 120 bp, Artificial Sequence
  ENSG00000143079_48 (sequence is synthesized)
gattgtacagcagtctaacttgtatctttatgtggtttgtgagaattagtgttgtagaaaggattgagtttgtgtcatgcaatttgccatttaacatactttggaacatgcagattctca

SEQ ID NO: 376099 - DNA, 120 bp, Artificial Sequence
  ENSG00000143079_49 (sequence is synthesized)
gagaaatgtgaacttaccaagtcagataaattcagtttttggtagcctagccaattaagatgtttaaacaggcatgagccactgcacccagccctagcggctaattctttctgagatttc

SEQ ID NO: 376100 - DNA, 120 bp, Artificial Sequence
  ENSG00000143079_50 (sequence is synthesized)
attgatctttgtgagtggtagtgaaatcaataattaaagtgaattttactttctgttgttgcttagtttgtgattaacaccagaaaacatatttctatttaatttcaactatttccttta

SEQ ID NO: 376101 - DNA, 120 bp, Artificial Sequence
  ENSG00000143079_51 (sequence is synthesized)
ttaaggcatttgatactataattgctcttatctctcactttattttttctttaattgtatcaaattaactatgtctttggagattgtctgattgttacctttgtttcaggctttcaagat

SEQ ID NO: 376102 - DNA, 120 bp, Artificial Sequence
  ENSG00000143079_52 (sequence is synthesized)
gaatctggaaaaactcagcaagcctgaactcctgacactatttagtattcttgaaggagagcttgaagcaagggaccttgttatagaagccttaaaggtatgttaaaagaaaaaaaaaaa

SEQ ID NO: 376103 - DNA, 120 bp, Artificial Sequence
  ENSG00000143079_53 (sequence is synthesized)
gttctgtttcagggagactgacagacaccagtgggtgctttcttcaagggttggggctgacctaagaaggagctcccaggccacagcattctgcaatacactgtccaataatttgtaggg

SEQ ID NO: 376104 - DNA, 120 bp, Artificial Sequence
  ENSG00000143079_54 (sequence is synthesized)
aaggcagtttgaaaaaggacctggttgccaaagtaccatattacccatcaatgtcctctcctacccatttccctttttcacaccctctaaatctctataagcaaatgcggaaaatgcaaa

SEQ ID NO: 376105 - DNA, 120 bp, Artificial Sequence
  ENSG00000143079_55 (sequence is synthesized)
ctaagctttgaacagaatcaaatgagtccctctgggacacttgcaggggacttatttcttccgaaggatgtgacagcagcttctcccaatagtggcagcgtttgtttcactgttagactg

SEQ ID NO: 376106 - DNA, 120 bp, Artificial Sequence
  ENSG00000143079_56 (sequence is synthesized)
gaggagcacaaggagcatacaacatgtggctctgtccacaccactgtgaagttgttggttctgagaaattactggggggagtgttaaaacaagattggccttatctctggggagtcacct

SEQ ID NO: 376107 - DNA, 120 bp, Artificial Sequence
  ENSG00000143079_57 (sequence is synthesized)
gtttaacctgacaagaatcctgctcattaactcaatgtgttagacactaggatgtgccacatgggttccctttcaggagtgaaatttaattccctaggtgcagggaatgctgacagtaag

SEQ ID NO: 376108 - DNA, 120 bp, Artificial Sequence
  ENSG00000143079_58 (sequence is synthesized)
tggccctcaagatataaccccttataggaattaccttcactgaaagaaaatcagcttgaccaaagtcacagctccttccctggacagctcatatattaatacaaagactgggcatggtgg

SEQ ID NO: 376109 - DNA, 120 bp, Artificial Sequence
  ENSG00000143079_59 (sequence is synthesized)
ctctgacacccctcattcaaaggcacctcccaccccgcacctcagccttggcggagaggactcacagcattggacacatttccaccatgctaatggcattttaaatatatttggcaattt

SEQ ID NO: 376110 - DNA, 120 bp, Artificial Sequence
  ENSG00000143093_0 (sequence is synthesized)
gtggagcagccaagatggagccggcagtcggcggtccgggcccactgatcgtgaacaacaaacagccccagcccccgccacctccgccgccggcagccgcacagccaccacccggggcac

SEQ ID NO: 376111 - DNA, 120 bp, Artificial Sequence
  ENSG00000143093_1 (sequence is synthesized)
cgcgggccgccgcgggcctcctgcctgggggcaaagcccgcgagttcaaccgcaaccagcgcaaagactcagagggctattcggagtcaccagacctggagtttgagtatgctgacacag

SEQ ID NO: 376112 - DNA, 120 bp, Artificial Sequence
  ENSG00000143093_2 (sequence is synthesized)
acaagtgggctgcagagctctcggagctttacagctacacggaagggccagaattcctgatgaatcgaaaatgctttgaggaggacttccggatccatgtgacagacaagaagtggactg

SEQ ID NO: 376113 - DNA, 120 bp, Artificial Sequence
  ENSG00000143093_3 (sequence is synthesized)
agctggataccaaccagcaccggacccatgccatgaggctcctggatggcttggaagtcactgccagggagaagagactcaaggtggctcgagcaattctctatgttgctcaaggcacgt

SEQ ID NO: 376114 - DNA, 120 bp, Artificial Sequence
  ENSG00000143093_4 (sequence is synthesized)
ttggggagtgcagctcggaggcagaggtgcagtcctggatgcgctacaacatctttctcctcctggaggtgggcacgttcaatgctttggtggagcttctgaacatggaaatagacaaca

SEQ ID NO: 376115 - DNA, 120 bp, Artificial Sequence
  ENSG00000143093_5 (sequence is synthesized)
gtgccgcctgcagcagtgctgtgaggaagcctgccatctccctggctgacagcacagacctcagggtcctgctcaacatcatgtacctgatagtggagaccgttcatcaggagtgtgagg

SEQ ID NO: 376116 - DNA, 120 bp, Artificial Sequence
  ENSG00000143093_6 (sequence is synthesized)
gtgacaaggctgagtggaggaccatgcggcagaccttcagagccgagctgggctccccgctgtacaacaatgagccatttgccatcatgctgtttgggatggtgaccaaattttgcagtg

SEQ ID NO: 376117 - DNA, 120 bp, Artificial Sequence
  ENSG00000143093_7 (sequence is synthesized)
gtcacgcccctcactttcccatgaagaaagttctcttgctgctctggaagacagtattgtgcacgctaggcggctttgaggagctgcagagcatgaaggctgagaagcgcagcatcctgg

SEQ ID NO: 376118 - DNA, 120 bp, Artificial Sequence
  ENSG00000143093_8 (sequence is synthesized)
gcctccccccgcttcctgaggacagcatcaaagtgattcgcaacatgagagcagcctctccaccagcatctgcttcagacttgattgagcagcagcagaaacggggccgccgagagcaca

SEQ ID NO: 376119 - DNA, 120 bp, Artificial Sequence
  ENSG00000143093_9 (sequence is synthesized)
aggctctgataaagcaggacaacctagatgccttcaacgagcgggatccctacaaggctgatgactctcgagaagaggaagaggagaatgatgatgacaacagtctggagggggagacgt

SEQ ID NO: 376120 - DNA, 120 bp, Artificial Sequence
  ENSG00000143093_10 (sequence is synthesized)
ttcccctggaacgggatgaagtgatgcctcccccgctacagcacccacagactgacaggctgacttgccccaaagggctcccgtgggctcccaaggtcagagagaaagacattgagatgt

SEQ ID NO: 376121 - DNA, 120 bp, Artificial Sequence
  ENSG00000143093_11 (sequence is synthesized)
tccttgagtccagccgcagcaaatttataggttacactctaggcagtgacacgaacacagtggtggggctgcccaggccaatccacgaaagcatcaagactctgaaacagcacaagtaca

SEQ ID NO: 376122 - DNA, 120 bp, Artificial Sequence
  ENSG00000143093_12 (sequence is synthesized)
cgtcgattgcagaggtccaggcacagatggaggaggaatacctccgctcccctctctcagggggagaagaagaagttgagcaagtccctgcagaaaccctctaccaaggcttgctcccca

SEQ ID NO: 376123 - DNA, 120 bp, Artificial Sequence
  ENSG00000143093_13 (sequence is synthesized)
attgccctcctgaagatcctgttggctgcagcacccacctcaaaagccaaaacagactcaatcaacatcctagcggacgtcttgcctgaggagatgcccaccacagtgttgcagagcatg

SEQ ID NO: 376124 - DNA, 120 bp, Artificial Sequence
  ENSG00000143093_14 (sequence is synthesized)
aagctgggggtggatgtaaaccgccacaaagaggtcattgttaaggccatttctgctgtcctgctgctgctgctcaagcactttaagttgaaccatgtctaccagtttgaatacatggcc

SEQ ID NO: 376125 - DNA, 120 bp, Artificial Sequence
  ENSG00000143093_15 (sequence is synthesized)
cagcacctggtgtttgccaactgcattcctttgatcctaaagttcttcaatcaaaacatcatgtcctacatcactgccaagaacagcatttctgtcctggattaccctcactgcgtggtg

SEQ ID NO: 376126 - DNA, 120 bp, Artificial Sequence
  ENSG00000143093_16 (sequence is synthesized)
catgagctgccagagctgacggcggagagtttggaagcaggtgacagtaaccaattttgctggaggaacctcttttcttgtatcaatctgcttcggatcttgaacaagctgacaaagtgg

SEQ ID NO: 376127 - DNA, 120 bp, Artificial Sequence
  ENSG00000143093_17 (sequence is synthesized)
aagcattcaaggacaatgatgctggtggtgttcaagtcagcccccatcttgaagcgggccctaaaggtgaaacaagccatgatgcagctctatgtgctgaagctgctcaaggtacagacc

SEQ ID NO: 376128 - DNA, 120 bp, Artificial Sequence
  ENSG00000143093_18 (sequence is synthesized)
aaatacttggggcggcagtggcgaaagagcaacatgaagaccatgtctgccatctaccagaaggtgcggcatcggctgaacgacgactgggcatacggcaatgatcttgatgcccggcct

SEQ ID NO: 376129 - DNA, 120 bp, Artificial Sequence
  ENSG00000143093_19 (sequence is synthesized)
tgggacttccaggcagaggagtgtgcccttcgtgccaacattgaacgcttcaacgcccggcgctatgaccgggcccacagcaaccctgacttcctgccagtggacaactgcctgcagagt

SEQ ID NO: 376130 - DNA, 120 bp, Artificial Sequence
  ENSG00000143093_20 (sequence is synthesized)
gtcctgggccaacgggtggacctccctgaggactttcagatgaactatgacctctggttagaaagggaggtcttctccaagcccatttcctgggaagagctgctgcagtgaggctgttgg

SEQ ID NO: 376131 - DNA, 120 bp, Artificial Sequence
  ENSG00000143093_21 (sequence is synthesized)
ttaggggactgaaatggagagaaaagatgatctgaaggtacctgtgggactgtcctagttcattgctgcagtgctcccatcccccaccaggtggcagcacagccccactgtgtcttccgc

SEQ ID NO: 376132 - DNA, 120 bp, Artificial Sequence
  ENSG00000143093_22 (sequence is synthesized)
agtctgtcctgggcttgggtgagcccagcttgacctccccttggttcccagggtcctgctccgaagcagtcatctctgcctgagatccattcttcctttacttcccccaccctcctctct

SEQ ID NO: 376133 - DNA, 120 bp, Artificial Sequence
  ENSG00000143093_23 (sequence is synthesized)
tggatatggttggttttggctcatttcacaatcagcccaaggctgggaaagctggaatgggatgggaacccctccgccgtgcatctgaatttcaggggtcatgctgatgcctctcgagac

SEQ ID NO: 376134 - DNA, 120 bp, Artificial Sequence
  ENSG00000143093_24 (sequence is synthesized)
atacaaatccttgctttgtcagcttgcaaaggaggagagtttaggattagggccagggccagaaagtcggtatcttggttgtgctctggggtgggggtggggtgtttctgatgttattcc

SEQ ID NO: 376135 - DNA, 120 bp, Artificial Sequence
  ENSG00000143093_25 (sequence is synthesized)
agcctcctgctacattatatccagaagtaattgcggaggctccttcagctgcctcagcactttgattttggacagggacaaggtaggaagagaagcttcccttaaccagaggggccattt

SEQ ID NO: 376136 - DNA, 120 bp, Artificial Sequence
  ENSG00000143093_26 (sequence is synthesized)
ttccttttggctttcgagggcctgtaaatatctatatataattctgtgtgtattctgtgtcatgttggggtttttaatgtgattgtgtattctgtttacattaaaaagaagcaaaaataa

SEQ ID NO: 376137 - DNA, 120 bp, Artificial Sequence
  ENSG00000143093_27 (sequence is synthesized)
cctttgtgttatttgggggtggttttttccttattggtctttaataaaattaataatgaatatcatttagggcttcattgctttccctagttctatcaaatatatatatatatatatata

SEQ ID NO: 376138 - DNA, 120 bp, Artificial Sequence
  ENSG00000143093_28 (sequence is synthesized)
gttatttgattcaagccttgtgtatcttataactttgtgttgtcctttacttttatgaagctggctagagcccagtcccattgtgagacagtgatgttccttggctatccactgtgaccc

SEQ ID NO: 376139 - DNA, 120 bp, Artificial Sequence
  ENSG00000143093_29 (sequence is synthesized)
gcctgtagggagaagccttttaagactgttgtctgcctgcaagaacctggggtagaggccggggtggactttgcaataaccttgcaaacagtctttcgtaagttttgcttgttttattat

SEQ ID NO: 376140 - DNA, 120 bp, Artificial Sequence
  ENSG00000143093_30 (sequence is synthesized)
aagttttacttgttttagctgagcttttgtttgggactgactgggaagtctttaaagattatattacctgaccaccgggcaccaaggcatgcacctgtagtcccagctactcaagaggtt

SEQ ID NO: 376141 - DNA, 120 bp, Artificial Sequence
  ENSG00000143093_31 (sequence is synthesized)
gatgcaggaggattgtttgagcacaggagatcaaggctacagtgagctatgatcatggtcctgcactctagcctgggccacagagtgagacccggattctttaaaaaaaaaaaaaaaaaa

SEQ ID NO: 376142 - DNA, 120 bp, Artificial Sequence
  ENSG00000143093_32 (sequence is synthesized)
ctggctctttttatgaatttggaagtttttagactaggtggttgtagtgttgcctcccgggtgttaggatccctgggcgtcacctctcagctcctgctttccatttcctcatcataaacc

SEQ ID NO: 376143 - DNA, 120 bp, Artificial Sequence
  ENSG00000143093_33 (sequence is synthesized)
ctgtttttgttctcactgtgaccctgttctgctttgaccctacagctcgctaccacctctgtggtttttttcttttcaggaagcttagggtggtaaatgcttttggccattcttgttcat

SEQ ID NO: 376144 - DNA, 120 bp, Artificial Sequence
  ENSG00000143093_34 (sequence is synthesized)
actcatttattcagataccatttattaatagtaagcccctgctttgtgtaagcactttgttagacactagggtgctcctttgacccccccatcccactccattgtgagctggctcttgtc

SEQ ID NO: 376145 - DNA, 120 bp, Artificial Sequence
  ENSG00000143093_35 (sequence is synthesized)
ctcagggtcctgctcaacatcatgtacctgatagtggagaccgttcatcaggagtgtgagggtgacaaggctgagtggaggaccatgcggcagaccttcagagccgagctgggtaggacc

SEQ ID NO: 376146 - DNA, 120 bp, Artificial Sequence
  ENSG00000143093_36 (sequence is synthesized)
ctggggatcctctctagaggccctgcctggaagctgaggcggaaggctttgggagggtcctgatacctttgtgtcacctccaggctccccgctgtacaacaatgagccatttgccatcat

SEQ ID NO: 376147 - DNA, 120 bp, Artificial Sequence
  ENSG00000143093_37 (sequence is synthesized)
ctttgacccacttgaactctgcatgaatgttctaagacatggcccttcagccaaggcctttcatccctggaggaaagagggcaaggtcccaagggccgcgcctttttttttttttttttt

SEQ ID NO: 376148 - DNA, 120 bp, Artificial Sequence
  ENSG00000143093_38 (sequence is synthesized)
tcctgttggcttcagtttgaatacatggcccagcacctggtgtttgccaactgcattcctttgatcctaaagttcttcaatcaaaacatcatgtcctacatcactgccaagaacaggtga

SEQ ID NO: 376149 - DNA, 120 bp, Artificial Sequence
  ENSG00000143093_39 (sequence is synthesized)
tgagggccagggaccatgaaggggtggatatggtcagacggcagagttcccagctggtatttcccactgtgtccatttttccagcacctacgagccagcactgtgctaggcatcaagaca

SEQ ID NO: 376150 - DNA, 120 bp, Artificial Sequence
  ENSG00000143093_40 (sequence is synthesized)
taaagataaatgagacatggcctctgcctgtggagagcccactgtgtcaaatctgagtctagctagtcctgccccaggtgacttggtctgtgcctgggcaggagggttttcatcccagga

SEQ ID NO: 376151 - DNA, 120 bp, Artificial Sequence
  ENSG00000143093_41 (sequence is synthesized)
tctagtactttcctccctgtcccttctgtactttttttttttttttttgaggagtccatgggctgcttgctgtctctaaggggctcggccatgtgccttgtaatgccctatctgctgact

SEQ ID NO: 376152 - DNA, 120 bp, Artificial Sequence
  ENSG00000143093_42 (sequence is synthesized)
cttagcccctgctgttggcctggtgccagctgtgcttgacattacttgctcgtcagtgtgatataccacagggcgccggccagaccctgtctccagaaaggtttggcataaattagttgc

SEQ ID NO: 376153 - DNA, 120 bp, Artificial Sequence
  ENSG00000143093_43 (sequence is synthesized)
aagatcaacaagctggcctctggctacaggggtgctttacaagttctcttgtaacagatatttcctcatcttataggtggggaaactggggtgggacacatcaggtagattcctacttct

SEQ ID NO: 376154 - DNA, 120 bp, Artificial Sequence
  ENSG00000143093_44 (sequence is synthesized)
gctccaacaagtgagggaggaaagctgggagctggctcaggcacggctgctccaccaggccctgggcctttgctcatggtgggcatctggttcctctcccctctgcagcatttctgtcct

SEQ ID NO: 376155 - DNA, 120 bp, Artificial Sequence
  ENSG00000143093_45 (sequence is synthesized)
ttgtcaagctgcctgcctttcccatcctgggggaagaggagagagagttggcatttatccagtttatcaagaagtttactatggaggatgaaaatatcacccaggaaaatgtcaccaaca

SEQ ID NO: 376156 - DNA, 120 bp, Artificial Sequence
  ENSG00000143093_46 (sequence is synthesized)
atttaaacaaggcagcctggatcaaaggctgagtcttctgcctcccatgacaaccttgctgagcctcagtttcctcatcagaaaggagagcctaccatgtgatccccatttgctggtacc

SEQ ID NO: 376157 - DNA, 120 bp, Artificial Sequence
  ENSG00000143093_47 (sequence is synthesized)
aggatatagtggcacacacgacatgtgatccctgccttcacagtgcttacactttgctggaatggaagtgtctcatccacgttgaagaaaatcatcctcatttggctgtgaattagaata

SEQ ID NO: 376158 - DNA, 120 bp, Artificial Sequence
  ENSG00000143093_48 (sequence is synthesized)
gaatctggtcttgtgagaagagttcctggctctgggcctcaactgtaaggtcagttcttcatttagggaaacatcagccccagcaccactttccgtttcattctctgcttccctcagcct

SEQ ID NO: 376159 - DNA, 120 bp, Artificial Sequence
  ENSG00000143093_49 (sequence is synthesized)
gcaccacaggaaggacatgtgcttctttttcccccagtggatttccagaagggatagggacgatgagaaagaggtaacctcagatctgagatttgcttgacatacacaaaatttccttcc

SEQ ID NO: 376160 - DNA, 120 bp, Artificial Sequence
  ENSG00000143093_50 (sequence is synthesized)
aacagggaaaactcagttgctttttttccttcaaaggaaagacagttggtattacctttgtcctgtttagatactgaaatcctaaattgattcatataaaaattctgggtttgggaaccc

SEQ ID NO: 376161 - DNA, 120 bp, Artificial Sequence
  ENSG00000143093_51 (sequence is synthesized)
agagggttaaatggggcagaagttctggtcccaggctgtgttctgaccacctgggttgaataacggagttggtcacttacaccttgaagattaatggagactaatgacaggtccctgcag

SEQ ID NO: 376162 - DNA, 120 bp, Artificial Sequence
  ENSG00000143093_52 (sequence is synthesized)
acgtcttgcctgaggagatgccgtgagtatcattctgtgaatgaagcaggtggggcagaagatagatggagaagggcaaacattttcctcttgtcaggttggttgttgttggcccagctc

SEQ ID NO: 376163 - DNA, 120 bp, Artificial Sequence
  ENSG00000143093_53 (sequence is synthesized)
attctagtgtagactctaccactgagcaaactcctgagtgaattggggaaagtcatttcctcctctgtaaaatgaatggggccaccctggacatttccccaaagccccactctccagctg

SEQ ID NO: 376164 - DNA, 120 bp, Artificial Sequence
  ENSG00000143093_54 (sequence is synthesized)
tgattgagacacccaggatgaggagggttagtttgtagacagcttgccagcaacagctgaacctgtgccaggtatagagacatcccttttcgccagtgattgggcacgcagaatgctggc

SEQ ID NO: 376165 - DNA, 120 bp, Artificial Sequence
  ENSG00000143093_55 (sequence is synthesized)
atctccactctttccttgttcctttttctcctttcccttgcggatgtcacggaattctccttgggagtggcttcagtccattgttcaggagttgcctgggtctctataaagacatgggtc

SEQ ID NO: 376166 - DNA, 120 bp, Artificial Sequence
  ENSG00000143093_56 (sequence is synthesized)
atgatgtcatgaatgtttctgagcctgacacaatggtcaggggccagcctgtggacacattgaccctggctctgcttccctgtctgtgatgcagtgcacgctaggcggctttgaggagct

SEQ ID NO: 376167 - DNA, 120 bp, Artificial Sequence
  ENSG00000143105_0 (sequence is synthesized)
acaagatcatgctttttattattaaggaatgttaacttcctcttttagtatggcccctctgccatcacatatggagaccatcctttgctggggagaatctccccttctttgccaggatcc

SEQ ID NO: 376168 - DNA, 120 bp, Artificial Sequence
  ENSG00000143105_1 (sequence is synthesized)
tttttttgcaatttctcctagttattagtttatgcaaactcaggggtacaaaatgattttaagggaagcatgctgccaaaataaccatgacgttccttcccaagctacaaataagtcatt

SEQ ID NO: 376169 - DNA, 120 bp, Artificial Sequence
  ENSG00000143105_2 (sequence is synthesized)
gattagcccattggtgtaccttacctcaataaacaagggccagttgtattctgccctggatcttgtataatgaacttcttcttctccatagctcacagcaggcagtgaaggctgaggatc

SEQ ID NO: 376170 - DNA, 120 bp, Artificial Sequence
  ENSG00000143105_3 (sequence is synthesized)
ttcatgcttcttccctggctcccctagaatggatgtgtgtggctggaaagaaatggaggttgcgctggtcaattttgataattcagatgaaatccaagaagagccaggctatgccacaga

SEQ ID NO: 376171 - DNA, 120 bp, Artificial Sequence
  ENSG00000143105_4 (sequence is synthesized)
cttcgactcaaccagcccaaaaggccggcctgggggcagctccttctccaacgggaagatcctcatcagcgaaagcaccaaccatgagacggccttctccaagcttccgggagactatgc

SEQ ID NO: 376172 - DNA, 120 bp, Artificial Sequence
  ENSG00000143105_5 (sequence is synthesized)
tgaccccccagggcctgagccagtggtcctaaatgaaggaaaccagcgggtgatcatcaacattgctgggctgagatttgagacccagctcagaacccttagtcagttcccagagactct

SEQ ID NO: 376173 - DNA, 120 bp, Artificial Sequence
  ENSG00000143105_6 (sequence is synthesized)
cctgggagaccgggaaaaaaggatgcagttctttgactccatgagaaatgagtatttctttgatcggaaccggcccagttttgatggaatcctatattattaccaatctggtgggaaaat

SEQ ID NO: 376174 - DNA, 120 bp, Artificial Sequence
  ENSG00000143105_7 (sequence is synthesized)
tcggcgcccagccaatgttcccattgatatctttgctgatgaaatctccttctatgagctgggtagtgaggccatggaccagttccgggaggatgaaggcttcatcaaagaccctgaaac

SEQ ID NO: 376175 - DNA, 120 bp, Artificial Sequence
  ENSG00000143105_8 (sequence is synthesized)
cctctttgagtaccctgaaagttccagcgctgcccgtgctgtggccgtggtctcggtgttggttgtggtcatctccatcaccatcttctgcctggagacactgccagagttccgggagga

SEQ ID NO: 376176 - DNA, 120 bp, Artificial Sequence
  ENSG00000143105_9 (sequence is synthesized)
tagggagctaaaggtggtcagagaccccaatctcaacatgagcaagacagtcctctcccagaccatgttcaccgaccctttcttcatggtggagtctacctgcatcgtgtggttcacctt

SEQ ID NO: 376177 - DNA, 120 bp, Artificial Sequence
  ENSG00000143105_10 (sequence is synthesized)
cgagctggtgctccggttcgtggtctgccccagcaagactgacttcttcaggaacatcatgaacatcattgacatcatctccattatcccctactttgcaactctcatcacagagctagt

SEQ ID NO: 376178 - DNA, 120 bp, Artificial Sequence
  ENSG00000143105_11 (sequence is synthesized)
ccaggagacagagccgagtgcccaacagaacatgtccctggccatcctgaggatcatccgcctggtgagggtcttccgcatcttcaagctctcgcgccactccaaggggctgcagatcct

SEQ ID NO: 376179 - DNA, 120 bp, Artificial Sequence
  ENSG00000143105_12 (sequence is synthesized)
cgggcaaacactgaaggcgtccatgcgggagttggggttgctcatcttctttctcttcattggagtcatcctcttctccagtgcagtctactttgctgaggtggatgagccagagtccca

SEQ ID NO: 376180 - DNA, 120 bp, Artificial Sequence
  ENSG00000143105_13 (sequence is synthesized)
tttctctagcattcctgatggcttctggtgggcagtggtcaccatgacaactgtaggctatggggacatgtgcccgaccaccccaggggggaagattgtgggcactctgtgtgccattgc

SEQ ID NO: 376181 - DNA, 120 bp, Artificial Sequence
  ENSG00000143105_14 (sequence is synthesized)
aggggtcctcaccattgccctccctgtgcctgtcattgtctccaacttcaattacttctaccaccgggagactgagaatgaagaaaagcagaacatcccaggagaaattgaaagaatcct

SEQ ID NO: 376182 - DNA, 120 bp, Artificial Sequence
  ENSG00000143105_15 (sequence is synthesized)
caacagtgtaggctcaagaatgggcagcacagactctcttaataagaccaatggtggctgttccacagagaagtctaggaaatgatcagtccagggcttcttgggtccatcctgtctctc

SEQ ID NO: 376183 - DNA, 120 bp, Artificial Sequence
  ENSG00000143106_0 (sequence is synthesized)
agttggtccttagtactgcggccgtgtgggtgagttggctgccggtgagttgggtgccggtggagtcgtgttggtcctcagaatccccgcgtagccgctgcctcctcctaccctcgccat

SEQ ID NO: 376184 - DNA, 120 bp, Artificial Sequence
  ENSG00000143106_1 (sequence is synthesized)
gtttcttacccggtctgagtacgacaggggcgtgaatactttttctcccgaaggaagattatttcaagtggaatatgccattgaggctatcaagcttggttctacagccattgggatcca

SEQ ID NO: 376185 - DNA, 120 bp, Artificial Sequence
  ENSG00000143106_2 (sequence is synthesized)
gacatcagagggtgtgtgcctagctgtggagaagagaattacttccccactgatggagcccagcagcattgagaaaattgtagagattgatgctcacataggttgtgccatgagtgggct

SEQ ID NO: 376186 - DNA, 120 bp, Artificial Sequence
  ENSG00000143106_3 (sequence is synthesized)
aattgctgatgctaagactttaattgataaagccagagtggagacacagaaccactggttcacctacaatgagacaatgacagtggagagtgtgacccaagctgtgtccaatctggcttt

SEQ ID NO: 376187 - DNA, 120 bp, Artificial Sequence
  ENSG00000143106_4 (sequence is synthesized)
gcagtttggagaagaagatgcagatccaggtgccatgtctcgtccctttggagtagcattattatttggaggagttgatgagaaaggaccccagctgtttcatatggacccatctgggac

SEQ ID NO: 376188 - DNA, 120 bp, Artificial Sequence
  ENSG00000143106_5 (sequence is synthesized)
ctttgtacagtgtgatgctcgagcaattggctctgcttcagagggtgcccagagctccttgcaagaagtttaccacaagtctatgactttgaaagaagccatcaagtcttcactcatcat

SEQ ID NO: 376189 - DNA, 120 bp, Artificial Sequence
  ENSG00000143106_6 (sequence is synthesized)
cctcaaacaagtaatggaggagaagctgaatgcaacaaacattgagctagccacagtgcagcctggccagaatttccacatgttcacaaaggaagaacttgaagaggttatcaaggacat

SEQ ID NO: 376190 - DNA, 120 bp, Artificial Sequence
  ENSG00000143106_7 (sequence is synthesized)
ttaaggaatcctgatcctcagaacttctctgggacaatttcagttctaataatgtccttaaattttatttccagctcctgttccttggaaaatctccattgtatgtgcattttttaaatg

SEQ ID NO: 376191 - DNA, 120 bp, Artificial Sequence
  ENSG00000143106_8 (sequence is synthesized)
aatgatgtctgtacataaaggcagttctgaaataaagaaaattttaaaatatttgttaatagactgttctcttctaatagtcttttttttttttttttttttaagagatgaggtctcact

SEQ ID NO: 376192 - DNA, 120 bp, Artificial Sequence
  ENSG00000143106_9 (sequence is synthesized)
tgcccaggctggtttcaaactcctgggttcaagtgatcttcccgcctctgcctcctgaagtgctaggattataggcgagagccactgtgcccagccattgtaatacagtcttttgtttga

SEQ ID NO: 376193 - DNA, 120 bp, Artificial Sequence
  ENSG00000143106_10 (sequence is synthesized)
aatgcaaatgttagtgggccaaaaggacagtgttattaatatccctattctatgaagatgtctgttctaaaactgttttagtgatgctctataacagaatcaactatatccattaatccc

SEQ ID NO: 376194 - DNA, 120 bp, Artificial Sequence
  ENSG00000143106_11 (sequence is synthesized)
atggtgttgataaatgaactagtccagctcttcccagtggttaatagatgttaacagcactgtaaatccatttcggccctataatttctggagcaaacgtgtatttttgctgcttttctt

SEQ ID NO: 376195 - DNA, 120 bp, Artificial Sequence
  ENSG00000143106_12 (sequence is synthesized)
ataaggagatgctactaattgactatcagaagaacatgttttgaggtcctcctcaaaacattgatgggttggaatcagccatcaacagtgttgtaccagttcttgggtcttgatagacaa

SEQ ID NO: 376196 - DNA, 120 bp, Artificial Sequence
  ENSG00000143106_13 (sequence is synthesized)
tttggaaagagatttccttgtttacgaagtgaaggactaagaattaaattaatgaccttggcctcactggcaatcaattacaaatctctatatcagtaagagaattgtaaaattcagaag

SEQ ID NO: 376197 - DNA, 120 bp, Artificial Sequence
  ENSG00000143106_14 (sequence is synthesized)
cagtttacattagactttggaatgaatgatgaactttccccattagagctgccatcatatgattggtggagattgtttaaagaatcattctatctcagcctcaaaaattaccacgggaag

SEQ ID NO: 376198 - DNA, 120 bp, Artificial Sequence
  ENSG00000143106_15 (sequence is synthesized)
tttcttgtttcagatcaccagctcttgagtaatagggaaatctggagatttgaaaagtacttgcactgtccacaacatggctaatccatatgtggatgatgcagaattgatttaattcac

SEQ ID NO: 376199 - DNA, 120 bp, Artificial Sequence
  ENSG00000143106_16 (sequence is synthesized)
taacagggaccccataattatttgctgggctctgggtatattgatgtgtaggaagttgtactatatgttaataaattatgactatttggataggctgaattcatactaaatccatactgt

SEQ ID NO: 376200 - DNA, 120 bp, Artificial Sequence
  ENSG00000143106_17 (sequence is synthesized)
agttcaacaaaaaacaacatgtttatatacatttggaaactgcaatgataggaaacatttggaagaaagggattttgccctagaataacacataaggaaagcagagaattagagtatatt

SEQ ID NO: 376201 - DNA, 120 bp, Artificial Sequence
  ENSG00000143106_18 (sequence is synthesized)
gttactgaatgttccagagacttctagtgattttaacacttattaagtatagcatgttgatggggagatttgtttctctaaagatcactttgttttattaaatcctaatagaaaataccc

SEQ ID NO: 376202 - DNA, 120 bp, Artificial Sequence
  ENSG00000143106_19 (sequence is synthesized)
ttgaaaatcctatctcatttattcctgtaacaaatttattgagcacctacctactatatgccaagaaatgtattagccatcaggcagagagctgttcaaatggtagatatgatctgtgct

SEQ ID NO: 376203 - DNA, 120 bp, Artificial Sequence
  ENSG00000143106_20 (sequence is synthesized)
cctgtgaaacttctagtggggagagccaaacaataaacaatattcctttttaactctaggttaatgcagaaatggataaagcccatgttgcttttgggagaggtgagttgtgtctctgaa

SEQ ID NO: 376204 - DNA, 120 bp, Artificial Sequence
  ENSG00000143106_21 (sequence is synthesized)
tcacatgcatttcatagggggaaaaatgcccaaatactaaggagtagctcttagcctatgtccgttcgcctcagcttaagttgttttccctcccactggctgggcagcatatttgtgttt

SEQ ID NO: 376205 - DNA, 120 bp, Artificial Sequence
  ENSG00000143106_22 (sequence is synthesized)
tacctggtaaaacagtaaatttcgtaccttctataattggcattcttcaaagaggtagaactttgatttttttgtagaatattaaaacaagctttcttaggttaaagaagtgatcttact

SEQ ID NO: 376206 - DNA, 120 bp, Artificial Sequence
  ENSG00000143106_23 (sequence is synthesized)
acgaacagcaatggtttcatgatgtgtaattgctttatgttatctttctgctatagaatgtttcctggagaaaggtacggtttttagtaataagataaatttactttagtcctgcaaata

SEQ ID NO: 376207 - DNA, 120 bp, Artificial Sequence
  ENSG00000143106_24 (sequence is synthesized)
aggtgaaatcttatgtccagtatctcacaaaggagaactgacagtgccacttttatatttaatgtcaatctcattagacaaaaatgaaatatagttcctagggtttccaatttaaaaagt

SEQ ID NO: 376208 - DNA, 120 bp, Artificial Sequence
  ENSG00000143106_25 (sequence is synthesized)
gaaataataaatatattcactcaaacattttctcagtgccatatgcaagttaccatgtcccagaagctgatacagtttgaagaaggaaatatataagtactgtaagcctgtgataactaa

SEQ ID NO: 376209 - DNA, 120 bp, Artificial Sequence
  ENSG00000143106_26 (sequence is synthesized)
aagcaacatactaaaaagtgaaggtacagataattggaacaaatttaatagcgtttaaaagtgtatttggtaatttctccaggaggtggcactgttgagttgttttttcttttcagacag

SEQ ID NO: 376210 - DNA, 120 bp, Artificial Sequence
  ENSG00000143106_27 (sequence is synthesized)
taagacaatagaccattcatctttgtgtcacccaaacaaagaaatattcctttataaccccctttcctccccccacctaatcacatgctactggaactgactgtcttgtgatctactccc

SEQ ID NO: 376211 - DNA, 120 bp, Artificial Sequence
  ENSG00000143106_28 (sequence is synthesized)
atagttggcatagatttaaaaataatcttttttaaattaatctgatagtagttatggaaaggaacaaattgttcaccaattttcatcagctttatcttttcagtccagtaactgagaact

SEQ ID NO: 376212 - DNA, 120 bp, Artificial Sequence
  ENSG00000143106_29 (sequence is synthesized)
taaaaagactattctagtgattttactatcctgctcagatggcattcaaaaacatttttcacttctcacgtcttggaaaaatttgtaaattcgttaagtctttttgtttgaaagttaatg

SEQ ID NO: 376213 - DNA, 120 bp, Artificial Sequence
  ENSG00000143106_30 (sequence is synthesized)
tgactggaaatattttaatgtaaatatcgggttgggtgcattgtatcattttgctctacaatgactatatcctcatttgggtttatggccagtttataattaaaagtaatctttacttgc

SEQ ID NO: 376214 - DNA, 120 bp, Artificial Sequence
  ENSG00000143106_31 (sequence is synthesized)
ttcagttttcaatcccagtttaaagggatgtgcgtagtgagatggtgggctgctttaatgtccttattagaaggttgtaccatgctttgctcttcttctagaaccactggttcacctaca

SEQ ID NO: 376215 - DNA, 120 bp, Artificial Sequence
  ENSG00000143106_32 (sequence is synthesized)
aattgataaagccagagtggagacacaggtaaaattggcattatctcctttttaccaggatgcttgagttccttgtttagtgattatctagctgcctgggctatactgcaggtacctgtg

SEQ ID NO: 376216 - DNA, 120 bp, Artificial Sequence
  ENSG00000143106_33 (sequence is synthesized)
tcaatattagatgtggctcttgggagtaattttgggtagaattcccagttagaacttcctggggcttggagtttagctgtccaatcattgcagttttaaagaggctctggtcagtagtgc

SEQ ID NO: 376217 - DNA, 120 bp, Artificial Sequence
  ENSG00000143106_34 (sequence is synthesized)
tgacagtgtcttccttttttttttggctttgcctatatataaagcatgcattgtttcctaattgactttgtgtgggagcatcatggcaggaggtggacgtagttaaaggatattctcccc

SEQ ID NO: 376218 - DNA, 120 bp, Artificial Sequence
  ENSG00000143106_35 (sequence is synthesized)
caactgacaaatactggtcagggatactgttttttttttttttaaactttgtagctgctgcttgaagataggctagtaagaaaaatacatcacatggtaaaattttttgtacttatttgc

SEQ ID NO: 376219 - DNA, 120 bp, Artificial Sequence
  ENSG00000143106_36 (sequence is synthesized)
aagtttgctgtctgtacttatgtaagaataagtcatttgaacatcaacagaataagctagagtctttgagggaaagaggcacttttagtttttgaaagagtaaacttggtgctttgaggc

SEQ ID NO: 376220 - DNA, 120 bp, Artificial Sequence
  ENSG00000143106_37 (sequence is synthesized)
ataaccctctttttcaaggcagtaattctcttgtccgtcgttgcgtagagtccttgtgatatgtttatttccagagctatttctcttcctctcatgtactcccaagtactcagggttaat

SEQ ID NO: 376221 - DNA, 120 bp, Artificial Sequence
  ENSG00000143106_38 (sequence is synthesized)
gtgtgatacttctgtcgagttttcttattgttctatgggacttaggacatttgtcctgtgaacataacattcccagcccctctcacctccttactttatagccatttatcttaatatctc

SEQ ID NO: 376222 - DNA, 120 bp, Artificial Sequence
  ENSG00000143106_39 (sequence is synthesized)
ccacatcggcggcacttgtcctaccgctgagtcacccctgggtcctaactcggtgcggaagcgagaagctccggctggtgcttggtaaagaaggcgtgaggagccggaactcctaccttg

SEQ ID NO: 376223 - DNA, 120 bp, Artificial Sequence
  ENSG00000143106_40 (sequence is synthesized)
aacccggagaaggccaagggtcactctttgctccgttcatcttttcgtgcctagtatgactgccttgaacaaacaaacaaaaagttaaacgtgcttcctggaagaaaaagcaactggttt

SEQ ID NO: 376224 - DNA, 120 bp, Artificial Sequence
  ENSG00000143106_41 (sequence is synthesized)
gtagtagggcatgctgcggtgtatagtttcttcagaagcgcgaaggcagtcgtagctttggctggatatattgtctggagtctgattttataggaactggaatttagaatggttttcaag

SEQ ID NO: 376225 - DNA, 120 bp, Artificial Sequence
  ENSG00000143106_42 (sequence is synthesized)
agatttctcatcatgccgattccaattgaccaaaattttttctgactttttaaaagtttaaagcaagttttaaaaaacttttgtggtatgaaaatgttcacaatattaagttgtacatat

SEQ ID NO: 376226 - DNA, 120 bp, Artificial Sequence
  ENSG00000143106_43 (sequence is synthesized)
atatgctgtagacatttttactttcagtttctgttttcgtcagttaagtttttacatagctactcttttttaaagtcagggaaggcagacattttctttgtactgagtggtatgagatgc

SEQ ID NO: 376227 - DNA, 120 bp, Artificial Sequence
  ENSG00000143106_44 (sequence is synthesized)
tgcatttcctgtcaagtatatgctgatcctgtcgaagttttaccacctgcagttaccactttttcatcttttttactgactcgtagaagatgtgtgtgaagttttgacatatttccccac

SEQ ID NO: 376228 - DNA, 120 bp, Artificial Sequence
  ENSG00000143107_0 (sequence is synthesized)
gccatgtgagtactatgtccaacaggatggctggtggacgagagacatgtttgcctttgattggattcattcttatctgtcttaaaatggttgcttcagcaaaatcagctcctgaaatac

SEQ ID NO: 376229 - DNA, 120 bp, Artificial Sequence
  ENSG00000143107_1 (sequence is synthesized)
ccactattgatcaggcatattcaaaactcagcaacagtatcactgtagaatgggctacagtgccgggtgccaccagttacctcctcacggctgaagacggggacacagtcattgaaacca

SEQ ID NO: 376230 - DNA, 120 bp, Artificial Sequence
  ENSG00000143107_2 (sequence is synthesized)
cggtggccaattccccaggcactgtgacgggactaaaggctgcaacctggtatgaaatcaccatcagatccatcagcgctgctgggagaagccaggcgtcacctccaaagcaggcaaaga

SEQ ID NO: 376231 - DNA, 120 bp, Artificial Sequence
  ENSG00000143107_3 (sequence is synthesized)
cagtgttggctgcaccaattctagaagtaagctctccaagttcagactccattcttgtgcagtgggaagctgtatatatggcaattgcattctccgtgtccattatgcgagccaatggct

SEQ ID NO: 376232 - DNA, 120 bp, Artificial Sequence
  ENSG00000143107_4 (sequence is synthesized)
tggggagtatatggaaagagaatactacaaacacctccttgacattcaccagtttagaagccggaactctctacaccataaaggcctatgcatggaatgccaacagaatccctggggatg

SEQ ID NO: 376233 - DNA, 120 bp, Artificial Sequence
  ENSG00000143107_5 (sequence is synthesized)
actccacctgcaatcagagaacaagtcctcgggcccctgccaacattcaagtctctttcgatagtggagctctgaaggcatctttttcctgggcacgggcagaaggagctttcaattata

SEQ ID NO: 376234 - DNA, 120 bp, Artificial Sequence
  ENSG00000143107_6 (sequence is synthesized)
ctgtgatggctttgagcgactcttcagagctgacctgcagtacaactttcagttcctgcaccatctcttccctccagtgtggaactgaatacttgatttcagttttagcaagtaatgatg

SEQ ID NO: 376235 - DNA, 120 bp, Artificial Sequence
  ENSG00000143107_7 (sequence is synthesized)
ctggatctagcaaatcatcttcagcaatgaccctgaaaactgttgcttgtgcacccggaagagtgacgatccaagaagatccccctggccacctgtctgtggcttggtccagtgtagatc

SEQ ID NO: 376236 - DNA, 120 bp, Artificial Sequence
  ENSG00000143107_8 (sequence is synthesized)
tgggtgactactatgtggtctttgtgaagagtgatgatggcttggaagtacactgcaacacatctctcactcagtgcaacttcttatctgagtgtggcttcacttattttattagtgttt

SEQ ID NO: 376237 - DNA, 120 bp, Artificial Sequence
  ENSG00000143107_9 (sequence is synthesized)
ttgtctataacaaggcagggcaaagtcctttgggtgacatattcaattataccacagctccctgttgtcctagtgacattaaccccgtgttggtgtccagtgacagagttgagattgtct

SEQ ID NO: 376238 - DNA, 120 bp, Artificial Sequence
  ENSG00000143107_10 (sequence is synthesized)
ggtctcctgtccgtggtgccgaactgtatgaaaccaaggctgtagatgggtacaacatggttgagtgcaatgacactactcctgcgtgcaccctttcggctctagagtgtgacaccaagt

SEQ ID NO: 376239 - DNA, 120 bp, Artificial Sequence
  ENSG00000143107_11 (sequence is synthesized)
acaacatcacagtgtattcattcaatgaagtccgaggcagcaatatgtcatgtactccccagttcataaccacagctccttgcagtcctgaaataaaaaatgtttcaagggatgcattct

SEQ ID NO: 376240 - DNA, 120 bp, Artificial Sequence
  ENSG00000143107_12 (sequence is synthesized)
gcacaggagagtcctgcaccatgcggggcttgccctgtggctcagtgttctctgtcactgctgtggccgaaacacaggcaggacggagcctgcccagctacagtgtgcccctggaaacag

SEQ ID NO: 376241 - DNA, 120 bp, Artificial Sequence
  ENSG00000143107_13 (sequence is synthesized)
tgccatgctgtccaaccggtctgacagtaactcaaatcacccagtcagtaatcaacgtgagctggactattgggagagtggctcaaacccatgttgcagttctggagtcacacactggac

SEQ ID NO: 376242 - DNA, 120 bp, Artificial Sequence
  ENSG00000143107_14 (sequence is synthesized)
agtctaagtgtcacactcatcaaaaccactgcctcctaggatgcatcacatgtggcatcaattacacagtgacattaaaagcaattagtgccaccgggttgactgcagattgctcctacc

SEQ ID NO: 376243 - DNA, 120 bp, Artificial Sequence
  ENSG00000143107_15 (sequence is synthesized)
aaagttatttctctggtgcctgctgccctttgggggtgaaattatataggctgggccctaatggcatccggatctactggcaagcctccaggggctctgccaattacagcactgacctct

SEQ ID NO: 376244 - DNA, 120 bp, Artificial Sequence
  ENSG00000143107_16 (sequence is synthesized)
atggctccaaaggcattttcacgtgcaccccgagtgctggcctcagtttctgtgatgtcactgagataccctgtggggatgtatacactgtgatggtctcaccagttgctaaaacaggat

SEQ ID NO: 376245 - DNA, 120 bp, Artificial Sequence
  ENSG00000143107_17 (sequence is synthesized)
tgaagcttactttctgtccaaaaaaaatatattcagtaacttgctctggaagtacacttggaatggtgatttatagagggaagagaaatgaagaatgacaaagtgagccccagataaaaa

SEQ ID NO: 376246 - DNA, 120 bp, Artificial Sequence
  ENSG00000143107_18 (sequence is synthesized)
caaaaacttgaccaaagttgtctcatttgttagtgattagagatggaaaagatctactagaatgtagaataaaaatgcctctaggataggaaaagctcctttggcctttagaagaacaac

SEQ ID NO: 376247 - DNA, 120 bp, Artificial Sequence
  ENSG00000143107_19 (sequence is synthesized)
tctgactctgcttcctgagggcaaggtcaggtgtgtcctcacctgcacagcagttggagatctgctatgtgaggactctggagagaaatgaatccagaaagtcccctggacggctgctag

SEQ ID NO: 376248 - DNA, 120 bp, Artificial Sequence
  ENSG00000143107_20 (sequence is synthesized)
cctgagttggcacactgtgagaaccctggaaacaagaaagttctgcttagcagaaattctgagatttcacatccacacacaccacagacttcaacacatccacttcatgagtgttttaca

SEQ ID NO: 376249 - DNA, 120 bp, Artificial Sequence
  ENSG00000143107_21 (sequence is synthesized)
acagcacttgtctgcagccccctcaggggctggaaatgttcactcccagaaagtcaagccacccacatgcagacagcacttatcccaagacaaacctccagcaggacttcagtataggtt

SEQ ID NO: 376250 - DNA, 120 bp, Artificial Sequence
  ENSG00000143107_22 (sequence is synthesized)
ggaaagcagtagctgccagggcaacctgagataacaaacgccctcatcgcaagttaggagcaaagctgagctgcttgcagggttcgctgagccaaagcatcaggtggcgtgacatctatg

SEQ ID NO: 376251 - DNA, 120 bp, Artificial Sequence
  ENSG00000143107_23 (sequence is synthesized)
ggagcatctgggaaagcagagctgccagcctgttgctagaagggttgcagttatgctttctgcatgagagaagatgtcaaatggagagcctcaaactgtggccgactgacatgcgtgcat

SEQ ID NO: 376252 - DNA, 120 bp, Artificial Sequence
  ENSG00000143107_24 (sequence is synthesized)
cttttgggggaggaccatccatcttattggccatatcccccactcatattgtaattacttttttcatctttggagggggaaggcaatgaaatataacataaatctctcatacctaaaaaa

SEQ ID NO: 376253 - DNA, 120 bp, Artificial Sequence
  ENSG00000143110_0 (sequence is synthesized)
gactccgtctcaaaaaataaaataaatcataatgttgacctcaaagaggaagcctaccgttgagtttagtaagatctttgctacacacaatgtgatgctggcagtggcaggggcagtaat

SEQ ID NO: 376254 - DNA, 120 bp, Artificial Sequence
  ENSG00000143110_1 (sequence is synthesized)
tggcaggggcagtaatctttatttcgtcatttttgaaacatagaagccgtaacggaagcaagtgaaatgctcagtcttagacgactgcgtcgtgctatgaccggactttttcttgaaagg

SEQ ID NO: 376255 - DNA, 120 bp, Artificial Sequence
  ENSG00000143110_2 (sequence is synthesized)
ggatgacagcatgggaggcaatggctccacatgtaaacccgacactgaaagacaaggcactctctccacagcagccccaacaactagccctgcaccctgtctctctaaccaccacaacaa

SEQ ID NO: 376256 - DNA, 120 bp, Artificial Sequence
  ENSG00000143110_3 (sequence is synthesized)
aaaacatttaatccttgccttttgtgctggggttctactgacactgctgctgatagcctttatcttcctcatcataaagagctacagaaaatatcgaagggagaggcttcccatttcccc

SEQ ID NO: 376257 - DNA, 120 bp, Artificial Sequence
  ENSG00000143110_4 (sequence is synthesized)
tctttctggcaccatggcagatcactccaagccccaggccccagatcctcactcagatcctccagccaagctttcatccatcccaggggaatcacttacctatgccagcacaactttcaa

SEQ ID NO: 376258 - DNA, 120 bp, Artificial Sequence
  ENSG00000143110_5 (sequence is synthesized)
actctcagaagaaaagagcaatcacttggctgagaaccattctgcagactttgaccccattgtctatgctcaaattaaagtaacaaactaactcagcttttccaatgaggcttgaatcca

SEQ ID NO: 376259 - DNA, 120 bp, Artificial Sequence
  ENSG00000143110_6 (sequence is synthesized)
tttcctctcatctcagccctatcttcacacatcactttcacttttttacaaattttggaccaccacctgtgtgaaactgcagtcggagttgtttagatgtgatctggcaatgctatccag

SEQ ID NO: 376260 - DNA, 120 bp, Artificial Sequence
  ENSG00000143110_7 (sequence is synthesized)
catctttggagaccaatggtcagtcttttcctggccagaggaaagattgatggccctcccacttgaactgacagcctgtgagccccttgggggcatagactgccttccttggacccttcc

SEQ ID NO: 376261 - DNA, 120 bp, Artificial Sequence
  ENSG00000143110_8 (sequence is synthesized)
aaagtgtgtggtacagagctcagtgcacagagtattcacccagcatcatgaatcaacttgggaggagtcaaccaaatgaacaatctaccaaaaatttcaaataaagtcaaaccccccaca

SEQ ID NO: 376262 - DNA, 120 bp, Artificial Sequence
  ENSG00000143110_9 (sequence is synthesized)
attatgtcaatattttatgatggtctgcaaagagcaccactgacttacaagttagaaaaggagcaaaaagtgtgagaaaaattaccactgccgattctgctgcggactgtgggcctccta

SEQ ID NO: 376263 - DNA, 120 bp, Artificial Sequence
  ENSG00000143110_10 (sequence is synthesized)
ttctcatggctcagattcctcaacacattttcccgttggcccttttcttatctgacattgcatgatctaaaaatgtttggtgaattgtaaggtacttggtaatgttgttgttgctgctat

SEQ ID NO: 376264 - DNA, 120 bp, Artificial Sequence
  ENSG00000143110_11 (sequence is synthesized)
tgtaacaggtacagggcgatgaggtgtccttctcccaaccctcccacaggtccaaggacttggaagttaacttttgagagctgaacaataaaacaataaataattgatgacatttgttta

SEQ ID NO: 376265 - DNA, 120 bp, Artificial Sequence
  ENSG00000143110_12 (sequence is synthesized)
aagaaatgaccttaaaatatagaagaaataacaaagccaaaacattttcccatgagtttgcctaaatacaaagtaaaattttggcctcctaaaaaaaaaaatcagggatgcatacaatgt

SEQ ID NO: 376266 - DNA, 120 bp, Artificial Sequence
  ENSG00000143110_13 (sequence is synthesized)
tttatgcacaaaaatatctctttcattgttattgatttaaataaaaatggaaacaattctatcagtaagtggggaatttgttaagcaagttatagtacatagctataatggaaagaccta

SEQ ID NO: 376267 - DNA, 120 bp, Artificial Sequence
  ENSG00000143110_14 (sequence is synthesized)
tcaccactaaaaaatgttataaaaagtttttagtgacatagaagaatgtgtatggcaaaatgctgagtgtaaaaggaagatataacctcttataaaaagaaatatctcaagtagcttttt

SEQ ID NO: 376268 - DNA, 120 bp, Artificial Sequence
  ENSG00000143110_15 (sequence is synthesized)
aaaaaatgcatggaagtctgactaaaaggaaagacactaaaaacattaatgagtagtaggagtttgggtgatttcactttcctgcctttagatattttatacattttgatataaagccta

SEQ ID NO: 376269 - DNA, 120 bp, Artificial Sequence
  ENSG00000143110_16 (sequence is synthesized)
aacaagaatattggcaaacttgagaagataatacgtgaacagattagaagtgtctaatgaggtctagagtaagggtctccaagagcaagtttgtcaaagtttatgtagcaatgccaggga

SEQ ID NO: 376270 - DNA, 120 bp, Artificial Sequence
  ENSG00000143110_17 (sequence is synthesized)
agagtaagattgatacatcagacccagttggcagtcaatataaaaatcatccattcatcttctctcatacttacttcagttcagtgcttaccaagcaaatttatgattttcattggcatt

SEQ ID NO: 376271 - DNA, 120 bp, Artificial Sequence
  ENSG00000143110_18 (sequence is synthesized)
cactgattgcaccaacatgtacctaatgttatttcggcttatacatcagtctcctgtgagttggttggtgggaatcagttctggagaaatcagtcatttcttggtgccctgataagatca

SEQ ID NO: 376272 - DNA, 120 bp, Artificial Sequence
  ENSG00000143110_19 (sequence is synthesized)
aatttctggacctgcaaacctgaaggctggctgctgagctgcagaaacaacaccagaattgttaaccactgatgagtgatctgtgaccactgatggcactagaacacccacaaattgcct

SEQ ID NO: 376273 - DNA, 120 bp, Artificial Sequence
  ENSG00000143110_20 (sequence is synthesized)
ctgtttcatcttgtaccacgtgggatttgatgttgtgctgacagcctcggcttggggatttgggcagggagactggggagaaaggactagaaacagtaaaagaacaaagtcagtttgtga

SEQ ID NO: 376274 - DNA, 120 bp, Artificial Sequence
  ENSG00000143110_21 (sequence is synthesized)
tctcaggagtatggctcttaatttggcatcccctaagcttcaagagatccatggatcccctaagcttatagctttcatccatcccaggggaatcacttacctatgccagcacaactttca

SEQ ID NO: 376275 - DNA, 120 bp, Artificial Sequence
  ENSG00000143119_0 (sequence is synthesized)
acaaatagccccggatatctgtgttaccagccttgtctcggccacctcaaggataatcactaaattctgccgaaaggactgaggaacggtgcctggaaaagggcaagaatatcacggcat

SEQ ID NO: 376276 - DNA, 120 bp, Artificial Sequence
  ENSG00000143119_1 (sequence is synthesized)
gggcatgagtagcttgaaactgctgaagtatgtcctgtttttcttcaacttgctcttttggatctgtggctgctgcattttgggctttgggatctacctgctgatccacaacaacttcgg

SEQ ID NO: 376277 - DNA, 120 bp, Artificial Sequence
  ENSG00000143119_2 (sequence is synthesized)
agtgctcttccataacctcccctccctcacgctgggcaatgtgtttgtcatcgtgggctctattatcatggtagttgccttcctgggctgcatgggctctatcaaggaaaacaagtgtct

SEQ ID NO: 376278 - DNA, 120 bp, Artificial Sequence
  ENSG00000143119_3 (sequence is synthesized)
gcttatgtcgttcttcatcctgctgctgattatcctccttgctgaggtgaccttggccatcctgctctttgtatatgaacagaagctgaatgagtatgtggctaagggtctgaccgacag

SEQ ID NO: 376279 - DNA, 120 bp, Artificial Sequence
  ENSG00000143119_4 (sequence is synthesized)
catccaccgttaccactcagacaatagcaccaaggcagcgtgggactccatccagtcatttctgcagtgttgtggtataaatggcacgagtgattggaccagtggcccaccagcatcttg

SEQ ID NO: 376280 - DNA, 120 bp, Artificial Sequence
  ENSG00000143119_5 (sequence is synthesized)
cccctcagatcgaaaagtggagggttgctatgcgaaagcaagactgtggtttcattccaatttcctgtatatcggaatcatcaccatctgtgtatgtgtgattgaggtgttggggatgtc

SEQ ID NO: 376281 - DNA, 120 bp, Artificial Sequence
  ENSG00000143119_6 (sequence is synthesized)
tagtcctgtggtgaagagacttgtttcatctccggaaatgcaaaaccatttatagcatgaagccctacatgatcactgcaggatgatcctcctcccatcctttccctttttaggtccctg

SEQ ID NO: 376282 - DNA, 120 bp, Artificial Sequence
  ENSG00000143119_7 (sequence is synthesized)
tcttatacaaccagagaagtgggtgttggccaggcacatcccatctcaggcagcaagacaatctttcactcactgacggcagcagccatgtctctcaaagtggtgaaactaatatctgag

SEQ ID NO: 376283 - DNA, 120 bp, Artificial Sequence
  ENSG00000143119_8 (sequence is synthesized)
catcttttagacaagagaggcaaagacaaactggatttaatggcccaacatcaaagggtgaacccaggatatgaatttttgcatcttcccattgtcgaattagtctccagcctctaaata

SEQ ID NO: 376284 - DNA, 120 bp, Artificial Sequence
  ENSG00000143119_9 (sequence is synthesized)
atgcccagtcttctccccaaagtcaagcaagagactagttgaagggagttctggggccaggctcactggaccattgtcacaaccctctgtttctctttgactaagtgccctggctacagg

SEQ ID NO: 376285 - DNA, 120 bp, Artificial Sequence
  ENSG00000143119_10 (sequence is synthesized)
aattacacagttctctttctccaaagggcaagatctcatttcaatttctttattagagggccttattgatgtgttctaagtctttccagaaaaaaactatccagtgatttatatcctgat

SEQ ID NO: 376286 - DNA, 120 bp, Artificial Sequence
  ENSG00000143119_11 (sequence is synthesized)
ttcaaccagtcacttagctgataatcacagtaagaagacttctggtattatctctctatcagataagattttgttaatgtactattttactcttcaataaataaaagtttattatctcaa

SEQ ID NO: 376287 - DNA, 120 bp, Artificial Sequence
  ENSG00000143119_12 (sequence is synthesized)
gcaaagaaaataaaaatataatacctaagcctctttgtattacataaagcaaaatgcaaagcactgtatcttccaaatacttcctcttgatatggtggaattatagagtagtatcatttg

SEQ ID NO: 376288 - DNA, 120 bp, Artificial Sequence
  ENSG00000143119_13 (sequence is synthesized)
ttataggcacagaaagatcataggaaaatgagattggtacctcagatcagccaagtctgcccagaccaatagtatattatgtatgactagggtcccacggacaggtgaaagagggcattg

SEQ ID NO: 376289 - DNA, 120 bp, Artificial Sequence
  ENSG00000143119_14 (sequence is synthesized)
ctatcccccttgtagccatttttatattgctaataatgacttttgtcattattgtaattcccctttatagcattttattttttctttatgtctggatgaaatcaggtgtcatccatcttc

SEQ ID NO: 376290 - DNA, 120 bp, Artificial Sequence
  ENSG00000143125_0 (sequence is synthesized)
acaaggctgagcgggaggaagcgagaggcatctaagcaggcagtgttttgccttcaccccaagtgaccatgagaggtgccacgcgagtctcaatcatgctcctcctagtaactgtgtctg

SEQ ID NO: 376291 - DNA, 120 bp, Artificial Sequence
  ENSG00000143125_1 (sequence is synthesized)
actgtgctgtgatcacaggggcctgtgagcgggatgtccagtgtggggcaggcacctgctgtgccatcagcctgtggcttcgagggctgcggatgtgcaccccgctggggcgggaaggcg

SEQ ID NO: 376292 - DNA, 120 bp, Artificial Sequence
  ENSG00000143125_2 (sequence is synthesized)
aggagtgccaccccggcagccacaaggtccccttcttcaggaaacgcaagcaccacacctgtccttgcttgcccaacctgctgtgctccaggttcccggacggcaggtaccgctgctcca

SEQ ID NO: 376293 - DNA, 120 bp, Artificial Sequence
  ENSG00000143125_3 (sequence is synthesized)
tggacttgaagaacatcaatttttaggcgcttgcctggtctcaggatacccaccatccttttcctgagcacagcctggatttttatttctgccatgaaacccagctcccatgactctccc

SEQ ID NO: 376294 - DNA, 120 bp, Artificial Sequence
  ENSG00000143125_4 (sequence is synthesized)
agtccctacactgactaccctgatctctcttgtctagtacgcacatatgcacacaggcagacatacctcccatcatgacatggtccccaggctggcctgaggatgtcacagcttgaggct

SEQ ID NO: 376295 - DNA, 120 bp, Artificial Sequence
  ENSG00000143125_5 (sequence is synthesized)
acattccccctcccctccccaggtgacctgctctctttcctgggccctgcccctctccccacatgtatccctcggtctgaattagacattcctgggcacaggctcttgggtgcattgctc

SEQ ID NO: 376296 - DNA, 120 bp, Artificial Sequence
  ENSG00000143125_6 (sequence is synthesized)
agagtcccaggtcctggcctgaccctcaggcccttcacgtgaggtctgtgaggaccaatttgtgggtagttcatcttccctcgattggttaactccttagtttcagaccacagactcaag

SEQ ID NO: 376297 - DNA, 120 bp, Artificial Sequence
  ENSG00000143125_7 (sequence is synthesized)
attggctcttcccagagggcagcagacagtcaccccaaggcaggtgtagggagcccagggaggccaatcagccccctgaagactctggtcccagtcagcctgtggcttgtggcctgtgac

SEQ ID NO: 376298 - DNA, 120 bp, Artificial Sequence
  ENSG00000143125_8 (sequence is synthesized)
ctgtgaccttctgccagaattgtcatgcctctgaggccccctcttaccacactttaccagttaaccactgaagcccccaattcccacagcttttccattaaaatgcaaatggtggtggtt

SEQ ID NO: 376299 - DNA, 120 bp, Artificial Sequence
  ENSG00000143125_9 (sequence is synthesized)
caatctaatctgatattgacatattagaaggcaattagggtgtttccttaaacaactcctttccaaggatcagccctgagagcaggttggtgactttgaggagggcagtcctctgtccag

SEQ ID NO: 376300 - DNA, 120 bp, Artificial Sequence
  ENSG00000143125_10 (sequence is synthesized)
attggggtgggagcaagggacagggagcagggcaggggctgaaaggggcactgattcagaccagggaggcaactacacaccaacctgctggctttagaataaaagcaccaactgaactga

SEQ ID NO: 376301 - DNA, 80 bp, Artificial Sequence
  ENSG00000143126_0 (sequence is synthesized)
tacgcgggcgcaggtgggcgatcccataggggcggagggggcaccccggctccggaacccggggcccggcaaggccaggg

SEQ ID NO: 376302 - DNA, 120 bp, Artificial Sequence
  ENSG00000143126_1 (sequence is synthesized)
gcaggtggtgagtgcccggagcgcaggtggaggcgcggcggcagcccgcggtgctcagggtgacccgggagcgggtctggctcagggggcagtgggagcccgggctcgtcggagggtgca

SEQ ID NO: 376303 - DNA, 80 bp, Artificial Sequence
  ENSG00000143126_2 (sequence is synthesized)
tgggagcccgggctcgtcggagggtgcagcgcggggtcccgccgagccatccagacgcaggccccgcggggcgcacggga

SEQ ID NO: 376304 - DNA, 120 bp, Artificial Sequence
  ENSG00000143126_3 (sequence is synthesized)
gttgacccggccgccggccgggagctgggagagatgcggagcccggccaccggcgtccccctcccaacgccgccgccgccgctgctgctgctgttgctgctgctgctgccgccgccacta

SEQ ID NO: 376305 - DNA, 120 bp, Artificial Sequence
  ENSG00000143126_4 (sequence is synthesized)
gttgctgctgctgctgccgccgccactattgggagaccaagtggggccctgtcgttccttggggtccaggggacgaggctcttcgggggcctgcgcccccatgggctggctctgtccatc

SEQ ID NO: 376306 - DNA, 120 bp, Artificial Sequence
  ENSG00000143126_5 (sequence is synthesized)
ctcagcgtcgaacctctggctctacaccagccgctgcagggatgcgggcactgagctgactggccacctggtaccccaccacgatggcctgagggtttggtgtccagaatccgaggccca

SEQ ID NO: 376307 - DNA, 120 bp, Artificial Sequence
  ENSG00000143126_6 (sequence is synthesized)
tattcccctaccaccagctcctgaaggctgcccctggagctgtcgcctcctgggcattggaggccacctttccccacagggcaagctcacactgcccgaggagcacccgtgcttaaaggc

SEQ ID NO: 376308 - DNA, 120 bp, Artificial Sequence
  ENSG00000143126_7 (sequence is synthesized)
tccacggctcagatgccagtcctgcaagctggcacaggcccccgggctcagggcaggggaaaggtcaccagaagagtccctgggtgggcgtcggaaaaggaatgtaaatacagcccccca

SEQ ID NO: 376309 - DNA, 120 bp, Artificial Sequence
  ENSG00000143126_8 (sequence is synthesized)
gttccagccccccagctaccaggccacagtgccggagaaccagccagcaggcacccctgttgcatccctgagggccatcgacccggacgagggtgaggcaggtcgactggagtacaccat

SEQ ID NO: 376310 - DNA, 120 bp, Artificial Sequence
  ENSG00000143126_9 (sequence is synthesized)
ggatgccctctttgatagccgctccaaccagttcttctccctggacccagtcactggtgcagtaaccacagccgaggagctggatcgtgagaccaagagcacccacgtcttcagggtcac

SEQ ID NO: 376311 - DNA, 120 bp, Artificial Sequence
  ENSG00000143126_10 (sequence is synthesized)
ggcgcaggaccacggcatgccccgacgaagtgccctggctacactcaccatcttggttactgacaccaatgaccatgaccctgtgttcgagcagcaggagtacaaggagagcctcaggga

SEQ ID NO: 376312 - DNA, 120 bp, Artificial Sequence
  ENSG00000143126_11 (sequence is synthesized)
gaacctggaggttggctatgaggtgctcactgtcagggccacggatggtgatgcccctcccaatgccaatattctgtaccgcctgctggaggggtctgggggcagcccctctgaagtctt

SEQ ID NO: 376313 - DNA, 120 bp, Artificial Sequence
  ENSG00000143126_12 (sequence is synthesized)
tgagatcgaccctcgctctggggtgatccgaacccgtggccctgtggatcgggaagaggtggaatcctaccagctgacggtagaggcaagtgaccagggtcgggacccgggtcctcggag

SEQ ID NO: 376314 - DNA, 120 bp, Artificial Sequence
  ENSG00000143126_13 (sequence is synthesized)
taccacagccgctgttttcctttctgtggaggatgacaatgataatgccccccagtttagtgagaagcgctatgtggtccaggtgagggaggatgtgactccaggggccccagtactccg

SEQ ID NO: 376315 - DNA, 120 bp, Artificial Sequence
  ENSG00000143126_14 (sequence is synthesized)
agtcacagcctcggatcgagacaaggggagcaatgccgtggtgcactatagcatcatgagtggcaatgctcggggacagttttatctggatgcccagactggagctctggatgtggtgag

SEQ ID NO: 376316 - DNA, 120 bp, Artificial Sequence
  ENSG00000143126_15 (sequence is synthesized)
ccctcttgactatgagacgaccaaggagtacaccctacgggtgcgagcacaggatggtggccgtcccccactctctaatgtctctggcttggtgacagtacaggtcctggatatcaacga

SEQ ID NO: 376317 - DNA, 120 bp, Artificial Sequence
  ENSG00000143126_16 (sequence is synthesized)
caatgcccccatcttcgtcagcacccctttccaggctactgtcctggagagtgtccccttaggctacctggttctccatgtccaggctatcgacgctgatgctggtgacaatgcccgcct

SEQ ID NO: 376318 - DNA, 120 bp, Artificial Sequence
  ENSG00000143126_17 (sequence is synthesized)
ggaataccgccttgctggggtgggacatgacttccccttcaccatcaacaatggcacaggctggatctctgtggctgctgaactggaccgggaggaagttgatttctacagctttggggt

SEQ ID NO: 376319 - DNA, 120 bp, Artificial Sequence
  ENSG00000143126_18 (sequence is synthesized)
agaagctcgagaccatggcactccagcactcactgcctcggccagtgtcagcgtgactgtcctggatgtcaacgacaacaatccaacctttacccaaccagagtacacagtgcggctcaa

SEQ ID NO: 376320 - DNA, 120 bp, Artificial Sequence
  ENSG00000143126_19 (sequence is synthesized)
tgaggatgcagctgtgggcaccagcgtggtgacggtgtcagctgtggaccgtgatgctcatagtgtcatcacctaccagatcaccagtggcaatactcgaaaccgcttctccatcaccag

SEQ ID NO: 376321 - DNA, 120 bp, Artificial Sequence
  ENSG00000143126_20 (sequence is synthesized)
ccaaagtggtggtgggctggtatcccttgccctgccactggactacaaacttgagcggcagtatgtgttggctgttaccgcctccgatggcactcggcaggacacggcacagattgtggt

SEQ ID NO: 376322 - DNA, 120 bp, Artificial Sequence
  ENSG00000143126_21 (sequence is synthesized)
gaatgtcaccgacgccaacacccatcgtcctgtctttcagagctcccactatacagtgaatgttaatgaggaccggccggcaggcaccacggtggtgctgatcagcgccacggatgagga

SEQ ID NO: 376323 - DNA, 120 bp, Artificial Sequence
  ENSG00000143126_22 (sequence is synthesized)
cacaggtgagaatgcccgcatcacctacttcatggaggacagcatcccccagttccgcatcgatgcagacacgggggctgtcaccacccaggctgagctggactatgaagaccaagtgtc

SEQ ID NO: 376324 - DNA, 120 bp, Artificial Sequence
  ENSG00000143126_23 (sequence is synthesized)
ttacaccctggccattactgctcgggacaatggcattccccagaagtccgacaccacctacctggagatcctggtgaacgacgtgaatgacaatgcccctcagttcctgcgagactccta

SEQ ID NO: 376325 - DNA, 120 bp, Artificial Sequence
  ENSG00000143126_24 (sequence is synthesized)
ccagggcagtgtctatgaggatgtgccacccttcactagcgtcctgcagatctcagccactgatcgtgattctggacttaatggcagggtcttctacaccttccaaggaggcgacgatgg

SEQ ID NO: 376326 - DNA, 120 bp, Artificial Sequence
  ENSG00000143126_25 (sequence is synthesized)
agacggtgactttattgttgagtccacgtcaggcatcgtgcgaacgctacggaggctggatcgagagaacgtggcccagtatgtcttgcgggcatatgcagtggacaaggggatgccccc

SEQ ID NO: 376327 - DNA, 120 bp, Artificial Sequence
  ENSG00000143126_26 (sequence is synthesized)
agcccgcacacctatggaagtgacagtcactgtgttggatgtgaatgacaatccccctgtctttgagcaggatgagtttgatgtgtttgtggaagagaacagccccattgggctagccgt

SEQ ID NO: 376328 - DNA, 120 bp, Artificial Sequence
  ENSG00000143126_27 (sequence is synthesized)
ggcccgggtcacagccactgaccccgatgaaggcaccaatgcccagattatgtaccagattgtggagggcaacatccctgaggtctttcagctggacatcttctccggggagctgacagc

SEQ ID NO: 376329 - DNA, 120 bp, Artificial Sequence
  ENSG00000143126_28 (sequence is synthesized)
cctggtagacttagactacgaggaccggcctgagtacgtcctggtcatccaggccacgtcagctcctctggtgagccgggctacagtccacgtccgcctccttgaccgcaatgacaaccc

SEQ ID NO: 376330 - DNA, 120 bp, Artificial Sequence
  ENSG00000143126_29 (sequence is synthesized)
accagtgctgggcaactttgagatccttttcaacaactatgtcaccaatcgctcaagcagcttccctgggggtgccattggccgagtacctgcccatgaccctgatatctcagatagtct

SEQ ID NO: 376331 - DNA, 120 bp, Artificial Sequence
  ENSG00000143126_30 (sequence is synthesized)
gacttacagctttgagcggggaaatgaactcagcctggtcctgctcaatgcctccacgggtgagctgaagctaagccgcgcactggacaacaaccggcctctggaggccatcatgagcgt

SEQ ID NO: 376332 - DNA, 120 bp, Artificial Sequence
  ENSG00000143126_31 (sequence is synthesized)
gctggtgtcagacggcgtacacagcgtgaccgcccagtgcgcgctgcgtgtgaccatcatcaccgatgagatgctcacccacagcatcacgctgcgcctggaggacatgtcacccgagcg

SEQ ID NO: 376333 - DNA, 120 bp, Artificial Sequence
  ENSG00000143126_32 (sequence is synthesized)
cttcctgtcaccactgctaggcctcttcatccaggcggtggccgccacgctggccacgccaccggaccacgtggtggtcttcaacgtacagcgggacaccgacgcccccgggggccacat

SEQ ID NO: 376334 - DNA, 120 bp, Artificial Sequence
  ENSG00000143126_33 (sequence is synthesized)
cctcaacgtgagcctgtcggtgggccagccgccagggcccgggggcgggccgcccttcctgccctctgaggacctgcaggagcgcctatacctcaaccgcagcctgctgacggccatctc

SEQ ID NO: 376335 - DNA, 120 bp, Artificial Sequence
  ENSG00000143126_34 (sequence is synthesized)
ggcacagcgcgtgctgcccttcgacgacaacatctgcctgcgggagccctgcgagaactacatgcgctgcgtgtcggtgctgcgcttcgactcctccgcgcccttcatcgcctcctcctc

SEQ ID NO: 376336 - DNA, 120 bp, Artificial Sequence
  ENSG00000143126_35 (sequence is synthesized)
cgtgctcttccggcccatccaccccgtcggagggctgcgctgccgctgcccgcccggcttcacgggtgactactgcgagaccgaggtggacctctgctactcgcggccctgtggccccca

SEQ ID NO: 376337 - DNA, 120 bp, Artificial Sequence
  ENSG00000143126_36 (sequence is synthesized)
cgggcgctgccgcagccgcgagggcggctacacctgcctctgtcgtgatggctacacgggtgagcactgtgaggtgagtgctcgctcaggccgttgcaccccgggtgtctgcaagaatgg

SEQ ID NO: 376338 - DNA, 120 bp, Artificial Sequence
  ENSG00000143126_37 (sequence is synthesized)
gggcacctgtgtcaacctgctggtgggcggtttcaagtgcgattgcccatctggagacttcgagaagccctactgccaggtgaccacgcgcagcttccccgcccactccttcatcacctt

SEQ ID NO: 376339 - DNA, 120 bp, Artificial Sequence
  ENSG00000143126_38 (sequence is synthesized)
tcgcggcctgcgccagcgtttccacttcaccctggccctctcgtttgccacaaaggagcgcgacgggttgctgttgtacaatgggcgtttcaatgagaagcatgactttgtggccctcga

SEQ ID NO: 376340 - DNA, 120 bp, Artificial Sequence
  ENSG00000143126_39 (sequence is synthesized)
ggtgatccaggagcaggtccagctcaccttctctgcaggggagtcaaccaccacggtgtccccattcgtgcccggaggagtcagtgatggccagtggcatacggtgcagctgaaatacta

SEQ ID NO: 376341 - DNA, 120 bp, Artificial Sequence
  ENSG00000143126_40 (sequence is synthesized)
caataagccactgttgggtcagacagggctcccacagggcccatcagagcagaaggtggctgtggtgaccgtggatggctgtgacacaggagtggccttgcgcttcggatctgtcctggg

SEQ ID NO: 376342 - DNA, 120 bp, Artificial Sequence
  ENSG00000143126_41 (sequence is synthesized)
caactactcctgtgctgcccagggcacccagggtggcagcaagaagtctctggatctgacggggcccctgctactaggcggggtgcctgacctgcccgagagcttcccagtccgaatgcg

SEQ ID NO: 376343 - DNA, 120 bp, Artificial Sequence
  ENSG00000143126_42 (sequence is synthesized)
gcagttcgtgggctgcatgcggaacctgcaggtggacagccggcacatagacatggctgacttcattgccaacaatggcaccgtgcctggctgccctgccaagaagaacgtgtgtgacag

SEQ ID NO: 376344 - DNA, 120 bp, Artificial Sequence
  ENSG00000143126_43 (sequence is synthesized)
caacacttgccacaatgggggcacttgcgtgaaccagtgggacgcgttcagctgcgagtgccccctgggctttgggggcaagagctgcgcccaggaaatggccaatccacagcacttcct

SEQ ID NO: 376345 - DNA, 120 bp, Artificial Sequence
  ENSG00000143126_44 (sequence is synthesized)
tcctgctgcaggccatcaccagggggcgcagcaccatcaccctacagctacgagagggccacgtgatgctgagcgtggagggcacagggcttcaggcctcctctctccgtctggagccag

SEQ ID NO: 376346 - DNA, 120 bp, Artificial Sequence
  ENSG00000143126_45 (sequence is synthesized)
gccgggccaatgacggtgactggcaccatgcacagctggcactgggagccagcggggggcccggccatgccattctgtccttcgattatgggcagcagagagcagagggcaacctgggcc

SEQ ID NO: 376347 - DNA, 120 bp, Artificial Sequence
  ENSG00000143126_46 (sequence is synthesized)
cccggctgcatggtctgcacctgagcaacataacagtgggcggaatacctgggccagccggcggtgtggcccgtggctttcggggctgtttgcagggtgtgcgggtgagcgatacgccgg

SEQ ID NO: 376348 - DNA, 120 bp, Artificial Sequence
  ENSG00000143126_47 (sequence is synthesized)
agggggttaacagcctggatcccagccatggggagagcatcaacgtggagcaaggctgtagcctgcctgacccttgtgactcaaacccgtgtcctgctaacagctattgcagcaacgact

SEQ ID NO: 376349 - DNA, 120 bp, Artificial Sequence
  ENSG00000143126_48 (sequence is synthesized)
gggacagctattcctgcagctgtgatccaggttactatggtgacaactgtactaatgtgtgtgacctgaacccgtgtgagcaccagtctgtgtgtacccgcaagcccagtgccccccatg

SEQ ID NO: 376350 - DNA, 120 bp, Artificial Sequence
  ENSG00000143126_49 (sequence is synthesized)
gctatacctgcgagtgtcccccaaattaccttgggccatactgtgagaccaggattgaccagccttgtccccgtggctggtggggacatcccacatgtggcccatgcaactgtgatgtca

SEQ ID NO: 376351 - DNA, 120 bp, Artificial Sequence
  ENSG00000143126_50 (sequence is synthesized)
gcaaaggctttgacccagactgcaacaagacaagcggcgagtgccactgcaaggagaaccactaccggcccccaggcagccccacctgcctcttgtgtgactgctaccccacaggctcct

SEQ ID NO: 376352 - DNA, 120 bp, Artificial Sequence
  ENSG00000143126_51 (sequence is synthesized)
tgtccagagtctgtgaccctgaggatggccagtgtccatgcaagccaggtgtcatcgggcgtcagtgtgaccgctgtgacaacccttttgctgaggtcaccaccaatggctgtgaagtga

SEQ ID NO: 376353 - DNA, 120 bp, Artificial Sequence
  ENSG00000143126_52 (sequence is synthesized)
attatgacagctgcccacgagcgattgaggctgggatctggtggccccgtacccgcttcgggctgcctgctgctgctccctgtcccaaaggctcctttgggactgctgtgcgccactgtg

SEQ ID NO: 376354 - DNA, 120 bp, Artificial Sequence
  ENSG00000143126_53 (sequence is synthesized)
atgagcacagggggtggctccccccaaacctcttcaactgcacgtccatcaccttctcagaactgaagggcttcgctgagcggctacagcggaatgagtcaggcctagactcagggcgct

SEQ ID NO: 376355 - DNA, 120 bp, Artificial Sequence
  ENSG00000143126_54 (sequence is synthesized)
cccagcagctagccctgctcctgcgcaacgccacgcagcacacagctggctacttcggcagcgacgtcaaggtggcctaccagctggccacgcggctgctggcccacgagagcacccagc

SEQ ID NO: 376356 - DNA, 120 bp, Artificial Sequence
  ENSG00000143126_55 (sequence is synthesized)
ggggctttgggctgtctgccacacaggacgtgcacttcactgagaatctgctgcgggtgggcagcgccctcctggacacagccaacaagcggcactgggagctgatccagcagacagagg

SEQ ID NO: 376357 - DNA, 120 bp, Artificial Sequence
  ENSG00000143126_56 (sequence is synthesized)
gtggcaccgcctggctgctccagcactatgaggcctacgccagtgccctggcccagaacatgcggcacacctacctaagccccttcaccatcgtcacgcccaacattgtcatctccgtag

SEQ ID NO: 376358 - DNA, 120 bp, Artificial Sequence
  ENSG00000143126_57 (sequence is synthesized)
tgcgcttggacaaagggaactttgctggggccaagctgccccgctacgaggccctgcgtggggagcagcccccggaccttgagacaacagtcattctgcctgagtctgtcttcagagaga

SEQ ID NO: 376359 - DNA, 120 bp, Artificial Sequence
  ENSG00000143126_58 (sequence is synthesized)
cgccccccgtggtcaggcccgcaggccccggagaggcccaggagccagaggagctggcacggcgacagcgacggcacccggagctgagccagggtgaggctgtggccagcgtcatcatct

SEQ ID NO: 376360 - DNA, 120 bp, Artificial Sequence
  ENSG00000143126_59 (sequence is synthesized)
accgcaccctggccgggctactgcctcataactatgaccctgacaagcgcagcttgagagtccccaaacgcccgatcatcaacacacccgtggtgagcatcagcgtccatgatgatgagg

SEQ ID NO: 376361 - DNA, 120 bp, Artificial Sequence
  ENSG00000143126_60 (sequence is synthesized)
agcttctgccccgggccctggacaaacccgtcacggtgcagttccgcctgctggagacagaggagcggaccaagcccatctgtgtcttctggaaccattcaatcctggtcagtggcacag

SEQ ID NO: 376362 - DNA, 120 bp, Artificial Sequence
  ENSG00000143126_61 (sequence is synthesized)
gtggctggtcggccagaggctgtgaagtcgtcttccgcaatgagagccacgtcagctgccagtgcaaccacatgacgagcttcgctgtgctcatggacgtttctcggcgggagaatgggg

SEQ ID NO: 376363 - DNA, 120 bp, Artificial Sequence
  ENSG00000143126_62 (sequence is synthesized)
agatcctgccactgaagacactgacatacgtggctctaggtgtcaccttggctgcccttctgctcaccttcttcttcctcactctcttgcgtatcctgcgctccaaccaacacggcatcc

SEQ ID NO: 376364 - DNA, 120 bp, Artificial Sequence
  ENSG00000143126_63 (sequence is synthesized)
gacgtaacctgacagctgccctgggcctggctcagctggtcttcctcctgggaatcaaccaggctgacctcccttttgcctgcacagtcattgccatcctgctgcacttcctgtacctct

SEQ ID NO: 376365 - DNA, 120 bp, Artificial Sequence
  ENSG00000143126_64 (sequence is synthesized)
gcaccttttcctgggctctgctggaggccttgcacctgtaccgggcactcactgaggtgcgcgatgtcaacaccggccccatgcgcttctactacatgctgggctggggcgtgcctgcct

SEQ ID NO: 376366 - DNA, 120 bp, Artificial Sequence
  ENSG00000143126_65 (sequence is synthesized)
tcatcacagggctagccgtgggcctggaccccgagggctacgggaaccctgacttctgctggctctccatctatgacacgctcatctggagttttgctggcccggtggcctttgccgtct

SEQ ID NO: 376367 - DNA, 120 bp, Artificial Sequence
  ENSG00000143126_66 (sequence is synthesized)
cgatgagtgtcttcctgtacatcctggcggcccgggcctcctgtgctgcccagcggcagggctttgagaagaaaggtcctgtctcgggcctgcagccctccttcgccgtcctcctgctgc

SEQ ID NO: 376368 - DNA, 120 bp, Artificial Sequence
  ENSG00000143126_67 (sequence is synthesized)
tgagcgccacgtggctgctggcactgctctctgtcaacagcgacaccctcctcttccactacctctttgctacctgcaattgcatccagggccccttcatcttcctctcctatgtggtgc

SEQ ID NO: 376369 - DNA, 120 bp, Artificial Sequence
  ENSG00000143126_68 (sequence is synthesized)
ttagcaaggaggtccggaaagcactcaagcttgcctgcagccgcaagcccagccctgaccctgctctgaccaccaagtccaccctgacctcgtcctacaactgccccagcccctacgcag

SEQ ID NO: 376370 - DNA, 120 bp, Artificial Sequence
  ENSG00000143126_69 (sequence is synthesized)
atgggcggctgtaccagccctacggagactcggccggctctctgcacagcaccagtcgctcgggcaagagtcagcccagctacatccccttcttgctgagggaggagtccgcactgaacc

SEQ ID NO: 376371 - DNA, 120 bp, Artificial Sequence
  ENSG00000143126_70 (sequence is synthesized)
ctggccaagggccccctggcctgggggatccaggcagcctgttcctggaaggtcaagaccagcagcatgatcctgacacggactccgacagtgacctgtccttagaagacgaccagagtg

SEQ ID NO: 376372 - DNA, 120 bp, Artificial Sequence
  ENSG00000143126_71 (sequence is synthesized)
gctcctatgcctctacccactcatcagacagtgaggaggaagaagaggaggaggaagaggaggccgccttccctggagagcagggctgggatagcctgctggggcctggagcagagagac

SEQ ID NO: 376373 - DNA, 120 bp, Artificial Sequence
  ENSG00000143126_72 (sequence is synthesized)
tgcccctgcacagtactcccaaggatgggggcccagggcctggcaaggccccctggccaggagactttgggaccacagcaaaagagagtagtggcaacggggcccctgaggagcggctgc

SEQ ID NO: 376374 - DNA, 120 bp, Artificial Sequence
  ENSG00000143126_73 (sequence is synthesized)
gggagaatggagatgccctgtctcgagaggggtccctaggcccccttccaggctcttctgcccagcctcacaaaggcatccttaagaagaagtgtctgcccaccatcagcgagaagagca

SEQ ID NO: 376375 - DNA, 120 bp, Artificial Sequence
  ENSG00000143126_74 (sequence is synthesized)
gcctcctgcggctccccctggagcaatgcacagggtcttcccggggctcctccgctagtgagggcagccggggaggcccccctccccgcccaccgccccggcagagcctccaggagcagc

SEQ ID NO: 376376 - DNA, 120 bp, Artificial Sequence
  ENSG00000143126_75 (sequence is synthesized)
tgaacggggtcatgcccatcgccatgagcatcaaggcaggcacggtggatgaggactcgtcaggctccgaatttctcttctttaacttcctgcattaaccctgggccgtggttcctacgc

SEQ ID NO: 376377 - DNA, 120 bp, Artificial Sequence
  ENSG00000143126_76 (sequence is synthesized)
ccgaggctcccttcccttccccagccgcactcatgccctgctcctgtcttgtgctttatcctgccccgctccccatcgcctgcccgcagcagcgacgaaacgtccatctgaggagcctgg

SEQ ID NO: 376378 - DNA, 120 bp, Artificial Sequence
  ENSG00000143126_77 (sequence is synthesized)
gccttgccgggaggggtactcaccccacctaaggccatctagtgccaactccccccccaccattcccctcactgcactttggacccctggggccaacatctccaagacaaagtttttcag

SEQ ID NO: 376379 - DNA, 120 bp, Artificial Sequence
  ENSG00000143126_78 (sequence is synthesized)
aaaagaggaaaaaaagaatttaaaaaaggatctccactcttcatgacttcagggattcattttttttatacgctggaaattgactcccctttcccttcccaaagaggataggacctccca

SEQ ID NO: 376380 - DNA, 120 bp, Artificial Sequence
  ENSG00000143126_79 (sequence is synthesized)
ggatgcttcccagcctctcctcagtttcccatctgctgtgcctctgggaggagagggactcctggggggcctgcccctcatacgccatcaccaaaaggaaaggacaaagccacacgcagc

SEQ ID NO: 376381 - DNA, 120 bp, Artificial Sequence
  ENSG00000143126_80 (sequence is synthesized)
cagggcttcacacccttcaggctgcacccgggcaggcctcagaacggtgaggggccagggcaaagggtgtgcctcgtcctgcccgcactgcctctcccaggaactggaaaagccctgtcc

SEQ ID NO: 376382 - DNA, 120 bp, Artificial Sequence
  ENSG00000143126_81 (sequence is synthesized)
ggtgagggggcagaaggactcagcgcccctggacccccaaatgctgcatgaacacattttcaggggagcctgtgcccccaggcgggggtcgggcagccccagcccctctccttttcctgg

SEQ ID NO: 376383 - DNA, 120 bp, Artificial Sequence
  ENSG00000143126_82 (sequence is synthesized)
actctggccgtgcgcggcagcccaggtgtttgctcagttgctgacccaaaagtgcttcatttttcgtgcccgccccgcgccccgggcaggccagtcatgtgttaagttgcgcttctttgc

SEQ ID NO: 376384 - DNA, 120 bp, Artificial Sequence
  ENSG00000143126_83 (sequence is synthesized)
tgtgatgtgggtgggggaggaagagtaaacacagtgctggctcggctgccctgagggtgctcaatcaagcacaggtttcaagtctgggttctggtgtccactcacccaccccacccccca

SEQ ID NO: 376385 - DNA, 120 bp, Artificial Sequence
  ENSG00000143126_84 (sequence is synthesized)
aaatcagacaaatgctactttgtctaacctgctgtggcctctgagacatgttctatttttaaccccttcttggaattggctctcttcttcaaaggaccaggtcctgttcctctttctccc

SEQ ID NO: 376386 - DNA, 120 bp, Artificial Sequence
  ENSG00000143126_85 (sequence is synthesized)
cgactccaccccagctccctgtgaagagagagttaatatatttgttttatttatttgctttttgtgttgggatgggttcgtgtccagtcccgggggtctgatatggccatcacaggctgg

SEQ ID NO: 376387 - DNA, 120 bp, Artificial Sequence
  ENSG00000143126_86 (sequence is synthesized)
gtgttcccagcagccctggcttgggggcttgacgcccttccccttgccccaggccatcatctccccacctctcctcccctctcctcagttttgccgactgcttttcatctgagtcaccat

SEQ ID NO: 376388 - DNA, 120 bp, Artificial Sequence
  ENSG00000143126_87 (sequence is synthesized)
ttactccaagcatgtattccagacttgtcactgactttccttctggagcaggtggctagaaaaagaggctgtgggcaggaaagaaaggctcctgtttctcatttgtgaggccagcctctg

SEQ ID NO: 376389 - DNA, 120 bp, Artificial Sequence
  ENSG00000143126_88 (sequence is synthesized)
gcttttctgccgtggattctcccccgtcttctcccctcagcaattcctgcaaagggttaaaaatttaactggtttttactactgatgacttgatttaaaaaaaatacaaagatgctggat

SEQ ID NO: 376390 - DNA, 120 bp, Artificial Sequence
  ENSG00000143126_89 (sequence is synthesized)
gctaacttggtactaaccatcagattgtacagtttggttgttgctgtaaatagggtagcgttttgttgttgttgttttttcatgccccatactactgaataaactagttctgtgcgggta

SEQ ID NO: 376391 - DNA, 120 bp, Artificial Sequence
  ENSG00000143126_90 (sequence is synthesized)
tcctttggtaggtgttggaggccccgatgtgatgtcgaggacatggcctctgctgttagtgggatgagggcaggaagctcctggctgaagatccggggaccccactttctggcctccagg

SEQ ID NO: 376392 - DNA, 120 bp, Artificial Sequence
  ENSG00000143126_91 (sequence is synthesized)
tcctgggatttcatttcccatcttccttggttcacattcccccttccccatgttgcccaggtgtgcctacatcttggactgttttgttttgttttggtttggttttttttctgggacaga

SEQ ID NO: 376393 - DNA, 120 bp, Artificial Sequence
  ENSG00000143126_92 (sequence is synthesized)
gcaacccctgctcctgcaccatgaactctaataaggtgcctagtgcagcacctggcccagggtttcctcttctgtggctcccccgggatcccccagcacctgcctctggcccaggcttcc

SEQ ID NO: 376394 - DNA, 120 bp, Artificial Sequence
  ENSG00000143126_93 (sequence is synthesized)
ctggaagcagttcccaacacccaggccctcctccatgcctgacccgaagcagagcctgtgctctgggcgggccccggtcgctgacctgccctggcctgggccctcagtttgcctgcacag

SEQ ID NO: 376395 - DNA, 120 bp, Artificial Sequence
  ENSG00000143126_94 (sequence is synthesized)
aggccctgaggccccacatccccatgccccaggccgccttattcacaggtgtccctctggtttaacccagactctgcagccgccacccaggcgtcactcccttatcctggggagatcggt

SEQ ID NO: 376396 - DNA, 120 bp, Artificial Sequence
  ENSG00000143126_95 (sequence is synthesized)
aggggccgatggtgggcagaacccttttccatgcttcatgcctggccctgtgagcccacctgcccgcagccctacttcccaggcccctcatcacccctccactgctcccgtctgtctcca

SEQ ID NO: 376397 - DNA, 120 bp, Artificial Sequence
  ENSG00000143126_96 (sequence is synthesized)
gatgggagggtggaggaggggaggaggggcccacgcatgctggacccaggccagccagctgttgggagttgaggagcacacactgtggctgacgtgggggccagcttggattagaagctg

SEQ ID NO: 376398 - DNA, 120 bp, Artificial Sequence
  ENSG00000143126_97 (sequence is synthesized)
taagggacccacagcaggaaccaggatcccaggggagaggagagactgggaccctgggcaaggggccaggctgacccctccagcatggtctcatcttcctagggaggagtccgcactgaa

SEQ ID NO: 376399 - DNA, 120 bp, Artificial Sequence
  ENSG00000143126_98 (sequence is synthesized)
cacccagcagggcagttggctggcttttactgaaggtgggtggaggtggctgggctggctgtgatctctccctggcctcctagatcctgacacggactccgacagtgacctgtccttaga

SEQ ID NO: 376400 - DNA, 120 bp, Artificial Sequence
  ENSG00000143126_99 (sequence is synthesized)
actatgccgtgcccacaaaccatggtgccttgcggggagggccacccctcctaggctctacgcggcgcagcccagcctagggcagagtgcgggaggatggggagctgggggtgctttcct

SEQ ID NO: 376401 - DNA, 120 bp, Artificial Sequence
  ENSG00000143126_100 (sequence is synthesized)
gtttccttcgtctggtgaaagctttcactctctcctctgtttcaactaaccctctgtctgccttttctgccactttcctttcctgcctctccagatttctcttctttaacttcctgcatt

SEQ ID NO: 376402 - DNA, 120 bp, Artificial Sequence
  ENSG00000143127_0 (sequence is synthesized)
agaggacttctcatactggacagaaaccgatcaggcatggaactccccttcgtcactcacctgttcttgcccctggtgttcctgacaggtctctgctccccctttaacctggatgaacat

SEQ ID NO: 376403 - DNA, 120 bp, Artificial Sequence
  ENSG00000143127_1 (sequence is synthesized)
cacccacgcctattcccagggccaccagaagctgaatttggatacagtgtcttacaacatgttgggggtggacagcgatggatgctggtgggcgccccctgggatgggccttcaggcgac

SEQ ID NO: 376404 - DNA, 120 bp, Artificial Sequence
  ENSG00000143127_2 (sequence is synthesized)
cggaggggggacgtttatcgctgccctgtagggggggcccacaatgccccatgtgccaagggccacttaggtgactaccaactgggaaattcatctcatcctgctgtgaatatgcacctg

SEQ ID NO: 376405 - DNA, 120 bp, Artificial Sequence
  ENSG00000143127_3 (sequence is synthesized)
gggatgtctctgttagagacagatggtgatgggggattcatggcctgtgcccctctctggtctcgtgcttgtggcagctctgtcttcagttctgggatatgtgcccgtgtggatgcttca

SEQ ID NO: 376406 - DNA, 120 bp, Artificial Sequence
  ENSG00000143127_4 (sequence is synthesized)
ttccagcctcagggaagcctggcacccactgcccaacgctgcccaacatacatggatgttgtcattgtcttggatggctccaacagcatctacccctggtctgaagttcagaccttccta

SEQ ID NO: 376407 - DNA, 120 bp, Artificial Sequence
  ENSG00000143127_5 (sequence is synthesized)
cgaagactggtagggaaactgtttattgacccagaacagatacaggtgggactggtacagtatggggagagccctgtacatgagtggtccctgggagatttccgaacgaaggaagaagtg

SEQ ID NO: 376408 - DNA, 120 bp, Artificial Sequence
  ENSG00000143127_6 (sequence is synthesized)
gtgagagcagcaaagaacctcagtcggcgggagggacgagaaacaaagactgcccaagcaataatggtggcctgcacagaagggttcagtcagtcccatgggggccgacccgaggctgcc

SEQ ID NO: 376409 - DNA, 120 bp, Artificial Sequence
  ENSG00000143127_7 (sequence is synthesized)
aggctactggtggttgtcactgatggagagtcccatgatggagaggagcttcctgcagcactaaaggcctgtgaggctggaagagtgacacgctatgggattgcagtccttggtcactac

SEQ ID NO: 376410 - DNA, 120 bp, Artificial Sequence
  ENSG00000143127_8 (sequence is synthesized)
ctccggcggcagcgagatcccagctctttcctgagagaaattagaactattgccagtgatccagatgagcgattcttcttcaatgtcacagatgaggctgctctgactgacattgtggat

SEQ ID NO: 376411 - DNA, 120 bp, Artificial Sequence
  ENSG00000143127_9 (sequence is synthesized)
gcactaggagatcggatttttggccttgaagggtcccatgcagaaaacgaaagctcctttgggctggaaatgtctcagattggtttctccactcatcggctaaaggatgggattcttttt

SEQ ID NO: 376412 - DNA, 120 bp, Artificial Sequence
  ENSG00000143127_10 (sequence is synthesized)
gggatggtgggggcctatgactggggaggctctgtgctatggcttgaaggaggccaccgccttttccccccacgaatggcactggaagacgagttcccccctgcattgcagaaccatgca

SEQ ID NO: 376413 - DNA, 120 bp, Artificial Sequence
  ENSG00000143127_11 (sequence is synthesized)
gcctacctgggttactctgtttcttccatgcttttgcggggtggacgccgcctgtttctctctggggctcctcgatttagacatcgaggaaaagtcatcgccttccagcttaagaaagat

SEQ ID NO: 376414 - DNA, 120 bp, Artificial Sequence
  ENSG00000143127_12 (sequence is synthesized)
ggggctgtgagggttgcccagagcctccagggggagcagattggttcatactttggcagtgagctctgcccattggatacagatagggatggaacaactgatgtcttacttgtggctgcc

SEQ ID NO: 376415 - DNA, 120 bp, Artificial Sequence
  ENSG00000143127_13 (sequence is synthesized)
cccatgttcctgggaccccagaacaaggaaacaggacgtgtttatgtgtatctggtaggccagcagtccttgctgaccctccaaggaacacttcagccagaacccccccaggatgctcgg

SEQ ID NO: 376416 - DNA, 120 bp, Artificial Sequence
  ENSG00000143127_14 (sequence is synthesized)
tttggctttgccatgggagctcttcctgatctgaaccaagatggttttgctgatgtggctgtgggggcgcctctggaagatgggcaccagggagcactgtacctgtaccatggaacccag

SEQ ID NO: 376417 - DNA, 120 bp, Artificial Sequence
  ENSG00000143127_15 (sequence is synthesized)
agtggagtcaggccccatcctgcccagaggattgctgctgcctccatgccacatgccctcagctactttggccgaagtgtggatggtcggctagatctggatggagatgatctggtcgat

SEQ ID NO: 376418 - DNA, 120 bp, Artificial Sequence
  ENSG00000143127_16 (sequence is synthesized)
gtggctgtgggtgcccagggggcagccatcctgctcagctcccggcccattgtccatctgaccccatcactggaggtgaccccacaggccatcagtgtggttcagagggactgtaggcgg

SEQ ID NO: 376419 - DNA, 120 bp, Artificial Sequence
  ENSG00000143127_17 (sequence is synthesized)
cgaggccaagaggcagtctgtctgactgcagccctttgcttccaagtgacctcccgtactcctggtcgctgggatcaccaattctacatgaggttcaccgcatcactggatgaatggact

SEQ ID NO: 376420 - DNA, 120 bp, Artificial Sequence
  ENSG00000143127_18 (sequence is synthesized)
gctggggcacgtgcagcatttgatggctctggccagaggttgtcccctcggaggctccggctcagtgtggggaatgtcacttgtgagcagctacacttccatgtgctggatacatcagat

SEQ ID NO: 376421 - DNA, 120 bp, Artificial Sequence
  ENSG00000143127_19 (sequence is synthesized)
tacctccggccagtggccttgactgtgacctttgccttggacaatactacaaagccagggcctgtgctgaatgagggctcacccacctctatacaaaagctggtccccttctcaaaggat

SEQ ID NO: 376422 - DNA, 120 bp, Artificial Sequence
  ENSG00000143127_20 (sequence is synthesized)
tgtggccctgacaatgaatgtgtcacagacctggtgcttcaagtgaatatggacatcagaggctccaggaaggccccatttgtggttcgaggtggccggcggaaagtgctggtatctaca

SEQ ID NO: 376423 - DNA, 120 bp, Artificial Sequence
  ENSG00000143127_21 (sequence is synthesized)
agagagagcccaataaaggtggaatgtgccgccccttctgctcatgcccggctctgcagtgtggggcatcctgtcttccagactggagccaaggtgacctttctgctagagtttgagttt

SEQ ID NO: 376424 - DNA, 120 bp, Artificial Sequence
  ENSG00000143127_22 (sequence is synthesized)
agctgctcctctctcctgagccaggtcttcgtgaagctgactgccagcagtgacagcctggagagaaatgggacccttcaagataacacagcccagacctcagcctacatccaatatgag

SEQ ID NO: 376425 - DNA, 120 bp, Artificial Sequence
  ENSG00000143127_23 (sequence is synthesized)
ccccacctcctgttctctagtgagtctaccctgcaccgctatgaggttcacccatatgggaccctcccagtgggtcctggcccagaattcaaaaccactctcagggttcagaacctaggc

SEQ ID NO: 376426 - DNA, 120 bp, Artificial Sequence
  ENSG00000143127_24 (sequence is synthesized)
tgctatgtggtcagtggcctcatcatctcagccctccttccagctgtggcccatgggggcaattacttcctatcactgtctcaagtcatcactaacaatgcaagctgcatagtgcagaac

SEQ ID NO: 376427 - DNA, 120 bp, Artificial Sequence
  ENSG00000143127_25 (sequence is synthesized)
ctgactgaacccccaggcccacctgtgcatccagaggagcttcaacacacaaacagactgaatgggagcaatactcagtgtcaggtggtgaggtgccaccttgggcagctggcaaagggg

SEQ ID NO: 376428 - DNA, 120 bp, Artificial Sequence
  ENSG00000143127_26 (sequence is synthesized)
actgaggtctctgttggactattgaggctggttcacaatgaatttttccgaagagccaagttcaagtccctgacggtggtcagcacctttgagctgggaaccgaagagggcagtgtccta

SEQ ID NO: 376429 - DNA, 120 bp, Artificial Sequence
  ENSG00000143127_27 (sequence is synthesized)
cagctgactgaagcctcccgttggagtgagagcctcttggaggtggttcagacccggcctatcctcatctccctgtggatcctcataggcagtgtcctgggagggttgctcctgcttgct

SEQ ID NO: 376430 - DNA, 120 bp, Artificial Sequence
  ENSG00000143127_28 (sequence is synthesized)
ctccttgtcttctgcctgtggaagcttggcttctttgcccataagaaaatccctgaggaagaaaaaagagaagagaagttggagcaatgaatgtagaataagggtctagaaagtcctccc

SEQ ID NO: 376431 - DNA, 120 bp, Artificial Sequence
  ENSG00000143127_29 (sequence is synthesized)
tggcagcttcttcaagagacttgcataaaagcagaggtttgggggctcagatgggacaagaagccgcctctggactatctccccagaccagcagcctgacttgacttttgagtcctaggg

SEQ ID NO: 376432 - DNA, 120 bp, Artificial Sequence
  ENSG00000143127_30 (sequence is synthesized)
atgctgctggctagagatgaggctttacctcagacaagaagagctggcaccaaaactagccatgctcccaccctctgcttccctcctcctcgtgatcctggttccatagccaacactggg

SEQ ID NO: 376433 - DNA, 120 bp, Artificial Sequence
  ENSG00000143127_31 (sequence is synthesized)
gcttttgtttggggtccttttatccccaggaatcaataatttttttgcctaggtgcctgactcctttcagattccctctttatcttccctcacagtttggaaaggatgagggttatcttc

SEQ ID NO: 376434 - DNA, 120 bp, Artificial Sequence
  ENSG00000143127_32 (sequence is synthesized)
ctcgattcttccaccctctcactttcctgcctgttccccactccacaggagggagctgacgttggcttgaaaggagtaaagtcaacatctgctgctttcctgtggactctggtgattcat

SEQ ID NO: 376435 - DNA, 120 bp, Artificial Sequence
  ENSG00000143127_33 (sequence is synthesized)
agagccggatggggagagtcaacaggaaaaaaggagggaggaggaaaagccacaagagacattctgtacaattccaaggaacagagaagcctttagacaggcaactgccatcccccctga

SEQ ID NO: 376436 - DNA, 120 bp, Artificial Sequence
  ENSG00000143127_34 (sequence is synthesized)
aacctgagacctgtagtgcactcgaccgccctcaggtgttggtgaaacagagctgcccccaggctcgctgggcataggcttcctgattccaagccttttctgggagcaaagccagggcct

SEQ ID NO: 376437 - DNA, 120 bp, Artificial Sequence
  ENSG00000143127_35 (sequence is synthesized)
ggtgcctgattttctgaagccaggagccctcaggtggctggagctggaatagcagggaggactgggtgtacctaggcagtattttctctacttctctcaagtcttatactcactcttgag

SEQ ID NO: 376438 - DNA, 120 bp, Artificial Sequence
  ENSG00000143127_36 (sequence is synthesized)
ccctccttggggcctgcttagaaagcagacaggagagagagtactgctacttgatgatgggaaatgctttcactttaccagctttgggaagcagcagccccatgggatctaaaagtgtgg

SEQ ID NO: 376439 - DNA, 120 bp, Artificial Sequence
  ENSG00000143127_37 (sequence is synthesized)
agtctgcattaagaaacctacatgggtggcatggggctctggggagcaagcccttacttgctcagcactggttatgtagcacaaatagctcctaggaaaatgtttctggggcaaccctag

SEQ ID NO: 376440 - DNA, 120 bp, Artificial Sequence
  ENSG00000143127_38 (sequence is synthesized)
aaccctggtcatattttgcagggtttctctggtggaatcagtttgccagcccttgcttgatgcttactggaaatctccaggttaatttctatctctgatccctccccaacccactccata

SEQ ID NO: 376441 - DNA, 120 bp, Artificial Sequence
  ENSG00000143127_39 (sequence is synthesized)
tttgggtcatggacagtaaaggcagttggattctcatagacaactgggtaacttatatttctttgtaatcaagacttgagatatcgaagtcagttattggtctccagagtgcagctctgg

SEQ ID NO: 376442 - DNA, 120 bp, Artificial Sequence
  ENSG00000143127_40 (sequence is synthesized)
gagccttttgaagaatcagcactcattaagagctgagaagagagaagacctgattgggtggttgactagcagtcacagaacctgtcctcccaggctgttcctgaggcctgaccacagtat

SEQ ID NO: 376443 - DNA, 120 bp, Artificial Sequence
  ENSG00000143127_41 (sequence is synthesized)
ttattttggcatgtctctggccttctgcagaggcccaccctcatgggcattgtctctgtttcccagtggggtggacagtatatcagatggtcagaacaaataaagttcagtgtcaaatga

SEQ ID NO: 376444 - DNA, 120 bp, Artificial Sequence
  ENSG00000143127_42 (sequence is synthesized)
tggtggcagtgtctctgaaggtccataaaagaaaaaagagaagtgtggtaagggaaaatggtctgtgtggaggggtcaaggagttaaaaaccctagaaagcaaaaggtaggtaatgtcag

SEQ ID NO: 376445 - DNA, 120 bp, Artificial Sequence
  ENSG00000143127_43 (sequence is synthesized)
gcagctctgtcttcagttctgggatatgtgcccgtgtggatgcttcattccagcctcagggaagcctggcacccactgcccaacgtgagccagaggaaggctgagtacttggttcccaga

SEQ ID NO: 376446 - DNA, 120 bp, Artificial Sequence
  ENSG00000143127_44 (sequence is synthesized)
aggagatactgggtgggaaaaagatggggcaaagcggtatgatgcctggcaaagggcctgcatggctatcctcattgctacctaatgtgcttgcaaaagctccatgtttcctaacagatt

SEQ ID NO: 376447 - DNA, 66 bp, Artificial Sequence
  ENSG00000143127_45 (sequence is synthesized)
cctaatgtgcttgcaaaagctccatgtttcctaacagattcagactcctggccaggtgtggtggcc

SEQ ID NO: 376448 - DNA, 88 bp, Artificial Sequence
  ENSG00000143127_46 (sequence is synthesized)
cgctagtgcatgcctgtaatctcatctactcgggaggctaagacaggagactctcacttcaacccaggaggtggaggttgcggtgagc

SEQ ID NO: 376449 - DNA, 83 bp, Artificial Sequence
  ENSG00000143127_47 (sequence is synthesized)
ggtgacagagtatcagactccttatcaggagtccatgatctggcctggcacagtaactcatgcctgtaatcccaacattttgg

SEQ ID NO: 376450 - DNA, 85 bp, Artificial Sequence
  ENSG00000143127_48 (sequence is synthesized)
tccatgatctggcctggcacagtaacgcaggaggattgcttgaggtctggaggtttgagaccagcctgggcaacatagagagacc

SEQ ID NO: 376451 - DNA, 120 bp, Artificial Sequence
  ENSG00000143147_0 (sequence is synthesized)
gttttgtgatgactgctccctggccttttggttccgagggagtgcagggcagcagtgtgaagacctgtttacgtccactccccactccccggggctggcttcgggacgaattcactgtgg

SEQ ID NO: 376452 - DNA, 120 bp, Artificial Sequence
  ENSG00000143147_1 (sequence is synthesized)
tattaacagagcccgggacagagcctggcagaaggcagatggatgctcgtgcccgtcggctggatgaatgaaaggtgagcagcaaaggcgataccaggatcgtccacggcgggactggag

SEQ ID NO: 376453 - DNA, 120 bp, Artificial Sequence
  ENSG00000143147_2 (sequence is synthesized)
gaggagaatgggactgtgcggagcctgcgggaagaatctgaaagtgtctgtgtgatggagagagacatggaaaaggcgacgtcccagcggctggaactggggcggaggaacgggaacagg

SEQ ID NO: 376454 - DNA, 120 bp, Artificial Sequence
  ENSG00000143147_3 (sequence is synthesized)
gaaggcctgagttaggcaccacaaaggttttcaggagaaaagtggggcgagccgagaggagtctcaccctgttgcttaggcagatggcgcgatctcggctcctgggttcaagcaattctc

SEQ ID NO: 376455 - DNA, 120 bp, Artificial Sequence
  ENSG00000143147_4 (sequence is synthesized)
ctgcctcagcctcctgaatagccgggattacagtcgtccagcatgctctgcccaccccacgccgaggtgcactgaccatgagcctcaactcctccctcagctgcaggaaggagctgagta

SEQ ID NO: 376456 - DNA, 120 bp, Artificial Sequence
  ENSG00000143147_5 (sequence is synthesized)
atctcactgaggaggagggtggcgaagggggcgtcatcatcacccagttcatcgccatcattgtcatcaccatttttgtctgcctgggaaacctggtcatcgtggtcaccttgtacaaga

SEQ ID NO: 376457 - DNA, 120 bp, Artificial Sequence
  ENSG00000143147_6 (sequence is synthesized)
agtcctacctcctcaccctcagcaacaagttcgtcttcagcctgactctgtccaacttcctgctgtccgtgttggtgctgccttttgtggtgacgagctccatccgcagggaatggatct

SEQ ID NO: 376458 - DNA, 120 bp, Artificial Sequence
  ENSG00000143147_7 (sequence is synthesized)
ttggtgtagtgtggtgcaacttctctgccctcctctacctgctgatcagctctgccagcatgctaaccctcggggtcattgccatcgaccgctactatgctgtcctgtaccccatggtgt

SEQ ID NO: 376459 - DNA, 120 bp, Artificial Sequence
  ENSG00000143147_8 (sequence is synthesized)
accccatgaagatcacagggaaccgggctgtgatggcacttgtctacatctggcttcactcgctcatcggctgcctgccacccctgtttggttggtcatccgtggagtttgacgagttca

SEQ ID NO: 376460 - DNA, 120 bp, Artificial Sequence
  ENSG00000143147_9 (sequence is synthesized)
aatggatgtgtgtggctgcttggcaccgggagcctggctacacggccttctggcagatctggtgtgccctcttcccctttctggtcatgctggtgtgctatggcttcatcttccgcgtgg

SEQ ID NO: 376461 - DNA, 120 bp, Artificial Sequence
  ENSG00000143147_10 (sequence is synthesized)
ccagggtcaaggcacgcaaggtgcactgtggcacagtcgtcatcgtggaggaggatgctcagaggaccgggaggaagaactccagcacctccacctcctcttcaggcagcaggaggaatg

SEQ ID NO: 376462 - DNA, 120 bp, Artificial Sequence
  ENSG00000143147_11 (sequence is synthesized)
cctttcagggtgtggtctactcggccaaccagtgcaaagccctcatcaccatcctggtggtcctcggtgccttcatggtcacctggggcccctacatggttgtcatcgcctctgaggccc

SEQ ID NO: 376463 - DNA, 120 bp, Artificial Sequence
  ENSG00000143147_12 (sequence is synthesized)
tctgggggaaaagctccgtctccccgagcctggagacttgggccacatggctgtcctttgccagcgctgtctgccaccccctgatctatggactctggaacaagacagttcgcaaagaac

SEQ ID NO: 376464 - DNA, 120 bp, Artificial Sequence
  ENSG00000143147_13 (sequence is synthesized)
tactgggcatgtgctttggggaccggtattatcgggaaccatttgtgcaacgacagaggacttccaggctcttcagcatttccaacaggatcacagacctgggcctgtccccacacctca

SEQ ID NO: 376465 - DNA, 120 bp, Artificial Sequence
  ENSG00000143147_14 (sequence is synthesized)
ctgcgctcatggcaggtggacagcccctggggcacagcagcagcacgggggacactggcttcagctgctcccaggactcagggacagatatgatgctgcttgaggactacacgtctgatg

SEQ ID NO: 376466 - DNA, 120 bp, Artificial Sequence
  ENSG00000143147_15 (sequence is synthesized)
acaaccctccctctcactgcacttgcccacccaagagaaggagctcggtgacatttgaggatgaagtggaacaaatcaaagaagctgccaagaactcgattcttcatgtgaaagctgaag

SEQ ID NO: 376467 - DNA, 120 bp, Artificial Sequence
  ENSG00000143147_16 (sequence is synthesized)
tacacaagtccttggacagttacgcagcaagcttggccaaagccattgaggccgaagccaaaatcaacttatttggggaggaggctttgccaggggtcttggttacagcacggactgtcc

SEQ ID NO: 376468 - DNA, 120 bp, Artificial Sequence
  ENSG00000143147_17 (sequence is synthesized)
cggggggcggcttcgggggccgccgaggcagcagaactcttgtgagccagaggctgcagttgcagagcatcgaagaaggagatgttttagctgccgagcagagatgagggcctcagggtg

SEQ ID NO: 376469 - DNA, 120 bp, Artificial Sequence
  ENSG00000143147_18 (sequence is synthesized)
ccgtggggctgcagcctgagaggctggcccggggaggagttcccatcaccgcctgtgccgcggccttgggagcatgtcactgtgtacagctggccacacacagggaaggagcagcatctg

SEQ ID NO: 376470 - DNA, 120 bp, Artificial Sequence
  ENSG00000143147_19 (sequence is synthesized)
gtatgcagccaccaggacaaggactgaaaataatgtctacagtccacagcttcagcatttccagagaccacatgtgagcttcttttaggtcccagtgatgggaccagaagcatctaaagc

SEQ ID NO: 376471 - DNA, 120 bp, Artificial Sequence
  ENSG00000143147_20 (sequence is synthesized)
gtaggtgcgtgcccgggactctgccgatgcgggccgcgccccctggggccaagagactccacgtcccgctcagggcaaagggtgtggggagaagcggtcacgcccctcggctggaatccg

SEQ ID NO: 376472 - DNA, 120 bp, Artificial Sequence
  ENSG00000143147_21 (sequence is synthesized)
gctttttgggaggtggggcatgggaggaccagagacgaagggcttggaaggagacccccacatgcatcatttcctcctcttcacagtgtgctgggagtccagccgtgcactgtgccagat

SEQ ID NO: 376473 - DNA, 120 bp, Artificial Sequence
  ENSG00000143147_22 (sequence is synthesized)
gcctcaggaggagaaccctccccagtgtactgtgaaggatgacacagcacttcttcctaatgacacgcgaccgtcctggtgcctctacatggttgatgcgggcagtgtgggaccctcagt

SEQ ID NO: 376474 - DNA, 120 bp, Artificial Sequence
  ENSG00000143147_23 (sequence is synthesized)
tctaggactggtccgcagagaaagcacccaggagcagagcgcttcggagcggtcctcagtggcgccacctgctggtgctaatagggacagccacaggcctcttgcagactggcccaccct

SEQ ID NO: 376475 - DNA, 120 bp, Artificial Sequence
  ENSG00000143147_24 (sequence is synthesized)
gcctacttccctactgacaagttctttggtatttcaaaagggagaaaccactataaaagacaagaggaagggcaggtactaggtgtttcatttccagaattaaaaaaaaaatccatttaa

SEQ ID NO: 376476 - DNA, 120 bp, Artificial Sequence
  ENSG00000143147_25 (sequence is synthesized)
ccaggaaatagagaaactgttattatggaagggaatttgttcacatgggaaagcctcattaaatagattctatgtgtgatgtttgagtgaccaatgaaaatagctggcctcagttctgca

SEQ ID NO: 376477 - DNA, 120 bp, Artificial Sequence
  ENSG00000143147_26 (sequence is synthesized)
tggcacactcccaagagcaacagttactattatcacaagcctggtataaataagatagaagcagccctggacccacagccagcaacctgggttattggcccagctctgtctttgtgtgca

SEQ ID NO: 376478 - DNA, 120 bp, Artificial Sequence
  ENSG00000143147_27 (sequence is synthesized)
catgtcatttggacatcttgtcacctttctaggtcctctgtaaagtgggaaaacagagtggagttggattgaatggtctccaagatcatttccagctctgacctttggtgttctcaggat

SEQ ID NO: 376479 - DNA, 120 bp, Artificial Sequence
  ENSG00000143147_28 (sequence is synthesized)
ttgtaaagcagagataggtaaaacacaaaagcagacccacggaccgacctttgtataactttggagtgtggttgctcatgcacatgtgaagtgcaggcagatcaaggttctgtggctttg

SEQ ID NO: 376480 - DNA, 120 bp, Artificial Sequence
  ENSG00000143147_29 (sequence is synthesized)
tctgccctgtccattagagcacaatctggatagaatgccagccaccaagatgcatgaggggcagggtcaccatctcagaaggggaagcacaggaatgtgattgggatggttaaacctctc

SEQ ID NO: 376481 - DNA, 120 bp, Artificial Sequence
  ENSG00000143147_30 (sequence is synthesized)
ttctcctccctttgtgctggaacagcagttgaagtttggtcctggagtaattgctgtgatgacttgggaagccactgatctcctcttgcgtctgcccttggcctgcatcatgactaaata

SEQ ID NO: 376482 - DNA, 120 bp, Artificial Sequence
  ENSG00000143147_31 (sequence is synthesized)
agttcaggacttctctgctttggttggcagaaggtagattccaaggagatcttgctggttgctgagaggcagctgttctagaaagtgaattacccttgtggttttttctttggggcccag

SEQ ID NO: 376483 - DNA, 120 bp, Artificial Sequence
  ENSG00000143147_32 (sequence is synthesized)
ctagctcctggtgaggttgtgtttttgtgttgtgtggcagaaaccaatggttagctggtcccctggtctgcagtttgtaaaagacctttcatgaggcctggagtcttgctacctgtggtg

SEQ ID NO: 376484 - DNA, 120 bp, Artificial Sequence
  ENSG00000143147_33 (sequence is synthesized)
attgaactcaactattctgggtcacctggatgccaggcgctggcctagcttctggatgggagtgggaaggagcagagggcaggttcacctgtgcaggtcagacactctgcttccatcact

SEQ ID NO: 376485 - DNA, 120 bp, Artificial Sequence
  ENSG00000143147_34 (sequence is synthesized)
ggatggcattcctacgtctgcgtgtggttcacgttttctatatatattccctgtatatatttttttctagcacttgtctactttctgaagggaccatattcctgatcaactagtgtgcac

SEQ ID NO: 376486 - DNA, 120 bp, Artificial Sequence
  ENSG00000143147_35 (sequence is synthesized)
ggaacagggcagagagacctttatctctaggatgggttgctggttaggtgtaggcattcttgagtgcagcagcttggctttgaaacgcaagggttggagaatgttcccctgactgtacta

SEQ ID NO: 376487 - DNA, 120 bp, Artificial Sequence
  ENSG00000143147_36 (sequence is synthesized)
gactgggctctagggaaagaatcctgagacagccccccactcccccactgaccccacactagctgggctattatagaatttaatctaaatctagaaatactgcatttcacaaaatgattc

SEQ ID NO: 376488 - DNA, 120 bp, Artificial Sequence
  ENSG00000143147_37 (sequence is synthesized)
actgtgtttccctttttttactgaggtccaattcatttagtcgtctaccagacactgcacatccagtgtatgcgaagcaccaggctaggctctgtaggcaataccactaaagtgtgcact

SEQ ID NO: 376489 - DNA, 120 bp, Artificial Sequence
  ENSG00000143147_38 (sequence is synthesized)
ctgatttagggagcaggacctgtggataccgattctaataactagcaaagtcaagtcgtggttatagaaagaagtgtggcttcagagggaggtgggtatttccaaatatggagttaggga

SEQ ID NO: 376490 - DNA, 120 bp, Artificial Sequence
  ENSG00000143147_39 (sequence is synthesized)
tggctccatgaggtaagtgacagtttgagctaagtcttgaaggatgcttggcagctagaaccatattttccatattcaggaattcaaatttgcctttattcagctagagagaaagagaga

SEQ ID NO: 376491 - DNA, 120 bp, Artificial Sequence
  ENSG00000143147_40 (sequence is synthesized)
agggggtgtgggggagaaggaaaagagaattttcacacattttgaagttcctgagagcatttctgaggatatctgccgttagtgcagaaggtcgaaaccccaagtgcccccactaaaccc

SEQ ID NO: 376492 - DNA, 120 bp, Artificial Sequence
  ENSG00000143147_41 (sequence is synthesized)
aggctctttagctgtaaactgccatgcagtggcaggcctgcagccttcctgatgggaccacatggacagtggcacatgggacatttggctactcgttagcttaaacaactcagtcctgtg

SEQ ID NO: 376493 - DNA, 120 bp, Artificial Sequence
  ENSG00000143147_42 (sequence is synthesized)
tcttctggttttgacaagaccacatttaggactgctgcccacctctgcctctttcattgagatttccgccttattgggtccctgtgctatgccacagataccaggtttggggttgttttg

SEQ ID NO: 376494 - DNA, 120 bp, Artificial Sequence
  ENSG00000143147_43 (sequence is synthesized)
acccagaaggcattgggagtcccacattacagagcacacacacagctcaacacagccatttccctggccagaggcaccaagactgaagttcaggcccttagacactaggtggcagcggtg

SEQ ID NO: 376495 - DNA, 120 bp, Artificial Sequence
  ENSG00000143147_44 (sequence is synthesized)
tggctgtgcagagccaaggatgaacctgagagcttgtttgcctctggctgggcactcttgttttgaattcctttgcccttatcgtgtagtccacggccttggtgaccaaggaccacctgg

SEQ ID NO: 376496 - DNA, 120 bp, Artificial Sequence
  ENSG00000143147_45 (sequence is synthesized)
ctagcctgcttacatgcatgaccccatccaggttcacaggtattgccactgagtgatcttaggtagatcactgctcctggagaagcagagttgaggagtgtaagacaagggccatctagt

SEQ ID NO: 376497 - DNA, 120 bp, Artificial Sequence
  ENSG00000143147_46 (sequence is synthesized)
gccaatgttccttgattcttatttgaggagctactatgtggtctttctgtaaacaagtgaacaaccaatgagactaaatatttgcaatagataggctaaggaatttgggttgagacagga

SEQ ID NO: 376498 - DNA, 120 bp, Artificial Sequence
  ENSG00000143147_47 (sequence is synthesized)
gacggaggaaaaatgctttgatacaatgacagatggttagtctcttcagatttccctgaatattttccatcccgacaatatgcctcttagatacttgcagattagacatgtctctggatg

SEQ ID NO: 376499 - DNA, 120 bp, Artificial Sequence
  ENSG00000143147_48 (sequence is synthesized)
gaccacaagatacattcacaacatgtgttcagccttgagccctggctgtgtcctgtctggaaggaactgaggatgatgtggctataaagaggaggcagtgagctggcatgtgactgcctt

SEQ ID NO: 376500 - DNA, 120 bp, Artificial Sequence
  ENSG00000143147_49 (sequence is synthesized)
ctgtgggcctgacctgtttgacatttgagggcctatgatgtgctaggtgctgtgttaggtacttccaaatgctttatctcattttaccccagtgcaagtgtgatatagtgaggatggtga

SEQ ID NO: 376501 - DNA, 120 bp, Artificial Sequence
  ENSG00000143147_50 (sequence is synthesized)
agacgtgggtatggttaagtcatgagttcagatcccgtgcttccaattacatgggtgttttcaaacaagtcactacttatgagtttcctcatctgtgaagggaagtttagtcatctgttt

SEQ ID NO: 376502 - DNA, 120 bp, Artificial Sequence
  ENSG00000143147_51 (sequence is synthesized)
caatgtggagacacacaggattgagggagtcctccgtcacagggtgactgtctggattctatgaggaaatacttggaaagcatgcagcacaatgcctggggtgcagctgaagctgagcca

SEQ ID NO: 376503 - DNA, 120 bp, Artificial Sequence
  ENSG00000143147_52 (sequence is synthesized)
ctggtgtttcttcacagtatctctgtggggagggtgtattattcctttttatagggatctctataatgaagtgagaatcttgaaaatataagtgttatcctagatgggaggtgttaaagg

SEQ ID NO: 376504 - DNA, 120 bp, Artificial Sequence
  ENSG00000143147_53 (sequence is synthesized)
tttttgccttgggaattttgtcatatttgttgcacagcaaggaaggactttcagaaaagcagggatgtggtgaggaagagcaggcaatagagagcagggaggaaaggctaagtagcatct

SEQ ID NO: 376505 - DNA, 120 bp, Artificial Sequence
  ENSG00000143147_54 (sequence is synthesized)
agagagcagggaggaaaggctaagtagcatctggaacttgagaagtctaagggagccaaaatgagattttctattaaaaatgtctatcctcagccgggcgtggtagctcacgcctgtaat

SEQ ID NO: 376506 - DNA, 63 bp, Artificial Sequence
  ENSG00000143147_55 (sequence is synthesized)
cctaaaaaaagaaaaaaaagaaaaagtctatcctctatgctactggcctgtttgtacaaagat

SEQ ID NO: 376507 - DNA, 120 bp, Artificial Sequence
  ENSG00000143147_56 (sequence is synthesized)
aagtctatcctctatgctactggcctgtttgtacaaagataaaatcattctaatttgtccggaatgactatcaaagatgatcaaatccccagggcctggtgtaacgttccaaatcatagc

SEQ ID NO: 376508 - DNA, 120 bp, Artificial Sequence
  ENSG00000143147_57 (sequence is synthesized)
acaaatacagcttgaccttccttacagtccagaaaggacattctccctgagaaatgcccttggttgctgaggacagctctgtcctgtagtgacagagtgactgcctggctgtggctcttg

SEQ ID NO: 376509 - DNA, 120 bp, Artificial Sequence
  ENSG00000143147_58 (sequence is synthesized)
ggttcacagaatccctaatcctccaagcccctaagaggcagggcagggatgctacccacaatatatgcagaaccccagatggagcctgtgggagagagaggaaattaccgtcttcactgt

SEQ ID NO: 376510 - DNA, 120 bp, Artificial Sequence
  ENSG00000143147_59 (sequence is synthesized)
aggcaaaggagaatggctgtgattagccatatatgcctataagaaggagcagagccatactgtccttgtgggttgggagaggggacacagaatccagggcaattgtctgaggtctcaaag

SEQ ID NO: 376511 - DNA, 120 bp, Artificial Sequence
  ENSG00000143147_60 (sequence is synthesized)
taagttaagccagagtcaaagccaaactccaagtcttggccaaggggatgagaaaagcaaggagctagtcttataggtcaaggaagatgaggtatagttaagagtcatcagtatcacaga

SEQ ID NO: 376512 - DNA, 120 bp, Artificial Sequence
  ENSG00000143147_61 (sequence is synthesized)
acaggccagcagggctttattaggtatgtagaactattataaaccaaggatcttgggagatattaatatctgctggccagacctaaaaaaaactgaaggcccaaggaaagtgactggact

SEQ ID NO: 376513 - DNA, 120 bp, Artificial Sequence
  ENSG00000143147_62 (sequence is synthesized)
cactggaaagtatctaacaaatactttggattccaaagtatttccaataccttgaagattcctttgaaaacatcaaagcacaaactcaaatctgcacaagattacaaaagcacaattttg

SEQ ID NO: 376514 - DNA, 120 bp, Artificial Sequence
  ENSG00000143147_63 (sequence is synthesized)
gtgttatttttagaatgcaatacacaaagctatgttcatttctctcagcaagcattttcctgggtagtagtaatagcttaggaatcaaatgccacttttgtttttccttttttcactagt

SEQ ID NO: 376515 - DNA, 120 bp, Artificial Sequence
  ENSG00000143147_64 (sequence is synthesized)
ttgaaataccacaaatcacaggtgagtcagtcctcccagaggaaaagacagtcctagggagaatcacaggcctggcagacaagaccacactgagagcagtagaaggaacctgcatgctta

SEQ ID NO: 376516 - DNA, 120 bp, Artificial Sequence
  ENSG00000143147_65 (sequence is synthesized)
agggacagaggactgtgttgtgttctcataatagaccgctggatgaagaagtggttaaaaaccaaccctcgaaaaacaaaaatccctggctaatcctgaaatatatttaacttgaagtct

SEQ ID NO: 376517 - DNA, 120 bp, Artificial Sequence
  ENSG00000143147_66 (sequence is synthesized)
ttggatgatttttttaaggttaaaaaaaagtttaggattattataaatcaatatttataaataagcaacaatgtatttggaatttttgtttacctgattaaatatgtttttggtatgtgt

SEQ ID NO: 376518 - DNA, 120 bp, Artificial Sequence
  ENSG00000143147_67 (sequence is synthesized)
gaaaagtggggcgagccgagaggcctggtgcactgtgcgtcctctgagaggtgaaggagcactgtgtggtcagagggctgcgagctctctgtttgggttccgaggaagacagaatgggct

SEQ ID NO: 376519 - DNA, 120 bp, Artificial Sequence
  ENSG00000143147_68 (sequence is synthesized)
cccgggcggagagggcggtccggatggagccaggctaaactcattgtgcgaggctgagggctcagggcgcgggccgggaagggtccccgcccccacggcgctccctttctccccgcgccc

SEQ ID NO: 376520 - DNA, 120 bp, Artificial Sequence
  ENSG00000143147_69 (sequence is synthesized)
ctctcggaggtcagggctgtcctccgcccgcactgcgccttgctttggagagctggagctctttgtgggaagatgttgggggcgcgcccctcccctgcggcctggggcttctgagaggcc

SEQ ID NO: 376521 - DNA, 120 bp, Artificial Sequence
  ENSG00000143147_70 (sequence is synthesized)
gtgaggaccaggtgagcagccttctcccagccgggactcagggcgctgtctccccgagcctgggcgggcggcgggtggcgcgcccagaagtggcccggcgccgccggatgggcggctctg

SEQ ID NO: 376522 - DNA, 120 bp, Artificial Sequence
  ENSG00000143147_71 (sequence is synthesized)
tcagatctgcgggagggagattcggctggttcttggaaaggggagaactcgaccagccctcggcgccttctgggccaagcttaacccccgtgcaacctttggacaaaggcatatgggatg

SEQ ID NO: 376523 - DNA, 120 bp, Artificial Sequence
  ENSG00000143147_72 (sequence is synthesized)
tgctcttgggagcctttgaaaaaccacctctgacttgacctgggtttcctgttccccatgagtgctccagggctgcgcctaagcctgtgtcatggaactcaggggtgagccttggggttg

SEQ ID NO: 376524 - DNA, 120 bp, Artificial Sequence
  ENSG00000143147_73 (sequence is synthesized)
gcaccgggaccaggccatgacctctcttagtcatggagaattttccttggaaaattccttatctggcaacccagagggccccgcaccacacggagtcatatatgaagcactgatcacact

SEQ ID NO: 376525 - DNA, 120 bp, Artificial Sequence
  ENSG00000143147_74 (sequence is synthesized)
gtgccctctaggcctgagtccctcatgtgatttaaggaaagtctctgttactccccagtctgcttccctgttctcagacaactaaagggatccagaggcactgcaacattcattcattca

SEQ ID NO: 376526 - DNA, 120 bp, Artificial Sequence
  ENSG00000143147_75 (sequence is synthesized)
ttcattcattcagcagttatttgccacgttcctgccttggccggaccctgtgccagatgctgggggcacagtggtgaactgccattgttgtggaggcttcagttcataaaagattgaact

SEQ ID NO: 376527 - DNA, 120 bp, Artificial Sequence
  ENSG00000143147_76 (sequence is synthesized)
gtaaagtatataaagattgtaaagtatacaattctcattgaattgtatactttaaatgagtcagttacatggcatgtgaattacatctctataaaactggttttgaaagatgatgaatgt

SEQ ID NO: 376528 - DNA, 120 bp, Artificial Sequence
  ENSG00000143147_77 (sequence is synthesized)
gtcgagagctgtgaaaggggaagccctagtggagtgggagcccgtgggctgctataggtaggggagttagagagactgctctgagcatgcgatgtcgaaagctgaagcatacgtggaagg

SEQ ID NO: 376529 - DNA, 120 bp, Artificial Sequence
  ENSG00000143147_78 (sequence is synthesized)
tgccccggcgcaaggagtgaggggacagcactgtaggcagaagaaagagcatgggcttcggggcacacagatctggtgtgagtctcagccctgccctttgttcgctgtgtccttatcagg

SEQ ID NO: 376530 - DNA, 120 bp, Artificial Sequence
  ENSG00000143147_79 (sequence is synthesized)
aatgatggccctcaatttagcccctgctgtgtgcaagcactatgctagatgtttacatgtctcaactcaaaatccccacaactccgtgaggtagactgaatgatgaccccaggtttacag

SEQ ID NO: 376531 - DNA, 120 bp, Artificial Sequence
  ENSG00000143147_80 (sequence is synthesized)
acgtggaaagatactgaggcattaaataacctgccagtgatcctaggtctgtccgacccaagcctgtgtgtttaaccaccatattctacctcccaaaggactgtttcttctctatgtcgg

SEQ ID NO: 376532 - DNA, 120 bp, Artificial Sequence
  ENSG00000143147_81 (sequence is synthesized)
gtaatcacacctctgcgaggtgctctgaaacagcatctaaagagctccaggtttctctttcttccttattttctgagcttcaaggcctttatggattgaaagctggaagctaagaacggg

SEQ ID NO: 376533 - DNA, 120 bp, Artificial Sequence
  ENSG00000143147_82 (sequence is synthesized)
cccacctatctctagtaggacttccctgaccttctccctttatttccctgctttttaggggaaaatttgtcaattattttttgatccccaaagaactctacattttggagctttacatgt

SEQ ID NO: 376534 - DNA, 120 bp, Artificial Sequence
  ENSG00000143147_83 (sequence is synthesized)
ttatttagtacaacatattttaactgtggtgatagaaattcagactgtaggaagaatcactcagaatataaagttccttttagtaggaccctctcctctactcggcccttctccccactt

SEQ ID NO: 376535 - DNA, 120 bp, Artificial Sequence
  ENSG00000143147_84 (sequence is synthesized)
cccttccatgctgggccggcagatgccatgcttctggggtctggtcattgaggcagataaccccctacttcagataacttggctgcattttttgtgtggctgacgcagccccaccggctg

SEQ ID NO: 376536 - DNA, 120 bp, Artificial Sequence
  ENSG00000143147_85 (sequence is synthesized)
tctgcaaactccctgaaacaggatgacaggcgggtgtttcttgggcacgtgctgcggcgcagtcagctccacttgatgatgggtttggatgaacgggagaagaggggtggaaggggtgtt

SEQ ID NO: 376537 - DNA, 120 bp, Artificial Sequence
  ENSG00000143147_86 (sequence is synthesized)
aggtaacctgcgtgctttataagcctctcacctgtcgcgttttccctgtgttgcgtttcccccgtgtcgcgtttcccctgtgcaggctcaagagctggcggaggggcatttcccacggtg

SEQ ID NO: 376538 - DNA, 120 bp, Artificial Sequence
  ENSG00000143149_0 (sequence is synthesized)
ggatcctaggatgcttacatgcaatgatgaacccgaaaacacttgcaaagtgctacgcaaatattgatcacgaagaaggaagtcctcttcccgcctggagactgtgtggggtatggcggg

SEQ ID NO: 376539 - DNA, 120 bp, Artificial Sequence
  ENSG00000143149_1 (sequence is synthesized)
gtggtggggagaatgtggtgtcttgctccaccctcctggcgaggggagggcctggcctggaccgcagaggaatcgagtgactgcccctaaaatctcctagaaccgatcccgcggccccgc

SEQ ID NO: 376540 - DNA, 120 bp, Artificial Sequence
  ENSG00000143149_2 (sequence is synthesized)
ccctcccgcggccccgcccctcccgcggcccgtcagcctctgccgcggagctgcgtccgccactcatgtttctccgagcaggcctggccgcgctctccccgcttcttcgcagtcttcggc

SEQ ID NO: 376541 - DNA, 120 bp, Artificial Sequence
  ENSG00000143149_3 (sequence is synthesized)
cctctcctgtcgccgccatgagcactggcaccttcgtcgtgtcgcagccgctcaattaccgcggcggggcccgcgtggagccggcggacgcctccggtaccgagaaagctttcgagccag

SEQ ID NO: 376542 - DNA, 120 bp, Artificial Sequence
  ENSG00000143149_4 (sequence is synthesized)
caaccggccgagtgatagctactttcacatgttcaggagaaaaggaagtaaatttggctgttcaaaatgcaaaggctgcttttaaaatatggagtcaaaaatctggcatggagcgttgcc

SEQ ID NO: 376543 - DNA, 120 bp, Artificial Sequence
  ENSG00000143149_5 (sequence is synthesized)
gaatccttttggaggctgccaggataataagggaacgggaggatgaaattgctactatggagtgcatcaacaatggcaagtccatctttgaggcccgcttggacattgacatttcctggc

SEQ ID NO: 376544 - DNA, 120 bp, Artificial Sequence
  ENSG00000143149_6 (sequence is synthesized)
agtgcctggagtattatgcgggcttggctgcatccatggctggtgaacacatccagctcccaggtggatcgtttggttataccagaagagaaccacttggggtatgtgtgggaataggag

SEQ ID NO: 376545 - DNA, 120 bp, Artificial Sequence
  ENSG00000143149_7 (sequence is synthesized)
catggaactacccctttcagattgcctcttggaagtcggctccagcattagcctgtggtaatgccatggtctttaaaccttctccctttacacctgtttctgcattgctactggctgaaa

SEQ ID NO: 376546 - DNA, 120 bp, Artificial Sequence
  ENSG00000143149_8 (sequence is synthesized)
tctacagtgaggctggtgtacctcctgggctcttcaatgtggtgcagggaggggctgccacaggccagtttctgtgtcagcatcccgatgtggccaaagtctccttcactggaagtgtgc

SEQ ID NO: 376547 - DNA, 120 bp, Artificial Sequence
  ENSG00000143149_9 (sequence is synthesized)
ccactggcatgaagatcatggagatgtcagctaaaggaatcaaacctgttaccttggaacttggaggcaaatctccactcatcatcttctcagactgtgatatgaacaatgctgtaaagg

SEQ ID NO: 376548 - DNA, 120 bp, Artificial Sequence
  ENSG00000143149_10 (sequence is synthesized)
gggcgctgatggccaacttcctcacacaaggccaggtttgctgtaatggcacaagagtatttgtgcagaaagaaattcttgataaatttacagaggaagtggtgaaacagacccaaagga

SEQ ID NO: 376549 - DNA, 120 bp, Artificial Sequence
  ENSG00000143149_11 (sequence is synthesized)
ccacacctggagcgagtccttgggtttgtcaaagtggcaaaggagcagggtgctaaagtgttatgtggtggagatatatatgtacctgaagatcccaaattaaaggatggatattacatg

SEQ ID NO: 376550 - DNA, 120 bp, Artificial Sequence
  ENSG00000143149_12 (sequence is synthesized)
agaccttgtgtattaactaattgcagagacgacatgacctgtgtgaaggaagagatctttgggcctgttatgtccattttatcatttgacactgaagctgaggttctagaaagagccaat

SEQ ID NO: 376551 - DNA, 120 bp, Artificial Sequence
  ENSG00000143149_13 (sequence is synthesized)
gataccacttttggactagcagctggcgtctttaccagggacatccaacgggctcatagagtggtagctgagcttcaggctgggacgtgcttcattaacaactataacgtcagcccagtg

SEQ ID NO: 376552 - DNA, 120 bp, Artificial Sequence
  ENSG00000143149_14 (sequence is synthesized)
gagttgccctttggtggatataagaagtcaggatttggcagagagaacggccgtgtgacaatcgaatattattcacagctgaagactgtgtgtgtggagatgggtgatgtggaatctgct

SEQ ID NO: 376553 - DNA, 120 bp, Artificial Sequence
  ENSG00000143149_15 (sequence is synthesized)
ttttgaaaacctgcagtgaaacctattgacatggccacgctgtggaatgatgtgaattggccctgtttacagaggcagtacaactgaatgttattttacatccagaattttggcgttcag

SEQ ID NO: 376554 - DNA, 120 bp, Artificial Sequence
  ENSG00000143149_16 (sequence is synthesized)
tataagagaatggttcatgttactctttctctctccatcagcttcctcactgaaaatgtgcattaagtgccttgtagatactaatcaagaaagctgtgattctcctcaaagcgtattttt

SEQ ID NO: 376555 - DNA, 120 bp, Artificial Sequence
  ENSG00000143149_17 (sequence is synthesized)
gtgaaatcttttaagagccagtaacatacttctagagaacaggaaaagagactaggataatacatcttccacacatttggcccactgataatgttaattctctggcgtatttcaaagaac

SEQ ID NO: 376556 - DNA, 120 bp, Artificial Sequence
  ENSG00000143149_18 (sequence is synthesized)
ttgttcctggctgatccaagtgcagtggtatttacaactaattgatcacaaccagtttgtagatttctttgttccttctccattcccactgcttcacttgcctagtcttgaagaaaaaaa

SEQ ID NO: 376557 - DNA, 120 bp, Artificial Sequence
  ENSG00000143149_19 (sequence is synthesized)
acaaaaaacaaaaaaaaaccttgttcctttataggttcctggtagaatcagtagagatgatttcagctcattgacatttttttaagctatatccccttgtcattccattgagaaagctga

SEQ ID NO: 376558 - DNA, 120 bp, Artificial Sequence
  ENSG00000143149_20 (sequence is synthesized)
caactgggatagggaggggattagataatagatggggtcaaattctgtgtgaatgtgaacttgcctagtaagcactttgtctctgttcactactgcgatagaggaaatctatctccctat

SEQ ID NO: 376559 - DNA, 120 bp, Artificial Sequence
  ENSG00000143149_21 (sequence is synthesized)
cttgggtccttgaactacagcctgctgtcttacaccagtggagctaccctttaaatgtacaaattatttgtatgctaatgtaatatggtgaaattaaaataaatcacactgttaattgtt

SEQ ID NO: 376560 - DNA, 120 bp, Artificial Sequence
  ENSG00000143149_22 (sequence is synthesized)
tttgtttgcttttagatgatttgaattaaatactgaatagatagagatgaatatttataaaatatgtacatgatataaagcaagggctggcaaattatgtggtcctactacccaagttta

SEQ ID NO: 376561 - DNA, 120 bp, Artificial Sequence
  ENSG00000143149_23 (sequence is synthesized)
agaagtagaactgctccattatctttgaagccttctgtgtgcccctcctttagggcacccatatgtattagtttatccaggaccacaactattgttctggaagcaaggagctcaaaaata

SEQ ID NO: 376562 - DNA, 120 bp, Artificial Sequence
  ENSG00000143149_24 (sequence is synthesized)
tgaggcagaagagcagggcctagtggtgaagggcaaagattttggaattaagacaaacctgggtgaaagtcttgggtttgtcactttctacctgggtggcctgggaattactttatcttt

SEQ ID NO: 376563 - DNA, 120 bp, Artificial Sequence
  ENSG00000143153_0 (sequence is synthesized)
cgagagccgcagcggcagcggcgcgtcctgcctgcagagagccaggccggagaagccgagcggcgcagaggacgccagggcgcgcgccgcagccacccaccctccggaccgcggcagctg

SEQ ID NO: 376564 - DNA, 120 bp, Artificial Sequence
  ENSG00000143153_1 (sequence is synthesized)
gctgctgacccgccatcgccatggcccgcgggaaagccaaggaggagggcagctggaagaaattcatctggaactcagagaagaaggagtttctgggcaggaccggtggcagttggttta

SEQ ID NO: 376565 - DNA, 120 bp, Artificial Sequence
  ENSG00000143153_2 (sequence is synthesized)
agatccttctattctacgtaatattttatggctgcctggctggcatcttcatcggaaccatccaagtgatgctgctcaccatcagtgaatttaagcccacatatcaggaccgagtggccc

SEQ ID NO: 376566 - DNA, 120 bp, Artificial Sequence
  ENSG00000143153_3 (sequence is synthesized)
cgccaggattaacacagattcctcagatccagaagactgaaatttcctttcgtcctaatgatcccaagagctatgaggcatatgtactgaacatagttaggttcctggaaaagtacaaag

SEQ ID NO: 376567 - DNA, 120 bp, Artificial Sequence
  ENSG00000143153_4 (sequence is synthesized)
attcagcccagagggatgacatgatttttgaagattgtggcgatgtgcccagtgaaccgaaagaacgaggagactttaatcatgaacgaggagagcgaaaggtctgcagattcaagcttg

SEQ ID NO: 376568 - DNA, 120 bp, Artificial Sequence
  ENSG00000143153_5 (sequence is synthesized)
aatggctgggaaattgctctggattaaatgatgaaacttatggctacaaagagggcaaaccgtgcattattataaagctcaaccgagttctaggcttcaaacctaagcctcccaagaatg

SEQ ID NO: 376569 - DNA, 120 bp, Artificial Sequence
  ENSG00000143153_6 (sequence is synthesized)
agtccttggagacttacccagtgatgaagtataacccaaatgtccttcccgttcagtgcactggcaagcgagatgaagataaggataaagttggaaatgtggagtattttggactgggca

SEQ ID NO: 376570 - DNA, 120 bp, Artificial Sequence
  ENSG00000143153_7 (sequence is synthesized)
actcccctggttttcctctgcagtattatccgtactatggcaaactcctgcagcccaaatacctgcagcccctgctggccgtacagttcaccaatcttaccatggacactgaaattcgca

SEQ ID NO: 376571 - DNA, 120 bp, Artificial Sequence
  ENSG00000143153_8 (sequence is synthesized)
tagagtgtaaggcgtacggtgagaacattgggtacagtgagaaagaccgttttcagggacgttttgatgtaaaaattgaagttaagagctgatcacaagcacaaatctttcccactagcc

SEQ ID NO: 376572 - DNA, 120 bp, Artificial Sequence
  ENSG00000143153_9 (sequence is synthesized)
gtcatacgtatgggacctacacttaatctatatgctttacactagctttctgcatttaataggttagaatgtaaattaaagtgtagcaatagcaacaaaatatttattctactgtaaatg

SEQ ID NO: 376573 - DNA, 120 bp, Artificial Sequence
  ENSG00000143153_10 (sequence is synthesized)
acaaaagaaaaagaaaaattgagccttgggacgtgcccatttttactgtaaattatgattccgtaactgacttgtagtaagcagtgtttctggcccctaagtattgctgccttgtgtatt

SEQ ID NO: 376574 - DNA, 120 bp, Artificial Sequence
  ENSG00000143153_11 (sequence is synthesized)
ttatttagtgtacagtactacaggtgcatactctggtcatttttcaagccatgttttattgtatctgttttctactttatgtgagcaaggtttgctgtccaaggtgtaaatattcaacgg

SEQ ID NO: 376575 - DNA, 120 bp, Artificial Sequence
  ENSG00000143153_12 (sequence is synthesized)
ttttttttttttttgttttttggctctttcaaaggtaatggcccatcgatgagcatttttaacatactccatagtcttttcctgtggtgttaggtctttatttttatttttttcctgggg

SEQ ID NO: 376576 - DNA, 120 bp, Artificial Sequence
  ENSG00000143153_13 (sequence is synthesized)
ggtctttatttttatttttttcctgggggctggggtgggggtttgtcatgggggaactgccctttaaattttaagtgacactacagaaaaacacaaaaaggtgatgggttgtgttatgct

SEQ ID NO: 376577 - DNA, 120 bp, Artificial Sequence
  ENSG00000143153_14 (sequence is synthesized)
tgtattgaatgctgtcttgacatctcttgccttgtcctccggtatgttctaaagctgtgtctgagatctggatctgcccatcactttggctagtgacagggctaattaatttgctttata

SEQ ID NO: 376578 - DNA, 120 bp, Artificial Sequence
  ENSG00000143153_15 (sequence is synthesized)
cattttcttttactttccttttttcctttctggaggcatcacatgctggtgctgtgtctttatgaatgttttaaccattttcatggtggaagaattttatatttatgcagttgtacaatt

SEQ ID NO: 376579 - DNA, 120 bp, Artificial Sequence
  ENSG00000143153_16 (sequence is synthesized)
ttatttttttctgcaagaaaaagtgtaatgtatgaaataaaccaaagtcacttgtttgaaaataaatctttattttgaactttataaaaagcaatgcagtaccccatagactggtgttaa

SEQ ID NO: 376580 - DNA, 120 bp, Artificial Sequence
  ENSG00000143153_17 (sequence is synthesized)
atgttgtctacagtgcaaaatccatgttctaacatatgtaataattgccaggagtacagtgctcttgttgatcttgtattcagtcaggttaaaacaacggacaataaaagaatgaacaca

SEQ ID NO: 376581 - DNA, 120 bp, Artificial Sequence
  ENSG00000143153_18 (sequence is synthesized)
gcccacaaggggcacagccgggcagtcaggaaccggggctgccggctgggctggcctgcaaagaagagggaagggccggaactgcaaccgcagtggcggggagtgcgagggggcggcaga

SEQ ID NO: 376582 - DNA, 120 bp, Artificial Sequence
  ENSG00000143153_19 (sequence is synthesized)
ggtcaggggaggcgggggcccagcacacgtccccagtggcagcgggagcggcagctacgggttcgcggagcccccgaccccccaagggctagaggagcgctcggcggaccaaagaaagcc

SEQ ID NO: 376583 - DNA, 120 bp, Artificial Sequence
  ENSG00000143153_20 (sequence is synthesized)
ctagaggagcgctcggcggaccaaagaaagcccgcgagcggctgcgcgcccaccaataggtgcggggctcggagccgcgcagcctgcgccgtccctccctccgcccccgccccgccgccg

SEQ ID NO: 376584 - DNA, 120 bp, Artificial Sequence
  ENSG00000143153_21 (sequence is synthesized)
atcatgaccatcaccaccaacaccactggcaccaccactgcagtcattcagggagtcctgaacagaggccgattggtgttcctgcttgggaggatctgtgggaatcggcaggagaatgag

SEQ ID NO: 376585 - DNA, 120 bp, Artificial Sequence
  ENSG00000143153_22 (sequence is synthesized)
tcagggaaatagtgcttagctgacattttgaaatggaagaagctggaatatatgaatttttgtaaagaaaaaaaaatgcagcctgtgagtctctcttgattgaaaattaaagggttaata

SEQ ID NO: 376586 - DNA, 120 bp, Artificial Sequence
  ENSG00000143155_0 (sequence is synthesized)
atggtaacggctcggaagcctaggaggctgggccggagggaggcggaggaaccggtgttcgccgccgccgctgcttcagcttattccttgtggcctctgcgggtcctgcctcagccatga

SEQ ID NO: 376587 - DNA, 120 bp, Artificial Sequence
  ENSG00000143155_1 (sequence is synthesized)
tgatccacggcttccagagcagccaccgggatttctgcttcgggccctggaagctgacggcgtccaagacccacatcatgaagtcggcggatgtggagaaattagccgatgaattacata

SEQ ID NO: 376588 - DNA, 120 bp, Artificial Sequence
  ENSG00000143155_2 (sequence is synthesized)
tgccatctctccctgaaatgatgtttggagacaacgttttaagaatccagcatgggtctggctttggaattgagttcaatgctacagatgcgttaagatgtgtaaacaactaccaaggaa

SEQ ID NO: 376589 - DNA, 120 bp, Artificial Sequence
  ENSG00000143155_3 (sequence is synthesized)
tgcttaaagtggcctgtgctgaagagtggcaagaaagcaggacggagggtgaacactccaaagaggttattaaaccatatgattggacctatacaacagattataagggaaccttacttg

SEQ ID NO: 376590 - DNA, 120 bp, Artificial Sequence
  ENSG00000143155_4 (sequence is synthesized)
gagaatctcttaagttaaaggttgtacctacaacagatcatatagatacagaaaaattgaaagccagagaacagattaagttttttgaagaagttctcctttttgaggatgaacttcatg

SEQ ID NO: 376591 - DNA, 120 bp, Artificial Sequence
  ENSG00000143155_5 (sequence is synthesized)
atcatggagtttcaagcctgagtgtgaagattagagtaatgccttctagctttttcctgctgttgcggtttttcttgagaattgatggggtgcttatcagaatgaatgacacgagacttt

SEQ ID NO: 376592 - DNA, 120 bp, Artificial Sequence
  ENSG00000143155_6 (sequence is synthesized)
accatgaggctgacaagacctacatgttacgagaatatacgtcacgagaaagcaaaatttctagtttgatgcatgttccaccttccctcttcacggaacctaatgaaatatcccagtatt

SEQ ID NO: 376593 - DNA, 120 bp, Artificial Sequence
  ENSG00000143155_7 (sequence is synthesized)
taccaataaaggaagcagtttgtgagaagctaatatttccagaaagaattgatcctaacccagcagactcacaaaaaagtacacaagtggaataaaatgtgatacaacatatactcacta

SEQ ID NO: 376594 - DNA, 120 bp, Artificial Sequence
  ENSG00000143155_8 (sequence is synthesized)
tggaatctgactggacaccttggctatttgtaaggggttatttttattatgagaattaattgccttgtttatgtacagattttctgtagccttaaaggaaaaaaaaataaagatcgttac

SEQ ID NO: 376595 - DNA, 120 bp, Artificial Sequence
  ENSG00000143155_9 (sequence is synthesized)
aggcaggtttcactcaactgctgtttgtactgtctgtcttcacattcatattccagatttatattttctggagttaaatttggatgatttctaaattatcacaaagtgggacctcagcag

SEQ ID NO: 376596 - DNA, 120 bp, Artificial Sequence
  ENSG00000143155_10 (sequence is synthesized)
tagtgatgtgtgtgtctcatgagcagtgagcacagtctgcattcatcatgaaacactatcttctaccaggaggaggttaatgtaaatcaccaaatcccaatgccttgtgactttcatagg

SEQ ID NO: 376597 - DNA, 120 bp, Artificial Sequence
  ENSG00000143155_11 (sequence is synthesized)
attcctgatcatgcatgttgatgtactggctcttcactttgggctttctgatgtttattcacacctttggagagttgcaacttgccacatacgaaattagtctcatagtgtagtgaactt

SEQ ID NO: 376598 - DNA, 120 bp, Artificial Sequence
  ENSG00000143155_12 (sequence is synthesized)
ttacatacatagaaacatgaatatggtttaccactgtgtgtgtgtaggatgttagaattatctgtcctccatctttaggtgctttttcttaaatgtggttctacttatactgatattttt

SEQ ID NO: 376599 - DNA, 120 bp, Artificial Sequence
  ENSG00000143155_13 (sequence is synthesized)
aatttccatcttccatgcaacctcagagtgaataaaccccttaaatttggtgctggttcgaaaaagtctaaagggtttattaggggttgtttttcgcaaatattacatcaatccttaaag

SEQ ID NO: 376600 - DNA, 120 bp, Artificial Sequence
  ENSG00000143155_14 (sequence is synthesized)
caacaagattaattttctgcttaaaatatttgggaagataggtaaggaggagggggttttaaaatataaaagcaagtttttctattttaaggtgcatatttgtaacattacaggggatga

SEQ ID NO: 376601 - DNA, 120 bp, Artificial Sequence
  ENSG00000143155_15 (sequence is synthesized)
agtaaaatgtaattaattagcacaagacttagggagtacagaaaatacacagaagtaaatttcaaatccatttgattgttttcatagtgaccccttagtcattttatattcttgtctgcc

SEQ ID NO: 376602 - DNA, 120 bp, Artificial Sequence
  ENSG00000143155_16 (sequence is synthesized)
tttctagaaaaatggttgtcataaagtggaaagtgattaaaaagcatcaaataagaaattatttcaagtggatttttaaaaatatttttttgaagggcagggggaaaattcacccctttt

SEQ ID NO: 376603 - DNA, 120 bp, Artificial Sequence
  ENSG00000143155_17 (sequence is synthesized)
ctgatttgaaatatgttgtacatatttccatttgatggataaatcattaagtaagaatatttgatttaaagtattagccaacctcttcaggtattagcctgaagataaattttaacaaaa

SEQ ID NO: 376604 - DNA, 120 bp, Artificial Sequence
  ENSG00000143155_18 (sequence is synthesized)
catatacacttgggtatccgtcattgctcaaactctatagtgtattgctggagccaataggcagggtatattttattagctaaatttgatatttgtcttctgccttctgtatcacctcca

SEQ ID NO: 376605 - DNA, 120 bp, Artificial Sequence
  ENSG00000143155_19 (sequence is synthesized)
agctataggaaatcaggattttgttggctttaagaaaacacatggtatgttcactgtatattaaatatacctgtatttaatgttttctcttaggacagaaaagtagacacacacacacac

SEQ ID NO: 376606 - DNA, 120 bp, Artificial Sequence
  ENSG00000143155_20 (sequence is synthesized)
acacacacacatgttgtgttcagctttctgttttatattatttgccattgagattagaatagaacaggctctattcatgcaaactatatgaaatgaaaaacttttaagactcttcattaa

SEQ ID NO: 376607 - DNA, 120 bp, Artificial Sequence
  ENSG00000143155_21 (sequence is synthesized)
tgtgtgtgtgtgtgtgtgtgtatacagacattttttttttaacttgttgattcagatgtcttggtccctgaatagtcctagattacttattttgagaattcattgttaaaaattacaggg

SEQ ID NO: 376608 - DNA, 120 bp, Artificial Sequence
  ENSG00000143155_22 (sequence is synthesized)
acttattttgagaattcattgttaaaaattacagggaattaaaataattgccttttttttttttagagggtaagagatgggtagaagagtatgcctctgaaaattttattagtttattct

SEQ ID NO: 376609 - DNA, 120 bp, Artificial Sequence
  ENSG00000143155_23 (sequence is synthesized)
tgtggagaataccaagaaaatgtgtatttgcccattgctaaatatgatatatgccattttgtatttatttgtcccaagtgtctttttgtaagaggagaataaacaataaggaattactga

SEQ ID NO: 376610 - DNA, 120 bp, Artificial Sequence
  ENSG00000143156_0 (sequence is synthesized)
gttgcctgagtaaccgtatgatggtggtggtggtggtgtcttcctgtctcaacgatacctattttctagtgctgagatcctgagacaatgaatcatagtgaaagattcgttttcattgca

SEQ ID NO: 376611 - DNA, 120 bp, Artificial Sequence
  ENSG00000143156_1 (sequence is synthesized)
gagtggtatgatccaaatgcttcacttcttcgacgttatgagcttttattttacccaggggatggatctgttgaaatgcatgatgtaaagaatcatcgcacctttttaaagcggaccaaa

SEQ ID NO: 376612 - DNA, 120 bp, Artificial Sequence
  ENSG00000143156_2 (sequence is synthesized)
tatgataacctgcacttggaagatttatttataggcaacaaagtgaatgtcttttctcgacaactggtattaattgactatggggatcaatatacagctcgccagctgggcagtaggaaa

SEQ ID NO: 376613 - DNA, 120 bp, Artificial Sequence
  ENSG00000143156_3 (sequence is synthesized)
gaaaaaacgctagccctaattaaaccagatgcaatatcaaaggctggagaaataattgaaataataaacaaagctggatttactataaccaaactcaaaatgatgatgctttcaaggaaa

SEQ ID NO: 376614 - DNA, 120 bp, Artificial Sequence
  ENSG00000143156_4 (sequence is synthesized)
gaagcattggattttcatgtagatcaccagtcaagaccctttttcaatgagctgatccagtttattacaactggtcctattattgccatggagattttaagagatgatgctatatgtgaa

SEQ ID NO: 376615 - DNA, 120 bp, Artificial Sequence
  ENSG00000143156_5 (sequence is synthesized)
tggaaaagactgctgggacctgcaaactctggagtggcacgcacagatgcttctgaaagcattagagccctctttggaacagatggcataagaaatgcagcgcatggccctgattctttt

SEQ ID NO: 376616 - DNA, 120 bp, Artificial Sequence
  ENSG00000143156_6 (sequence is synthesized)
tccttcaagtggaggttgtgggccggcaaacactgctaaatttactaattgtacctgttgcattgttaaaccccatgctgtcagtgaaggactgttgggaaagatcctgatggctatccg

SEQ ID NO: 376617 - DNA, 120 bp, Artificial Sequence
  ENSG00000143156_7 (sequence is synthesized)
agatgcaggttttgaaatctcagctatgcagatgttcaatatggatcgggttaatgttgaggaattctatgaagtttataaaggagtagtgaccgaatatcatgacatggtgacagaaat

SEQ ID NO: 376618 - DNA, 120 bp, Artificial Sequence
  ENSG00000143156_8 (sequence is synthesized)
gtattctggcccttgtgtagcaatggagattcaacagaataatgctacaaagacatttcgagaattttgtggacctgctgatcctgaaattgcccggcatttacgccctggaactctcag

SEQ ID NO: 376619 - DNA, 120 bp, Artificial Sequence
  ENSG00000143156_9 (sequence is synthesized)
agcaatctttggtaaaactaagatccagaatgctgttcactgtactgatctgccagaggatggcctattagaggttcaatacttcttcaagatcttggataattagtggtgtggaaagta

SEQ ID NO: 376620 - DNA, 120 bp, Artificial Sequence
  ENSG00000143156_10 (sequence is synthesized)
aagaagtcacaggttgggacatttagacaagagtgaatcacacacgaggaatgtgttcattcttttattgtccgttgttttaacctgactgaatacaagatcaacaagagcactgtactc

SEQ ID NO: 376621 - DNA, 120 bp, Artificial Sequence
  ENSG00000143156_11 (sequence is synthesized)
ctggcaattattacatatgttagaacatggattttgcactgtagacaacatttaacaccagtctatggggtactgcattgctttttataaagttcaaaataaagatttattttcaaacaa

SEQ ID NO: 376622 - DNA, 120 bp, Artificial Sequence
  ENSG00000143156_12 (sequence is synthesized)
agaataatggcgtctcgtagccccaggcgacagcgtggaggggcgggtctgtcgattggatgaacgcagctgagattactcccagccactaaggacgaagaggtggggcggtggcgtccc

SEQ ID NO: 376623 - DNA, 120 bp, Artificial Sequence
  ENSG00000143156_13 (sequence is synthesized)
cagggggtacacatgcagatttgttacgtgggaatattgtgtgatgctgaggtttggagtatggatcccatcatccaggtatgagctgatccagtttattacaactggtcctattattgc

SEQ ID NO: 376624 - DNA, 120 bp, Artificial Sequence
  ENSG00000143156_14 (sequence is synthesized)
tcgagaattttgtggacctgctgatcctacccccaaatctccaatttctcacaagtgaatttaggcaaactaaagaagacatctctgttccgaaattgcccggcatttacgccctggaac

SEQ ID NO: 376625 - DNA, 120 bp, Artificial Sequence
  ENSG00000143156_15 (sequence is synthesized)
tacattttgttaataggagagcaatgtttattttcttgatgtactttatgtatagaaaataaagtatacttttagtatttccattttttttctttgaaggcacttgagtaaaggtgacaa

SEQ ID NO: 376626 - DNA, 120 bp, Artificial Sequence
  ENSG00000143156_16 (sequence is synthesized)
aatataagggaaaatctgtctaaatctctatttgtcttttctttgtggatttttaggaggtgttctttgagttgctgatcatgctcaggctcagtcatactgttacagatcttggctaat

SEQ ID NO: 376627 - DNA, 120 bp, Artificial Sequence
  ENSG00000143156_17 (sequence is synthesized)
agtcatactgttacagatcttggctaattgacttttagtctgccttctctctttctaatcacaaattgtgattcacttaatttacttcaatagcactttttttttttttttttgagacag

SEQ ID NO: 376628 - DNA, 66 bp, Artificial Sequence
  ENSG00000143156_18 (sequence is synthesized)
tttttgagacagagtctagttctgttgtccaagctggagtgcagtggcatgatctcgagttactgc

SEQ ID NO: 376629 - DNA, 63 bp, Artificial Sequence
  ENSG00000143156_19 (sequence is synthesized)
tagcactcctgttgtacaaattaaaacaatgtctgccatacctctagtataccctttctgaga

SEQ ID NO: 376630 - DNA, 120 bp, Artificial Sequence
  ENSG00000143156_20 (sequence is synthesized)
aaacaatgtctgccatacctctagtataccctttctgagaaggctggagaaatttccttcagttctttgtatctgaaacagttctttgacatatgtatgtatatacatgtttgcatatat

SEQ ID NO: 376631 - DNA, 120 bp, Artificial Sequence
  ENSG00000143156_21 (sequence is synthesized)
atacatatataaagagaaagagtttgcaagttcttttcttatttttgtctcaatttctttattttatttattttagtctggtatatatatttttgttaggtatctcaaatctttttggaa

SEQ ID NO: 376632 - DNA, 120 bp, Artificial Sequence
  ENSG00000143156_22 (sequence is synthesized)
gtaagatggggtatggttaaaaagatcacccttaaaaaactagaatatactaaataatatacagaagtgattggattttaaaattttatgtctcctaagtatccaagtaatccatgtata

SEQ ID NO: 376633 - DNA, 120 bp, Artificial Sequence
  ENSG00000143156_23 (sequence is synthesized)
tagtagaaaattggaaataaaaaaccattaaaaatgaagtaaaaaaatactgaattcccatcacctgaagatagtcattgttaatgttttgatgcatttcctccaaatcatttttttctg

SEQ ID NO: 376634 - DNA, 120 bp, Artificial Sequence
  ENSG00000143156_24 (sequence is synthesized)
catttgtatgtgcatgtgtgtacactgctacacatgaatgtaatggttgagatgtaggtctataggctgttgtttaaatataatttttgtgagcatttctggctgctgttaagtcctcat

SEQ ID NO: 376635 - DNA, 120 bp, Artificial Sequence
  ENSG00000143156_25 (sequence is synthesized)
taaaactttgaagaatatctttatacgtaaatatttgatgatatctctaatcttttcctctggctagtttcctagaaatagaattacttgttggaaggatatgagccttaaagatcttgc

SEQ ID NO: 376636 - DNA, 120 bp, Artificial Sequence
  ENSG00000143156_26 (sequence is synthesized)
tgcataattaatacttctttaattttttaggaagtattttagtatattgtaaatccttaggaccatgattataagtaactaacatgcagcatggataacaaacacttatggagaatatac

SEQ ID NO: 376637 - DNA, 120 bp, Artificial Sequence
  ENSG00000143156_27 (sequence is synthesized)
cattatgtgccaggtggcagactggttccttatacattatttttaatcttcacagcaagtatgtcaagtaggtaaatttgttgctcttttccagataggcaagctaaggttccatgagat

SEQ ID NO: 376638 - DNA, 120 bp, Artificial Sequence
  ENSG00000143156_28 (sequence is synthesized)
taagttgtttctcctaatttggaatggaaattgaggatgcaaaccctgtttgtttgtttgtttgtttttaatctccattctgttccctctatactctattgccctaatagcaatagccac

SEQ ID NO: 376639 - DNA, 120 bp, Artificial Sequence
  ENSG00000143156_29 (sequence is synthesized)
aaaaaagtcacatggcacatgattagtaacaattccataggaagtgatagtaatatttgaaatggctggtgttgaaaatttatggaaaaaaacctgggattttatgtttcactcattttt

SEQ ID NO: 376640 - DNA, 120 bp, Artificial Sequence
  ENSG00000143156_30 (sequence is synthesized)
cttagctggagagattgtgtatgtgtatgtgagtgtctacacaggtgtggtatccctaatccaaaaatctgaaacccaaattactccaaactccaaaactttttgagcacagacatgaag

SEQ ID NO: 376641 - DNA, 120 bp, Artificial Sequence
  ENSG00000143156_31 (sequence is synthesized)
ctcaaaggaaatggtcgttgtagcattttcaaccactggtttatgtttattggatttttgaattgggtatgctccacaaatacgtatctacagatatttcaaaatcaaaaaaaaaattga

SEQ ID NO: 376642 - DNA, 120 bp, Artificial Sequence
  ENSG00000143156_32 (sequence is synthesized)
aatccaaaacactgcttgtcacaagcatttctgtaaggaatattcaacctgtacacacacacatgcacatacatacacccgtgtatatttgtgtacatatacatatatacataaacacac

SEQ ID NO: 376643 - DNA, 120 bp, Artificial Sequence
  ENSG00000143156_33 (sequence is synthesized)
atagtacactcacattttgaaaaagttcttgtttataggcatcaactttttaaaaagcttatccttgacaccctaaaatgttttattcaatttacctgatctaatccttttcaaggaaaa

SEQ ID NO: 376644 - DNA, 120 bp, Artificial Sequence
  ENSG00000143156_34 (sequence is synthesized)
atatgttgcaaggagagtgaaataaaataaagtggtactagaataaatactagttgtataccttaataattgcacatatagctgggagaactgatagccacatggagaaaattgacacgg

SEQ ID NO: 376645 - DNA, 75 bp, Artificial Sequence
  ENSG00000143156_35 (sequence is synthesized)
tagaaaatctagtcaatagcattcaggacataggcatgggcaacaattttgtgaacaaaatgtgaaaagcaatta

SEQ ID NO: 376646 - DNA, 120 bp, Artificial Sequence
  ENSG00000143156_36 (sequence is synthesized)
tctagtcaatagcattcaggacataggcatgggcaacaattttgtgaacaaaatgtgaaaagcaattacaacaaaaacaaaaattgccagattggatctaattaaactaaagagcttctg

SEQ ID NO: 376647 - DNA, 120 bp, Artificial Sequence
  ENSG00000143156_37 (sequence is synthesized)
agagaaaatttttgcaatctatccatttcacaaaggtttaatatctggaatctacaagggacttaaatttacaagaaaaaacaacctcattaaaaagtggtcaaaggacatggacagacc

SEQ ID NO: 376648 - DNA, 120 bp, Artificial Sequence
  ENSG00000143156_38 (sequence is synthesized)
tcaaaggacatggacagacccttctcaaaagaagacattcatgcacccaacaaacacatgaaaaaaagctgaagtcaaattgctaactagaataaccaatgcagagaagaacatgaatga

SEQ ID NO: 376649 - DNA, 120 bp, Artificial Sequence
  ENSG00000143156_39 (sequence is synthesized)
cctgatggagctgaaaagcatagcacaagaactttgtgaagaatacacaactatcaatagtcaaatcaatcaagtagaagaaaggatgtcagtgactgaagatcaacttaatgaaataaa

SEQ ID NO: 376650 - DNA, 71 bp, Artificial Sequence
  ENSG00000143156_40 (sequence is synthesized)
agaagagcaaccccaagacacataatcattagattcaccaaggttgaaatgaacagaagcccattcagact

SEQ ID NO: 376651 - DNA, 120 bp, Artificial Sequence
  ENSG00000143156_41 (sequence is synthesized)
gaagatagacaatatataacataagtagaaaagtaaacattgcctcctacattaatttttatttacattgatattactcatacttaaaaaatattttaaaagagtggctttgacagaata

SEQ ID NO: 376652 - DNA, 120 bp, Artificial Sequence
  ENSG00000143157_0 (sequence is synthesized)
ggaaatatcgaaggaaccgactttgaactccagagggatcttttctttggaggttccccgatgcagccctcaagatgcatccgcactccacacctaggaattgcccgcgcccatagaggg

SEQ ID NO: 376653 - DNA, 120 bp, Artificial Sequence
  ENSG00000143157_1 (sequence is synthesized)
caggagtgcggccctttgtactggccaagagtcagcgaatagagaatttgcagcccagaggcaatgggttatttccctgtcggggtgggccccagccgatttctgcacctttttgggtat

SEQ ID NO: 376654 - DNA, 120 bp, Artificial Sequence
  ENSG00000143157_2 (sequence is synthesized)
ccaggcataaccctcactatgtttcactgactcctgcgtttgcaaagtcccttaaggtagaatgaccctattttctgaaccagctcgtggacagaacctttgaatttggaaaatccagag

SEQ ID NO: 376655 - DNA, 120 bp, Artificial Sequence
  ENSG00000143157_3 (sequence is synthesized)
atggagtccacagcctaccctctcaatttgagcctgaaagaagaggaagaggaagaagagattcagagccgggaactagaggacggcccggcagacatgcagaaagtacgaatctgctct

SEQ ID NO: 376656 - DNA, 120 bp, Artificial Sequence
  ENSG00000143157_4 (sequence is synthesized)
gagggcggatgggtaccggccctatttgatgaggtggccatatatttttccgatgaggaatgggaagttttgacggagcaacaaaaggccctctaccgggaagtcatgaggatgaattat

SEQ ID NO: 376657 - DNA, 120 bp, Artificial Sequence
  ENSG00000143157_5 (sequence is synthesized)
gaaactgtcctgtccctggaattcccattccctaagccagacatgatcacccgtttggaaggggaggaggagtctcagaattctgacgagtggcagctccaaggaggcacctctgcagaa

SEQ ID NO: 376658 - DNA, 120 bp, Artificial Sequence
  ENSG00000143157_6 (sequence is synthesized)
aatgaagaatctgacgtaaagcctccagactggccaaacccaatgaatgctacctcccagtttcctcagcctcagcactttgacagctttggcctccgtctgcctcgggatatcacagag

SEQ ID NO: 376659 - DNA, 120 bp, Artificial Sequence
  ENSG00000143157_7 (sequence is synthesized)
ctgcccgagtggagtgaggggtaccccttctacatggccatgggcttcccagggtatgacctctcggctgatgacatagctgggaagtttcagttcagccggggcatgcgccgcagttac

SEQ ID NO: 376660 - DNA, 120 bp, Artificial Sequence
  ENSG00000143157_8 (sequence is synthesized)
gacgcagggttcaagctgatggtagtggaatatgctgagagtaccaacaactgccaggctgccaagcagtttggagtattggaaaaaaacgttcgagactggcgcaaagtgaagccacag

SEQ ID NO: 376661 - DNA, 120 bp, Artificial Sequence
  ENSG00000143157_9 (sequence is synthesized)
cttcaaaacgcccacgccatgcggcgggcattccgaggccccaagaatgggaggtttgctctggtggaccagcgtgtggccgaatatgtcagatacatgcaggccaaaggggaccccatc

SEQ ID NO: 376662 - DNA, 120 bp, Artificial Sequence
  ENSG00000143157_10 (sequence is synthesized)
acccgggaggcgatgcagctgaaagctctcgaaatcgcccaggaaatgaacattccagagaaagggttcaaggcaagcttgggttggtgtcgaagaatgatgagaaggtatgacctgtct

SEQ ID NO: 376663 - DNA, 120 bp, Artificial Sequence
  ENSG00000143157_11 (sequence is synthesized)
ctgaggcataaagtgcccgtgccccagcacctgccggaagacctgactgagaaactcgtcacttaccagcgcagtgtcctggctctgcgcagggcgcatgactatgaggtagctcagatg

SEQ ID NO: 376664 - DNA, 120 bp, Artificial Sequence
  ENSG00000143157_12 (sequence is synthesized)
gggaatgcagatgagacgcccatttgtttagaggtgccatcacgggtaactgttgataaccagggcgaaaagcctgtcttggtcaagacaccaggcagggaaaaactgaaaatcacagca

SEQ ID NO: 376665 - DNA, 120 bp, Artificial Sequence
  ENSG00000143157_13 (sequence is synthesized)
atgcttggtgtcttggctgatgggaggaagttaccaccgtacatcattttgaggggaacatatatccccccggggaagtttcccagtgggatggaaattcgctgccaccggtatgggtgg

SEQ ID NO: 376666 - DNA, 120 bp, Artificial Sequence
  ENSG00000143157_14 (sequence is synthesized)
atgactgaagacttgatgcaggactggttggaagtggtgtggagacggaggacaggagcagtgcccaagcagcgagggatgctgatcttgaatggcttccggggccatgccacagattcc

SEQ ID NO: 376667 - DNA, 120 bp, Artificial Sequence
  ENSG00000143157_15 (sequence is synthesized)
gtgaagaactccatggaaagcatgaacactgacatggtgatcatcccagggggtctgacctcacagcttcaggtgctggatgtcgtggtctacaagccactgaatgacagtgtgcgggcc

SEQ ID NO: 376668 - DNA, 120 bp, Artificial Sequence
  ENSG00000143157_16 (sequence is synthesized)
cagtactccaactggcttctggctgggaacctggcgctgagcccaaccgggaatgctaagaagccacccctgggcctctttctggagtgggtcatggtcgcgtggaatagcatctcaagt

SEQ ID NO: 376669 - DNA, 120 bp, Artificial Sequence
  ENSG00000143157_17 (sequence is synthesized)
gagtccatcgtccaagggttcaagaagtgccatatctccagcaacttggaggaggaagacgatgtcctgtgggaaatcgagagtgagttgccaggaggaggagaaccaccaaaagattgt

SEQ ID NO: 376670 - DNA, 120 bp, Artificial Sequence
  ENSG00000143157_18 (sequence is synthesized)
gacaccgaaagcatggctgagagcaactgaagggaaagggaaaggtaaccactcaggagtagatactcagtgcctttgctgacatgtctgtgttctacaaacaccttctctccattattt

SEQ ID NO: 376671 - DNA, 120 bp, Artificial Sequence
  ENSG00000143157_19 (sequence is synthesized)
ttctgtttttaagttcccttagagcctacagtgcagtagtgtagatcaggggtccccaacccccaggtcacggaccatactggtccatggcctgtcaggaactgggctgcacagcaggag

SEQ ID NO: 376672 - DNA, 90 bp, Artificial Sequence
  ENSG00000143157_20 (sequence is synthesized)
ccatggcctgtcggcaggtgagcaagcattaccacctgagctccgcccgctgtcacagcagcggcattagattctcataggagcacaaac

SEQ ID NO: 376673 - DNA, 120 bp, Artificial Sequence
  ENSG00000143157_21 (sequence is synthesized)
caggctcctcaatgcctgaggatctgaggcggaacagtttcatcccaaagccatcctaccacccactaccccgcacttcctgggtccctgcaaaaattgtcttccatgaaaccagtccct

SEQ ID NO: 376674 - DNA, 120 bp, Artificial Sequence
  ENSG00000143157_22 (sequence is synthesized)
ggtgccagaaaagttggggactgctggtatagataacagaccattagcattttctcctttatatgaaacatttattatttgatttatttgtgtctattttgctctgtggcttggacccag

SEQ ID NO: 376675 - DNA, 120 bp, Artificial Sequence
  ENSG00000143157_23 (sequence is synthesized)
aaacacttgtataataggtgaaatgaacaaagaatgagctgccagaacatctgagagctgtaaagttaaaattatttggacccaaagaagcatagtctgacgttgttcagttcacacaaa

SEQ ID NO: 376676 - DNA, 120 bp, Artificial Sequence
  ENSG00000143157_24 (sequence is synthesized)
attttgtctgaaaagccaacttttttctttcccttttaaattatgctgaacatttagggccagtatgtgtaactgacatgctgggacagttgtactcacttttgctggcctgtaggactg

SEQ ID NO: 376677 - DNA, 120 bp, Artificial Sequence
  ENSG00000143157_25 (sequence is synthesized)
tgacatagggagaacactaagtgtgtcctccgggcctcgggtctcagtcctggagctatctacagtatgttaccagcgagtaagaataatagcttctacttgcttttccctacagagttc

SEQ ID NO: 376678 - DNA, 120 bp, Artificial Sequence
  ENSG00000143157_26 (sequence is synthesized)
gtcatcttagtctcattatgaccttcacatgggctatgacaataatttcctgtagtcagcagatgtctgaaggaagatattttttaactgaatctttacaccaaaaaaagaaaataaaac

SEQ ID NO: 376679 - DNA, 120 bp, Artificial Sequence
  ENSG00000143157_27 (sequence is synthesized)
ggtgcgtatctaggactctagtgagggctgaggacaataggcctggaattttctgggttgagtacacaagaagaacagctttcaaaggaaagtaggaatggaggcctaactgagacaaca

SEQ ID NO: 376680 - DNA, 120 bp, Artificial Sequence
  ENSG00000143157_28 (sequence is synthesized)
ctagtgaaatgaccccacccacctacacctccagagaggaggaggatgagcatgtacagcaggggggacacccacaaagaacaaacaattcatttacctgttcgttctcatctccctaat

SEQ ID NO: 376681 - DNA, 120 bp, Artificial Sequence
  ENSG00000143157_29 (sequence is synthesized)
tataaattaaattgatcctccagacagtgttttatatgaaggaagaagccaccttttttacagaggacctgaaaccgtcaaccatcttcacacattctttttctttcttttaaagtataa

SEQ ID NO: 376682 - DNA, 120 bp, Artificial Sequence
  ENSG00000143157_30 (sequence is synthesized)
ttaggtatttccatcttccttgcttttttctccaaatgaaatgctaatgggagccttattttacccacttcagctatataagtccatctgtgtttcaaagagtgacttatgtctcctgcc

SEQ ID NO: 376683 - DNA, 120 bp, Artificial Sequence
  ENSG00000143157_31 (sequence is synthesized)
ttgcttccaaattaaattgtactcatattgctgaatcccattgtaattctgggatccctggaattacaatggagcaagaagttcttactattacattcaaaatcaccaaaattgcttttt

SEQ ID NO: 376684 - DNA, 120 bp, Artificial Sequence
  ENSG00000143157_32 (sequence is synthesized)
tttcccccttgggtcctccttgctttgagaaaccccatgaatccagcctcccttttctgctgacccttatattgcctgcattggatatcaaactgaattacattgagtttccatcttttc

SEQ ID NO: 376685 - DNA, 120 bp, Artificial Sequence
  ENSG00000143157_33 (sequence is synthesized)
ttcatttaccttttgcttttccctctccttgttagataacatttttgtgcacttttaatttcctaagctccttaccacctcagggacatgattaaaaacttccagaagaggaaaggagaa

SEQ ID NO: 376686 - DNA, 120 bp, Artificial Sequence
  ENSG00000143157_34 (sequence is synthesized)
aaagctatgctaagttgcatttatgaatgttggcctgtaatattggtcatgagcttttgctcttctagtctgccacaattctctctgcagctcctgaggaagtgatgggagtagacagat

SEQ ID NO: 376687 - DNA, 120 bp, Artificial Sequence
  ENSG00000143157_35 (sequence is synthesized)
tcacagtgaacaagagatttgggagaccaagtgggcataaaactacgtcttggcctctatttggaaatctgaatgatggaattattatgtttgttaaaagttataccaaaaagccaaggg

SEQ ID NO: 376688 - DNA, 120 bp, Artificial Sequence
  ENSG00000143157_36 (sequence is synthesized)
ttaattcatttaggttctctctgttttccagcaaatggaactctgatttaaacagctggggatgaaattcctcaagatgattattcctgaaagtgtggatgcgctggatgcgcagggaac

SEQ ID NO: 376689 - DNA, 120 bp, Artificial Sequence
  ENSG00000143157_37 (sequence is synthesized)
atcaggaaaaggccacggggctctgaacagccccggtccagacagcagcctgtacatccatcccaggacacagcccagcccctccccacaccatacaaggtatcagaaaagtctaggacc

SEQ ID NO: 376690 - DNA, 120 bp, Artificial Sequence
  ENSG00000143157_38 (sequence is synthesized)
tatcatttcatcagagacatgatcagaaaagaaactgcttctgccccatttcttgttttggagattactccatctgtccatcaaaagaaacctgtaaatatgaaagaacaaaggttattt

SEQ ID NO: 376691 - DNA, 120 bp, Artificial Sequence
  ENSG00000143157_39 (sequence is synthesized)
cctggagaaaagacaatttattcaacaccaacgagggactcatcatatgggcacaactctggtgtccttctatggagaaaacctcaagtaaagttttattctgcctttgaaaatgcttcc

SEQ ID NO: 376692 - DNA, 120 bp, Artificial Sequence
  ENSG00000143157_40 (sequence is synthesized)
aaaagtagaccctgtccccacacaggtcaagactacagagaaggctttgtagaaatgtgtcacctatgtacacctgctacttacacatttcctcttttggaaaaatgagatacttagaat

SEQ ID NO: 376693 - DNA, 120 bp, Artificial Sequence
  ENSG00000143157_41 (sequence is synthesized)
aacaagaaaattaagacatactggcctggtgccagcagatggcttttctatagacaaactaggttagtgtggaagatataggttaaaataaactatgctgttttatttatcttcccaacc

SEQ ID NO: 376694 - DNA, 120 bp, Artificial Sequence
  ENSG00000143157_42 (sequence is synthesized)
tgattggcagctagacttttttagggtctcatttaatggccctgtttttttcattattatatttaatgatagggcaggatttcgtatgcaagctcttgtttctcaggctgcctgcagaag

SEQ ID NO: 376695 - DNA, 120 bp, Artificial Sequence
  ENSG00000143157_43 (sequence is synthesized)
aagtcgctataaattatctgttgtctacatggtacaaggcccattgactcatctgatgcttgttttgttaatttctttaatatttttatcacggggcagtgggagggcttgggcttttag

SEQ ID NO: 376696 - DNA, 120 bp, Artificial Sequence
  ENSG00000143157_44 (sequence is synthesized)
ccacagctgttttaagacttctgatctcctgccctgcaggaataggtgggaagtcattgaatttttacactatagtaatttgcattcccacataagtttgagtgttacgaaaacattcct

SEQ ID NO: 376697 - DNA, 120 bp, Artificial Sequence
  ENSG00000143157_45 (sequence is synthesized)
ttaaagggatctgtgctacacaaaatatgccaggacctcacagacaaagccattgctagaaatgtcattccaatgatcagatctggaaacaggctgccataaccacttttccttcttgta

SEQ ID NO: 376698 - DNA, 120 bp, Artificial Sequence
  ENSG00000143157_46 (sequence is synthesized)
gactcagctcacctgtatatttaaactgttcttggcatcttgaaacacctatttctactcaggtactcattgtcctgttactgattcacctttctgatccttttcaaccagttttccccc

SEQ ID NO: 376699 - DNA, 120 bp, Artificial Sequence
  ENSG00000143157_47 (sequence is synthesized)
aaggggggaaattttacttaacctctagtatttgaacaactcaatatttgaattgttgccccatttgcttttacctgtactgtattcttggtcatctcaaatggcgtctaaacccagcta

SEQ ID NO: 376700 - DNA, 120 bp, Artificial Sequence
  ENSG00000143157_48 (sequence is synthesized)
ctttgcattccagaagtttccattccctccaattccacctaatttttcatctgtcctagttactggctctttcttcatgtcttatttctcttgctttgggagcttaaaagattttacaag

SEQ ID NO: 376701 - DNA, 120 bp, Artificial Sequence
  ENSG00000143157_49 (sequence is synthesized)
acctaattttgggttccttccttggagccatagttaccctgccaagaagagtagaaaatgggttcaactcctgtttcgctccaccaacacctctgtgagtctcatcatcagctgagcgat

SEQ ID NO: 376702 - DNA, 120 bp, Artificial Sequence
  ENSG00000143157_50 (sequence is synthesized)
gatgccttacaggttgcatagcactggaactttcctagagtaacggctctgctgccagggtttctctgggctcattcttccactgacttaattatgatctatgcctaacagagccccagt

SEQ ID NO: 376703 - DNA, 120 bp, Artificial Sequence
  ENSG00000143157_51 (sequence is synthesized)
acaactattttgcagaatggctgttaccctagaattactatagcacatattgagatatagttgtactccctagtagataggaactgaccccaacaataaactttgataataaagacaata

SEQ ID NO: 376704 - DNA, 120 bp, Artificial Sequence
  ENSG00000143157_52 (sequence is synthesized)
accctccctcctcccaccacgtgtcctccccgctccctcccgaggggccgcgcgcacgggaggacggagaggcggaaaggatggcgctgtgacagccgggccggagccctcgcgtcccca

SEQ ID NO: 376705 - DNA, 120 bp, Artificial Sequence
  ENSG00000143157_53 (sequence is synthesized)
attctccatccggtttggtaccaatatattacatctttcagtcaaaaagtgttcatgagatgcagtgtaagtaatattggtatctgtgaagacacagggaagaacgtgtgcagtggggca

SEQ ID NO: 376706 - DNA, 120 bp, Artificial Sequence
  ENSG00000143157_54 (sequence is synthesized)
agtttgacataaatagcttttttcctcagtcatgttttgtatgctctcagcagtggtacattaccaaaatcacatgaaagaaatcccataaagggatctgaattttaaatgaaagtatga

SEQ ID NO: 376707 - DNA, 120 bp, Artificial Sequence
  ENSG00000143157_55 (sequence is synthesized)
tgaacccgcaagtcttaattatgcacttttaataaaattagtcctgacaatttacagtgcccataaagtagtagttgattctccaggaataatctggcagtgttatttttccttttcaac

SEQ ID NO: 376708 - DNA, 120 bp, Artificial Sequence
  ENSG00000143157_56 (sequence is synthesized)
ccatcagcattaaatgctgagccactctccaagtctgacccctagactaagcttccttactcttactcttcctcccagaggcattttggaatgagtcaaaggcatggtaggacacggcat

SEQ ID NO: 376709 - DNA, 120 bp, Artificial Sequence
  ENSG00000143157_57 (sequence is synthesized)
ttacctgtggtcatcacttcaggcaatggaaaggaaaagtgtttgtccttggttgatcagagaagtgggtgataagaacgtgctaaataacaaacctgcacacttgtacctctgaaccta

SEQ ID NO: 376710 - DNA, 120 bp, Artificial Sequence
  ENSG00000143157_58 (sequence is synthesized)
aaatgttttttttttaattcagaacaacaaaagaacatgctaagcgagtcctcccacctgcctggtaaaatacagccagctttatcacacctggttttgcacagtgataaattcctgcag

SEQ ID NO: 376711 - DNA, 120 bp, Artificial Sequence
  ENSG00000143157_59 (sequence is synthesized)
gaaaaaataagttttattctaagtctgaaattatatggtttccaacagctttttccctcgttaaaataattatttttctacatgatgcttgataataagcatttgtttcttaacctaatt

SEQ ID NO: 376712 - DNA, 120 bp, Artificial Sequence
  ENSG00000143157_60 (sequence is synthesized)
agagaagcgattgcactcgagtccccacagctggcagtggtgttacagatggaaccagcctttggtggacagagttcagatgtttcaggggctcttgtgaaaatgctaagtattactgtt

SEQ ID NO: 376713 - DNA, 120 bp, Artificial Sequence
  ENSG00000143157_61 (sequence is synthesized)
tctaccttactgccctgcactttaccccatcatctcccctccttagaaaatgatttcataggaaaattggcatggagagcagatagtagagtgtagacctgaaatacatgaggcaaaggc

SEQ ID NO: 376714 - DNA, 120 bp, Artificial Sequence
  ENSG00000143157_62 (sequence is synthesized)
agtcttccagcattctatggtcccaccaggtgggtaggtgactaggaattcaggccaggtcctagagagtagtgagaagttttccagtttgcagtttcctctgtgctgtatgtacagcca

SEQ ID NO: 376715 - DNA, 120 bp, Artificial Sequence
  ENSG00000143157_63 (sequence is synthesized)
tacagcctatggaacctgacattgcagtgggcagcaggacacggtcaaggctcctagctgcctctccatctatggaactatgaaatttcacacatattccctaggcagcattaaggccca

SEQ ID NO: 376716 - DNA, 120 bp, Artificial Sequence
  ENSG00000143157_64 (sequence is synthesized)
ggtatattgagtagtccaaaccaaaaaactatattcgagtatcagtttaaattcttccaagccctaaaaattcttacgtagtttctcacctaaaactaatggcttgtgccaagaactgaa

SEQ ID NO: 376717 - DNA, 120 bp, Artificial Sequence
  ENSG00000143157_65 (sequence is synthesized)
actaagctattgatttttttttaagaagtcttaatctatacataagaaattacatacctggccaggtgcagtagttcaggcctgtaatcctaacaaacactctgggaggccaaggtgggc

SEQ ID NO: 376718 - DNA, 120 bp, Artificial Sequence
  ENSG00000143157_66 (sequence is synthesized)
agactgcttgagctcaggagttcattaccagtctgggcaacatgataaaaccgtgtctttacaaaaaaaaaaaattttaaattagccgggcatggtggtgtgaatctgtagtcccagcta

SEQ ID NO: 376719 - DNA, 120 bp, Artificial Sequence
  ENSG00000143157_67 (sequence is synthesized)
cccagctacttaggaggttgcgatgggagaatcacctgagcccagaggtccagtctgcagtgagccatgatcacaccacagcactccagctggggtgacagagtgagaccctatctcaaa

SEQ ID NO: 376720 - DNA, 120 bp, Artificial Sequence
  ENSG00000143158_0 (sequence is synthesized)
agcgtgccccctcccccactctaggcggcgacctcagcgcctccgccccggggcccccgctcacccaggtagcgactccgcagccgggacgggtcctccagcccgagggaccttttcctc

SEQ ID NO: 376721 - DNA, 120 bp, Artificial Sequence
  ENSG00000143158_1 (sequence is synthesized)
acgtcccacaacagccagggacgagaacacagccacgctcccacccggctgccaacgatccctcggcggcgatgtcggccgccggtgcccgaggcctgcgggccacctaccaccggctcc

SEQ ID NO: 376722 - DNA, 120 bp, Artificial Sequence
  ENSG00000143158_2 (sequence is synthesized)
tcgataaagtggagctgatgctgcccgagaaattgaggccgttgtacaaccatccagcaggtcccagaacagttttcttctgggctccaattatgaaatgggggttggtgtgtgctggat

SEQ ID NO: 376723 - DNA, 120 bp, Artificial Sequence
  ENSG00000143158_3 (sequence is synthesized)
tggctgatatggccagacctgcagaaaaacttagcacagctcaatctgctgttttgatggctacagggtttatttggtcaagatactcacttgtaattattccaaaaaattggagtctgt

SEQ ID NO: 376724 - DNA, 120 bp, Artificial Sequence
  ENSG00000143158_4 (sequence is synthesized)
ttgctgttaatttctttgtgggggcagcaggagcctctcagctttttcgtatttggagatataaccaagaactaaaagctaaagcacacaaataaaagagttcctgatcacctgaacaat

SEQ ID NO: 376725 - DNA, 120 bp, Artificial Sequence
  ENSG00000143158_5 (sequence is synthesized)
ctagatgtggacaaaaccattgggacctagtttattatttggttattgataaagcaaagctaactgtgtgtttagaaggcactgtaactggtagctagttcttgattcaatagaaaaatg

SEQ ID NO: 376726 - DNA, 120 bp, Artificial Sequence
  ENSG00000143158_6 (sequence is synthesized)
cagcaaacttttaataacagtctctctacatgacttaaggaacttatctatggatattagtaacatttttctaccatttgtccgtaataaaccatacttgctcgtatataccccctgcct

SEQ ID NO: 376727 - DNA, 120 bp, Artificial Sequence
  ENSG00000143158_7 (sequence is synthesized)
ccttctgttccagtcagccaacatatgtacataaaagaacacacaaattcaagaagttggaagattaaattatctgcttatttagtgtaggatggtcaggtagctagctataagtgaaag

SEQ ID NO: 376728 - DNA, 120 bp, Artificial Sequence
  ENSG00000143158_8 (sequence is synthesized)
gaaattttgctgaagagactgagaaatgggtagtggaatgactatcaagatgacctcaaactatttaaaaacattttaacttgccatgaagaatcttgatgatttttgtataaatgttgt

SEQ ID NO: 376729 - DNA, 120 bp, Artificial Sequence
  ENSG00000143158_9 (sequence is synthesized)
ttttaacatagtgcctggtccatgataagtgttaaatttttcaattaccctcagtaactgataatgtagcagaaaatactctatattcagacagacctgaatttgaatcccagctctatg

SEQ ID NO: 376730 - DNA, 120 bp, Artificial Sequence
  ENSG00000143158_10 (sequence is synthesized)
actcctgggctcaggtgatctgcccgcctcgtcctgtcaaagtgctggaatacaggcatgagccaccatacccagcctatgctgtgactttagacaagttaggaaagtacctagcagagt

SEQ ID NO: 376731 - DNA, 120 bp, Artificial Sequence
  ENSG00000143158_11 (sequence is synthesized)
acctgggacataagtaggttttctgtaaatgtttgtgacctttggctccgttgtgaggagagactgagcatacattactccacgctacaaataattaactatctatttgatttgactttc

SEQ ID NO: 376732 - DNA, 120 bp, Artificial Sequence
  ENSG00000143158_12 (sequence is synthesized)
agtgtggagtgcagagctttttttctaaaagtgctaataaagccagtcctcattaaaaatatagtcagatgagtcagcaaagcaagttatttcaaaatttgaagaaatgagacaaaacaa

SEQ ID NO: 376733 - DNA, 120 bp, Artificial Sequence
  ENSG00000143158_13 (sequence is synthesized)
ctttttgagtaatactataacctatgaaaatttggcagttagcaattgaaaaccttgtactttatcatctgtcccttaaccatggcctaccattgaggagaaaagattagagagcttgac

SEQ ID NO: 376734 - DNA, 120 bp, Artificial Sequence
  ENSG00000143158_14 (sequence is synthesized)
ataggccacaatgaagaggttctgaagagtcaaactattattgctttcatttcataaaccacactgttaaattcatttgtgtgtttggcatgggtgtgcacacatgtgtttcctaggtta

SEQ ID NO: 376735 - DNA, 120 bp, Artificial Sequence
  ENSG00000143158_15 (sequence is synthesized)
agcatttaggaaaaacattatgaaatatgacatagacacaaaaaagtttattaaaaatttatgtgagcttggtgtttcacttccttttcattaaaacctcttctgtgcggggtctcctaa

SEQ ID NO: 376736 - DNA, 120 bp, Artificial Sequence
  ENSG00000143158_16 (sequence is synthesized)
cgccccctcaaccttcgcggggcgcgggccgcagcttttcggttcacagcgggcagggaaagccgcgggaagggtactccaggcgagaggcggacgcgagtcgtcgtggcaggaaaagtg

SEQ ID NO: 376737 - DNA, 120 bp, Artificial Sequence
  ENSG00000143158_17 (sequence is synthesized)
ccgggcctccagggcgcagcgttagatggcggtggcagcagcggcgcctgggcccctgaagcccggccgcacccgggccggagctcgcctcatactctccttcttagactaaccagaaca

SEQ ID NO: 376738 - DNA, 120 bp, Artificial Sequence
  ENSG00000143158_18 (sequence is synthesized)
tccaaagatcagcaacagtctcctccctcagcccccctccaacaggaggaggcggaggcggaggcgatggcgactcctccctctcctcgtcctggataccctccccgccaaccctttctc

SEQ ID NO: 376739 - DNA, 120 bp, Artificial Sequence
  ENSG00000143162_0 (sequence is synthesized)
actcttcctggagacaccgccatggccgggctatcccgcgggtccgcgcgcgcactgctcgccgccctgctggcgtcgacgctgttggcgctgctcgtgtcgcccgcgcggggtcgcggc

SEQ ID NO: 376740 - DNA, 120 bp, Artificial Sequence
  ENSG00000143162_1 (sequence is synthesized)
ggccgggaccacggggactgggacgaggcctcccggctgccgccgctaccaccccgcgaggacgcggcgcgcgtggcccgcttcgtgacgcacgtctccgactggggcgctctggccacc

SEQ ID NO: 376741 - DNA, 120 bp, Artificial Sequence
  ENSG00000143162_2 (sequence is synthesized)
atctccacgctggaggcggtgcgcggccggcccttcgccgacgtcctctcgctcagcgacgggcccccgggcgcgggcagcggcgtgccctatttctacctgagcccgctgcagctctcc

SEQ ID NO: 376742 - DNA, 120 bp, Artificial Sequence
  ENSG00000143162_3 (sequence is synthesized)
gtgagcaacctgcaggagaatccatatgctacactgaccatgactttggcacagaccaacttctgcaagaaacatggatttgatccacaaagtcccctttgtgttcacataatgctgtca

SEQ ID NO: 376743 - DNA, 120 bp, Artificial Sequence
  ENSG00000143162_4 (sequence is synthesized)
ggaactgtgaccaaggtgaatgaaacagaaatggatattgcaaagcattcgttattcattcgacaccctgagatgaaaacctggccttccagccataattggttctttgctaagttgaat

SEQ ID NO: 376744 - DNA, 120 bp, Artificial Sequence
  ENSG00000143162_5 (sequence is synthesized)
ataaccaatatctgggtcctggactactttggtggaccaaaaatcgtgacaccagaagaatattataatgtcacagttcagtgaagcagactgtggtgaatttagcaacacttatgaagt

SEQ ID NO: 376745 - DNA, 120 bp, Artificial Sequence
  ENSG00000143162_6 (sequence is synthesized)
ttcttaaagtggctcatacacacttaaaaggcttaatgtttctctggaaagcgtcccagaatattagccagttttctgtcacatgctggtttgtttgcttgcttgtttacttgcttgttt

SEQ ID NO: 376746 - DNA, 120 bp, Artificial Sequence
  ENSG00000143162_7 (sequence is synthesized)
accaatagagttgacctgttattggatttcctggaagatgtggtagctacttttttcctattttgaagccattttcgtagagaaatatccttcactataatcaaataagttttgtcccat

SEQ ID NO: 376747 - DNA, 120 bp, Artificial Sequence
  ENSG00000143162_8 (sequence is synthesized)
gttttaaattgcccattggcatttgaaggtagttgagtatgtgttctttattcctagaagccactgtgcttggtagagtgcatcactcaccacagctgcctcctgagctgcctgagcctg

SEQ ID NO: 376748 - DNA, 120 bp, Artificial Sequence
  ENSG00000143162_9 (sequence is synthesized)
gtgcaaaaggattggcccccattatggtgcttctgaataaatcttgccaagatagacaaacaatgatgaaactcagatggagcttcctactcacgttgatttatgtctcacaatcctggg

SEQ ID NO: 376749 - DNA, 120 bp, Artificial Sequence
  ENSG00000143162_10 (sequence is synthesized)
tattgttaattcaacatagggtgaaactatttctgataaagaacttttgaaaaactttttatactctaaagtgatactcagaacaaaagaaagtcataaaactcctgaatttaatttccc

SEQ ID NO: 376750 - DNA, 120 bp, Artificial Sequence
  ENSG00000143162_11 (sequence is synthesized)
cacctaagtcgaaacagtattatcaaaacacatgtgcacacagattattttttggctccaaaactggattgcaaaagaaagaggagaagaatattttgtgtgttcctggtattcttttat

SEQ ID NO: 376751 - DNA, 120 bp, Artificial Sequence
  ENSG00000143162_12 (sequence is synthesized)
aagtaaagtttacccaggcatggaccagcttcagccagggacaaaatcccctcccaaaccactctccacagctttttaaaaatacttctactcttaacaattacctaaggcttcctcaac

SEQ ID NO: 376752 - DNA, 120 bp, Artificial Sequence
  ENSG00000143162_13 (sequence is synthesized)
tgccccaaatctcttaatagcttctagtgctgctacaatctaagtcaggtcaccagagggaagagaacatggcattaaaagaatcacatcttcagaagagaagacactaatattattacc

SEQ ID NO: 376753 - DNA, 120 bp, Artificial Sequence
  ENSG00000143162_14 (sequence is synthesized)
catatacatgatttcagaagatgacataagattcctcttaaagaggaaatgtcaggaatcaagccactgaatccttaaagagaaaagttgaatatgagtcattgtgtctgaaaactgcaa

SEQ ID NO: 376754 - DNA, 120 bp, Artificial Sequence
  ENSG00000143162_15 (sequence is synthesized)
agtgaacttaactgagatccagcaaacaggttctgtttaagaaaaataatttatactaaatttagtaaaatggacttcttattcaaagcatcaataattaaaagaattattttaatgaaa

SEQ ID NO: 376755 - DNA, 120 bp, Artificial Sequence
  ENSG00000143162_16 (sequence is synthesized)
tcactggaagacatcttgtggagaccatctagttcagcttcttcattgtatagctgaggacacccaggcccagagaggggaagtgatttggtcaaagtcacacagcaagtaaaggacaaa

SEQ ID NO: 376756 - DNA, 120 bp, Artificial Sequence
  ENSG00000143162_17 (sequence is synthesized)
gctgagagcagatcccaggcaagcttcttccatctggtgaaaaagatgaacaccaggcgtgtctgatcttcccagaggaagaagggagcatctttttgaacagcatttctgtgagaaatg

SEQ ID NO: 376757 - DNA, 120 bp, Artificial Sequence
  ENSG00000143162_18 (sequence is synthesized)
gagctatcactcctgtgcttttgcggttttatgtggcaaagggagagtgttctgggtgggcctgacctgatcaggcatatcctctaaaatcagagttttctccagctggttccagaagac

SEQ ID NO: 376758 - DNA, 120 bp, Artificial Sequence
  ENSG00000143162_19 (sequence is synthesized)
taagtcagagagatgctctgtgtttgggccagaagcaagcaaacatccacattgtgaactgcctatgggggccacctggcaaggaactgcaggtgttttctgggacctgagagcattccc

SEQ ID NO: 376759 - DNA, 120 bp, Artificial Sequence
  ENSG00000143162_20 (sequence is synthesized)
tggccaatcattagcaggaaaacaggaactcactcctataactgagaggaaataaaatttaccaacaaccaatgagcctggaagaagaccctgagcctcaaatgagaactgcagccccag

SEQ ID NO: 376760 - DNA, 120 bp, Artificial Sequence
  ENSG00000143162_21 (sequence is synthesized)
ccaacactgatttcagccttgtaagtacctgagcagagaactcagccatgctatatcaggacttctgacctacattactgtaagatcataaatgtgttgttttaagccactacatttgtg

SEQ ID NO: 376761 - DNA, 120 bp, Artificial Sequence
  ENSG00000143162_22 (sequence is synthesized)
atagtttgttatgcagcaatagaaagctaatacaacttccaaaaattctactgtgtaagtcaggatcctttggttgcaagcaacaaaaatcagctctggatagcttaagcaaaaaaggaa

SEQ ID NO: 376762 - DNA, 120 bp, Artificial Sequence
  ENSG00000143162_23 (sequence is synthesized)
attggctggaacagtgttcgtgtagccacagaatatgagcaacttctgggatggatccaagaaggagaaacaaacaagggttatgtccaggtcttgtttcattctgttaagatttaaagt

SEQ ID NO: 376763 - DNA, 120 bp, Artificial Sequence
  ENSG00000143162_24 (sequence is synthesized)
gtccaggtcttgtttcattctgttaagatttaaagtccggggagaaagcagctgattgacattacctgatagcctcatcaagcgattataatcggccggcacggtggctcacgcctgtaa

SEQ ID NO: 376764 - DNA, 120 bp, Artificial Sequence
  ENSG00000143164_0 (sequence is synthesized)
gaggagactgttgctgatctttggatgttctggttagtctaagaaggagagtatgaggcgagctccggcccgggtgcggccgggcttcaggggcccaggcgccgctgctgccaccgccat

SEQ ID NO: 376765 - DNA, 120 bp, Artificial Sequence
  ENSG00000143164_1 (sequence is synthesized)
ctaacgctgcgccctggaggcccggcgcgcggatggtgccggtgcggctcgggtgttgaaacgggtgtcccctccccctcctcccctcccccacgcggtggtctcccctcccacccggct

SEQ ID NO: 376766 - DNA, 120 bp, Artificial Sequence
  ENSG00000143164_2 (sequence is synthesized)
caggcagagccatgtctcggggtggctcctacccacacctgttgtgggacgtgaggaaaaggtccctcgggctggaggacccgtcccggctgcggagtcgctacctgggaagaagagaat

SEQ ID NO: 376767 - DNA, 120 bp, Artificial Sequence
  ENSG00000143164_3 (sequence is synthesized)
ttatccaaagattaaaacttgaagcaacccttaatgtgcatgatggttgtgttaatacaatctgttggaatgacactggagaatatattttatctggctcagatgacaccaaattagtaa

SEQ ID NO: 376768 - DNA, 120 bp, Artificial Sequence
  ENSG00000143164_4 (sequence is synthesized)
ttagtaatccttacagcagaaaggttttgacaacaattcgttcagggcaccgagcaaacatatttagtgcaaagttcttaccttgtacaaatgataaacagattgtatcctgctctggag

SEQ ID NO: 376769 - DNA, 120 bp, Artificial Sequence
  ENSG00000143164_5 (sequence is synthesized)
atggagtaatattttataccaacgttgagcaagatgcagaaaccaacagacaatgccaatttacgtgtcattatggaactacttatgagattatgactgtacccaatgacccttacactt

SEQ ID NO: 376770 - DNA, 120 bp, Artificial Sequence
  ENSG00000143164_6 (sequence is synthesized)
ttctctcttgtggtgaagatggaactgttaggtggtttgatacacgcatcaaaactagctgcacaaaagaagattgtaaagatgatattttaattaactgtcgacgtgctgccacgtctg

SEQ ID NO: 376771 - DNA, 120 bp, Artificial Sequence
  ENSG00000143164_7 (sequence is synthesized)
ttgctatttgcccaccaataccatattaccttgctgttggttgttctgacagctcagtacgaatatatgatcggcgaatgctgggcacaagagctacagggaattatgcaggtcgaggga

SEQ ID NO: 376772 - DNA, 120 bp, Artificial Sequence
  ENSG00000143164_8 (sequence is synthesized)
ctactggaatggttgcccgttttattccttcccatcttaataataagtcctgcagagtgacatctctgtgttacagtgaagatggtcaagagattctcgttagttactcttcagattaca

SEQ ID NO: 376773 - DNA, 120 bp, Artificial Sequence
  ENSG00000143164_9 (sequence is synthesized)
tatatctttttgacccgaaagatgatacagcacgagaacttaaaactccttctgcggaagagagaagagaagagttgcgacaaccaccagttaagcgtttgagacttcgtggtgattggt

SEQ ID NO: 376774 - DNA, 120 bp, Artificial Sequence
  ENSG00000143164_10 (sequence is synthesized)
cagatactggacccagagcaaggccggagagtgaacgagaacgagatggagagcagagtcccaatgtgtcattgatgcagagaatgtctgatatgttatcaagatggtttgaagaagcaa

SEQ ID NO: 376775 - DNA, 120 bp, Artificial Sequence
  ENSG00000143164_11 (sequence is synthesized)
gtgaggttgcacaaagcaatagaggacgaggaagatctcgacccagaggtggaacaagtcaatcagatatttcaactcttcctacggtcccatcaagtcctgatttggaagtgagtgaaa

SEQ ID NO: 376776 - DNA, 120 bp, Artificial Sequence
  ENSG00000143164_12 (sequence is synthesized)
ctgcaatggaagtagatactccagctgaacaatttcttcagccttctacatcctctacaatgtcagctcaggctcattcgacatcatctcccacagaaagccctcattctactcctttgc

SEQ ID NO: 376777 - DNA, 120 bp, Artificial Sequence
  ENSG00000143164_13 (sequence is synthesized)
cagtctgattctccttcttctgtggttaacaaacagctcggatccatgtcacttgacgagcaacaggataacaataatgaaaagctgagccccaaaccagggacaggtgaaccagtttta

SEQ ID NO: 376778 - DNA, 120 bp, Artificial Sequence
  ENSG00000143164_14 (sequence is synthesized)
agtttgcactacagcacagaaggaacaactacaagcacaataaaactgaactttacagatgaatggagcagtatagcatcaagttctagaggaattgggagccattgcaaatctgagggt

SEQ ID NO: 376779 - DNA, 120 bp, Artificial Sequence
  ENSG00000143164_15 (sequence is synthesized)
caggaggaatctttcgtcccacagagctcagtgcaaccaccagaaggagacagtgaaacaaaagctcctgaagaatcatcagaggatgtgacaaaatatcaggaaggagtatctgcagaa

SEQ ID NO: 376780 - DNA, 120 bp, Artificial Sequence
  ENSG00000143164_16 (sequence is synthesized)
aacccagttgagaaccatatcaatataacacaatcagataagttcacagccaagccattggattccaactcaggagaaagaaatgacctcaatcttgatcgctcttgtggggttccagaa

SEQ ID NO: 376781 - DNA, 120 bp, Artificial Sequence
  ENSG00000143164_17 (sequence is synthesized)
gaatctgcttcatctgaaaaagccaaggaaccagaaacttcagatcagactagcactgagagtgctaccaatgaaaataacaccaatcctgagcctcagttccaaacagaagccactggg

SEQ ID NO: 376782 - DNA, 120 bp, Artificial Sequence
  ENSG00000143164_18 (sequence is synthesized)
ccttcagctcatgaagaaacatccaccagggactctgctcttcaggacacagatgacagtgatgatgacccagtcctgatcccaggtgcaaggtatcgagcaggacctggtgatagacgc

SEQ ID NO: 376783 - DNA, 120 bp, Artificial Sequence
  ENSG00000143164_19 (sequence is synthesized)
tctgctgttgcccgtattcaggagttcttcagacggagaaaagaaaggaaagaaatggaagaattggatactttgaacattagaaggccgctagtaaaaatggtttataaaggccatcgc

SEQ ID NO: 376784 - DNA, 120 bp, Artificial Sequence
  ENSG00000143164_20 (sequence is synthesized)
aactccaggacaatgataaaagaagccaatttctggggtgctaactttgtaatgagtggttctgactgtggccacattttcatctgggatcggcacactgctgagcatttgatgcttctg

SEQ ID NO: 376785 - DNA, 120 bp, Artificial Sequence
  ENSG00000143164_21 (sequence is synthesized)
gaagctgataatcatgtggtaaactgcctgcagccacatccgtttgacccaattttagcctcatctggcatagattatgacataaagatctggtcaccattagaagagtcaaggattttt

SEQ ID NO: 376786 - DNA, 120 bp, Artificial Sequence
  ENSG00000143164_22 (sequence is synthesized)
aaccgaaaacttgctgatgaagttataactcgaaacgaactcatgctggaagaaactagaaacaccattacagttccagcctctttcatgttgaggatgttggcttcacttaatcatatc

SEQ ID NO: 376787 - DNA, 120 bp, Artificial Sequence
  ENSG00000143164_23 (sequence is synthesized)
cgagctgaccggttggagggtgacagatcagaaggctctggtcaagagaatgaaaatgaggatgaggaataataaactctttttggcaagcacttaaatgttctgaaatttgtataagac

SEQ ID NO: 376788 - DNA, 120 bp, Artificial Sequence
  ENSG00000143164_24 (sequence is synthesized)
atttattatatttttttctttacagagctttagtgcaattttaaggttatggtttttggagtttttccctttttttgggataacctaacattggtttggaatgattgtgtgcatgaattt

SEQ ID NO: 376789 - DNA, 120 bp, Artificial Sequence
  ENSG00000143164_25 (sequence is synthesized)
gggagattgtataaaacaaaactagcagaatgtttttaaaactttttgccgtgtatgaggagtgctagaaaatgcaaagtgcaatattttccctaaccttcaaatgtgggagcttggatc

SEQ ID NO: 376790 - DNA, 120 bp, Artificial Sequence
  ENSG00000143164_26 (sequence is synthesized)
aatgttgaagaataattttcatcatagtgaaaatgttggttcaaataaatttctacacttgccatttgcatgtttgttgctttctaattaaagaaactggttgttttaagataccctgaa

SEQ ID NO: 376791 - DNA, 120 bp, Artificial Sequence
  ENSG00000143164_27 (sequence is synthesized)
acatcatcagtctggtcccctgaagtcatgggttgctggctcctgctcagagtgacagcaccctgtggagtctgctggtactgacctaaccaccacagagccccactggagcatggagcc

SEQ ID NO: 376792 - DNA, 120 bp, Artificial Sequence
  ENSG00000143164_28 (sequence is synthesized)
agcctagagagggtcagattctccttcttctgtggttaacaaacagctcggatccatgtcacttgacgagcaacagggtgcgtgcaacaggagatgcgctatgcccatccatccatagct

SEQ ID NO: 376793 - DNA, 120 bp, Artificial Sequence
  ENSG00000143164_29 (sequence is synthesized)
ttattgcaatgcatatactaagctctctcacacctttcgtagcatttcattttgattatggtcttatagtcagtattttgtggaccaaattacaataggtggtattgtacataaaaggtc

SEQ ID NO: 376794 - DNA, 120 bp, Artificial Sequence
  ENSG00000143164_30 (sequence is synthesized)
tttttggcctatacagattattttctatgtaagctcatttctcactttggcccttgatgccaactttgaactctctccctataacaaaattataatggatacaaactatatccatttttt

SEQ ID NO: 376795 - DNA, 120 bp, Artificial Sequence
  ENSG00000143164_31 (sequence is synthesized)
aaattctaggtatctgtcataaaattgtgtagaactgtgggtgtgaggttaatactacctcgttgcttatgtaggataagttatttaaacacagtgatattctatattactagattgctt

SEQ ID NO: 376796 - DNA, 120 bp, Artificial Sequence
  ENSG00000143164_32 (sequence is synthesized)
tagtaatgatacttggttttatgtctcacttatctggtagccaaattcctggtagctttaactaaagactatagttacgaacccagaggtaagctcaaaagctgtcagtcagaagctccc

SEQ ID NO: 376797 - DNA, 120 bp, Artificial Sequence
  ENSG00000143164_33 (sequence is synthesized)
acttccacttgtacttttcaatgtgggaaaggtatagaatcaatctccaagccttgaatagagcctgatgaaatgaacgcgttacttatttatcaggctttattactagcgatcaaatat

SEQ ID NO: 376798 - DNA, 120 bp, Artificial Sequence
  ENSG00000143164_34 (sequence is synthesized)
agcacagagaaggattagtagaggaagacattctgacatgaagggacatctgaaaaggctggagataggaagactaaaaactaaaaaggctatttagtgttagcgcaaatgttttactat

SEQ ID NO: 376799 - DNA, 120 bp, Artificial Sequence
  ENSG00000143164_35 (sequence is synthesized)
ctcacctcagaatttaatgaagtattttaaatatattgtgacaaagtgtgataagtaatcttagttaagtctttaagaatgatttaacacgatattcactttctctatttaaaaaggcag

SEQ ID NO: 376800 - DNA, 73 bp, Artificial Sequence
  ENSG00000143164_36 (sequence is synthesized)
atagctgggggaggatcacttgaacccagaaatttgagaccagcctggtcaatatagcgagaccccgtctctt

SEQ ID NO: 376801 - DNA, 120 bp, Artificial Sequence
  ENSG00000143164_37 (sequence is synthesized)
tttttataccccaaaagggtgtaaaacattggtgattatttttgaaaaagggcttttcaaaactgagccatattggaaaaaatcagcacttacccgatcctgtgcaagcaggctctaaac

SEQ ID NO: 376802 - DNA, 120 bp, Artificial Sequence
  ENSG00000143164_38 (sequence is synthesized)
aacaccagatttcccacagtgtccataatgacagtcacatggcagcacttctcagatggatgcattggatctatgtgtttgatgtttataagtagttaataaattagatatattagtctg

SEQ ID NO: 376803 - DNA, 120 bp, Artificial Sequence
  ENSG00000143164_39 (sequence is synthesized)
actttatcgaggagccggtggtaggtggcccgcaggcctcgggcaccggcggccgacatcgccgccgagggatcgttggcagccgggtgggagcgtggctgtgttctcgtccctggctga

SEQ ID NO: 376804 - DNA, 120 bp, Artificial Sequence
  ENSG00000143164_40 (sequence is synthesized)
caacgaaggggagctagtcacttttcctgccacgacgactcgcgtccgcctctcgcctggagtacccttcccgcggctttccctgcccgctgtgaaccgaaaagctgcggcccgcgcccc

SEQ ID NO: 376805 - DNA, 120 bp, Artificial Sequence
  ENSG00000143164_41 (sequence is synthesized)
gttcacttaaaattcaatagagagacatgtagaaatacatactagataatgaaaggatccaaacagtgaagaagcagtccctttatatttttgaattttttttcaagagtaaagtgtgtt

SEQ ID NO: 376806 - DNA, 120 bp, Artificial Sequence
  ENSG00000143164_42 (sequence is synthesized)
atgatagtcatcttgatttgtttgaaatgatgtttacaaatgctattaaaattataaatcctacattttacttgtgaattttttggtctacctttctagttgtaaaatataaaaatccta

SEQ ID NO: 376807 - DNA, 120 bp, Artificial Sequence
  ENSG00000143164_43 (sequence is synthesized)
atgggatttcagtattacattattaaatcttcagttatctctttatccaacatggttcttttagccctataatatattgtgaaagatcattattttttacaagaaaactctactaaaaaa

SEQ ID NO: 376808 - DNA, 120 bp, Artificial Sequence
  ENSG00000143164_44 (sequence is synthesized)
ggcatctggacaccacacacatcatcagtctgaatttttaaggggccctgagatagctttgcttcgtaagcgcctgcaacaactgaggcttaagaaggctgagcagcagaggcagcaaga

SEQ ID NO: 376809 - DNA, 120 bp, Artificial Sequence
  ENSG00000143164_45 (sequence is synthesized)
gaaagtgaagctgcgctggttctactgccctttcactttgattaagcaggcccgtagttaaaatgggtttttgggccttcagtgcctaaagatgatgccgcacaattctcttgcttcttt

SEQ ID NO: 376810 - DNA, 120 bp, Artificial Sequence
  ENSG00000143164_46 (sequence is synthesized)
tcactggagactcgtgagcgagagactacagaattgagtagcttctctctctactcgtcttttatccctagcgacttaaggatctggttagagtggcccgaatgcattcttccagggaag

SEQ ID NO: 376811 - DNA, 120 bp, Artificial Sequence
  ENSG00000143167_0 (sequence is synthesized)
agaagctgctgtagctttaaccagacagctcagacctgtctggaggctgccagtgacaggttaggtttagggcagagaagaagcaagaccatggtggggaagatgtggcctgtgttgtgg

SEQ ID NO: 376812 - DNA, 120 bp, Artificial Sequence
  ENSG00000143167_1 (sequence is synthesized)
acactctgtgcagtcagggtgaccgtcgatgccatctctgtggaaactccgcaggacgttcttcgggcttcgcagggaaagagtgtcaccctgccctgcacctaccacacttccacctcc

SEQ ID NO: 376813 - DNA, 120 bp, Artificial Sequence
  ENSG00000143167_2 (sequence is synthesized)
agtcgagagggacttattcaatgggataagctcctcctcactcatacggaaagggtggtcatctggccgttttcaaacaaaaactacatccatggtgagctttataagaatcgcgtcagc

SEQ ID NO: 376814 - DNA, 120 bp, Artificial Sequence
  ENSG00000143167_3 (sequence is synthesized)
atatccaacaatgctgagcagtccgatgcctccatcaccattgatcagctgaccatggctgacaacggcacctacgagtgttctgtctcgctgatgtcagacctggagggcaacaccaag

SEQ ID NO: 376815 - DNA, 120 bp, Artificial Sequence
  ENSG00000143167_4 (sequence is synthesized)
tcacgtgtccgcctgttggtcctcgtgccaccctccaaaccagaatgcggcatcgagggagagaccataattgggaacaacatccagctgacctgccaatcaaaggagggctcaccaacc

SEQ ID NO: 376816 - DNA, 120 bp, Artificial Sequence
  ENSG00000143167_5 (sequence is synthesized)
cctcagtacagctggaagaggtacaacatcctgaatcaggagcagcccctggcccagccagcctcaggtcagcctgtctccctgaagaatatctccacagacacatcgggttactacatc

SEQ ID NO: 376817 - DNA, 120 bp, Artificial Sequence
  ENSG00000143167_6 (sequence is synthesized)
tgtacctccagcaatgaggaggggacgcagttctgcaacatcacggtggccgtcagatctccctccatgaacgtggccctgtatgtgggcatcgcggtgggcgtggttgcagccctcatt

SEQ ID NO: 376818 - DNA, 120 bp, Artificial Sequence
  ENSG00000143167_7 (sequence is synthesized)
atcattggcatcatcatctactgctgctgctgccgagggaaggacgacaacactgaagacaaggaggatgcaaggccgaaccgggaagcctatgaggagccaccagagcagctaagagaa

SEQ ID NO: 376819 - DNA, 120 bp, Artificial Sequence
  ENSG00000143167_8 (sequence is synthesized)
ctttccagagagagggaggaggaggatgactacaggcaagaagagcagaggagcactgggcgtgaatccccggaccacctcgaccagtgacaggccagcagcagagggcggcggaggaag

SEQ ID NO: 376820 - DNA, 120 bp, Artificial Sequence
  ENSG00000143167_9 (sequence is synthesized)
ggttaggggttcattctcccgcttcctggcctcccttctcctttctaagccctgttctcctgtccctccatcccagacattgatggggacatttcttccccagtgtcagctgtggggaac

SEQ ID NO: 376821 - DNA, 120 bp, Artificial Sequence
  ENSG00000143167_10 (sequence is synthesized)
gctgatcctgctgacctcactgtcctgtgaagtaacccctcctggctgtgacacctggtgcgggcctggccctcactcaagaccaggctgcagcctccacttccctcgtagttggcagga

SEQ ID NO: 376822 - DNA, 120 bp, Artificial Sequence
  ENSG00000143167_11 (sequence is synthesized)
gctcctggaagcacagcgctgagcatggggcgctcccactcagaactctccagggaggcgatgccagccttggggggtgggggctgtcctgctcacctgtgtgcccagcacctggagggg

SEQ ID NO: 376823 - DNA, 120 bp, Artificial Sequence
  ENSG00000143167_12 (sequence is synthesized)
caccaggtggagggtttgcactccacacatctttcttgaatgaatgaaagaataagtgagtatgcttgggccctgcattggcctggcctccagctcccactccctttccaacctcacttc

SEQ ID NO: 376824 - DNA, 120 bp, Artificial Sequence
  ENSG00000143167_13 (sequence is synthesized)
ccgtagctgccagtatgttccaaaccctcctgggaaggccacctcccactcctgctgcacaggccctggggagcttttgcccacacactttccatctctgcctgtcaatatcgtacctgt

SEQ ID NO: 376825 - DNA, 120 bp, Artificial Sequence
  ENSG00000143167_14 (sequence is synthesized)
ccctccaggcccatctcaaatcacaaggatttctctaaccctatcctaattgtccacatacgtggaaacaatcctgttactctgtcccacgtccaatcatgggccacaaggcacagtctt

SEQ ID NO: 376826 - DNA, 120 bp, Artificial Sequence
  ENSG00000143167_15 (sequence is synthesized)
ctgagcgagtgctctcactgtattagagcgccagctccttggggcagggcctgggcctcatggcttttgctttccctgaagccctagtagctggcgcccatcctagtgggcacttaagct

SEQ ID NO: 376827 - DNA, 120 bp, Artificial Sequence
  ENSG00000143167_16 (sequence is synthesized)
taattggggaaactgctttgattggttgtgccttcccttctctggtctccttgagatgatcgtagacacagggatgattcccacccaaacccacgtattcattcagtgagttaaacacga

SEQ ID NO: 376828 - DNA, 120 bp, Artificial Sequence
  ENSG00000143167_17 (sequence is synthesized)
attgatttaaagtgaacacacacaagggagcttgcttgcagatggtctgagttcttgtgtcctggtaattcctctccaggccagaataattggcatgtctcctcaacccacatggggttc

SEQ ID NO: 376829 - DNA, 120 bp, Artificial Sequence
  ENSG00000143167_18 (sequence is synthesized)
ctggttgttcctgcatcccgatacctcagccctggccctgcccagcccatttgggctctggttttctggtggggctgtcctgctgccctcccacagcctccttctgtttgtcgagcattt

SEQ ID NO: 376830 - DNA, 120 bp, Artificial Sequence
  ENSG00000143167_19 (sequence is synthesized)
cttctactcttgagagctcaggcagcgttagggctgcttaggtctcatggaccagtggctggtctcacccaactgcagtttactattgctatcttttctggatgatcagaaaaataattc

SEQ ID NO: 376831 - DNA, 120 bp, Artificial Sequence
  ENSG00000143167_20 (sequence is synthesized)
cataaatctattgtctacttgcgattttttaaaaaatgtatatttttatatatattgttaaatcctttgcttcattccaaatgctttcagtaataataaaattgtgggtggaaattctta

SEQ ID NO: 376832 - DNA, 120 bp, Artificial Sequence
  ENSG00000143167_21 (sequence is synthesized)
agtgacaggttaggtttagggcagagaagaagcaagaccatggtggggaagatgtggcctgtgttgtggacactctgtgcagagcatttgggaaataaaagtacacatagaagaaatctc

SEQ ID NO: 376833 - DNA, 120 bp, Artificial Sequence
  ENSG00000143167_22 (sequence is synthesized)
atgccatgctgcctcctgaaatggccatggagaagttgtgcgatacagagcggtacacgctccgggattaaagtatcgaagggatgtttctgaaccagaagaaagggagagttgggagac

SEQ ID NO: 376834 - DNA, 120 bp, Artificial Sequence
  ENSG00000143167_23 (sequence is synthesized)
tttctggtatcttccagcagctcccaacaccctttcgtcttagcctgggccttttcttcagctgcaaacacccacgagggaaatgtgcagctgacctctggggtccccgggctgagggtg

SEQ ID NO: 376835 - DNA, 120 bp, Artificial Sequence
  ENSG00000143171_0 (sequence is synthesized)
accagctgctgccgccacagccgtctcaaacgcactatgtggactctccgatctagaggcagattcctgactaatcccagagggctggcccagcctgtgctccccgggctgctaggaagc

SEQ ID NO: 376836 - DNA, 120 bp, Artificial Sequence
  ENSG00000143171_1 (sequence is synthesized)
gatgaccactcttgttagcccaagttgaagaaagccgggctgtgcctgggagccgagagaggcggtaatatttagaagctgcacaggagaggaacatgaactgacgagtaaacatgtatg

SEQ ID NO: 376837 - DNA, 120 bp, Artificial Sequence
  ENSG00000143171_2 (sequence is synthesized)
gaaattattctcacttcatgaagtttcccgcaggctatggaggctcccctggccacactggctctacatccatgagcccatcagcagccttgtccacagggaagccaatggacagccacc

SEQ ID NO: 376838 - DNA, 120 bp, Artificial Sequence
  ENSG00000143171_3 (sequence is synthesized)
ccagctacacagataccccagtgagtgccccacggactctgagtgcagtggggacccccctcaatgccctgggctctccatatcgagtcatcacctctgccatgggcccaccctcaggag

SEQ ID NO: 376839 - DNA, 120 bp, Artificial Sequence
  ENSG00000143171_4 (sequence is synthesized)
cacttgcagcgcctccaggaatcaacttggttgccccacccagctctcagctaaatgtggtcaacagtgtcagcagttcagaggacatcaagcccttaccagggcttcccgggattggaa

SEQ ID NO: 376840 - DNA, 120 bp, Artificial Sequence
  ENSG00000143171_5 (sequence is synthesized)
acatgaactacccatccaccagccccggatctctggttaaacacatctgtgccatctgtggagacagatcctcaggaaagcactacggggtatacagttgtgaaggctgcaaagggttct

SEQ ID NO: 376841 - DNA, 120 bp, Artificial Sequence
  ENSG00000143171_6 (sequence is synthesized)
tcaagaggacgataaggaaggacctcatctacacgtgtcgggataataaagactgcctcattgacaagcgtcagcgcaaccgctgccagtactgtcgctatcagaagtgccttgtcatgg

SEQ ID NO: 376842 - DNA, 120 bp, Artificial Sequence
  ENSG00000143171_7 (sequence is synthesized)
gcatgaagagggaagctgtgcaagaagaaagacagaggagccgagagcgagctgagagtgaggcagaatgtgctaccagtggtcatgaagacatgcctgtggagaggattctagaagctg

SEQ ID NO: 376843 - DNA, 120 bp, Artificial Sequence
  ENSG00000143171_8 (sequence is synthesized)
ggagaactcgacaaatgaccctgttaccaacatatgtcatgctgctgacaagcagcttttcaccctcgttgaatgggccaagcgtattccccacttctctgacctcaccttggaggacca

SEQ ID NO: 376844 - DNA, 120 bp, Artificial Sequence
  ENSG00000143171_9 (sequence is synthesized)
ggtcattttgcttcgggcagggtggaatgaattgctgattgcctctttctcccaccgctcagtttccgtgcaggatggcatccttctggccacgggtttacatgtccaccggagcagtgc

SEQ ID NO: 376845 - DNA, 120 bp, Artificial Sequence
  ENSG00000143171_10 (sequence is synthesized)
ccacagtgctggggtcggctccatctttgacagagtcctaactgagctggtttccaaaatgaaagacatgcagatggacaagtcggaactgggatgcctgcgagccattgtactctttaa

SEQ ID NO: 376846 - DNA, 120 bp, Artificial Sequence
  ENSG00000143171_11 (sequence is synthesized)
cccagatgccaagggcctgtccaacccctctgaggtggagactctgcgagagaaggtttatgccacccttgaggcctacaccaagcagaagtatccggaacagccaggcaggtttgccaa

SEQ ID NO: 376847 - DNA, 120 bp, Artificial Sequence
  ENSG00000143171_12 (sequence is synthesized)
gctgctgctgcgcctcccagctctgcgttccattggcttgaaatgcctggagcacctcttcttcttcaagctcatcggggacacccccattgacaccttcctcatggagatgttggagac

SEQ ID NO: 376848 - DNA, 120 bp, Artificial Sequence
  ENSG00000143171_13 (sequence is synthesized)
cccgctgcagatcacctgagccccaccagccacagcctccccacccaggatgacccctgggcaggtgtgtgtggacccccaccctgcactttcctccacctcccaccctgacccccttcc

SEQ ID NO: 376849 - DNA, 120 bp, Artificial Sequence
  ENSG00000143171_14 (sequence is synthesized)
tgtccccaaaatgtgatgcttataataaagaaaacctttctacacatgagacttttataggtggacttttgtatagatgttaaaggtaatacgctttgctgtctacagggctgggagact

SEQ ID NO: 376850 - DNA, 120 bp, Artificial Sequence
  ENSG00000143171_15 (sequence is synthesized)
ttctggaagttcttgggaaaactaatcaagcctctgtacatacaattggtttaaattattttttcacttgccctggaaagcaaacaaatgagtaataaaataatatgtgtgaaattggca

SEQ ID NO: 376851 - DNA, 120 bp, Artificial Sequence
  ENSG00000143171_16 (sequence is synthesized)
cacatcgctagggctgtgaaaacagatactgtgagccctgaaccctccaggaggctgcttccccatgacactagtgaccagtaaaatgaaaaggaggagcaaaggagattttgagtcaca

SEQ ID NO: 376852 - DNA, 120 bp, Artificial Sequence
  ENSG00000143171_17 (sequence is synthesized)
gaaatgaaacccaggcaaccagcctagaagaaacactccaagatattcattaagtgctttgtttcccgttcctctgacatcttgtaaatgctttttgaattaaagatgataacaggcttt

SEQ ID NO: 376853 - DNA, 120 bp, Artificial Sequence
  ENSG00000143171_18 (sequence is synthesized)
ccctgagcagtgttctgggcttgggctccggaaccacactgcagcaatgctttgctcggttaacgagatgacactggaaaaaaggccttggtgttagctacagtgagctggactctggat

SEQ ID NO: 376854 - DNA, 120 bp, Artificial Sequence
  ENSG00000143171_19 (sequence is synthesized)
cgtctgggcagattattcctatgcatcctgccttcctcacccaggactggtctgagagggattcatgatggaagcatgttcattctgtgacctggttctcgcctaaatgtggtcaacagt

SEQ ID NO: 376855 - DNA, 120 bp, Artificial Sequence
  ENSG00000143171_20 (sequence is synthesized)
acctacaccgggcggtcatacatcgattggcttcctagataatagatcgtgccacccggtagggacctctggggacgcgccgggagctggaagagtcgcacgcagcagcccaaccctgag

SEQ ID NO: 376856 - DNA, 120 bp, Artificial Sequence
  ENSG00000143178_0 (sequence is synthesized)
accccgctccccaactaaagcttaacaggttggtggcataatgtggagacttttaaggggtgtcatcctaggagcttaggcaagagccagggtatcttctctccgctccccaagcactgt

SEQ ID NO: 376857 - DNA, 120 bp, Artificial Sequence
  ENSG00000143178_1 (sequence is synthesized)
tcaagtgggtttgaaaagcaggcaagtgagggaaggaagaagctagaagcaggcaagttgggtaacggctctcggcaaagttcgagaagtgcctatggccatgagtgagctgggcactcg

SEQ ID NO: 376858 - DNA, 120 bp, Artificial Sequence
  ENSG00000143178_2 (sequence is synthesized)
gaagcccagcgatggcactgtttctcatctgctcaatgtggtggagagtgagcttcaggcagggagggaaaaaggcgaccctacggagaagcaacttcagatcatcctggaggatgcacc

SEQ ID NO: 376859 - DNA, 120 bp, Artificial Sequence
  ENSG00000143178_3 (sequence is synthesized)
tctctggcagagattcaaggaagtcactaatgagatgattgtgaccaagaatggcagacggatgtttccagtcctaaagattagtgtcacagggttggaccccaatgccatgtactccct

SEQ ID NO: 376860 - DNA, 120 bp, Artificial Sequence
  ENSG00000143178_4 (sequence is synthesized)
cctgctggactttgtccctacggacagtcaccgctggaagtacgtcaacggggaatgggtgcccgctggcaagccagaggtctccagccacagctgcgtctacattcacccggactcccc

SEQ ID NO: 376861 - DNA, 120 bp, Artificial Sequence
  ENSG00000143178_5 (sequence is synthesized)
caactttggggcccactggatgaaagctcccatctccttcagcaaagtgaagctgaccaacaagctcaatggaggcgggcagataatgttgaattctctgcataaatatgaaccccaggt

SEQ ID NO: 376862 - DNA, 120 bp, Artificial Sequence
  ENSG00000143178_6 (sequence is synthesized)
tcacatagtgcgtgttggaagtgcccatcgaatggtaacaaactgctccttccctgaaacccagttcatagccgtgactgcctatcagaatgaggagataacggctctcaaaatcaagta

SEQ ID NO: 376863 - DNA, 120 bp, Artificial Sequence
  ENSG00000143178_7 (sequence is synthesized)
caatccttttgccaaagccttcttggatgccaaggaaagaaatcacctaagagacgtaccggaggctatctctgagagccagcatgtgacctattctcacttgggaggctggatcttttc

SEQ ID NO: 376864 - DNA, 120 bp, Artificial Sequence
  ENSG00000143178_8 (sequence is synthesized)
caatccagatggagtgtgcacagcaggaaactccaattaccagtatgccgctcctctgcctctgcctgctccccacacccaccatggctgtgagcactattcgggtctccgaggacaccg

SEQ ID NO: 376865 - DNA, 120 bp, Artificial Sequence
  ENSG00000143178_9 (sequence is synthesized)
gcaggctccctacccttctgcgtacatgcacagaaaccattctccctcagtgaatttgatagaaagctcaagcaataatctgcaagttttctcgggacctgacagctggacttccttatc

SEQ ID NO: 376866 - DNA, 120 bp, Artificial Sequence
  ENSG00000143178_10 (sequence is synthesized)
ctccacaccccatgccagcatcctgtctgtaccccacaccaacggaccaatcaatccagggcccagcccctacccgtgcctgtggaccatcagcaatggtgccggaggccccagtgggcc

SEQ ID NO: 376867 - DNA, 120 bp, Artificial Sequence
  ENSG00000143178_11 (sequence is synthesized)
aggcccggaggtgcacgccagcaccccaggagcatttctcctcggaaacccagctgtgacttcacccccttctgtgctctccacccaagcacccacttcggctggtgtggaggttctggg

SEQ ID NO: 376868 - DNA, 120 bp, Artificial Sequence
  ENSG00000143178_12 (sequence is synthesized)
ctcactggatggttaagcaggatcctaggagcctctttgcacagcgatccttccatgtgtagagtgcttagaaaccccatcaactgatctagtgagtcagactgtggaatctcccttccc

SEQ ID NO: 376869 - DNA, 120 bp, Artificial Sequence
  ENSG00000143178_13 (sequence is synthesized)
actagctggaggtggaggtgggttattacagaagtcatactgggagagggttcagtttggatgatgctagttagatcatttgcatctctccaccattttcttctgcactcccattttctc

SEQ ID NO: 376870 - DNA, 120 bp, Artificial Sequence
  ENSG00000143178_14 (sequence is synthesized)
tgcagcttattcttgccatgcttaggtgacagaagtttgttaagtaccatccttgtgccctgcctcttattctcaaatcgttctggaaagcctcacttccttttctgtggagaaggtgca

SEQ ID NO: 376871 - DNA, 120 bp, Artificial Sequence
  ENSG00000143178_15 (sequence is synthesized)
aagctgttaaatgagctcagagtttacctagctaaggccactgcttcctgctttgtgaagcctggaaagtatgtgtggccacagggctcaggttcacacttctgctttgagaccaggatg

SEQ ID NO: 376872 - DNA, 120 bp, Artificial Sequence
  ENSG00000143178_16 (sequence is synthesized)
gggtgtaagccatagagtaaggttaacaaaaagaataaagctaatcatgtattacaaacagcagtgtgcccagacttgtggaaatgaagtcatgtcactcctctgctcagaaaccttcaa

SEQ ID NO: 376873 - DNA, 120 bp, Artificial Sequence
  ENSG00000143178_17 (sequence is synthesized)
tggttcaccattaccagtggaatgaagtcaattctcctcactataactgggtgtggtagtttaagcctataatctcagcccttttggaggccaaggtaagaggatcgcttgaggtcagga

SEQ ID NO: 376874 - DNA, 90 bp, Artificial Sequence
  ENSG00000143178_18 (sequence is synthesized)
ttgaggtcaggagttcgagaccagcttgtgcaacaaagtgagagcctgtctctacaaaaaatagtcatgcacacatagtcccaactactt

SEQ ID NO: 376875 - DNA, 120 bp, Artificial Sequence
  ENSG00000143178_19 (sequence is synthesized)
atcgcttgatctcaggaggttgaggctgcagtgaattatgattgtggcattgcactccagcctgggtggtagatcaaggctttgtttcatttgaaaaaaaagaaagaaagaaagaaagaa

SEQ ID NO: 376876 - DNA, 120 bp, Artificial Sequence
  ENSG00000143178_20 (sequence is synthesized)
atcctactacgagcgatcacaccatctggcctgaaaccacttccccagcttaggtccctctgttatcctgttggcctcctatgtattggtcaaggcaggcatctctgttctctgaacatt

SEQ ID NO: 376877 - DNA, 120 bp, Artificial Sequence
  ENSG00000143178_21 (sequence is synthesized)
cattgcactttcccacctctataccttgcctgtgccttagtgtcctcttttttccagttcacctgtgcgaatccgacccacctcccagagcctggctgaaacgtcactccctgcatccaa

SEQ ID NO: 376878 - DNA, 120 bp, Artificial Sequence
  ENSG00000143178_22 (sequence is synthesized)
catctgatctgctgagatatgtctgatctatctctgctcgctgttctcccgttgtttttgcctctgccatagagctcacctcattttgccttgtatttttgttacctgtgagtgtgtctc

SEQ ID NO: 376879 - DNA, 120 bp, Artificial Sequence
  ENSG00000143178_23 (sequence is synthesized)
tccctattagactgtaagcctctcgagggtgaggcctagccttcttgtctttgtaacccacagcagctggtactgtgccttgcctattgtaggtgcccaataaacatttgctgaactgaa

SEQ ID NO: 376880 - DNA, 120 bp, Artificial Sequence
  ENSG00000143178_24 (sequence is synthesized)
ccagcttcccacccctggtaaccactgttgtactctcagcttctatgtattcaactttcttagagtccacatataagtgagatcatattatgttcttctttttgtaaaaaggtatgtttt

SEQ ID NO: 376881 - DNA, 120 bp, Artificial Sequence
  ENSG00000143178_25 (sequence is synthesized)
tttcttaattttttttttttttaattgtagagatggtgtctctctgtgttgcccagagaggtctcaaattcctgggctcaagggattcccctgccttggactcccaaagtgccaggatta

SEQ ID NO: 376882 - DNA, 120 bp, Artificial Sequence
  ENSG00000143178_26 (sequence is synthesized)
caggtgtgggcaccatgccgggccaaaaggcactgtgcttgagatatttaaacctactcagggatggccgagaagaataagttcctggacctcagaaatctcatctggggcactggtggc

SEQ ID NO: 376883 - DNA, 120 bp, Artificial Sequence
  ENSG00000143178_27 (sequence is synthesized)
ccttaggcttagcttgaggggaggctggtatggtcccttcttaaaagagagtgactgtggtgaaatgagttagacagatcggtgttacccagggcaaatcattctaccaccctgaggcgt

SEQ ID NO: 376884 - DNA, 120 bp, Artificial Sequence
  ENSG00000143178_28 (sequence is synthesized)
atctataagatggagttaaggagtcactggtgtgaagattaaactatgaatgacacctggcatatggttgacattgaggaaacccacgtttctttttattttctatttccctgagaaaga

SEQ ID NO: 376885 - DNA, 120 bp, Artificial Sequence
  ENSG00000143178_29 (sequence is synthesized)
actaacaaactgttggtgcctgtagtgcaagccatggttatattttgccctaggataatgtcactggtcaccatctttatgtcttctacatttgctatcaattcaactgttgttatttcc

SEQ ID NO: 376886 - DNA, 120 bp, Artificial Sequence
  ENSG00000143178_30 (sequence is synthesized)
aaaagagagggaattaaactggttttacagaagacaaagggttctgtttgcccatgtgtatcctacttttactaacacttcttgtctttgtaaatgcaagataacggctctcaaaatcaa

SEQ ID NO: 376887 - DNA, 120 bp, Artificial Sequence
  ENSG00000143179_0 (sequence is synthesized)
gtaaaccggaccagccgctgcgggcaaaggaaggctcttggctccttcgggaaacccagccccgtcaccgggctccgagcggctcgcaggcgagcgacagcggcctcagccccggcagcg

SEQ ID NO: 376888 - DNA, 120 bp, Artificial Sequence
  ENSG00000143179_1 (sequence is synthesized)
cccagcggcggctgcggaaagcggagggagtccgacgcgggcgcgggcggggagcgtgcgtccgttcgcacaggcagcgggaggaggggcggcgcgaaccatggccggggacagcgagca

SEQ ID NO: 376889 - DNA, 120 bp, Artificial Sequence
  ENSG00000143179_2 (sequence is synthesized)
gaccctgcagaaccaccagcagcccaacggcggcgagcccttccttataggcgtcagcgggggaacagctagcggcaagtcttccgtgtgtgctaagatcgtgcagctcctggggcagaa

SEQ ID NO: 376890 - DNA, 120 bp, Artificial Sequence
  ENSG00000143179_3 (sequence is synthesized)
tgaggtggactatcgccagaagcaggtggtcatcctgagccaggatagcttctaccgtgtccttacctcggagcagaaggccaaagccctgaagggccagttcaactttgaccacccgga

SEQ ID NO: 376891 - DNA, 120 bp, Artificial Sequence
  ENSG00000143179_4 (sequence is synthesized)
tgcctttgacaatgaactcattctcaaaacactcaaagaaatcactgaagggaaaacagtccagatccccgtgtatgactttgtctcccattcccggaaggaggagacagttactgtcta

SEQ ID NO: 376892 - DNA, 120 bp, Artificial Sequence
  ENSG00000143179_5 (sequence is synthesized)
tcccgcagacgtggtgctctttgaagggatcctggccttctactcccaggaggtacgagacctgttccagatgaagctttttgtggatacagatgcggacacccggctctcacgcagagt

SEQ ID NO: 376893 - DNA, 120 bp, Artificial Sequence
  ENSG00000143179_6 (sequence is synthesized)
attaagggacatcagcgagagaggcagggatcttgagcagattttatctcagtacattacgttcgtcaagcctgcctttgaggaattctgcttgccaacaaagaagtatgctgatgtgat

SEQ ID NO: 376894 - DNA, 120 bp, Artificial Sequence
  ENSG00000143179_7 (sequence is synthesized)
catccctagaggtgcagataatctggtggccatcaacctcatcgtgcagcacatccaggacatcctgaatggagggccctccaaacggcagaccaatggctgtctcaacggctacacccc

SEQ ID NO: 376895 - DNA, 120 bp, Artificial Sequence
  ENSG00000143179_8 (sequence is synthesized)
ttcacgcaagaggcaggcatcggagtccagcagcaggccgcattgacccgtctccatcggaccccagcccctatctccaagagacagaggaggggtcaggaggcactgctcatctgtaca

SEQ ID NO: 376896 - DNA, 120 bp, Artificial Sequence
  ENSG00000143179_9 (sequence is synthesized)
tactgtttcctatgacattactgtatttaagaaaacaccatggagatgaaatgcctttgattttttttttctttttgtactttggaacgacaaaatgaaacagaacttgaccctgagctt

SEQ ID NO: 376897 - DNA, 120 bp, Artificial Sequence
  ENSG00000143179_10 (sequence is synthesized)
aaataacaaaactgtgccaactactactggtgatgcctaattatgaatccaacgtgtaaccagttataaatacatatatatataaaaaaggatctatttttgtgtaaatgtacaaatact

SEQ ID NO: 376898 - DNA, 120 bp, Artificial Sequence
  ENSG00000143179_11 (sequence is synthesized)
gtaaagctgtttgccataagtattttgcaggagggtctgtacttgagtgttttaggactggagctggaatttcaccaaggggaaattgcctgttgtgtcccagggtggggaggctcgggc

SEQ ID NO: 376899 - DNA, 120 bp, Artificial Sequence
  ENSG00000143179_12 (sequence is synthesized)
atctgtgagagacagggagggtggctaaggtccagttgcttttgagtgccccgtggaacttgatgggaatggggttggaaaaccttgattgcctcctctgtcacatgccactcttggagc

SEQ ID NO: 376900 - DNA, 87 bp, Artificial Sequence
  ENSG00000143179_13 (sequence is synthesized)
gaaattaggtaaaatctcaactcaaaaatcaaactcagggaagaggcccactgaggagaacaagtcttctgcattttcttcctgccc

SEQ ID NO: 376901 - DNA, 120 bp, Artificial Sequence
  ENSG00000143179_14 (sequence is synthesized)
ccactgaggagaacaagtcttctgcattttcttcctgccctgctcccaccttctcgcctctggctgcttggatagcttggtgactccttcctcaccctcctgcttctctgtctctccaag

SEQ ID NO: 376902 - DNA, 120 bp, Artificial Sequence
  ENSG00000143179_15 (sequence is synthesized)
aagccagagctgcctctttccttccctggaagagattttatgggatcgcttcctgatagaagatgggaaggagagggcagaactttgcctgctgtcatatctgaagaatcactggttctt

SEQ ID NO: 376903 - DNA, 120 bp, Artificial Sequence
  ENSG00000143179_16 (sequence is synthesized)
tctgcatcccaggggcgtaactgatctgactccttgggctttttcctgtattgtggaatatagagtggaccattgcaggctgggtgtgggtgagggcttcggtaactgatgccggcagca

SEQ ID NO: 376904 - DNA, 120 bp, Artificial Sequence
  ENSG00000143179_17 (sequence is synthesized)
gcgcctcatggagtggcaggggagctctgtctgtggaggggtagtagtttccgcttcctggaggtttgcagtgaggtgaggagagtaactttggtcagggattctcactagcagcgtcat

SEQ ID NO: 376905 - DNA, 120 bp, Artificial Sequence
  ENSG00000143179_18 (sequence is synthesized)
ggccaggatgctttacttatttgcaataccacctagtggatatggcaactgcagagcataaaaggggctcggaaaagcagtttttacaaagtatttaaaaggagagtatttaaatcatag

SEQ ID NO: 376906 - DNA, 120 bp, Artificial Sequence
  ENSG00000143179_19 (sequence is synthesized)
gtacctaagttggagcctgaggttgaaatatttggggtggagatttctagctttcctgagagctgctgcttggtggtagtgttttctctggaagtacagattcctgacattctgggtgga

SEQ ID NO: 376907 - DNA, 120 bp, Artificial Sequence
  ENSG00000143179_20 (sequence is synthesized)
gggagcccaagtgagcctgaaggagttctgattatagagtcccgagcctcagtttctgactgcagaagagccagagatgttcatttcattgttgaccaccctagtgcttggtggactgtg

SEQ ID NO: 376908 - DNA, 120 bp, Artificial Sequence
  ENSG00000143179_21 (sequence is synthesized)
cccttagctatcccactgtggctgccattgccagaaacattttggagaaccttttcttcccattgctctcagagcctgttcgagccattcaggtaaattggtctccattattacctggtc

SEQ ID NO: 376909 - DNA, 120 bp, Artificial Sequence
  ENSG00000143179_22 (sequence is synthesized)
acaccagattttcccccagactcagcaccatccagtctgattccccgtttctgggctcagtttgactctaaatctgttttgctattttaaaaagtcaaacctggtccccagcagagcttg

SEQ ID NO: 376910 - DNA, 120 bp, Artificial Sequence
  ENSG00000143179_23 (sequence is synthesized)
ccacccggagactttcaggagaccgtgcaggctctgaagggagctcccagtcacagcagccgcctacttggagcaagggaaggctcccaagatgcctcctttgaaagccggtgctcacca

SEQ ID NO: 376911 - DNA, 120 bp, Artificial Sequence
  ENSG00000143179_24 (sequence is synthesized)
agatcagttcaggatcaatcattatccttgtagtcatgccttgatcagttctgagatgaagcagggaatgcaggcctgggttagtatcctgaggacacagggcccctggccttgatggca

SEQ ID NO: 376912 - DNA, 120 bp, Artificial Sequence
  ENSG00000143179_25 (sequence is synthesized)
ctgggctgtgctcaggtgaagcccacccgtgtctgggagagccttggcttttcagtgggcagcatgctcaactttacttgaagctcccaggtgccaaaccatttagtgccttggctgttt

SEQ ID NO: 376913 - DNA, 120 bp, Artificial Sequence
  ENSG00000143179_26 (sequence is synthesized)
atcccactgccttggaagatggactcctctcatctctgagcctttacctagctgcttcctcatctacctgtggtgttgggaccaagcctccaatatctctgaatagcccactcctagctt

SEQ ID NO: 376914 - DNA, 120 bp, Artificial Sequence
  ENSG00000143179_27 (sequence is synthesized)
ggaaacagctataagggctgccctgccccttgtcaaatgatcaccaattcttggtggcttggctggggacaatgaacagtgtctgctggggtctgtgacacactgtttctggaacaagga

SEQ ID NO: 376915 - DNA, 120 bp, Artificial Sequence
  ENSG00000143179_28 (sequence is synthesized)
agggatggaaggctctacccctccgtggcagcccagcatttggccaactctgtatctgaacttgagctttctatggaacaaacaatggtcttagttttttaagagcctctgggtctctga

SEQ ID NO: 376916 - DNA, 120 bp, Artificial Sequence
  ENSG00000143179_29 (sequence is synthesized)
ttccatggagagtcaggagtagaattagtggaccagaaaccatgacatttgccatctaggtactctgctgttcagggtggaggcacagatgagcagagtggggtgatgttggttgtatgt

SEQ ID NO: 376917 - DNA, 120 bp, Artificial Sequence
  ENSG00000143179_30 (sequence is synthesized)
gcatagaagtcccctggctccagagccatccagtggtgcttggttctctcttcctgcccaggtattgtgtgtggaccaagtgtttaggaaacaagcatagaagcattatgtcacaggaag

SEQ ID NO: 376918 - DNA, 120 bp, Artificial Sequence
  ENSG00000143179_31 (sequence is synthesized)
gcctggcctctcactccttcacactaatgagccttctactgacccaagtttctttttctcgggcagcctgggaccactatgagcagagagatgggagtctgtgtaagaaggatgcaagta

SEQ ID NO: 376919 - DNA, 120 bp, Artificial Sequence
  ENSG00000143179_32 (sequence is synthesized)
tcctttgatttggagtggacagagcaggtccttgcaaaggcagtgggttaaacaacgggatgtctgtgggacaggccagggaaggagggcagagacagggtctccagttcaccttgccgc

SEQ ID NO: 376920 - DNA, 120 bp, Artificial Sequence
  ENSG00000143179_33 (sequence is synthesized)
agaactagcctaatcatccctgcttctggtcttggccacttggcaatcatggggaagttgactccccgcctcacttgggcttggagctggatacttgtggccacgcccaggataggttgc

SEQ ID NO: 376921 - DNA, 120 bp, Artificial Sequence
  ENSG00000143179_34 (sequence is synthesized)
cagagtttcattaggccgctgggtcgggctggaggcttgtgtacacctcggagcagtcgggcagcaggagggccggaagcctggttggtttgtatatgacctctcttgcccttgtgcact

SEQ ID NO: 376922 - DNA, 120 bp, Artificial Sequence
  ENSG00000143179_35 (sequence is synthesized)
ttccttgatttagcaaccttgacctgcactggccctcacagctgttggagggaagtagcctcttgcagggaaatattttcccctgccctggaatctcctatgtgcctgttaaagattcca

SEQ ID NO: 376923 - DNA, 120 bp, Artificial Sequence
  ENSG00000143179_36 (sequence is synthesized)
gggccaagaactcggcaggctgaggagcagctaggtaggtgggttatgcggttcaggactgcttctggaagggactgcctgtacttctgtaccaccgttgccctttacactttgctcagg

SEQ ID NO: 376924 - DNA, 120 bp, Artificial Sequence
  ENSG00000143179_37 (sequence is synthesized)
gcggggtgggggaagcattcaaacaaaacaaggaagggaactgtctggcaaagcataagtggatgcatccagagctcagtcccctttaatcttttgtctctgggcgttctgctgccttcc

SEQ ID NO: 376925 - DNA, 120 bp, Artificial Sequence
  ENSG00000143179_38 (sequence is synthesized)
tcataccggggactggcattccaggtcagcttggctgtggtcttagaggcagggagtgcctacccagtcctgcctcaggagcagggtgagtagctaaatacagacttaggcttttttttc

SEQ ID NO: 376926 - DNA, 120 bp, Artificial Sequence
  ENSG00000143179_39 (sequence is synthesized)
cccccttttaagatgcttgctcctctcccttttctttttaccaccctacctttattgttagtggttacaaagtgaccacatattatgtactttgctgtaaataaagacagacaaaaaggc

SEQ ID NO: 376927 - DNA, 120 bp, Artificial Sequence
  ENSG00000143179_40 (sequence is synthesized)
tttttttttttttttttttttggcaaacctctgtgcatgaggtaggtggaaatggttaaccatggctgggtcctcagcctggcctgggctccatgctgcagagggggcatgggtgggagc

SEQ ID NO: 376928 - DNA, 120 bp, Artificial Sequence
  ENSG00000143179_41 (sequence is synthesized)
gagctgggagcagtgagctgatgcctgatcagtgggtcgctggacttctgaacgcaggtaagtgcatgcaaggaggcagcgtgcagcccagccctctcggggcccagattgcttcttgtt

SEQ ID NO: 376929 - DNA, 120 bp, Artificial Sequence
  ENSG00000143179_42 (sequence is synthesized)
aacagtgagctctccaggagtgccctgcttttttaaaaaattcacactgaaattttgtttggagcaaatgttgcttgaaacaagaaggctgttggcctccatggacagccttttgtttca

SEQ ID NO: 376930 - DNA, 120 bp, Artificial Sequence
  ENSG00000143179_43 (sequence is synthesized)
aagagcattgtgtcattgccaagtttgaccattgtaagatgtcagaatgtaacttgtcttttccgaagccgctgctgatctgctcttggtcaagcctctcaggattccagcttgagaatc

SEQ ID NO: 376931 - DNA, 120 bp, Artificial Sequence
  ENSG00000143179_44 (sequence is synthesized)
gttgacaagagacattccagcccaccacttcccaagtaaagaattaaaatgcagcatgatggctaaggcaagggcctgcagaagaatgtaaaggagggaggaagagcaggggattcagag

SEQ ID NO: 376932 - DNA, 120 bp, Artificial Sequence
  ENSG00000143179_45 (sequence is synthesized)
ggtagagccagaccagacagacgtcgggattctgtacttcctcacaaatgctttctcgtctgtatcctctttcccaaaacttttctttattttccctccttcccttccccttctgtcctt

SEQ ID NO: 376933 - DNA, 120 bp, Artificial Sequence
  ENSG00000143179_46 (sequence is synthesized)
tcctccctcctttcaattgcctcaggactggcggggaggggatggagttgttgagagaaaactgtgagtttctgtttttaaagttcagagtgttaggttccataaatgccaggccatgag

SEQ ID NO: 376934 - DNA, 120 bp, Artificial Sequence
  ENSG00000143179_47 (sequence is synthesized)
agcattcctggagacgccttcagagaaaaaaagaaatcacatctgtttttgtctgcctttattcttcattcaacagcaggtttttttaattccaaggagaaggatgtctgccgtgtattt

SEQ ID NO: 376935 - DNA, 120 bp, Artificial Sequence
  ENSG00000143179_48 (sequence is synthesized)
ctgtttcatggtgaaagctcagaagtggtcaaaggagacctttgtcccggccgtgatcacccttggctctttggtggtggtccgagggctctgtaagaccatattagccaagtctttagc

SEQ ID NO: 376936 - DNA, 120 bp, Artificial Sequence
  ENSG00000143179_49 (sequence is synthesized)
cgcttgaagtctgtgggggcaaggaacccagaacccagcccagccagatgttctggcccttgttctctgtcccttgctagcccctgcctggcttggcccattatctgctctgtgctttgc

SEQ ID NO: 376937 - DNA, 120 bp, Artificial Sequence
  ENSG00000143179_50 (sequence is synthesized)
gcggcaagaggtaaagtacatttatggagaacatcggggtgaatgccaaagcggcttatgttctaaaatagtgaaaagaattgtgcagttggagttagacctatggtttgagactcagct

SEQ ID NO: 376938 - DNA, 120 bp, Artificial Sequence
  ENSG00000143179_51 (sequence is synthesized)
ttgggactgagcaaatcatttcacgtgatcaattttctaagctccagtttcctcattaggaaaaaagaagacaaagtaatacttgttgtaatggaattaaatgagataatgtcttcagaa

SEQ ID NO: 376939 - DNA, 120 bp, Artificial Sequence
  ENSG00000143179_52 (sequence is synthesized)
tcctactgagtcaatgagtcttctccagcttggccaaaccatggtctggctcctgaattatttatagttaagctctgagaccgggaggaagggaaggaagagcttgggacttaacctggt

SEQ ID NO: 376940 - DNA, 120 bp, Artificial Sequence
  ENSG00000143179_53 (sequence is synthesized)
aattcaaaaattctaaacacctaagcatttcatataagggatacttaacctggatatgtaaacttagtgcagccattgtgttctctgttagtgtgttcaagtggactcttgcacatacat

SEQ ID NO: 376941 - DNA, 120 bp, Artificial Sequence
  ENSG00000143179_54 (sequence is synthesized)
tcactttatttttggacaaagccttcccacactctccttggtgtaggggagttgcctagagagtggctcactatttcacttacccattggttctgttttctgaacttctctaggttgcct

SEQ ID NO: 376942 - DNA, 120 bp, Artificial Sequence
  ENSG00000143179_55 (sequence is synthesized)
tcttatgcacaatgacaatgggcacaccattttctggcagctgacattcctctagactggtgcttctctaccctggctgcatgttagaaatatcttgggagcttctaaatagtgttgaag

SEQ ID NO: 376943 - DNA, 120 bp, Artificial Sequence
  ENSG00000143183_0 (sequence is synthesized)
gccccggaagcggaagtgcgatcttcgggctgtcagagttggtctgttactcggtggtggcggagtctacggaagccgttttcgcttcacttttcctggctgtagagcgctttccccctg

SEQ ID NO: 376944 - DNA, 120 bp, Artificial Sequence
  ENSG00000143183_1 (sequence is synthesized)
gcgggtgagagtgcagagacgaaggtgcgagatgagcactatgttcgcggacactctcctcatcgtttttatctctgtgtgcacggctctgctcgcagagggcataacctgggtcctggt

SEQ ID NO: 376945 - DNA, 120 bp, Artificial Sequence
  ENSG00000143183_2 (sequence is synthesized)
ttacaggacagacaagtacaagagactgaaggcagaagtggaaaaacagagtaaaaaattggaaaagaagaaggaaacaataacagagtcagctggtcgacaacagaaaaagaaaataga

SEQ ID NO: 376946 - DNA, 120 bp, Artificial Sequence
  ENSG00000143183_3 (sequence is synthesized)
gagacaagaagagaaactgaagaataacaacagagatctatcaatggttcgaatgaaatccatgtttgctattggcttttgttttactgccctaatgggaatgttcaattccatatttga

SEQ ID NO: 376947 - DNA, 120 bp, Artificial Sequence
  ENSG00000143183_4 (sequence is synthesized)
tggtagagtggtggcaaagcttccttttacccctctttcttacatccaaggactgtctcatcgaaatctgctgggagatgacaccacagactgttccttcattttcctgtatattctctg

SEQ ID NO: 376948 - DNA, 120 bp, Artificial Sequence
  ENSG00000143183_5 (sequence is synthesized)
tactatgtcgattcgacagaacattcagaagattctcggccttgccccttcacgagccgccaccaagcaggcaggtggatttcttggcccaccacctccttctgggaagttctcttgaac

SEQ ID NO: 376949 - DNA, 120 bp, Artificial Sequence
  ENSG00000143183_6 (sequence is synthesized)
tcaagaactctttattttctatcattctttctagacacacacacatcagactggcaactgttttgtagcaagagccataggtagccttactacttgggcctctttctagttttgaattat

SEQ ID NO: 376950 - DNA, 120 bp, Artificial Sequence
  ENSG00000143183_7 (sequence is synthesized)
ttctaagccttttgggtatgattagagtgaaaatggcagccagcaaacttgatagtgcttttggtcctagatgatttttatcaaataagtggattgattagttaagttcaggtaatgttt

SEQ ID NO: 376951 - DNA, 120 bp, Artificial Sequence
  ENSG00000143183_8 (sequence is synthesized)
tcttgtttcatttacataagtattttctgtgggaccgactctcaaggcactgtgtatgccctgcaagttggctgtctatgagcatttagagatttagaagaaaaatttagtttgtttaac

SEQ ID NO: 376952 - DNA, 120 bp, Artificial Sequence
  ENSG00000143183_9 (sequence is synthesized)
ccttgtaactgtttgttttgttgttgtttttttttcaagccaaatacatgacataagatcaataaagaggccaaatttttagctgttttatgtacaaggagagatctgtttcattttgtt

SEQ ID NO: 376953 - DNA, 120 bp, Artificial Sequence
  ENSG00000143183_10 (sequence is synthesized)
ttgccgtatttctagatataagttttagcatgggccaggaaggactaaaataaaagtttttaaggtactgtactttttgccatacttgactcatatactcaaaatacagagttgtcttgg

SEQ ID NO: 376954 - DNA, 120 bp, Artificial Sequence
  ENSG00000143183_11 (sequence is synthesized)
tgtaggaattggaaagcaagagtggaaaggaacgtaataactcgttggagtttaaaaatgagggtcttggcaagtaacactgatgtctgaaaaaaaattaaatataaataaataaataaa

SEQ ID NO: 376955 - DNA, 120 bp, Artificial Sequence
  ENSG00000143183_12 (sequence is synthesized)
aatgagggtcctcagctgttctcttcatatcctattacagtctctcagattcttgtgggggcactcttagatctcccttggagacaaggttatagttatatgttgttaatctcgcagagc

SEQ ID NO: 376956 - DNA, 120 bp, Artificial Sequence
  ENSG00000143183_13 (sequence is synthesized)
ttccttttagtcacaatagccttcattttctgccatgccccttcataagggagaaggatgtttgtaccatgatcctccccgcataatctatggaattaggagtcctgtgtggagtcttat

SEQ ID NO: 376957 - DNA, 120 bp, Artificial Sequence
  ENSG00000143183_14 (sequence is synthesized)
caataaatatgcacattcatcaaatgtctacttaaatgtgagtattctaccagtgagaaaaaacacataattttcaaggtaatcattgttaaaccaacagcaaacttctttcttatcagc

SEQ ID NO: 376958 - DNA, 120 bp, Artificial Sequence
  ENSG00000143183_15 (sequence is synthesized)
accataaagtccagaagacagtagaaaagtatcttcaaagtgctgaggaaaataagtatcaacttagaattttatgtacaatattggaggcaaaataaagacatgtttagacatacaaaa

SEQ ID NO: 376959 - DNA, 120 bp, Artificial Sequence
  ENSG00000143183_16 (sequence is synthesized)
cgagccttacttgcttgagaggctcatctactccacttcagggaatctctgggcaactcgtgaacaggagcaggaggggagtatggagtcgattgccgagttttctttggtctcaggcat

SEQ ID NO: 376960 - DNA, 120 bp, Artificial Sequence
  ENSG00000143183_17 (sequence is synthesized)
ctaatattacgaccacagaagttgggctgaggtagaagtcaagactatcccaataactggattctggccgagaaaaaggcgcgcgccagcaccccagtcagtaaaatctaccgggcaaag

SEQ ID NO: 376961 - DNA, 120 bp, Artificial Sequence
  ENSG00000143183_18 (sequence is synthesized)
ttcgccgccgccactatcctcctctggctctgaaatagttccaattctcgcgagattcggcctgactaccagcccttcagctccagtgagttgcgggttggtttcctctagactctcgtg

SEQ ID NO: 376962 - DNA, 120 bp, Artificial Sequence
  ENSG00000143183_19 (sequence is synthesized)
tacaagaaacaatggtcaacagagaaataaaatatatggatgaatatatggataaatttgagtgttttatggattatctaatttaaggattatcccaagacagccctacaaggtaattac

SEQ ID NO: 376963 - DNA, 120 bp, Artificial Sequence
  ENSG00000143183_20 (sequence is synthesized)
aaactggggcaggggaggttagtaacttgctctgcatcacagagctattgagtggcagtcaggatttgaattcaaccagtgtaaagcctaatagtccaggctgtcaagctctatattaca

SEQ ID NO: 376964 - DNA, 120 bp, Artificial Sequence
  ENSG00000143183_21 (sequence is synthesized)
gcctcctcatgggtatgtggtgattctcttctcatcccatctcctcaactagagtgtgtgagctctctaaagttggactttgtctttttttttgttctccttattacaaagtagtcaacg

SEQ ID NO: 376965 - DNA, 120 bp, Artificial Sequence
  ENSG00000143183_22 (sequence is synthesized)
tgggtggaaacacagcaggagctcaataaaagcagatgaaagggaacagaagtccctattctgagactagttttatcagaaggatgtctgataatggatggtaatgacttttaatggtct

SEQ ID NO: 376966 - DNA, 120 bp, Artificial Sequence
  ENSG00000143183_23 (sequence is synthesized)
tttctccatatcattgaccactctaagcaaaataataattcgaatgataatgaagaaaatgatgcccatgataacaataatgacaaatatgaaatggctaaaataaaacatgaaaccatc

SEQ ID NO: 376967 - DNA, 120 bp, Artificial Sequence
  ENSG00000143183_24 (sequence is synthesized)
ctcaaaattctgccatcacctttttaaagtgagaatatatagcacactctatcactcataccctgaggctttgaagttggtgctttctaatcagacttcttatggaccaggttttcatat

SEQ ID NO: 376968 - DNA, 120 bp, Artificial Sequence
  ENSG00000143183_25 (sequence is synthesized)
acaaattatgtttccatggtaaggaataaataagagggagaagttaaaaaggagagattacatctattcaccctattcattaaaatttttttaaatttttttccaaatatgttctgctta

SEQ ID NO: 376969 - DNA, 120 bp, Artificial Sequence
  ENSG00000143183_26 (sequence is synthesized)
tgtatattcactctattcttaaaagcacaataacaaagatatattacagaggaaataaaactatcacaagaattaaattcaaggagttattaagggctactgcagcctcacaattagttt

SEQ ID NO: 376970 - DNA, 120 bp, Artificial Sequence
  ENSG00000143183_27 (sequence is synthesized)
tttaaaatttcttgtcctgaagaaatttcaagactagttatttggatgacactctaggtccacagcatcaccagatcattggagatgacatttcaagacaggcctctgaacatctctcat

SEQ ID NO: 376971 - DNA, 120 bp, Artificial Sequence
  ENSG00000143183_28 (sequence is synthesized)
aacacataatttggttattttccctatgtaagatggattgtctcctgtctagggaagaaaaacagccattactaatatctgcattagtctactcaggttgcaatcataatatgctaaagt

SEQ ID NO: 376972 - DNA, 120 bp, Artificial Sequence
  ENSG00000143183_29 (sequence is synthesized)
agtaaacttttaaaaatgacagtaaacctgagtttattaacaggttacattctaaaagctaagctagtttggaaattggaaagcaaatgtgtgtagatattcatatgtccttgaccagac

SEQ ID NO: 376973 - DNA, 120 bp, Artificial Sequence
  ENSG00000143183_30 (sequence is synthesized)
tgggcctttctcttcccaggtaagtcattctctccaatggggccagttacttaaaattacatcagacaattgatagagcttctagatcccccttctaaaacaaaagcattttgccacaaa

SEQ ID NO: 376974 - DNA, 120 bp, Artificial Sequence
  ENSG00000143183_31 (sequence is synthesized)
ctaggatggagtaggtttttttcagactatttatacttattttatgtatttcaatactgccctttaagtaaaagtactatatactttctctttttttagattaattctgcttaagtcagt

SEQ ID NO: 376975 - DNA, 120 bp, Artificial Sequence
  ENSG00000143183_32 (sequence is synthesized)
gagagagagagagagagaaagagagaataaagaacacctaggtaacccatcctccaccttcgacaattatcagctcctagctaatttgtgtcatctgtaaccccacctgcttctgccctt

SEQ ID NO: 376976 - DNA, 120 bp, Artificial Sequence
  ENSG00000143183_33 (sequence is synthesized)
ctgccctttctgtattattttgaagcaaatcttatcatttatctgtaaatatttcaggactttaaaaaatatgtgtaatctgaataccatttttacacctaagaaaatggacaattcctt

SEQ ID NO: 376977 - DNA, 120 bp, Artificial Sequence
  ENSG00000143183_34 (sequence is synthesized)
aatataatgtgttgtctatagatgtcaaaaatttttgcagttttttggaatcaggaaccaagtaaggtactgaatattgcagttagctgatacacatcctaaatttcttcaattgttgtg

SEQ ID NO: 376978 - DNA, 120 bp, Artificial Sequence
  ENSG00000143183_35 (sequence is synthesized)
gtcctcaaactagagtgtatcagaatcactagagccttgttagaacacaaactgctgggccccaccccagagctggtgatctgtaagtctgctgtggagtctgggaatttgcatctctaa

SEQ ID NO: 376979 - DNA, 120 bp, Artificial Sequence
  ENSG00000143183_36 (sequence is synthesized)
caaattcccaggtgatgctgaagctgcaggtttggggttcactcacctattggttcatcagcatctctctgccctcttacaatatatttgttgaagaagttgtgttgtttaccttgtaga

SEQ ID NO: 376980 - DNA, 120 bp, Artificial Sequence
  ENSG00000143183_37 (sequence is synthesized)
gtttttcttagtttggattttggtgatagcatgctggttttttcatactattggttgtctctgtaatgcgagcagcttttgatctattaattaatgagatattaaaagtgatggtattct

SEQ ID NO: 376981 - DNA, 120 bp, Artificial Sequence
  ENSG00000143183_38 (sequence is synthesized)
gctttccgcagccgccgctgggcgctgccggggctgaggccgctgtcgctcgcctgcgagccgctcggagcccggtgacggggctgggtttcccgaaggagccaagagccttcctttgcc

SEQ ID NO: 376982 - DNA, 120 bp, Artificial Sequence
  ENSG00000143183_39 (sequence is synthesized)
cgcagcggctggtccggtttacatcccaggcagaggtcagcgtgatgctgctgctccaatccgggcgggcagcgcgctgctattcgccgaggcggaggcggcgaggcgtctggccccagc

SEQ ID NO: 376983 - DNA, 120 bp, Artificial Sequence
  ENSG00000143183_40 (sequence is synthesized)
ctccgcccctcccgggccccgccgccgcccgaggtctctgcgaaagggtctcactctatccaataggctggaatgcagtagcatgatcaccacttactgacgctttgacctcccagtctc

SEQ ID NO: 376984 - DNA, 120 bp, Artificial Sequence
  ENSG00000143183_41 (sequence is synthesized)
accacttactgacgctttgacctcccagtctcaagcaatcctcccacttcagcctttcgagtagctgagactacagagtcttgctttgtcaccaggctggaatgcagtggcgcaatcttg

SEQ ID NO: 376985 - DNA, 120 bp, Artificial Sequence
  ENSG00000143183_42 (sequence is synthesized)
gggctgtcagagttggtctgttactcggtggtggcggagtctacggaagccgttttcgcttcacttttcctggctgtagagcgctttccccctggcgggtgagagtgcagagacgaaggc

SEQ ID NO: 376986 - DNA, 120 bp, Artificial Sequence
  ENSG00000143184_0 (sequence is synthesized)
actctccttgcacagctcagcaggacctcagccatgagacttctcatcctggccctccttggcatctgctctctcactgcatacattgtggaaggtgtagggagtgaagtctcagataag

SEQ ID NO: 376987 - DNA, 120 bp, Artificial Sequence
  ENSG00000143184_1 (sequence is synthesized)
aggacctgtgtgagcctcactacccagcgactgccggttagcagaatcaagacctacaccatcacggaaggctccttgagagcagtaatttttattaccaaacgtggcctaaaagtctgt

SEQ ID NO: 376988 - DNA, 120 bp, Artificial Sequence
  ENSG00000143184_2 (sequence is synthesized)
gctgatccacaagccacatgggtgagagacgtggtcaggagcatggacaggaaatccaacaccagaaataacatgatccagaccaagccaacaggaacccagcaatcgaccaatacagct

SEQ ID NO: 376989 - DNA, 120 bp, Artificial Sequence
  ENSG00000143184_3 (sequence is synthesized)
gtgactctgactggctagtagtctctggcaccctgtccgtctccagccagccagctcatttcactttacacgctcatggactgagtttatactcaccttttatgaaagcactgcatgaat

SEQ ID NO: 376990 - DNA, 120 bp, Artificial Sequence
  ENSG00000143184_4 (sequence is synthesized)
aaatgtcttctgtattcacttatatgttctaattaataaattatttattattaagaatagttccctagtctattcattatatttagggaaaggtagtgtatcattgttgtttgatttctg

SEQ ID NO: 376991 - DNA, 120 bp, Artificial Sequence
  ENSG00000143184_5 (sequence is synthesized)
gaccttgtacctctctttgatggtaaccataatggaagagattctggctagtgtctatcagaggtgaaagctatatcaatctctcttagagtccagcttgtaatggttctttacacatca

SEQ ID NO: 376992 - DNA, 120 bp, Artificial Sequence
  ENSG00000143184_6 (sequence is synthesized)
gtcacaagttacagctgtgacaatggcaacaatttgagatgtatttcaacttgtctctataatagaattctgtttatagaataagggagaaaataatccagtcttcactgggttcccatt

SEQ ID NO: 376993 - DNA, 120 bp, Artificial Sequence
  ENSG00000143184_7 (sequence is synthesized)
ctgagggtccactactcaaaaatttgcttcactcaatttttttcacctctttgtgttttattttggtgtcctattaaaggaataaaatgacacaacttgtcccttttttgtcccattagc

SEQ ID NO: 376994 - DNA, 120 bp, Artificial Sequence
  ENSG00000143184_8 (sequence is synthesized)
aaaaattagaattttggtataaagaaactttattcaagtaaaaatcaataccctttgaattggacaataatctcactaccttattaggatttctgtatttgccattacgctagttatcat

SEQ ID NO: 376995 - DNA, 120 bp, Artificial Sequence
  ENSG00000143184_9 (sequence is synthesized)
gcatgttatgctttactgcgaataagcttttaatgctccaaatgctgacccatgcaatatttcctcatgtgatcacaatttgcagtaaacttttaattaaatgctcatctggtaactcaa

SEQ ID NO: 376996 - DNA, 120 bp, Artificial Sequence
  ENSG00000143185_0 (sequence is synthesized)
actctccctgcacagctcagcgggacctcagccatgagacttctcatcctggccctccttggcatctgctctctcactgcatacattgtggaaggtgtagggagtgaagtctcacatagg

SEQ ID NO: 376997 - DNA, 120 bp, Artificial Sequence
  ENSG00000143185_1 (sequence is synthesized)
aggacctgtgtgagcctcactacccagcgactgccagttagcagaatcaagacctacaccatcacggaaggctccttgagagcagtaatttttattaccaaacgtggcctaaaagtctgt

SEQ ID NO: 376998 - DNA, 120 bp, Artificial Sequence
  ENSG00000143185_2 (sequence is synthesized)
ccaagccaacaggaacccagcaatcgaccaatacagctgtgaccctgactggctagtagtctctggcaccctgtccgtctccagccagccagctcatttcactttacaccctcatggact

SEQ ID NO: 376999 - DNA, 120 bp, Artificial Sequence
  ENSG00000143185_3 (sequence is synthesized)
gactgagattatactcaccttttatgaaagcactgcatgaataaaattattcctttgtatttttacttttaaatgtcttctgtattcacttatatgttctaattaataaattatttatta

SEQ ID NO: 377000 - DNA, 120 bp, Artificial Sequence
  ENSG00000143190_0 (sequence is synthesized)
aaaatattcaaaatggcggacggaggagcagcgagtcaagatgagagttcagccgcggcggcagcagcagcagactcaagaatgaacaatccgtcagaaaccagtaaaccatctatggag

SEQ ID NO: 377001 - DNA, 120 bp, Artificial Sequence
  ENSG00000143190_1 (sequence is synthesized)
agtggagatggcaacacaggcacacaaaccaatggtctggactttcagaagcagcctgtgcctgtaggaggagcaatctcaacagcccaggcgcaggctttccttggacatctccatcag

SEQ ID NO: 377002 - DNA, 120 bp, Artificial Sequence
  ENSG00000143190_2 (sequence is synthesized)
gtccaactcgctggaacaagtttacaggctgctgctcagtctttaaatgtacagtctaaatctaatgaagaatcgggggattcgcagcagccaagccagccttcccagcagccttcagtg

SEQ ID NO: 377003 - DNA, 120 bp, Artificial Sequence
  ENSG00000143190_3 (sequence is synthesized)
caggcagccattccccagacccagcttatgctagctggaggacagataactgggcttactttgacgcctgcccagcaacagttactactccagcaggcacaggcacaggcacagctgctg

SEQ ID NO: 377004 - DNA, 120 bp, Artificial Sequence
  ENSG00000143190_4 (sequence is synthesized)
gctgctgcagtgcagcagcactccgccagccagcagcacagtgctgctggagccaccatctccgcctctgctgccacgcccatgacgcagatccccctgtctcagcccatacagatcgca

SEQ ID NO: 377005 - DNA, 120 bp, Artificial Sequence
  ENSG00000143190_5 (sequence is synthesized)
caggatcttcaacaactgcaacagcttcaacagcagaatctcaacctgcaacagtttgtgttggtgcatccaaccaccaatttgcagccagcgcagtttatcatctcacagacgccccag

SEQ ID NO: 377006 - DNA, 120 bp, Artificial Sequence
  ENSG00000143190_6 (sequence is synthesized)
ggccagcagggtctcctgcaagcgcaaaatcttctaacgcaactacctcagcaaagccaagccaacctcctacagtcgcagccaagcatcaccctcacctcccagccagcaaccccaaca

SEQ ID NO: 377007 - DNA, 120 bp, Artificial Sequence
  ENSG00000143190_7 (sequence is synthesized)
cgcacaatagcagcaaccccaattcagacacttccacagagccagtcaacaccaaagcgaattgatactcccagcttggaggagcccagtgaccttgaggagcttgagcagtttgccaag

SEQ ID NO: 377008 - DNA, 120 bp, Artificial Sequence
  ENSG00000143190_8 (sequence is synthesized)
accttcaaacaaagacgaatcaaacttggattcactcagggtgatgttgggctcgctatggggaaactatatggaaatgacttcagccaaactaccatctctcgatttgaagccttgaac

SEQ ID NO: 377009 - DNA, 120 bp, Artificial Sequence
  ENSG00000143190_9 (sequence is synthesized)
ctcagctttaagaacatgtgcaagttgaagccacttttagagaagtggctaaatgatgcagagaacctctcatctgattcgtccctctccagcccaagtgccctgaattctccaggaatt

SEQ ID NO: 377010 - DNA, 120 bp, Artificial Sequence
  ENSG00000143190_10 (sequence is synthesized)
gagggcttgagccgtaggaggaagaaacgcaccagcatagagaccaacatccgtgtggccttagagaagagtttcttggagaatcaaaagcctacctcggaagagatcactatgattgct

SEQ ID NO: 377011 - DNA, 120 bp, Artificial Sequence
  ENSG00000143190_11 (sequence is synthesized)
gatcagctcaatatggaaaaagaggtgattcgtgtttggttctgtaaccgccgccagaaagaaaaaagaatcaacccaccaagcagtggtgggaccagcagctcacctattaaagcaatt

SEQ ID NO: 377012 - DNA, 120 bp, Artificial Sequence
  ENSG00000143190_12 (sequence is synthesized)
ttccccagcccaacttcactggtggcgaccacaccaagccttgtgactagcagtgcagcaactaccctcacagtcagccctgtcctccctctgaccagtgctgctgtgacgaatctttca

SEQ ID NO: 377013 - DNA, 120 bp, Artificial Sequence
  ENSG00000143190_13 (sequence is synthesized)
gttacaggcacttcagacaccacctccaacaacacagcaaccgtgatttccacagcgcctccagcttcctcagcagtcacgtccccctctctgagtccctccccttctgcctcagcctcc

SEQ ID NO: 377014 - DNA, 120 bp, Artificial Sequence
  ENSG00000143190_14 (sequence is synthesized)
acctccgaggcatccagtgccagtgagaccagcacaacacagaccacctccactcctttgtcctcccctcttgggaccagccaggtgatggtgacagcatcaggtttgcaaacagcagca

SEQ ID NO: 377015 - DNA, 120 bp, Artificial Sequence
  ENSG00000143190_15 (sequence is synthesized)
gctgctgcccttcaaggagctgcacagttgccagcaaatgccagtcttgctgccatggcagctgctgcaggactaaacccaagcctgatggcaccctcacagtttgcggctggaggtgcc

SEQ ID NO: 377016 - DNA, 120 bp, Artificial Sequence
  ENSG00000143190_16 (sequence is synthesized)
ttactcagtctgaatccagggaccctgagcggtgctctcagcccagctctaatgagcaacagtacactggcaactattcaagctcttgcttctggtggctctcttccaataacatcactt

SEQ ID NO: 377017 - DNA, 120 bp, Artificial Sequence
  ENSG00000143190_17 (sequence is synthesized)
gatgcaactgggaacctggtatttgccaatgcgggaggagcccccaacatcgtgactgcccctctgttcctgaaccctcagaacctctctctgctcaccagcaaccctgttagcttggtc

SEQ ID NO: 377018 - DNA, 120 bp, Artificial Sequence
  ENSG00000143190_18 (sequence is synthesized)
tctgccgccgcagcatctgcagggaactctgcacctgtagccagccttcacgccacctccacctctgctgagtccatccagaactctctcttcacagtggcctctgccagcggggctgcg

SEQ ID NO: 377019 - DNA, 120 bp, Artificial Sequence
  ENSG00000143190_19 (sequence is synthesized)
tccaccaccaccaccgcctccaaggcacagtgagctgggcagagctgggctgccagaagcctttttcactctgcagtgtgattggactgccagccaggttaataaactgaaaaatgtgat

SEQ ID NO: 377020 - DNA, 120 bp, Artificial Sequence
  ENSG00000143190_20 (sequence is synthesized)
tggcttcctctcgccgtgttgtgagggcaaaggagagaagggagaaaaaaaaaaaaaaaccacacacacccatacacacataccagaaaaagaaagaaaggatggagacggaacatttgc

SEQ ID NO: 377021 - DNA, 120 bp, Artificial Sequence
  ENSG00000143190_21 (sequence is synthesized)
agaaaaagaaagaaaggatggagacggaacatttgcctaattttgtaataaaacactgtcttttcaggattgcttcatggattggagaactttctaaccaaaaattaaaaaaaaaaaaaa

SEQ ID NO: 377022 - DNA, 120 bp, Artificial Sequence
  ENSG00000143190_22 (sequence is synthesized)
agtgaaaggactacttatcatttccagcagtcatgatgacaagttaaggtgggttaccaattccaatataggaaggggatttcttgtttgtctaaatttctttttttcttaaaaaaaaaa

SEQ ID NO: 377023 - DNA, 120 bp, Artificial Sequence
  ENSG00000143190_23 (sequence is synthesized)
aatcatttttatgggtctgttgtacaggccattaagtcataacaaggtgtttataatcgtatcaattgtgttgggggttcctttcttaactggtacaatttaggcaggcctgtattactg

SEQ ID NO: 377024 - DNA, 120 bp, Artificial Sequence
  ENSG00000143190_24 (sequence is synthesized)
tattattattgttgttgttgttattgttttatatatatagtttggacatgtttattatctcttgctcctggatcctatttcagtgagctcccacactgtggggagggagggttttggggt

SEQ ID NO: 377025 - DNA, 120 bp, Artificial Sequence
  ENSG00000143190_25 (sequence is synthesized)
aaggggagacttctgttcttaactgtggggaatgttcttgctggtttccttatccttgatgactcttacagaggtgctagaaaattattttcttttgccacttatgcaagaggcttggtg

SEQ ID NO: 377026 - DNA, 120 bp, Artificial Sequence
  ENSG00000143190_26 (sequence is synthesized)
cagaagctgaaggcagtgtgtgcaaacactcccattccacacacgccccttcccctccccacatcaggtggtgcctttggagcacttttgtgtaggaaggaattcctgctgaactgtagc

SEQ ID NO: 377027 - DNA, 120 bp, Artificial Sequence
  ENSG00000143190_27 (sequence is synthesized)
tctcactcacccccaaatcattgaatgaccctgaggcccagttcctgtggtgcaacagtgctgctttctgctactttcaatgggaacagctgtacatgttgcagggcaggatttggttcc

SEQ ID NO: 377028 - DNA, 120 bp, Artificial Sequence
  ENSG00000143190_28 (sequence is synthesized)
caagagcaaagactactgcagacacctgacttggtggttctcctgatttcttatctcctgaaaaatgctcctgctgttggtgtgtttgtttgtttgttccattttgtggaagtttttcat

SEQ ID NO: 377029 - DNA, 120 bp, Artificial Sequence
  ENSG00000143190_29 (sequence is synthesized)
ccaaactttaactaacttggcaaagaaaaaaaactgacttactgaaattgggaaacttttcccttcttttattttctaaaggaattctactagactattttccattgataatatatacaa

SEQ ID NO: 377030 - DNA, 120 bp, Artificial Sequence
  ENSG00000143190_30 (sequence is synthesized)
aagaggtgtgatgagaagggtataaggttaccaccttttcctctagagagccacagacttcctttccactggatggtttataaattcctctaaccctgagattcttcttggttctctgac

SEQ ID NO: 377031 - DNA, 120 bp, Artificial Sequence
  ENSG00000143190_31 (sequence is synthesized)
taaaggaggcacttattagccgggctgggatctgtagaacctttgaagaaggactttgagcaggaactttgcacacaccttaagtgtctccttggtttgttcatgatgctcctgctaggt

SEQ ID NO: 377032 - DNA, 120 bp, Artificial Sequence
  ENSG00000143190_32 (sequence is synthesized)
aggtctaaatggcaatacacatctctttattcaatgtagaaagtaattagctctgtaattattttcagggtgtttgtagactatataaatgagcccattgaaaaggaagagtttgtgaaa

SEQ ID NO: 377033 - DNA, 120 bp, Artificial Sequence
  ENSG00000143190_33 (sequence is synthesized)
gtggatgaagaggaataagggtaacttggagattaaattcctttttttgtcagtgtactgttgttatgccatctgtaccaaaaaattttccaaaagactggatcactgcagtgcagctca

SEQ ID NO: 377034 - DNA, 120 bp, Artificial Sequence
  ENSG00000143190_34 (sequence is synthesized)
tctaagttccccttcttattggagttaaaggttcccatttggtggctgtgggtgcttgcttaaatctctggtggtcccaagactgcactttttctccctttcgagctggggatgtagaga

SEQ ID NO: 377035 - DNA, 120 bp, Artificial Sequence
  ENSG00000143190_35 (sequence is synthesized)
gaacttacaggtgatttttattctgattgcttttgtttgtgtccacaagggagcttggattctgtgtacttgtctctttcccattgtccagtaaggcagtaaatacagacacaatgtgta

SEQ ID NO: 377036 - DNA, 120 bp, Artificial Sequence
  ENSG00000143190_36 (sequence is synthesized)
cttttgtgtgtgattcaagtgggagacagtctgttaaaaggtcagaaacattttagtcccctttaaaatatttcttttagtttatttctatcgtgttttatttcacagatatttaattac

SEQ ID NO: 377037 - DNA, 120 bp, Artificial Sequence
  ENSG00000143190_37 (sequence is synthesized)
cacccctaaatttcctcctcttacccttcaccttccctaaaatccttccaaaatcagtgaactgcaagcagggaaactaacaaatgtccattcaccctttttgtgtggtgtgttttttta

SEQ ID NO: 377038 - DNA, 120 bp, Artificial Sequence
  ENSG00000143190_38 (sequence is synthesized)
tgttttgttttgttttttaactaagcttgaaccaaagtcaatttttagcaagctgctgtactaatggactagttgataacgtgcagttcagacacatcgaggagatagatgctactgaca

SEQ ID NO: 377039 - DNA, 120 bp, Artificial Sequence
  ENSG00000143190_39 (sequence is synthesized)
atttctttttcatttgtctttattaattttatatgaaagttgctgcttgtttttaatcttttatgttggtaaattgtgatatcctctgggcagacattaacttgatgtttaactagttta

SEQ ID NO: 377040 - DNA, 120 bp, Artificial Sequence
  ENSG00000143190_40 (sequence is synthesized)
ttaggttggtgtgtaaatagaatgacaatgtcaattactaatttctctcctctccattcactttttctctgttgtagttaaatttaatcttctatcctgacttgacatctctacctttag

SEQ ID NO: 377041 - DNA, 120 bp, Artificial Sequence
  ENSG00000143190_41 (sequence is synthesized)
tctgtggaaatgattttagggctatcagtaatgctgtagctgcccataataatgagtccctcccttgggagtggtgaaacttagaaggaaggattcagggagggaaatgctggtacccag

SEQ ID NO: 377042 - DNA, 120 bp, Artificial Sequence
  ENSG00000143190_42 (sequence is synthesized)
tatactggattagaagttatagcattaatttctcaaaattgctaccaaaggaagtgtggagtcccaagggactcaagctcagtgaggtaagacaaagggcaaggaaaggctgtttgggtg

SEQ ID NO: 377043 - DNA, 120 bp, Artificial Sequence
  ENSG00000143190_43 (sequence is synthesized)
gtttttttttccccacatatggtttagaaaatgatccctttcccaaacaaaactcaccaacagactttaatattagaaaagatactaagctttaaatgtcaatacagtggtcttttattc

SEQ ID NO: 377044 - DNA, 120 bp, Artificial Sequence
  ENSG00000143190_44 (sequence is synthesized)
cctgccctgtctatattttctactcaatttgggataaggggattttatgtgaagcacttgatgagggtagaccagcataaaaaatctgtttaaaagaagaaataatctttaggaaaagat

SEQ ID NO: 377045 - DNA, 120 bp, Artificial Sequence
  ENSG00000143190_45 (sequence is synthesized)
aaatctttagataaaaataaatttttttctctttttttacttatttaaaaataagttgtgaaatgaaaggtacatttacacatgtacacacgaaacactaatatagctttttggtggttg

SEQ ID NO: 377046 - DNA, 120 bp, Artificial Sequence
  ENSG00000143190_46 (sequence is synthesized)
tttagtttaaaatcaactccctatccatcatccctagatattctacttatcgtattgcttcatgaacaccttagtcattttttactttacgtatatatttttttatcatctcaagaaatg

SEQ ID NO: 377047 - DNA, 120 bp, Artificial Sequence
  ENSG00000143190_47 (sequence is synthesized)
cattttgaattgaatgaactatcttctaagctaagatactcaaatttaacttttagccaccttatatgggagagcctggaaactaaaggggaccagggaccatttgaccaaaagaggtgt

SEQ ID NO: 377048 - DNA, 120 bp, Artificial Sequence
  ENSG00000143190_48 (sequence is synthesized)
ttggtggagtttctgcatttcaaagaagaaaggccagataggtcatcacaattcattgtattattctttttttttccccttaatgtttatgcaaattttattttatatttctgaatttgg

SEQ ID NO: 377049 - DNA, 120 bp, Artificial Sequence
  ENSG00000143190_49 (sequence is synthesized)
ttagcacatactaagccaaagactattctaaatgcatttatagtgaatactatgtatgcccatggtaatgggtcctccctaaggagtggtgaatgtaattgtgtgaatcctgcttatcac

SEQ ID NO: 377050 - DNA, 120 bp, Artificial Sequence
  ENSG00000143190_50 (sequence is synthesized)
aagtggtgcaatttggtcataaactttatttataccctgtatacatctgaataacagagcagaaagacctaaaaaagggcttctcacaggaacaatattactatgttgttctaagaaaaa

SEQ ID NO: 377051 - DNA, 120 bp, Artificial Sequence
  ENSG00000143190_51 (sequence is synthesized)
ataagttgagtgctgtattagtttaagtgtttctaaagttctataggcagcattttagaattaagaattgtgtatatccattaactgatataattcacatgtccttttatttgttatcag

SEQ ID NO: 377052 - DNA, 120 bp, Artificial Sequence
  ENSG00000143190_52 (sequence is synthesized)
aaagatcaatactatcccaatttattcaacttgttacccaagaaatggaaccaaaggaatccaactttcattttgtgtagaatcatacctacttatacttaatgctagcactgtaagaaa

SEQ ID NO: 377053 - DNA, 120 bp, Artificial Sequence
  ENSG00000143190_53 (sequence is synthesized)
taagtcttttttgtttaaaaaagggaagataagattaaagattcttagtgagatcatcttgccaatttgttgtacatctctcattcattgttgggggaaaaaaaagcacaactatacctc

SEQ ID NO: 377054 - DNA, 120 bp, Artificial Sequence
  ENSG00000143190_54 (sequence is synthesized)
tttaatgttattttcttccattatccctcatttatttggaaagataagggaaaccttgtctgtattatccagaagcacagatatttgcttgacacaatatttaaattcagcccaatcttt

SEQ ID NO: 377055 - DNA, 120 bp, Artificial Sequence
  ENSG00000143190_55 (sequence is synthesized)
aacattaaaaaattttctttttaacttgctggaaaagttggatacattggcaaatatagggaattcatgtcttttttttttttttttttctggtcttgctctgttgcctaggctagagtg

SEQ ID NO: 377056 - DNA, 82 bp, Artificial Sequence
  ENSG00000143190_56 (sequence is synthesized)
tcctcatgtcaatttttaaagtgataaatcctgatattatacattgcaattagtgtagaataaacgcttggcttatagaact

SEQ ID NO: 377057 - DNA, 120 bp, Artificial Sequence
  ENSG00000143190_57 (sequence is synthesized)
attgcaattagtgtagaataaacgcttggcttatagaactctctgttcttagtctaaagctgttcccaaaccaggtcatcctcacgaaacattcttgaccaagaaaaaagataaggtcat

SEQ ID NO: 377058 - DNA, 120 bp, Artificial Sequence
  ENSG00000143190_58 (sequence is synthesized)
tgagataggaagacagaggaaaagcctcttgctgttgtttcttcccaagaaaggagaagccctgccagggagaagtcagtagtattgctgactcactgtatcactgagtgtagggtgtgg

SEQ ID NO: 377059 - DNA, 120 bp, Artificial Sequence
  ENSG00000143190_59 (sequence is synthesized)
tagcaaggaggaggcaggggattcacgctgacaggtggctctggcctggctcttggggggccttctgaagaccagtctgcagtttgaggaagggccccaacaattcatttggagagcttg

SEQ ID NO: 377060 - DNA, 120 bp, Artificial Sequence
  ENSG00000143190_60 (sequence is synthesized)
gccaaatactttctcattaaatcagcacctaaacttgatgaacttaaagtttgtttattagagttgaaaacattaaaagatgactgatactaatgggagaaaaatactaaagacccaaaa

SEQ ID NO: 377061 - DNA, 120 bp, Artificial Sequence
  ENSG00000143190_61 (sequence is synthesized)
tttaaaattttccaaaatggacaagaattgatgggttaatttgctcataactgatatgagtttgcttttatgtgtgtgtggaaagcatttaatgtgtgatgctgttcatagtcctggcta

SEQ ID NO: 377062 - DNA, 120 bp, Artificial Sequence
  ENSG00000143190_62 (sequence is synthesized)
tttgatgtcattttcagttttacaacattttgaggatgacactttataaaatggtaaatctttctcagcgtttacaaacttggcttttgagaagggaaaaatcctctttgctatttctgt

SEQ ID NO: 377063 - DNA, 120 bp, Artificial Sequence
  ENSG00000143190_63 (sequence is synthesized)
aagaagaataactgagatcagctattatataggtttgcatggatggtgtccacaatacaaatgtaaacttggacaggaataggataaataaattgctttcatcataaaggccaatcatcc

SEQ ID NO: 377064 - DNA, 120 bp, Artificial Sequence
  ENSG00000143190_64 (sequence is synthesized)
atttcttagtccaaggagattaaatataaataggacacccctgagatttccagtaaggtatttgaaaggattccactgggagggcagggaatatattttttctcagagcatccagtttgt

SEQ ID NO: 377065 - DNA, 120 bp, Artificial Sequence
  ENSG00000143190_65 (sequence is synthesized)
acccagttttctatatggtttgtgaactgtagcttttaaaaaaaaattttgtagttttcttctaaccttattcattaagtagttccttgttttggcccttctactcttggccttagctaa

SEQ ID NO: 377066 - DNA, 120 bp, Artificial Sequence
  ENSG00000143190_66 (sequence is synthesized)
aagcagtaaatgtgagtgaattttatgttgattatgtcacctggatctcctttccttcccttctttttctcattgaatggtggtaccttaatttgggtaacagctagcttctggcacctt

SEQ ID NO: 377067 - DNA, 120 bp, Artificial Sequence
  ENSG00000143190_67 (sequence is synthesized)
cataaaatacctcagaatagcttagcattgttgcaaaactggttttaaactaaaaaccaaataaataagtgaaaaaattttataaatagtggaaataattctagctgtagcatttagttg

SEQ ID NO: 377068 - DNA, 120 bp, Artificial Sequence
  ENSG00000143190_68 (sequence is synthesized)
aactaatgtttattatgatcgataaacaagattgatgctgtatgtatttgggatcctgtttataggttacaatttatagggttagggagggttgggtgggggaagaggagatgttgatta

SEQ ID NO: 377069 - DNA, 120 bp, Artificial Sequence
  ENSG00000143190_69 (sequence is synthesized)
tgttagaaggaaaacattgctcgtgtgtgtgtttgttttttcttatatctgtcttgccaaaggaaacttgattttccctgtgattggctttggcctctgtggtctggtctgcagcagtgt

SEQ ID NO: 377070 - DNA, 120 bp, Artificial Sequence
  ENSG00000143190_70 (sequence is synthesized)
gtggtggcatgcaggtaacatatggggtgtccagtaggttcagggaccctgagggtgcatttacatcccttcctatggttgcccatgccccccagaccctgccaacctctcctaatgatt

SEQ ID NO: 377071 - DNA, 120 bp, Artificial Sequence
  ENSG00000143190_71 (sequence is synthesized)
cattacctctgtacatagcaaaagcataggcaaaggatgaatgcgtgaatgcctggatgtgcagttgagaaacagaggcagacatagacatgcaccaattaatttggagccaagaggtga

SEQ ID NO: 377072 - DNA, 120 bp, Artificial Sequence
  ENSG00000143190_72 (sequence is synthesized)
gtgattgatgtatcttaaatctaggaaagttaaagtgaaacaggttctttgtgttgccctctgtcaagttactgaatgttgtgctaataacacaacactttaaaaccttacttacttttc

SEQ ID NO: 377073 - DNA, 120 bp, Artificial Sequence
  ENSG00000143190_73 (sequence is synthesized)
tcataccaaggctagttctttctagaccaaaaacacaaacaggataaaaagcaaaccaagaagttgaaagctaacctgcccacctcacccctgtgatacaaagtgtgaaccttaaggatt

SEQ ID NO: 377074 - DNA, 120 bp, Artificial Sequence
  ENSG00000143190_74 (sequence is synthesized)
agttggtgggattgaggagagaattattcttggtgggaacatgaatgagaaatgatgctggcttaggaaaaatcacaagccctttctgcccatactctgggacaaactttcttggctccc

SEQ ID NO: 377075 - DNA, 120 bp, Artificial Sequence
  ENSG00000143190_75 (sequence is synthesized)
tgagttcggatatagactgtatctctagaaaggctatttttttaaataaatgatcccacagaacttaagtgggatttggtttagataccaaagacactgctaatgtcattgcttatcctt

SEQ ID NO: 377076 - DNA, 120 bp, Artificial Sequence
  ENSG00000143190_76 (sequence is synthesized)
aagttttcaaaacaggcagagggaataggagcaaaaagccaaaatttggaaaagctttactttatctctttccttcccttttccccttttcccagtcccctgctttttgaaggaagtctt

SEQ ID NO: 377077 - DNA, 120 bp, Artificial Sequence
  ENSG00000143190_77 (sequence is synthesized)
cttggttatcctggctttggaaaagagatttattttgttttgctctgctggctctttaaagatggatagttgctcaatctagcagtgatgttcttggaattgctgagaaatttggggagg

SEQ ID NO: 377078 - DNA, 120 bp, Artificial Sequence
  ENSG00000143190_78 (sequence is synthesized)
gcaaaagataggggtagaattttttcattatttccctttatctaatacttttaaatagaaccaacacagcctatatgagttcagacaatatttagatgtggtatctccatctgtctcctg

SEQ ID NO: 377079 - DNA, 120 bp, Artificial Sequence
  ENSG00000143190_79 (sequence is synthesized)
taaaagataagaattttcaagaacaggattacgtggaaaaccaaaagatcttcccttactctcctataaatgttttgttccaaatgtttttatatatgggctctagggagtcaggtagtt

SEQ ID NO: 377080 - DNA, 120 bp, Artificial Sequence
  ENSG00000143190_80 (sequence is synthesized)
cattgtttcggtgtactattgataggacacagaaagggagagagggtaaagaaatgtatcactctctgaatattgcatcaaaaatgattaggttgcagaacttcatgaaagctttactaa

SEQ ID NO: 377081 - DNA, 120 bp, Artificial Sequence
  ENSG00000143190_81 (sequence is synthesized)
taatcttattgttctgacattatgtaaaggtggtattaatattgtatgacttgtcaaagtgctagataggtttataagtaggtaatagggatgttgaagattagagcacttgaaacagaa

SEQ ID NO: 377082 - DNA, 120 bp, Artificial Sequence
  ENSG00000143190_82 (sequence is synthesized)
gttctgggaaaacaaggtgtgtgtaatggaacaccactttgagcacagaaacaaaggtcccttggacctggtagggaagatgtgatttatgattgtttctgtgtccctgtatctgcccac

SEQ ID NO: 377083 - DNA, 120 bp, Artificial Sequence
  ENSG00000143190_83 (sequence is synthesized)
cctgcacagggctccaccacccagggccaccttctggtttaaacccaggacactgtcaaaaagttaagaccccaaaactaatttactgtaaaaaacattgaggactgctgcaaagttttc

SEQ ID NO: 377084 - DNA, 120 bp, Artificial Sequence
  ENSG00000143190_84 (sequence is synthesized)
ccttgttttctttgtgtacttgttcatcattgtataagttagccacagcttcacaagagcagcttaaggcttctttcataaattggcagtggcattgagttctcaaacattatatcccaa

SEQ ID NO: 377085 - DNA, 120 bp, Artificial Sequence
  ENSG00000143190_85 (sequence is synthesized)
agtctgcaggcagacagctggatacagcgctgtgtataaatgagacgtccaaacacttgagtttcttaagattgggatctctttcaaatgaaaaaggacagagccaagtagagaaaagac

SEQ ID NO: 377086 - DNA, 120 bp, Artificial Sequence
  ENSG00000143190_86 (sequence is synthesized)
tttgtgctcccacccagccttaatgagtctcatggtctaaaagtataggaagaaatgaaatgcactttcagaagctaaaatgacagtgtctgctacaaaaggctgtagttgtaggcagtc

SEQ ID NO: 377087 - DNA, 120 bp, Artificial Sequence
  ENSG00000143190_87 (sequence is synthesized)
ggggatgccatgtccttggttccattcctgcgtgagtctgcagaaggcacacactttgtaagagtagagtggactagtgccagcctgaataggtttaaaactgcaaacagttggagaaca

SEQ ID NO: 377088 - DNA, 120 bp, Artificial Sequence
  ENSG00000143190_88 (sequence is synthesized)
tggaacaggttggtgcaggaagcctaagattttgcaatcatattataacattggcttttgacaacataaatgttgtatcttccctaaggtcaggtcggggaaagaaagacttccagcttc

SEQ ID NO: 377089 - DNA, 120 bp, Artificial Sequence
  ENSG00000143190_89 (sequence is synthesized)
ttacctctgcgtgcatgggcacgtgtgcattgctcagtccgcaggaggtctcactccgcaggaaacgctctcctcccgcataagtctgtacttccatcccctcatctgtggtagtagtga

SEQ ID NO: 377090 - DNA, 120 bp, Artificial Sequence
  ENSG00000143190_90 (sequence is synthesized)
aggctaggtgagtaagcgtgggctgttctacccaccagaagtccaggagctgttgtatacctcatttctaactcgtgaccgagtgacttgctttaactttctcgaaatcctacagagttg

SEQ ID NO: 377091 - DNA, 120 bp, Artificial Sequence
  ENSG00000143190_91 (sequence is synthesized)
ccaagtctgccctccctcctcagtcatgttaaactctggcctatagcatcatgggacctgtagcctagggtgggaccccctaaagcctctgaatgtcgctgcttaaaagctactgcaaac

SEQ ID NO: 377092 - DNA, 120 bp, Artificial Sequence
  ENSG00000143190_92 (sequence is synthesized)
tgagggcaaattgcaatcttctattcctttttgttgcaaggggtcttcacaggtctcttaacatctgctttccctgccaccctgcctttaggggctggccagctatccacacccctaacc

SEQ ID NO: 377093 - DNA, 120 bp, Artificial Sequence
  ENSG00000143190_93 (sequence is synthesized)
caccctgtgtttctgacagctggccacacgtcaacttctgtacttgccttttccttggtggggtagaggccaaccccttctcctctgaggcctcagggttctgtttcttttcaggacttt

SEQ ID NO: 377094 - DNA, 120 bp, Artificial Sequence
  ENSG00000143190_94 (sequence is synthesized)
gggtagaagggaagacaccaaaggctcctttaagctgactgctgcatacacatttcactttttttcctttgacatgaccaaaaatatccaaatatttaagtttattattattattattat

SEQ ID NO: 377095 - DNA, 120 bp, Artificial Sequence
  ENSG00000143190_95 (sequence is synthesized)
tatttgacaatcttatatccaatgggctctctagaagctgcatccccagccctttcaccttttctttgaatgtagttcccaaccttcaattcccacccctaatgctgacaaaaagcttag

SEQ ID NO: 377096 - DNA, 90 bp, Artificial Sequence
  ENSG00000143190_96 (sequence is synthesized)
tttcaaatttccagccaaaaccaaagatttcttaatgattgtataaactcaaaacaaacaaaagaaccaaagaaaagggaagtcttcagc

SEQ ID NO: 377097 - DNA, 120 bp, Artificial Sequence
  ENSG00000143190_97 (sequence is synthesized)
aaaacaaacaaaagaaccaaagaaaagggaagtcttcagcatcagtccagtctgtggtgtcctggcacttagaagagtgaggccagggaaggtggggcggggggaccctctgactggatc

SEQ ID NO: 377098 - DNA, 120 bp, Artificial Sequence
  ENSG00000143190_98 (sequence is synthesized)
agaaagggcaggcaagctgcttaccaccttccagggtccagcacaggtgcatgcccctagctttggccctcacaaacttgtgagcatgccctgaaacaaattggcatttcagattttcca

SEQ ID NO: 377099 - DNA, 120 bp, Artificial Sequence
  ENSG00000143190_99 (sequence is synthesized)
aaacaaaagtcaaaaaaccccatcaccaccatcatccaccctacaccaaccagggtcactatggggacttagcacagggcctagggagggtgggagctgctgctggactggcccgaggac

SEQ ID NO: 377100 - DNA, 120 bp, Artificial Sequence
  ENSG00000143190_100 (sequence is synthesized)
tccacagagtgggggacgttgaagacactggcgcacgattggctgctctgctgggtgctttaacctctggggctgggcgaatgcacgccacggtgcccttctgagcctttttttcttttc

SEQ ID NO: 377101 - DNA, 120 bp, Artificial Sequence
  ENSG00000143190_101 (sequence is synthesized)
ctgtactggaactgcttggaagtggctgtcctgtttgtgagaaaacatgcagaaagattatcaagcttttcatttctctttattgtagttttctttcctttttgcagcaccactgtgcaa

SEQ ID NO: 377102 - DNA, 120 bp, Artificial Sequence
  ENSG00000143190_102 (sequence is synthesized)
ctatgcattgtacttcacaaccttttgtgctaggtagatgcctgtgactttttaacttggggggtggggggattgcaaatgaaggaactttttacatggatctttttaatctcagttggt

SEQ ID NO: 377103 - DNA, 120 bp, Artificial Sequence
  ENSG00000143190_103 (sequence is synthesized)
tgggggaggggggtacttggttcttgggtcacacaagctctatcccaaagcaaaatccaaatgttaataatattagcctgatgcagataccaaagataatttctttcctgcagaacctta

SEQ ID NO: 377104 - DNA, 120 bp, Artificial Sequence
  ENSG00000143190_104 (sequence is synthesized)
gactcgtgtattaagtacgattacccagcacttgcattagtctaacctcagtaattccaaagcttagatgtatattttggtatatttctgggatattaaaaaaaaaatgtcgtttaactt

SEQ ID NO: 377105 - DNA, 120 bp, Artificial Sequence
  ENSG00000143190_105 (sequence is synthesized)
cttgtttgtttcagtgtaatgctcttaaagtcatagcatgaaaataattgaactgtcctattcttagtagtttgaaataatagtatttttgtatgttttgggtgtgtctatgtatgtatt

SEQ ID NO: 377106 - DNA, 120 bp, Artificial Sequence
  ENSG00000143190_106 (sequence is synthesized)
aacataacagttttcactgcctaggtgttcataataaaaaagaaaatgaaaaaagttctgagtgtacataatattcaataataatctcccaccaggtgtcaatttagattgcatattcct

SEQ ID NO: 377107 - DNA, 120 bp, Artificial Sequence
  ENSG00000143190_107 (sequence is synthesized)
cattactgttcccaactgggattttgttttcttttaaagagacagtgatcgtgtttttctaaagatgttttctttctctctttcaatatcttaactcactttttttttcttccttttttg

SEQ ID NO: 377108 - DNA, 120 bp, Artificial Sequence
  ENSG00000143190_108 (sequence is synthesized)
tcttaattattaattcaggggtgtttgtccactgttgtcaaaggaggggcacaaggggaattggcccccggcctcctagaactttttgttttatgtactttaaaatgtgagtttgagttc

SEQ ID NO: 377109 - DNA, 120 bp, Artificial Sequence
  ENSG00000143190_109 (sequence is synthesized)
ttctttgtggaaacttaagatgtggtgtaaatgattctttccaaaattgtccagcagcttgaatgaggcagtgacaattctgaggtggtttattgggagtccttctacatttctcttaga

SEQ ID NO: 377110 - DNA, 120 bp, Artificial Sequence
  ENSG00000143190_110 (sequence is synthesized)
taactctgcactctgggtggctattgtgtagccttactgccccagagtgcctgttagccaaatatttcccctctgataggaatattttctaagaatcagctgataacttgcgtgctggac

SEQ ID NO: 377111 - DNA, 120 bp, Artificial Sequence
  ENSG00000143190_111 (sequence is synthesized)
cttgttatctgtgcccctgggagacacacgttttcttggttttgaaaacctgaaacacaggcaactttacattttggggaattagctgatgcctcctgaagcctgaggaggtggcgggga

SEQ ID NO: 377112 - DNA, 120 bp, Artificial Sequence
  ENSG00000143190_112 (sequence is synthesized)
atatgagcggtgctgtctctctcaaaagtgccctttagatgattccccctcctagggctgcctgcaggggctgtaggcttgggaaagattgtgtaggtgacagtgaatcagaatgaagtg

SEQ ID NO: 377113 - DNA, 120 bp, Artificial Sequence
  ENSG00000143190_113 (sequence is synthesized)
gtagattttgtgtagatgcatttgtctgctgtaattttttatatatatattaaacttactgtaactgtacagttcatttctgttgtaaaacatcattaaaccatcttccaagtgttttca

SEQ ID NO: 377114 - DNA, 120 bp, Artificial Sequence
  ENSG00000143190_114 (sequence is synthesized)
aaactcctctgagcaactgaagtttccttattcagttgaagattgctatggtgtaacagaagttgtattttgcttttccccttaatccactttccaccctacgcaacccccctcttttcg

SEQ ID NO: 377115 - DNA, 120 bp, Artificial Sequence
  ENSG00000143190_115 (sequence is synthesized)
cttaagaacatactgtagatttgttagaaatagtagtaccttctttccccaccccaaactgctacctgtttcttccttgtttggactctctgctcctctagaagatttcacagcaatgct

SEQ ID NO: 377116 - DNA, 120 bp, Artificial Sequence
  ENSG00000143190_116 (sequence is synthesized)
atggcggacggaggagcagcgagtcaagatgagagttcagccgcggcggcagcagcagcagactggaaaagtaagaagagctttcctgcctttttaattaccaaactactctcagttttc

SEQ ID NO: 377117 - DNA, 120 bp, Artificial Sequence
  ENSG00000143190_117 (sequence is synthesized)
gattttggttaaaatattcaaaatggcggacggaggagcagcgagtcaagatgagagttcagccgcggcggcagcagcagcagctactactgggctgtaaacagtgatgccagcaaaatg

SEQ ID NO: 377118 - DNA, 120 bp, Artificial Sequence
  ENSG00000143190_118 (sequence is synthesized)
ttacttcagctgatgaagtgatgctgtttcgagaatttgaaagcaatttttcagtggataaagaagttgacagcacgatttgttggatgtgatgaaggattaatgagcatacaccttcac

SEQ ID NO: 377119 - DNA, 120 bp, Artificial Sequence
  ENSG00000143190_119 (sequence is synthesized)
aatggttctgggcaatataaaataacagactcaagaatgaacaatccgtcagaaaccagtaaaccatctatggagagtggagatggcaacacagcatggacccttttatgatatgggcac

SEQ ID NO: 377120 - DNA, 120 bp, Artificial Sequence
  ENSG00000143190_120 (sequence is synthesized)
tgaaactaaagcacatggtggaagaaggattggtagcatatagaaacatttttagacaaatgaaaaagcaaaaaagtcagaaattacagtgtatttccataaagttacaccaagtgtgcc

SEQ ID NO: 377121 - DNA, 120 bp, Artificial Sequence
  ENSG00000143190_121 (sequence is synthesized)
tgcctctcctgcctccccttccagctttttgtcttctgccatttctgagtcagcaagacccctcctgttcctccttctcagcctactcagcatgaagacaaggatgaagatctttgtgat

SEQ ID NO: 377122 - DNA, 120 bp, Artificial Sequence
  ENSG00000143190_122 (sequence is synthesized)
tctggtccaacatacgctggcagtttctaatggattctaggttaagaagttgagctctttttggaatttccagctgtttctatttagaatagttttttaactttcatcccattctttcct

SEQ ID NO: 377123 - DNA, 120 bp, Artificial Sequence
  ENSG00000143190_123 (sequence is synthesized)
aaaataaaggattgacctatcacagagcttattcagattatgccaaagacatatcagttttaatttaatgttgtatatcttctcttccaagttgtaaaacaagattgaatgtaaggcaaa

SEQ ID NO: 377124 - DNA, 120 bp, Artificial Sequence
  ENSG00000143190_124 (sequence is synthesized)
aagactaccagagatcaactggaaattttcagctcattttctgattctttctttcttttgccatgtgttcgaagaaatctttaatgtttctggataacatgtttttcttctacaggtctc

SEQ ID NO: 377125 - DNA, 120 bp, Artificial Sequence
  ENSG00000143190_125 (sequence is synthesized)
aaaatattcaaaatggcggacggaggagcagcgagtcaagatgagagttcagccgcggcggcagcagcagcaggctggagtgcagtggtgtaattatggctcagttcaccctcaacctcc

SEQ ID NO: 377126 - DNA, 120 bp, Artificial Sequence
  ENSG00000143190_126 (sequence is synthesized)
atcagaaagctgattcatttaaatattctagtaattacagtataaataattagccgtaatttttagcctgaaatactcttgtatttgagccaggattaggaacacacacacacacacaca

SEQ ID NO: 377127 - DNA, 120 bp, Artificial Sequence
  ENSG00000143190_127 (sequence is synthesized)
cacagttgaaggaataggataagtaaggcttttgtatttagataagcttgaagtagaagcttattgtttcttccttgatgaattatcatagaacttgttcttgcaatagttctgcttttg

SEQ ID NO: 377128 - DNA, 89 bp, Artificial Sequence
  ENSG00000143190_128 (sequence is synthesized)
tgtcaagttcaagagcagctcagatgccatgaattaagtggagcacaaaagggggaaaggagacccttttgaagaacaaaggcctccca

SEQ ID NO: 377129 - DNA, 120 bp, Artificial Sequence
  ENSG00000143190_129 (sequence is synthesized)
agggggaaaggagacccttttgaagaacaaaggcctcccattaggctgccatgttcttttttgaccaaaagtgcaccctacatggtttctattgttgtccacatgccctgcacataaggt

SEQ ID NO: 377130 - DNA, 120 bp, Artificial Sequence
  ENSG00000143190_130 (sequence is synthesized)
cttttgagtattgcctggaatttactatttctgacaaatttctatagaacatgtgggtctatgaggaaggtttcattttaaatagactcaagaatgaacaatccgtcagaaaccagtaaa

SEQ ID NO: 377131 - DNA, 120 bp, Artificial Sequence
  ENSG00000143194_0 (sequence is synthesized)
acttagggcgggagcccggcgagggcgccggtgctttgttctgtctgaggccaggaagtttgaccgcgctgccatgccgaaccgtaaggccagccggaatgcttactatttcttcgtgca

SEQ ID NO: 377132 - DNA, 120 bp, Artificial Sequence
  ENSG00000143194_1 (sequence is synthesized)
ggagaagatccccgaactacggcgacgaggcctgcctgtggctcgcgttgctgatgccatcccttactgctcctcagactgggcgcttctgagggaggaagaaaaggagaaatacgcaga

SEQ ID NO: 377133 - DNA, 120 bp, Artificial Sequence
  ENSG00000143194_2 (sequence is synthesized)
aatggctcgagaatggagggccgctcagggaaaggaccctgggccctcagagaagcagaaacctgttttcacaccactgaggaggccaggcatgcttgtaccaaagcagaatgtttcacc

SEQ ID NO: 377134 - DNA, 120 bp, Artificial Sequence
  ENSG00000143194_3 (sequence is synthesized)
tccagatatgtcagctttgtctttaaaaggtgatcaagctctccttggaggcattttttattttttgaacatttttagccatggcgagctacctcctcattgtgaacagcgcttcctccc

SEQ ID NO: 377135 - DNA, 120 bp, Artificial Sequence
  ENSG00000143194_4 (sequence is synthesized)
ttgtgaaattggctgtgttaagtattctctccaagaaggtattatggcagatttccacagttttataaatcctggtgaaattccacgaggatttcgatttcattgtcaggctgcaagtga

SEQ ID NO: 377136 - DNA, 120 bp, Artificial Sequence
  ENSG00000143194_5 (sequence is synthesized)
ttctagtcacaagattcctatttcaaattttgaacgtgggcataaccaagcaactgtgttacaaaacctttatagatttattcatcccaacccagggaactggccacctatctactgcaa

SEQ ID NO: 377137 - DNA, 120 bp, Artificial Sequence
  ENSG00000143194_6 (sequence is synthesized)
gtctgatgatagaaccagagtcaactggtgtttgaagcatatggcaaaggcatcagaaatcaggcaagatctacaacttctcactgtagaggaccttgtagtggggatctaccaacaaaa

SEQ ID NO: 377138 - DNA, 120 bp, Artificial Sequence
  ENSG00000143194_7 (sequence is synthesized)
ggattattctagcaacacaaggtgcaagtggcatgaagaaaatgatattctcttctgtgctttagctgtttgcaagaagattgcgtactgcatcagtaattctctggccactctctttgg

SEQ ID NO: 377139 - DNA, 120 bp, Artificial Sequence
  ENSG00000143194_8 (sequence is synthesized)
aatccagctcacagaggctcatgtaccactacaagattatgaggccagcaatagtgtgacacccaaaatggttgtattggatgcagggcgttaccagaagctaagggttgggagttcagg

SEQ ID NO: 377140 - DNA, 120 bp, Artificial Sequence
  ENSG00000143194_9 (sequence is synthesized)
attctctcatttcaactcttctaatgaggaacaaagatcaaacacacccattggtgactacccatctagggcaaaaatttctggccaaaacagcagcgttcggggaagaggaattacccg

SEQ ID NO: 377141 - DNA, 120 bp, Artificial Sequence
  ENSG00000143194_10 (sequence is synthesized)
cttactagagagcatttccaattcttccagcaatatccacaaattctccaactgtgacacttcactctcaccttacatgtcccaaaaagatggatacaaatctttctcttccttatctta

SEQ ID NO: 377142 - DNA, 120 bp, Artificial Sequence
  ENSG00000143194_11 (sequence is synthesized)
atgatggtactcttttcaatttctgaaaacagtaacaggcccaacttccttcttactacagtcatattaaacagatcacatcaatgacaaatgtcactactataaaaactacttaatttg

SEQ ID NO: 377143 - DNA, 120 bp, Artificial Sequence
  ENSG00000143194_12 (sequence is synthesized)
taaggaaattgtttcatagatttaaaaaaattgtggttggagagcatcttggcatttgtgctttttttcttgagggattgttctgcttcctggctgtatgatgggtatatcattaaagtt

SEQ ID NO: 377144 - DNA, 120 bp, Artificial Sequence
  ENSG00000143194_13 (sequence is synthesized)
tggagtcctatatgaacaaaactgacatttttagagttgtacttttgggaatgttatagattgatcattctttctcctgataataaaggtattgaatatctgttatgaaaggttctaaaa

SEQ ID NO: 377145 - DNA, 120 bp, Artificial Sequence
  ENSG00000143194_14 (sequence is synthesized)
tgccacgcacccagccaatcagagcacttggcacctgcgacggcgctctccccccacctcacccgcaaggcggcacgagccggaatcttccagtctcaggctgtttgttcccccgcgggg

SEQ ID NO: 377146 - DNA, 120 bp, Artificial Sequence
  ENSG00000143194_15 (sequence is synthesized)
ggattattctagcaacacaaggtattgctagcatttttgttttagagtcattttgacttattttctagactgagaaaatatggtaggactatttttgcctttttatgcaatattttccca

SEQ ID NO: 377147 - DNA, 120 bp, Artificial Sequence
  ENSG00000143194_16 (sequence is synthesized)
tgaaagcttggaatcattgtatttccctgaatataaaatttcattgatagtaagatatattgttacttgtgtatcactaaaaacaaacctgccaaataaactgttctttcttatcactta

SEQ ID NO: 377148 - DNA, 120 bp, Artificial Sequence
  ENSG00000143194_17 (sequence is synthesized)
gctttgggggttcggttagtgcgaagacgacgttcttcttttcccctggtgtcagaatgcctgttaaaaaaaaccaacagcctccacaactagggcatgcacacattggtgtaatttgat

SEQ ID NO: 377149 - DNA, 120 bp, Artificial Sequence
  ENSG00000143194_18 (sequence is synthesized)
ggtgaaaggcctggggaattcctgttaggaaacctgtagacaatacactttgatcgctaatgggagtgtaacatctaggggttgtactagatgacatcaaggtgtccctttcaactcttc

SEQ ID NO: 377150 - DNA, 120 bp, Artificial Sequence
  ENSG00000143194_19 (sequence is synthesized)
tgtgattaatgagccttggcggggggtggggggtgggcagtgggggcttaaaactagtttagaccattctgtctttttttctttagcaaaatataccattcttttaaaaatgacacctga

SEQ ID NO: 377151 - DNA, 120 bp, Artificial Sequence
  ENSG00000143194_20 (sequence is synthesized)
acacctgaaacaaagccagctgctgtgtttaaaatattgaaataacaagacttggattagttggtgtatgtgtgtatgttttacaagagttgaataggctgggcacggtggctcacgtct

SEQ ID NO: 377152 - DNA, 76 bp, Artificial Sequence
  ENSG00000143194_21 (sequence is synthesized)
actctactaaaagtaaaaaataaaaaaagctgggtgtgatagcagacgcccgtggtcccagctactcaggaggctg

SEQ ID NO: 377153 - DNA, 120 bp, Artificial Sequence
  ENSG00000143194_22 (sequence is synthesized)
cccctagtctcctgatgcttcttgtcataattcttcttggactaattcactgtctatgatcagctgactaaacatggcagcctttatttaatcaacaaatatttattgagcacctcctct

SEQ ID NO: 377154 - DNA, 80 bp, Artificial Sequence
  ENSG00000143195_0 (sequence is synthesized)
gagacgctcgccccgtgccgcgctgcctgggcatgcggatgcgccgccgagcgctgcgcggaccccggaagcccgcggca

SEQ ID NO: 377155 - DNA, 120 bp, Artificial Sequence
  ENSG00000143195_1 (sequence is synthesized)
gcgcggccggcccggcgggcgctgcgcccagggacgcccggtgcccgccgctccgccgccgcccgctgccgcggggtgacagcgatccttctgttccagccatttcccactttcctcact

SEQ ID NO: 377156 - DNA, 120 bp, Artificial Sequence
  ENSG00000143195_2 (sequence is synthesized)
cactccgtaattcggctgggaagttggggaagatggatagggtcttgctgaggtggatttctctcttctggctaacagccatggtcgaaggccttcaggtcacagtgcccgacaagaaga

SEQ ID NO: 377157 - DNA, 120 bp, Artificial Sequence
  ENSG00000143195_3 (sequence is synthesized)
aggtggccatgctcttccagcccactgtgcttcgctgccacttctcaacatcctcccatcagcctgcagttgtgcagtggaagttcaagtcctactgccaggatcgcatgggagaatcct

SEQ ID NO: 377158 - DNA, 120 bp, Artificial Sequence
  ENSG00000143195_4 (sequence is synthesized)
tgggcatgtcctctacccgggcccaatctctcagcaagagaaacctggaatgggacccctacttggattgtttggacagcaggaggactgttcgagtagtagcttcaaaacagggctcga

SEQ ID NO: 377159 - DNA, 120 bp, Artificial Sequence
  ENSG00000143195_5 (sequence is synthesized)
ctgtcaccctgggagatttctacaggggcagagagatcacgattgttcatgatgcagatcttcaaattggaaagcttatgtggggagacagcggactctattactgtattatcaccaccc

SEQ ID NO: 377160 - DNA, 120 bp, Artificial Sequence
  ENSG00000143195_6 (sequence is synthesized)
cagatgacctggaggggaaaaatgaggactcagtggaactgctggtgttgggcaggacagggctgcttgctgatctcttgcccagttttgctgtggagattatgccagagtgggtgtttg

SEQ ID NO: 377161 - DNA, 120 bp, Artificial Sequence
  ENSG00000143195_7 (sequence is synthesized)
ttggcctggtgctcctgggcgtcttcctcttcttcgtcctggtggggatctgctggtgccagtgctgccctcacagctgctgctgctatgtccgctgcccatgctgcccagattcctgct

SEQ ID NO: 377162 - DNA, 120 bp, Artificial Sequence
  ENSG00000143195_8 (sequence is synthesized)
gctgccctcaagccttgtatgaagcagggaaagcagcaaaggccgggtaccctccctctgtctccggtgtccccggcccttactccatcccctctgtccctttgggaggagccccctcat

SEQ ID NO: 377163 - DNA, 120 bp, Artificial Sequence
  ENSG00000143195_9 (sequence is synthesized)
ctggcatgctgatggacaagccgcatccacctcccttggcaccaagtgactccactggaggaagccacagtgttcgcaaaggttaccggatccaggctgacaaagagagagactccatga

SEQ ID NO: 377164 - DNA, 120 bp, Artificial Sequence
  ENSG00000143195_10 (sequence is synthesized)
aggtcctgtactatgttgagaaggagctggctcagtttgatccagccagaaggatgagaggcagatataacaacaccatctcagaactcagctccctacatgaggaggacagcaatttcc

SEQ ID NO: 377165 - DNA, 120 bp, Artificial Sequence
  ENSG00000143195_11 (sequence is synthesized)
gccagtctttccatcagatgagaagcaagcagttccctgtgtctggggacttggagagcaatcctgactattggtcaggtgtcatgggaggcagcagtggggcaagccgcgggccctcag

SEQ ID NO: 377166 - DNA, 120 bp, Artificial Sequence
  ENSG00000143195_12 (sequence is synthesized)
ccatggagtataacaaagaggatcgagagagcttcaggcacagccagccgcgctccaagtcggagatgctgtcgcggaagaacttcgccacgggggtgccggccgtttccatggacgagc

SEQ ID NO: 377167 - DNA, 120 bp, Artificial Sequence
  ENSG00000143195_13 (sequence is synthesized)
tggcggccttcgctgactcctacggccagcggccccgccgggcagacggcaacagtcacgaggcgcggggcgggagccgcttcgagcgctcggagtcgcgggcgcacagcggcttctacc

SEQ ID NO: 377168 - DNA, 120 bp, Artificial Sequence
  ENSG00000143195_14 (sequence is synthesized)
aggacgactccttggaggagtactacggtcagcgcagccgcagccgcgagcccctgaccgatgctgaccgcggctgggccttcagccccgcgcgccgcagacccgccgaggacgcgcacc

SEQ ID NO: 377169 - DNA, 120 bp, Artificial Sequence
  ENSG00000143195_15 (sequence is synthesized)
tgccgcggctggtgagccgcacgccaggcaccgcacccaaatacgaccactcgtacctgggcagcgcgcgggagcgccaggcgcggcccgagggcgccagccgcggtggcagcctggaga

SEQ ID NO: 377170 - DNA, 120 bp, Artificial Sequence
  ENSG00000143195_16 (sequence is synthesized)
cgccatccaagcggagcgcgcagctcggcccgcgcagcgcctcctactacgcttggtcgccgcccggcacctacaaggccggctcgtcgcaggacgaccaggaggacgcgtccgacgacg

SEQ ID NO: 377171 - DNA, 120 bp, Artificial Sequence
  ENSG00000143195_17 (sequence is synthesized)
cgctgccgccctacagcgagctggagctgacccgcggcccgtcctaccgcggccgcgacctgccctaccacagcaactcggagaagaagaggaaaaaggagcccgccaagaaaaccaatg

SEQ ID NO: 377172 - DNA, 120 bp, Artificial Sequence
  ENSG00000143195_18 (sequence is synthesized)
actttccaaccaggatgtcccttgtggtctgatgttgtcaacatttctctggataatgagaaatcagacatggactacggggacaagacacaaatctaagaaccagcaggcccaggacct

SEQ ID NO: 377173 - DNA, 120 bp, Artificial Sequence
  ENSG00000143195_19 (sequence is synthesized)
tctctggccatcaccttggaagatttgctgatctctgctttggcaagggatggcaggcagcctttaagggaggctgatttcaaacctctgtgcccatctaactagtttgagaagcttacc

SEQ ID NO: 377174 - DNA, 120 bp, Artificial Sequence
  ENSG00000143195_20 (sequence is synthesized)
aagaaagcaagaatgtgtgagaacattcctacatacagagtttctcaactatagcgtttatcctgcccagcctcctcccttaacagaaccaggactccatttgcaattctgaaagagagt

SEQ ID NO: 377175 - DNA, 120 bp, Artificial Sequence
  ENSG00000143195_21 (sequence is synthesized)
tagctctggactgctaaactccagaaattgcctatgcctacaatatgcttttctatacctcctgtgctatacttagagacagaagaatttattactactattagaaggccttcttctgac

SEQ ID NO: 377176 - DNA, 120 bp, Artificial Sequence
  ENSG00000143195_22 (sequence is synthesized)
aagggaagatagcttcaagtcaaaatataccttttatccccatcactttacagtcactagtcaatgactgttgttacactaaaatcaaaaggcctttggtgagctcagtgacagtgacct

SEQ ID NO: 377177 - DNA, 120 bp, Artificial Sequence
  ENSG00000143195_23 (sequence is synthesized)
ctgggacaatcacagaaatgacttcactgctgttctgaatgacaattcttaagtggctaggacaaagcaaaagcgagtatacctttttgaaaagctgtctaagtggtatttccttttcca

SEQ ID NO: 377178 - DNA, 120 bp, Artificial Sequence
  ENSG00000143195_24 (sequence is synthesized)
ttctgagaacgtaaactgctttttccttttctgctgcacatgtcaatatcggagtcttagacattaagggctcttctcttcctcccctctcctggacttcccacaggttggtgccacaca

SEQ ID NO: 377179 - DNA, 120 bp, Artificial Sequence
  ENSG00000143195_25 (sequence is synthesized)
cacagccctgcctccctctgcactctgattagattgtcattgaatgccttgtgataaatgcttaaaatatacacatgaaagagaagagggaggaaagaggagaaagcagtaatgcatata

SEQ ID NO: 377180 - DNA, 120 bp, Artificial Sequence
  ENSG00000143195_26 (sequence is synthesized)
gaaaagaatgagaaggaatttaaaagggaaataacatcatctcattatattttgaatgtggaccatttcacccacaaacttcactcagtcttttccggttttgtgcttcacttgccgtta

SEQ ID NO: 377181 - DNA, 120 bp, Artificial Sequence
  ENSG00000143195_27 (sequence is synthesized)
attgtttctgccatcccagttctgccattctaggacatgggggatgtggaacatacagcatttggcctgactagactgccactatggctgctttcaagagattagagatactgctttctc

SEQ ID NO: 377182 - DNA, 120 bp, Artificial Sequence
  ENSG00000143195_28 (sequence is synthesized)
aggaaggagtacttcctattcccacccttgcctaaatgatagattttgcctaaatcccaaagctagatctctggattttatcgtttgtgtagatagcaaaaatggccacgaactctttcc

SEQ ID NO: 377183 - DNA, 120 bp, Artificial Sequence
  ENSG00000143195_29 (sequence is synthesized)
ttctcatcaagaggtgccatcttttttccaaccccttgaatctggagttggctatgtgatttgatttagccagtagcccaacaaatgtgacacaagcagagacttgaaaagttcttgtgc

SEQ ID NO: 377184 - DNA, 120 bp, Artificial Sequence
  ENSG00000143195_30 (sequence is synthesized)
atggggcttgtcctcttttgctgctcttgggaaccttgcaactaccatcaggtgaacaagcctggactatcctgctgcatgacaaaagaaaagggcccagttacccttgtcaccctatct

SEQ ID NO: 377185 - DNA, 120 bp, Artificial Sequence
  ENSG00000143195_31 (sequence is synthesized)
gacagcccgtcaacttccagctgatgcagacatgggtgagtccaggtgataccaatagaagaactgcctagctgaacccagcccaaatttctgattcctactcgaggcgtgagaagttgg

SEQ ID NO: 377186 - DNA, 120 bp, Artificial Sequence
  ENSG00000143195_32 (sequence is synthesized)
tgcattctttatgttcatttctctttaagaacaaacctgactcgttcttgtctgaatgttcatccctgaacctcttaatccatccaaacttgtgtttctcatagcctccactattgttga

SEQ ID NO: 377187 - DNA, 120 bp, Artificial Sequence
  ENSG00000143195_33 (sequence is synthesized)
caaatttttatcaaagcttttcaccctgcactcttgtggagtggaggataatgcttgactttgctatcccttaatccagcagtggtttcttccctgtctatggatccgtggacaacctct

SEQ ID NO: 377188 - DNA, 120 bp, Artificial Sequence
  ENSG00000143195_34 (sequence is synthesized)
gaagatctcttctttaccatccttttggtcttctccagagccaccctactggggctagaccctattctcaaagtaccattcctctagtatccatttgtacttcatgacatttccaaaaaa

SEQ ID NO: 377189 - DNA, 120 bp, Artificial Sequence
  ENSG00000143195_35 (sequence is synthesized)
agtcctatgtttgcaatgaaataagaaagtggctgggtgagggtcggagggatgagctggtatgtgtcattgcttggagaattgacctaccaaaggacttccgtgttgctttggccagtc

SEQ ID NO: 377190 - DNA, 120 bp, Artificial Sequence
  ENSG00000143195_36 (sequence is synthesized)
ccagagaaatcaggagaacagttgaacccagtgctggcacttccaagggctggaagacacaagccataaccctggtgctgagttttagacttgctggtgtccctggcctctgaaagccta

SEQ ID NO: 377191 - DNA, 120 bp, Artificial Sequence
  ENSG00000143195_37 (sequence is synthesized)
ggtctagcctgtctgtttggaccccagttcagatggaaaagatgataaaaaacatttcttagtcaccagctttggatttcaacttgctcaggcaattttggagaatattgggtagctgtg

SEQ ID NO: 377192 - DNA, 120 bp, Artificial Sequence
  ENSG00000143195_38 (sequence is synthesized)
gtagctattatcgctttatactgagcactgtgtcaggcttttcaccaccaaagagcctcatagcaccagctgcagagaccaaaaataatgtttttttaaagctacggacgtatgattttg

SEQ ID NO: 377193 - DNA, 120 bp, Artificial Sequence
  ENSG00000143195_39 (sequence is synthesized)
gtgaaggttgagggtagcaatgggaaagaaagaattattaaaattggaaacctgcaattccaaagacaacaaaactacagatagactgaaaagtacaaagaagatagcaggctactgaat

SEQ ID NO: 377194 - DNA, 120 bp, Artificial Sequence
  ENSG00000143195_40 (sequence is synthesized)
taaccttgggagttgggaccaggttgtcctttgtagaactggataaatcattcagacttccaggctttcagtagagagaaaaagcagttgtttctgggtatatggacaggagttaaggct

SEQ ID NO: 377195 - DNA, 120 bp, Artificial Sequence
  ENSG00000143195_41 (sequence is synthesized)
gagttgacaagtcaaaacttcttgtcctcagcacccctgactttcctctatgtgtccttttgtttcttctcctttgaatagtgtgtcctgcacaggaaatggttatatttgttagcttct

SEQ ID NO: 377196 - DNA, 120 bp, Artificial Sequence
  ENSG00000143195_42 (sequence is synthesized)
ttcctaggtcttattggagtacaaagtaaatcttgtgtaagacataatctctgtccactaggaccccgtaatttaataggggaaataagacatgctcaagaaaggagattttatacatag

SEQ ID NO: 377197 - DNA, 120 bp, Artificial Sequence
  ENSG00000143195_43 (sequence is synthesized)
agtatgaaatagtgctatggataaattataataaaaccagagatttagtttttttaaaaaatgagaatactttgatattaaagtgttgtatgtgtttgtccatcatcttatttaaacata

SEQ ID NO: 377198 - DNA, 120 bp, Artificial Sequence
  ENSG00000143195_44 (sequence is synthesized)
gacttggtgatctgaaaagccaatactcaaaagtctgaactgaaaagaggtgaattaggatcgggaaagggtgagcagcaggggtcccagggggatgatgcataagctgctgtgcttgcc

SEQ ID NO: 377199 - DNA, 120 bp, Artificial Sequence
  ENSG00000143195_45 (sequence is synthesized)
tgtgagtcactactgagtcaggaacacgctggaggagggagtgtggatgcaggtggcagggaggtgtcccctggtagatgagctgcttctctaggccatgcatggattcattaggaagtt

SEQ ID NO: 377200 - DNA, 120 bp, Artificial Sequence
  ENSG00000143195_46 (sequence is synthesized)
ggagacaatggccatggacctggtgcatggcagctattccatccaagcacgttcacaggggagctcagcgtggctgctcctggggctcagttctgcggctgtgagtgctgctgcccatat

SEQ ID NO: 377201 - DNA, 120 bp, Artificial Sequence
  ENSG00000143195_47 (sequence is synthesized)
tcaccaacacagggcaggcctcacggagatgctaggcctcacatcccccttctcatgatcctcactgtgcacttgacataggattaggcatactggagatgagaaaaggctgccacccaa

SEQ ID NO: 377202 - DNA, 120 bp, Artificial Sequence
  ENSG00000143195_48 (sequence is synthesized)
acccaaggcacctgaccacatctgtaaatatttctgaatagtccacaaaatttcacataggtagtctgattagatcttgcctttgagagaagctgaagtcacagatactgttgtaattta

SEQ ID NO: 377203 - DNA, 120 bp, Artificial Sequence
  ENSG00000143195_49 (sequence is synthesized)
ccaccgcccctcacccaattttttttaataggtgaagaaaccatcactgccattaatgaagtcacaaacctattaggtctttagactcccaacctctggatcttttctgctgattagtgt

SEQ ID NO: 377204 - DNA, 120 bp, Artificial Sequence
  ENSG00000143195_50 (sequence is synthesized)
ttcccaaaattgcctaaccacaagaattaacttgatagctgctgttaaaaaggtattgttggaccctgttttggagattgattgggtgggtctagagccagaattcatatttttaatatg

SEQ ID NO: 377205 - DNA, 120 bp, Artificial Sequence
  ENSG00000143195_51 (sequence is synthesized)
cattccaggagactcctgtgatcagatgcatttggaaatcattgcactaagtcatacctctgggtactccaaacagctagtcctgaggcttccttgggccttagaattttttcttcaaat

SEQ ID NO: 377206 - DNA, 120 bp, Artificial Sequence
  ENSG00000143195_52 (sequence is synthesized)
gtcctggtgaggtccctctcaatcctttggggctggctgtggtgagtcactcagaagtctggctgtgacctggatgggctcaccagagtacgctagtggtagtgggaaaacaggcagaga

SEQ ID NO: 377207 - DNA, 120 bp, Artificial Sequence
  ENSG00000143195_53 (sequence is synthesized)
gaaaggagtgtcaggagcactcccagggaggctgttgtagatatttccattcccagaacagtgatctattgtgacagtctcagaacagacaacaagaattacaggtaattttctcattct

SEQ ID NO: 377208 - DNA, 120 bp, Artificial Sequence
  ENSG00000143195_54 (sequence is synthesized)
cttgatatatttttagcaaaacttaaatcatgaatagaaggaaaagatgccattggggaaatagaaaaactcaatcattttataaagcatacaaatcataaggatgactggccaatagca

SEQ ID NO: 377209 - DNA, 120 bp, Artificial Sequence
  ENSG00000143195_55 (sequence is synthesized)
aataaaagtcctcattttatatccttccaaaatcagatttaaatgctgccagcatcttaatggaagtctgaaattgattgataggatgtagaaatccaaattcactaaaatagggggcca

SEQ ID NO: 377210 - DNA, 120 bp, Artificial Sequence
  ENSG00000143195_56 (sequence is synthesized)
gctacataaagtcctagaaggaaaaagtgcctcgcttttttctgccattatcctaccccctagtcatctggggaattgatctatgaagcttgaagaaggggcatttaacatcagagtggt

SEQ ID NO: 377211 - DNA, 120 bp, Artificial Sequence
  ENSG00000143195_57 (sequence is synthesized)
gcaagggcagtgttgagatgctttaagcagcagcctgagctttagcactatttgaaggggagaaggttaatactaataatatttgtgttatttttatgatatattactgtttacagaaca

SEQ ID NO: 377212 - DNA, 120 bp, Artificial Sequence
  ENSG00000143195_58 (sequence is synthesized)
ctttcatttgatcccaacatcaactgctgtgatagaggcagggcagatgttgtggtctcattacatagaatgtaaaactgaggttgaaaaatactaagtgacttgtctgtagtcaaatgg

SEQ ID NO: 377213 - DNA, 120 bp, Artificial Sequence
  ENSG00000143195_59 (sequence is synthesized)
tttttaaaattataaagccaggccttctgactgtcttgtctggtgtcctttccaattccttaaatactcatgggactggaatctgggtattccagattccagtttctcttcacagccaga

SEQ ID NO: 377214 - DNA, 120 bp, Artificial Sequence
  ENSG00000143195_60 (sequence is synthesized)
catctggtgagaagagccgtagacttgatgcttgttcatatgtcatggatgtggcgaagccatgaagacagatactgttgctgcttcatccaactaagcaccattcattcctcaaatgct

SEQ ID NO: 377215 - DNA, 79 bp, Artificial Sequence
  ENSG00000143195_61 (sequence is synthesized)
ctgcttcatccaactaagcaccattcattcctcaaatgctaatctaagagggagttgtagcttcactcaaggagagggt

SEQ ID NO: 377216 - DNA, 120 bp, Artificial Sequence
  ENSG00000143195_62 (sequence is synthesized)
tatcagctcactgcagtctcaaactcctagctcaagcaatcctcctccctcagcctcccaagtaggtaggactacagatatatgccaccacgtccagcaaattttgtttgtttgtagaga

SEQ ID NO: 377217 - DNA, 120 bp, Artificial Sequence
  ENSG00000143195_63 (sequence is synthesized)
ggcctcaagtgatcctcccaccttggctgcctaaagtgctggtattacagacatgagccactgaacccagctgagagcctcactttcatcacctgtgctgtgaggggtaatatatgcttc

SEQ ID NO: 377218 - DNA, 120 bp, Artificial Sequence
  ENSG00000143195_64 (sequence is synthesized)
cactttcatcacctgtgctgtgaggggtaatatatgcttcaggttttctggagaatccttcttgcagagaagtttctgaatgaaacgacagattcatctggattcagaactccaggcaga

SEQ ID NO: 377219 - DNA, 120 bp, Artificial Sequence
  ENSG00000143195_65 (sequence is synthesized)
agctgcttaacagcaaaaatctggcatcttcactacattttaagattttaggtagaactaagagggatcagatatagaggaataaggaatgtgagaaggaaaaagatatagtagtttagc

SEQ ID NO: 377220 - DNA, 120 bp, Artificial Sequence
  ENSG00000143195_66 (sequence is synthesized)
taaatttttcttagagtttcttggtggggctggccatgaagtaactagtctgactcatttcttctgggaaggctaaaagagacacagatagcttctcttttaccttggctttaaggaaaa

SEQ ID NO: 377221 - DNA, 120 bp, Artificial Sequence
  ENSG00000143195_67 (sequence is synthesized)
gccattttattaacaaaagtattagacacgactgcataagaaatttgctgtgtgagaataaagaacaagggagtaggagggtgggacagagaagggtgagaagttggcttcgtgagggcc

SEQ ID NO: 377222 - DNA, 120 bp, Artificial Sequence
  ENSG00000143195_68 (sequence is synthesized)
acctgtcagttgtctttgtgccttgtgacatcaaaactgaaatgtttgtattactgttgtccatgactttttttttctgtgtcagacatacaaattgaatttggttgtaatgttttaaac

SEQ ID NO: 377223 - DNA, 120 bp, Artificial Sequence
  ENSG00000143195_69 (sequence is synthesized)
gtaataaagaattcttacctacatttgttaccaagaactcataattaacacaactatggttaatcatgatctgacattaaatggcctcagcaagagaaagaatcatatgatacatgtcct

SEQ ID NO: 377224 - DNA, 120 bp, Artificial Sequence
  ENSG00000143195_70 (sequence is synthesized)
tctctgattgttgtaagtacagtaatagaggaatacatattgtggggttacagagggggctggtactgacagagcaaaaggtatgcttttacagattgtaataagctagataaattctgt

SEQ ID NO: 377225 - DNA, 120 bp, Artificial Sequence
  ENSG00000143195_71 (sequence is synthesized)
tgtcactcttactgctctccacagactgtaacattcagaaggagatgaagggtaggaaaggtggttggataaggtgatggtacctagctcatttccaagaggggcacaagcatatgcctg

SEQ ID NO: 377226 - DNA, 120 bp, Artificial Sequence
  ENSG00000143195_72 (sequence is synthesized)
ctagaaattacacttggggaagggaggaaggaagctattcgtgggaggacatttcaagttctgttaagatttgagaaattccacagcaccataattaagaggaggcaattaaaaaccttt

SEQ ID NO: 377227 - DNA, 120 bp, Artificial Sequence
  ENSG00000143195_73 (sequence is synthesized)
gttagcaaaagaagtgataaatacctctgagaactattaatcctgttttggatggctaagccctctcaagggaattccagattttagtggccttgtcaagcagaaaatctgtttttgctt

SEQ ID NO: 377228 - DNA, 120 bp, Artificial Sequence
  ENSG00000143195_74 (sequence is synthesized)
gaagcatctgggctcaattttttttaagtagttaacttaaaaatgttaacatgtagatttaacttaaagatagactctaaaacagtttgattacctctggattttgtattattttgtgtt

SEQ ID NO: 377229 - DNA, 120 bp, Artificial Sequence
  ENSG00000143195_75 (sequence is synthesized)
ttaattccatttaggtttttcagctttataaaatatttttgtttttatttataaagtatttgtttagaatcacccacgtgttttttctacacatctttttttcctatatttcagatcttc

SEQ ID NO: 377230 - DNA, 120 bp, Artificial Sequence
  ENSG00000143195_76 (sequence is synthesized)
cttttgaaatattttctttctgaaggaagtttacttcagtaatgatttgttggtaggatactcatcagtctttgttgatgtaaaagtctttatttcattcttgttcttgaaagataattt

SEQ ID NO: 377231 - DNA, 120 bp, Artificial Sequence
  ENSG00000143195_77 (sequence is synthesized)
cactgattatgattctagattgatagttattttctttcaggacattgaagttattattacactcccttctgacttttatttttgcttttaagaagtcaattaccagtttaattatccttc

SEQ ID NO: 377232 - DNA, 120 bp, Artificial Sequence
  ENSG00000143195_78 (sequence is synthesized)
ctaatctgtctggtctctctgactgttctaaagatttttttgtctctagtgttctttggtttaattaacatgtgaccaggtgtggatttctttttatttatccaaattaggatttgtggt

SEQ ID NO: 377233 - DNA, 120 bp, Artificial Sequence
  ENSG00000143195_79 (sequence is synthesized)
gtttcctaaatccgtggattggatttcccattaaatatggaaaactctcagctatattaacacatcaaatatttcctcttctttttaaactctctcttgagaattccaattgttagattt

SEQ ID NO: 377234 - DNA, 120 bp, Artificial Sequence
  ENSG00000143195_80 (sequence is synthesized)
tttttcattctatgccccatattgtttaatctatattttgtatttcctctctctgtgttttctattccctattcaggtaaatttcttcaggtttatcttccagctcactaattttctttt

SEQ ID NO: 377235 - DNA, 120 bp, Artificial Sequence
  ENSG00000143195_81 (sequence is synthesized)
cagctagctctaatctcctttatttgagttttaattttaattaatatgtatttcatttctaggagtttagttctttttcaaatttacatagtccctgttgtcttgtgacttactcttttt

SEQ ID NO: 377236 - DNA, 120 bp, Artificial Sequence
  ENSG00000143195_82 (sequence is synthesized)
ttttttttacaatgccctcttatttatctgaatatcttaaagatactaacttaaaattttatatccagtaattccaatatctacagtctttgtgggtctacttttagagtttgttacttc

SEQ ID NO: 377237 - DNA, 120 bp, Artificial Sequence
  ENSG00000143195_83 (sequence is synthesized)
tgctaactttcactcacagttttttgtttctttatgggttttatagttttttattttaagctcatgtgtggtgcaatgccatattacattgtgccagtcaagaaaaacctttcttgctcc

SEQ ID NO: 377238 - DNA, 120 bp, Artificial Sequence
  ENSG00000143195_84 (sequence is synthesized)
ttatctgccttacatttctccataatgactctatatatacacagcaaccctggggaagccaggaagagtgaatgattgagtaaggaagaagtaagtgtgctaaatgggaaaaaatgaaaa

SEQ ID NO: 377239 - DNA, 120 bp, Artificial Sequence
  ENSG00000143195_85 (sequence is synthesized)
aggcacacatacacgcattgtgcatttctttctaatgcaacctgtagactgcaaacaaaatcttaagatggggagggcaagaggctttaactttacatattctttagagtttgataatat

SEQ ID NO: 377240 - DNA, 120 bp, Artificial Sequence
  ENSG00000143195_86 (sequence is synthesized)
aagagaatggctgtcttaattatagacatagactgttttagggtttaagagtgaacagaaggctgttaattgttaagagtggccaaataaattatggatgtagatttcattcaagaggca

SEQ ID NO: 377241 - DNA, 120 bp, Artificial Sequence
  ENSG00000143195_87 (sequence is synthesized)
aggaaggccgggccctgtggctcacacctgaaatcccaacagttagggagacaaaggtgggaggatagcttgagccaggagttcaagacctacctgggcagtatagtgagatcccatcct

SEQ ID NO: 377242 - DNA, 120 bp, Artificial Sequence
  ENSG00000143195_88 (sequence is synthesized)
ccacaaaaaggtaaaaatttaaaaagacaagaaaaaaaagaagcagcaaggaaggactagactcataggatggattaaaattaggcaaaacaaataattcatttttccctatgattatct

SEQ ID NO: 377243 - DNA, 120 bp, Artificial Sequence
  ENSG00000143195_89 (sequence is synthesized)
aattctaatccaatttttatatgctttcatttcaagaaataagaagtaggctaatttcaggttctcttagaaaatcttggcagagacatcctaatcatactcatcacaccacttaggtga

SEQ ID NO: 377244 - DNA, 120 bp, Artificial Sequence
  ENSG00000143195_90 (sequence is synthesized)
aaattatattttctgctgaattggttataagcatttcctgaatacttatcaggtggcctaagatgactcaccaaaaatggcatgaggtgtagaagtagctaggaagttgcttagaggtga

SEQ ID NO: 377245 - DNA, 120 bp, Artificial Sequence
  ENSG00000143195_91 (sequence is synthesized)
gtgagttggtctgacacgccatctagtggcacacatccaagagagtgactctattgctaaccttccagtattggatggaggtgtgcctcacattacttaagggaaaagctacatatgaat

SEQ ID NO: 377246 - DNA, 120 bp, Artificial Sequence
  ENSG00000143195_92 (sequence is synthesized)
ttatatagcttattttaatgctatatatgaatttatatagatgaatttggcttttgaaaaacaaattaagtgcattaggaattttttctttaaaagtgatatgtttttcttacactttgc

SEQ ID NO: 377247 - DNA, 120 bp, Artificial Sequence
  ENSG00000143195_93 (sequence is synthesized)
aagtttagaacttgccatattatgtttttgaggcaggcttctgtggatataatgtggggaaaaccatgaggtttttgcttgggatcaagtgggatttaggtgcatgccttttgtgattta

SEQ ID NO: 377248 - DNA, 120 bp, Artificial Sequence
  ENSG00000143195_94 (sequence is synthesized)
aagctattttaaagtgtgcttttaacaccatggaattacaattgttttctgaagtcaggtcaggactctgattctgcagaattatggtgaagccagtttctctttaacaagcaaaaaccg

SEQ ID NO: 377249 - DNA, 120 bp, Artificial Sequence
  ENSG00000143195_95 (sequence is synthesized)
tgtcatcaaactgtacaaccaaaggacctaaatagtccattccctagtcttcagctgtacaaagatgaatcaatctctctgtctcttgttctctctctcactgtctctaaaaaccaagca

SEQ ID NO: 377250 - DNA, 120 bp, Artificial Sequence
  ENSG00000143195_96 (sequence is synthesized)
gaggagaaaattccagacatgttaaaacactttacttttttttaaaacaatccttgctctctggagatattttctcacattttgttacaaattttgtgtagaagcatagccacagtggat

SEQ ID NO: 377251 - DNA, 120 bp, Artificial Sequence
  ENSG00000143195_97 (sequence is synthesized)
aaattttgtgtagaagcatagccacagtggattttttctggctctttttctttctctgagacgttaatgtccagtagagcaaagctagaaggatatatatatatatatatatatataaat

SEQ ID NO: 377252 - DNA, 120 bp, Artificial Sequence
  ENSG00000143195_98 (sequence is synthesized)
atatatatatgtatgtatacacacacacatatatatgtcaatttctattaaccttgtttttggaaaaacgctttgttcaactgaatgtagttaaattataatggacattaatatacaacc

SEQ ID NO: 377253 - DNA, 120 bp, Artificial Sequence
  ENSG00000143195_99 (sequence is synthesized)
ccaccctcccagcctctttttgttgctggtatgacttaggcacctagcttttctcattccctcaggccaaggcgatagcctcttatgtttcattcctttggcagctgtattagtaaaaaa

SEQ ID NO: 377254 - DNA, 120 bp, Artificial Sequence
  ENSG00000143195_100 (sequence is synthesized)
atttttggttgcaaatgacaggaagatagctcagactagcttaagaacaagaaaaggagaaatggagctcatctattagagagatcctggagtagctcacaggctggaagagctgtagga

SEQ ID NO: 377255 - DNA, 120 bp, Artificial Sequence
  ENSG00000143195_101 (sequence is synthesized)
actgagaacaaacctgggtctcaatgtagtaagatttaagattccctgtccatcatccacacctacttgtgtttttacatcaatacattttctcagtgaggatagacttactccaaaagg

SEQ ID NO: 377256 - DNA, 120 bp, Artificial Sequence
  ENSG00000143195_102 (sequence is synthesized)
caggaatatagccactagcagtctgagagtcacaactttccagctcatttgaccaagcaggcaaaaggctttactcatgagaacaatcctggagaaagactgcagtcaactcatattgag

SEQ ID NO: 377257 - DNA, 120 bp, Artificial Sequence
  ENSG00000143195_103 (sequence is synthesized)
tcatgtgcccatatctgagctaatcatgtggccagagatgtggcaagtctgtttatgaccaggaaggtgagactgcgatggactggatagtgggataggaagatttctccaaagagagaa

SEQ ID NO: 377258 - DNA, 120 bp, Artificial Sequence
  ENSG00000143195_104 (sequence is synthesized)
gagagttgttattaatagaagaagtgagaatagtgatgctgggcagacaaaacacatacacaacaccaacagctatctgctactgcatccgaaaagattctttatctgcagccacagagc

SEQ ID NO: 377259 - DNA, 120 bp, Artificial Sequence
  ENSG00000143195_105 (sequence is synthesized)
cctgaacaaccagcctttccggcttccttttgttgccaattccctcacacgtattattccaacccaaggcttcagggaggctgtttttaccacagttcagtgacaaatcctaccagagcc

SEQ ID NO: 377260 - DNA, 120 bp, Artificial Sequence
  ENSG00000143195_106 (sequence is synthesized)
ttccatataccagtgaatgtccttggttatacttgtctcgttctgaatttagaaatccatctctgtgtcactgccttcattaggacctttcgtctcctccctggattcttctggtaccct

SEQ ID NO: 377261 - DNA, 120 bp, Artificial Sequence
  ENSG00000143195_107 (sequence is synthesized)
catttcttgtctcctacttcctgttgtctcctaattattcaccttctactttttttgttagaggttccagacagtttcaagaaaaatacttaatgctgggcaaggtgcttctcccttcct

SEQ ID NO: 377262 - DNA, 120 bp, Artificial Sequence
  ENSG00000143195_108 (sequence is synthesized)
ctctaagttccatagaacaggggacattttgcttctctgttgctatggactgagtgttttgtgtcttccccaaatttttatgtcaaaatcctaatcctaatgtgatggtatttgggcatg

SEQ ID NO: 377263 - DNA, 120 bp, Artificial Sequence
  ENSG00000143195_109 (sequence is synthesized)
aggcctttgggaggtgattaggtcagtagggtggagctcttatgatggaattagtgtccttataagaagagacaggagagagattacttcctctctttctctgccatgtgaggatacagc

SEQ ID NO: 377264 - DNA, 120 bp, Artificial Sequence
  ENSG00000143195_110 (sequence is synthesized)
aaggtatctgtctgcaaaccaggaaaaggaccttcgccaggaactgaatgtattggtgcactgagcttggacttcccagattctagaactgtgagaaataaatttctgatatttaagcca

SEQ ID NO: 377265 - DNA, 120 bp, Artificial Sequence
  ENSG00000143195_111 (sequence is synthesized)
tgagtgtctgaagttcatcatgccacatttcccagtgtaaagaagttcagaactaaatggaatgatttaaattcttgacttaaggagaccagcagctttgataatgctgccaaattatcc

SEQ ID NO: 377266 - DNA, 120 bp, Artificial Sequence
  ENSG00000143195_112 (sequence is synthesized)
tcacagtatcagaaagaaaaaattgacctaaagacttgcgctgtaagaattaaaacagcagaagcagaagctaccctcacctccccatcacttgtctgccctgaagcaggacataagacc

SEQ ID NO: 377267 - DNA, 120 bp, Artificial Sequence
  ENSG00000143195_113 (sequence is synthesized)
ggagtatgcttatctatgaagacatgagaacacagagaagaatctgaacaaacggggcttgctaagttccctgcagtttatcggcattagattatacaattttgtcctccctttgtattt

SEQ ID NO: 377268 - DNA, 120 bp, Artificial Sequence
  ENSG00000143195_114 (sequence is synthesized)
ctctatgactgtccatgattcatcaaacctaaacataataatatacaagtctacttgtttctttgggtcttcatttccaaagcctcccatgttcataaatatattaaataaatgtatatg

SEQ ID NO: 377269 - DNA, 120 bp, Artificial Sequence
  ENSG00000143196_0 (sequence is synthesized)
gagtgacattgtttgccaaaatcccaggcagcatggacctcagtcttctctgggtacttctgcccctagtcaccatggcctggggccagtatggcgattatggatacccataccagcagt

SEQ ID NO: 377270 - DNA, 120 bp, Artificial Sequence
  ENSG00000143196_1 (sequence is synthesized)
atcatgactacagcgatgatgggtgggtgaatttgaaccggcaaggcttcagctaccagtgtccccaggggcaggtgatagtggccgtgaggagcatcttcagcaagaaggaaggttctg

SEQ ID NO: 377271 - DNA, 120 bp, Artificial Sequence
  ENSG00000143196_2 (sequence is synthesized)
acagacaatggaactacgcctgcatgcccacgccacagagcctcggggaacccacggagtgctggtgggaggagatcaacagggctggcatggaatggtaccagacgtgctccaacaatg

SEQ ID NO: 377272 - DNA, 120 bp, Artificial Sequence
  ENSG00000143196_3 (sequence is synthesized)
ggctggtggcaggattccagagccgctacttcgagtcagtgctggatcgggagtggcagttttactgttgtcgctacagcaagaggtgcccatattcctgctggctaacaacagaatatc

SEQ ID NO: 377273 - DNA, 120 bp, Artificial Sequence
  ENSG00000143196_4 (sequence is synthesized)
caggtcactatggtgaggaaatggacatgatttcctacaattatgattactatatccgaggagcaacaaccactttctctgcagtggaaagggatcgccagtggaagttcataatgtgcc

SEQ ID NO: 377274 - DNA, 120 bp, Artificial Sequence
  ENSG00000143196_5 (sequence is synthesized)
ggatgactgaatacgactgtgaatttgcaaatgtttagatttgccacataccaaatctgggtgaaaggaaaggggccggggacaggagggtgtccacatatgttaacatcagttggatct

SEQ ID NO: 377275 - DNA, 120 bp, Artificial Sequence
  ENSG00000143196_6 (sequence is synthesized)
cctatagaagtttctgctgctctctttccttctccctgagctggtaactgcaatgccaacttcctgggcctttctgactagtatcacacttctaataaaatccacaattaaaccatgttt

SEQ ID NO: 377276 - DNA, 120 bp, Artificial Sequence
  ENSG00000143196_7 (sequence is synthesized)
ctgatgatggcttccttgcacaccacatatacagtgcgcatgcttacagccgggcttctggagcaccagctgcagcctggctactgctttttactgcagaatgaactgcaagttcagcat

SEQ ID NO: 377277 - DNA, 120 bp, Artificial Sequence
  ENSG00000143196_8 (sequence is synthesized)
agtggaggggagaggcagaactggaggagaggtgcagtgaaggttctctacagctaagcctgtttgaatgatacgtaggttccccaccaaaagcaggctttctgccctgagggacatctt

SEQ ID NO: 377278 - DNA, 120 bp, Artificial Sequence
  ENSG00000143196_9 (sequence is synthesized)
cccactcccctgctccacatgagccatgcatgcttagcaatccaagtgcagagctctttgctccaggagtgaggagactgggaggtgaaatggggaaatggaagggtttggaggcagagc

SEQ ID NO: 377279 - DNA, 120 bp, Artificial Sequence
  ENSG00000143196_10 (sequence is synthesized)
tgaaaacagggttggaaggatttcctgaattagaagacaaacgttagcatacccagtaaggaaaatgagtgcaggggccaggggaacccgtgaggatcactctcaaatgagattaaaaac

SEQ ID NO: 377280 - DNA, 120 bp, Artificial Sequence
  ENSG00000143196_11 (sequence is synthesized)
aaggaagcagagaatggtcagagaatgggattcagattgggaacttgtggggatgagagtgaccaggttgaactgggaagtggaaaaaggagtttgagtcactggcacctagaagcctgc

SEQ ID NO: 377281 - DNA, 120 bp, Artificial Sequence
  ENSG00000143196_12 (sequence is synthesized)
ccacgattcctaggaaggctggcagacaccctggaaccctggggagctactggcaaactctcctggattgggcctgatttttttggtgggaaaggctgccctggggatcaactttccttc

SEQ ID NO: 377282 - DNA, 120 bp, Artificial Sequence
  ENSG00000143196_13 (sequence is synthesized)
tgtgtgtggctcaggagttcttctgcagagatggcgctatctttcctcctcctgtgatgtcctgctcccaaccatttgtactcttcattacaaaagaaataaaaatattaacgttcacta

SEQ ID NO: 377283 - DNA, 120 bp, Artificial Sequence
  ENSG00000143198_0 (sequence is synthesized)
gcagttttgttctgctccagctgttcgaaggtgatccaggacagatcttccatcctcctaacatatagttagcttccactctccaaatattccaccagcaacattgatgaatattgaaga

SEQ ID NO: 377284 - DNA, 120 bp, Artificial Sequence
  ENSG00000143198_1 (sequence is synthesized)
ctatggactgtgagacgcaagatggctgtcctctctaaggaatatggttttgtgcttctaactggtgctgccagctttataatggtggcccacctagccatcaatgtttccaaggcccgc

SEQ ID NO: 377285 - DNA, 120 bp, Artificial Sequence
  ENSG00000143198_2 (sequence is synthesized)
attttttctagctgttggaggtgtttaccacccgcgtatagcttctggcctgggcttggcctggattgttggacgagttctttatgcttatggctattacacgggagaacccagcaagcg

SEQ ID NO: 377286 - DNA, 120 bp, Artificial Sequence
  ENSG00000143198_3 (sequence is synthesized)
tagtcgaggagccctggggtccatcgccctcctgggcttggtgggcacaactgtgtgctctgctttccagcatcttggttgggttaaaagtggcttgggcagtggacccaaatgctgcca

SEQ ID NO: 377287 - DNA, 120 bp, Artificial Sequence
  ENSG00000143198_4 (sequence is synthesized)
ttaaagaattataggggtttaaaaactctcattcattttaaatgacttacctttatttccagttacattttttttctaaatataataaaaacttacctggcatcagcctcatacctaaaa

SEQ ID NO: 377288 - DNA, 120 bp, Artificial Sequence
  ENSG00000143198_5 (sequence is synthesized)
tatctgaaatcagtagcctagtcctactagatgagaaaggagccacaagtattgtgccctctcctcacccttccagcagatgcttctgtagtatgtgaggttgagaaaaagtctgattgt

SEQ ID NO: 377289 - DNA, 120 bp, Artificial Sequence
  ENSG00000143198_6 (sequence is synthesized)
ggtgatgtaggtatagtcatgccacagtgatgaaaaattaaagaaaaatcttctagctctcaggatatgcattatcacttgctacagatactccaaggccaaaggaatgcttgagcctaa

SEQ ID NO: 377290 - DNA, 71 bp, Artificial Sequence
  ENSG00000143198_7 (sequence is synthesized)
atagcaaaaccccatctctacaaaaaaatatacaacagttagccaggcatgatggcacatgtctgcgtgtc

SEQ ID NO: 377291 - DNA, 120 bp, Artificial Sequence
  ENSG00000143198_8 (sequence is synthesized)
aggatcacttgagcccagggtgtcaaggctgcagtgagttatgatcacactgctgcactccagcgtgggtgacagagcaagaccctgtctcaaataaataaaaattaagtttctattaaa

SEQ ID NO: 377292 - DNA, 120 bp, Artificial Sequence
  ENSG00000143198_9 (sequence is synthesized)
acccacaccgcgctgcgcagttttgttctgctccagctgttcgaaggtgatccagtaataaagcatcttgctccctaaggcttcacaccatgaaatagccacagtgctgggggccgtccc

SEQ ID NO: 377293 - DNA, 120 bp, Artificial Sequence
  ENSG00000143198_10 (sequence is synthesized)
acatagaacagcagctgagtcttcagtcaatctcatgctcagaggcccatttgagaaaacggcatttcccctagtcctgactttggggcagttctcttttctggcctgccctgagaccgg

SEQ ID NO: 377294 - DNA, 120 bp, Artificial Sequence
  ENSG00000143198_11 (sequence is synthesized)
ctggcccacatgtccttctcttgagctctgacacaagttccccaagatgcccagggcaagtggggggattccttctatcccacctgtctaggagaaggccaatactcatctcccaggtcc

SEQ ID NO: 377295 - DNA, 120 bp, Artificial Sequence
  ENSG00000143198_12 (sequence is synthesized)
acaagccaagccattcatagaagaatcacagatattttattttcccgctgaaactaacttaattctacctaatttgcgtggggagtagttggccaaatcatcaaattgttaactttttgc

SEQ ID NO: 377296 - DNA, 120 bp, Artificial Sequence
  ENSG00000143198_13 (sequence is synthesized)
gcacccacaccgcgctgcgcagttttgttctgctccagctgttcgaaggtgatccaggctctttaatttctccattgagcattgtgtgagctccgctgagcattgtatggagggtcagct

SEQ ID NO: 377297 - DNA, 120 bp, Artificial Sequence
  ENSG00000143198_14 (sequence is synthesized)
ctatccaggggagctttaagtgagccaagtggaccctcagcaccacctcagagtgttctaagctaccgtctggtgtttgggactcagggaagtccttttggtatgatcagactagccctt

SEQ ID NO: 377298 - DNA, 120 bp, Artificial Sequence
  ENSG00000143198_15 (sequence is synthesized)
tatgtgactatccttgtgtgttactctcattaaaatattgatttttgccatgtaaggaagattggaatagcacaggcagccgaataaggattttaatgaaacattggagaatggcttcaa

SEQ ID NO: 377299 - DNA, 120 bp, Artificial Sequence
  ENSG00000143198_16 (sequence is synthesized)
ggtgtttaccacccggacattgggaacagggagacttttccctcgaagaccatgtattctgggagaagcgctccccttctttctagtggagctacacccccagtgtagcctgcagaacca

SEQ ID NO: 377300 - DNA, 120 bp, Artificial Sequence
  ENSG00000143198_17 (sequence is synthesized)
attccccgaagttgtggcttctgctgatactttccttgagagtcacgagtttacaagctacataatagcgtcgggggcaaggacaggagatgccctggaggggaaggcgcttccggctct

SEQ ID NO: 377301 - DNA, 120 bp, Artificial Sequence
  ENSG00000143198_18 (sequence is synthesized)
tttcaagggatactgaaagggaatattggaaccaaatgaatctgaatgggaatcccaggtctgtcactgtctgttttagaccttggaaacattacttaacctcttttgaaaataaggatt

SEQ ID NO: 377302 - DNA, 120 bp, Artificial Sequence
  ENSG00000143198_19 (sequence is synthesized)
taccatcttgttggttggtttgttaggatgattagatacattccagatcagggtaactctcctaggttaaaagcagggactgaagccaggcaattaccagggatggaaattttaaagctg

SEQ ID NO: 377303 - DNA, 120 bp, Artificial Sequence
  ENSG00000143198_20 (sequence is synthesized)
acggcagaacacacaccagagctgctggctcgtggaagcctttgaagtgatgatttgatgggcaatctgagttcctcaggagctgcccaaagcctcataggctcaggagccatgctctgc

SEQ ID NO: 377304 - DNA, 120 bp, Artificial Sequence
  ENSG00000143198_21 (sequence is synthesized)
tttcagagtactcaacctgggccttcccctacctgtgtgagatgtctgctgctgcacccgcacgtgccccaggatcgaagggaggcctcagagtcctgccctcacagtgtcccccatgtc

SEQ ID NO: 377305 - DNA, 120 bp, Artificial Sequence
  ENSG00000143198_22 (sequence is synthesized)
tgaaggcaaaaaacttggaatcactgtgcatatactattttggatgctcgctttcttgctttctcactttcttgctttctctctctctctctctccctctcctccctccccactccctct

SEQ ID NO: 377306 - DNA, 120 bp, Artificial Sequence
  ENSG00000143198_23 (sequence is synthesized)
ctctccctctccatccctctccccaccatgtcctgctcctctcactccctccctccccctccctatgtaatgtatactttagcattttaccatgttaaatattttttcaataatgtgatt

SEQ ID NO: 377307 - DNA, 120 bp, Artificial Sequence
  ENSG00000143198_24 (sequence is synthesized)
tttgttggctatattattctacagcaacgactactgcagtggtgtagataaatctcataatgttgatcagaatctcccaggcacaaaagagaaaaaaagatacatgactgtatacttttc

SEQ ID NO: 377308 - DNA, 120 bp, Artificial Sequence
  ENSG00000143198_25 (sequence is synthesized)
tgtgtatagactgcatagttgagtaatttttaaattattttatatggtactgtctttgatgacttctcagaaacatcagattgattcatacctttttttggtctctatttactcatttgc

SEQ ID NO: 377309 - DNA, 120 bp, Artificial Sequence
  ENSG00000143198_26 (sequence is synthesized)
tgtaggcttgtctgggggccacaggcttagccaagaacttattttcagccatggagggagaggcaaggagctagttgtgagaagtggcagtttcaggactgtgttagcgattctgcttct

SEQ ID NO: 377310 - DNA, 120 bp, Artificial Sequence
  ENSG00000143198_27 (sequence is synthesized)
tcatggtaggaaagaggcaagaaatacagggccctgctagggagtagtttccatcttgtttgactttgtctcttcggtagaaagaccaggaatgctgggattccaatagtacacttctgc

SEQ ID NO: 377311 - DNA, 120 bp, Artificial Sequence
  ENSG00000143198_28 (sequence is synthesized)
gattttcctgttttccaagtagaaaagaggtatgtggtgttgagattagcctggacttagacataggaaggtggtctattaaacacttcctttagttttaggtgatctagaagggataat

SEQ ID NO: 377312 - DNA, 120 bp, Artificial Sequence
  ENSG00000143198_29 (sequence is synthesized)
taccaaagttgtccctggtgagtggttttaaatgtctgtttctgtttagcaacttaataattaaactcccttactagagcttcttttaagtttttatatttagtttcttcttttttttcc

SEQ ID NO: 377313 - DNA, 120 bp, Artificial Sequence
  ENSG00000143198_30 (sequence is synthesized)
cttccagtggacacttccattaagattctcacacactcaatttctgttcttctattaagggaaatcttaaaaggatgtggtatttgatgactcttaggaaggctctatttccctacagta

SEQ ID NO: 377314 - DNA, 120 bp, Artificial Sequence
  ENSG00000143198_31 (sequence is synthesized)
tctttgtaatgcatctgaaatccaccattgatgcttaacgtcaatgaaaagcacggagtttggcgcaaagctgcctctttcccttgtgcaactacagcgcagacatacattcttattcct

SEQ ID NO: 377315 - DNA, 120 bp, Artificial Sequence
  ENSG00000143198_32 (sequence is synthesized)
ggatatttaatagaaacattgactctgcttctgagaattgagacccttgtcaccataaatatttaagcagaaattgaatggtcatctatcaagggtgtgaaagaagatactttggaatat

SEQ ID NO: 377316 - DNA, 120 bp, Artificial Sequence
  ENSG00000143198_33 (sequence is synthesized)
attgtttttaaggttcattttaactttcaacactgaatgctcctcttgaccatctgatcagtatgtgctttgttgtgacagtatcctatcatgtacagcacggaccctgaaaatgggcac

SEQ ID NO: 377317 - DNA, 120 bp, Artificial Sequence
  ENSG00000143198_34 (sequence is synthesized)
atcttcaactgcattcagcgagcccaccagaacacgtgagtgtcggccctgccgggcaccaaagacatctgcagagtgggtgttttctgtctaacacctcagcccttagtgcgctgtatt

SEQ ID NO: 377318 - DNA, 120 bp, Artificial Sequence
  ENSG00000143198_35 (sequence is synthesized)
tgctgagtcatagtgatggtgacaatcatgggcacctcattaaaagtattcaaaaattatgtatgtgaacacattgactattaagcaaacttaagagtggttggaatggtgggatttcgg

SEQ ID NO: 377319 - DNA, 120 bp, Artificial Sequence
  ENSG00000143198_36 (sequence is synthesized)
gatattcttttcaaaaaatgtcttcatggttgcattacctactacagttttgcagcatgacccatctaaaccgatgttgactctcccaggcctagggagtgaagaggttttgaatgctgt

SEQ ID NO: 377320 - DNA, 120 bp, Artificial Sequence
  ENSG00000143198_37 (sequence is synthesized)
aaggaaacccactctgactcaccaggaccttccacttccatttgttagatgtgaggtccttttactcagcatgttccaagtgacctctaatcccatgcagagcaaaggagggtggatgat

SEQ ID NO: 377321 - DNA, 120 bp, Artificial Sequence
  ENSG00000143198_38 (sequence is synthesized)
agtgaccaggtcttctccctgcggtgaatgtttatttttacccccaagcttctaacttggcaaggaagatgtaaagattcatagtgctggctgggtgaggtgggctcacacctgtaatcc

SEQ ID NO: 377322 - DNA, 66 bp, Artificial Sequence
  ENSG00000143198_39 (sequence is synthesized)
aagcttggtcaacatggcaaaaccccatctctacaaaacttagccaggcatggtggcacgcacctg

SEQ ID NO: 377323 - DNA, 120 bp, Artificial Sequence
  ENSG00000143198_40 (sequence is synthesized)
atgtggatgatacagtgtactacgatgttacaatggcacagtggctatgatgtcactaagcaataggaatgtttcagctccattacagtcttatggggccattgttaaatatgcagtcca

SEQ ID NO: 377324 - DNA, 120 bp, Artificial Sequence
  ENSG00000143198_41 (sequence is synthesized)
tcactgaaacgcatggctgcatgtggtagaaggtttcaattcataaatattaatttatactgctggtttatgactaacccaggaaactgcataatgattaacaaatgctacgatataacc

SEQ ID NO: 377325 - DNA, 120 bp, Artificial Sequence
  ENSG00000143198_42 (sequence is synthesized)
aagtgaattgcaaagtcatctacacctgtattaaagttcagctcagaaaggactgtttggactgtgtgtatctagcactacgtagaagagaaagtcaagggcaaagttcccactctcaag

SEQ ID NO: 377326 - DNA, 120 bp, Artificial Sequence
  ENSG00000143198_43 (sequence is synthesized)
aactttatcttgttgggttcatgaaagggtttctggtgacacagagtaggtatataatcagcaaaatgtggtctgcggttcaaatgagtgctcatgccagagattggttgggtgccagct

SEQ ID NO: 377327 - DNA, 120 bp, Artificial Sequence
  ENSG00000143198_44 (sequence is synthesized)
atcagttcttccaccctgtccctggaagctatctgctacctctggggctggcacaacccagggtgtggctgcgactgcctagggtgtggccactgtgaactgagctgcatccccttcctg

SEQ ID NO: 377328 - DNA, 120 bp, Artificial Sequence
  ENSG00000143198_45 (sequence is synthesized)
gtgcacacccgcacacacaaaagtcactctctaaggagtgggaatatctatctcttcgccttggaatcttcagaaaataatgatgtagcaaatgatagtttttttgaatgttgatttaat

SEQ ID NO: 377329 - DNA, 120 bp, Artificial Sequence
  ENSG00000143198_46 (sequence is synthesized)
taagctgattctttctttgaaagagaagatttaatgatttttcactccctattgcatttatgttttccacaactacgacaagagttttctctgtgttctgaattcttctttcttaagatt

SEQ ID NO: 377330 - DNA, 120 bp, Artificial Sequence
  ENSG00000143198_47 (sequence is synthesized)
tctctttctggattagtcataaaccagtctttcttaaatacattcagtttcttccctggtttcaatagatattgagggaagaaacggaaacctgaattggttagatgcatactttatacc

SEQ ID NO: 377331 - DNA, 120 bp, Artificial Sequence
  ENSG00000143198_48 (sequence is synthesized)
agacactgtgccagatgatagagattatttcaggtgtgtattcaggggacggggtgcgtggtggtggtcattctgaaagacacctgcagttgcagctcaaatcatttattccgtaagtat

SEQ ID NO: 377332 - DNA, 120 bp, Artificial Sequence
  ENSG00000143198_49 (sequence is synthesized)
ctatgagcgtgcacactgtgcttgacatggaagatgccagacaaacgtggtcctgctctgttttaagtgaaggttgttatggtgtataaagcaggacacctcacttggtaggagtgcaag

SEQ ID NO: 377333 - DNA, 120 bp, Artificial Sequence
  ENSG00000143198_50 (sequence is synthesized)
gctcctgcacctatgcagacgtgtccatggctcgtgcgggggaccctcagggagaacagtcacgctgctgccccaggcacttgcactgtccctatgactgagtatgcatcctctgcaaac

SEQ ID NO: 377334 - DNA, 120 bp, Artificial Sequence
  ENSG00000143198_51 (sequence is synthesized)
cactgctgtagcatcagactctgggtacccttactgtgaattcactgcctttccaaggtcctaactgttgctggctctgcttgtcatcatccagattcataacgccatacataccttaac

SEQ ID NO: 377335 - DNA, 120 bp, Artificial Sequence
  ENSG00000143198_52 (sequence is synthesized)
aaagtgtgaggagagtaactttcactagggtgcaaatgcccatcaagtttaacctcacagattgcatttatactttaaaagaggagctcagtagtaaatattaatttgtaattatagatt

SEQ ID NO: 377336 - DNA, 120 bp, Artificial Sequence
  ENSG00000143198_53 (sequence is synthesized)
ctaactgtggattgtagagcagttgctttgctgtgacaggcatctatgcaagaggcacttctcttatcttgccatctacctaccctagcctcttaaaattaagaaaaatagaagtcagtg

SEQ ID NO: 377337 - DNA, 120 bp, Artificial Sequence
  ENSG00000143198_54 (sequence is synthesized)
actaagccaccaaatttgaatgtgttacctgggctagctggagtgttttgggggagaattctaaaacctgctctggtcttagctctgccctcatttactgagcctctatttccttttcta

SEQ ID NO: 377338 - DNA, 120 bp, Artificial Sequence
  ENSG00000143198_55 (sequence is synthesized)
taaagtggagctaataggagttttgtgaagagtaaaagtgagctgaaaagtgctgggctgacacaaggtagccctgcacatagccagggagcccagcatcctgtccaaagattagagtct

SEQ ID NO: 377339 - DNA, 120 bp, Artificial Sequence
  ENSG00000143198_56 (sequence is synthesized)
gaaagctcactctactgatttgcaaactttaacctaaagcaaatatgcttaattttattgtccttacatttattgcttctgagagacacctttttttttttttaaggcaaggtcttgctc

SEQ ID NO: 377340 - DNA, 120 bp, Artificial Sequence
  ENSG00000143198_57 (sequence is synthesized)
gagagacacctttttttttttttaaggcaaggtcttgctctgttgccccatgctgcagtgaggtggtgcaatcatagctcactacagcctcagcctcctgggctcaggtgatcctcccac

SEQ ID NO: 377341 - DNA, 88 bp, Artificial Sequence
  ENSG00000143198_58 (sequence is synthesized)
ttcagcctcctgagtagacatgagagtctccctgtgtggcccaggctgcctggcctcaagagttcaagaatagcctggccaacatggc

SEQ ID NO: 377342 - DNA, 83 bp, Artificial Sequence
  ENSG00000143198_59 (sequence is synthesized)
gacagtcgatgagctaaaagaaaaaaatattgccaaaaaaaaaaaaaacccacgttttaagaaagtttacaaatttgtgtttg

SEQ ID NO: 377343 - DNA, 120 bp, Artificial Sequence
  ENSG00000143198_60 (sequence is synthesized)
aaaaacccacgttttaagaaagtttacaaatttgtgtttggctgcattcaaagctgtcctgggctgcatatggactgtgggctgcggattggacaagcttgctttagagggactatcaga

SEQ ID NO: 377344 - DNA, 120 bp, Artificial Sequence
  ENSG00000143198_61 (sequence is synthesized)
aacttatcttctcccaggcagctcctactgcttaaggtgcataggatccccttggacacagggtaacgctattggctttgtccagtatcacatatgtgtcctctgtgcaaagaaatacca

SEQ ID NO: 377345 - DNA, 120 bp, Artificial Sequence
  ENSG00000143199_0 (sequence is synthesized)
agacaaaactgtcattttatgggtcagctatagacagacatggcgcttcagctgtcttcagaataatgtcacccggcctcctctcctgtcttctgcagtcttaaaagacctagtccctaa

SEQ ID NO: 377346 - DNA, 120 bp, Artificial Sequence
  ENSG00000143199_1 (sequence is synthesized)
ctgaggtctggcttttcctcagccctggatgaagtggagaagacctatttggagactgcttcctgtcaccataaaatcctgaacatttgtcttgaacatgaacactccaaaagaagaatt

SEQ ID NO: 377347 - DNA, 120 bp, Artificial Sequence
  ENSG00000143199_2 (sequence is synthesized)
ccaggactggcccatagtcagaatagcagctcatttaccagacctcattgtctatggacatttctccccagagcgaccctttatggattattttgacggagtcctgatgtttgttgatat

SEQ ID NO: 377348 - DNA, 120 bp, Artificial Sequence
  ENSG00000143199_3 (sequence is synthesized)
ttcaggttttactgcaatgactgagaagttcagcagtgccatgtacatggacagaggggctgagcagttggtggagatcctcaactaccacataagtgcaatagtggagaaagtgttgat

SEQ ID NO: 377349 - DNA, 120 bp, Artificial Sequence
  ENSG00000143199_4 (sequence is synthesized)
ttttggaggagacatcctgaaatttgcaggtgatgcactgctagccctgtggagggtggagcgaaagcagctgaaaaacattatcacagtggtaattaaatgtagcctggagatccatgg

SEQ ID NO: 377350 - DNA, 120 bp, Artificial Sequence
  ENSG00000143199_5 (sequence is synthesized)
attgtttgagacccaggagtgggaagaaggcctagacatccgagtcaagataggactggctgctggccacatcagcatgttggtctttggagatgaaacacacagccactttctggtgat

SEQ ID NO: 377351 - DNA, 120 bp, Artificial Sequence
  ENSG00000143199_6 (sequence is synthesized)
tggtcaggcagtggacgatgtgcgccttgcccagaacatggctcagatgaatgatgttattctgtcaccaaactgctggcagctctgtgaccggagcatgattgaaattgagagtgttcc

SEQ ID NO: 377352 - DNA, 120 bp, Artificial Sequence
  ENSG00000143199_7 (sequence is synthesized)
agatcagagagcagttaaggttaacttcttaaaaccaccccccaattttaattttgatgaatttttcacaaagtgtacgaccttcatgcattattatccttctggtgagcacaaaaacct

SEQ ID NO: 377353 - DNA, 120 bp, Artificial Sequence
  ENSG00000143199_8 (sequence is synthesized)
cctgaggcttgcatgcacgctgaagcctgatcctgaactggagatgtccctacaaaagtatgtgatggaaagcattttgaagcagattgataacaaacagcttcagggctatttatctga

SEQ ID NO: 377354 - DNA, 120 bp, Artificial Sequence
  ENSG00000143199_9 (sequence is synthesized)
gcttcgcccagtgacgattgtgtttgtgaacctgatgtttgaagaccaagacaaagcagaagagataggcccagccatccaggatgcctatatgcacatcacttctgtcctgaagatctt

SEQ ID NO: 377355 - DNA, 120 bp, Artificial Sequence
  ENSG00000143199_10 (sequence is synthesized)
ccaaggccaaatcaataaagtcttcatgtttgacaagggctgctctttcctctgtgtctttggcttccctggggaaaaggtacctgacgagctcactcatgctctggaatgtgctatgga

SEQ ID NO: 377356 - DNA, 120 bp, Artificial Sequence
  ENSG00000143199_11 (sequence is synthesized)
tatatttgacttctgctctcaagtccacaaaatccaaactgtatccatcggtgttgccagtgggattgtcttctgtgggatcgttggacacactgtgagacacgagtacacagtcattgg

SEQ ID NO: 377357 - DNA, 120 bp, Artificial Sequence
  ENSG00000143199_12 (sequence is synthesized)
tcaaaaagtcaacttagctgccaggatgatgatgtactacccaggaattgtgacctgcgactctgtcacctacaatgggagcaacctaccagcgtacttttttaaagagcttccaaagaa

SEQ ID NO: 377358 - DNA, 120 bp, Artificial Sequence
  ENSG00000143199_13 (sequence is synthesized)
agttatgaaaggtgttgcagattctggaccattgtatcagtattggggccgtactgagaaagtcatgtttggtatggcgtgcctcatctgcaacagaaaggaggattaccctttgctggg

SEQ ID NO: 377359 - DNA, 120 bp, Artificial Sequence
  ENSG00000143199_14 (sequence is synthesized)
acgtaataaagagatcaactacttcatgtatactatgaagaaatttttgatatctaacagcagccaagtcttaatgtatgagggattaccaggatatggaaaaagccagatacttatgaa

SEQ ID NO: 377360 - DNA, 120 bp, Artificial Sequence
  ENSG00000143199_15 (sequence is synthesized)
aattgagtacctggcccaaggtaagaatcacaggattattgccatttcattgaataagatcagcttccatcaaactttctataccatccagatgttcatggccaatgtcctaggcctaga

SEQ ID NO: 377361 - DNA, 120 bp, Artificial Sequence
  ENSG00000143199_16 (sequence is synthesized)
cacttgtaaacattataaagaacgacagaccaaccttcgaaataaagtcatgacactgttggatgaaaagttctactgtcttcttaatgacattttccatgttcagttccctatttctcg

SEQ ID NO: 377362 - DNA, 120 bp, Artificial Sequence
  ENSG00000143199_17 (sequence is synthesized)
ggagatttccaggatgagcaccttgaaaaagcaaaaacaattggaaatattgtttatgaagatcttgaagctgatagtgaaagaggaaaggattatttttatcattgatgaggcccagtt

SEQ ID NO: 377363 - DNA, 120 bp, Artificial Sequence
  ENSG00000143199_18 (sequence is synthesized)
tgtggattcgacctcctggagatttatggagaagcttatccggactcttcctatcttcatcattatgtccctgtgtcccttcgttaacattccctgtgcagctgccagggccgtaataaa

SEQ ID NO: 377364 - DNA, 120 bp, Artificial Sequence
  ENSG00000143199_19 (sequence is synthesized)
gaacaggaacaccacctacattgtcattggtgcagtacagcctaacgacatctccaacaagatctgtcttgacctcaatgtgagctgcatctccaaagaactggactcgtacctggggga

SEQ ID NO: 377365 - DNA, 120 bp, Artificial Sequence
  ENSG00000143199_20 (sequence is synthesized)
gggaagctgtgggattccattttactgtgaagaattgcttaaaaacctggaacatcatgaggtactcgttttccaacaaacggagtctgaggaaaagacaaataggacctggaataacct

SEQ ID NO: 377366 - DNA, 120 bp, Artificial Sequence
  ENSG00000143199_21 (sequence is synthesized)
gttcaagtattccattaagctaacagagaagttaaacatggttactctccatagtgataaggaaagtgaagaagtctgtcacctcacaagtggtgtcagactgaaaaacctgtcacctcc

SEQ ID NO: 377367 - DNA, 120 bp, Artificial Sequence
  ENSG00000143199_22 (sequence is synthesized)
tggtgagatgtgctgccatcattggcctgaccttcaccactgagttgttgtttgagattctcccctgttggaatatgaagatgatgatcaagaccctggcaaccctagtggaatctaaca

SEQ ID NO: 377368 - DNA, 120 bp, Artificial Sequence
  ENSG00000143199_23 (sequence is synthesized)
ttttttattgtttccggaatggcaaggagcttcaaaaggccctgaaacagaatgatccctcatttgaggtgcactatcgttccttgtctctgaagcccagtgaagggatggatcacggtg

SEQ ID NO: 377369 - DNA, 120 bp, Artificial Sequence
  ENSG00000143199_24 (sequence is synthesized)
aagaggaacagcttcgtgaactggagaatgaggtgatcgagtgccacaggattcgattctgtaaccctatgatgcagaaaacagcctacgagctgtggctcaaggaccagagaaaagcca

SEQ ID NO: 377370 - DNA, 120 bp, Artificial Sequence
  ENSG00000143199_25 (sequence is synthesized)
tgcacttgaaatgtgcccgctttttagaagaagatgcccacagatgtgaccactgccgaggcagggacttcattccctatcatcacttcacagtgaatattcggctcaacgctttagaca

SEQ ID NO: 377371 - DNA, 120 bp, Artificial Sequence
  ENSG00000143199_26 (sequence is synthesized)
tggatgccattaaaaagatggctatgtctcatggatttaaaactgaagaaaagcttatcttgtccaactcagagattcctgagacatctgcattttttcctgaaaatcgcagtcctgaag

SEQ ID NO: 377372 - DNA, 120 bp, Artificial Sequence
  ENSG00000143199_27 (sequence is synthesized)
aaataagagaaaagatcttgaatttctttgaccacgttttaacaaaaatgaagacatctgacgaagacattatccctctggaatcttgccagtgtgaagaaatcctagagattgtcatct

SEQ ID NO: 377373 - DNA, 120 bp, Artificial Sequence
  ENSG00000143199_28 (sequence is synthesized)
tgcctctggcccaccattttctggctttgggagaaaatgacaaagccttatattacttcttagaaattgcatctgcttatctcatcttttgtgataactacatggcatacatgtatttga

SEQ ID NO: 377374 - DNA, 120 bp, Artificial Sequence
  ENSG00000143199_29 (sequence is synthesized)
atgaaggacagaagttgctaaaaactctcaagaaggacaaatcttggagccagacatttgagtctgccaccttttacagcctcaaaggtgaggtctgtttcaatatgggccagatagtgc

SEQ ID NO: 377375 - DNA, 120 bp, Artificial Sequence
  ENSG00000143199_30 (sequence is synthesized)
ttgccaagaaaatgctgaggaaggcactgaagctcctcaaccgaatctttccttacaacttaatctccttgtttctccatatccatgtcgagaaaaacagacactttcattatgtgaatc

SEQ ID NO: 377376 - DNA, 120 bp, Artificial Sequence
  ENSG00000143199_31 (sequence is synthesized)
ggcaggcccaagagagcccacctccagggaagaagaggctggcacaactttaccggcaaactgtctgcctttccttgctgtggcgcatctatagctacagttatctttttcactgcaagt

SEQ ID NO: 377377 - DNA, 120 bp, Artificial Sequence
  ENSG00000143199_32 (sequence is synthesized)
attatgcccacctggcagttatgatgcaaatgaatactgcactggaaactcaaaattgtttccagatcattaaggcttacctagactattcgctataccaccacctggctggctacaaag

SEQ ID NO: 377378 - DNA, 120 bp, Artificial Sequence
  ENSG00000143199_33 (sequence is synthesized)
gtgtgtggttcaaatatgaagtcatggccatggagcacatcttcaacctccccctgaaaggcgagggcattgaaatcgtggcatacgtggctgagacactggtcttcaacaagctcataa

SEQ ID NO: 377379 - DNA, 120 bp, Artificial Sequence
  ENSG00000143199_34 (sequence is synthesized)
tgggacacctggatttggccattgagttaggctcccgagcccttcagatgtgggcactgctccagaatcccaaccgacattatcagtccctctgcagacttagcagatgtctccttctga

SEQ ID NO: 377380 - DNA, 120 bp, Artificial Sequence
  ENSG00000143199_35 (sequence is synthesized)
acagcagatacccgcaattgatccaggtgctggggcggctgtgggagctttctgtaacacaggaacacatcttcagcaaggcatttttctattttgtctgcttggacatcctgctttatt

SEQ ID NO: 377381 - DNA, 120 bp, Artificial Sequence
  ENSG00000143199_36 (sequence is synthesized)
ctggttttgtttatagaacatttgaagaatgtttggaattcatacaccaatacgaaaacaacagaatcctcaagttccacagtggactcctcctgggactttattcctctgtagctatct

SEQ ID NO: 377382 - DNA, 120 bp, Artificial Sequence
  ENSG00000143199_37 (sequence is synthesized)
ggtatgccagacttcaggaatgggacaacttttacaaattttccaatagagctaaaaatcttttgccaagaagaaccatgacacttacttactatgacggaatatctaggtacatggagg

SEQ ID NO: 377383 - DNA, 120 bp, Artificial Sequence
  ENSG00000143199_38 (sequence is synthesized)
ggcaagttcttcaccttcaaaaacaaatcaaagaacagtcagagaatgcccaagccagtggggaggagctactcaagaacttggagaatctggtggctcaaaataccactggccctgtct

SEQ ID NO: 377384 - DNA, 120 bp, Artificial Sequence
  ENSG00000143199_39 (sequence is synthesized)
tttgcccaaggctctaccacctgatggcttacgtctgtatattaatgggagatgggcagaaatgtggcctcttcctgaacacagccttgcggctctctgaaacacaggggaatatactgg

SEQ ID NO: 377385 - DNA, 120 bp, Artificial Sequence
  ENSG00000143199_40 (sequence is synthesized)
agaaatgctggctgaacatgaacaaagaatcatggtactcaacctctgagttaaaagaagaccaatggcttcagacgatcttgagtctcccatcatgggaaaaaattgtagcaggcaggg

SEQ ID NO: 377386 - DNA, 120 bp, Artificial Sequence
  ENSG00000143199_41 (sequence is synthesized)
taaacattcaggatcttcaaaaaaacaaattcctgatgagagctaataccgtggacaatcatttctaacatgtcaaagaaaaaagattttaataagcactatgtccttgtgattatctat

SEQ ID NO: 377387 - DNA, 120 bp, Artificial Sequence
  ENSG00000143199_42 (sequence is synthesized)
tattgacctttctccgtggctggcccactccaggttcctacataatctcttctgttccagacacagaaacagacatgttgatttcttctctttctggagggcctacaagggtcaggagtg

SEQ ID NO: 377388 - DNA, 120 bp, Artificial Sequence
  ENSG00000143199_43 (sequence is synthesized)
tcatggtttacttcttcctaatgttacaaaaaattgcttttaccattcatgttgttttagcttgacctgtttatttcagcccatgcaaaactgtatcatattacaaattattaatctcaa

SEQ ID NO: 377389 - DNA, 120 bp, Artificial Sequence
  ENSG00000143199_44 (sequence is synthesized)
ttaatgtggatgagcaacaggctcgcgtgggaattcacatgcagagcttgattgcagagtagggaggccattctggagcccttgggctgtcacagcagatgtgctccactgagaacacaa

SEQ ID NO: 377390 - DNA, 120 bp, Artificial Sequence
  ENSG00000143199_45 (sequence is synthesized)
gagggaggaaatagcttgtggccctggctctctctcatcctcccttactcaggactgccagtcataggcatatctttaacatgctcaagtcccattctttgctccagtatctctgcccca

SEQ ID NO: 377391 - DNA, 120 bp, Artificial Sequence
  ENSG00000143199_46 (sequence is synthesized)
acttcactgactcatcctctccagccccaagccccatacacatcccagtcaaaattgacctcaggaaatgatctccctagatgatgtttacatcttactaataaacttgccacctcttca

SEQ ID NO: 377392 - DNA, 120 bp, Artificial Sequence
  ENSG00000143199_47 (sequence is synthesized)
ctgcctcaccttattatattcttcaagtctgatcttaccttggtgtgcacacgtgctaagatttgcctaatgatgttgggaggtgaagctgaagtgatgagagttgtgcagggacttact

SEQ ID NO: 377393 - DNA, 120 bp, Artificial Sequence
  ENSG00000143199_48 (sequence is synthesized)
tcctcatccacctcccaaaatgaccctggcaaaggaagtgggggtgattcataattcatttaaaaactgaagaccaacttctcacagatgtggggatgctgttcaaggcatacatgtatt

SEQ ID NO: 377394 - DNA, 120 bp, Artificial Sequence
  ENSG00000143207_0 (sequence is synthesized)
gctcgcgcgcgcgcgcacggccggccacggcgcgccggggttggctgctacagggaccgcggtggcggcggcggcctcgacagcggtagtgccttctactccgcttttttagtttcctcc

SEQ ID NO: 377395 - DNA, 120 bp, Artificial Sequence
  ENSG00000143207_1 (sequence is synthesized)
gccccctcccgtgggacgctgttgtgtggctgccttaaaaaaaaacgcaactttattgttcctcagccccacctccggctcggcgggcgtcctcaggatgcactgaggctgaggggaggg

SEQ ID NO: 377396 - DNA, 120 bp, Artificial Sequence
  ENSG00000143207_2 (sequence is synthesized)
gaggcggcggagggtcgaggtcgcggtccctctcctccgagcgcccggctggaggggagggagtcacgatgtctggtagccgccaggccgggtcgggctccgctgggacaagccccgggt

SEQ ID NO: 377397 - DNA, 120 bp, Artificial Sequence
  ENSG00000143207_3 (sequence is synthesized)
cctcggcggcctcctcggtgacttccgcctcctcgtctttatcctcttccccgtcgccgccttccgtggcggtttcggcggcagcgctggtgtccggcggggtggcccaggccgccggct

SEQ ID NO: 377398 - DNA, 120 bp, Artificial Sequence
  ENSG00000143207_4 (sequence is synthesized)
gtgcggcctgtgttggtggcgcccgccgtatcgggtagcggcggcggggcggtgtccacgggcctgtcccggcacagctgcgcggccaggcccagcgccggcgtaggaggcagcagctcc

SEQ ID NO: 377399 - DNA, 120 bp, Artificial Sequence
  ENSG00000143207_5 (sequence is synthesized)
gcgtaggaggcagcagctccagcctaggcagcggcagcaggaagcgacctctcctcgcccccctctgcaacgggctcatcaactcctacgaggacaaaagcaacgacttcgtatgcccca

SEQ ID NO: 377400 - DNA, 120 bp, Artificial Sequence
  ENSG00000143207_6 (sequence is synthesized)
tctgctttgatatgattgaagaagcatacatgacaaaatgtggccacagcttttgctacaagtgtattcatcagagtttggaggacaataatagatgtcccaagtgtaactatgttgtgg

SEQ ID NO: 377401 - DNA, 120 bp, Artificial Sequence
  ENSG00000143207_7 (sequence is synthesized)
acaatattgaccatctgtatcctaatttcttggtgaatgaactcattcttaaacagaagcaaagatttgaggaaaagaggttcaaattggaccactcagtgagtagcaccaatggccaca

SEQ ID NO: 377402 - DNA, 120 bp, Artificial Sequence
  ENSG00000143207_8 (sequence is synthesized)
ggtggcagatatttcaagattggttgggaactgaccaagataaccttgatttggccaatgtcaatcttatgttggagttactagtgcagaagaagaaacaactggaagcagaatcacatg

SEQ ID NO: 377403 - DNA, 120 bp, Artificial Sequence
  ENSG00000143207_9 (sequence is synthesized)
cagcccaactacagattcttatggaattcctcaaggttgcaagaagaaataagagagagcaactggaacagatccagaaggagctaagtgttttggaagaggatattaagagagtggaag

SEQ ID NO: 377404 - DNA, 120 bp, Artificial Sequence
  ENSG00000143207_10 (sequence is synthesized)
aaatgagtggcttatactctcctgtcagtgaggatagcacagtgcctcaatttgaagctccttctccatcacacagtagtattattgattccacagaatacagccaacctccaggtttca

SEQ ID NO: 377405 - DNA, 120 bp, Artificial Sequence
  ENSG00000143207_11 (sequence is synthesized)
ttactgctcattttgaagacttggagcagtgttacttttctacaaggatgtctcgtatctcagatgacagtcgaactgcaagccagttggatgaatttcaggaatgcttgtccaagttta

SEQ ID NO: 377406 - DNA, 120 bp, Artificial Sequence
  ENSG00000143207_12 (sequence is synthesized)
ctcgatataattcagtacgacctttagccacattgtcatatgctagtgatctctataatggttccagtatagtctctagtattgaatttgaccgggattgtgactattttgcgattgctg

SEQ ID NO: 377407 - DNA, 120 bp, Artificial Sequence
  ENSG00000143207_13 (sequence is synthesized)
gagttacaaagaagattaaagtctatgaatatgacactgtcatccaggatgcagtggatattcattaccctgagaatgaaatgacctgcaattcgaaaatcagctgtatcagttggagta

SEQ ID NO: 377408 - DNA, 120 bp, Artificial Sequence
  ENSG00000143207_14 (sequence is synthesized)
gttaccataagaacctgttagctagcagtgattatgaaggcactgttattttatgggatggattcacaggacagaggtcaaaggtctatcaggagcatgagaagaggtgttggagtgttg

SEQ ID NO: 377409 - DNA, 120 bp, Artificial Sequence
  ENSG00000143207_15 (sequence is synthesized)
actttaatttgatggatcctaaactcttggcttcaggttctgatgatgcaaaagtgaagctgtggtctaccaatctagacaactcagtggcaagcattgaggcaaaggctaatgtgtgct

SEQ ID NO: 377410 - DNA, 120 bp, Artificial Sequence
  ENSG00000143207_16 (sequence is synthesized)
gtgttaaattcagcccctcttccagataccatttggctttcggctgtgcagatcactgtgtccactactatgatcttcgtaacactaaacagccaatcatggtattcaaaggacaccgta

SEQ ID NO: 377411 - DNA, 120 bp, Artificial Sequence
  ENSG00000143207_17 (sequence is synthesized)
aagcagtctcttatgcaaagtttgtgagtggtgaggaaattgtctctgcctcaacagacagtcagctaaaactgtggaatgtagggaaaccatactgcctacgttccttcaagggtcata

SEQ ID NO: 377412 - DNA, 120 bp, Artificial Sequence
  ENSG00000143207_18 (sequence is synthesized)
tcaatgaaaaaaactttgtaggcctggcttccaatggagattatatagcttgtggaagtgaaaataactctctctacctgtactataaaggactttctaagactttgctaacttttaagt

SEQ ID NO: 377413 - DNA, 120 bp, Artificial Sequence
  ENSG00000143207_19 (sequence is synthesized)
ttgatacagtcaaaagtgttctcgacaaagaccgaaaagaagatgatacaaatgaatttgttagtgctgtgtgctggagggcactaccagatggggagtccaatgtgctgattgctgcta

SEQ ID NO: 377414 - DNA, 120 bp, Artificial Sequence
  ENSG00000143207_20 (sequence is synthesized)
acagtcagggtacaattaaggtgctagaattggtatgaagggttaactcaagtcaaattgtacttgatcctgctgaaatacatctgcagctgacaatgagagaagaaacagaaaatgtca

SEQ ID NO: 377415 - DNA, 120 bp, Artificial Sequence
  ENSG00000143207_21 (sequence is synthesized)
tgtgatgtctctccccaaagtcatcatgggttttggatttgttttgaatatttttttctttttttcttttccctcctttatgacctttgggacattgggaatacccagccaactctccac

SEQ ID NO: 377416 - DNA, 120 bp, Artificial Sequence
  ENSG00000143207_22 (sequence is synthesized)
catcaatgtaactccatggacattgctgctcttggtggtgttatctaatttttgtgatagggaaacaaattcttttgaataaaaataaataacaaaacaataaaagtttattgagccaca

SEQ ID NO: 377417 - DNA, 120 bp, Artificial Sequence
  ENSG00000143207_23 (sequence is synthesized)
tgagtggcttatactctcctgtcagtgaggatagcacagtgcctcaatttgaagctccttctccatcacacagccttgaattcagttctgatatgcacaggatctttgtcaatggaatac

SEQ ID NO: 377418 - DNA, 120 bp, Artificial Sequence
  ENSG00000143207_24 (sequence is synthesized)
agtttgtgagtggtgaggaaattgtctctgcgtgagtattactctcctcagaggttgagcttaatacagagctctgtacttacctaccagcttgtaatgtcactgagggtgtatgtaaac

SEQ ID NO: 377419 - DNA, 120 bp, Artificial Sequence
  ENSG00000143207_25 (sequence is synthesized)
tataatattggagtatatgtactttttcttaaatagtagattttttttttaatcttgtccaattaaagtagtgtggtttctggtctgtattgtgcacttttatatgtgaattgtgggtaa

SEQ ID NO: 377420 - DNA, 120 bp, Artificial Sequence
  ENSG00000143207_26 (sequence is synthesized)
aatcctgaagatactagttttttatataccctccccccttatctcatcctcctatgtttaattgcatttgaacttcagattagattttagctattgcttctaaagaagagataaacaaca

SEQ ID NO: 377421 - DNA, 120 bp, Artificial Sequence
  ENSG00000143207_27 (sequence is synthesized)
tagttgatgcaatagaatgagaagtattttatttattaaagtcaactcatgtgttactgtgtattttatctacttgcagtatagtagtagaattatttttggttttaaatattacttggt

SEQ ID NO: 377422 - DNA, 73 bp, Artificial Sequence
  ENSG00000143207_28 (sequence is synthesized)
ggtgtccacctgcctcggcctaccaaattgcttggaatacaagcgtgagccaccacgcctggccgacagatga

SEQ ID NO: 377423 - DNA, 120 bp, Artificial Sequence
  ENSG00000143207_29 (sequence is synthesized)
ggaatacaagcgtgagccaccacgcctggccgacagatgaacgtgctaactcagtctggctccagagcctgcattcttaaccagcaaactgcattgcctctaattagtagtgatgagttt

SEQ ID NO: 377424 - DNA, 120 bp, Artificial Sequence
  ENSG00000143207_30 (sequence is synthesized)
aatttcttggtgtgcatactctgtctgctcctctctgcctcccttggttttgaatgctctctttccctctcctgatcctgaaaggctgattcagtgaatgaactcattcttaaacagaag

SEQ ID NO: 377425 - DNA, 120 bp, Artificial Sequence
  ENSG00000143217_0 (sequence is synthesized)
gccgtcgttgttggccacagcgtgggaagcagctctgggggagctcggagctcccgatcacggcttcttgggggtagctacggctgggtgtgtagaacggggccggggctggggctgggt

SEQ ID NO: 377426 - DNA, 120 bp, Artificial Sequence
  ENSG00000143217_1 (sequence is synthesized)
cccctagtggagacccaagtgcgagaggcaagaactctgcagcttcctgccttctgggtcagttccttattcaagtctgcagccggctcccagggagatctcggtggaacttcagaaacg

SEQ ID NO: 377427 - DNA, 120 bp, Artificial Sequence
  ENSG00000143217_2 (sequence is synthesized)
ctgggcagtctgcctttcaaccatgcccctgtccctgggagccgagatgtgggggcctgaggcctggctgctgctgctgctactgctggcatcatttacaggccggtgccccgcgggtga

SEQ ID NO: 377428 - DNA, 120 bp, Artificial Sequence
  ENSG00000143217_3 (sequence is synthesized)
gctggagacctcagacgtggtaactgtggtgctgggccaggacgcaaaactgccctgcttctaccgaggggactccggcgagcaagtggggcaagtggcatgggctcgggtggacgcggg

SEQ ID NO: 377429 - DNA, 120 bp, Artificial Sequence
  ENSG00000143217_4 (sequence is synthesized)
cgaaggcgcccaggaactagcgctactgcactccaaatacgggcttcatgtgagcccggcttacgagggccgcgtggagcagccgccgcccccacgcaaccccctggacggctcagtgct

SEQ ID NO: 377430 - DNA, 120 bp, Artificial Sequence
  ENSG00000143217_5 (sequence is synthesized)
cctgcgcaacgcagtgcaggcggatgagggcgagtacgagtgccgggtcagcaccttccccgccggcagcttccaggcgcggctgcggctccgagtgctggtgcctcccctgccctcact

SEQ ID NO: 377431 - DNA, 120 bp, Artificial Sequence
  ENSG00000143217_6 (sequence is synthesized)
gaatcctggtccagcactagaagagggccagggcctgaccctggcagcctcctgcacagctgagggcagcccagcccccagcgtgacctgggacacggaggtcaaaggcacaacgtccag

SEQ ID NO: 377432 - DNA, 120 bp, Artificial Sequence
  ENSG00000143217_7 (sequence is synthesized)
ccgttccttcaagcactcccgctctgctgccgtcacctcagagttccacttggtgcctagccgcagcatgaatgggcagccactgacttgtgtggtgtcccatcctggcctgctccagga

SEQ ID NO: 377433 - DNA, 120 bp, Artificial Sequence
  ENSG00000143217_8 (sequence is synthesized)
ccaaaggatcacccacatcctccacgtgtccttccttgctgaggcctctgtgaggggccttgaagaccaaaatctgtggcacattggcagagaaggagctatgctcaagtgcctgagtga

SEQ ID NO: 377434 - DNA, 120 bp, Artificial Sequence
  ENSG00000143217_9 (sequence is synthesized)
agggcagccccctccctcatacaactggacacggctggatgggcctctgcccagtggggtacgagtggatggggacactttgggctttcccccactgaccactgagcacagcggcatcta

SEQ ID NO: 377435 - DNA, 120 bp, Artificial Sequence
  ENSG00000143217_10 (sequence is synthesized)
cgtctgccatgtcagcaatgagttctcctcaagggattctcaggtcactgtggatgttcttgacccccaggaagactctgggaagcaggtggacctagtgtcagcctcggtggtggtggt

SEQ ID NO: 377436 - DNA, 120 bp, Artificial Sequence
  ENSG00000143217_11 (sequence is synthesized)
gggtgtgatcgccgcactcttgttctgccttctggtggtggtggtggtgctcatgtcccgataccatcggcgcaaggcccagcagatgacccagaaatatgaggaggagctgaccctgac

SEQ ID NO: 377437 - DNA, 120 bp, Artificial Sequence
  ENSG00000143217_12 (sequence is synthesized)
cagggagaactccatccggaggctgcattcccatcacacggaccccaggagccagccggaggagagtgtagggctgagagccgagggccaccctgatagtctcaaggacaacagtagctg

SEQ ID NO: 377438 - DNA, 120 bp, Artificial Sequence
  ENSG00000143217_13 (sequence is synthesized)
ctctgtgatgagtgaagagcccgagggccgcagttactccacgctgaccacggtgagggagatagaaacacagactgaactgctgtctccaggctctgggcgggccgaggaggaggaaga

SEQ ID NO: 377439 - DNA, 120 bp, Artificial Sequence
  ENSG00000143217_14 (sequence is synthesized)
ggggacacctggtctgacccaggcctgcctcccttccctaggcctggctccttctgttgacatgggagattttagctcatcttgggggcctccttaaacacccccatttcttgcggaaga

SEQ ID NO: 377440 - DNA, 120 bp, Artificial Sequence
  ENSG00000143217_15 (sequence is synthesized)
tgctccccatcccactgactgcttgacctttacctccaacccttctgttcatcgggagggctccaccaattgagtctctcccaccatgcatgcaggtcactgtgtgtgtgcatgtgtgcc

SEQ ID NO: 377441 - DNA, 120 bp, Artificial Sequence
  ENSG00000143217_16 (sequence is synthesized)
tgtgtgagtgttgactgactgtgtgtgtgtggaggggtgactgtccgtggaggggtgactgtgtccgtggtgtgtattatgctgtcatatcagagtcaagtgaactgtggtgtatgtgcc

SEQ ID NO: 377442 - DNA, 120 bp, Artificial Sequence
  ENSG00000143217_17 (sequence is synthesized)
acgggatttgagtggttgcgtgggcaacactgtcagggtttggcgtgtgtgtcatgtggctgtgtgtgacctctgcctgaaaaagcaggtattttctcagaccccagagcagtattaatg

SEQ ID NO: 377443 - DNA, 120 bp, Artificial Sequence
  ENSG00000143217_18 (sequence is synthesized)
atgcagaggttggaggagagaggtggagactgtggctcagacccaggtgtgcgggcatagctggagctggaatctgcctccggtgtgagggaacctgtctcctaccacttcggagccatg

SEQ ID NO: 377444 - DNA, 120 bp, Artificial Sequence
  ENSG00000143217_19 (sequence is synthesized)
ggggcaagtgtgaagcagccagtccctgggtcagccagaggcttgaactgttacagaagccctctgccctctggtggcctctgggcctgctgcatgtacatattttctgtaaatatacat

SEQ ID NO: 377445 - DNA, 120 bp, Artificial Sequence
  ENSG00000143217_20 (sequence is synthesized)
atatacatgcgccgggagcttcttgcaggaatactgctccgaatcacttttaatttttttcttttttttttcttgccctttccattagttgtattttttatttatttttatttttatttt

SEQ ID NO: 377446 - DNA, 72 bp, Artificial Sequence
  ENSG00000143217_21 (sequence is synthesized)
ttaagtgtacaccactgtgcctgctttgaatcctttacgaagagaaaaaaaaaattaaagaaagcctttaga

SEQ ID NO: 377447 - DNA, 120 bp, Artificial Sequence
  ENSG00000143217_22 (sequence is synthesized)
ctttacgaagagaaaaaaaaaattaaagaaagcctttagatttatccaatgtttactactgggattgcttaaagtgaggcccctccaacaccagggggttaattcctgtgattgtgaaag

SEQ ID NO: 377448 - DNA, 120 bp, Artificial Sequence
  ENSG00000143217_23 (sequence is synthesized)
gggctacttccaaggcatcttcatgcaggcagccccttgggagggcacctgagagctggtagagtctgaaattagggatgtgagcctcgtggttactgagtaaggtaaaattgcatccac

SEQ ID NO: 377449 - DNA, 120 bp, Artificial Sequence
  ENSG00000143217_24 (sequence is synthesized)
cattgtttgtgataccttagggaattgcttggacctggtgacaagggctcctgttcaatagtggtgttggggagagagagagcagtgattatagaccgagagagtaggagttgaggtgag

SEQ ID NO: 377450 - DNA, 120 bp, Artificial Sequence
  ENSG00000143217_25 (sequence is synthesized)
gtgaaggaggtgctgggggtgagaatgtcgcctttccccctgggttttggatcactaattcaaggctcttctggatgtttctctgggttggggctggagttcaatgaggtttatttttag

SEQ ID NO: 377451 - DNA, 120 bp, Artificial Sequence
  ENSG00000143217_26 (sequence is synthesized)
ctggcccacccagatacactcagccagaatacctagatttagtacccaaactcttcttagtctgaaatctgctggatttctggcctaagggagaggctcccatccttcgttccccagcca

SEQ ID NO: 377452 - DNA, 120 bp, Artificial Sequence
  ENSG00000143217_27 (sequence is synthesized)
gcctaggacttcgaatgtggagcctgaagatctaagatcctaacatgtacattttatgtaaatatgtgcatatttgtacataaaatgatattctgtttttaaataaacagacaaaacttg

SEQ ID NO: 377453 - DNA, 120 bp, Artificial Sequence
  ENSG00000143217_28 (sequence is synthesized)
ccgataccatcggcgcaaggcccagcagatgacccagaaatatgaggaggagctgaccctgaccagggagaactccatccggaggctgcattcccatcacacggaccccaggagccagag

SEQ ID NO: 377454 - DNA, 120 bp, Artificial Sequence
  ENSG00000143222_0 (sequence is synthesized)
ctcttgcgccctggtccaagatggcggatgaagccacgcgacgtgttgtgtctgagatcccggtgctgaagactaacgccggaccccgagatcgtgagttgtgggtgcagcgactgaagg

SEQ ID NO: 377455 - DNA, 120 bp, Artificial Sequence
  ENSG00000143222_1 (sequence is synthesized)
aggaatatcagtcccttatccggtatgtggagaacaacaagaatgctgacaacgattggttccgactggagtccaacaaggaaggaactcggtggtttggaaaatgctggtatatccatg

SEQ ID NO: 377456 - DNA, 120 bp, Artificial Sequence
  ENSG00000143222_2 (sequence is synthesized)
acctcctgaaatatgagtttgacatcgagtttgacattcctatcacatatcctactactgccccagaaattgcagttcctgagctggatggaaagacagcaaagatgtacaggggtggca

SEQ ID NO: 377457 - DNA, 120 bp, Artificial Sequence
  ENSG00000143222_3 (sequence is synthesized)
ccaaatttggactagctcatctcatggctctggggctgggtccatggctggcagtggaaatccctgatctgattcagaagggcgtcatccaacacaaagagaaatgcaaccaatgaagaa

SEQ ID NO: 377458 - DNA, 120 bp, Artificial Sequence
  ENSG00000143222_4 (sequence is synthesized)
tcaagccactgaggcagggcagagggacctttgataggctacgatactattttcctgtgcatcacacttaactcatctaactgcttccccggacaccctccacctctagttgttactaag

SEQ ID NO: 377459 - DNA, 120 bp, Artificial Sequence
  ENSG00000143222_5 (sequence is synthesized)
tagctgcagtaggcattgctggggaagaaacaaacacacaccaaacagtactgctacttagtttctaaggctgcacagggaagggaaagactgggctttggacaatctagaggtaattta

SEQ ID NO: 377460 - DNA, 120 bp, Artificial Sequence
  ENSG00000143222_6 (sequence is synthesized)
tatccgcccccaggtggagcaacatgcgattctggaggcacgggggtaactgaaagtgagtacatatagtctttctggtttctggagataacccatcaataaaagctgcttcctctggta

SEQ ID NO: 377461 - DNA, 120 bp, Artificial Sequence
  ENSG00000143222_7 (sequence is synthesized)
gccctggtccaagatggcggatgaagccacgcgacgtgttgtgtctgagatcccggtgctgaagactaacgccggaccccgagatctatgtggagaacaacaagaatgctgacaacgatt

SEQ ID NO: 377462 - DNA, 120 bp, Artificial Sequence
  ENSG00000143222_8 (sequence is synthesized)
ggttccgactggagtccaacaaggaaggaactcggtaggtagaccctcttgggaggtgtggggtgggagtcttatatgagttaggcaatttggtatcctagcgcccactaccaaagctgc

SEQ ID NO: 377463 - DNA, 120 bp, Artificial Sequence
  ENSG00000143222_9 (sequence is synthesized)
tagctgtctccactcccacagcgccagagttccccagttcccatcctatgagtctcccaggctggtggcctaagccaagatatcatttgagtactggaagaataggcaaattggactgag

SEQ ID NO: 377464 - DNA, 120 bp, Artificial Sequence
  ENSG00000143222_10 (sequence is synthesized)
gtttggtctttgttacaggtggtttggaaaatgctggtatatccatgacctcctgaaatatgagtttgacatcgagtttgacgtgagtgtgatagagtgggaaatatgaaggttagtaga

SEQ ID NO: 377465 - DNA, 78 bp, Artificial Sequence
  ENSG00000143222_11 (sequence is synthesized)
aggcggaggttgcggagttaaacatccttctacaggataactgcatctagaggcaggactatatataagcaaaggaaa

SEQ ID NO: 377466 - DNA, 120 bp, Artificial Sequence
  ENSG00000143222_12 (sequence is synthesized)
aactgcatctagaggcaggactatatataagcaaaggaaaagttcttcgaagaggaaacacgaatcgctcgttttaggaataaagatgacggcgccttgaggtaagctacaggcaacacc

SEQ ID NO: 377467 - DNA, 120 bp, Artificial Sequence
  ENSG00000143222_13 (sequence is synthesized)
atcaggaagaatagctaatggatgcttggcttgatgtctgggtgatgggatgatctatgtgtaaatcaccatggcacgtttacctatgtaacaaacctatacatcctgcatgtgtacctc

SEQ ID NO: 377468 - DNA, 120 bp, Artificial Sequence
  ENSG00000143222_14 (sequence is synthesized)
tgaacttaaaagatgtaaggaaaaaaaaaaaaaggaagaactttggaggcagagattttcccagggtctgctggcctagtggggtgccaggccctcctttgctgagcctaagcaaagtac

SEQ ID NO: 377469 - DNA, 120 bp, Artificial Sequence
  ENSG00000143222_15 (sequence is synthesized)
ttagctgaacttgttctcaattctgatcactagtagtcttcctatgcccccaagaggctgctgtgctttatggtaaactttgcatgtcaacaccttcttcatgtccctctcataggggtg

SEQ ID NO: 377470 - DNA, 120 bp, Artificial Sequence
  ENSG00000143222_16 (sequence is synthesized)
gcaaaatatgcctgacggatcatttcaaacctttgtgggccaggaatgtgcccaaatttggactagctcatctcatggctctgggggtaagttttgtgtatttggcataaaaggagaaag

SEQ ID NO: 377471 - DNA, 120 bp, Artificial Sequence
  ENSG00000143222_17 (sequence is synthesized)
atgaaggttagtagaaggggagggattagatgatgggtaacaagctatcctttcttgaagggaccaaagaaaactttaaaaatgggagagaaaagctgaggtttgaggcaagcataagtt

SEQ ID NO: 377472 - DNA, 120 bp, Artificial Sequence
  ENSG00000143224_0 (sequence is synthesized)
gccgcgagaacagagtggacggagcgtaggagagaccgaaaaggctgggggtgggagtagcggatttgaagcacttgttggcctacagaggtgtggcaagcagagcacctcagaactcag

SEQ ID NO: 377473 - DNA, 120 bp, Artificial Sequence
  ENSG00000143224_1 (sequence is synthesized)
gcgtactgcccgccgcccgagccctgcgagggccgatagcgagggtgtggcccttatctgcacccagcagagcgccggcggggtttccgcatgggccggaccgtggtcgtgctgggcgga

SEQ ID NO: 377474 - DNA, 120 bp, Artificial Sequence
  ENSG00000143224_2 (sequence is synthesized)
ggcatcagcggcttggccgccagttaccacctgagccgggccccctgcccccctaaggtggtcctagtggagagcagtgagcgtctgggaggctggattcgctccgttcgaggccctaat

SEQ ID NO: 377475 - DNA, 120 bp, Artificial Sequence
  ENSG00000143224_3 (sequence is synthesized)
ggtgctatctttgagcttggacctcggggaattaggccagcgggagccctaggggcccggaccttgctcctggtttctgagcttggcttggattcagaagtgctgcctgtccggggagac

SEQ ID NO: 377476 - DNA, 120 bp, Artificial Sequence
  ENSG00000143224_4 (sequence is synthesized)
cacccagctgcccagaacaggttcctctacgtgggcggtgccctgcatgccctacccactggcctcagggggctactccgcccttcaccccccttctccaaacctctgttttgggctggg

SEQ ID NO: 377477 - DNA, 120 bp, Artificial Sequence
  ENSG00000143224_5 (sequence is synthesized)
ctgagggagctgaccaagccccggggcaaagagcctgatgagactgtgcacagttttgcccagcgccgccttggacctgaggtggcgtctctagccatggacagtctctgccgtggagtg

SEQ ID NO: 377478 - DNA, 120 bp, Artificial Sequence
  ENSG00000143224_6 (sequence is synthesized)
tttgcaggcaacagccgtgagctcagcatcaggtcctgctttcccagtctcttccaagctgagcaaacccatcgttccatattactgggcctgctgctgggggcagggcggaccccacag

SEQ ID NO: 377479 - DNA, 120 bp, Artificial Sequence
  ENSG00000143224_7 (sequence is synthesized)
tcagcactcattcgccaggccttggctgagcgctggagccagtggtcacttcgtggaggtctagagatgttgcctcaggcccttgaaacccacctgactagtaggggggtcagtgttctc

SEQ ID NO: 377480 - DNA, 120 bp, Artificial Sequence
  ENSG00000143224_8 (sequence is synthesized)
agaggccagccggtctgtgggctcagcctccaggcagaagggcgctggaaggtatctctaagggacagcagtctggaggctgaccacgttattagtgccattccagcttcagtgctcagt

SEQ ID NO: 377481 - DNA, 120 bp, Artificial Sequence
  ENSG00000143224_9 (sequence is synthesized)
gagctgctccctgctgaggctgcccctctggctcgtgccctgagtgccatcactgcagtgtctgtagctgtggtgaatctgcagtaccaaggagcccatctgcctgtccagggatttgga

SEQ ID NO: 377482 - DNA, 120 bp, Artificial Sequence
  ENSG00000143224_10 (sequence is synthesized)
catttggtgccatcttcagaagatccaggagtcctgggaatcgtgtatgactcagttgctttccctgagcaggacgggagcccccctggcctcagagtgactgtgatgctgggaggttcc

SEQ ID NO: 377483 - DNA, 120 bp, Artificial Sequence
  ENSG00000143224_11 (sequence is synthesized)
tggttacagacactggaggctagtggctgtgtcttatctcaggagctgtttcaacagcgggcccaggaagcagctgctacacaattaggactgaaggagatgccgagccactgcttggtc

SEQ ID NO: 377484 - DNA, 120 bp, Artificial Sequence
  ENSG00000143224_12 (sequence is synthesized)
catctacacaagaactgcattccccagtatacactaggtcactggcaaaaactagagtcagctaggcaattcctgactgctcacaggttgcccctgactctggctggagcctcctatgag

SEQ ID NO: 377485 - DNA, 120 bp, Artificial Sequence
  ENSG00000143224_13 (sequence is synthesized)
ggagttgctgttaatgactgtatagagagtgggcgccaggcagcagtcagtgtcctgggcacagaacctaacagctgatccccaactctcattcatgaaaataaaaattgctggagcttg

SEQ ID NO: 377486 - DNA, 120 bp, Artificial Sequence
  ENSG00000143224_14 (sequence is synthesized)
tctaggagaggttgtggagggggcttccattggggaatagagtttaggggaggaagtatgtttggtgggtcagatcttcccttagtttctcctcttctgagggcatgtggagagcaggtt

SEQ ID NO: 377487 - DNA, 60 bp, Artificial Sequence
  ENSG00000143224_15 (sequence is synthesized)
tgcaacttccgctactccgcccttcaccccccttctccaaacctctgttttgggctgggc

SEQ ID NO: 377488 - DNA, 120 bp, Artificial Sequence
  ENSG00000143224_16 (sequence is synthesized)
gtaggaaacaggctccttctattcttcatgtgcctgggtgccaactcctcaggtgcagggaccgtgaccacctgggggctgtaagcgaacagccccggagctcggcggagagtagggtgg

SEQ ID NO: 377489 - DNA, 120 bp, Artificial Sequence
  ENSG00000143224_17 (sequence is synthesized)
ggtgacagagtgagactctgtcccccccacccccccaaaaaaatgggaaggagagacagcctcagctagagccctttccttctgacgcatgaatgtccttctctccagggatttggacat

SEQ ID NO: 377490 - DNA, 120 bp, Artificial Sequence
  ENSG00000143224_18 (sequence is synthesized)
aaaactaggtaagttgggaaaacagctgggctgaggagggccaaggacatcagacccccagctaaaacattcctttcatcctttccttccagagtcagctaggcaattcctgactgctca

SEQ ID NO: 377491 - DNA, 120 bp, Artificial Sequence
  ENSG00000143224_19 (sequence is synthesized)
ataattcccaaaactcattattgggagtgaaggccttcatttccatccgtcacagtgggaatgtcccccaacccaaaccctatcccaccctcattccctaccaaataggggctgtggaaa

SEQ ID NO: 377492 - DNA, 120 bp, Artificial Sequence
  ENSG00000143224_20 (sequence is synthesized)
gcttaactaggccagggccgataggactggagttcctcattgtttttgtgccttagaagctacttagacatgggctaccccagaatcctaggccctatttgtgaaccttcctcaaagagc

SEQ ID NO: 377493 - DNA, 120 bp, Artificial Sequence
  ENSG00000143224_21 (sequence is synthesized)
ctatgcaagtctgtggatagaagtagtacttataagtggcttagagataggggaaagaacccagcttcactgaacatttcagaacagccacactggcctgtctggtccacttcctggagt

SEQ ID NO: 377494 - DNA, 120 bp, Artificial Sequence
  ENSG00000143224_22 (sequence is synthesized)
acacagaggaatgattttttgtgaagtctacatagtcacccaatctcttcatcctgggtcagtacacagtctccccggccacatgggtgcctgggaaactgagagtgaggcaccagaagt

SEQ ID NO: 377495 - DNA, 120 bp, Artificial Sequence
  ENSG00000143224_23 (sequence is synthesized)
ctcttttcactcatcaaattctcattttctgggtctctcaaatgttttcatgctctcaggtatctctaagggacagcagtctggaggctgaccacgttattagtgccattccagcttcag

SEQ ID NO: 377496 - DNA, 120 bp, Artificial Sequence
  ENSG00000143224_24 (sequence is synthesized)
gtaatggaatagccaccttccccttccccaacccctaccagtgagaagcaaaagctataccttcctgggtcagcaggaccacaccatgcccctgaactggtcatctctatgggagtctaa

SEQ ID NO: 377497 - DNA, 120 bp, Artificial Sequence
  ENSG00000143224_25 (sequence is synthesized)
ctgcacccagcagagcgccggcggggtacggtcttaggacctcgatctccttctccctcattttctctcatccctacctattgtgggtttccgcatgggccggaccgtggtcgtgctggg

SEQ ID NO: 377498 - DNA, 120 bp, Artificial Sequence
  ENSG00000143224_26 (sequence is synthesized)
ctaccttttctacctttcccctcttctagcgggggtggggaggagggttactgctgaagagaaagggagagggagagcaggggcagagacagtcaggggtggctggaagggctcacctag

SEQ ID NO: 377499 - DNA, 120 bp, Artificial Sequence
  ENSG00000143224_27 (sequence is synthesized)
aggggcgtggtccgcgctgtggagggggttaaaacccagctctttcggagcacgcccatcctatcccagtctcttgcttttgccctacctactagcaacgtgagcccgcccggcccccgt

SEQ ID NO: 377500 - DNA, 120 bp, Artificial Sequence
  ENSG00000143224_28 (sequence is synthesized)
ccatacttccacctaggaccccgtccctgctcaggctcgtctccaggcgttacccaaaacttctcactctctcgaatgcccaaacctttatcccaggcctccgtgtcgacgcattcccag

SEQ ID NO: 377501 - DNA, 120 bp, Artificial Sequence
  ENSG00000143224_29 (sequence is synthesized)
cgcacatacctggtcttttgctgcctgtcgtcaccgccaccccaacagccgggcaggcatcgctgccgccatcttggaagcgggcgctgcgggggcggggtctcgcgtcatggggcgggg

SEQ ID NO: 377502 - DNA, 120 bp, Artificial Sequence
  ENSG00000143224_30 (sequence is synthesized)
cctcggggcggagccacccgggctgactaggcacccggtcccagacaccgcgtggccgggggcttgtgagggagcagcgcctgagcctgcccacctggaacgcgttgtaggcgaccccct

SEQ ID NO: 377503 - DNA, 120 bp, Artificial Sequence
  ENSG00000143224_31 (sequence is synthesized)
ggggagcgggtgctagggttcaactccactacgcagactgctagtgggatttcatttcctgcccctcagatttgtaaaagcagaagctcaagcccttcattttcctctgggccgagactg

SEQ ID NO: 377504 - DNA, 120 bp, Artificial Sequence
  ENSG00000143224_32 (sequence is synthesized)
atcaggaggctagtgagccggtttctggtgctccgctgacctcgttatcaccttgtggttggctgagccctctcccagtgtgtcagtggcaccccctgcagcctagtgccacttagtatc

SEQ ID NO: 377505 - DNA, 120 bp, Artificial Sequence
  ENSG00000143224_33 (sequence is synthesized)
aattgttccttacgcaggctacagcgttgcggaccgctctagcgcatttttgtattcccgttgtatcccgcaggcctggaaataaaaagcgattagttaataaaacaatgaaacattgaa

SEQ ID NO: 377506 - DNA, 120 bp, Artificial Sequence
  ENSG00000143224_34 (sequence is synthesized)
tcctggcccctggacggggacctcgctgttccaccagcccatccgtgcacacttagtttcccctaaagcagtgagtggccgggatagaactcaaaaccggcggggcttctggagcgcagg

SEQ ID NO: 377507 - DNA, 120 bp, Artificial Sequence
  ENSG00000143224_35 (sequence is synthesized)
aaggagctgtttatggagccgcctccccgtggactggccttaagtgtccctatctattctccctacgaccaaagctcctgcggccttccctctagggttgtcaccctagctggacctggt

SEQ ID NO: 377508 - DNA, 120 bp, Artificial Sequence
  ENSG00000143224_36 (sequence is synthesized)
gagcgtctgggaggctggattcgctccgttcgaggccctaatggtgctatctttgagcttggacctcggggaattaggccagcgggagccctaggggcccggaccttgctcctgggggct

SEQ ID NO: 377509 - DNA, 120 bp, Artificial Sequence
  ENSG00000143226_0 (sequence is synthesized)
gtctcttaaaacccactggacgttggcacagtgctgggatgactatggagacccaaatgtctcagaatgtatgtcccagaaacctgtggctgcttcaaccattgacagttttgctgctgc

SEQ ID NO: 377510 - DNA, 120 bp, Artificial Sequence
  ENSG00000143226_1 (sequence is synthesized)
tggcttctgcagacagtcaagctgctcccccaaaggctgtgctgaaacttgagcccccgtggatcaacgtgctccaggaggactctgtgactctgacatgccagggggctcgcagccctg

SEQ ID NO: 377511 - DNA, 120 bp, Artificial Sequence
  ENSG00000143226_2 (sequence is synthesized)
agagcgactccattcagtggttccacaatgggaatctcattcccacccacacgcagcccagctacaggttcaaggccaacaacaatgacagcggggagtacacgtgccagactggccaga

SEQ ID NO: 377512 - DNA, 120 bp, Artificial Sequence
  ENSG00000143226_3 (sequence is synthesized)
ccagcctcagcgaccctgtgcatctgactgtgctttccgaatggctggtgctccagacccctcacctggagttccaggagggagaaaccatcatgctgaggtgccacagctggaaggaca

SEQ ID NO: 377513 - DNA, 120 bp, Artificial Sequence
  ENSG00000143226_4 (sequence is synthesized)
agcctctggtcaaggtcacattcttccagaatggaaaatcccagaaattctcccatttggatcccaccttctccatcccacaagcaaaccacagtcacagtggtgattaccactgcacag

SEQ ID NO: 377514 - DNA, 120 bp, Artificial Sequence
  ENSG00000143226_5 (sequence is synthesized)
aatggggatcattgtggctgtggtcattgcgactgctgtagcagccattgttgctgctgtagtggccttgatctactgcaggaaaaagcggatttcagccaattccactgatcctgtgaa

SEQ ID NO: 377515 - DNA, 120 bp, Artificial Sequence
  ENSG00000143226_6 (sequence is synthesized)
ggctgcccaatttgagccacctggacgtcaaatgattgccatcagaaagagacaacttgaagaaaccaacaatgactatgaaacagctgacggcggctacatgactctgaaccccagggc

SEQ ID NO: 377516 - DNA, 120 bp, Artificial Sequence
  ENSG00000143226_7 (sequence is synthesized)
acctactgacgatgataaaaacatctacctgactcttcctcccaacgaccatgtcaacagtaataactaaagagtaacgttatgccatgtggtcatactctcagcttgctgagtggatga

SEQ ID NO: 377517 - DNA, 120 bp, Artificial Sequence
  ENSG00000143226_8 (sequence is synthesized)
caaaaagaggggaattgttaaaggaaaatttaaatggagactggaaaaatcctgagcaaacaaaaccacctggcccttagaaatagctttaactttgcttaaactacaaacacaagcaaa

SEQ ID NO: 377518 - DNA, 120 bp, Artificial Sequence
  ENSG00000143226_9 (sequence is synthesized)
acttcacggggtcatactacatacaagcataagcaaaacttaacttggatcatttctggtaaatgcttatgttagaaataagacaaccccagccaatcacaagcagcctactaacatata

SEQ ID NO: 377519 - DNA, 120 bp, Artificial Sequence
  ENSG00000143226_10 (sequence is synthesized)
attaggtgactagggactttctaagaagatacctacccccaaaaaacaattatgtaattgaaaaccaaccgattgcctttattttgcttccacattttcccaataaatacttgcctgtga

SEQ ID NO: 377520 - DNA, 75 bp, Artificial Sequence
  ENSG00000143226_11 (sequence is synthesized)
ctggaacactaaacttcatgaattgcgcctcagatttttcctttaacatcttttttttttttgacagagtctcaa

SEQ ID NO: 377521 - DNA, 72 bp, Artificial Sequence
  ENSG00000143226_12 (sequence is synthesized)
gtttaagcgattctcatgcctcagcctcccagtagctgggattagaggcatgtagagacagggtttcgcaat

SEQ ID NO: 377522 - DNA, 120 bp, Artificial Sequence
  ENSG00000143226_13 (sequence is synthesized)
tcggcctcccaaagtgctgggatgaccagcatcagccccaatgtccagcctctttaacatcttctttcctatgccctctctgtggatccctactgctggtttctgccttctccatgctga

SEQ ID NO: 377523 - DNA, 120 bp, Artificial Sequence
  ENSG00000143226_14 (sequence is synthesized)
tggtttctgccttctccatgctgagaacaaaatcacctattcactgcttatgcagtcggaagctccagaagaacaaagagcccaattaccagaaccacattaagtctccattgttttgcc

SEQ ID NO: 377524 - DNA, 120 bp, Artificial Sequence
  ENSG00000143226_15 (sequence is synthesized)
ttgggatttgagaagagaattagagaggtgaggatctggtatttcctggactaaattccccttggggaagacgaagggatgctgcagttccaaaagagaaggactcttccagagtcatct

SEQ ID NO: 377525 - DNA, 120 bp, Artificial Sequence
  ENSG00000143226_16 (sequence is synthesized)
acctgagtcccaaagctccctgtcctgaaagccacagacaatatggtcccaaatgactgactgcaccttctgtgcctcagccgttcttgacatcaagaatcttctgttccacatccacac

SEQ ID NO: 377526 - DNA, 120 bp, Artificial Sequence
  ENSG00000143226_17 (sequence is synthesized)
agccaatacaattagtcaaaccactgttattaacagatgtagcaacatgagaaacgcttatgttacaggttacatgagagcaatcatgtaagtctatatgacttcagaaatgttaaaata

SEQ ID NO: 377527 - DNA, 120 bp, Artificial Sequence
  ENSG00000143226_18 (sequence is synthesized)
gactaacctctaacaacaaattaaaagtgattgtttcaaggtgatgcaattattgatgacctattttatttttctataatgatcatatattacctttgtaataaaacattataaccaaaa

SEQ ID NO: 377528 - DNA, 120 bp, Artificial Sequence
  ENSG00000143226_19 (sequence is synthesized)
acctactgacgatgataaaaacatctacctgactcttcctcccaacgaccatgtcaacatgcagttaccagaaggatgtgaccttctcagagaagtcattccaggcagattagaaacatg

SEQ ID NO: 377529 - DNA, 120 bp, Artificial Sequence
  ENSG00000143226_20 (sequence is synthesized)
tgagatgggtcctggagaaggaagagcccaagctcacctccccagcatttcacatacgcagctaaatttgaagccgtgttctcctgctcgacgttgatccactctcttctcttttacagc

SEQ ID NO: 377530 - DNA, 120 bp, Artificial Sequence
  ENSG00000143226_21 (sequence is synthesized)
caggcttgcaacttgtgtcctgagctctctgagtttatttgagtaattttatttctcatttgattcagcagttaatcttggtatttgacaagttcatctgtttccaacaggaactatact

SEQ ID NO: 377531 - DNA, 120 bp, Artificial Sequence
  ENSG00000143226_22 (sequence is synthesized)
aggtccagtatagtgtactagtttccagacaaggtctgatttctggattgggatccagaggtcaaattgggtacttgacagattgaactaggtgttcaacagaaaccgaactgggggtcc

SEQ ID NO: 377532 - DNA, 120 bp, Artificial Sequence
  ENSG00000143226_23 (sequence is synthesized)
tggcacagtgctgggatgactatggagacccaaatgtctcagaatgtatgtcccagaaacctgtggctgcttcaaccattgacagttttgctgctgctgggtgagtgagggtcattctga

SEQ ID NO: 377533 - DNA, 120 bp, Artificial Sequence
  ENSG00000143226_24 (sequence is synthesized)
aatggggcaatttcagacactcctactgcctggactccaggtaccagtgtggtaaggagcaggcctgggccctggaagcaggggatagattgaaagaggagagaggaccctgaattctta

SEQ ID NO: 377534 - DNA, 120 bp, Artificial Sequence
  ENSG00000143226_25 (sequence is synthesized)
gaggggatggacaagggctgaggtcacatgggcctacatggaggtctgagaaagcccatagcagcaaaattgggcactggagcaaagaggagtggggtggaagcctggctaagtattgac

SEQ ID NO: 377535 - DNA, 120 bp, Artificial Sequence
  ENSG00000143226_26 (sequence is synthesized)
caacaagtaggggccagagcttggagccctcacgtcccaggtaataggtagtcaggctgttgtttcactttgaaatgtaggccccagactaaagatggcagtgaagcagagctccctcat

SEQ ID NO: 377536 - DNA, 120 bp, Artificial Sequence
  ENSG00000143226_27 (sequence is synthesized)
ctgtgctttccggtcagtggaggaaggccccagggtggacctgggagggccaggacggatgaaatctgtttacagacagaggtttgcaggaaagagtgggcgtggactgcttactgggaa

SEQ ID NO: 377537 - DNA, 120 bp, Artificial Sequence
  ENSG00000143226_28 (sequence is synthesized)
agtgctgggatgactatggagacccaaatgtctcagaatgtatgtcccagaaacctgtggctgcttcaaccattgacagttttgctgctgctggcttctgcagacagtcaagctggtgag

SEQ ID NO: 377538 - DNA, 120 bp, Artificial Sequence
  ENSG00000143226_29 (sequence is synthesized)
tatgccctttgcttccttgtattgacagtgttgtatcctcataatatgatgctgtgtttgctggggcggcgggggggtatgtctattccactgaaaatcaagcttgggttcagcatgggc

SEQ ID NO: 377539 - DNA, 120 bp, Artificial Sequence
  ENSG00000143226_30 (sequence is synthesized)
tacagatcttgaactacatctacaataggactcttgggtgcctgacctcccttgggagctcctttggcatccacagtcccttcagggttatttattccacacccctttccactctgcccc

SEQ ID NO: 377540 - DNA, 120 bp, Artificial Sequence
  ENSG00000143226_31 (sequence is synthesized)
tcagcagctcccccaaaggctgtgctgaaacttgagcccccgtggatcaacgtgctccaggaggactctgtgactctgacatgccagggggctcgcagccctgagagcgactccattcag

SEQ ID NO: 377541 - DNA, 120 bp, Artificial Sequence
  ENSG00000143226_32 (sequence is synthesized)
aaaaacatctacctgactcttcctcccaacgaccatgtcaacaggctgtattgattggggtgtagactgaactatccggggtctgtttcttttcggtgatgaaagtcttgagaagcaaat

SEQ ID NO: 377542 - DNA, 120 bp, Artificial Sequence
  ENSG00000143226_33 (sequence is synthesized)
aaagcattcactttgttttggaacacaagttgtcagaaaggcaaacttcaggtgaattgtcagtggagactgctgacttcctgcactgctattttcccagtgcagttaccagaaggatgt

SEQ ID NO: 377543 - DNA, 120 bp, Artificial Sequence
  ENSG00000143226_34 (sequence is synthesized)
gagaagtcattccaggcagattagaaacatgacccacagtctccttgatggtttgtacggctgatcctctcaagcagcaaactctaccagctgtcactggtgctctcggagagacgatta

SEQ ID NO: 377544 - DNA, 120 bp, Artificial Sequence
  ENSG00000143226_35 (sequence is synthesized)
accaaggaacccagcccgggaacagtactgacctctacttctggactcctgcctccctcttaaaaagtcccttgaacttcctagtgggttctaacctgtcaaaggagaaaatagccatct

SEQ ID NO: 377545 - DNA, 120 bp, Artificial Sequence
  ENSG00000143226_36 (sequence is synthesized)
atggagtaagggtttttagtttctctttttacaaatggaagtttcctctgaatcaggcaagtaacgttaaatagaagccaacttttaagtttctctaacacactgctaaattgtaacacc

SEQ ID NO: 377546 - DNA, 120 bp, Artificial Sequence
  ENSG00000143226_37 (sequence is synthesized)
aatccgaacgccagcagatctgaatggaatgttctggattgaagaaagtgggaaatggcctcaattcacaaagtcacaacctgataaaaaccagtgtgactttactgcccagtgaaccca

SEQ ID NO: 377547 - DNA, 120 bp, Artificial Sequence
  ENSG00000143226_38 (sequence is synthesized)
tctcgtcctccagcctttaggaggtaggttggactggagcctgcagtagtttactctccacctgagtcctggtctccagctgggaacccacttaggccataaagaaaaacgcacactgtg

SEQ ID NO: 377548 - DNA, 120 bp, Artificial Sequence
  ENSG00000143226_39 (sequence is synthesized)
cctctccaccgggcctctggagacgaggctcctcggggatacaaacagtggggagaacatgagggacatcccgaccgtactctgcgtcctcctttcccaggtgttgcgttctctcttggg

SEQ ID NO: 377549 - DNA, 120 bp, Artificial Sequence
  ENSG00000143226_40 (sequence is synthesized)
ctgagtggcgaggtctctcccgagtcccagggccacagtgcaatgtcacatctcctttgtggaaagtgactggtaaaggagagagaacaaaactggaggaatgtaaagtcttcagccacc

SEQ ID NO: 377550 - DNA, 120 bp, Artificial Sequence
  ENSG00000143226_41 (sequence is synthesized)
aaagtcttcagccacctggtttaatttattcaagagtgattaatcctagatgagaaaaagaattgaaatggatcggaaaaaaatgaaagtgcattggccgggaatcgaacccgggcctcc

SEQ ID NO: 377551 - DNA, 120 bp, Artificial Sequence
  ENSG00000143226_42 (sequence is synthesized)
attctaccactgaaccaccaatgctactgtcagctaaagacctgcagtattgtctcttaaagctcactatctctggccattcactaaggaaccaggcaccgtcttaaatcgcggtttgga

SEQ ID NO: 377552 - DNA, 120 bp, Artificial Sequence
  ENSG00000143226_43 (sequence is synthesized)
cctccctgcctctctttttctctctcatgttactttctctttctgtcttcctttttaatgccatggagtactatattcttcaaagttccaacaaagatgcactacatttggacaatgtgg

SEQ ID NO: 377553 - DNA, 120 bp, Artificial Sequence
  ENSG00000143228_0 (sequence is synthesized)
agtaggaggcggcaagtttgaaaagtgatgacggttgacgtttgctgatttttgactttgcttgtagctgctccccgaactcgccgtcttcctgtcggcggccggcactgtaggtgagcg

SEQ ID NO: 377554 - DNA, 120 bp, Artificial Sequence
  ENSG00000143228_1 (sequence is synthesized)
cgagaggacggaggaaggaagcctgcagacagacgccttctccatcccaaggcgcgggcaggtgccgggacgctgggcctggcggtgttttcgtcgtgctcagcggtgggaggaggcgga

SEQ ID NO: 377555 - DNA, 120 bp, Artificial Sequence
  ENSG00000143228_2 (sequence is synthesized)
agaaaccagagcctgggagattaacaggaaacttccaagatggaaactttgtctttccccagatataatgtagctgagattgtgattcatattcgcaataagatcttaacaggagctgat

SEQ ID NO: 377556 - DNA, 120 bp, Artificial Sequence
  ENSG00000143228_3 (sequence is synthesized)
ggtaaaaacctcaccaagaatgatctttatccaaatccaaagcctgaagtcttgcacatgatctacatgagagccttacaaatagtatatggaattcgactggaacatttttacatgatg

SEQ ID NO: 377557 - DNA, 120 bp, Artificial Sequence
  ENSG00000143228_4 (sequence is synthesized)
ccagtgaactctgaagtcatgtatccacatttaatggaaggcttcttaccattcagcaatttagttactcatctggactcatttttgcctatctgccgggtgaatgactttgagactgct

SEQ ID NO: 377558 - DNA, 120 bp, Artificial Sequence
  ENSG00000143228_5 (sequence is synthesized)
gatattctatgtccaaaagcaaaacggacaagtcggtttttaagtggcattatcaactttattcacttcagagaagcatgccgtgaaacgtatatggaatttctttggcaatataaatcc

SEQ ID NO: 377559 - DNA, 120 bp, Artificial Sequence
  ENSG00000143228_6 (sequence is synthesized)
tctgcggacaaaatgcaacagttaaacgccgcacaccaggaggcattaatgaaactggagagacttgattctgttccagttgaagagcaagaagagttcaagcagctttcagatggaatt

SEQ ID NO: 377560 - DNA, 120 bp, Artificial Sequence
  ENSG00000143228_7 (sequence is synthesized)
caggagctacaacaatcactaaatcaggattttcatcaaaaaacgatagtgctgcaagagggaaattcccaaaagaagtcaaatatttcagagaaaaccaagcgtttgaatgaactaaaa

SEQ ID NO: 377561 - DNA, 120 bp, Artificial Sequence
  ENSG00000143228_8 (sequence is synthesized)
aaaaattgtggattctccagagaagttaaagaattataaagaaaaaatgaaagatacggtccagaagcttaaaaatgccagacaagaagtggtggagaaatatgaaatctatggagactc

SEQ ID NO: 377562 - DNA, 120 bp, Artificial Sequence
  ENSG00000143228_9 (sequence is synthesized)
agttgactgcctgccttcatgtcagttggaagtgcagttatatcaaaagaaaatacaggacctttcagataatagggaaaaattagccagtatcttaaaggagagcctgaacttggagga

SEQ ID NO: 377563 - DNA, 120 bp, Artificial Sequence
  ENSG00000143228_10 (sequence is synthesized)
ccaaattgagagtgatgagtcagaactgaagaaattgaagactgaagaaaattcgttcaaaagactgatgattgtgaagaaggaaaaacttgccacagcacaattcaaaataaataagaa

SEQ ID NO: 377564 - DNA, 120 bp, Artificial Sequence
  ENSG00000143228_11 (sequence is synthesized)
gcatgaagatgttaagcaatacaaacgcacagtaattgaggattgcaataaagttcaagaaaaaagaggtgctgtctatgaacgagtaaccacaattaatcaagaaatccaaaaaattaa

SEQ ID NO: 377565 - DNA, 120 bp, Artificial Sequence
  ENSG00000143228_12 (sequence is synthesized)
acttggaattcaacaactaaaagatgctgctgaaagggagaaactgaagtcccaggaaatatttctaaacttgaaaactgctttggagaaataccacgacggtattgaaaaggcagcaga

SEQ ID NO: 377566 - DNA, 120 bp, Artificial Sequence
  ENSG00000143228_13 (sequence is synthesized)
ggactcctatgctaagatagatgagaagacagctgaactgaagaggaagatgttcaaaatgtcaacctgattaacaaaattacatgtctttttgtaaatggcttgccatcttttaatttt

SEQ ID NO: 377567 - DNA, 120 bp, Artificial Sequence
  ENSG00000143228_14 (sequence is synthesized)
ctatttagaaagaaaagttgaagcgaatggaagtatcagaagtaccaaataatgttggcttcatcagtttttatacactctcataagtagttaataagatgaatttaatgtaggctttta

SEQ ID NO: 377568 - DNA, 120 bp, Artificial Sequence
  ENSG00000143228_15 (sequence is synthesized)
ttaatttataattaaaataacttgtgcagctattcatgtctctactctgccccttgttgtaaatagtttgagtaaaacaaaactagttacctttgaaatatatatatttttttctgttac

SEQ ID NO: 377569 - DNA, 120 bp, Artificial Sequence
  ENSG00000143228_16 (sequence is synthesized)
aagtagacaatttcttcatctcagttatttgaggacaggtatttcattttagcctttcaaaagtgaagagcagtattttaatctattttgctgtgttaagttctgttccagttgaagagc

SEQ ID NO: 377570 - DNA, 120 bp, Artificial Sequence
  ENSG00000143228_17 (sequence is synthesized)
attgtacttcgaaagaatgatagaatttggatattggaggaggttccaaaaggaaatactggaagtttgggaaagttaggagactaacttggagcagaaatttcattcaattattaaagg

SEQ ID NO: 377571 - DNA, 120 bp, Artificial Sequence
  ENSG00000143228_18 (sequence is synthesized)
tttgctttcactttttgttatgttttcctaaagaaaaacagggtcattctacagtataatagatgtggcaatgtatgctatgaaaaagacacttttctttttaaacatagcagtagcaag

SEQ ID NO: 377572 - DNA, 120 bp, Artificial Sequence
  ENSG00000143228_19 (sequence is synthesized)
acccaatttttaaccttctgatgaaattaataataactaacccatcacattgctgtgtatattttggaaaatagtacagtagctcccccttatccttaggagattcatttcaggacctcc

SEQ ID NO: 377573 - DNA, 120 bp, Artificial Sequence
  ENSG00000143228_20 (sequence is synthesized)
aggggatgcctgaaactgtggatagtaacaaaccttatatatatatatatgttttttcctttatgtacatacctatgataaagtttaatttaaaacttaggcacagtaagagattaacaa

SEQ ID NO: 377574 - DNA, 120 bp, Artificial Sequence
  ENSG00000143228_21 (sequence is synthesized)
aatgcttattcattcttcaagattcagctcaaaattcacttttctctgtgaattcgtatgtcactccatctaccacacagcctctctcagcttcctcagaaaacagccatatgaaagcca

SEQ ID NO: 377575 - DNA, 120 bp, Artificial Sequence
  ENSG00000143228_22 (sequence is synthesized)
ggcaagtttgaaaagtgatgacggttgacgtttgctgatttttgactttgcttgtagctgctccccgaactcgccgtcttcctgtcggcggccggcactgtagatataatgtagctgaga

SEQ ID NO: 377576 - DNA, 120 bp, Artificial Sequence
  ENSG00000143228_23 (sequence is synthesized)
tatccacatttaatggaaggcttcttaccattcagcaatttagttactcatctactgtcatcaaacagaactgcctccaactgtgccactttctcagcatattttcaattgaacttctaa

SEQ ID NO: 377577 - DNA, 120 bp, Artificial Sequence
  ENSG00000143228_24 (sequence is synthesized)
tgatctaacacatttaactcctttcttaccttaattttatgagacagcagtgagtggctaaatctaaatgttttgaatcattataaaacgtgtttgctttttcccttagatagtgctgca

SEQ ID NO: 377578 - DNA, 120 bp, Artificial Sequence
  ENSG00000143228_25 (sequence is synthesized)
ttattgtcttcgtctacattcgtatttatattacattaagttttcttaatgacatggttttctttggtaaggaatacctactatgttccttttcatttcatcccatatacattcattcaa

SEQ ID NO: 377579 - DNA, 120 bp, Artificial Sequence
  ENSG00000143228_26 (sequence is synthesized)
actttcaaaattgtagactgtcatcaaacagaactgcctccaactgtgccactttctcagcatattttcaattgaacttctaagatactgtaagtcgaaaattgtttaccgtctttgtga

SEQ ID NO: 377580 - DNA, 120 bp, Artificial Sequence
  ENSG00000143248_0 (sequence is synthesized)
agacagttttgaagttttcaaagactggctctgctgttaagaagttgtacttaaagcggaggagctaagccacctgccaaaatgtgcaaaggacttgcagctttgccccactcatgcctg

SEQ ID NO: 377581 - DNA, 120 bp, Artificial Sequence
  ENSG00000143248_1 (sequence is synthesized)
gaaagggccaaggagattaagatcaagttgggaattctcctccagaagccagactcagttggtgaccttgtcattccgtacaatgagaagccagagaaaccagccaagacccagaaaacc

SEQ ID NO: 377582 - DNA, 120 bp, Artificial Sequence
  ENSG00000143248_2 (sequence is synthesized)
tcgctggacgaggccctgcagtggcgtgattccctggacaaactcctgcagaacaactatggacttgccagtttcaaaagtttcctgaagtctgaattcagtgaggaaaaccttgagttc

SEQ ID NO: 377583 - DNA, 120 bp, Artificial Sequence
  ENSG00000143248_3 (sequence is synthesized)
tggattgcctgtgaggattacaagaagatcaagtcccctgccaagatggctgagaaggcaaagcaaatttatgaagaattcattcaaacggaggctcctaaagaggtgaatattgaccac

SEQ ID NO: 377584 - DNA, 120 bp, Artificial Sequence
  ENSG00000143248_4 (sequence is synthesized)
ttcactaaggacatcacaatgaagaacctggtggaaccttccctgagcagctttgacatggcccagaaaagaatccatgccctgatggaaaaggattctctgcctcgctttgtgcgctct

SEQ ID NO: 377585 - DNA, 120 bp, Artificial Sequence
  ENSG00000143248_5 (sequence is synthesized)
gagttttatcaggagttaatcaagtagtaatttagccaggctatgaaatcatcctgtgagttatttcctccataataaccctgcatttcccattaatctacatatcttcccacagcagct

SEQ ID NO: 377586 - DNA, 120 bp, Artificial Sequence
  ENSG00000143248_6 (sequence is synthesized)
ttgctcagtgatacccacatgggaaaaatcccaggggatgttgcttactctttttgcccacactgctttggatacttatctactgtccgaaggccttctttccccactcaattcttcctg

SEQ ID NO: 377587 - DNA, 120 bp, Artificial Sequence
  ENSG00000143248_7 (sequence is synthesized)
ccctgttattaattaagatatcttcagcttgtagtcagacacaatcagaatcacagaaaaatcctgcctaaggcaaagaaatataagacaagactatgatatcaatgaatgtgggttaag

SEQ ID NO: 377588 - DNA, 120 bp, Artificial Sequence
  ENSG00000143248_8 (sequence is synthesized)
taatagatttccagctaaattggtctaaaaaagaatattaagtgtggacagacctatttcaaaggagcttaattgatctcacttgttttagttctgatccagggagatcacccctctaat

SEQ ID NO: 377589 - DNA, 120 bp, Artificial Sequence
  ENSG00000143248_9 (sequence is synthesized)
tatttctgaacttggttaataaaagtttataagatttttatgaagcagccactgtatgatattttaagcaaatatgttatttaaaatattgatccttcccttggaccaccttcatgttag

SEQ ID NO: 377590 - DNA, 120 bp, Artificial Sequence
  ENSG00000143248_10 (sequence is synthesized)
ttgggtattataaataagagatacaaccatgaatatattatgtttatacaaaatcaatctgaacacaattcataaagatttctcttttataccttcctcactggccccctccacctgccc

SEQ ID NO: 377591 - DNA, 120 bp, Artificial Sequence
  ENSG00000143248_11 (sequence is synthesized)
atagtcaccaaattctgttttaaatcaatgacctaagatcaacaatgaagtattttataaatgtatttatgctgctagactgtgggtcaaatgtttccattttcaaattatttagaattc

SEQ ID NO: 377592 - DNA, 120 bp, Artificial Sequence
  ENSG00000143248_12 (sequence is synthesized)
ttatgagtttaaaatttgtaaatttctaaatccaatcatgtaaaatgaaactgttgctccattggagtagtctcccacctaaatatcaagatggctatatgctaaaaagagaaaatatgg

SEQ ID NO: 377593 - DNA, 120 bp, Artificial Sequence
  ENSG00000143248_13 (sequence is synthesized)
tcaagtctaaaatggctaattgtcctatgatgctattatcatagactaatgacatttatcttcaaaacaccaaattgtctttagaaaaattaatgtgattacaggtagaggccttctagg

SEQ ID NO: 377594 - DNA, 120 bp, Artificial Sequence
  ENSG00000143248_14 (sequence is synthesized)
tgagacacttttaaggtacactgcattttgcaaaaaaaaaaaaaaaaagtaatcttttagcaaccccagtattccttcactatttcgcttcctgcattagcaaattttacttacagtcaa

SEQ ID NO: 377595 - DNA, 120 bp, Artificial Sequence
  ENSG00000143248_15 (sequence is synthesized)
aagtgcagatttatactcctgacgtgtctcattcacagctaaataataggccataggacttttggtaggtttaaacttttaattctgtatttcatgattataagtcttgctagaattttt

SEQ ID NO: 377596 - DNA, 120 bp, Artificial Sequence
  ENSG00000143248_16 (sequence is synthesized)
tctaatctttagtagatttgattaaataatgattcacagaatttagtaacagaatcaaactaagccatgtatgagggtaatcgagatgaggatattaactcaaaagaaatagggtgattt

SEQ ID NO: 377597 - DNA, 120 bp, Artificial Sequence
  ENSG00000143248_17 (sequence is synthesized)
ttaaaggattaataaaattctgaaatgttaagtagaagattacattgtctagtcttgtatttcctccttctgttgctctctttcattcacacactctcagtttctcatatttgtagctca

SEQ ID NO: 377598 - DNA, 120 bp, Artificial Sequence
  ENSG00000143248_18 (sequence is synthesized)
tttatttggttatttcctaagaatattgaaagtgaagcaactatgtgactgtattcttcaggtaaacactgactgcgcttgttggattttccctatttttgtgacttcaagaataatatg

SEQ ID NO: 377599 - DNA, 120 bp, Artificial Sequence
  ENSG00000143248_19 (sequence is synthesized)
ccctgctgaatacatgccatttcacattctgaaactgggtagagtggttgggtgttctgccaacaattgctagtggtgtgaattcattcatatttgccagtattgctcacttcaaagaaa

SEQ ID NO: 377600 - DNA, 120 bp, Artificial Sequence
  ENSG00000143248_20 (sequence is synthesized)
ctccttcatcaagcagtccagagctaggccagatcaatgctacaatcatgaagttctcattgcatgcaattgtgtaggattgacaaggaactcagataaaaatttccagggtgcacttcc

SEQ ID NO: 377601 - DNA, 120 bp, Artificial Sequence
  ENSG00000143248_21 (sequence is synthesized)
agaaccagcttcaacatatgtctacattgcccccaagttaataaagtgccaaccctttactctctcatacagccagaaatgttagaaatccaaaatcttggtgcattattttttcataaa

SEQ ID NO: 377602 - DNA, 120 bp, Artificial Sequence
  ENSG00000143248_22 (sequence is synthesized)
cgctaaaacatttgaagaaacaatttaattatttaaaattcaagtattttattcacattatttgcaatatccaaatgtttaaaaattcccagataattaactagctattacagatctcac

SEQ ID NO: 377603 - DNA, 120 bp, Artificial Sequence
  ENSG00000143248_23 (sequence is synthesized)
ggactgtactcacaaattgactggacaccctatgaaagtgggtagacctctcagcggaaaataagaagggcttttacctacagggcaggacagggtcccatgagagcagttctgtggaga

SEQ ID NO: 377604 - DNA, 120 bp, Artificial Sequence
  ENSG00000143248_24 (sequence is synthesized)
gttctgtggagatataaaaagaatggaagaaggaatgccttatagtgatattgtgacattatatctatatatctacatatatctatctatctatatctacatctatataatcttacattt

SEQ ID NO: 377605 - DNA, 120 bp, Artificial Sequence
  ENSG00000143248_25 (sequence is synthesized)
ctacacatattagaaactcttctaataaatgaagtaaaaaaattaaaaagaatacaaatattccagccccaaatgagaaatcaaacatattaaaattgttcaagaaaatttctttgaaca

SEQ ID NO: 377606 - DNA, 120 bp, Artificial Sequence
  ENSG00000143248_26 (sequence is synthesized)
cttctgaaagtttttggaaacttagaaaagagggaaaaaaatccagtgttactagtaatttccatggtaatacagataaaatacattcttttaattctgggaaattagaaaaagtggggt

SEQ ID NO: 377607 - DNA, 120 bp, Artificial Sequence
  ENSG00000143248_27 (sequence is synthesized)
gatctttccaggaaaaacatgtgtaacatctgcttatcactccagctccctcctcctcctcctctccacgttcccttgagtaaatgtctgggaaagcatgaagcttgatgcaagaaccct

SEQ ID NO: 377608 - DNA, 120 bp, Artificial Sequence
  ENSG00000143248_28 (sequence is synthesized)
gttgtactggcgttttcctcccctgtgaaaacgtaactactgttgggagtgaattgaggatgtagaaaggtggtggaaccaaattgtggtcaatggaaataggagaatatggttctcact

SEQ ID NO: 377609 - DNA, 120 bp, Artificial Sequence
  ENSG00000143248_29 (sequence is synthesized)
cttgagaaaaaaacctaagattagcccaggtagttgcctgtaacttcagtttttctgcctgggtttgatatagtttagggttggggttagattaagatctaaattacatcaggacaaaga

SEQ ID NO: 377610 - DNA, 120 bp, Artificial Sequence
  ENSG00000143248_30 (sequence is synthesized)
gacagactattaactccacagttaattaaggacgtatgttccatgtttatttgttaaagcagtgtgaatagccttcaagcatgtgaataatcttccatcttccccgccacacatacacac

SEQ ID NO: 377611 - DNA, 120 bp, Artificial Sequence
  ENSG00000143248_31 (sequence is synthesized)
acacactttttgtttctttcaggtagacaccttttaaaatgcagaactaactgaggcatttcagtaactttgctttcaaatcaataaagtcaaatgtatggaaacattttgtgccctact

SEQ ID NO: 377612 - DNA, 120 bp, Artificial Sequence
  ENSG00000143248_32 (sequence is synthesized)
ctccataccccgtgtactcaaattctctactgtatgaattatgctttaagtagaattcagtgccaaggagaacttggtgaaataaattattttaattttttttttatcctttacaaagcc

SEQ ID NO: 377613 - DNA, 120 bp, Artificial Sequence
  ENSG00000143248_33 (sequence is synthesized)
atggattttatttggttgatgtgtgctctgtacacaagccatttcaataggatggagctgttaattattttccaaagagtaatagacatgcaaaagtttcaataaaaactgggccattaa

SEQ ID NO: 377614 - DNA, 120 bp, Artificial Sequence
  ENSG00000143248_34 (sequence is synthesized)
caaataaattaataaactaataagcattcccttctaggtttttgccaaactgcctatccaataacaaatttgagaatcgttgtaaaagctagttatatttcagagaaatgattttcatta

SEQ ID NO: 377615 - DNA, 120 bp, Artificial Sequence
  ENSG00000143248_35 (sequence is synthesized)
ttgaaactgttctccctagcaggccattttccctttttcctgggagtttagcaagtttaggagagaatagtcatgaaaagaaagggaagaaaggggagaagggaagaggttaaaaagtaa

SEQ ID NO: 377616 - DNA, 120 bp, Artificial Sequence
  ENSG00000143248_36 (sequence is synthesized)
gtgctcagacctatgaacgtaatccctttgctacaaatatttaagagcagctcagcttggttgaaactgagttttgtcatcttccatatttgcaggaaggtattttctgacttgcaatgc

SEQ ID NO: 377617 - DNA, 120 bp, Artificial Sequence
  ENSG00000143248_37 (sequence is synthesized)
agctagatgtaaaattttattttatcatcctagaaagccttgactagaaaaatgaataaatattgagggtttcctgtccatatctggcttgcatgtgccagaaagcagagaatagaaaat

SEQ ID NO: 377618 - DNA, 120 bp, Artificial Sequence
  ENSG00000143248_38 (sequence is synthesized)
gtaatctccaacatccaagcatcgaaacccaaggggtaggcaattctatgtaggttttggacatgaagtttggtgcatcttggtttatgctggctcaactgctattaaacctctctggct

SEQ ID NO: 377619 - DNA, 120 bp, Artificial Sequence
  ENSG00000143248_39 (sequence is synthesized)
tatagtctcttcattctattagacaagcacgtatcgaacacttgcttcgcacaaggctctttagttaacaatttagcagctactgtttgtgttaaacacacttttcaccaaataggttct

SEQ ID NO: 377620 - DNA, 120 bp, Artificial Sequence
  ENSG00000143248_40 (sequence is synthesized)
gaggcaaacgagagcaatgactatttaaagaaaggctttcccagcatcacttacacatcccaaaactaaaaagatcaactcttccaactgagaaaagactcctggctttgaatggaaact

SEQ ID NO: 377621 - DNA, 120 bp, Artificial Sequence
  ENSG00000143248_41 (sequence is synthesized)
tacagcagagagtcacaggccacggcaacaacaacgacaacaacaaacatttggaatattattctcaactcacgttttaataatacatcttattatttttctagtagagaaactacaaat

SEQ ID NO: 377622 - DNA, 120 bp, Artificial Sequence
  ENSG00000143248_42 (sequence is synthesized)
cagcctcttcaacatttatatacagtttaataagcctcttgcaagttacttgttctctcacctgaggtatttttttcctccccaccttgcccctgttcctcccttcctcttctccctttg

SEQ ID NO: 377623 - DNA, 120 bp, Artificial Sequence
  ENSG00000143248_43 (sequence is synthesized)
caagaggaaatatttaacatatttgggtccaacttcaataatgtaataattaatacattaaaagcatttaacttcctttctagaaaaatgcacaggctaaggcatagacaaaacaaagag

SEQ ID NO: 377624 - DNA, 120 bp, Artificial Sequence
  ENSG00000143248_44 (sequence is synthesized)
aaatgctgagaaatttgccactggagacaagcaatctgaataaatatttgccaaaagttctttttatgtcatatagtgtcaggatttgaaggagctatttttttttaatgttgcaactag

SEQ ID NO: 377625 - DNA, 120 bp, Artificial Sequence
  ENSG00000143248_45 (sequence is synthesized)
caactcatcttcggaagacacagccaggagaatgaagtagaagtgaaaggtttataaatccatttgtaagcatttatcccatatattttaaattcaagaaaaattgtgtttatctttaga

SEQ ID NO: 377626 - DNA, 120 bp, Artificial Sequence
  ENSG00000143248_46 (sequence is synthesized)
attttgtattcaatactttatgtactatgtgactcatgcttctggataaataaagcaccaaatatgtatctgtaaccacaatcacacatattatattaaatatatatctatataacagcc

SEQ ID NO: 377627 - DNA, 120 bp, Artificial Sequence
  ENSG00000143248_47 (sequence is synthesized)
aagtgggagcaccgcggtttcggggaagagaccggggttgagcgtctagcccatctctgcgtgacttccgccagcgtttagagcgttttcggggtccgagttgaagagcaaaaccaagtg

SEQ ID NO: 377628 - DNA, 120 bp, Artificial Sequence
  ENSG00000143248_48 (sequence is synthesized)
aaggaaacttcactaagttcagggtgacaagggaggaagtacagagtgaactattggcatggctcaatccattgacctgttttggttcctgatgaagttttgttaatttaaatgagaaaa

SEQ ID NO: 377629 - DNA, 120 bp, Artificial Sequence
  ENSG00000143248_49 (sequence is synthesized)
aagtacagagaaacagagcgcttaaaaagcactgtctggatatcttcagagggaaaaaggagaaagttaactgaattggtgacacttcgggtctctcacagaggaagggaaatggttatt

SEQ ID NO: 377630 - DNA, 120 bp, Artificial Sequence
  ENSG00000143248_50 (sequence is synthesized)
agttcagggtgacaagggaggaagtacagagactgcactttaaattctggatgacagacctatcaggactgagtggacctttgagtgacaagatgggggtgttccaaagagaccatggca

SEQ ID NO: 377631 - DNA, 120 bp, Artificial Sequence
  ENSG00000143248_51 (sequence is synthesized)
agaagtgtctgacaaaacaaagaaacaaaacctcagtgaaaaatgtgcgcaagaaacatttcacaggatattctcatcttacagatgcacagtgctcattggcatatcaatggcaaatat

SEQ ID NO: 377632 - DNA, 120 bp, Artificial Sequence
  ENSG00000143248_52 (sequence is synthesized)
gaataagaagaatcacagaggcagatgtaagcagcaccctaatcaatggccaagtgagaagagctctgtcatgtcagtgtctaattgtatgtatcagagacaaaatccaataaacccttg

SEQ ID NO: 377633 - DNA, 120 bp, Artificial Sequence
  ENSG00000143252_0 (sequence is synthesized)
agctaggcagagctgagcggagaagctccagagccttttaaagagactctcgtcacatgacacccccaaccccgacccccagccggcgcgcctccgccctcgggtggcggggccgcctgg

SEQ ID NO: 377634 - DNA, 120 bp, Artificial Sequence
  ENSG00000143252_1 (sequence is synthesized)
cgtcacttccgtccagaccggaacccaagatggctgcgctgttgctgagacacgttggtcgtcattgcctccgagcccactttagccctcagctctgtatcagaaatgctgttcctttgg

SEQ ID NO: 377635 - DNA, 120 bp, Artificial Sequence
  ENSG00000143252_2 (sequence is synthesized)
gaaccacggccaaagaagagatggagcggttctggaataagaatataggttcaaaccgtcctctgtctccccacattactatctacagttggtctcttcccatggcgatgtccatctgcc

SEQ ID NO: 377636 - DNA, 120 bp, Artificial Sequence
  ENSG00000143252_3 (sequence is synthesized)
accgtggcactggtattgctttgagtgcaggggtctctctttttggcatgtcggccctgttactccctgggaactttgagtcttatttggaacttgtgaagtccctgtgtctggggccag

SEQ ID NO: 377637 - DNA, 120 bp, Artificial Sequence
  ENSG00000143252_4 (sequence is synthesized)
cactgatccacacagctaagtttgcacttgtcttccctctcatgtatcatacctggaatgggatccgacacttgatgtgggacctaggaaaaggcctgaagattccccagctataccagt

SEQ ID NO: 377638 - DNA, 120 bp, Artificial Sequence
  ENSG00000143252_5 (sequence is synthesized)
ctggagtggttgtcctggttcttactgtgttgtcctctatggggctggcagccatgtgaagaaaggaggctcccagcatcatcttcctacacattattacattcacccatctttctgttt

SEQ ID NO: 377639 - DNA, 120 bp, Artificial Sequence
  ENSG00000143252_6 (sequence is synthesized)
gtcattcttatctccagcctgggaaaagttctccttatttgtttagatccttttgtattttcagatctccttggagcagtagagtacctggtagaccataatagtggaaaagggtctagt

SEQ ID NO: 377640 - DNA, 120 bp, Artificial Sequence
  ENSG00000143252_7 (sequence is synthesized)
tttccccttgtttctaaagatgaggtggctgcaaaaactccccttttttgcccacagcttgcctactctcggcctagaagcagttattctctctccatattgggctttgatttgtgctga

SEQ ID NO: 377641 - DNA, 120 bp, Artificial Sequence
  ENSG00000143252_8 (sequence is synthesized)
gggtcagcttttggctccttcttcctgagacagtggaaacaatgccagctctgtggcttctgccctggggatgggccgggttggggggtgggttggtgaggctttgggtgccactgcctg

SEQ ID NO: 377642 - DNA, 120 bp, Artificial Sequence
  ENSG00000143252_9 (sequence is synthesized)
tgggttgctggcttaaaggacaattctcttcattggtgagagcccaggccattaacacctacacagtgttattgaaagaagagaggtgggggtggaggggaattagtctgtcccagctag

SEQ ID NO: 377643 - DNA, 120 bp, Artificial Sequence
  ENSG00000143252_10 (sequence is synthesized)
agggagataaagagggctagttagttcttggagcagctgcttttgaggagaaaatatatagctttggacacgaggaagatctagaaaattatcattgaacatattaatggttatttcttt

SEQ ID NO: 377644 - DNA, 120 bp, Artificial Sequence
  ENSG00000143252_11 (sequence is synthesized)
ttcttggatttccagaaaagcctcttaattttatgctttctcatcgaagtaatgtaccctttttttctgaaactgaattaaatactcattttatctttgactctccttgaaatctagaga

SEQ ID NO: 377645 - DNA, 120 bp, Artificial Sequence
  ENSG00000143252_12 (sequence is synthesized)
aaccaagaaaatggctgttgggaaggaaccaatttcctcctcttccctcgggtctcaggcatttacatcctccctctccccgcaatctgacctttaccaggagggaaacagttctcctac

SEQ ID NO: 377646 - DNA, 120 bp, Artificial Sequence
  ENSG00000143252_13 (sequence is synthesized)
atctcatcattggaaaagttttcagggaatcagatagaacttagccagagatttaaatatcacagaaaagcctcagagaaggaaggagaaaaagaaaagaagtgacgcatgtagagtgct

SEQ ID NO: 377647 - DNA, 120 bp, Artificial Sequence
  ENSG00000143252_14 (sequence is synthesized)
tttgggttataggcaccaaaatcccattaaggactgattataagcttcatggtacagttcagcaaattatgattcattgaggggcacagaggaccagtgttggtgacagctaggggatga

SEQ ID NO: 377648 - DNA, 120 bp, Artificial Sequence
  ENSG00000143252_15 (sequence is synthesized)
tgacctgaggttataggcttggggtgaatgaagcatagagtttttttttaaaaaagaagggattgttgaaaacctggcaaaaatgtataatttaatgagaaaacttgctgcttttaaaat

SEQ ID NO: 377649 - DNA, 120 bp, Artificial Sequence
  ENSG00000143252_16 (sequence is synthesized)
ccatataggccaggctttagcaggcatgctgttttgatagtttttgggaactctggaataagagacttatctcatctgtcacttcgagttgttggccagccagttaaagctgtgggtcga

SEQ ID NO: 377650 - DNA, 120 bp, Artificial Sequence
  ENSG00000143252_17 (sequence is synthesized)
agaggggaaatgttaactggctggtgtcaattggataggaagaccttagttaaggtggggacccgctgttttaacagtcttcattcagggtcccaaatagtatttggctttaagtaatga

SEQ ID NO: 377651 - DNA, 120 bp, Artificial Sequence
  ENSG00000143252_18 (sequence is synthesized)
ttggttttccctttttactagaggggccctgggaagtccttgtacctttcctccattttaaaccagctgttctctactttgtccttggaatgagggacaagtgatcatgacagaacactt

SEQ ID NO: 377652 - DNA, 120 bp, Artificial Sequence
  ENSG00000143252_19 (sequence is synthesized)
tgtcattgggactgggaaaggtttggcaagggcattaaatttaacagccagtgccaggaaaatataaaatggggtcaatgataaacagctgttagaggctggaaaatgggtagggcagtt

SEQ ID NO: 377653 - DNA, 120 bp, Artificial Sequence
  ENSG00000143252_20 (sequence is synthesized)
gaattttttggtggtttcgtaccatttgggtgattgaagcatggtagtgggtgggtggggggtgtgacagagcatcatgtttgttattctgccttaaatttctacttactgtctttttct

SEQ ID NO: 377654 - DNA, 120 bp, Artificial Sequence
  ENSG00000143252_21 (sequence is synthesized)
tctctgtcttccaatcactttaatatcttcaattttcaaactatatttgtacttgggcttagatagaaagtcttacacaagcatagtatcttctactttggttttccctaccttttcttc

SEQ ID NO: 377655 - DNA, 120 bp, Artificial Sequence
  ENSG00000143252_22 (sequence is synthesized)
cccaccttctccaaacacacatatacatactctactcaattctatttctgattttgtagttgttagttgtccatgctcaggataaaaaatgagtgggtagggttgagggactggttcttt

SEQ ID NO: 377656 - DNA, 120 bp, Artificial Sequence
  ENSG00000143252_23 (sequence is synthesized)
gaggttctgccctttttccatgattcagaccaactttctcttggtcatttctggagtataactgactcaattcttgtaaaaatgtgttccacccaaaccactgtatgttcttttccctac

SEQ ID NO: 377657 - DNA, 120 bp, Artificial Sequence
  ENSG00000143252_24 (sequence is synthesized)
tttattttctcctaccttccttctcctaattgtgttacaagaggcagccatagcaagaatggaaaatccagatcagtaaaagattcaacaaaaaaaagtttattttccaaatttgctttt

SEQ ID NO: 377658 - DNA, 120 bp, Artificial Sequence
  ENSG00000143252_25 (sequence is synthesized)
actcccaccccaaaatttccctgtttcacagttctgactgggggctcttgtttatttcactgagtcgctatacgggtttttcagtgtgtggccacttggtccatatgaagttccaggttt

SEQ ID NO: 377659 - DNA, 120 bp, Artificial Sequence
  ENSG00000143252_26 (sequence is synthesized)
gtatttctggacctcagctagattaggccctgcccagagttctagcatacgtggacttccaggtgggctcttaggatttggctggtctttggggacctggagtatgacctgcagaggggt

SEQ ID NO: 377660 - DNA, 120 bp, Artificial Sequence
  ENSG00000143252_27 (sequence is synthesized)
gtgagctttggagttcatctggggaattgaggttggcagctggggagcttggaattatggttggacttcgtgcttgttgtacagtctttgtgatagacttctttctgagtttcttctgac

SEQ ID NO: 377661 - DNA, 120 bp, Artificial Sequence
  ENSG00000143252_28 (sequence is synthesized)
tgtctggatcatggggctgtcagtgataagagtgggagagatagtcatgtctctggtcaggcccggatcattcctaatgcacctcaggattctaactccctttctccccataccatgggc

SEQ ID NO: 377662 - DNA, 120 bp, Artificial Sequence
  ENSG00000143252_29 (sequence is synthesized)
agtagatcaagtttcaaataagaaaagttaaatttgatttctctaaccaccctcccccaccttgagattagatcattttctactgttgggggtatgatgtccttagcccatcccttcagg

SEQ ID NO: 377663 - DNA, 120 bp, Artificial Sequence
  ENSG00000143252_30 (sequence is synthesized)
cctcagaaggtgattaaggactagtcaagataagacaaattggttagaggtcccccatgctgggatagtggtggcataacaatagacattttttgaggttgaaaagaaattgagactaca

SEQ ID NO: 377664 - DNA, 120 bp, Artificial Sequence
  ENSG00000143252_31 (sequence is synthesized)
gggttttgggttagatgggaagaatagataccttgcctaagatttcaggacacagcccattggaggccttgagtaaatcaggatttttctgtatccatttggtgagggaggcagcaccag

SEQ ID NO: 377665 - DNA, 120 bp, Artificial Sequence
  ENSG00000143252_32 (sequence is synthesized)
cagttgtacgggaggtcagggtcacccgagcagggggtatcttcagaggcatttgccaggtgcccatgaaggaaccccaaggatttgcctaaaaatgaaaagggattcctcagtagggct

SEQ ID NO: 377666 - DNA, 120 bp, Artificial Sequence
  ENSG00000143252_33 (sequence is synthesized)
tctcactcccagtaactgacttagacctctgtattatttcctttctttacctttaggaatgcatggttatgaaacaagactgaaagcataatcttcccacccttccttatccccctccct

SEQ ID NO: 377667 - DNA, 120 bp, Artificial Sequence
  ENSG00000143252_34 (sequence is synthesized)
catttaggctttgcaggcctaattttttcatcccctttactctgccaacttaaattccacatccttaggccgagtgtggcaaaggagtacccactgcacaaatgtcatcacctgaaggct

SEQ ID NO: 377668 - DNA, 120 bp, Artificial Sequence
  ENSG00000143252_35 (sequence is synthesized)
ttcatttatacagatcattgatcaatttaagaacttctgaagggtgctaaacacaactctatcctgctgggtaagctggccggaagttcaggggctctcacattacaacatgaattagat

SEQ ID NO: 377669 - DNA, 120 bp, Artificial Sequence
  ENSG00000143252_36 (sequence is synthesized)
taaactttaattttcccgataatggctgtgagagactgcacatctcccagttctgtgccttaattatttgactttcttgataggagtgaagatagtatctcaccttggaacggggcacag

SEQ ID NO: 377670 - DNA, 120 bp, Artificial Sequence
  ENSG00000143252_37 (sequence is synthesized)
aaggcagtagatgaccacgatcgttggcaataatttgagtgtagccttcatgagaagagatgctctggggtacaagtgggagagataaaggtttgtgaggggaaaaagggaagtatttgg

SEQ ID NO: 377671 - DNA, 120 bp, Artificial Sequence
  ENSG00000143252_38 (sequence is synthesized)
ggagcttggtcagagaaggatatgggagtttagagaatgctaaaaggagttaattgacagggagagcatgaggctatcttgtaggtgcactgaacatggaatacctcttttgttggctta

SEQ ID NO: 377672 - DNA, 120 bp, Artificial Sequence
  ENSG00000143252_39 (sequence is synthesized)
gtgggagaccagttctgcagatacttggatgagaaagccttttcatactgtggagagaaagataagtagccctatgagacttcaaggccccaaacccaggaaatgaagactaggcacaat

SEQ ID NO: 377673 - DNA, 120 bp, Artificial Sequence
  ENSG00000143252_40 (sequence is synthesized)
tctttagatttgaagaccaaaggcctgaccaaccatgtaggctttaagtcactatgacaagggtgtaatttgtttggtctagatgtgtgctgtccagcatggagccgggagccacatgga

SEQ ID NO: 377674 - DNA, 120 bp, Artificial Sequence
  ENSG00000143252_41 (sequence is synthesized)
tccagcatggagccgggagccacatggagctgttgagcacctgaaatatgactagttcaaattgaggtgctttgtaaatatgaaatatgctgaatttttaagtttttttcttttcttttt

SEQ ID NO: 377675 - DNA, 90 bp, Artificial Sequence
  ENSG00000143252_42 (sequence is synthesized)
gtctgccacctgggttggagttggacacctgggttcaagcgatcctcctccctcagactcacaggtagctgggactacaggtgcatgcca

SEQ ID NO: 377676 - DNA, 120 bp, Artificial Sequence
  ENSG00000143252_43 (sequence is synthesized)
ccatgtccagctaatttttaaatttacttgtagagacgaggtctcaccatattgcccagggtggtctcaaacccctggcctcaagcgatccttgtgcctcagcctcccaaagtgttggga

SEQ ID NO: 377677 - DNA, 120 bp, Artificial Sequence
  ENSG00000143252_44 (sequence is synthesized)
gtgagctacaacacccagcaggttttggagatttagtacaaaaaaagaacgtaaaatgtctgattataattttttaaatactgattaaatgttgaaataatatttggatttattgggtta

SEQ ID NO: 377678 - DNA, 120 bp, Artificial Sequence
  ENSG00000143252_45 (sequence is synthesized)
aattcaatatatttaaattttatgttttaattttttcatgtagctactagaaaatttaaaattacatttgtgggtcgcactctttttgttgggcagcactggtctagatcaggagttggt

SEQ ID NO: 377679 - DNA, 120 bp, Artificial Sequence
  ENSG00000143252_46 (sequence is synthesized)
aaactatggcctatgggccatatccatattgctgcctgtttggggatggcctgagagtaagggtgatttttatagatgaacatttacaattgattcagtcaaatggaacactaactttga

SEQ ID NO: 377680 - DNA, 120 bp, Artificial Sequence
  ENSG00000143252_47 (sequence is synthesized)
atcccagttaagtgaaatgttttctcaacccccaaaattccattattttcattagtagtacaaaaaattgtactcagttatattttgaatttgtcaaaaatgttatggaaaaatgttttt

SEQ ID NO: 377681 - DNA, 120 bp, Artificial Sequence
  ENSG00000143252_48 (sequence is synthesized)
ctttaattatgcaagtagctacagaatatttttgactttgccacttggcctgcaaagcctaaaatttttacactccgcccttttacagaaaaaaaattgccaacttctggtttacaccct

SEQ ID NO: 377682 - DNA, 120 bp, Artificial Sequence
  ENSG00000143252_49 (sequence is synthesized)
acaaatttaaccaagagatacctttggatcgcccctgggctctctctatccctgaggaggtaaaatattatctcactccactctcagctatctgttcaaagatcagaatcctatgagagg

SEQ ID NO: 377683 - DNA, 120 bp, Artificial Sequence
  ENSG00000143252_50 (sequence is synthesized)
ggacagtccaaagatagaatctgaaaaacaaaagtaaacgttaaagaaatggagaatgggaacttacctggttggcactgtagttagtggccatgatcttgtgctgtttacactcgttgc

SEQ ID NO: 377684 - DNA, 120 bp, Artificial Sequence
  ENSG00000143252_51 (sequence is synthesized)
ttggcaactgcagaaggccgacctcctgggactaccaatgagcagaggctgcctttctcttctgcttattattattcacttccttggctcacactgcccccatttgttttctctggaact

SEQ ID NO: 377685 - DNA, 120 bp, Artificial Sequence
  ENSG00000143252_52 (sequence is synthesized)
tagattcatttttattttacagacgggaaagactgagtaaatgtgagaaaattagctgaatagccactactttttttctggcataacctacccctgcttaagaacttccacgggcctttg

SEQ ID NO: 377686 - DNA, 120 bp, Artificial Sequence
  ENSG00000143252_53 (sequence is synthesized)
attggggtttttaaccactttaacaaaccatgtaaccctgagagctatgcttgttggacaacatggtgtaatgtaccacaggctgtagagccagatactggggtttgaatccttattcaa

SEQ ID NO: 377687 - DNA, 120 bp, Artificial Sequence
  ENSG00000143252_54 (sequence is synthesized)
catgggaacataggagctatatgacattaaacaactgtcttgtcttcactaaatttctatcaactcatttgtattgtggggataatagagcctgcttttacagggtaagtgagataaaat

SEQ ID NO: 377688 - DNA, 120 bp, Artificial Sequence
  ENSG00000143252_55 (sequence is synthesized)
gaataaagtgtctagacaatatcatagcatagtaggtattcaatcctggtgagatcctgtttataaggcccactactttgtcttatcaggcagaataacaaaggaacaatatttaaaaag

SEQ ID NO: 377689 - DNA, 120 bp, Artificial Sequence
  ENSG00000143252_56 (sequence is synthesized)
gctcaaatctgtccccagaaggaaaaacatatcttgtccttggtccttaaaaaatttcctctgtcactgtctagaatcagcacctaagaacacaggcgtttagtgttgactggaataaaa

SEQ ID NO: 377690 - DNA, 120 bp, Artificial Sequence
  ENSG00000143252_57 (sequence is synthesized)
tggaatcgggtgctggtgcagggagattgagcagggatgaagagagaaaatcacagagtggaaaggatcaggtttggagagttcaatggggggctgccaggacataagcctaatatgtgt

SEQ ID NO: 377691 - DNA, 120 bp, Artificial Sequence
  ENSG00000143252_58 (sequence is synthesized)
gggacaaggaaacccctctgaaactcataaaatggtattgtaatacccatctatgaggtggttaggagaattaataagtaagtagaactgtgctttgtgaattgtaaagtgaatttatat

SEQ ID NO: 377692 - DNA, 120 bp, Artificial Sequence
  ENSG00000143252_59 (sequence is synthesized)
atttatatataaggtgtcaagatgaaagggaaaaactaagaaataagttgcccaaagatatcattaggaccaggagaccattataaagtatatccaggccgggcacggtggctcatgcct

SEQ ID NO: 377693 - DNA, 83 bp, Artificial Sequence
  ENSG00000143252_60 (sequence is synthesized)
agagatcatgctactactgcacttcagcctgggcgacagcgtgagactccgtctcaaaaaataaaaaataaataaagtatatc

SEQ ID NO: 377694 - DNA, 120 bp, Artificial Sequence
  ENSG00000143252_61 (sequence is synthesized)
agactccgtctcaaaaaataaaaaataaataaagtatatccatcagtcccttctcttttccttcttcccccaaaatcctcatcttaaccaacacaccaagtataagagcactcctatgct

SEQ ID NO: 377695 - DNA, 120 bp, Artificial Sequence
  ENSG00000143252_62 (sequence is synthesized)
tctgcagatggagggaagaacagctcttgttttataggctctggagttaatacctggataatgtgagatctggaaagataactcatgagcttagtccctgtggttcttatcactctctag

SEQ ID NO: 377696 - DNA, 120 bp, Artificial Sequence
  ENSG00000143252_63 (sequence is synthesized)
agaagagttctttaaggaccaaggactatctttgctctaggatatccattttggccctttaatctgcaatgataggctagcattatttctcttagaatttgtcttcagttggtatgcctc

SEQ ID NO: 377697 - DNA, 120 bp, Artificial Sequence
  ENSG00000143252_64 (sequence is synthesized)
cctctgcctttctgataggaatgtaatgataaatgatgactgcactcatttttaaaagttaaccagtttttgttcaattgaaaaagtaatgtacatggaaaaaatttcatgtttacagga

SEQ ID NO: 377698 - DNA, 120 bp, Artificial Sequence
  ENSG00000143252_65 (sequence is synthesized)
tgttcagtgaaaagcaaatctccatttgatttcaactctcagtcttgctcctcagggcaactgctgttactcatttcttgtgtctccttccagaaatcttctctgcatacaaacactaat

SEQ ID NO: 377699 - DNA, 120 bp, Artificial Sequence
  ENSG00000143252_66 (sequence is synthesized)
gagagagctgtccacattgctttttgatttgctttttgactatcttggggattatgtttttatcataatattccattttgggatgcaccatagtttgttcagacccatatggatgaccat

SEQ ID NO: 377700 - DNA, 120 bp, Artificial Sequence
  ENSG00000143252_67 (sequence is synthesized)
ttagtttatttatagtcttttgctaataaggacattgctgtaatgaaaaatccctatgtatctttatgaatatgtatgtatgtatttttatgtacatatgtgatctgtaggataaatgtt

SEQ ID NO: 377701 - DNA, 90 bp, Artificial Sequence
  ENSG00000143252_68 (sequence is synthesized)
tgtatttttatgtacatatgtgatctgtaggataaatgttttaaagtacattgcaaagtcaaaagggtttgtgcatttaaaataagtaga

SEQ ID NO: 377702 - DNA, 120 bp, Artificial Sequence
  ENSG00000143252_69 (sequence is synthesized)
agtagataatgtcaaattaccactgaaagacattgtgccagtttgtacttctaccagtggtgtatgatggcgtatgagtgcctagttctctgctttcttttcaacatcatcgttttttct

SEQ ID NO: 377703 - DNA, 120 bp, Artificial Sequence
  ENSG00000143252_70 (sequence is synthesized)
ttttttttcagtttaaaccaattttaattgaactaatagaattgaactaatagaactaattgattgaactagtagaactaatgttaactgagcagttactatatacatgccaggcacagt

SEQ ID NO: 377704 - DNA, 120 bp, Artificial Sequence
  ENSG00000143252_71 (sequence is synthesized)
tctaattgctttactacattttctcatttagttctcaacccaaccaaggaaactggagaatacacagtgaggagtagagccaggatttaatcccaagtattctgactctagagccagcag

SEQ ID NO: 377705 - DNA, 120 bp, Artificial Sequence
  ENSG00000143252_72 (sequence is synthesized)
ttttaaccattatatcatattgcttgttaagctgtaggttaaacatggtatataattttattttttgtttttgttttgagacggtctccctgccgcctaagctctggagtgcagtggttc

SEQ ID NO: 377706 - DNA, 120 bp, Artificial Sequence
  ENSG00000143252_73 (sequence is synthesized)
tcctcccaccttagcctcccaagtagttgggagtataggcatgagctaccatgcccagctaatttaaaaaaacaaattttttttaagagatagggtcttaactatattgttcctcttgtc

SEQ ID NO: 377707 - DNA, 120 bp, Artificial Sequence
  ENSG00000143252_74 (sequence is synthesized)
cttaactatattgttcctcttgtcttgaattcatggcctcaagtgattcttcgacctctggaagtgttgagattacaggcacgagccaccacacccacccaacatggtatatcattgttt

SEQ ID NO: 377708 - DNA, 120 bp, Artificial Sequence
  ENSG00000143252_75 (sequence is synthesized)
taaatttgcatttctttaattagggtgtttttatatgtgtataaactgtttttattttaatttttttccctgaaaatggcctttaatgtattttgccacttactattgggctgttgactt

SEQ ID NO: 377709 - DNA, 120 bp, Artificial Sequence
  ENSG00000143252_76 (sequence is synthesized)
caggctggagtgcagtggcatcatcttggttcactgtaacttctgcctctcaggtccaaacaatcctcccacctcagcctcccgaataactggaactacagggatgcaccaccacaccca

SEQ ID NO: 377710 - DNA, 85 bp, Artificial Sequence
  ENSG00000143252_77 (sequence is synthesized)
ctcaggtccaaacaatcctcccacctcagcctcccgaataactggaactacagggatgcaccaccacacccagctgattttttaa

SEQ ID NO: 377711 - DNA, 120 bp, Artificial Sequence
  ENSG00000143252_78 (sequence is synthesized)
gggattacaggcttgagccactgcacccagcctgttgatcatgttcattaatctgtttgaactccatatattaaggaaattagtcctttgtcaaatatgttgcaaatattccctccaatt

SEQ ID NO: 377712 - DNA, 120 bp, Artificial Sequence
  ENSG00000143252_79 (sequence is synthesized)
tgcaaatattccctccaatttgtcacttactttcattttgttggtggtttttctgttttgttgttgtttttctgtgggtttttttttttttttttgccatggacatgtttttagtactta

SEQ ID NO: 377713 - DNA, 120 bp, Artificial Sequence
  ENSG00000143252_80 (sequence is synthesized)
tgtagtagtcagatgtattactcattttttctgtgctctggatcttatgctttgaatggctttttgtgaattccaatattttaaaaataatttacccctagcttcagttcttacatttaa

SEQ ID NO: 377714 - DNA, 120 bp, Artificial Sequence
  ENSG00000143252_81 (sequence is synthesized)
atatttgttccttctggaattttagtgaatgtggacaaggttatgcttcagttgccttaactagttgccttggcatcattaataagttttcttttcctctactgatttgaaatgccattt

SEQ ID NO: 377715 - DNA, 120 bp, Artificial Sequence
  ENSG00000143252_82 (sequence is synthesized)
ttaatgtattccctaacatatttgggtctgtttctggatcctctaacccactgttctagagagaaaggtgatcgttttagattatttgtctctctgtaatctaaaatccaaggtacacgc

SEQ ID NO: 377716 - DNA, 120 bp, Artificial Sequence
  ENSG00000143252_83 (sequence is synthesized)
taatctaaaatccaaggtacacgctgggcacagtggctcacacgtgtaatcctagcactttcggaggctgaggcaggtggaacagttgaggacagaagttcgagaccagcctgaccaaca

SEQ ID NO: 377717 - DNA, 80 bp, Artificial Sequence
  ENSG00000143252_84 (sequence is synthesized)
actccgtctaaaaaaaaaaaaaaaaaaatccaaggtggagtcctggcttgatcctatgtgaattctaatatttaagattt

SEQ ID NO: 377718 - DNA, 69 bp, Artificial Sequence
  ENSG00000143252_85 (sequence is synthesized)
ccagcactttgggaggcccaggggggtggatcacaaggtcaggaaatcgagagcatgctggctaacacg

SEQ ID NO: 377719 - DNA, 120 bp, Artificial Sequence
  ENSG00000143252_86 (sequence is synthesized)
taatatcagtagtaacaggcaattttaagcttctaataaaagtgtattgaattttagcctttcttcagatgaactggttgacttcaggtacagcagatggtcttttactaggaccagatt

SEQ ID NO: 377720 - DNA, 120 bp, Artificial Sequence
  ENSG00000143252_87 (sequence is synthesized)
tacttcttccaaagttggaagggctctttaaaggccccatcctttacgtatgccttaagatacttttttccattcacttaaattctttgatgactgaaactaaaccattaggaaatcttt

SEQ ID NO: 377721 - DNA, 120 bp, Artificial Sequence
  ENSG00000143252_88 (sequence is synthesized)
tatttggactgagattatctgctattgaagtacaagtttaacctgtactctataggcgatgtgtacattggacctacgtgaaggcaaccaccagcataagtactagagtcacattgcctg

SEQ ID NO: 377722 - DNA, 120 bp, Artificial Sequence
  ENSG00000143252_89 (sequence is synthesized)
gattaaattctggctttgcctaaatgtgtggccttacacaagttaatctttctgggtctcagtacccttacatgtaaaatggggataatcttagttttgagcattaaatatatgtaacat

SEQ ID NO: 377723 - DNA, 120 bp, Artificial Sequence
  ENSG00000143252_90 (sequence is synthesized)
gctaatagggtgcaagatgcataatgaatgctcaattattttagcattattattggcttaagactgccaagtaagaagtactcattcaggttaccttaaacaaaaaaggggaagtgggga

SEQ ID NO: 377724 - DNA, 120 bp, Artificial Sequence
  ENSG00000143252_91 (sequence is synthesized)
aattataattaataggagtatttaacagattccaaaggtaggaagtatagtttgggcttcaaaggatactagaatttcaaagatagaacatgatcagaaagattttctgtttcttcttta

SEQ ID NO: 377725 - DNA, 60 bp, Artificial Sequence
  ENSG00000143252_92 (sequence is synthesized)
agatagaacatgatcagaaagattttctgtttcttctttatcatctctgtttctcactgc

SEQ ID NO: 377726 - DNA, 120 bp, Artificial Sequence
  ENSG00000143252_93 (sequence is synthesized)
ccagaaaaaattattagtaaccccttcatagtaaaaatggggcatttatctcatctattacacagtgtaaccacctgaatcactgtctctagttataccatcagctctctactaaggttt

SEQ ID NO: 377727 - DNA, 120 bp, Artificial Sequence
  ENSG00000143252_94 (sequence is synthesized)
cttctaagtagctccaaggtgccctccatgtcacctcactgggtcaggtgttgatgggtcttggataggagacctggcttttgccccatttcctgggctaacaggatttcatccaaccaa

SEQ ID NO: 377728 - DNA, 120 bp, Artificial Sequence
  ENSG00000143252_95 (sequence is synthesized)
gctactggccaaattttgaactattcaaacaccctggtttttgtagatttccttataggaaatgaaggcgtagttctgacccctgaagagatgcatggctacaaatgtaaaagctatagt

SEQ ID NO: 377729 - DNA, 120 bp, Artificial Sequence
  ENSG00000143252_96 (sequence is synthesized)
ttcaaaacttctctatagagttaaaatagctgatccagttttctttcctgagactaaggctccctctctcggagactgctgttacatctctcctttccactgacaataccacaaaagaat

SEQ ID NO: 377730 - DNA, 120 bp, Artificial Sequence
  ENSG00000143252_97 (sequence is synthesized)
aatattcttgataagatccccttcctgaggagccaaagaacaagctttgtatactccccacacactgcctatggggtagccctctctgcagcattcatagagctatttaacactatttct

SEQ ID NO: 377731 - DNA, 80 bp, Artificial Sequence
  ENSG00000143252_98 (sequence is synthesized)
gcctcccaggttcaagtgatcctcctgcttcagcccccctccatagctgggattataggcacacaccagcatgccctgct

SEQ ID NO: 377732 - DNA, 86 bp, Artificial Sequence
  ENSG00000143252_99 (sequence is synthesized)
cccaaagtcgttaacactatttcttaaaacaaaacaaaaagaccaaagaacaagctttaaacaaccaaaatgactgaaaagacatc

SEQ ID NO: 377733 - DNA, 120 bp, Artificial Sequence
  ENSG00000143252_100 (sequence is synthesized)
agaacaagctttaaacaaccaaaatgactgaaaagacatcagtatctctcactagtggtgtgaattaagtttgtttacttgcataactaagaataaatgatggttataatggcaccagta

SEQ ID NO: 377734 - DNA, 120 bp, Artificial Sequence
  ENSG00000143252_101 (sequence is synthesized)
taggatatcttggctatgtgctttaacaatatacaggttgaccatgaagtctggaaatagatactattattttatcatgtatttaaatatattaataaaccattaatatgtattcattaa

SEQ ID NO: 377735 - DNA, 120 bp, Artificial Sequence
  ENSG00000143252_102 (sequence is synthesized)
cttccgtccagaccggaacccaagatggctgcgctgttgctgagacacgttggtcgtcattgcctccgagcccactttagccctcagctctgtatcagaaattggtctcttcccatggcg

SEQ ID NO: 377736 - DNA, 120 bp, Artificial Sequence
  ENSG00000143252_103 (sequence is synthesized)
acttccgtccagaccggaacccaagatggctgcgctgttgctgaggtgacttcagtgggactgggagttggtgcctgcggccctccggagatctgaactggcccctcacgttttgctgat

SEQ ID NO: 377737 - DNA, 120 bp, Artificial Sequence
  ENSG00000143252_104 (sequence is synthesized)
aactgtttatcctgtgcctgggcagggaaaggacccatgggtgtggaggccaagcgctcggggatcctagagaccccttttcccgtcccccccagccgctccggtgcgctccgtagggct

SEQ ID NO: 377738 - DNA, 120 bp, Artificial Sequence
  ENSG00000143252_105 (sequence is synthesized)
tttccccacctcctctagtacttctaacgcaaattgctctcgggcctgcacccagagccgagctctgagaaaataacttcaaggtcagccacccatgggtcctacgatttcgagagcgta

SEQ ID NO: 377739 - DNA, 120 bp, Artificial Sequence
  ENSG00000143252_106 (sequence is synthesized)
tttagacatttagcttcggagagagagatcttcgtgtattttgcctttgcttcgaatgccttcagacactagctgctcccaccacacgttggtcgtcattgcctccgagcccactttagc

SEQ ID NO: 377740 - DNA, 87 bp, Artificial Sequence
  ENSG00000143252_107 (sequence is synthesized)
acacgttggtcgtcattgcctccgagcccactttagccctcagctctgtatcagaaaagtctcgttctgtcgaccaggctggagtgt

SEQ ID NO: 377741 - DNA, 120 bp, Artificial Sequence
  ENSG00000143256_0 (sequence is synthesized)
aggcggcgaagatggcggagaacagcggtcgcgccggcaagagcagcgggagcggcgcggggaagggggcggtgtccgcagagcaggtgattgctggcttcaaccgccttcggcaggaac

SEQ ID NO: 377742 - DNA, 120 bp, Artificial Sequence
  ENSG00000143256_1 (sequence is synthesized)
agcgaggcctggcatccaaagcagctgagttggagatggagttgaatgagcacagcctagtgatcgatacactgaaggaggtagatgaaactcgtaagtgctaccgcatggttggaggag

SEQ ID NO: 377743 - DNA, 120 bp, Artificial Sequence
  ENSG00000143256_2 (sequence is synthesized)
tgaattccgggaaaagcacaacattcgtctcatgggagaagatgagaagccagcagccaaggaaaactcagaaggggctggggctaaggccagctcagctggagtgttggtctcctaggg

SEQ ID NO: 377744 - DNA, 120 bp, Artificial Sequence
  ENSG00000143256_3 (sequence is synthesized)
accaaggcctttgcatttttttctaccctgactcccacttctaatttctctttattgttattattattattttctctgctattgtaatatttttttgttaattaaatgttttggtcagaa

SEQ ID NO: 377745 - DNA, 120 bp, Artificial Sequence
  ENSG00000143256_4 (sequence is synthesized)
gccggccggaaacccagcaggcggcgaagatggcggagaacagcggtcgcgccggcaagagcagcgggagcggcgcggggaagggggcggtgtccgcagagcagatacagaagatcattg

SEQ ID NO: 377746 - DNA, 120 bp, Artificial Sequence
  ENSG00000143257_0 (sequence is synthesized)
gtcatgctgggaaaacctcccacccaggcctttgccctgagtccagggtctgtgccctaaccccacagtcactgagagcaactggaggccacataaaacagacatctcttgttttccaga

SEQ ID NO: 377747 - DNA, 120 bp, Artificial Sequence
  ENSG00000143257_1 (sequence is synthesized)
tactacgggtcataatccctaactccaatcactggcaactcctgagatcagaggaaaaccagcaacagcgtgggagtttggggagaggcattccataccagattctgtggcctgcaggtg

SEQ ID NO: 377748 - DNA, 120 bp, Artificial Sequence
  ENSG00000143257_2 (sequence is synthesized)
acatgctgcctaagagaagcaggagtctgtgacagccaccccaacacgtgacgtcatggccagtagggaagatgagctgaggaactgtgtggtatgtggggaccaagccacaggctacca

SEQ ID NO: 377749 - DNA, 120 bp, Artificial Sequence
  ENSG00000143257_3 (sequence is synthesized)
ctttaatgcgctgacttgtgagggctgcaagggtttcttcaggagaacagtcagcaaaagcattggtcccacctgcccctttgctggaagctgtgaagtcagcaagactcagaggcgcca

SEQ ID NO: 377750 - DNA, 120 bp, Artificial Sequence
  ENSG00000143257_4 (sequence is synthesized)
ctgcccagcctgcaggttgcagaagtgcttagatgctggcatgaggaaagacatgatactgtcggcagaagccctggcattgcggcgagcaaagcaggcccagcggcgggcacagcaaac

SEQ ID NO: 377751 - DNA, 120 bp, Artificial Sequence
  ENSG00000143257_5 (sequence is synthesized)
acctgtgcaactgagtaaggagcaagaagagctgatccggacactcctgggggcccacacccgccacatgggcaccatgtttgaacagtttgtgcagtttaggcctccagctcatctgtt

SEQ ID NO: 377752 - DNA, 120 bp, Artificial Sequence
  ENSG00000143257_6 (sequence is synthesized)
tgtgctgcctctggtcacacacttcgcagacatcaacactttcatggtactgcaagtcatcaagtttactaaggacctgcccgtcttccgttccctgcccattgaagaccagatctccct

SEQ ID NO: 377753 - DNA, 120 bp, Artificial Sequence
  ENSG00000143257_7 (sequence is synthesized)
tctcaagggagcagctgtggaaatctgtcacatcgtactcaataccactttctgtctccaaacacaaaacttcctctgcgggcctcttcgctacacaattgaagatggagcccgtgtggg

SEQ ID NO: 377754 - DNA, 120 bp, Artificial Sequence
  ENSG00000143257_8 (sequence is synthesized)
gttccaggtagagtttttggagttgctctttcacttccatggaacactacgaaaactgcagctccaagagcctgagtatgtgctcttggctgccatggccctcttctctcctgaccgacc

SEQ ID NO: 377755 - DNA, 120 bp, Artificial Sequence
  ENSG00000143257_9 (sequence is synthesized)
tggagttacccagagagatgagattgatcagctgcaagaggagatggcactgactctgcaaagctacatcaagggccagcagcgaaggccccgggatcggtttctgtatgcgaagttgct

SEQ ID NO: 377756 - DNA, 120 bp, Artificial Sequence
  ENSG00000143257_10 (sequence is synthesized)
aggcctgctggctgagctccggagcattaatgaggcctacgggtaccaaatccagcacatccagggcctgtctgccatgatgccgctgctccaggagatctgcagctgaggccatgctca

SEQ ID NO: 377757 - DNA, 120 bp, Artificial Sequence
  ENSG00000143257_11 (sequence is synthesized)
cttccttccccagctcacctggaacaccctggatacactggagtgggaaaatgctgggaccaaagattgggccgggttcaaagggagcccagtggttgcaatgaaagactaaagcaataa

SEQ ID NO: 377758 - DNA, 120 bp, Artificial Sequence
  ENSG00000143257_12 (sequence is synthesized)
tttgctgcaccacctctgcccaaatactcagctccttgagtccatccacccaggccttctagcctagctatcaaacctgcagactaggtctatcccagcctcagtccccggggcaccacg

SEQ ID NO: 377759 - DNA, 120 bp, Artificial Sequence
  ENSG00000143257_13 (sequence is synthesized)
tctcctccccaatggaaatagccctccaaaccaaactccctattagtcagcctttacaccctcgctggtgcccaagcctgtccagctacattactcctttatcttagagtctaactaccc

SEQ ID NO: 377760 - DNA, 120 bp, Artificial Sequence
  ENSG00000143257_14 (sequence is synthesized)
tgtggctggcatcctacatcttgccaaacacatcactgtataaactggtggcataacagagggaaagctgaatgtttgtctgatggacacagcccattagtcaagagcatttattatgta

SEQ ID NO: 377761 - DNA, 120 bp, Artificial Sequence
  ENSG00000143257_15 (sequence is synthesized)
cccactgcctgtgaagcacctagctagtactacatcaactaggctttctggagtgatcctgtgttgccatggaaatgcttgagatgtgttggatactatccacccctggggacctttggg

SEQ ID NO: 377762 - DNA, 120 bp, Artificial Sequence
  ENSG00000143257_16 (sequence is synthesized)
aggaaagacagtgagttggccccctacatctcaagaatccattgactgcgtctgtctttgtccttgttcccaacagtgcattctctacatagcaggcacagtactctttttgaaactagt

SEQ ID NO: 377763 - DNA, 120 bp, Artificial Sequence
  ENSG00000143257_17 (sequence is synthesized)
tggattatgtcactattcactcaagacatccaatggctccccatctcaaagtacgtgatctcatgatctagctctcccacaacacctttcagactttatttcatactcttccccctttac

SEQ ID NO: 377764 - DNA, 83 bp, Artificial Sequence
  ENSG00000143257_18 (sequence is synthesized)
aacacctttcagactttatttcatactcttccccctttactcaaccaattctagccacactgacttcactgtcattcttagaa

SEQ ID NO: 377765 - DNA, 120 bp, Artificial Sequence
  ENSG00000143257_19 (sequence is synthesized)
gcgaaggccccgggatcgctcacctggaacaccctggatacactggagtgggaaaatgctgggaccaaagattgggccgggttcaaagggagcccagtggttgcaatgaaagactaaagc

SEQ ID NO: 377766 - DNA, 120 bp, Artificial Sequence
  ENSG00000143257_20 (sequence is synthesized)
gccccgggatcggtacggtgggacactgagggcttggaggccacaccagggcaggaaggggttggtgaaacattgagcttgggaggaatgtttttttactgtcctttccttagggaattc

SEQ ID NO: 377767 - DNA, 120 bp, Artificial Sequence
  ENSG00000143257_21 (sequence is synthesized)
aggtatcgtggggtctagtccttccccctggccatccctgtctcacatcgtttcagcatccaaattgctgtatttggatactgctgtttcatctcactttttccagattttttttttatt

SEQ ID NO: 377768 - DNA, 120 bp, Artificial Sequence
  ENSG00000143257_22 (sequence is synthesized)
cagtacagatgcaaagtagtagctcagaggctctgggtaatagcattcctgagattgatgacatccattacctcactagtccaacttctccagactaacgcagacttttctcttcccttg

SEQ ID NO: 377769 - DNA, 120 bp, Artificial Sequence
  ENSG00000143257_23 (sequence is synthesized)
gcctttcctctcctcgccattgggccaattccttcgatttctcatttcccttgaagttagggccattcacagtttcatggtcaaagccagttccaggttcaatagtctgtgatttatcca

SEQ ID NO: 377770 - DNA, 120 bp, Artificial Sequence
  ENSG00000143258_0 (sequence is synthesized)
gagacggtgaagccggtggccggtggccgggcgggaccaacaaagatggcggcggcccctgcggcgggagcgatctgggcaacggctgcggctaaagctgcagccgggcccacggggggg

SEQ ID NO: 377771 - DNA, 120 bp, Artificial Sequence
  ENSG00000143258_1 (sequence is synthesized)
ctgcacgggggtagtagggggtggccctgaactggggcctggccctggctggcctctcccgccgcctcactgggggacaggtccagcctgtggtgtccacaatgccccaggcctctgagc

SEQ ID NO: 377772 - DNA, 120 bp, Artificial Sequence
  ENSG00000143258_2 (sequence is synthesized)
accgcctgggccgtacccgagagccacctgttaatatccagccccgagtgggatccaagctaccatttgcccccagggcccgcagcaaggagcgcagaaacccagcctctgggccaaacc

SEQ ID NO: 377773 - DNA, 120 bp, Artificial Sequence
  ENSG00000143258_3 (sequence is synthesized)
ccatgttacgacctctgcctccccggccaggtctgcctgatgaacggctcaagaaactggagctgggacggggacggacctcaggccctcgtcccagaggcccccttcgagcagatcatg

SEQ ID NO: 377774 - DNA, 120 bp, Artificial Sequence
  ENSG00000143258_4 (sequence is synthesized)
gggttcccctgcctggctcaccacccccaacagtggctttgcctctcccatctcggaccaacttagcccgttccaagtctgtgagcagtggggacttgcgtccaatggggattgccttgg

SEQ ID NO: 377775 - DNA, 120 bp, Artificial Sequence
  ENSG00000143258_5 (sequence is synthesized)
gagggcaccgtggcaccggagagcttggggctgcactgagccgcttggccctccggcctgagccacccactttgagacgtagcacttctctccgccgcctagggggctttcctggacccc

SEQ ID NO: 377776 - DNA, 120 bp, Artificial Sequence
  ENSG00000143258_6 (sequence is synthesized)
ctaccctgttcagcatacggacagagccccctgcttcccatggctccttccacatgatatccgcccggtcctctgagcctttctactctgatgacaagatggctcatcacacactccttc

SEQ ID NO: 377777 - DNA, 120 bp, Artificial Sequence
  ENSG00000143258_7 (sequence is synthesized)
tgggctctggtcatgttggccttcgaaacctgggaaacacgtgcttcctgaatgctgtgctgcagtgtctgagcagcactcgacctcttcgggacttctgtctgagaagggacttccggc

SEQ ID NO: 377778 - DNA, 120 bp, Artificial Sequence
  ENSG00000143258_8 (sequence is synthesized)
aagaggtgcctggaggaggccgagcccaagagctcactgaagcctttgcagatgtgattggtgccctctggcaccctgactcctgcgaagctgtgaatcctactcgattccgagctgtct

SEQ ID NO: 377779 - DNA, 120 bp, Artificial Sequence
  ENSG00000143258_9 (sequence is synthesized)
cagcaggatgcccaagagttcctgaagctcctcatggagcggctacaccttgaaatcaaccgccgaggccgccgggctccaccgatacttgccaatggtccagttccctctccaccccgc

SEQ ID NO: 377780 - DNA, 120 bp, Artificial Sequence
  ENSG00000143258_10 (sequence is synthesized)
cgaggaggggctctgctagaagaacctgagttaagtgatgatgaccgagccaacctaatgtggaaacgttacctggagcgagaggacagcaagattgtggacctgtttgtgggccagttg

SEQ ID NO: 377781 - DNA, 120 bp, Artificial Sequence
  ENSG00000143258_11 (sequence is synthesized)
aaaagttgtctcaagtgccaggcctgtgggtatcgctccacgaccttcgaggttttttgtgacctgtccctgcccatccccaagaaaggatttgctgggggcaaggtgtctctgcgggat

SEQ ID NO: 377782 - DNA, 120 bp, Artificial Sequence
  ENSG00000143258_12 (sequence is synthesized)
tgtttcaaccttttcactaaggaagaagagctagagtcggagaatgccccagtgtgtgaccgatgtcggcagaaaactcgaagtaccaaaaagttgacagtacaaagattccctcgaatc

SEQ ID NO: 377783 - DNA, 120 bp, Artificial Sequence
  ENSG00000143258_13 (sequence is synthesized)
ctcgtgctccatctgaatcgattttctgcctcccgaggctccatcaaaaaaagttcagtaggtgtagactttccactgcagcgactgagcctaggggactttgccagtgacaaagccgga

SEQ ID NO: 377784 - DNA, 120 bp, Artificial Sequence
  ENSG00000143258_14 (sequence is synthesized)
agtcctgtataccagctgtatgccctttgcaaccactcaggcagcgtccactatggccactacacagccctgtgccggtgccagactggttggcatgtctacaatgactctcgtgtctcc

SEQ ID NO: 377785 - DNA, 120 bp, Artificial Sequence
  ENSG00000143258_15 (sequence is synthesized)
cctgtcagtgaaaaccaggtggcatccagcgagggctacgtgctgttctaccaactgatgcaggagccaccccggtgcctgtgacacctctaagctctggcacctgtgaagccctttaaa

SEQ ID NO: 377786 - DNA, 120 bp, Artificial Sequence
  ENSG00000143258_16 (sequence is synthesized)
cacccttaagccccaggctccccgtttacctcagagacgtctatttttgtgtctttttaatcggggaggggggagggggtggttgtagctccattattttttttattaaaaaataccctt

SEQ ID NO: 377787 - DNA, 120 bp, Artificial Sequence
  ENSG00000143258_17 (sequence is synthesized)
ccacctggaggctcccttgtctcccagccccatgtacaaagctcaccaagcccctgcccatgtacagcccccagaccctctgcaatatcactttttgtgaataaatttattaagaaaaaa

SEQ ID NO: 377788 - DNA, 120 bp, Artificial Sequence
  ENSG00000143258_18 (sequence is synthesized)
tccccactttcgttgatgtggtagtggtgatgactgagccaaccacctaatgtggaaatgagaggacagcaagattgtgggtccagcctgtggtgtccacaatgccccaggcctctgagc

SEQ ID NO: 377789 - DNA, 120 bp, Artificial Sequence
  ENSG00000143258_19 (sequence is synthesized)
tggacatgcctctcccttgcttaaatacccttgagcctcctagacccttttttgggttgttggtgactcttcagcatggtgtgccatttcggtccccaggggattaccccaactatttag

SEQ ID NO: 377790 - DNA, 120 bp, Artificial Sequence
  ENSG00000143258_20 (sequence is synthesized)
aattcttctttgggtccccaggcccttcctttcccttgcttgcaccttctctactgggactctgcctaggcctaattaatctctggagctaaagagaggcaggcacagaacatcttagca

SEQ ID NO: 377791 - DNA, 120 bp, Artificial Sequence
  ENSG00000143258_21 (sequence is synthesized)
aacgtggttgcacattttctgagctaagtaagctaggctgattgcaattggagccagcaggagaagggcaagaaggggccacgggggcaggagggggttttgggggcagaaaggtgggag

SEQ ID NO: 377792 - DNA, 120 bp, Artificial Sequence
  ENSG00000143258_22 (sequence is synthesized)
tggtgagcagctgggcaaccatgccggtgctgggggagttgccccaggagctgcaacgtcagctagctgagcagaggagtaagtgggcaacaggtgggacagccatggctgagtccgtgg

SEQ ID NO: 377793 - DNA, 120 bp, Artificial Sequence
  ENSG00000143258_23 (sequence is synthesized)
tacattcagctgtgatgggcttactgctcatgaccagtgaggtagggagactagaatacctagtgaggggaatagggtagagtttggggatgaaacatgcatgggatgggggaggcagtg

SEQ ID NO: 377794 - DNA, 120 bp, Artificial Sequence
  ENSG00000143258_24 (sequence is synthesized)
gggtggacaggacaggggctctgtgacccaagcctacccacccccagagtgtgggcgggaaccctgtgggtttctggagcagaactgaagcctggattgattgagaagagttggaaaagg

SEQ ID NO: 377795 - DNA, 120 bp, Artificial Sequence
  ENSG00000143258_25 (sequence is synthesized)
aaattcagaacatgttgacctttcttccccttttcccccagaaaggatttgctgggggcaaggtgtctctgcgggattgtttcaaccttttcactaaggaagaagagctagagtcggaga

SEQ ID NO: 377796 - DNA, 120 bp, Artificial Sequence
  ENSG00000143258_26 (sequence is synthesized)
atgccccagtatgtggaggttcacaagggatacagtaagggtgggagacctggggggactccatgtggataaaagggattgcatgatgtcttcatatggggaataatatttatgtatctg

SEQ ID NO: 377797 - DNA, 120 bp, Artificial Sequence
  ENSG00000143258_27 (sequence is synthesized)
ggtttgtgttggagtctcagatctgttctagtactcctagagcaaaggggagaagccaagaggatccagctgtaatgaagagcatactaaatttgtatgtggatcggggtgtcagaaaag

SEQ ID NO: 377798 - DNA, 120 bp, Artificial Sequence
  ENSG00000143258_28 (sequence is synthesized)
gaaaagtctgccacccacttttccacaagatgctcccagtgtgtcgggagtggggagaggacagctttcaggatagaagaagttcccctcagaggcccactgcctcccaaatgctcctta

SEQ ID NO: 377799 - DNA, 120 bp, Artificial Sequence
  ENSG00000143258_29 (sequence is synthesized)
ccctggctggcctctcccgccgcctcactgggggacagatactaagtatttactttgtaccaaacacgatgccaggtactggggatacgatggctgattcgatagatctggttcctgccc

SEQ ID NO: 377800 - DNA, 120 bp, Artificial Sequence
  ENSG00000143278_0 (sequence is synthesized)
agtgcttagaattgttaaaatctttgtgaagcacaccactgaagatgaggttgaaaaacctgacttttatcatcatattgataatctcaggagaactctatgcagaagagaaaccctgtg

SEQ ID NO: 377801 - DNA, 120 bp, Artificial Sequence
  ENSG00000143278_1 (sequence is synthesized)
gttttcctcatgtggaaaatggaagaattgcccaatattactatacttttaaaagcttttactttccaatgagcatagacaaaaaattgtcatttttctgcttggctggttataccactg

SEQ ID NO: 377802 - DNA, 120 bp, Artificial Sequence
  ENSG00000143278_2 (sequence is synthesized)
aaagtggaagacaagaagagcaaaccacgtgtacaacagaaggctggtctccagagccaaggtgcttcaaaaaatgcactaagcctgacctgagtaatggttacatctctgatgtaaagt

SEQ ID NO: 377803 - DNA, 120 bp, Artificial Sequence
  ENSG00000143278_3 (sequence is synthesized)
tattgtataaaattcaagagaacatgcgttatggttgcgcttcagggtacaaaaccactggagggaaggatgaagaagtggttcaatgtctctctgatggatggtcttctcaaccaacct

SEQ ID NO: 377804 - DNA, 120 bp, Artificial Sequence
  ENSG00000143278_4 (sequence is synthesized)
gtaggaaagaacatgaaacatgtttggctcctgaattatataatggaaattattccacaacacagaaaacattcaaagtgaaggacaaagtacaatacgaatgtgctactggctactaca

SEQ ID NO: 377805 - DNA, 120 bp, Artificial Sequence
  ENSG00000143278_5 (sequence is synthesized)
cagctggaggaaagaagacagaggaggtagaatgtctcacatacggatggtctctcacaccaaaatgtaccaaattaaagtgctcttctttaagattaattgaaaatggttattttcatc

SEQ ID NO: 377806 - DNA, 120 bp, Artificial Sequence
  ENSG00000143278_6 (sequence is synthesized)
ctgtaaagcaaacctatgaagaaggagatgtcgttcagtttttctgtcatgaaaattattatctaagtggatctgatttaattcaatgctataactttggttggtacccagaatctcctg

SEQ ID NO: 377807 - DNA, 120 bp, Artificial Sequence
  ENSG00000143278_7 (sequence is synthesized)
tatgcgaaggaagaagaaacagatgtcctcctccacctctgcccataaactccaaaattcaaacacattcaacaacttatcgtcatggagaaatagttcatatagaatgtgaacttaatt

SEQ ID NO: 377808 - DNA, 120 bp, Artificial Sequence
  ENSG00000143278_8 (sequence is synthesized)
ttgagatccatgggtcagcagaaatacgttgtgaagatggaaaatggacagaacctccaaaatgcattgaaggacaggagaaggtagcctgtgaggaaccacccttcattgaaaatggtg

SEQ ID NO: 377809 - DNA, 120 bp, Artificial Sequence
  ENSG00000143278_9 (sequence is synthesized)
aaagcggctaccttctccatggatcgaatgagataacttgtaatcgtggaaaatggacacttcctcctgagtgtgttgaaaataatgagaattgtaagcatcctcctgttgtaatgaatg

SEQ ID NO: 377810 - DNA, 120 bp, Artificial Sequence
  ENSG00000143278_10 (sequence is synthesized)
gggctgttgcagacgggatattggcaagctatgcaacaggatcctcagtggaatatagatgcaatgaatattacttactgaggggatcaaaaatatctcgttgcgaacaaggaaaatggt

SEQ ID NO: 377811 - DNA, 120 bp, Artificial Sequence
  ENSG00000143278_11 (sequence is synthesized)
catccccacctgtttgcttggaaccatgtactgttaatgtggattacatgaacagaaataacatagaaatgaagtggaaatatgaagggaaagtcttacatggagatttaatagattttg

SEQ ID NO: 377812 - DNA, 120 bp, Artificial Sequence
  ENSG00000143278_12 (sequence is synthesized)
tatgtaaacagggatatgacttatctccattaaccccattgtctgaattatctgtgcagtgcaacagaggagaagtgaaatatcctttatgtactagaaaagaatctaaaggaatgtgca

SEQ ID NO: 377813 - DNA, 120 bp, Artificial Sequence
  ENSG00000143278_13 (sequence is synthesized)
catctcctcctcttattaaacatggagtcattattagttcaacagtagacacctatgaaaatggctcttcagtagaatacagatgttttgatcaccatttcctagaaggatctagggagg

SEQ ID NO: 377814 - DNA, 120 bp, Artificial Sequence
  ENSG00000143278_14 (sequence is synthesized)
cctattgtttagatggaatgtggactacaccaccattgtgtttagagccatgcacattatcttttactgaaatggaaaagaataatttacttctgaaatgggattttgacaatagaccac

SEQ ID NO: 377815 - DNA, 120 bp, Artificial Sequence
  ENSG00000143278_15 (sequence is synthesized)
acattttgcatggtgaatatattgagtttatttgtagaggagatacttatccagctgaattatatattactggatctatacttagaatgcaatgtgacagagggcagttaaaatatccaa

SEQ ID NO: 377816 - DNA, 120 bp, Artificial Sequence
  ENSG00000143278_16 (sequence is synthesized)
gatgtattccaagacaaagcactctgtcttatcaagaacccttaagaacatagaaatgaatggcagaaagaggagtcatatttcaatacatcatgaaattccttataaaatataattttg

SEQ ID NO: 377817 - DNA, 120 bp, Artificial Sequence
  ENSG00000143278_17 (sequence is synthesized)
aggaaataagttaaaaacttcggagtttttccttgcttaaatatttgaatctaaattatttgtgctgaacatttcgttatttataaatgaaaaccaataaatgtctaatttttagtttgt

SEQ ID NO: 377818 - DNA, 120 bp, Artificial Sequence
  ENSG00000143278_18 (sequence is synthesized)
tgactagactatatagttgttttcaatatactgtatgtgcaaaaatttcacattcacattcgtcatcatctttattaatattaaggcttttgttacccttaattcaaagtttatgtcact

SEQ ID NO: 377819 - DNA, 120 bp, Artificial Sequence
  ENSG00000143278_19 (sequence is synthesized)
attaaagggccaaacacactagagataagaaactatatgctgtattagaggatctgccttattaaaggcagaagagactgcccttcagactttctaaatgtaaaaaacttttaaaattaa

SEQ ID NO: 377820 - DNA, 120 bp, Artificial Sequence
  ENSG00000143278_20 (sequence is synthesized)
ctgtaatatttgctacaacgttaataaccaaattgtttatgaggtggtgtactaccatatttgaacatgtgctcaaatattgttaaagagacacaattaaagaaagaatgacccttggaa

SEQ ID NO: 377821 - DNA, 120 bp, Artificial Sequence
  ENSG00000143278_21 (sequence is synthesized)
gacaaagcaaacaaacaactggaagtggtaatcaattcaacaggccttctgaattgtctgaagtgaaagcaacgtttgccatttgatatttgtgacactttggcaaatggaaaaataaac

SEQ ID NO: 377822 - DNA, 120 bp, Artificial Sequence
  ENSG00000143278_22 (sequence is synthesized)
caatttatacgtgcaatatttcaatgtgcaaaaattaacctatatgttctgtgataaggacaaaaatcacactttctcctacttctcaatataagttcaagcactactaataaaggttgg

SEQ ID NO: 377823 - DNA, 120 bp, Artificial Sequence
  ENSG00000143294_0 (sequence is synthesized)
ggccattagctgtgtgtagttgcccgggactaggagcttaagtgaagaggtacgccttgttcggtggaaatcagccgtagccatgagtttctgccggggctagccctagagtacggagca

SEQ ID NO: 377824 - DNA, 120 bp, Artificial Sequence
  ENSG00000143294_1 (sequence is synthesized)
ggcggacttttcggttccccgccccgccaggtggcggggcctactaggcctccgggcatccccggtctcaagtaggcctcatctgccggcaagggcgcccgaaacgcgggaggcgccatg

SEQ ID NO: 377825 - DNA, 120 bp, Artificial Sequence
  ENSG00000143294_2 (sequence is synthesized)
tcgctggttgcttacgccagcagcgatgagagcgagccggatgaggctgagcccgagccggaggaagaggaggcggtggctcctacatctgggcccgctttagggggcttgttcgcttct

SEQ ID NO: 377826 - DNA, 120 bp, Artificial Sequence
  ENSG00000143294_3 (sequence is synthesized)
ctccctgcgcccaagggtccggccttgctgcctccgccccctcagatgctggcgccagcctttcccccgccgctgttgcttcccccacccaccggagaccccaggcttcagcctcctccc

SEQ ID NO: 377827 - DNA, 120 bp, Artificial Sequence
  ENSG00000143294_4 (sequence is synthesized)
cccttgcccttcggcctgggaggcttccccccacctccaggcgtgagcccggctgaagcggcgggagttggggagggactgggattggggttgccctcgccccgaggccctggcctcaat

SEQ ID NO: 377828 - DNA, 120 bp, Artificial Sequence
  ENSG00000143294_5 (sequence is synthesized)
ctgccccctccaattggcggtgccggtcccccgctggggcttcccaagccaaagaagaggaaagagcccgtgaagatcgcggcgccggagttgcataagggagattcagattctgaggaa

SEQ ID NO: 377829 - DNA, 120 bp, Artificial Sequence
  ENSG00000143294_6 (sequence is synthesized)
gatgaacccacaaagaagaaaactatccttcagggatccagtgaggggactggtttgtctgccttgcttccccaacctaaaaacctgactgtgaaagagactaacaggttgctcctgccc

SEQ ID NO: 377830 - DNA, 120 bp, Artificial Sequence
  ENSG00000143294_7 (sequence is synthesized)
catgccttctcccgcaaaccctcggatggctcccctgatactaagccctccagactggcttctaagaccaagacttcctctcttgcccctgttgtgggcaccacaaccaccactccgtcg

SEQ ID NO: 377831 - DNA, 120 bp, Artificial Sequence
  ENSG00000143294_8 (sequence is synthesized)
gtgctgccctgcaggtgacaaagcagatcacgcaggaagaagacgacagtgatgaggaagtagcccccgaaaactttttctccctccctgaaaaggctgagccacctggagttgagccat

SEQ ID NO: 377832 - DNA, 120 bp, Artificial Sequence
  ENSG00000143294_9 (sequence is synthesized)
acccttaccccatccccactgtccctgaagagctgcctccaggcacggaaccagagccggctttccaggacgatgcagccaatgccccccttgaattcaagatggcagcaggttcaagtg

SEQ ID NO: 377833 - DNA, 120 bp, Artificial Sequence
  ENSG00000143294_10 (sequence is synthesized)
gggccccttggatgcctaagcctggggacgactacagctacaatcagttttccacatatggcgatgccaatgccgctggtgcttattatcaggattattacagtggtggctactatcctg

SEQ ID NO: 377834 - DNA, 120 bp, Artificial Sequence
  ENSG00000143294_11 (sequence is synthesized)
cacaggacccggccctggtccccccccaggaaattgccccagatgcctccttcatcgatgacgaagcatttaagcggctgcagggcaagaggaaccgagggagagaagaaatcaactttg

SEQ ID NO: 377835 - DNA, 120 bp, Artificial Sequence
  ENSG00000143294_12 (sequence is synthesized)
tggagatcaaaggtgatgaccagctcagtggggcccagcaatggatgactaagtcattgacagaagagaaaaccatgaagtcattcagcaaaaagaaaggtgagcagccaacaggccagc

SEQ ID NO: 377836 - DNA, 120 bp, Artificial Sequence
  ENSG00000143294_13 (sequence is synthesized)
agcggcggaaacaccagatcacatatcttattcatcaggccaaggagcgggagctggaactgaagaacacctggtcagagaacaagctcagccgccgtcagacccaagccaaatatggat

SEQ ID NO: 377837 - DNA, 120 bp, Artificial Sequence
  ENSG00000143294_14 (sequence is synthesized)
tctagggctctggaactgattgctcccaggatctcctgccagcccagctggcctggcccccagcttcacctctgggaccccagctgctctaagcccaggatctctttccccaaggaccca

SEQ ID NO: 377838 - DNA, 120 bp, Artificial Sequence
  ENSG00000143294_15 (sequence is synthesized)
gccctcgcctctgcgagaatgaacatatttgatagatttttcttaacaagttagaaaattcagctcctttctgtcctggagctagcaaagacttgtgtgatgcctccgaaggggctctga

SEQ ID NO: 377839 - DNA, 120 bp, Artificial Sequence
  ENSG00000143294_16 (sequence is synthesized)
gttctggggtgggagttttgctctctgtcaggtgtgataaaatgttgaaccctccccaccaccacttttttttttttaaaccagggatgtctgttgaaataaaacattcagtctgacaaa

SEQ ID NO: 377840 - DNA, 120 bp, Artificial Sequence
  ENSG00000143294_17 (sequence is synthesized)
gatgaacatttcttcacctagtagctgagaacagcaaatgtggacatttatgagcctgccaccggaggggaaatgtgggaaaaccctggacttgagcccagcaccagcgagaccaaggtc

SEQ ID NO: 377841 - DNA, 120 bp, Artificial Sequence
  ENSG00000143294_18 (sequence is synthesized)
gaggattttgttcccttttcctccccccatttgctttgctttgttctatggccacagatggccacacaagccccagccgtttgttttaactgaatgctggcggtcatacaggacagagca

SEQ ID NO: 377842 - DNA, 120 bp, Artificial Sequence
  ENSG00000143294_19 (sequence is synthesized)
aaggactgtggttagatcagcatagatccatcactgtttactggaaaaaccacttaggagagcatgctctaccaactgtgggtcgagaagcatagtcacatagtaatagctactgttgtt

SEQ ID NO: 377843 - DNA, 120 bp, Artificial Sequence
  ENSG00000143294_20 (sequence is synthesized)
aatgctcaccgtgggccaggaatggagctggatgttttatgtgtgtcatctttaactgtcacattaaatgacattaaatagcagcaagcaattagtatttgctattttcctatctccaag

SEQ ID NO: 377844 - DNA, 120 bp, Artificial Sequence
  ENSG00000143294_21 (sequence is synthesized)
ttttcttgccaccgtctcattatattgaactagattttgttaaaaggagaaaaagatatggtccttgtccttgaggagttgacagcatagttgggaagaagagatttaaggacacttgag

SEQ ID NO: 377845 - DNA, 120 bp, Artificial Sequence
  ENSG00000143294_22 (sequence is synthesized)
tgtaaatgattacagtacagattgatgacataagtgctgaggagactctagagaggagttttgggagttgggtggagatgattaggaagcttctagtctgagacaactctggcagaggac

SEQ ID NO: 377846 - DNA, 120 bp, Artificial Sequence
  ENSG00000143294_23 (sequence is synthesized)
agaaaaaccgcagaatgaaagcccagaccaatatagactttgacagtaaatcatttgcatcgaagtttggttacgggttcagtgcagttacgggcggaggctggaagactggggagaggt

SEQ ID NO: 377847 - DNA, 120 bp, Artificial Sequence
  ENSG00000143294_24 (sequence is synthesized)
agagtgattgtgaaatttctaattccagggaagctgctggcacttactagaatggggaaggcaggggttttagccagaggtgattgatgggagcgagcttgataagcagtaggtgggaga

SEQ ID NO: 377848 - DNA, 120 bp, Artificial Sequence
  ENSG00000143294_25 (sequence is synthesized)
agtttgaagggagatgggcacagggattgtgggagggcctggcaggggggcagaaggtcacctgtgccctggcccacaaactgtttcagactgactgcacgcagttaaactggtctcaga

SEQ ID NO: 377849 - DNA, 120 bp, Artificial Sequence
  ENSG00000143294_26 (sequence is synthesized)
tgtccacagcagacagaaccccatgctgggtgctaggggtggggtgggattaccaaagacgcagaagacagtcctgacctcaaagcatttccagtctagtgggggatattagcaggctat

SEQ ID NO: 377850 - DNA, 120 bp, Artificial Sequence
  ENSG00000143294_27 (sequence is synthesized)
ttcaggcaagtgttctgagctgggttttttgtataatggctttaataaaaataaaggctttgtagtatatagaggtaaaaacagctccaacttttctcccccaggatttgggctgtggaa

SEQ ID NO: 377851 - DNA, 120 bp, Artificial Sequence
  ENSG00000143294_28 (sequence is synthesized)
ttggcttctcagcccctaacaccacaccatctgggcacatgagaaacttctgctttcatcctgtggattaatgaatatgttttcttctcttgcagaagaaaggtgagcagccaacaggcc

SEQ ID NO: 377852 - DNA, 120 bp, Artificial Sequence
  ENSG00000143294_29 (sequence is synthesized)
gtgagagtctctcttaggaagtagctgagggagcaaggtatagattgaagcaggagagactgtctttgtttcttgttaccctttcctaaaaaatatccatctgtctggatagtgtagatg

SEQ ID NO: 377853 - DNA, 120 bp, Artificial Sequence
  ENSG00000143294_30 (sequence is synthesized)
agaaaagctgtagggactgttcttgagttgtaggtcggtccttgggatctatgcctttaactggtctgtttgaggaagctgtagtatagctatctcaccattgcctctttgatgacaatt

SEQ ID NO: 377854 - DNA, 120 bp, Artificial Sequence
  ENSG00000143294_31 (sequence is synthesized)
ggacttcctaataccacaagggaatctgccacctcaatcctaaatttgagttggcagcatatggaggaatatttctgtggagctgagggctgatgggttctgacggataatttccaagcc

SEQ ID NO: 377855 - DNA, 120 bp, Artificial Sequence
  ENSG00000143297_0 (sequence is synthesized)
actaatgcattctgctctttttgagagcacagcttctcagatgtgctccttggagctggtgtgcagtgtcctgactgtaagatcaagtccaaacctgttttggaattgaggaaacttctc

SEQ ID NO: 377856 - DNA, 120 bp, Artificial Sequence
  ENSG00000143297_1 (sequence is synthesized)
ttttgatctcagcccttggtggtccaggtcttcatgctgctgtgggtgatattactggtcctggctcctgtcagtggacagtttgcaaggacacccaggcccattattttcctccagcct

SEQ ID NO: 377857 - DNA, 120 bp, Artificial Sequence
  ENSG00000143297_2 (sequence is synthesized)
ccatggaccacagtcttccaaggagagagagtgaccctcacttgcaagggatttcgcttctactcaccacagaaaacaaaatggtaccatcggtaccttgggaaagaaatactaagagaa

SEQ ID NO: 377858 - DNA, 120 bp, Artificial Sequence
  ENSG00000143297_3 (sequence is synthesized)
accccagacaatatccttgaggttcaggaatctggagagtacagatgccaggcccagggctcccctctcagtagccctgtgcacttggatttttcttcagcttcgctgatcctgcaagct

SEQ ID NO: 377859 - DNA, 120 bp, Artificial Sequence
  ENSG00000143297_4 (sequence is synthesized)
ccactttctgtgtttgaaggagactctgtggttctgaggtgccgggcaaaggcggaagtaacactgaataatactatttacaagaatgataatgtcctggcattccttaataaaagaact

SEQ ID NO: 377860 - DNA, 120 bp, Artificial Sequence
  ENSG00000143297_5 (sequence is synthesized)
gacttccatattcctcatgcatgtctcaaggacaatggtgcatatcgctgtactggatataaggaaagttgttgccctgtttcttccaatacagtcaaaatccaagtccaagagccattt

SEQ ID NO: 377861 - DNA, 120 bp, Artificial Sequence
  ENSG00000143297_6 (sequence is synthesized)
acacgtccagtgctgagagccagctccttccagcccatcagcgggaacccagtgaccctgacctgtgagacccagctctctctagagaggtcagatgtcccgctccggttccgcttcttc

SEQ ID NO: 377862 - DNA, 120 bp, Artificial Sequence
  ENSG00000143297_7 (sequence is synthesized)
agagatgaccagaccctgggattaggctggagtctctccccgaatttccagattactgccatgtggagtaaagattcagggttctactggtgtaaggcagcaacaatgccttacagcgtc

SEQ ID NO: 377863 - DNA, 120 bp, Artificial Sequence
  ENSG00000143297_8 (sequence is synthesized)
atatctgacagcccgagatcctggatacaggtgcagatccctgcatctcatcctgtcctcactctcagccctgaaaaggctctgaattttgagggaaccaaggtgacacttcactgtgaa

SEQ ID NO: 377864 - DNA, 120 bp, Artificial Sequence
  ENSG00000143297_9 (sequence is synthesized)
acccaggaagattctctgcgcactttgtacaggttttatcatgagggtgtccccctgaggcacaagtcagtccgctgtgaaaggggagcatccatcagcttctcactgactacagagaat

SEQ ID NO: 377865 - DNA, 120 bp, Artificial Sequence
  ENSG00000143297_10 (sequence is synthesized)
tcagggaactactactgcacagctgacaatggccttggcgccaagcccagtaaggctgtgagcctctcagtcactgttcccgtgtctcatcctgtcctcaacctcagctctcctgaggac

SEQ ID NO: 377866 - DNA, 120 bp, Artificial Sequence
  ENSG00000143297_11 (sequence is synthesized)
ctgatttttgagggagccaaggtgacacttcactgtgaagcccagagaggttcactccccatcctgtaccagtttcatcatgagggtgctgccctggagcgtaggtcggccaactctgca

SEQ ID NO: 377867 - DNA, 120 bp, Artificial Sequence
  ENSG00000143297_12 (sequence is synthesized)
ggaggagtggccatcagcttctctctgactgcagagcattcagggaactactactgcacagctgacaatggctttggcccccagcgcagtaaggcggtgagcctctccgtcactgtccct

SEQ ID NO: 377868 - DNA, 120 bp, Artificial Sequence
  ENSG00000143297_13 (sequence is synthesized)
gtgtctcatcctgtcctcaccctcagctctgctgaggccctgacttttgaaggagccactgtgacacttcactgtgaagtccagagaggttccccacaaatcctataccagttttatcat

SEQ ID NO: 377869 - DNA, 120 bp, Artificial Sequence
  ENSG00000143297_14 (sequence is synthesized)
gaggacatgcccctgtggagcagctcaacaccctctgtgggaagagtgtccttcagcttctctctgactgaaggacattcagggaattactactgcacagctgacaatggctttggtccc

SEQ ID NO: 377870 - DNA, 120 bp, Artificial Sequence
  ENSG00000143297_15 (sequence is synthesized)
cagcgcagtgaagtggtgagcctttttgtcactgttccagtgtctcgccccatcctcaccctcagggttcccagggcccaggctgtggtgggggacctgctggagcttcactgtgaggcc

SEQ ID NO: 377871 - DNA, 120 bp, Artificial Sequence
  ENSG00000143297_16 (sequence is synthesized)
ccgagaggctctcccccaatcctgtactggttttatcatgaggatgtcaccctggggagcagctcagccccctctggaggagaagcttctttcaacctctctctgactgcagaacattct

SEQ ID NO: 377872 - DNA, 120 bp, Artificial Sequence
  ENSG00000143297_17 (sequence is synthesized)
ggaaactactcatgtgaggccaacaatggcctagtggcccagcacagtgacacaatatcactcagtgttatagttccagtatctcgtcccatcctcaccttcagggctcccagggcccag

SEQ ID NO: 377873 - DNA, 120 bp, Artificial Sequence
  ENSG00000143297_18 (sequence is synthesized)
gctgtggtgggggacctgctggagcttcactgtgaggccctgagaggctcctccccaatcctgtactggttttatcatgaagatgtcaccctgggtaagatctcagccccctctggagga

SEQ ID NO: 377874 - DNA, 120 bp, Artificial Sequence
  ENSG00000143297_19 (sequence is synthesized)
ggggcctccttcaacctctctctgactacagaacattctggaatctactcctgtgaggcagacaatggtctggaggcccagcgcagtgagatggtgacactgaaagttgcagttccggtg

SEQ ID NO: 377875 - DNA, 120 bp, Artificial Sequence
  ENSG00000143297_20 (sequence is synthesized)
tctcgcccggtcctcaccctcagggctcccgggacccatgctgcggtgggggacctgctggagcttcactgtgaggccctgagaggctctcccctgatcctgtaccggttttttcatgag

SEQ ID NO: 377876 - DNA, 120 bp, Artificial Sequence
  ENSG00000143297_21 (sequence is synthesized)
gatgtcaccctaggaaataggtcgtccccctctggaggagcgtccttaaacctctctctgactgcagagcactctggaaactactcctgtgaggccgacaatggcctcggggcccagcgc

SEQ ID NO: 377877 - DNA, 120 bp, Artificial Sequence
  ENSG00000143297_22 (sequence is synthesized)
ggggcactgctgctctactgctggctctcgagaaaagcagggagaaagcctgcctctgaccccgccaggagcccttcagactcggactcccaagagcccacctatcacaatgtaccagcc

SEQ ID NO: 377878 - DNA, 120 bp, Artificial Sequence
  ENSG00000143297_23 (sequence is synthesized)
tgggaagagctgcaaccagtgtacactaatgcaaatcctagaggagaaaatgtggtttactcagaagtacggatcatccaagagaaaaagaaacatgcagtggcctctgaccccaggcat

SEQ ID NO: 377879 - DNA, 120 bp, Artificial Sequence
  ENSG00000143297_24 (sequence is synthesized)
ctcaggaacaagggttcccctatcatctactctgaagttaaggtggcgtcaaccccggtttccggatccctgttcttggcttcctcagctcctcacagatgagtccacacgtctctccaa

SEQ ID NO: 377880 - DNA, 120 bp, Artificial Sequence
  ENSG00000143297_25 (sequence is synthesized)
ctgctgtttcagcctctgcaccccaaagttccccttgggggagaagcagcattgaagtgggaagatttaggctgccccagaccatatctactggcctttgtttcacatgtcctcattctc

SEQ ID NO: 377881 - DNA, 120 bp, Artificial Sequence
  ENSG00000143297_26 (sequence is synthesized)
agtctgaccagaatgcagggccctgctggactgtcacctgtttcccagttaaagccctgactggcaggttttttaatccagtggcaaggtgctcccactccagggcccagcacatctcct

SEQ ID NO: 377882 - DNA, 120 bp, Artificial Sequence
  ENSG00000143297_27 (sequence is synthesized)
ggattccttagtgggcttcagctgtggttgctgttctgagtactgctctcatcacacccccacagagggggtcttaccacacaaagggagagtgggccttcaggagatgccgggctggcc

SEQ ID NO: 377883 - DNA, 120 bp, Artificial Sequence
  ENSG00000143297_28 (sequence is synthesized)
taacagctcaggtgctcctaaactccgacacagagttcctgctttgggtggatgcatttctcaattgtcatcagcctggtggggctactgcagtgtgctgccaaatgggacagcacacag

SEQ ID NO: 377884 - DNA, 120 bp, Artificial Sequence
  ENSG00000143297_29 (sequence is synthesized)
cctgtgcacatgggacatgtgatgggtctccccacgggggctgcatttcacactcctccacctgtctcaaactctaaggtcggcacttgacaccaaggtaacttctctcctgctcatgtg

SEQ ID NO: 377885 - DNA, 120 bp, Artificial Sequence
  ENSG00000143297_30 (sequence is synthesized)
tcagtgtctacctgcccaagtaagtggctttcatacaccaagtcccaagttcttcccatcctaacagaagtaacccagcaagtcaaggccaggaggaccaggggtgcagacagaacacat

SEQ ID NO: 377886 - DNA, 120 bp, Artificial Sequence
  ENSG00000143297_31 (sequence is synthesized)
actggaacacaggaggtgctcaattactatttgactgactgactgaatgaatgaatgaatgaggaagaaaactgtgggtaatcaaactggcataaaatccagtgcactccctaggaaatc

SEQ ID NO: 377887 - DNA, 120 bp, Artificial Sequence
  ENSG00000143297_32 (sequence is synthesized)
cgggaggtattctggcttccctaagaaacaatggaagagaaggagcttggatgaggaaactgttcagcaagaggaagggcttctcacactttcatgtgcttgtggatcacctgaggatcc

SEQ ID NO: 377888 - DNA, 120 bp, Artificial Sequence
  ENSG00000143297_33 (sequence is synthesized)
tgtgaaaatacagatactgattcagtgggtctgcgtagagcctgagactgccattctaacatgttcccaggggatgctgatgctgctggccctgggactgcactgcatgcatgtgaagcc

SEQ ID NO: 377889 - DNA, 120 bp, Artificial Sequence
  ENSG00000143297_34 (sequence is synthesized)
ctataggtctcagcagaggcccatggagagggaatgtgtggctctggctgcccagggcccaactcggttcacacggatcgtgctgctccctggccagcctttggccacagcaccaccagc

SEQ ID NO: 377890 - DNA, 120 bp, Artificial Sequence
  ENSG00000143297_35 (sequence is synthesized)
tgctgttgctgagagagcttcttctctgtgacatgttggctttcatcagccaccctgggaagcggaaagtagctgccactatctttgtttccccacctcaggcctcacactttcccatga

SEQ ID NO: 377891 - DNA, 120 bp, Artificial Sequence
  ENSG00000143297_36 (sequence is synthesized)
aaagggtgaatgtatataacctgagccctctccattcagagttgttctcccatctctgagcaatgggatgttctgttccgcttttatgatatccatcacatcttatcttgatctttgctc

SEQ ID NO: 377892 - DNA, 120 bp, Artificial Sequence
  ENSG00000143297_37 (sequence is synthesized)
ccagtggattgtacagtgatgacttttaagccccacggccctgaaataaaatccttccaagggcattggaagctcactccacctgaaccatggcttttcatgcttccaagtgtcagggcc

SEQ ID NO: 377893 - DNA, 120 bp, Artificial Sequence
  ENSG00000143297_38 (sequence is synthesized)
ttgcccagatagacagggctggctctgctgccccaacctttcaaggaggaaaccagacacctgagacaggagcctgtatgcagcccagtgcagccttgcagaggacaaggctggaggcat

SEQ ID NO: 377894 - DNA, 120 bp, Artificial Sequence
  ENSG00000143297_39 (sequence is synthesized)
ttgtcatcactacagatatgcaactaaaatagacgtggagcaagagaaatgcattcccaccgaggccgcttttttaggcctagttgaaagtcaagaaggacagcagcaagcataggctca

SEQ ID NO: 377895 - DNA, 120 bp, Artificial Sequence
  ENSG00000143297_40 (sequence is synthesized)
ggattaaagaaaaaaatctgctcacagtctgttctggaggtcacatcaccaacaaagctcacgccctatgcagttctgagaaggtggaggcaccaggctcaaaagaggaaatttagaatt

SEQ ID NO: 377896 - DNA, 120 bp, Artificial Sequence
  ENSG00000143297_41 (sequence is synthesized)
tctcattgggagagtaaggtacccccatcccagaatgataactgcacagtggcagaacaaactccaccctaatgtgggtggaccccgtccagtctgttgaaggcctgaatgtaacaaaag

SEQ ID NO: 377897 - DNA, 120 bp, Artificial Sequence
  ENSG00000143297_42 (sequence is synthesized)
ggcttattcttcctcaagtaagggggaactcctgctttgggctgggacataagtttttctgctttcagacgcaaactgaaaaatggctcttcttgggtcttgagcttgctggcatatgga

SEQ ID NO: 377898 - DNA, 120 bp, Artificial Sequence
  ENSG00000143297_43 (sequence is synthesized)
ctgaaagaaactatgctattggatctcctggatctccagcttgctgactgcagatcttgagatatgtcagcctctacagtcacaagagctaattcattctaataaaccaatctttctgta

SEQ ID NO: 377899 - DNA, 120 bp, Artificial Sequence
  ENSG00000143297_44 (sequence is synthesized)
catcccagcacacttcctgcctgcagaacctccctgtgaaagtctcggatcctttgtggtatggttccaggaatctgatgtttcccagcagtcttcttgaagatgatcaaagcacctcac

SEQ ID NO: 377900 - DNA, 120 bp, Artificial Sequence
  ENSG00000143297_45 (sequence is synthesized)
taaaaatgcaaataagacttttttagaacataaactatattctgaactgaaattattacatgaaaatgaaaccaaagaattctgagcatatgtttctctgccgtagaaaggattaagctg

SEQ ID NO: 377901 - DNA, 120 bp, Artificial Sequence
  ENSG00000143297_46 (sequence is synthesized)
tttcttgtccggattcttctctcattgacttctaacaagcctctactcttgagtctctttcattactggggatgtaaatgttccttacatttccacattaaaaatcctatgttaacataa

SEQ ID NO: 377902 - DNA, 120 bp, Artificial Sequence
  ENSG00000143297_47 (sequence is synthesized)
atataccttccagtatcctcagtttctttcttgggaaaacctaatgtcctcctccactctccggctcactgaaccagctgtctgcctcttgagtctcgttgcattgcagtctaggtgccc

SEQ ID NO: 377903 - DNA, 120 bp, Artificial Sequence
  ENSG00000143297_48 (sequence is synthesized)
ttatacccctgcctgatggtgcagtggctttctatcccctggttcccaatttctgagaagccaagtgcttttcttgtgctttccacttgtcctgtggctccccagatgactgattttcat

SEQ ID NO: 377904 - DNA, 120 bp, Artificial Sequence
  ENSG00000143297_49 (sequence is synthesized)
tcactatattattctcagtagacacagactcaatttccaggagcacagaggtatctcctgttctgttaatatcagacattaatcaataaaccaaaggcaaagacatgtaagacacaaaga

SEQ ID NO: 377905 - DNA, 120 bp, Artificial Sequence
  ENSG00000143297_50 (sequence is synthesized)
caagtcgctggatcatagttaacccagcatgtccttcttgctcaagccttttttagagttgatgggcagtaggtaagaaaggcacgggcaatggtgggctgggggcaggccaggagatag

SEQ ID NO: 377906 - DNA, 120 bp, Artificial Sequence
  ENSG00000143297_51 (sequence is synthesized)
cttcacctctacttgcttggcttaatgccctcagagctattcaggtagctgccaaatagttatgacatcaaaaaggtttcctttgagctttggatctcagtttcgaaccatccatgcatg

SEQ ID NO: 377907 - DNA, 120 bp, Artificial Sequence
  ENSG00000143297_52 (sequence is synthesized)
gctgaatgccaggtccaatgttgaaggagacagtgtgatttgggtctatactggtgacagagagtccagtcttggttggtcctggaagcggcatcagtttcctttcctgtaaaacaataa

SEQ ID NO: 377908 - DNA, 120 bp, Artificial Sequence
  ENSG00000143297_53 (sequence is synthesized)
taccagcttggaagacaagcaagaatccagtccctcccacatggatgtgtgagattataaaggagaggaccagggaacccagcgggagacatcaaatgacgtagaaagagaacagtgtcc

SEQ ID NO: 377909 - DNA, 120 bp, Artificial Sequence
  ENSG00000143297_54 (sequence is synthesized)
ctgacattcagtggcccaaagaaagtggagacagtgacatcatgatcaaacatgctcagagatgtttaaagtcctattcaatgactcacttcttcacctaataaatgctgattgcatata

SEQ ID NO: 377910 - DNA, 90 bp, Artificial Sequence
  ENSG00000143297_55 (sequence is synthesized)
atttctgtgttctctccttccattggtctaccctggtaactatagccttgtagtatcgttcaaagtcaggtaatgtgatgcctccagatt

SEQ ID NO: 377911 - DNA, 89 bp, Artificial Sequence
  ENSG00000143297_56 (sequence is synthesized)
tcttgctttggctatgtaggctcttttttttgttccatatgaatattaggattgttttttctagttctgtgaagaattgttatagattg

SEQ ID NO: 377912 - DNA, 120 bp, Artificial Sequence
  ENSG00000143297_57 (sequence is synthesized)
gtattttgatgggaattgcattgaagttatagattgcttttggtagatggccattttcacaatattgattctacccatccatgagaatgggatgtgtttccatttgattgtgtcatctgc

SEQ ID NO: 377913 - DNA, 120 bp, Artificial Sequence
  ENSG00000143297_58 (sequence is synthesized)
gatttcttacaccagtgttttgtagtttttcttatagatatctttcatttacttgtgaaggtgtatttctaagtattttatttttgtaggtgtcataaacaagtttgaattttttatttg

SEQ ID NO: 377914 - DNA, 75 bp, Artificial Sequence
  ENSG00000143297_59 (sequence is synthesized)
tttttgtaggtgtcataaacaagtttgaattttttatttgattctcagcttggtcactattggtgtatagcagtg

SEQ ID NO: 377915 - DNA, 81 bp, Artificial Sequence
  ENSG00000143297_60 (sequence is synthesized)
cctaggtatacaatcatgtcatcagtgaacagcaacaatttgacttcttcctctttaccaatttggatgtcctttatttct

SEQ ID NO: 377916 - DNA, 120 bp, Artificial Sequence
  ENSG00000143297_61 (sequence is synthesized)
ctccctcatttctataattctctgtcgcaaatgcatgttatttctgctgctgttatcacagctaaagggtttcttgcccagcctgaatgaattgtgtctgaatcctgaaactaggaccca

SEQ ID NO: 377917 - DNA, 120 bp, Artificial Sequence
  ENSG00000143297_62 (sequence is synthesized)
ggtcatagagaccaggagctgccagaaaaggaaatattatttcttattatcatcataaccagtgtcatcatcatcaacactcactgagccttcaccaggttccaggctctgtgctaaatg

SEQ ID NO: 377918 - DNA, 120 bp, Artificial Sequence
  ENSG00000143297_63 (sequence is synthesized)
tttaataggcaacatctcatttaattattaagataaacctgtgaggataaattttaagccatcgtatcccctatttgcggaaaagagactgaggtttagagaagtgaagtaactagcttg

SEQ ID NO: 377919 - DNA, 120 bp, Artificial Sequence
  ENSG00000143297_64 (sequence is synthesized)
cagacacacagctagccagggtaaagccaggttgaagcacagtcctctctaactcttcacattagtctgatacatgatgacattttctcatccgttgtggccacttttaacacaacattt

SEQ ID NO: 377920 - DNA, 120 bp, Artificial Sequence
  ENSG00000143297_65 (sequence is synthesized)
tagtttttagtaatttgttattctgaaagaacacatgaatgtttgtgatgaaaaaaatcaaataatacaaaagggccaatattgaaaagtaaaggtctctttctacctgctcatatcact

SEQ ID NO: 377921 - DNA, 120 bp, Artificial Sequence
  ENSG00000143297_66 (sequence is synthesized)
tcttacgcacatattctccagacataaccactgttaattgtttcatgtgtatgcttctagaaataatctacaaacctaaaggtagataatttttagaaagctagaataatattacacata

SEQ ID NO: 377922 - DNA, 120 bp, Artificial Sequence
  ENSG00000143297_67 (sequence is synthesized)
tagttatgccagttgcattttttaacttaaaatacatcctgacttttgtttaagaaatgcatcttggatatcattcatgtttcattacccaatccagtaggttgtctctaatttttagct

SEQ ID NO: 377923 - DNA, 120 bp, Artificial Sequence
  ENSG00000143297_68 (sequence is synthesized)
cttgtaaaaatgctacaatagaaattcttgtagaaatatattggcatattttatgtcagtatccctaaaggagatggccctagaagtaggacttgaactcctgggctcaagtaatcctcc

SEQ ID NO: 377924 - DNA, 120 bp, Artificial Sequence
  ENSG00000143297_69 (sequence is synthesized)
tgcctcatactcccaaatcgctgggattataggtgtgagccactacacctggcccactagaagcagatttgttgggtcaaagtttatgtgcactttaaattttgtagatattgccaagtt

SEQ ID NO: 377925 - DNA, 120 bp, Artificial Sequence
  ENSG00000143297_70 (sequence is synthesized)
gccattcaaggaagtgtgttaaatttgtattaccaccaagggcatatgtaggtgcctgtttatctacaagctaatcagtatgatcagtctatttaagctttgccaacctgaaaaatagaa

SEQ ID NO: 377926 - DNA, 120 bp, Artificial Sequence
  ENSG00000143297_71 (sequence is synthesized)
aaaagaatagtattgtatggttgtctttgtgtttagttaattagtaatgaagatgagaatctctgtatatatttattgtctatttgaagttttcagtgatttatacactttttacagttt

SEQ ID NO: 377927 - DNA, 120 bp, Artificial Sequence
  ENSG00000143297_72 (sequence is synthesized)
tctattggatatttttgtacactgaaaactattagcaggtcaaagtaattagctttatcatctatgttttaatctactttccaagattgagatatgactttttacatttgtttatgatac

SEQ ID NO: 377928 - DNA, 120 bp, Artificial Sequence
  ENSG00000143297_73 (sequence is synthesized)
ccacccctggctgagttctctctcacccattcctttaaaaatctgtttgcactgtccagtttcctcccctaatcaacttaatccccttcttggcttcctcctcaactaactagctggggt

SEQ ID NO: 377929 - DNA, 120 bp, Artificial Sequence
  ENSG00000143297_74 (sequence is synthesized)
tttccgtactcataagtcctggctcagccagacccctaaaacagctcagtagattccccagcttttaccaaatgaatttatttattgtattttctcctcattccttgtatgttccaacag

SEQ ID NO: 377930 - DNA, 120 bp, Artificial Sequence
  ENSG00000143297_75 (sequence is synthesized)
tacgccaatttttcttgatgcacggagcgtgtcctacttctctactgacatttacatattaacttagctacaagcacagtcttatagataaatattggtcaagaccttaaattctccaaa

SEQ ID NO: 377931 - DNA, 120 bp, Artificial Sequence
  ENSG00000143297_76 (sequence is synthesized)
cttgttttctaacctgctaaaatcagtatcattttattgtattattttaaaaaaactattgttgaagtatgacatacattcaagaaacgtgtgcaaattgtatgtgtacgatttggtgtc

SEQ ID NO: 377932 - DNA, 120 bp, Artificial Sequence
  ENSG00000143297_77 (sequence is synthesized)
tttttaggagctaagttgcttctgtttttacttgaatctttgtttatagaaactgggggaaagtttactttcttttcagagaagccaaatggtatgatagaaaaatcttgagcctgatgt

SEQ ID NO: 377933 - DNA, 120 bp, Artificial Sequence
  ENSG00000143297_78 (sequence is synthesized)
gtcagacatgcccctagcataacttgttgagtaaagaggttatttttaaaatgtgaatgttctgagactactccaaagtcagagccaaatctactaggaagcttctagacttcactcatt

SEQ ID NO: 377934 - DNA, 120 bp, Artificial Sequence
  ENSG00000143297_79 (sequence is synthesized)
ctgcatcccattactatctttttatccatgttttactttcttctcatattcagcagcatcttaagcctctttattttctgtttcttgactgtcacccttaatgccagtagaatgtaagct

SEQ ID NO: 377935 - DNA, 120 bp, Artificial Sequence
  ENSG00000143297_80 (sequence is synthesized)
tcatgagaacagaactgcatccatcttggtcttcacaacatccctgtgcctactcagtgtttggcacacagtaggtcctcagtcaacatttgtaatttagtggacagatgatatgacaag

SEQ ID NO: 377936 - DNA, 120 bp, Artificial Sequence
  ENSG00000143297_81 (sequence is synthesized)
atgataagaggggatttaaaaaaatcatctagcaaagcccaagaggaaaaaaaacaaagctattttagaaatgaaataccaatttgaagcagtaagaatagattggatatctttgaaaac

SEQ ID NO: 377937 - DNA, 120 bp, Artificial Sequence
  ENSG00000143297_82 (sequence is synthesized)
cattaattgaatgaagaaccaatttgagaaaacaatacagaatgcaaagtagaaagatacagaaataaaggcaaaaattataatatggaaatcagacaatggatttgtctgtatccagtt

SEQ ID NO: 377938 - DNA, 120 bp, Artificial Sequence
  ENSG00000143297_83 (sequence is synthesized)
atgtggataattaaaatggagaccctcagaaaattgaaccgaagagtaaaatgaaactcaaaaatgtagtagaaattgttgggaagtaaagaaaacttgaatatgtagatcagaacatat

SEQ ID NO: 377939 - DNA, 120 bp, Artificial Sequence
  ENSG00000143297_84 (sequence is synthesized)
atgttgatgacgttattgactttgaggttaaaaatatatatatgtgcctatgattatggggaaaaaagcagtcgtctcagaaagaaaaacatcaagttagtcttagactttgcagtgcac

SEQ ID NO: 377940 - DNA, 120 bp, Artificial Sequence
  ENSG00000143297_85 (sequence is synthesized)
tcaataccaaagagagaggaggtccagacttggacctgcgagggaagaataataaccgaaaattttatatcaattcaaaaagacattgtcaaaaatacagggattcaggaaactgagaat

SEQ ID NO: 377941 - DNA, 120 bp, Artificial Sequence
  ENSG00000143297_86 (sequence is synthesized)
gcactaagccttctggaaaaaacacctaatgacaaaatctagcccaacaagatgtaaatgaatataaaggactcataatgaggaaaccgcattatgactggctctcaaccctggctgcat

SEQ ID NO: 377942 - DNA, 120 bp, Artificial Sequence
  ENSG00000143297_87 (sequence is synthesized)
attagactcgtcaaagacctttgtaaaaggtcacacattgactcgtcaaagcccctctccagactaattcaattcagaatctcacagatggggccacagaatcagtattttttgacacaa

SEQ ID NO: 377943 - DNA, 120 bp, Artificial Sequence
  ENSG00000143297_88 (sequence is synthesized)
cctcaagtgagaatattgtgtagacaagattggaaaccactgatttagatatagaaacaaaggctaatcaactgtgagaattatggtcacagaatagaaagtaactattatgaacactga

SEQ ID NO: 377944 - DNA, 120 bp, Artificial Sequence
  ENSG00000143297_89 (sequence is synthesized)
aaatgtaaaaaaaatgtaacaaagaaaaatagttagaggaaggagaggaagtaaaggaacaatcattttctcatgattattattatttcagagtaaattgtgagttatttcacaattcaa

SEQ ID NO: 377945 - DNA, 120 bp, Artificial Sequence
  ENSG00000143297_90 (sequence is synthesized)
aaagaatggactgttttaaaaaattagtaatagatttcaaaatgtccattttgtaaatcgtttctgaatactttgtcaacagttactcatcattaatggcttatacttcactaaaattcc

SEQ ID NO: 377946 - DNA, 120 bp, Artificial Sequence
  ENSG00000143297_91 (sequence is synthesized)
atggaaaaccaactagtagcctgtagagtcacataggagagaacaagtgaattctttgggtggcgcaagcatagatgttaggactgacaaaaaaaaaataataaaaataaacctgtgcat

SEQ ID NO: 377947 - DNA, 120 bp, Artificial Sequence
  ENSG00000143297_92 (sequence is synthesized)
tgatatgatcacaaatgatcagggaaagaggaaacagaaactctcatacgccattattacaagcgtaaattggttcaaccttttcgtcttaattgacacattgtaattgtatatatttat

SEQ ID NO: 377948 - DNA, 120 bp, Artificial Sequence
  ENSG00000143297_93 (sequence is synthesized)
ggaagcacagtttgatattttgatatacatacatggtatataacgatcaaattaggatatttaatgtacccatcatctcatgcatttatcatttctttggaataaaaacattcaaaagcc

SEQ ID NO: 377949 - DNA, 120 bp, Artificial Sequence
  ENSG00000143297_94 (sequence is synthesized)
gagagggtctgtcagtgctgagaggctgagggagttgggaatggagagggactgggtgagcaccaactaagaggaatggctactcaccgcacagagggagagcgggcctccaggaggctc

SEQ ID NO: 377950 - DNA, 120 bp, Artificial Sequence
  ENSG00000143297_95 (sequence is synthesized)
cacttattggagcctccgtttgtttcagctaaaacgaggatgaaatagaactaacaacgtattgctgtaagcatcagcaccatgcctgttacacactagatgaccagaaagcctggaaac

SEQ ID NO: 377951 - DNA, 120 bp, Artificial Sequence
  ENSG00000143297_96 (sequence is synthesized)
ctgcagtaagaagtcactcactaggagtgatcattatagctactttgtctggattcctaagaaacattcacatttctctgtctcacaggagcccttcagactcggactcccaagagccca

SEQ ID NO: 377952 - DNA, 120 bp, Artificial Sequence
  ENSG00000143303_0 (sequence is synthesized)
ggtgcgcgccgacgaagcccgggaaggcaggcgcgcgggttagaacgcgccagaggtcggcgcgcgcacacccgcaccgccccgaccccaggtagtgaggccagtgattccgagtgtgtg

SEQ ID NO: 377953 - DNA, 120 bp, Artificial Sequence
  ENSG00000143303_1 (sequence is synthesized)
aggagcggcagtggcggcggaggagggggcggcgtgggtgggggcgggggcgggatgcgctccccggcccctctagccccgtggtggtacaacgcgaaggtgtgggaaggccgcgataaa

SEQ ID NO: 377954 - DNA, 120 bp, Artificial Sequence
  ENSG00000143303_2 (sequence is synthesized)
ccggaactgcagcccgccggacacctccggcttcacttccgtaagaggagaggagtgtacggcaaggggcgggaactggaacttggcccgcctcgttgtgagctgagctcagcggcacgc

SEQ ID NO: 377955 - DNA, 120 bp, Artificial Sequence
  ENSG00000143303_3 (sequence is synthesized)
ttttgtggcgtcactgcactgttaccccgccctacgtgtctctgacgctgacaccttctcactgtgaaacgtcgcgacctgtgacgtctggggggcgcctcaaatcttccactccagcat

SEQ ID NO: 377956 - DNA, 120 bp, Artificial Sequence
  ENSG00000143303_4 (sequence is synthesized)
cggatcccggaaaggcagcgtcggagactggacccaaaactcttcctgttctgcctgcagagttgagccccgtccgggtcctggacccgcgtagtactgaccctggatccctgttcactg

SEQ ID NO: 377957 - DNA, 120 bp, Artificial Sequence
  ENSG00000143303_5 (sequence is synthesized)
cgttctcgctccccgcgctccctgctggaccccgggatgccgggcatctccgcccgaggcctctctcatgaggggaggaagcagctagctgttaacctcacccgtgtcctggcactctac

SEQ ID NO: 377958 - DNA, 120 bp, Artificial Sequence
  ENSG00000143303_6 (sequence is synthesized)
cgttccatcttggatgcctacatcatcgaatttttcacagacaacctatgggacacactcccttgctcatggcaggaagcattggatggactgaaaccaccacagctggccacaatgctg

SEQ ID NO: 377959 - DNA, 120 bp, Artificial Sequence
  ENSG00000143303_7 (sequence is synthesized)
ctggggatgcctggggaaggggaggtcgtcaggtacaggtcagtgtggccactcaccctgctggccctgaagtccacggcgtgtgccctggcctttacccggatgcctggctttcagacc

SEQ ID NO: 377960 - DNA, 120 bp, Artificial Sequence
  ENSG00000143303_8 (sequence is synthesized)
ccctcagaattcctggagaaccccagccagagctcccgactaacagctccattccggaaacatgtcaggcccaagaagcagcatgagatccggaggctgggagagttggtgaagaagctg

SEQ ID NO: 377961 - DNA, 120 bp, Artificial Sequence
  ENSG00000143303_9 (sequence is synthesized)
cagagactggtggagagagcccagcgcctggaccaggagcttctgcaggctctggagaaagaggagaagaggaacccgcaggtggtccaaaccagccctcgtcactccccacaccacgtg

SEQ ID NO: 377962 - DNA, 120 bp, Artificial Sequence
  ENSG00000143303_10 (sequence is synthesized)
gttaggtgggtagaccccacagccctgtgtgaggagcttctgcttccactggagaacccgtgtcagggcagggcccgcttgctgctcacaggcctccacgcctgtggggatctgagtgtt

SEQ ID NO: 377963 - DNA, 120 bp, Artificial Sequence
  ENSG00000143303_11 (sequence is synthesized)
gccttgctgagacacttctcctgctgtcctgaggtggtggccctggcctcagtgggctgctgctacatgaagctgagtgaccctggcggctacccactgagtcagtgggtggctgggctg

SEQ ID NO: 377964 - DNA, 120 bp, Artificial Sequence
  ENSG00000143303_12 (sequence is synthesized)
cctggctatgaactgccctaccggcttcgggagggggcctgccatgccctggaggaatatgctgagcggctacagaaagctggccctggccttcgaactcactgctaccgtgcagcactg

SEQ ID NO: 377965 - DNA, 120 bp, Artificial Sequence
  ENSG00000143303_13 (sequence is synthesized)
gagacagtcatccgacgggcccggcccgagctccgtcggccaggcgtgcagggtatccccagggtccacgagctcaagattgaagaatatgtgcagcgggggctacagcgagtggggcta

SEQ ID NO: 377966 - DNA, 120 bp, Artificial Sequence
  ENSG00000143303_14 (sequence is synthesized)
gatccccagctgccactgaatctggctgcccttcaggcccacgtggcccaggagaaccgtgtggtggccttcttcagcctggctctactgcttgccccactggtggagacgcttattcta

SEQ ID NO: 377967 - DNA, 120 bp, Artificial Sequence
  ENSG00000143303_15 (sequence is synthesized)
ctggaccggctgctgtaccttcaggaacagggtttccatgctgagctcctgcccatcttcagtcctgaactctctcccagaaacctggttctggtggccaccaagatgcccctgggtcag

SEQ ID NO: 377968 - DNA, 120 bp, Artificial Sequence
  ENSG00000143303_16 (sequence is synthesized)
gctctttctgttctggagactgaagacagctgatgcagcctgaggaaacatctcagaccccatcatctgaaagtgcccagagagcacagtggcagagtacatctcatccagagaaacagc

SEQ ID NO: 377969 - DNA, 120 bp, Artificial Sequence
  ENSG00000143303_17 (sequence is synthesized)
atcctgcatcctccagagtcctggttccttcagtttcatcccctttctctccttccatggattatgtaatacattgtaaagttttaattaattaaaaattggatatctgtttccttccca

SEQ ID NO: 377970 - DNA, 120 bp, Artificial Sequence
  ENSG00000143303_18 (sequence is synthesized)
cccttcctgcgacctggactgcaggagcaggggctgcttggctggaattgagcacagaggctggattacatctttcaagtttctcagcttgaactggtgtggtccctaatttctattacc

SEQ ID NO: 377971 - DNA, 120 bp, Artificial Sequence
  ENSG00000143303_19 (sequence is synthesized)
aaaataaagcaaagttggaactgaattaggaacaagcaaagtttaagtgagaggtgacagttcttaaaaccaaactgagtgctgaatgtgactgatcccacagatatgtgcagcgggggc

SEQ ID NO: 377972 - DNA, 85 bp, Artificial Sequence
  ENSG00000143303_20 (sequence is synthesized)
aaaccccatctctagtaaaaatacaaaaagtagccgggtatggtggcgcacacctgtagtctcagctatttgggtggttgaggca

SEQ ID NO: 377973 - DNA, 74 bp, Artificial Sequence
  ENSG00000143303_21 (sequence is synthesized)
tattaagattcctaccaaatcagcctctggtgaacctctctaaggtgcatgttaagcaagcttcccaggcatcg

SEQ ID NO: 377974 - DNA, 120 bp, Artificial Sequence
  ENSG00000143303_22 (sequence is synthesized)
aatgcaagaggactgcctcccaagtcagtgccttgggaacccgtgttccttatggagaacggggtctccttagccccgctggatcctcccccatggggaaaagggactatgcctacaggc

SEQ ID NO: 377975 - DNA, 120 bp, Artificial Sequence
  ENSG00000143303_23 (sequence is synthesized)
aactcaaggctttaagccctgcagtgagcatattgctcagagagtctcataaggtcttcctgggcctcgggttgtaaactgctgcactcagatgtgatgggactattcactggaggcctc

SEQ ID NO: 377976 - DNA, 120 bp, Artificial Sequence
  ENSG00000143314_0 (sequence is synthesized)
atgtgctgaaaatccgaagtgccgcggaaagtggaggtgagggccgcccgccctagaggtgcccgtccgagaggcagagctgacaaggaaggtttcgagcgttttgctggcaaagggatt

SEQ ID NO: 377977 - DNA, 120 bp, Artificial Sequence
  ENSG00000143314_1 (sequence is synthesized)
tcttacaacctccaggcatgcgtctttctgccctgctggccttggcatccaaggtcactctgcccccccattaccgctatgggatgagccccccaggctctgttgcagacaagaggaaga

SEQ ID NO: 377978 - DNA, 120 bp, Artificial Sequence
  ENSG00000143314_2 (sequence is synthesized)
accccccatggatcaggcggcgcccagtggttgtggaacccatctctgatgaagactggtatctgttctgtggggacacggtggagatcctagaaggcaaggatgccgggaagcagggca

SEQ ID NO: 377979 - DNA, 120 bp, Artificial Sequence
  ENSG00000143314_3 (sequence is synthesized)
agggctgaacacacattaccgctacattggcaagaccatggattaccggggaaccatgatccctagtgaagcccccttgctccaccgccaggtcaaacttgtggatcctatggacaggaa

SEQ ID NO: 377980 - DNA, 120 bp, Artificial Sequence
  ENSG00000143314_4 (sequence is synthesized)
acccactgagatcgagtggagatttactgaagcaggagagcgggtacgagtctccacacgatcagggagaattatccctaaacccgaatttcccagagctgatggcatcgtccctgaaac

SEQ ID NO: 377981 - DNA, 120 bp, Artificial Sequence
  ENSG00000143314_5 (sequence is synthesized)
gtggattgatggccccaaagacacatcagtggaagatgctttagaaagaacctatgtgccctgtctaaagacactgcaggaggaggtgatggaggccatggggatcaaggagacccggaa

SEQ ID NO: 377982 - DNA, 120 bp, Artificial Sequence
  ENSG00000143314_6 (sequence is synthesized)
atacaagaaggtctattggtattgagcctggggcagagcagctcctccccaacttctgtcccagccttgaaggctgaggcacttctttttcagatgccaataaagagcactttatgagtc

SEQ ID NO: 377983 - DNA, 120 bp, Artificial Sequence
  ENSG00000143314_7 (sequence is synthesized)
agaaagtcgacgggcgtggcgggggaggggacgctgagggcccatgtgctgaaaatccgaagtgccgcggaaagtggagagctgacaaggaaggtttcgagcgttttgctggcaaaggga

SEQ ID NO: 377984 - DNA, 120 bp, Artificial Sequence
  ENSG00000143314_8 (sequence is synthesized)
cttgtctgtaaaagggactttacgatgcatctggcaacctcaccttcctcactgggcaatgtgaagaccaaatgccggcaatgaaattcccagcattaggtttgtcatatagtagtcctc

SEQ ID NO: 377985 - DNA, 120 bp, Artificial Sequence
  ENSG00000143314_9 (sequence is synthesized)
atgtgctgaaaatccgaagtgccgcggaaagtggaggtgagggccgcccgccctagaggtgcccgtccgagaggcaggtgcgggaagagcctatccttttccctggccatggctcagtcg

SEQ ID NO: 377986 - DNA, 120 bp, Artificial Sequence
  ENSG00000143314_10 (sequence is synthesized)
agatctgacattttgtaactagatcggctactagcattggaagggcccacgtttcatcccttcctctagaaagcctaccggcagtttttgaatctgccctgcccccactccagcagagaa

SEQ ID NO: 377987 - DNA, 120 bp, Artificial Sequence
  ENSG00000143314_11 (sequence is synthesized)
ggacagggagagcattggcggtagccctgtctggaaagggcggccctttgccttgaacaggaagccacaaccacctagaaaatggagccttcttctctagaaactacaattcccagcggc

SEQ ID NO: 377988 - DNA, 120 bp, Artificial Sequence
  ENSG00000143314_12 (sequence is synthesized)
ctccacgcagagcatgcgcgggaatgtgccaggcgggccagccgaaccagcttgcctttcgattcccgacatgcttcatggtgtgttccggtttccttgatttcctacccccgccaaact

SEQ ID NO: 377989 - DNA, 120 bp, Artificial Sequence
  ENSG00000143315_0 (sequence is synthesized)
ggaagcgagaccgtccatccagaggaaggcaagtttttggctcgggcggctgagaagaccgcgcggggctggagacaggtagcagtacgggggcggggcttcatgccggatgtgatagtc

SEQ ID NO: 377990 - DNA, 120 bp, Artificial Sequence
  ENSG00000143315_1 (sequence is synthesized)
tgcagtcgtttcggttggcagcctggcgggtgggagatgcggcggccacctgctgcaaagaaccgaagggaaggttagaagtacgaaggcagtttggagctggggctaagcagctgtcgc

SEQ ID NO: 377991 - DNA, 120 bp, Artificial Sequence
  ENSG00000143315_2 (sequence is synthesized)
acggtcagatcatgggctccaccaagcactggggcgaatggctcctgaacttgaaggtggctccagccggcgtctttggtgtggcctttctagccagagtcgccctggttttctatggcg

SEQ ID NO: 377992 - DNA, 120 bp, Artificial Sequence
  ENSG00000143315_3 (sequence is synthesized)
tcttccaggaccggaccctgcacgtgaggtatacggacatcgactaccaggtcttcaccgacgccgcgcgcttcgtcacggaggggcgctcgccttacctgagagccacgtaccgttaca

SEQ ID NO: 377993 - DNA, 120 bp, Artificial Sequence
  ENSG00000143315_4 (sequence is synthesized)
ccccgctgctgggttggctcctcactcccaacatctacctcagcgagctctttggaaagtttctcttcatcagctgcgacctcctcaccgctttcctcttataccgcctgctgctgctga

SEQ ID NO: 377994 - DNA, 120 bp, Artificial Sequence
  ENSG00000143315_5 (sequence is synthesized)
aggggctggggcgccgccaggcttgtggctactgtgtcttttggcttcttaaccccctgcctatggcagtatccagccgcggtaatgcggactctattgtcgcctccctggtcctgatgg

SEQ ID NO: 377995 - DNA, 120 bp, Artificial Sequence
  ENSG00000143315_6 (sequence is synthesized)
tcctctacttgataaagaaaagactcgtcgcgtgtgcagctgtattctatggtttcgcggtgcatatgaagatatatccagtgacttacatccttcccataaccctccacctgcttccag

SEQ ID NO: 377996 - DNA, 120 bp, Artificial Sequence
  ENSG00000143315_7 (sequence is synthesized)
atcgcgacaatgacaaaagcctccgtcaattccggtacactttccaggcttgtttgtacgagctcctgaaaaggctgtgtaatcgggctgtgctgctgtttgtagcagttgctggactca

SEQ ID NO: 377997 - DNA, 120 bp, Artificial Sequence
  ENSG00000143315_8 (sequence is synthesized)
cgttttttgccctgagctttggtttttactatgagtacggctgggaatttttggaacacacctacttttatcacctgactaggcgggatatccgtcacaacttttctccgtacttctaca

SEQ ID NO: 377998 - DNA, 120 bp, Artificial Sequence
  ENSG00000143315_9 (sequence is synthesized)
tgctgtatttgactgcagagagcaagtggagtttttccctgggaattgctgcattcctgccacagctcatcttgctttcagctgtgtctttcgcctattacagagacctcgttttttgtt

SEQ ID NO: 377999 - DNA, 120 bp, Artificial Sequence
  ENSG00000143315_10 (sequence is synthesized)
gttttcttcatacgtccatttttgtgacttttaacaaagtctgcacctcccagtactttctttggtacctctgcttactgcctcttgtgatgccactagtcagaatgccttggaaaagag

SEQ ID NO: 378000 - DNA, 120 bp, Artificial Sequence
  ENSG00000143315_11 (sequence is synthesized)
ctgtagttctcctaatgttatggtttatagggcaggccatgtggctggctcctgcctatgttctagagtttcaaggaaagaacacctttctgtttatttggttagctggtttgttctttc

SEQ ID NO: 378001 - DNA, 120 bp, Artificial Sequence
  ENSG00000143315_12 (sequence is synthesized)
ttcttatcaattgttccatcctgattcaaattatttcccattacaaagaagaacccctgacagagagaatcaaatatgactagtgtatgttccacaccctctgctactgtgttacattct

SEQ ID NO: 378002 - DNA, 120 bp, Artificial Sequence
  ENSG00000143315_13 (sequence is synthesized)
gattgtcttgtatggaccagaagagagctttgggacattttttctgaacattctaagcattctagtgaaagttcccatgttccaacagaacttaaaagcaatgtttgccttatatataaa

SEQ ID NO: 378003 - DNA, 120 bp, Artificial Sequence
  ENSG00000143315_14 (sequence is synthesized)
agggacacaataattgaggtccaccttctaggaaatcctaggactcgtttatttgggacatggtgggaataaaggtcacatattggaaaatggaaaggctgatgaaactatcagatacta

SEQ ID NO: 378004 - DNA, 120 bp, Artificial Sequence
  ENSG00000143315_15 (sequence is synthesized)
aaacattcttaaaatagaggaatatagttagagacatcaggtttaagccagtatttgttcctgttttacaatgcttctgtcttaagctgtgtcttaacttttaacacccatcttttcttt

SEQ ID NO: 378005 - DNA, 120 bp, Artificial Sequence
  ENSG00000143315_16 (sequence is synthesized)
cttaacttttaacacccatcttttctttctaaagctttcctgacagctgtgaaaatccaaaaaatattcttaaactgtgtatggtggcccttgcctgtagtctcagcactttgggaggct

SEQ ID NO: 378006 - DNA, 120 bp, Artificial Sequence
  ENSG00000143315_17 (sequence is synthesized)
gttctagacccacctggggcaagatggtgagacctagtctcaaaaaaaaaaaaaaaaattagccaggtgttgtggtgcacccctgtagtcatagctgcatgggaggctgaggtgggagaa

SEQ ID NO: 378007 - DNA, 120 bp, Artificial Sequence
  ENSG00000143315_18 (sequence is synthesized)
aaaaaaaaaaaaaaaaaggaaaggacaactttttagatagaaaagtattaaataatactaagatgcttagtagtattattttagagagttttaaacttctatattaaatgtggggtctta

SEQ ID NO: 378008 - DNA, 78 bp, Artificial Sequence
  ENSG00000143315_19 (sequence is synthesized)
actaagatgcttagtagtattattttagagagttttaaacttctatattaaatgtggggtcttacaagataatccaaa

SEQ ID NO: 378009 - DNA, 120 bp, Artificial Sequence
  ENSG00000143315_20 (sequence is synthesized)
tttattacttacttttatagcacttagtcccagtggtattagactgctatttggtttcatacaaaaaggattaaatttaaattcattcatgtttagacttgagttattacatttttaaaa

SEQ ID NO: 378010 - DNA, 120 bp, Artificial Sequence
  ENSG00000143315_21 (sequence is synthesized)
ctatcatcttgcctttaatgtttgtggtcctacacaaactattagtacatttcagtatcctcttacccctttgtttttaagtttttgattgctaaagcaagacttttttcttctagaatt

SEQ ID NO: 378011 - DNA, 120 bp, Artificial Sequence
  ENSG00000143315_22 (sequence is synthesized)
taagtcaaccaagtgttatctatgttgtaaaaatggataatagtagattttaggtgataaaacaacttgttagtaagacatttcctagcttaaaaaaaaaaatcaaaaattccatgatag

SEQ ID NO: 378012 - DNA, 120 bp, Artificial Sequence
  ENSG00000143315_23 (sequence is synthesized)
aaatgcagacctgtgagggaaactcctgaaaagcataagaagcatcccagagagccatgggttttctagaccagagaatttagagggagattgtggaactgaggcttaggtggtcagatc

SEQ ID NO: 378013 - DNA, 120 bp, Artificial Sequence
  ENSG00000143315_24 (sequence is synthesized)
gtttcccttatcactgtaatatttctgggggaaaaatgctttctgagttgtttaaacaagcatccttacatttttttttttaattaaacagcctgtctaggcttgggattccctaatact

SEQ ID NO: 378014 - DNA, 120 bp, Artificial Sequence
  ENSG00000143315_25 (sequence is synthesized)
acagtagcagtatatgaatatgattttgtgattgtgttttttaaaagataagtaatttgatgaactgttcttttgcagtcagaaaacactcacaaaaagacaaaaaaagttccacagtat

SEQ ID NO: 378015 - DNA, 120 bp, Artificial Sequence
  ENSG00000143315_26 (sequence is synthesized)
tatatttcatgtcagttcaggcctaaaatcctttgcaaataagatgtttataggctggtcacaattaacaatgttattattggcagcacttcttggatggataccttttgggacctttca

SEQ ID NO: 378016 - DNA, 120 bp, Artificial Sequence
  ENSG00000143315_27 (sequence is synthesized)
caatgaccttccttataacatttagtttcatacccatattaggtcttgtcttgaggaccctttatatgtgcttgtttactagtggccttccagccatagcattcttacctttttttccta

SEQ ID NO: 378017 - DNA, 120 bp, Artificial Sequence
  ENSG00000143315_28 (sequence is synthesized)
ttctaagaattaaaaaaaaaaattatagagccagcaagggaggaggcaggaaacagaaatcgaatttcatcattccagtatagttgtccctttttttgtatttctgacttggttttataa

SEQ ID NO: 378018 - DNA, 120 bp, Artificial Sequence
  ENSG00000143315_29 (sequence is synthesized)
ttatatttacttactaattattgttttttaacattctttattgtggcttactcttcatacttagaattgaaattgttggacatcacatgtatattcacattataaatacatcattcttcc

SEQ ID NO: 378019 - DNA, 120 bp, Artificial Sequence
  ENSG00000143315_30 (sequence is synthesized)
actgttagacctttagattgcttccagtttttaatattctaaataagactttcaacattttctgtgttttagctcattctcttaggacattcttagaagttagaaacatttctgctggga

SEQ ID NO: 378020 - DNA, 120 bp, Artificial Sequence
  ENSG00000143315_31 (sequence is synthesized)
tcgttggagggaacttcaaactttggaatctttcctgcaagaaattctttaccaaagaaaggcaggtgtttcttaaagggatgcaaaagatattttgcactttgtatgttccaaaacatt

SEQ ID NO: 378021 - DNA, 120 bp, Artificial Sequence
  ENSG00000143315_32 (sequence is synthesized)
tagtaagttaactaaaaaaatgagttaatttggtttcttgggggattttaattttttaatttgttttctggttatgtaaaaaaaatgttttttttttgcttcttatcacaatccttttgt

SEQ ID NO: 378022 - DNA, 120 bp, Artificial Sequence
  ENSG00000143315_33 (sequence is synthesized)
ttcctttttaatcctttaataacaccttcaaattttataagactttggcttatttcctatataattctttttttcttataccacctcttaagattgatatgttcatttgcaggtaagcat

SEQ ID NO: 378023 - DNA, 120 bp, Artificial Sequence
  ENSG00000143315_34 (sequence is synthesized)
taattattagataaagagggatgattctcaagattgtgtgtgttctgaacagagggaactacatgacattttcttctgtaattgcctttgtaacgtctttagaatgtggttcctaaatat

SEQ ID NO: 378024 - DNA, 120 bp, Artificial Sequence
  ENSG00000143315_35 (sequence is synthesized)
tcctggataaattctcttgataggcccattggaaaggctaatactcccacccagtgctttgttccttcctggcaaaagaattcctaaaaccactgattttagttactgacttctcaccat

SEQ ID NO: 378025 - DNA, 120 bp, Artificial Sequence
  ENSG00000143315_36 (sequence is synthesized)
ctggactcttacaagatgtttcagaagttgtgtagaacttgtctttcagttgacttgtggctgaatttactgttacttctctaatatcagttgttttctgcattaccaccctctccccta

SEQ ID NO: 378026 - DNA, 120 bp, Artificial Sequence
  ENSG00000143315_37 (sequence is synthesized)
accatctgtactatgaatggaaaaggaaaaagatggaaaaattatacctaggattgtccctaaatgcaacctcttggttccccccacccctcatgttttattataaacgattttaagagc

SEQ ID NO: 378027 - DNA, 86 bp, Artificial Sequence
  ENSG00000143315_38 (sequence is synthesized)
cccccacccctcatgttttattataaacgattttaagagctgggcatggtggttcatgcctataatcccaatgacaggagtttgag

SEQ ID NO: 378028 - DNA, 120 bp, Artificial Sequence
  ENSG00000143315_39 (sequence is synthesized)
tagtgagacccccatctgtacaaaaaaaaaagtgctacttgggaagctgaagtgggaggaccacttgagcccaggaattcgaggaggttatagtgaactatgattgtgccactgcactcc

SEQ ID NO: 378029 - DNA, 120 bp, Artificial Sequence
  ENSG00000143315_40 (sequence is synthesized)
tgcctctaaaacaaacagctccaactattttatttttttatttttctgagacaagatgttgctttgtcacccaggctggagtgcagtagtataaacatggctcactgcagccgaactccc

SEQ ID NO: 378030 - DNA, 120 bp, Artificial Sequence
  ENSG00000143315_41 (sequence is synthesized)
agcctcccaagtagctgggaccacaggtatttgccaccatgcctggctaatctttattttttgtagagacgaggtcttgctatgttgcaagagggagatcacttaagtgatcttccctca

SEQ ID NO: 378031 - DNA, 120 bp, Artificial Sequence
  ENSG00000143315_42 (sequence is synthesized)
gatcacttaagtgatcttccctcattggcttcccaaagtgttgggattccaggcgtgagccactgcaccccgcctgacctaactattttaaacactactcatattgccatcatctaaatt

SEQ ID NO: 378032 - DNA, 120 bp, Artificial Sequence
  ENSG00000143315_43 (sequence is synthesized)
caacaacaatttgccatatttgctttatgtatatgtataattatatatttataaaattttttgaaccatgtgaagttgcaaacatcattgaacttcaccactaaatatatcagcatgcat

SEQ ID NO: 378033 - DNA, 120 bp, Artificial Sequence
  ENSG00000143315_44 (sequence is synthesized)
ctcctaaaaatcaggtattttcttacaaaaccataattctgctatctattatgatttaacattctgtcattttcaaatttcttcaggtgttttttgttacatcttaaagaacagacgttc

SEQ ID NO: 378034 - DNA, 120 bp, Artificial Sequence
  ENSG00000143315_45 (sequence is synthesized)
ttggatctcaaagattccgaggaaggaaagaacatggtggataatccataattaagaagtttgaatcttttcctagtcttaaaaacaaagtgagaactaaaggggtttaccttccatcaa

SEQ ID NO: 378035 - DNA, 120 bp, Artificial Sequence
  ENSG00000143315_46 (sequence is synthesized)
agttgaacaaattaattcttttgtgtgtcatactttctgtctctctccctaaaaacatgggggtggtaatctctttgttttatctggtaggttttccagataaaagattatacaggtttg

SEQ ID NO: 378036 - DNA, 120 bp, Artificial Sequence
  ENSG00000143315_47 (sequence is synthesized)
gaatcttaatatccaacccccaactccaagccctgccccaacaacaacagctaattattttacatcttgatgatggtaaatttttcatgattaaccaattttgggcacctattccgccat

SEQ ID NO: 378037 - DNA, 120 bp, Artificial Sequence
  ENSG00000143315_48 (sequence is synthesized)
atatggttttatttaattttcacagcaacacttcaaagttgatattcatattctaaatttatagatgaacgaagaggctcaaagattaaacaacttgctaataagtgatttttacccatg

SEQ ID NO: 378038 - DNA, 120 bp, Artificial Sequence
  ENSG00000143315_49 (sequence is synthesized)
ctttttccattatattatgttttggatttttccagagtacccaaacccagcagatgcatactgctccaaaataaatggaactcaatactggctctgtcaagtgtctcttgccaatcaatt

SEQ ID NO: 378039 - DNA, 120 bp, Artificial Sequence
  ENSG00000143315_50 (sequence is synthesized)
gtccttctaatcttttgaggggcagttctctcagttgtaccaagtcactgtcatccccaaacttttcaatgattccaggcctttaacaactcccctccacctccaaaccctctctcacca

SEQ ID NO: 378040 - DNA, 120 bp, Artificial Sequence
  ENSG00000143315_51 (sequence is synthesized)
aattgtgtaatttctttgtttactgctggcttcatcatgcacttttccttcatagcctattttaagaagttgatttgctgaactgctttttagccaagctatttgtaaatcaagctacac

SEQ ID NO: 378041 - DNA, 120 bp, Artificial Sequence
  ENSG00000143315_52 (sequence is synthesized)
aaagtatgtggccataatttccaaaaggcaaatgatcattgttcaattgctgttgctctgcagtgtgcattcatgcagttaaaaattgtactgcattgatagtacggcatcagagaatag

SEQ ID NO: 378042 - DNA, 120 bp, Artificial Sequence
  ENSG00000143315_53 (sequence is synthesized)
atcacttaggttcaaatcccagtgcatgatcctgagcaagattatcatatctagatacattagtttttatctgtgaaatgggaatgatagcacaatcttcatagaattgttggtaaggat

SEQ ID NO: 378043 - DNA, 120 bp, Artificial Sequence
  ENSG00000143315_54 (sequence is synthesized)
taagtgagttgatatgctcaaagtgtgcatgctggcatagaacaagtcactgtttacaagcctttaaagaaggagctgttctggcactgtaaacttgaaccttttttccccaaatctaat

SEQ ID NO: 378044 - DNA, 120 bp, Artificial Sequence
  ENSG00000143315_55 (sequence is synthesized)
ggatataggcaaggaaattatatttatataaaataaatgtttgactacctttgatcataaactttattctcatcttgacctgttcctttgaaaagataataaatactgatatgtgaaaaa

SEQ ID NO: 378045 - DNA, 120 bp, Artificial Sequence
  ENSG00000143318_0 (sequence is synthesized)
ggctctgtcggcagtttctccaggacccagcagtgccctctgtccactgctctgggccattccccaatcccccctcccacttgagcccctaactcagaatctgggacccaggggcccctc

SEQ ID NO: 378046 - DNA, 120 bp, Artificial Sequence
  ENSG00000143318_1 (sequence is synthesized)
cctaccccagctaacctcttctggaccaggagagccaacccagatcccactacctccatgagtgctacagacaggatggggcccagagctgtgccgggtctgcggctggcactgctgttg

SEQ ID NO: 378047 - DNA, 120 bp, Artificial Sequence
  ENSG00000143318_2 (sequence is synthesized)
ctgctggtgctagggacacccaagtcaggggtacaggggcaggaagggctggacttccctgagtacgatggtgtggaccgtgtgatcaatgtcaatgcaaagaactacaagaatgtgttc

SEQ ID NO: 378048 - DNA, 120 bp, Artificial Sequence
  ENSG00000143318_3 (sequence is synthesized)
aagaagtatgaggtgctggcactcctctaccatgaaccccccgaggatgacaaggcctcacaaagacaatttgagatggaggagctgatcctggagttagcagcccaagtcctagaagac

SEQ ID NO: 378049 - DNA, 120 bp, Artificial Sequence
  ENSG00000143318_4 (sequence is synthesized)
aagggtgttggcttcgggctggtagactctgagaaggatgcagctgtggccaagaaactaggcctaactgaagtggacagcatgtatgtattcaagggagatgaagtcattgagtacgat

SEQ ID NO: 378050 - DNA, 120 bp, Artificial Sequence
  ENSG00000143318_5 (sequence is synthesized)
ggcgagttttctgctgacaccatcgtggagtttctgcttgatgtcctagaggaccctgtggaattgattgaaggtgaacgagagctgcaggcgtttgagaatattgaggatgagatcaaa

SEQ ID NO: 378051 - DNA, 120 bp, Artificial Sequence
  ENSG00000143318_6 (sequence is synthesized)
ctcattggctacttcaagagcaaagactcagagcattacaaagccttcgaggatgcagctgaggagtttcatccctacatccccttcttcgccaccttcgacagcaaggtggcaaagaag

SEQ ID NO: 378052 - DNA, 120 bp, Artificial Sequence
  ENSG00000143318_7 (sequence is synthesized)
agcgaagaggagattgtcaacttcgtggaggagcacaggagatcaaccctgaggaaactgaagccggagagtatgtatgagacctgggaggatgatatggatggaatccacattgtggcc

SEQ ID NO: 378053 - DNA, 120 bp, Artificial Sequence
  ENSG00000143318_8 (sequence is synthesized)
ttcgcagaggaagctgatcctgatggtttcgagttcttagagactctcaaggctgtggcccaagataacactgaaaacccagatcttagcatcatctggattgaccctgatgacttcccc

SEQ ID NO: 378054 - DNA, 120 bp, Artificial Sequence
  ENSG00000143318_9 (sequence is synthesized)
ctgctggtcccatactgggagaagacgtttgacatcgacttgtcagccccacaaataggagtcgtcaatgttactgatgcggatagcgtatggatggaaatggacgatgaggaggacctg

SEQ ID NO: 378055 - DNA, 120 bp, Artificial Sequence
  ENSG00000143318_10 (sequence is synthesized)
ccttctgctgaggagctggaggactggctggaggatgtcctggagggcgagatcaacacagaggacgatgacgatgatgatgatgactagttgctatggcaaccatctttcagccccact

SEQ ID NO: 378056 - DNA, 120 bp, Artificial Sequence
  ENSG00000143318_11 (sequence is synthesized)
ggtcttttcatgctctctcctgccttcccttgtccttccctgagttcctccagggagactaggttattctctgccatagagctaactggggtctatatgctgggtgctgagacactgatc

SEQ ID NO: 378057 - DNA, 120 bp, Artificial Sequence
  ENSG00000143318_12 (sequence is synthesized)
cccctcatttgatgagcaaatgagctacttttccctagacaccaggccagctctctcttatctgacttctgtttcttatcccataacttacttgtatctattatgtgtctcttccatcac

SEQ ID NO: 378058 - DNA, 120 bp, Artificial Sequence
  ENSG00000143318_13 (sequence is synthesized)
tctccatactctttcttgtgattctcctctagccatatatatgggccccatctctgttctgttccctccatctatgcacagctttcccccactctctctaatcctgtatctttctgactg

SEQ ID NO: 378059 - DNA, 120 bp, Artificial Sequence
  ENSG00000143318_14 (sequence is synthesized)
tcctgtccttggccagaaggaagggagaatactgtgtttgggactgtatctcagcaatcacttgttaatgtatttgggtcaaatgagaggcctcaataaagacatctggggcagcatgaa

SEQ ID NO: 378060 - DNA, 120 bp, Artificial Sequence
  ENSG00000143318_15 (sequence is synthesized)
tgtggctgtagggaatttgggggatattctggatcttagcaaagggtcaaggtcaactcttatatctcccgcacctcaactgacccaacttgaaagcatgagagggagaataggggataa

SEQ ID NO: 378061 - DNA, 120 bp, Artificial Sequence
  ENSG00000143319_0 (sequence is synthesized)
ttagctggacccgtctgggaggtaggtttgtgagcgtgagagatcgatctgtaccgcggggatccgaagtatgcttatccaggtgggctgcctcaagcctcgatcccacccccgcgctgg

SEQ ID NO: 378062 - DNA, 120 bp, Artificial Sequence
  ENSG00000143319_1 (sequence is synthesized)
tagatggtgtcaaggtccttgcgtgggagaaggacttgggtgagatgcatgcggagattgcccccaattccggcctggagccaagggaaagggatgcctggatttgtgtctctattggtg

SEQ ID NO: 378063 - DNA, 120 bp, Artificial Sequence
  ENSG00000143319_2 (sequence is synthesized)
gtccacgctgcggatgcctgggtagcccagaggttatctacgccatacttctcactgtttttgagcatacctagatgttcctttcctaggcggagtatagatcgcacgtgttctagcctc

SEQ ID NO: 378064 - DNA, 120 bp, Artificial Sequence
  ENSG00000143319_3 (sequence is synthesized)
ttagactcagagggttcgagctctataagcccctccactcccttcattttacaaatgagactcaaacctagagcgcggtaatgaccttactaagaccaaatggctggtgaattgggcttc

SEQ ID NO: 378065 - DNA, 120 bp, Artificial Sequence
  ENSG00000143319_4 (sequence is synthesized)
actagaatccaggcttgctggctaacaccaatgctccctccatcatttcatgttatgttttcatttcccctctgtctgagagattgctctgatgtctttccttccataagtcctacggag

SEQ ID NO: 378066 - DNA, 120 bp, Artificial Sequence
  ENSG00000143319_5 (sequence is synthesized)
atcgagcttacctcatttttctcccaggcctaggagctcaattaccaggatcactttcttccccagggtgtactacagacctccacatgttggacagtaggattcagcagagaatgagtc

SEQ ID NO: 378067 - DNA, 120 bp, Artificial Sequence
  ENSG00000143319_6 (sequence is synthesized)
ccacatcctcttttcatccataagccactcttcccaactactcttccgccttccattgtccctatgtctactttactgctcaatctggattttggggaacctcctcccaaaaaggcatta

SEQ ID NO: 378068 - DNA, 120 bp, Artificial Sequence
  ENSG00000143319_7 (sequence is synthesized)
gaaggaaatgccaagcaccgaaattttgtcaagaagcggaggctcttagaacggagaggctttctgagtaaaaagaaccaaccccctagcaaggcgcctaagttgcactctgaaccttca

SEQ ID NO: 378069 - DNA, 120 bp, Artificial Sequence
  ENSG00000143319_8 (sequence is synthesized)
aagaaaggggaaactcctacggtcgatggcacttggaagaccccttccttcccaaaaaagaagacagctgcttccagcaatgggtcaggacagcccctggacaagaaagctgcagtgtct

SEQ ID NO: 378070 - DNA, 120 bp, Artificial Sequence
  ENSG00000143319_9 (sequence is synthesized)
tggttgacccctgccccttcaaaaaaggctgattctgttgctgctaaagtagatttgctgggggagttccagagtgcccttccaaagatcaatagccacccaacccgctctcagaagaag

SEQ ID NO: 378071 - DNA, 120 bp, Artificial Sequence
  ENSG00000143319_10 (sequence is synthesized)
agctcccagaagaaatcctctaaaaagaaccatcctcagaagaatgccccacagaactccacccaagctcattcagagaataaatgctccggagcatcccagaagttgccacggaagatg

SEQ ID NO: 378072 - DNA, 120 bp, Artificial Sequence
  ENSG00000143319_11 (sequence is synthesized)
gtggcaattgactgtgagatggtgggcacaggaccaaaggggcatgttagttccttggctcgatgtagcattgtcaactacaacggagatgtgctttatgacgagtacattcttcccccc

SEQ ID NO: 378073 - DNA, 120 bp, Artificial Sequence
  ENSG00000143319_12 (sequence is synthesized)
tgccacattgtggactaccgaaccaggtggagtggtatccggaagcagcacatggtgaatgccacacccttcaagattgctcgaggccagatcttgaagatactcacagggaagatagtg

SEQ ID NO: 378074 - DNA, 120 bp, Artificial Sequence
  ENSG00000143319_13 (sequence is synthesized)
cgtgacacctcccatatcccccccctcaaccggaaggctgactgcccggagaatgccaccatgtctctgaagcatctcaccaagaagctgctaaaccgggatatccaggttgggaagagc

SEQ ID NO: 378075 - DNA, 120 bp, Artificial Sequence
  ENSG00000143319_14 (sequence is synthesized)
ggacattcctctgtggaagatgcccaggccaccatggagctatataagttggttgaagtcgagtgggaagagcacctagcccggaatccccctacagactagtggcagtggggacgctgg

SEQ ID NO: 378076 - DNA, 120 bp, Artificial Sequence
  ENSG00000143319_15 (sequence is synthesized)
tgatatgaggaggcagaggcagcacccaggagaaacagggcagtggaccaatggacagctccaccagctccacatctttggaagctagatttggggagagagaagctctaccccagactt

SEQ ID NO: 378077 - DNA, 120 bp, Artificial Sequence
  ENSG00000143319_16 (sequence is synthesized)
aatacccattgaaatttcacctcaggtgttgtgtcctgtgtctggttaagtgtcccatggaaggggaaagccttcacgtcagaacccaaccctataccttttacttcttaaatggtgcta

SEQ ID NO: 378078 - DNA, 120 bp, Artificial Sequence
  ENSG00000143319_17 (sequence is synthesized)
accacaggtgtcccagggtgctctgtgccagttaagatttttaactttcaaggggcagggcatactgggaaatgtagtttcccaaactgccttatcacttgggtggacatatgtctcctt

SEQ ID NO: 378079 - DNA, 120 bp, Artificial Sequence
  ENSG00000143319_18 (sequence is synthesized)
gccttatcacttgggtggacatatgtctccttttatgccttttggtcttgagtaattaacagcatcctcttccacgctcagaagtgttctggttggggccaggcatggtggctcacacct

SEQ ID NO: 378080 - DNA, 78 bp, Artificial Sequence
  ENSG00000143319_19 (sequence is synthesized)
ttcccgttctctactaaaaatacaaaaaatgtgtggggtgtggtggcaggagcctgtaatcctagctactcaggaggc

SEQ ID NO: 378081 - DNA, 67 bp, Artificial Sequence
  ENSG00000143319_20 (sequence is synthesized)
gagactccgtctccaaaaaaaaaaaaaaagaatttattaacctggttggttaataaattgtgtggtc

SEQ ID NO: 378082 - DNA, 77 bp, Artificial Sequence
  ENSG00000143319_21 (sequence is synthesized)
tgtgccactgcactccagcctgggccaaaattgtgtggtccctttccatgtcacagagtctgcttttggctcagagt

SEQ ID NO: 378083 - DNA, 120 bp, Artificial Sequence
  ENSG00000143319_22 (sequence is synthesized)
gtccctttccatgtcacagagtctgcttttggctcagagtctgtatctagcctgtgtcaggatattgcctgttcttcccaccttgacttccagagcagccatcgctggtgagctttagtt

SEQ ID NO: 378084 - DNA, 120 bp, Artificial Sequence
  ENSG00000143319_23 (sequence is synthesized)
ctccttagggttccaaggcattagaagtaagagtgtagcttggaaaccaacttctgtgatttaggaaagctgtctctttcctaaggtaatagggggtttatttcatttaggccccagttg

SEQ ID NO: 378085 - DNA, 120 bp, Artificial Sequence
  ENSG00000143319_24 (sequence is synthesized)
gtaggttttaaaataatttataaagtgttttaataatttggttgtcttttttaccttgctaaaccaagcctctaaaaactcaaattattcccttgataaatttttataatggaaaagcaa

SEQ ID NO: 378086 - DNA, 120 bp, Artificial Sequence
  ENSG00000143319_25 (sequence is synthesized)
gcgggccaagttccagttcccgccccttgccgtacactcctctcctcttacggaagtgaagccggaggtgtccggcgggctgcagttccggtttatcgcggccttcccacaccttcgcgt

SEQ ID NO: 378087 - DNA, 120 bp, Artificial Sequence
  ENSG00000143319_26 (sequence is synthesized)
tgtaccaccacggggctagaggggccggggagcgcatcccgcccccgcccccacccacgccgccccctcctccgccgccactgccgctcctcacacactcggaatcactggcctcactac

SEQ ID NO: 378088 - DNA, 120 bp, Artificial Sequence
  ENSG00000143319_27 (sequence is synthesized)
ctggggtcggggcggtgcgggtgtgcgcgcgccgacctctggcgcgttctaacccgcgcgcctgccttcccgggcttcgtcggcgcgcaccgatttccgcatccggctccggacgcttcc

SEQ ID NO: 378089 - DNA, 120 bp, Artificial Sequence
  ENSG00000143319_28 (sequence is synthesized)
atctcagaagtcctgtggttgtagagatccaggtgggctgctgtgatgggaagagctccatctgtacacaggataataattcctgttgtctacctcatagaatgtttcaaagtgtgcttt

SEQ ID NO: 378090 - DNA, 120 bp, Artificial Sequence
  ENSG00000143319_29 (sequence is synthesized)
ggacccgtctgggaggtaggtttgtgagcgtgagagatcgatctgtaccgcggggatccgaagtatgcttatccagggtgtactacagacctccacatgttggacagtaggattcagcag

SEQ ID NO: 378091 - DNA, 120 bp, Artificial Sequence
  ENSG00000143319_30 (sequence is synthesized)
cgttagaggtgaggtgactgactattttagaaaagacggaaagaagagttaaacatcttgtgcacaaaggggcgcagccaagcaaaggcataggagaggcagaagatgggacgggtctga

SEQ ID NO: 378092 - DNA, 120 bp, Artificial Sequence
  ENSG00000143319_31 (sequence is synthesized)
gacagcaaatctgcccagctttgatgagggctatatgtcgaggttaataagaagtgaaggtggtggtggacagtaagtaggtgaagtcaggagtaacgaaatatctagttcacgggacta

SEQ ID NO: 378093 - DNA, 120 bp, Artificial Sequence
  ENSG00000143319_32 (sequence is synthesized)
cgtctggttttcatcataaagcacttccccagtgccaagctggggttatgagactaaggtatgtccagatgagcctagccccttcagagggggtccctttgggaggctatgcaggactgt

SEQ ID NO: 378094 - DNA, 120 bp, Artificial Sequence
  ENSG00000143319_33 (sequence is synthesized)
cacttttgttgaaaacctgtttggaacctcatttgggaatggccttcagagcctgtggtgtgttcttcggttgtcctcattggtagcatgtcctcctacttcaagagcctgaaatggcta

SEQ ID NO: 378095 - DNA, 120 bp, Artificial Sequence
  ENSG00000143319_34 (sequence is synthesized)
tggtagcatgtcctcctacttcaagagcctgaaatggctaggtgtggtgacatgtgtctgtaatcccagctactcaggagtttgaggtgagagcattgcttgagcccaggagtttgaggc

SEQ ID NO: 378096 - DNA, 66 bp, Artificial Sequence
  ENSG00000143319_35 (sequence is synthesized)
cagccaacctgggaaaaatagcaagacctcatctcttttaaaaaataagttaccagcgggcagatc

SEQ ID NO: 378097 - DNA, 88 bp, Artificial Sequence
  ENSG00000143319_36 (sequence is synthesized)
gtttcctgaaatattgagaagttatttttattttacttggttccaaaactagtgtgaataaggttgcttctgcaactttagtttatat

SEQ ID NO: 378098 - DNA, 120 bp, Artificial Sequence
  ENSG00000143319_37 (sequence is synthesized)
ctagtgtgaataaggttgcttctgcaactttagtttatatgtgattcttaattttttacggtttgtagactctgagaatttgatgaaagccacagattctcttcctctagtacccataca

SEQ ID NO: 378099 - DNA, 120 bp, Artificial Sequence
  ENSG00000143319_38 (sequence is synthesized)
catctaattgcatgtaattttgggcttttgttagcctccctggagcccgggtcccagccatgtgtctaaggccaacataatggtaatagttaaaggacttcatgtagcaagccagaactg

SEQ ID NO: 378100 - DNA, 120 bp, Artificial Sequence
  ENSG00000143319_39 (sequence is synthesized)
aactaaatacatggacatctcaaacatgagtgtcatttaggactgaaggcaaattaatgtcatggggtggagatcaataagaaggtaaggagccactggcagtatgagtccaaacagggt

SEQ ID NO: 378101 - DNA, 120 bp, Artificial Sequence
  ENSG00000143319_40 (sequence is synthesized)
ataccatggaaatcacctgtggaagaggaaggtggattccagaagaaagaaaacttgtgggagtgagcatttcaaggatggagagatcttgaagatactcacagggaagatagtggtggg

SEQ ID NO: 378102 - DNA, 120 bp, Artificial Sequence
  ENSG00000143320_0 (sequence is synthesized)
ccagagaagcctggacccacacgcgggctagatccagagacagtgtccagtgctccagcctaggagtctacggggaccgcctcccgcgccgccaccatgcccaacttctctggcaactgg

SEQ ID NO: 378103 - DNA, 120 bp, Artificial Sequence
  ENSG00000143320_1 (sequence is synthesized)
aaaatcatccgatcggaaaacttcgaggaattgctcaaagtgctgggggtgaatgtgatgctgaggaagattgctgtggctgcagcgtccaagccagcagtggagatcaaacaggaggga

SEQ ID NO: 378104 - DNA, 120 bp, Artificial Sequence
  ENSG00000143320_2 (sequence is synthesized)
gacactttctacatcaaaacctccaccaccgtgcgcaccacagagattaacttcaaggttggggaggagtttgaggagcagactgtggatgggaggccctgtaagagcctggtgaaatgg

SEQ ID NO: 378105 - DNA, 120 bp, Artificial Sequence
  ENSG00000143320_3 (sequence is synthesized)
tggaccagagaactgaccaacgatggggaactgatcctgaccatgacggcggatgacgttgtgtgcaccagggtctacgtccgagagtgagtggccacaggtagaaccgcggccgaagcc

SEQ ID NO: 378106 - DNA, 120 bp, Artificial Sequence
  ENSG00000143320_4 (sequence is synthesized)
caccactggccatgctcaccgccctgcttcactgccccctccgtcccaccccctccttctaggatagcgctccccttaccccagtcacttctgggggtcactgggatgcctcttgcaggg

SEQ ID NO: 378107 - DNA, 120 bp, Artificial Sequence
  ENSG00000143320_5 (sequence is synthesized)
tcttgctttctttgacctcttctctcctcccctacaccaacaaagaggaatggctgcaagagcccagatcacccattccgggttcactccccgcctccccaagtcagcagtcctagcccc

SEQ ID NO: 378108 - DNA, 120 bp, Artificial Sequence
  ENSG00000143320_6 (sequence is synthesized)
gggacttgagggcctgagcaggaaagactggccctctagcttctaccctttgtccctgtagcctatacagtttagaatatttatttgttaattttattaaaatgctttaaaaaaataaaa

SEQ ID NO: 378109 - DNA, 120 bp, Artificial Sequence
  ENSG00000143320_7 (sequence is synthesized)
gattcaagtgctggctttgcgtccgcttccccatccacttactagcgcaggagaaggctatctcggtccccagagaagcctggacccacacgcgggctagatccagagaacctgacgacc

SEQ ID NO: 378110 - DNA, 80 bp, Artificial Sequence
  ENSG00000143321_0 (sequence is synthesized)
caaacacaaacaactgcacgagcgcgcacccaccgcgccggagccttgccccgatccgcgcccgccccgtccgtgcggcg

SEQ ID NO: 378111 - DNA, 120 bp, Artificial Sequence
  ENSG00000143321_1 (sequence is synthesized)
gagcggagcggcgccgccaccgccgcacgcgcaaacttgggctcgcgcttcccggcccggcgcggagcccggggcgcccggagccccgccatgtcgcgatccaaccggcagaaggagtac

SEQ ID NO: 378112 - DNA, 120 bp, Artificial Sequence
  ENSG00000143321_2 (sequence is synthesized)
cccgccatgtcgcgatccaaccggcagaaggagtacaaatgcggggacctggtgttcgccaagatgaagggctacccacactggccggcccggattgacgagatgcctgaggctgccgtg

SEQ ID NO: 378113 - DNA, 120 bp, Artificial Sequence
  ENSG00000143321_3 (sequence is synthesized)
aaatcaacagccaacaaataccaagtcttttttttcgggacccacgagacggcattcctgggccccaaagacctcttcccttacgaggaatccaaggagaagtttggcaagcccaacaag

SEQ ID NO: 378114 - DNA, 120 bp, Artificial Sequence
  ENSG00000143321_4 (sequence is synthesized)
aggaaagggttcagcgaggggctgtgggagatcgagaacaaccctactgtcaaggcttccggctatcagtcctcccagaaaaagagctgtgtggaagagcctgaaccagagcccgaagct

SEQ ID NO: 378115 - DNA, 120 bp, Artificial Sequence
  ENSG00000143321_5 (sequence is synthesized)
gcagagggtgacggtgataagaaggggaatgcagagggcagcagcgacgaggaagggaagctggtcattgatgagccagccaaggagaagaacgagaaaggagcgttgaagaggagagca

SEQ ID NO: 378116 - DNA, 120 bp, Artificial Sequence
  ENSG00000143321_6 (sequence is synthesized)
ggggacttgctggaggactctcctaaacgtcccaaggaggcagaaaaccctgaaggagaggagaaggaggcagccaccttggaggttgagaggccccttcctatggaggtggaaaagaat

SEQ ID NO: 378117 - DNA, 120 bp, Artificial Sequence
  ENSG00000143321_7 (sequence is synthesized)
agcaccccctctgagcccggctctggccgggggcctccccaagaggaagaagaggaggaggatgaagaggaagaggctaccaaggaagatgctgaggccccaggcatcagagatcatgag

SEQ ID NO: 378118 - DNA, 120 bp, Artificial Sequence
  ENSG00000143321_8 (sequence is synthesized)
agcctgtagccaccaatgtttcaagaggagcccccaccctgttcctgctgctgtctgggtgctactggggaaactggccatggcctgcaaactgggaacccctttcccaccccaacctgc

SEQ ID NO: 378119 - DNA, 120 bp, Artificial Sequence
  ENSG00000143321_9 (sequence is synthesized)
aagcccagcccatggagattgacctggatggggcaggccacctggctctcacctctaggtccccatactcctatgatctgagtcagagccatgtcttctccctggaatgagttgaggcca

SEQ ID NO: 378120 - DNA, 120 bp, Artificial Sequence
  ENSG00000143321_10 (sequence is synthesized)
ctgtgttccttccgcttggagctattttccaggcttctgctggggcctgggacaactgctcccacctcctgacacccttctcccactctcctaggcattctggacctctgggttgggatc

SEQ ID NO: 378121 - DNA, 120 bp, Artificial Sequence
  ENSG00000143321_11 (sequence is synthesized)
aggggtaggaatggaaaggatggagcatcaacagcagggtgggcttgtggggcctgggaggggcaatcctcaaatgcggggtgggggcagcacaggagggcggcctccttctgagctcct

SEQ ID NO: 378122 - DNA, 120 bp, Artificial Sequence
  ENSG00000143321_12 (sequence is synthesized)
gtcccctgctacacctattatcccagctgcctagattcagggaaagtgggacagcttgtaggggaggggctcctttccataaatccttgatgattgacaacacccatttttccttttgcc

SEQ ID NO: 378123 - DNA, 120 bp, Artificial Sequence
  ENSG00000143321_13 (sequence is synthesized)
gaccccaagagttttgggagttgtagttaatcatcaagagaatttggggcttccaagttgttcgggccaaggacctgagacctgaagggttgactttacccatttgggtgggagtgttga

SEQ ID NO: 378124 - DNA, 120 bp, Artificial Sequence
  ENSG00000143321_14 (sequence is synthesized)
gcatctgtccccctttagatctctgaagccacaaataggatgcttgggaagactcctagctgtcctttttcctctccacacagtgctcaaggccagcttatagtcatatatatcacccag

SEQ ID NO: 378125 - DNA, 120 bp, Artificial Sequence
  ENSG00000143321_15 (sequence is synthesized)
acataaaggaaaagacacattttttaggaaatgtttttaataaaagaaaattacaaaaaaaaattttaaagacccctaaccctttgtgtgctctccattctgctccttccccatcgttgc

SEQ ID NO: 378126 - DNA, 120 bp, Artificial Sequence
  ENSG00000143321_16 (sequence is synthesized)
ccccatttctgaggtgcactgggaggctccccttctatttggggcttgatgactttctttttgtagctggggctttgatgttccttccagtgtcatttctcatccacataccctgacctg

SEQ ID NO: 378127 - DNA, 120 bp, Artificial Sequence
  ENSG00000143321_17 (sequence is synthesized)
gccccctcagtgttgtcaccagatctgatttgtaacccactgagaggacagagagaaataagtgccctctcccaccctcttcctactggtctctctatgcctctctacagtctcgtctct

SEQ ID NO: 378128 - DNA, 120 bp, Artificial Sequence
  ENSG00000143321_18 (sequence is synthesized)
tttaccctggcccctctcccttgggctctgatgaaaaattgctgactgtagctttggaagtttagctctgagaaccgtagatgatttcagttctaggaaaataaaacccgttgattacta

SEQ ID NO: 378129 - DNA, 120 bp, Artificial Sequence
  ENSG00000143321_19 (sequence is synthesized)
agaactgagctcatctttgcggggttagctagccgttgagtccaagtctccttggcaagacagtagcttagagaaacgagatcgaatgcacccggaaggtggccaatttgtgcctcaact

SEQ ID NO: 378130 - DNA, 120 bp, Artificial Sequence
  ENSG00000143321_20 (sequence is synthesized)
ccttggccatctcctggctaccaaactcaagcgtttcctccttagcaaaggcggacgtagggctcaaatccccgacgtttccagggccaccccccatacgattgacgagatgcctgaggc

SEQ ID NO: 378131 - DNA, 120 bp, Artificial Sequence
  ENSG00000143321_21 (sequence is synthesized)
ggccaaaggggtataggtcgggagggccccgggaggactactctggggaaggtgaggtggtgttggtgcccctttcatgccgggctgtgcagctcaggggcagtgaggggcttgagagca

SEQ ID NO: 378132 - DNA, 120 bp, Artificial Sequence
  ENSG00000143321_22 (sequence is synthesized)
atacggtaagcacggcgaggtccagagaggaccccagtgcgcggagcggcacggcgcccactcctctcgccctcggcgcctagcacgctgccaagaaccgcgggtgcccagtaaatattt

SEQ ID NO: 378133 - DNA, 120 bp, Artificial Sequence
  ENSG00000143321_23 (sequence is synthesized)
agggaggaggtgatctccctcaccaggatcggggtgcacatccaggaacacaccttaccctggagcctggggcctggcctccctctgcagcaaccagtgagacaaagatgggcaaggctc

SEQ ID NO: 378134 - DNA, 120 bp, Artificial Sequence
  ENSG00000143321_24 (sequence is synthesized)
tgacaatccgggccagtttgcatcattggcatgtactacctacacaaaacgttaaaccagattttaaagatggtggtctggaactcatgaagatcttcaggtgctttgacctcttcctgc

SEQ ID NO: 378135 - DNA, 120 bp, Artificial Sequence
  ENSG00000143321_25 (sequence is synthesized)
cctactaaggttgaagatctctcctttgaggtccaaggagccattcattgtcaccataattcttggaaagagctgaaaaaagaacccaggaatacaactccccaggagcctccacagtcc

SEQ ID NO: 378136 - DNA, 120 bp, Artificial Sequence
  ENSG00000143321_26 (sequence is synthesized)
cttccccatgcagagggtgtaacttgggccaagaaatcgtgatgtgagtaggtcacacagtgttgagggccaaaaccctcgactccgttgggagttaaaggggaggaagtggacatttcc

SEQ ID NO: 378137 - DNA, 120 bp, Artificial Sequence
  ENSG00000143322_0 (sequence is synthesized)
ggtttaaagatggcggcggcggtggcggcggcggcggcggcggcgttgggggcgcggagccgcgacaggaggagggaaaagcagaatctgtgagtcgcctggaggcagcgcggcggctgc

SEQ ID NO: 378138 - DNA, 120 bp, Artificial Sequence
  ENSG00000143322_1 (sequence is synthesized)
cgtgaggaggccgggtgcggagccgccggtggcccagccactcagggccagggcctgggctgggagggagagaccggagcagcgccaggagcccgaggccggagccgaggaggaatgtga

SEQ ID NO: 378139 - DNA, 120 bp, Artificial Sequence
  ENSG00000143322_2 (sequence is synthesized)
ccaggggtcggcgggggcgcgggagtacgcgagagcagggatggggcagcaggtgggccgcgtcggggaagctccggggctccagcagcctcagccccgcgggatccggggcagcagtgc

SEQ ID NO: 378140 - DNA, 120 bp, Artificial Sequence
  ENSG00000143322_3 (sequence is synthesized)
agccaggccctccggccgcaggcgggacccggcggggcgcaccacagagaccggcttcaatatcttcacccagcatgatcactttgccagctgtgtggaggatggatttgagggagacaa

SEQ ID NO: 378141 - DNA, 120 bp, Artificial Sequence
  ENSG00000143322_4 (sequence is synthesized)
gactggaggcagtagtccagaagctttgcatcgtccctatggttgtgatgttgaaccccaggcactaaatgaggctatcaggtggagctccaaggagaacttgctcggagccactgagag

SEQ ID NO: 378142 - DNA, 120 bp, Artificial Sequence
  ENSG00000143322_5 (sequence is synthesized)
tgaccctaatctcttcgttgcactttatgattttgtagcaagtggtgataacacactcagcatcactaaaggtgaaaagctacgagtccttggttacaaccagaatggtgagtggagtga

SEQ ID NO: 378143 - DNA, 120 bp, Artificial Sequence
  ENSG00000143322_6 (sequence is synthesized)
agttcgctctaagaatgggcagggctgggtgccaagcaactacatcaccccagtgaacagcctggaaaaacactcctggtaccatggacctgtgtcacgcagtgcagctgagtatctgct

SEQ ID NO: 378144 - DNA, 120 bp, Artificial Sequence
  ENSG00000143322_7 (sequence is synthesized)
cagcagtctaatcaatggcagcttcctggtgcgagaaagtgagagtagccctgggcagctgtccatctcgctcaggtacgagggacgtgtgtatcactacaggatcaataccactgcaga

SEQ ID NO: 378145 - DNA, 120 bp, Artificial Sequence
  ENSG00000143322_8 (sequence is synthesized)
tggcaaggtgtatgtgactgctgagagccgcttcagcaccttggcagagcttgtacaccatcactccacagtggctgatgggctggtgacaacattacactacccagcacccaagtgtaa

SEQ ID NO: 378146 - DNA, 120 bp, Artificial Sequence
  ENSG00000143322_9 (sequence is synthesized)
taagcctacagtctatggtgtgtcccccatccacgacaaatgggaaatggagcgaacagatattaccatgaagcacaaacttgggggcggtcagtatggagaggtttacgttggcgtctg

SEQ ID NO: 378147 - DNA, 120 bp, Artificial Sequence
  ENSG00000143322_10 (sequence is synthesized)
gaagaaatacagccttacagttgctgtgaaaacattgaaggaagataccatggaggtagaagaattcctgaaagaagctgcagtaatgaaggaaatcaagcatcctaatctggtacaact

SEQ ID NO: 378148 - DNA, 120 bp, Artificial Sequence
  ENSG00000143322_11 (sequence is synthesized)
tttaggtgtgtgtactttggagccaccattttacattgtgactgaatacatgccatacgggaatttgctggattacctccgagaatgcaaccgagaagaggtgactgcagttgtgctgct

SEQ ID NO: 378149 - DNA, 120 bp, Artificial Sequence
  ENSG00000143322_12 (sequence is synthesized)
ctacatggccactcagatttcttctgcaatggagtacttagagaagaagaatttcatccatagagatcttgcagctcgtaactgcctagtgggagaaaaccatgtggtaaaagtggctga

SEQ ID NO: 378150 - DNA, 120 bp, Artificial Sequence
  ENSG00000143322_13 (sequence is synthesized)
ctttggcttaagtagattgatgactggagacacttatactgctcatgctggagccaaatttcctattaagtggacagcaccagagagtcttgcctacaataccttctcaattaaatctga

SEQ ID NO: 378151 - DNA, 120 bp, Artificial Sequence
  ENSG00000143322_14 (sequence is synthesized)
cgtctgggcttttggggtattgttgtgggaaattgctacctatggaatgtcaccatatccaggtattgacctgtctcaggtctatgacctactagaaaaaggatatcgaatggaacagcc

SEQ ID NO: 378152 - DNA, 120 bp, Artificial Sequence
  ENSG00000143322_15 (sequence is synthesized)
tgagggatgcccccctaaggtttatgaacttatgagagcatgctggaagtggagccctgccgataggccctcttttgctgaaacacaccaagcttttgaaaccatgttccatgactccag

SEQ ID NO: 378153 - DNA, 120 bp, Artificial Sequence
  ENSG00000143322_16 (sequence is synthesized)
catttctgaagaggtagctgaggagcttgggagagccgcctcctcgtcatctgttgttccatacctgccccggctacctatacttccttccaagactcggacactgaagaaacaggtgga

SEQ ID NO: 378154 - DNA, 120 bp, Artificial Sequence
  ENSG00000143322_17 (sequence is synthesized)
gaacaaggagaacattgaaggggcacaagatgccacagaaaattctgcttccagtttagcaccagggttcatcagaggtgcacaggcctctagtggatccccagcactgcctcgaaagca

SEQ ID NO: 378155 - DNA, 120 bp, Artificial Sequence
  ENSG00000143322_18 (sequence is synthesized)
aagagacaagtcacccagcagcctcttggaagatgccaaagagacatgcttcaccagggataggaaggggggcttcttcagctccttcatgaagaagagaaatgctcctacaccccccaa

SEQ ID NO: 378156 - DNA, 120 bp, Artificial Sequence
  ENSG00000143322_19 (sequence is synthesized)
acgcagcagctccttccgagaaatggagaatcagccccataagaaatacgaactcacgggtaacttctcatctgttgcttctctacagcatgctgatgggttctctttcactcctgccca

SEQ ID NO: 378157 - DNA, 120 bp, Artificial Sequence
  ENSG00000143322_20 (sequence is synthesized)
gcaagaggcgaatctggtgccacccaagtgctatggggggagctttgcacagaggaacctctgtaatgacgacggtggtgggggtgggggcagtggcactgctgggggtgggtggtctgg

SEQ ID NO: 378158 - DNA, 120 bp, Artificial Sequence
  ENSG00000143322_21 (sequence is synthesized)
catcacaggcttctttacaccacgcttaatcaaaaagacactgggcttacgagcaggtaaacccacagccagtgatgacacttccaagccttttccaaggtcaaactctacatcttccat

SEQ ID NO: 378159 - DNA, 120 bp, Artificial Sequence
  ENSG00000143322_22 (sequence is synthesized)
gtcctcagggcttccagagcaggataggatggcaatgacccttcccaggaactgccagaggtccaaactccagctggaaaggacagtgtccacctcttctcagccagaagagaatgtgga

SEQ ID NO: 378160 - DNA, 120 bp, Artificial Sequence
  ENSG00000143322_23 (sequence is synthesized)
cagggccaatgacatgcttccaaaaaaatcagaggaaagtgctgctccaagcagggagagaccaaaagccaagttattgcccagaggagccacagctcttcctctcagaacaccctctgg

SEQ ID NO: 378161 - DNA, 120 bp, Artificial Sequence
  ENSG00000143322_24 (sequence is synthesized)
ggatctagccattacagagaaggaccctccaggggtgggagtggctggagtggcagctgcccccaagggtaaagagaagaatggtggggcacgacttgggatggctggagttccagagga

SEQ ID NO: 378162 - DNA, 120 bp, Artificial Sequence
  ENSG00000143322_25 (sequence is synthesized)
tggagagcagccgggctggccttctccagccaaggctgcccccgtcctcccaaccactcacaaccacaaagtgccagtccttatctcacccactctgaaacacactccagctgacgtgca

SEQ ID NO: 378163 - DNA, 120 bp, Artificial Sequence
  ENSG00000143322_26 (sequence is synthesized)
gctcattggcacagactctcaggggaataaattcaagctcttatctgagcatcaggtcacatcctctggagacaaggaccgaccccgacgggtaaaaccaaagtgtgccccacccccacc

SEQ ID NO: 378164 - DNA, 120 bp, Artificial Sequence
  ENSG00000143322_27 (sequence is synthesized)
accagtgatgagactactgcagcatccgtccatctgctcagaccctacagaagagccaactgccctaactgcaggacagtccacatcagaaacacaggaaggaggaaagaaggcagctct

SEQ ID NO: 378165 - DNA, 120 bp, Artificial Sequence
  ENSG00000143322_28 (sequence is synthesized)
gggcgcagtgcccatcagtgggaaagctgggaggccagtgatgcctccacctcaagtgcctctgcccacatcttccatctcgccagccaaaatggccaatggcacagcaggtactaaagt

SEQ ID NO: 378166 - DNA, 120 bp, Artificial Sequence
  ENSG00000143322_29 (sequence is synthesized)
ggctctgagaaaaaccaaacaggccgctgagaaaatctcagcagacaaaatcagcaaagaggccctgctggaatgtgctgacctactgtccagtgcactcacggaacctgtgcccaacag

SEQ ID NO: 378167 - DNA, 120 bp, Artificial Sequence
  ENSG00000143322_30 (sequence is synthesized)
ccagctggtagacactggacaccagctgcttgactactgctcaggctatgtggactgcatccctcaaactcgcaacaaatttgccttccgagaggctgtgagcaaactggaactcagcct

SEQ ID NO: 378168 - DNA, 120 bp, Artificial Sequence
  ENSG00000143322_31 (sequence is synthesized)
gcaggagctacaggtttcttcagcagctgctggtgtgcccgggacaaaccctgtccttaataacttattgtcatgtgtacaggaaatcagtgatgtggtgcagaggtagccactgttagc

SEQ ID NO: 378169 - DNA, 120 bp, Artificial Sequence
  ENSG00000143322_32 (sequence is synthesized)
ctggtgggaaaatgcacacatttctgaggggagagggaaaaggacttgttttcctgtgttcttgttttcagaaaatgaaagactcatacttgagtgtgtttatgtgaagtacctcagatc

SEQ ID NO: 378170 - DNA, 120 bp, Artificial Sequence
  ENSG00000143322_33 (sequence is synthesized)
cctgagttctcacgtttacagtttcatctcaaaaataagaagcaaaccacataagtataggagaggtaaattaagtgggggcaaggcagtagtggacagggttggaaactgcactggaaa

SEQ ID NO: 378171 - DNA, 120 bp, Artificial Sequence
  ENSG00000143322_34 (sequence is synthesized)
atagggaacatgtgtatgtcataaggaaggcaatgcagcccatccctacctggaatgctgggaagtgctaggcagggctgctctcagcaagactgcagcagctgcacccagacctggggc

SEQ ID NO: 378172 - DNA, 120 bp, Artificial Sequence
  ENSG00000143322_35 (sequence is synthesized)
tctggtaggtactaatggtgattatgctccaatttacctaatgaatttggtgggacagcagaaaagaaagctgggaatgtaccaagagaaatttttgttcagggctgttggaagtagctg

SEQ ID NO: 378173 - DNA, 120 bp, Artificial Sequence
  ENSG00000143322_36 (sequence is synthesized)
ttagccttgcttccacaaggccattgctgctgtaataagaactgcaaatcagagtgctacaacataaaactgggaaatatggccctatctgaatgcctctgtcctattttccgctggtgt

SEQ ID NO: 378174 - DNA, 120 bp, Artificial Sequence
  ENSG00000143322_37 (sequence is synthesized)
atcagttagtgcaggaagtaaagaatgctggaaagttgaatcagaaattgaaaaccttctaaaatcttacacagattagcagaagtcacttctcccagtctggtatattatttcataatg

SEQ ID NO: 378175 - DNA, 120 bp, Artificial Sequence
  ENSG00000143322_38 (sequence is synthesized)
gaccaggatcggcttcctgcctgttggtggctatctgtaaaccataagtacaggggtctccctagtggttcttctctgtcttttgctgggcaggctgtcttcctttattcctggtagcat

SEQ ID NO: 378176 - DNA, 120 bp, Artificial Sequence
  ENSG00000143322_39 (sequence is synthesized)
tcagagcattaaccagtgttgattttgaaaatagtagtccctacaggttctcacaaaggaatgaatcctgttctgatacagttcccctgcatactgacatactggccaaggacttgagca

SEQ ID NO: 378177 - DNA, 120 bp, Artificial Sequence
  ENSG00000143322_40 (sequence is synthesized)
gctgtgtatttttctttatcaactaaaataccagggagatggtcttttcttgaaacccagtggcctgtatgtgactgagaggaaaagctggcttggtcctaatggctgtttctctgtacc

SEQ ID NO: 378178 - DNA, 120 bp, Artificial Sequence
  ENSG00000143322_41 (sequence is synthesized)
tttcccttcccttaccaccttaagcccaatccaggtagagaatagggagaggcattctcctctctatggatttgaagtgaatcacccccacattattctcacatgcttttcttctctcac

SEQ ID NO: 378179 - DNA, 120 bp, Artificial Sequence
  ENSG00000143322_42 (sequence is synthesized)
atattcctccctactcccccacccaatcattgtgcttatttgtacagatcttattgggaatattctttatttattttgtcatttcacttctattttaagaatgcataattgaaggagtag

SEQ ID NO: 378180 - DNA, 120 bp, Artificial Sequence
  ENSG00000143322_43 (sequence is synthesized)
tcattttcagggagcaccaggtagaccctgggaacctaatgacttaatccttaaatatgttttgcccttgaaaaataggccttttccttccttccttagttataattgtggaagctaatt

SEQ ID NO: 378181 - DNA, 120 bp, Artificial Sequence
  ENSG00000143322_44 (sequence is synthesized)
aggatggcatggaagtgaatctaatgagttaggtattattaatgttcttggtatcgggtctaattccagttactgcttcattctctttttaaagctttatgaatacttcccccatcctcc

SEQ ID NO: 378182 - DNA, 120 bp, Artificial Sequence
  ENSG00000143322_45 (sequence is synthesized)
ccaaggagagctcaatacacacatatttttattttattctctcaaaggaatattagcttaggaagataggaattcaacattgagcactgagttttcttctggctctgtcattgatacact

SEQ ID NO: 378183 - DNA, 120 bp, Artificial Sequence
  ENSG00000143322_46 (sequence is synthesized)
gtcaaaccacagcctcatctcttaatctatttaattaaggtaacagtacatgttctcaagggtgttgcaagtaagtgtgcagctatcccttggagagcctctctggaaagctcttttagt

SEQ ID NO: 378184 - DNA, 120 bp, Artificial Sequence
  ENSG00000143322_47 (sequence is synthesized)
gcagtgttgttatgctgaattgttttccattatcttatttgctgagtagaaaatattaatgaaattaagaattgttgagattatatgaattgggctagaatactaaggggaaaactatgt

SEQ ID NO: 378185 - DNA, 120 bp, Artificial Sequence
  ENSG00000143322_48 (sequence is synthesized)
tttgaatagagtttggcatttttgaccaagaacaaaattgagttttcattggaaagaaaggaaaccttgattcttaccattgctgctccaaaggaggcccaggttaagaggattagagga

SEQ ID NO: 378186 - DNA, 120 bp, Artificial Sequence
  ENSG00000143322_49 (sequence is synthesized)
gacacgcggtgctgggcattcctggcaggtgttgggtgatccccgcagtatgtcacctgcagttgcagcacaggcagctagtgattgggttcatctcctcctagtggttggaagagaact

SEQ ID NO: 378187 - DNA, 120 bp, Artificial Sequence
  ENSG00000143322_50 (sequence is synthesized)
gccttttaaggtcgaggatgggaaagctaaaactgtagaatattattatgctgctttttaggtttatccctgttgttgtgggatgcaagttaagggattgtaattgtttttcagggtttt

SEQ ID NO: 378188 - DNA, 120 bp, Artificial Sequence
  ENSG00000143322_51 (sequence is synthesized)
tttgttttttgttttttaagcaagggctctattttcccttgagagttctggaactaagccttggagaaacactactgagtgtatttaggctccctggttttcttgcccaacaacaatctg

SEQ ID NO: 378189 - DNA, 120 bp, Artificial Sequence
  ENSG00000143322_52 (sequence is synthesized)
aagggtagggggtgggggctgtgtcttactcaggggcagcacctagctgtcttgcctacagtgggtgcacgatatataaatggaattgatttttgtcaacactgtcaagagtggcattga

SEQ ID NO: 378190 - DNA, 120 bp, Artificial Sequence
  ENSG00000143322_53 (sequence is synthesized)
ctattggagcataccccgtccacatgatgcttgaactatgtaacttcaggggttgagggctcaaggttcaggttaaagaggcactgtcaacttactatacaagcataatttaggtttttc

SEQ ID NO: 378191 - DNA, 120 bp, Artificial Sequence
  ENSG00000143322_54 (sequence is synthesized)
ctttttctacttgaaaaggaccagcttaaacacaaacccttatgtaaattaaaaggtttgaatccaaagcagagagaactgcttctggaaaagtgtagtttaattttaactattctaaaa

SEQ ID NO: 378192 - DNA, 120 bp, Artificial Sequence
  ENSG00000143322_55 (sequence is synthesized)
gcaatgagcaaaggcccttgtccaaggcgttgacagttttctaaagtggttatgctgtatatctggatgcatgcctttgggctgccactgcttgattcctttcatgtacagataatatta

SEQ ID NO: 378193 - DNA, 120 bp, Artificial Sequence
  ENSG00000143322_56 (sequence is synthesized)
cttcagtttagatttcccactttaaaatgcagtgatttgtgttgaatacatcttgattgtgctttacctaaagtattttcttaaaaggctttgtgtaaaatttaaatgtatatattttcc

SEQ ID NO: 378194 - DNA, 120 bp, Artificial Sequence
  ENSG00000143322_57 (sequence is synthesized)
tgtagacttccatcatgattttcagagattagccttaaaaaatttggccctaagaaattcattcagtgtttttctagatgacctctgtacatagaggtcattatagtggagaccctttac

SEQ ID NO: 378195 - DNA, 120 bp, Artificial Sequence
  ENSG00000143322_58 (sequence is synthesized)
cagcagcattttaagatttaaattagatagaaagtttcttaggattcaactgaaaattggctagtaaaatatgtcccaggtaataaagcatgctgactttgctaaggcactgcccatttt

SEQ ID NO: 378196 - DNA, 120 bp, Artificial Sequence
  ENSG00000143322_59 (sequence is synthesized)
tatttaactaaagtcatggagattttgagtttaaaggatgcagtatagatagtggtttagtgtttaggctctaatgccagtctaaaaggcaagtcatttaaccttgggagcctcagtttc

SEQ ID NO: 378197 - DNA, 120 bp, Artificial Sequence
  ENSG00000143322_60 (sequence is synthesized)
ctcactgtaaaacagggataataatagtaactacctcagggttgttgtaaggattaaatgagatgatatttgtaagatacttagctcaagtgcctggcacacaatgagcacactctataa

SEQ ID NO: 378198 - DNA, 120 bp, Artificial Sequence
  ENSG00000143322_61 (sequence is synthesized)
agtgcctggcacacaatgagcacactctataaatgttctactactactattattaacacctagtctagggatgcacagcagaatcccctagggttaaaaaacaaaacaaaacaaacaaaa

SEQ ID NO: 378199 - DNA, 120 bp, Artificial Sequence
  ENSG00000143322_62 (sequence is synthesized)
aattcccagtgggctggggtctcggccagtgtattctccagtaatctcgccaggtgtttgaaacacccagtgctatctgaaaactatcagtaccccaaccctttggtttatagattaaga

SEQ ID NO: 378200 - DNA, 120 bp, Artificial Sequence
  ENSG00000143322_63 (sequence is synthesized)
aactagcagaagatggttaaattacttgcctattgtctcagaacggttaattagtggcggagccaaggctagaattcaagtctcttgactttatggttgtggggtctttccaccatacct

SEQ ID NO: 378201 - DNA, 120 bp, Artificial Sequence
  ENSG00000143322_64 (sequence is synthesized)
gctgccatgtgagacactgcaaaaaagtggctcagaccgacaatcagcctgtgtggtgctgcacactttctaaagcacatgctcctgacactttgaccttaaggggcttgaatgtggagt

SEQ ID NO: 378202 - DNA, 120 bp, Artificial Sequence
  ENSG00000143322_65 (sequence is synthesized)
aatgggaacacaagccaagcaagcactcagtagaattcagtcatttaaaaaattcaatggggtcattcttttggacagacctcagcaacacagcaatgtgcactttgtagtaaagaaata

SEQ ID NO: 378203 - DNA, 120 bp, Artificial Sequence
  ENSG00000143322_66 (sequence is synthesized)
ccaacttgagtttttaaaaaacctagttagtcctacattcccttttctttaaaaaaactttattgttcacattattttaatgactatgagataatgtatatgacagcactttgagaaaat

SEQ ID NO: 378204 - DNA, 120 bp, Artificial Sequence
  ENSG00000143322_67 (sequence is synthesized)
atcaactgtaatataactataaggttgtagtattgtctgtttaaaagataagacagttgattcaatgtggatggaccctgtggggtacctgaaaatgtagatacgtaagaatcacctctg

SEQ ID NO: 378205 - DNA, 120 bp, Artificial Sequence
  ENSG00000143322_68 (sequence is synthesized)
tcatttatcacatttagaaatatgaaactgcttaacaggtatgagcaggtatagcaagtgtttgctaaagttgtagttcagagctgaattacttcaggaaactagggaccaactttttgg

SEQ ID NO: 378206 - DNA, 120 bp, Artificial Sequence
  ENSG00000143322_69 (sequence is synthesized)
tttaattccgatctttaaaaagtaagaatgtgtactcactccagaacacagaagctcttccaaggaccttgactcaagaaggatgaggtcctcttactcttctccatttatccactatat

SEQ ID NO: 378207 - DNA, 120 bp, Artificial Sequence
  ENSG00000143322_70 (sequence is synthesized)
gcttggccatttatcctaaatgtggtgggaacagacttgttatctgttgatgttgacagtgtcttttttaacctatgtcctgcatagttttgttaggtttacagggggaggtggatggcc

SEQ ID NO: 378208 - DNA, 120 bp, Artificial Sequence
  ENSG00000143322_71 (sequence is synthesized)
ataaaaccagtgcactttgggaattacttttctaggatttcctaccagttataaatgacattgacatttgtcatcttttttttctttttctaaaaagaatagctgaatttaattcaccta

SEQ ID NO: 378209 - DNA, 120 bp, Artificial Sequence
  ENSG00000143322_72 (sequence is synthesized)
ttataaaatactcaaaagtaaattgccttggtggccacttctgaattatagctacatttcattatgaccccttctgctcccttccattttgctactgatgtcattcttgttatcaggctg

SEQ ID NO: 378210 - DNA, 120 bp, Artificial Sequence
  ENSG00000143322_73 (sequence is synthesized)
tgcccctaccaggagttcatattgggttgacagggttatctatatttttgttcttgatttttgagtttcatcatcttgcattaaattgttccacctggatttggggttcatctctgtgcc

SEQ ID NO: 378211 - DNA, 120 bp, Artificial Sequence
  ENSG00000143322_74 (sequence is synthesized)
ctaaggatctgctatgaccaatcctctttttgtaggtgggtctctggcttaagtattgataggcttcagcggtttgtgtctctgtcttagcttgtatcaagccagtagtagctcacttcc

SEQ ID NO: 378212 - DNA, 120 bp, Artificial Sequence
  ENSG00000143322_75 (sequence is synthesized)
tttgtaaattcctgcttcagtctgggatccgtaggagtatgtgagaacttctgaaacgtctccaactcttaacagtcaagatatctatatcatttggatagagttctggttttccaacta

SEQ ID NO: 378213 - DNA, 120 bp, Artificial Sequence
  ENSG00000143322_76 (sequence is synthesized)
ttttcttttttccagcaagccagtagtaatagttattgttacttgctctgttcagcacaactgtagttcacttgaacttcactgtcattccctacgctcctctcttactgagaagcatgg

SEQ ID NO: 378214 - DNA, 120 bp, Artificial Sequence
  ENSG00000143322_77 (sequence is synthesized)
gtgggattcagggctgtgggacaagctacagcctactctggagcactcacccccatgactcagtccagcctgtctcttgggaagtttattgcaatgtgcagacggatgaatttctgcttt

SEQ ID NO: 378215 - DNA, 120 bp, Artificial Sequence
  ENSG00000143322_78 (sequence is synthesized)
tttattgcaatgtgcagacggatgaatttctgcttttcatgccacctctctgaggtatgtattctatcttgagtatgtacaagatgataccttttggctgggcacagtggctcgtgcctg

SEQ ID NO: 378216 - DNA, 90 bp, Artificial Sequence
  ENSG00000143322_79 (sequence is synthesized)
aagtgacagagtgagacacgttaagaagaaaaaaaaaaaaaaggataccttcatttctgactcaatatcctagatccaaaggacaggaaa

SEQ ID NO: 378217 - DNA, 120 bp, Artificial Sequence
  ENSG00000143322_80 (sequence is synthesized)
tcatttctgactcaatatcctagatccaaaggacaggaaattagggaaggcttcaccctgtgggatcaagataagaagatcccatacttcttcccaggtaaggaggcctgtggcaggtca

SEQ ID NO: 378218 - DNA, 120 bp, Artificial Sequence
  ENSG00000143322_81 (sequence is synthesized)
tgattcaaagctgacttggaatggcagaaactgctgagaggccacccttggagatttgtgccttcaaagatgggtttcatgagtctcagagaggaaaagacttgtcagctgggttgattt

SEQ ID NO: 378219 - DNA, 120 bp, Artificial Sequence
  ENSG00000143322_82 (sequence is synthesized)
tgcatgattattgaactagagctggtagacacgagcttctcagatggcagtggccagatcctccatctgtgagaatccgccacttgaagtggtttcctgagagtgttcacttggcagttg

SEQ ID NO: 378220 - DNA, 120 bp, Artificial Sequence
  ENSG00000143322_83 (sequence is synthesized)
ctgcgtttctcaagcccacctggcgaggtctcgccggacccttccctccaagtgcacttacttcttcatccccatgtacatctctaactttgaaattgtttacctctcctacaaaaatct

SEQ ID NO: 378221 - DNA, 120 bp, Artificial Sequence
  ENSG00000143322_84 (sequence is synthesized)
taccttttgacctgagcagagtagcaaagccctgttcactctgagggagcagctggcgtgttgaaggggaaaggccaggcacagcactgtcctcagaccacaccatatttggagcagaat

SEQ ID NO: 378222 - DNA, 120 bp, Artificial Sequence
  ENSG00000143322_85 (sequence is synthesized)
tgtgatacatgtcatctgtgtctattctggaaggttctttgttcatcactgtactcgcatcagcaaattttcagggtcctacctgtcactccaggctactgagctgaaccctcagaagct

SEQ ID NO: 378223 - DNA, 120 bp, Artificial Sequence
  ENSG00000143322_86 (sequence is synthesized)
gaggtctccgagcatgctaagtaaccttttagaaaagctggaggcaaactgtcgaatgctagcaggctttatgaaaggaaacataaggagtttgtgtagtcagaacttgcttaaatttgc

SEQ ID NO: 378224 - DNA, 120 bp, Artificial Sequence
  ENSG00000143322_87 (sequence is synthesized)
ttcggaattaggcaccataaactttagttggagaatgggacttaaattttcacatatatgtatacttaattttcagcaattatgacacaataaaaagaatatgcaaatttattgttgttt

SEQ ID NO: 378225 - DNA, 120 bp, Artificial Sequence
  ENSG00000143322_88 (sequence is synthesized)
cagaaggttttgcaggactgggaacgctttagtgtcatcaacagtaaacctcagatactgttctgcacagttcagaagtaccataccaggtattgtgagtggcaagaacgccaggggaca

SEQ ID NO: 378226 - DNA, 120 bp, Artificial Sequence
  ENSG00000143322_89 (sequence is synthesized)
gagatgcttctggtagatgagggccagagaaaccagctctcctccattttgacagcaatttctcactgtggccatttggcctccattatgttttgagaggaatttcttgagatcttgaga

SEQ ID NO: 378227 - DNA, 120 bp, Artificial Sequence
  ENSG00000143322_90 (sequence is synthesized)
aatcaccatgattaggccaattgtcaatcagtattcagaaactagaaaggaacaatgagatacttgtttatggttctttagggcatatgtttgaaaaccctctcatctcagatctgtata

SEQ ID NO: 378228 - DNA, 120 bp, Artificial Sequence
  ENSG00000143322_91 (sequence is synthesized)
gctggtgtgtgtttgtgtccataaatacacgtgcattgctgtcgtgcccattaagaaagggggagtaagtaaaagaggaatcgctcagatctttccttggatgaacagcagtggcgtggt

SEQ ID NO: 378229 - DNA, 120 bp, Artificial Sequence
  ENSG00000143322_92 (sequence is synthesized)
tggtgtgttgactgtgaacaggctgacttagctgttgatgtatactcagaacctccatctcctcccagaccctgcacttttccttctctgcagtctgattctctaatgactgtcactgga

SEQ ID NO: 378230 - DNA, 120 bp, Artificial Sequence
  ENSG00000143322_93 (sequence is synthesized)
caaaccccagttttatgctcgcttagtaaaaataagtttaaacatttcatggtggttgacagaactttgtccccaaacatgcggattcaattctttaaaactcgttgaacgtttatacca

SEQ ID NO: 378231 - DNA, 120 bp, Artificial Sequence
  ENSG00000143322_94 (sequence is synthesized)
aaggtcccgccccgcaggtgtgtatgtggtgcacagagggtgaggtttggagcatcgggcactgtgtgcattgctaaggggacatagtgagacaatgtgggatttaactaaaaacacatc

SEQ ID NO: 378232 - DNA, 120 bp, Artificial Sequence
  ENSG00000143322_95 (sequence is synthesized)
aattgtgtgtcacattaccagtgttgtcaggtatttgttcttaattgttattgtaatatattttcagttgtttttctaatttaattctctccgtctgttgtctgactgtgaactgctaac

SEQ ID NO: 378233 - DNA, 120 bp, Artificial Sequence
  ENSG00000143322_96 (sequence is synthesized)
agtgttaaacttgatgtaaataaatgaggcccttgaaagggactgctttctctgtcttctcacaaggtttgccaagttgtgttctgttttaaataaaggttgcaatattttattggcaaa

SEQ ID NO: 378234 - DNA, 120 bp, Artificial Sequence
  ENSG00000143322_97 (sequence is synthesized)
ctctttacacagaacagtttaacttttgtgcttctgggcagaggtatggtccttgggacagttctccttccacctaatagttatggcagagatcaggacacttcactttgctgcctgtgc

SEQ ID NO: 378235 - DNA, 120 bp, Artificial Sequence
  ENSG00000143322_98 (sequence is synthesized)
gtagtccaggtgagagatgttgagatgttgcagatttgaactaaggcattggcagtagagatggagaacagggaatggatttgaaaataaatggaaccacaaattcaagggtttttcctt

SEQ ID NO: 378236 - DNA, 120 bp, Artificial Sequence
  ENSG00000143322_99 (sequence is synthesized)
ttgaaaataaatggaaccacaaattcaagggtttttcctttcatatatgataaaactatttttatattaaaaataagttggcctggctgggtgtggtggctcacgtttgtaatcccagca

SEQ ID NO: 378237 - DNA, 66 bp, Artificial Sequence
  ENSG00000143322_100 (sequence is synthesized)
caacatggtgaaacttcgtctctactgaaaatacaaaatttagctgggcttggtggcgtaggacgt

SEQ ID NO: 378238 - DNA, 74 bp, Artificial Sequence
  ENSG00000143322_101 (sequence is synthesized)
caagactccatctcggtggtgggagaggggtgcggacggggaataagtcagccgggtgtggtggctcacgcctg

SEQ ID NO: 378239 - DNA, 120 bp, Artificial Sequence
  ENSG00000143322_102 (sequence is synthesized)
agagcgaaactccatctcaaaataataatgataataataataataatcataataatcataagtggaggaagagagacataaaagtgttgttatatgacatagacatttggatagtttgcc

SEQ ID NO: 378240 - DNA, 120 bp, Artificial Sequence
  ENSG00000143322_103 (sequence is synthesized)
tatgacatagacatttggatagtttgcctttgtagacaggcactaaaaatagtctgatcaagaaaattgatactggaaaaactgttttttgtataatcgatctgggctgtgagaagcagg

SEQ ID NO: 378241 - DNA, 120 bp, Artificial Sequence
  ENSG00000143322_104 (sequence is synthesized)
tggtatagggatcacctgtgctatgtactatgaataaatttagaaactgtaaaggcttaaggaaaaaacaggtcgtaaaaggcttggaccactttgagtagaaactcaataaatgcccga

SEQ ID NO: 378242 - DNA, 120 bp, Artificial Sequence
  ENSG00000143322_105 (sequence is synthesized)
tgatagtaatgttttctaggctcttcaattaagttattgatatttacaaaaaatcactgctcaggaaaacaaaatagagtttaaaagtcattcaggccgggtgcggccacatttcttttg

SEQ ID NO: 378243 - DNA, 120 bp, Artificial Sequence
  ENSG00000143322_106 (sequence is synthesized)
tttttttaaaacgaaaaaaagattattttttgccatgttggccaaaaaaagatatttttctaaaagcactttttaaataattttttctatacttaaatagagggcctggatttatacagt

SEQ ID NO: 378244 - DNA, 120 bp, Artificial Sequence
  ENSG00000143322_107 (sequence is synthesized)
attacctaattctgaaaaataatccctgttgtcttttctacagtttgttttctgtggagagagaaaggaataagggtagtttgagtggacttgtaagaaacttacaatcatttcttcctt

SEQ ID NO: 378245 - DNA, 120 bp, Artificial Sequence
  ENSG00000143322_108 (sequence is synthesized)
aaaactacaaccactactacaacaaaatatcctctatgttttataaagctagtaaccatttctctttgagattcttttttccattttgagaaaactgcgtttcctattagtttatgtctg

SEQ ID NO: 378246 - DNA, 120 bp, Artificial Sequence
  ENSG00000143322_109 (sequence is synthesized)
attttggtgagtgcatataaatcacggctaaactctcattttgtggtcttttctctgactaccttgttttacattttcaacaagtaaattgcttcctcatgcttaggagacacagtgcct

SEQ ID NO: 378247 - DNA, 120 bp, Artificial Sequence
  ENSG00000143322_110 (sequence is synthesized)
atttgctaattcttcataacactttatactgtacagttctttcctactctggagccagcagctgaaatactgtgtatataatgaattcaaacaaatgtttcgctgttgaactcaccgtga

SEQ ID NO: 378248 - DNA, 65 bp, Artificial Sequence
  ENSG00000143322_111 (sequence is synthesized)
gaggcttctatgtagcatcctttcacttttcagttttcattaatgattaagagataaaggggcct

SEQ ID NO: 378249 - DNA, 120 bp, Artificial Sequence
  ENSG00000143322_112 (sequence is synthesized)
gtgcataacattgtgaaccaaaagacacagagcaggatgatgctagcaacgtattcatagtaactccaaactggaaacaacctaaacatccatcaagaggagaacaggtggattgtggta

SEQ ID NO: 378250 - DNA, 120 bp, Artificial Sequence
  ENSG00000143322_113 (sequence is synthesized)
tattcacacgttggcatgctacacagcaatgagaacccctgccacatgcagcagcgtggacgaatctacacacatgatactgggcgaaagaagccagacaaaagagtacatactttatga

SEQ ID NO: 378251 - DNA, 90 bp, Artificial Sequence
  ENSG00000143322_114 (sequence is synthesized)
ccacctcccaggttcaagctattctcgtgcctcaacgtagagacagggttttgctatgttggacagtcaagtcttgaactgctgggctca

SEQ ID NO: 378252 - DNA, 76 bp, Artificial Sequence
  ENSG00000143322_115 (sequence is synthesized)
atcaccacgcccagctaatttttgtagtagagacagggttttgctatgttggacagtcaagtcttgaactgctggg

SEQ ID NO: 378253 - DNA, 120 bp, Artificial Sequence
  ENSG00000143322_116 (sequence is synthesized)
ataaggaatctgccatatatcagtgaaatccttgactatggaaatgatgaaaatcattttgcaaagcagtattgcaggtggggctcacatagtcttcagcttgtgcacaattgctattac

SEQ ID NO: 378254 - DNA, 120 bp, Artificial Sequence
  ENSG00000143322_117 (sequence is synthesized)
ttttgaataagtattgttagcctgcagttgaggaggagaatcatgggccatgtgcaaaactctagacatgttggttttcttggccccttatagaattaatacaggtaactctgcttttgc

SEQ ID NO: 378255 - DNA, 120 bp, Artificial Sequence
  ENSG00000143322_118 (sequence is synthesized)
tcaaatagacaaatactcagaggcatatgaattcccagagaacaatacagtgaaagcaaggactcccttataaaccagcttcttagtttttgcttattaatttcagagaacgtggtggta

SEQ ID NO: 378256 - DNA, 120 bp, Artificial Sequence
  ENSG00000143322_119 (sequence is synthesized)
ctggggtaaggttgaaagggacttttttctgtgtcattttatttttttttttataaatgccttgattctttagagcttctcttacgatgttcagtatcctctacctttacctgccattct

SEQ ID NO: 378257 - DNA, 120 bp, Artificial Sequence
  ENSG00000143322_120 (sequence is synthesized)
tcttcagttattcagcaagcatttgttaaatacctcctatctgccaggactgtgttaagaactttgcataaacagaagtataggcctggtgtggtggctcacgtttgtaattacagcact

SEQ ID NO: 378258 - DNA, 84 bp, Artificial Sequence
  ENSG00000143322_121 (sequence is synthesized)
agaccagcctggccaacatggtgaactcccatctctactagtaatcccagctattcaagaggctgaaggctgaggcaggggagt

SEQ ID NO: 378259 - DNA, 86 bp, Artificial Sequence
  ENSG00000143322_122 (sequence is synthesized)
aattagccaggcgtggtggcatgcgccagtaatcccagctattcaagaggctgaaggctgaggcaggggagttgcttgagcctgga

SEQ ID NO: 378260 - DNA, 120 bp, Artificial Sequence
  ENSG00000143322_123 (sequence is synthesized)
tatgtttgtgtaatttgggcatttgtttagctaacagttattaaacacatactatgtaacttttggtaggagaagaataccattccagatacaaggaacatgttatgatgtttggggaac

SEQ ID NO: 378261 - DNA, 120 bp, Artificial Sequence
  ENSG00000143322_124 (sequence is synthesized)
aaacatacgtagaatgtattattaatatagagataaagatagagtattaatgcagcaactgtgatgcttttgagagtacagatgggaggtgcagtagcccccattatccagttttgcttt

SEQ ID NO: 378262 - DNA, 120 bp, Artificial Sequence
  ENSG00000143322_125 (sequence is synthesized)
atacagtttcagttactggcactccaccccagtcagaaagtattaagatattttgagggaaaaagagagataccacattcacataaattttattacaatatattgttataattgttcatt

SEQ ID NO: 378263 - DNA, 120 bp, Artificial Sequence
  ENSG00000143322_126 (sequence is synthesized)
gtattattgttaatctctttctgagcctaatttataaattaaattgtatcatggttatgtatgtgtaggaaaaacgtagtatatagtggatttggtactatcctgattgattttaagcat

SEQ ID NO: 378264 - DNA, 120 bp, Artificial Sequence
  ENSG00000143322_127 (sequence is synthesized)
ccactgggggtcttggaacatattcctcatggataagggggactactatatattggagctgagtattacaagtagaaatcagccagtcaaaagaaaagtggggtgagaacccattccagt

SEQ ID NO: 378265 - DNA, 120 bp, Artificial Sequence
  ENSG00000143322_128 (sequence is synthesized)
gtgaaccaaggccagaagatgggaagcagcatggtgtatattaaagtttacaatttgaggtatggagtagggagaggcgaagctggagaagtaggtagagacctgatcatgaaaggcctt

SEQ ID NO: 378266 - DNA, 120 bp, Artificial Sequence
  ENSG00000143322_129 (sequence is synthesized)
tgaatgccatgaaaaggagactttagcttgatgttaaactattgaagaagcttaagaaaagtgacgtggtcaatttttttcttaaatagatcactttgccagctgtgtggaggatggatt

SEQ ID NO: 378267 - DNA, 120 bp, Artificial Sequence
  ENSG00000143324_0 (sequence is synthesized)
atggagaggaggaggaagatggcgggcgggctgctctgaagagacctcggcggcggcggaggaggagagaagcgcagcgccgcgccgcgccggggcccatgtggggaggagtcggagtcg

SEQ ID NO: 378268 - DNA, 120 bp, Artificial Sequence
  ENSG00000143324_1 (sequence is synthesized)
ctgttgccgccgccgcctgtagctgctggacccgagtgggagtgagggggaaacggcaggatgaagttcgccgagcacctctccgcgcacatcactcccgagtggaggaagcaatacatc

SEQ ID NO: 378269 - DNA, 120 bp, Artificial Sequence
  ENSG00000143324_2 (sequence is synthesized)
cagtatgaggctttcaaggatatgctgtattcagctcaggaccaggcaccttctgtggaagttacagatgaggacacagtaaagaggtattttgccaagtttgaagagaagtttttccaa

SEQ ID NO: 378270 - DNA, 120 bp, Artificial Sequence
  ENSG00000143324_3 (sequence is synthesized)
acctgtgaaaaagaacttgccaaaatcaacacattttattcagagaagctcgcagaggctcagcgcaggtttgctacacttcagaatgagcttcagtcatcactggatgcacagaaagaa

SEQ ID NO: 378271 - DNA, 120 bp, Artificial Sequence
  ENSG00000143324_4 (sequence is synthesized)
agcactggtgttactacgctgcgacaacgcagaaagccagtcttccacttgtcccatgaggaacgtgtccaacatagaaatattaaagaccttaaactggccttcagtgagttctacctc

SEQ ID NO: 378272 - DNA, 120 bp, Artificial Sequence
  ENSG00000143324_5 (sequence is synthesized)
agtctaatcctgctgcagaactatcagaatctgaattttacagggtttcgaaaaatcctgaaaaagcatgacaagatcctggaaacatctcgtggagcagattggcgagtggctcacgta

SEQ ID NO: 378273 - DNA, 120 bp, Artificial Sequence
  ENSG00000143324_6 (sequence is synthesized)
gaggtggccccattttatacatgcaagaaaatcaaccagcttatctctgaaactgaggctgtagtgaccaatgaacttgaagatggtgacagacaaaaggctatgaagcgtttacgtgtc

SEQ ID NO: 378274 - DNA, 120 bp, Artificial Sequence
  ENSG00000143324_7 (sequence is synthesized)
ccccctttgggagctgctcagcctgcaccagcatggactacttttagagttggcctattttgtggaatattcattgtactgaatattacccttgtgcttgccgctgtatttaaacttgaa

SEQ ID NO: 378275 - DNA, 120 bp, Artificial Sequence
  ENSG00000143324_8 (sequence is synthesized)
acagatagaagtatatggcccttgataagaatctatcggggtggctttcttctgattgaattcctttttctactgggcatcaacacgtatggttggagacaggctggagtaaaccatgta

SEQ ID NO: 378276 - DNA, 120 bp, Artificial Sequence
  ENSG00000143324_9 (sequence is synthesized)
ctcatctttgaacttaatccgagaagcaatttgtctcatcaacatctctttgagattgctggattcctcgggatattgtggtgcctgagccttctggcatgcttctttgctccaattagt

SEQ ID NO: 378277 - DNA, 120 bp, Artificial Sequence
  ENSG00000143324_10 (sequence is synthesized)
gtcatccccacatatgtgtatccacttgccctttatggatttatggttttcttccttatcaaccccaccaaaactttctactataaatcccggttttggctgcttaaactgctgtttcga

SEQ ID NO: 378278 - DNA, 120 bp, Artificial Sequence
  ENSG00000143324_11 (sequence is synthesized)
gtatttacagcccccttccataaggtaggctttgctgatttctggctggcggatcagctgaacagcctgtcagtgatactgatggacctggaatatatgatctgcttctacagtttggag

SEQ ID NO: 378279 - DNA, 120 bp, Artificial Sequence
  ENSG00000143324_12 (sequence is synthesized)
ctcaaatgggatgaaagtaagggcctgttgccaaataattcagaagaatcaggaatttgccacaaatatacatatggtgtgcgggccattgttcagtgcattcctgcttggcttcgcttc

SEQ ID NO: 378280 - DNA, 120 bp, Artificial Sequence
  ENSG00000143324_13 (sequence is synthesized)
atccagtgcctgcgccgatatcgagacacaaaaagggcctttcctcatttagttaatgctggcaaatactccacaactttcttcatggtgacgtttgcagccctttacagcactcacaaa

SEQ ID NO: 378281 - DNA, 120 bp, Artificial Sequence
  ENSG00000143324_14 (sequence is synthesized)
gaacgaggtcactcggacactatggtgttcttttacctgtggattgtcttttatatcatcagttcctgctataccctcatctgggatctcaagatggactggggtctcttcgataagaat

SEQ ID NO: 378282 - DNA, 120 bp, Artificial Sequence
  ENSG00000143324_15 (sequence is synthesized)
gctggagagaacactttcctccgggaagagattgtatacccccaaaaagcctactactactgtgccataatagaggatgtgattctgcgctttgcttggactatccaaatctcgattacc

SEQ ID NO: 378283 - DNA, 120 bp, Artificial Sequence
  ENSG00000143324_16 (sequence is synthesized)
tctacaactttgttgcctcattctggggacatcattgctactgtctttgccccacttgaggttttccggcgatttgtgtggaacttcttccgcctggagaatgaacatctgaataactgt

SEQ ID NO: 378284 - DNA, 120 bp, Artificial Sequence
  ENSG00000143324_17 (sequence is synthesized)
ggtgaattccgtgctgtgcgggacatctctgtggcccccctgaacgcagatgatcagactctcctagaacagatgatggaccaggatgatggggtacgaaaccgccagaagaatcggtca

SEQ ID NO: 378285 - DNA, 120 bp, Artificial Sequence
  ENSG00000143324_18 (sequence is synthesized)
tggaagtacaaccagagcatatccctgcgccggcctcgcctcgcttctcaatccaaggctcgtgacactaaggtattgatagaagacacagatgatgaagctaacacttgaattttctga

SEQ ID NO: 378286 - DNA, 120 bp, Artificial Sequence
  ENSG00000143324_19 (sequence is synthesized)
agtctagcttaacatctttggttttcctactctacaatcctttcctcgaccaacgcaacctctagtacctttccagccgaaaacaggagaaaacacataacacattttccgagctcttcc

SEQ ID NO: 378287 - DNA, 120 bp, Artificial Sequence
  ENSG00000143324_20 (sequence is synthesized)
ggatcggatcctatggactccaaacaagctcactgtgtttcttttcttttcttctggtttaattttaattttctattttcaaaacaaatatttacttcatttgccaatcagaggatgttt

SEQ ID NO: 378288 - DNA, 120 bp, Artificial Sequence
  ENSG00000143324_21 (sequence is synthesized)
taagaaacaaaacatagtatcttatggattgtttacaatcacaaggacatagatacctatcaggatgaagaacaggcattgcaaggaccctctgatgggacggtactgagatatctcggc

SEQ ID NO: 378289 - DNA, 120 bp, Artificial Sequence
  ENSG00000143324_22 (sequence is synthesized)
ttccgctcagcccggttttgactggttgaaaccggacattggtttttaaattttttgtcagtttatgtggagaatttttttctttccttcatacccagcgcaaaggcactggccgcactt

SEQ ID NO: 378290 - DNA, 120 bp, Artificial Sequence
  ENSG00000143324_23 (sequence is synthesized)
gcaggaaaagtgcaacttaaagcagtaccttcattcatgaagctactttttaatttgatgtaacttttcttattttgggaagggttgctgggtgggtgggaaatatgatgtatttgttac

SEQ ID NO: 378291 - DNA, 120 bp, Artificial Sequence
  ENSG00000143324_24 (sequence is synthesized)
acatagttttctcattatttatgaaacttaaccatacagaatgatataactcctgtgcaatgaaggtgataacagtaaaagaaggcaggggaaacttacgttggatgacatttatgaggg

SEQ ID NO: 378292 - DNA, 120 bp, Artificial Sequence
  ENSG00000143324_25 (sequence is synthesized)
tcagtcccacatacctctttcaggagacaacttgcaccagtttgaccttttcttttctttgtttttattttaagccaaagtttcattgctaacttcttaagttgctgctgctttagagtc

SEQ ID NO: 378293 - DNA, 120 bp, Artificial Sequence
  ENSG00000143324_26 (sequence is synthesized)
ctgagcatatctctcataacaaggaatcccacacttcacaccaccggctgaatttcatggaagaggttctgataatttttttaactttttaaggaacagatgtggaatacactggcccat

SEQ ID NO: 378294 - DNA, 120 bp, Artificial Sequence
  ENSG00000143324_27 (sequence is synthesized)
atttcaaccttaacagctgaagctatgccttattatgcatccacatgtatggtccctgtagcgtgacctttactagctctgaatcagaagacagagctatttcagaggctctgtgtgccc

SEQ ID NO: 378295 - DNA, 120 bp, Artificial Sequence
  ENSG00000143324_28 (sequence is synthesized)
tcactagatagtttttcttctgggttcaaccactttagccagaatttgatcaaattaaaagtctgtcatggggaaactatatttttgagcacatggaacaaattatacttcctcattcat

SEQ ID NO: 378296 - DNA, 120 bp, Artificial Sequence
  ENSG00000143324_29 (sequence is synthesized)
attatgttgatacaaaagaccttggcagccatttctcccagcagttttaaaggatgaacattggatttcatgccatcccatagaaaacctgttttaaaattttagggatctttacttggt

SEQ ID NO: 378297 - DNA, 120 bp, Artificial Sequence
  ENSG00000143324_30 (sequence is synthesized)
catacatgaaaagtacactgcttagaaattatagactattatgatctgtccacagtgcccattgtcacttctttgtctcatttcttccctttgttccttagtcatccaaataagcctgaa

SEQ ID NO: 378298 - DNA, 120 bp, Artificial Sequence
  ENSG00000143324_31 (sequence is synthesized)
aaccataagagatattactttattgaatatggttggcattaaatttagcatttcattatctaacaaaattaatataaattccaggacatggtaaaatgtgttttaataacccccagaccc

SEQ ID NO: 378299 - DNA, 120 bp, Artificial Sequence
  ENSG00000143324_32 (sequence is synthesized)
aaatgaaaatttcaaagtcaataccagcagattcatgaaagtaaatttagtcctataattttcagcttaattataaacaaaggaacaaataagtggaagggcagctattaccattcgctt

SEQ ID NO: 378300 - DNA, 120 bp, Artificial Sequence
  ENSG00000143324_33 (sequence is synthesized)
agtcaaaacattcggttactgccctttaatacactcctatcatcagcacttccaccatgtattacaagtcttgacccatccctgtcgtaactccagtaaaagttactgttactagaaaat

SEQ ID NO: 378301 - DNA, 120 bp, Artificial Sequence
  ENSG00000143324_34 (sequence is synthesized)
ttttatcaattaactgacaaatagtttctttttaaagtagtttcttccatctttattctgactagcttccaaaatgtgttccctttttgaatcgaggtttttttgttttgttttgttttc

SEQ ID NO: 378302 - DNA, 120 bp, Artificial Sequence
  ENSG00000143324_35 (sequence is synthesized)
tttaattaatgctttttagtttaaataaattgaatcatttataataatcagtgttaacaatttagtgacccttggtaggttaaaggttgcattatttatacttgagatttttttccccta

SEQ ID NO: 378303 - DNA, 120 bp, Artificial Sequence
  ENSG00000143324_36 (sequence is synthesized)
actattctgttttttgtactttaaaactatgggggaaatatcactggtctgtcaagaaacagcagtaattattactgagttaaattgaaaagtccagtggaccaggcatttcttatataa

SEQ ID NO: 378304 - DNA, 120 bp, Artificial Sequence
  ENSG00000143324_37 (sequence is synthesized)
ataaaattggtggtactaatgtgtatccagagacatttgaattattaactttattctttattagtgaatctctatgatggcacacataaaatcttacagttgacttctgctgtttgaatt

SEQ ID NO: 378305 - DNA, 120 bp, Artificial Sequence
  ENSG00000143324_38 (sequence is synthesized)
ccccagtgtttttacattaatgtatcctatggccagtttagtctttcttcaactgttacagttctaggccctaatcggtcttattctttcacatatgatgcaatgatagatgtaatcctt

SEQ ID NO: 378306 - DNA, 120 bp, Artificial Sequence
  ENSG00000143324_39 (sequence is synthesized)
ttctgaagtgtttgtcggattggcatagtctattcaaaaataaggcttatgtaactttcagcttgctatgtgacagaagtttaaatgtgtatttaagtacacagctttatgttcctctta

SEQ ID NO: 378307 - DNA, 120 bp, Artificial Sequence
  ENSG00000143324_40 (sequence is synthesized)
aagctgtaaagagaaaagaggacttttcctcatcaagagagcttgggagacaaagcatacatttaatttttttctttcaaaaaaggcaatgtgcactttcctctcctaaattttatatgc

SEQ ID NO: 378308 - DNA, 120 bp, Artificial Sequence
  ENSG00000143324_41 (sequence is synthesized)
cctagcagttgcgaatgttgtgtccaccttacaatttgattggaggctcccatacactgaaactctcaatagaattcttaaaaatgaacatcagctgggcgcagtggctcacgtctgtaa

SEQ ID NO: 378309 - DNA, 77 bp, Artificial Sequence
  ENSG00000143324_42 (sequence is synthesized)
gcaggagaattgcttaaacctgggaagcagaggttgcagtgagactagatcatgccactgcactccactgccacaaa

SEQ ID NO: 378310 - DNA, 120 bp, Artificial Sequence
  ENSG00000143324_43 (sequence is synthesized)
agcaagactccatctcaaaaacaaacaaaaaaaatcacagactcattttaaaggagcagcaacctaaccaaatacaaacttcatttgattttaggtttagaaattctagttttattttgg

SEQ ID NO: 378311 - DNA, 120 bp, Artificial Sequence
  ENSG00000143324_44 (sequence is synthesized)
ttggagaatcactcagtttttaatatcaattaaaatagtcctcaaaggaatgaagaggaagtctaaataaatgaataaaactcatttttcattttatggtagtatagaaagcattgatgt

SEQ ID NO: 378312 - DNA, 120 bp, Artificial Sequence
  ENSG00000143324_45 (sequence is synthesized)
gtgtagagaaattaaaagacaagagtggtttactgtctatgcacaaatgagtgcctatatttaaggctgcctataccattacagtggcgtaattggtgatttcatagcatacagagaaac

SEQ ID NO: 378313 - DNA, 120 bp, Artificial Sequence
  ENSG00000143324_46 (sequence is synthesized)
aatgaaatcaaagattaaatcattaggttatgatggtcatttgtaagattggaaagtagtcaaaaacccatgtgcaactttttttcagcactctaccattaggctccttaggcaagctgc

SEQ ID NO: 378314 - DNA, 120 bp, Artificial Sequence
  ENSG00000143324_47 (sequence is synthesized)
ttaacttccgtcagaagcaaaggtgtgggagaacaccattcacctcagtagtaacttataaaaaccgtttaaagaaggaaaatgggccccagcccctaggatccctgacttcctgatatt

SEQ ID NO: 378315 - DNA, 120 bp, Artificial Sequence
  ENSG00000143324_48 (sequence is synthesized)
ctaaacatgagagttctgtgactttaactgagctctttaccagaagtaacgtgttgatgtatattatctttccaccatgctttgaccaaagtacattcacagtaactagagaaagcagat

SEQ ID NO: 378316 - DNA, 120 bp, Artificial Sequence
  ENSG00000143324_49 (sequence is synthesized)
catccatttctggataggtgaactacggcaaggtaagaacagaaaaaagtaaagtagtattgagtcatgcaggtatcagattaacagacattcattgaagataagtgaaataactttgga

SEQ ID NO: 378317 - DNA, 120 bp, Artificial Sequence
  ENSG00000143324_50 (sequence is synthesized)
gatagcagagaagagcaagaagatgttggacgttggcagtaagccgcagcaaggcagttaggaaagtacgtgagcctgatgacgcgaaggtgatgcctccatctgtccgcttagtggtta

SEQ ID NO: 378318 - DNA, 120 bp, Artificial Sequence
  ENSG00000143324_51 (sequence is synthesized)
ttaaattgctgggaaagacctgcctttattttcctatcatcttttccccattactttgcattattcaggaaataattatttattcccaaatgcagttttctaagcagtgaccacaaaaat

SEQ ID NO: 378319 - DNA, 120 bp, Artificial Sequence
  ENSG00000143324_52 (sequence is synthesized)
ttcttattctaaggaaaataattaagaaaataaccctatctgtggcattgttttaaaatgtgggatacaaatctggtaagcagatttcaggtcattattgttttcttttaatggtttaca

SEQ ID NO: 378320 - DNA, 120 bp, Artificial Sequence
  ENSG00000143324_53 (sequence is synthesized)
tgaaattttcctctcaaaaaacaagtacctcttactgtataacatttgagtttttaaaattgagatagcttctgagagaaaaaaagaaagttgaatttgtagctctctcaactacaaaat

SEQ ID NO: 378321 - DNA, 120 bp, Artificial Sequence
  ENSG00000143324_54 (sequence is synthesized)
caccacacttttctcaaatctaataggaattcagtgtcattacagatacggtctctagtgaccaggtgaagacaattgaagctttggtagaacttctgcaaaagttaggtaaagaagaat

SEQ ID NO: 378322 - DNA, 120 bp, Artificial Sequence
  ENSG00000143324_55 (sequence is synthesized)
aaatccaatttatcagctttgttcatattctttttctgagtgatctaaatttttcttgcttgtgatcattagctaagacaaggagtgttaaaggttttctaaatgcaaacacatacgttt

SEQ ID NO: 378323 - DNA, 120 bp, Artificial Sequence
  ENSG00000143324_56 (sequence is synthesized)
ctgcatttcagaagtcagtcttgatagtaaatcctacaaactctcaactttctgcattgtattttaagtctatacaatgttagagcacatggtaatgtgggacagagttgattatatgat

SEQ ID NO: 378324 - DNA, 120 bp, Artificial Sequence
  ENSG00000143324_57 (sequence is synthesized)
agcatgagaaatttgcactggttggtgttacaaaccaatgatctaaccagcatactctccaaatatgaaaaagtaaaaacatctcattaggtttggaagagcctaaggtagtccatacag

SEQ ID NO: 378325 - DNA, 120 bp, Artificial Sequence
  ENSG00000143324_58 (sequence is synthesized)
gaagtttgcctgagaacagagaggagcctgttgattggcatggctcatgatgcctttcttgtatgaattatcaaaactgatactgagttgcccctagaaaacagccttccagaatatgtt

SEQ ID NO: 378326 - DNA, 120 bp, Artificial Sequence
  ENSG00000143324_59 (sequence is synthesized)
tgcttatttatggtggaagaggaagtgagaacaagatgagagtttcccttaaagtgaggagaatcattatacaactttgcaactgaagtatgtttccttgtagcaaacctttggtttatt

SEQ ID NO: 378327 - DNA, 120 bp, Artificial Sequence
  ENSG00000143324_60 (sequence is synthesized)
ttatcgtcaaatcaaagccaccctcagttttttgtatggtgccatcaacctaaggaggacaatcaaataacctattgtttgccttggattcagtatatctactaagtacacagtctcgta

SEQ ID NO: 378328 - DNA, 120 bp, Artificial Sequence
  ENSG00000143324_61 (sequence is synthesized)
taccttcaaaccagttacttgactaaacttccaccatattaccttagttcttcctatgccctttcctctgtgccaccacaaatcagagggaaagactgcagtacttctagaaagttgtgg

SEQ ID NO: 378329 - DNA, 120 bp, Artificial Sequence
  ENSG00000143324_62 (sequence is synthesized)
acttctaagaaagagccaggcttccatctcactatcccttgatcattatctctgaagtccctacctgcacttccctgattgccctgtagcaacaccagcatggtgggaattggagggaaa

SEQ ID NO: 378330 - DNA, 120 bp, Artificial Sequence
  ENSG00000143324_63 (sequence is synthesized)
gattgtggaaaatccctaaagggtcattgttcatgacgttattttgaattgtaaaattgtgagccactcacatttcaattacaaaaagaacagaactcttaatcacgttgtgaagattaa

SEQ ID NO: 378331 - DNA, 120 bp, Artificial Sequence
  ENSG00000143324_64 (sequence is synthesized)
tttcttgccattttctggattagcacagaagcttgtatcaatgaagagtatttaggaggggaatagggggaaaattgtatttttctgttcaaactctctccttctatttgtgtttccttc

SEQ ID NO: 378332 - DNA, 120 bp, Artificial Sequence
  ENSG00000143324_65 (sequence is synthesized)
acccctctccctccaccacactgtgttggtcaaatgatactattctatgaaaccctgagctatagttgtcaaaagtaactatggattgtgattagtcctctgtgggtgcttccttccctc

SEQ ID NO: 378333 - DNA, 120 bp, Artificial Sequence
  ENSG00000143324_66 (sequence is synthesized)
ttttttctccctcactctctttctcagtctccactctggtaaatggaaaaggtgatgtcgaagaattgatgcttgcttggactcatgttgtatctgtgactatgctattagctgtctcct

SEQ ID NO: 378334 - DNA, 120 bp, Artificial Sequence
  ENSG00000143324_67 (sequence is synthesized)
ttttccttcctatatgggtagaattcttatgacttatgaagttcccttcttgataagtaggttaaatgcacaatgtggtactgttttatagtttctagatggttgtataaagcaaaaagt

SEQ ID NO: 378335 - DNA, 120 bp, Artificial Sequence
  ENSG00000143324_68 (sequence is synthesized)
taatgtggttatgtgtttttaaagaaaataagtgattggtcactaaactctgtccttttttcattattacaatttctctctgttttccaacagtttgctgactcctttgtcactggtgaa

SEQ ID NO: 378336 - DNA, 120 bp, Artificial Sequence
  ENSG00000143324_69 (sequence is synthesized)
cagaccagtgctccttcccttcctcaccttcctgaatgcctcggcctggcacctgaactccccatcgctgctgccaccttcccccacccacttctttctctttcatgtgtgctacttcat

SEQ ID NO: 378337 - DNA, 120 bp, Artificial Sequence
  ENSG00000143324_70 (sequence is synthesized)
caattttttaaaagaaattctagtaaaaaaagaaaaatacctcatgacgattttctttttaaaatcatttgcttactaactaaatcaaatgttctatcccatttaaaacaaacaaaaaaa

SEQ ID NO: 378338 - DNA, 120 bp, Artificial Sequence
  ENSG00000143324_71 (sequence is synthesized)
ttttccggtaagcaaactactgaaaagtttattaaagattctttttaacctaaaagacacccaatacttacaaattagaatttattataacttgtacttgaaaacctttaattttccaac

SEQ ID NO: 378339 - DNA, 120 bp, Artificial Sequence
  ENSG00000143333_0 (sequence is synthesized)
gcttgcaggctgctaaacccaaccgcagttgactagcacctgctaccgcgcctttgcttcctggcgcacgcggagcctcctggagcctgccaccatcctgcctactacgtgctgccctgc

SEQ ID NO: 378340 - DNA, 120 bp, Artificial Sequence
  ENSG00000143333_1 (sequence is synthesized)
gcccgcagccatgtgccgcaccctggccgccttccccaccacctgcctggagagagccaaagagttcaagacacgtctggggatctttcttcacaaatcagagctgggctgcgatactgg

SEQ ID NO: 378341 - DNA, 120 bp, Artificial Sequence
  ENSG00000143333_2 (sequence is synthesized)
gagtactggcaagttcgagtggggcagtaaacacagcaaagagaatagaaacttctcagaagatgtgctggggtggagagagtcgttcgacctgctgctgagcagtaaaaatggagtggc

SEQ ID NO: 378342 - DNA, 120 bp, Artificial Sequence
  ENSG00000143333_3 (sequence is synthesized)
tgccttccacgctttcctgaagacagagttcagtgaggagaacctggagttctggctggcctgtgaggagttcaagaagatccgatcagctaccaagctggcctccagggcacaccagat

SEQ ID NO: 378343 - DNA, 120 bp, Artificial Sequence
  ENSG00000143333_4 (sequence is synthesized)
ctttgaggagttcatttgcagtgaggcccctaaagaggtcaacattgaccatgagacccacgagctgacgaggatgaacctgcagactgccacagccacatgctttgatgcggctcaggg

SEQ ID NO: 378344 - DNA, 120 bp, Artificial Sequence
  ENSG00000143333_5 (sequence is synthesized)
gaagacacgtaccctgatggagaaggactcctacccacgcttcctgaagtcgcctgcttaccgggacctggctgcccaagcctcagccgcctctgccactctgtccagctgcagcctgga

SEQ ID NO: 378345 - DNA, 120 bp, Artificial Sequence
  ENSG00000143333_6 (sequence is synthesized)
cgagccctcacacacctgagtctccacggcagtgaggaagccagccgggaagagaggttgagtcacccatccccgaggtggctgcccctgtgtgggaggcaggttctgcaaagcaagtgc

SEQ ID NO: 378346 - DNA, 120 bp, Artificial Sequence
  ENSG00000143333_7 (sequence is synthesized)
aaaaaaaaaaaaaaaaaaaaaatgcgctccagcagcctgtttgggaagcagcagtctctccttcagatactgtgggactcatgctggagaggagccgcccacttccaggacctgtgaata

SEQ ID NO: 378347 - DNA, 120 bp, Artificial Sequence
  ENSG00000143333_8 (sequence is synthesized)
gacctgtgaataagggctaatgatgagggttggtggggctctctgtggggcaaaaaggtggtatgggggttagcactggctctcgttctcaccggagaaggaagtgttctagtgtggttt

SEQ ID NO: 378348 - DNA, 120 bp, Artificial Sequence
  ENSG00000143333_9 (sequence is synthesized)
aggaaacatgtggataaagggaaccatgaaaatgagaggaggaaagacatccagatcagctgttttgcctgttgctcagttgactctgattgcatcctgttttcctaattcccagactgt

SEQ ID NO: 378349 - DNA, 120 bp, Artificial Sequence
  ENSG00000143333_10 (sequence is synthesized)
cggaagggaccctggatgtggagtcttcccctttggccctcctcactggcctctgggctagcccagagtcccttagcttgtacctcgtaacactcctgtgtgtctgtccagccttgcagt

SEQ ID NO: 378350 - DNA, 120 bp, Artificial Sequence
  ENSG00000143333_11 (sequence is synthesized)
catgtcaaggccagcaagctgatgtgactcttgccccatgcgagatatttatacctcaaacactggcctgtgagccctttccaagtcagtggagagccctgaaaggaggctcacttgaat

SEQ ID NO: 378351 - DNA, 120 bp, Artificial Sequence
  ENSG00000143333_12 (sequence is synthesized)
ccagctcagtgctctgggtggccccctgcaggtggcccctgaccctgcgttgcagcagggtccacctgtgagcaggcccgccctggggcctcttcctggatgtgccctctctgagttctg

SEQ ID NO: 378352 - DNA, 120 bp, Artificial Sequence
  ENSG00000143333_13 (sequence is synthesized)
tgctgtctcttggaggcagggcccaggagaacaaagtgtggaggcctcggggagtggcttttccagctctcatgccccgcagtgtggaacaaggcagaaaaggatcctaggaaataagtc

SEQ ID NO: 378353 - DNA, 120 bp, Artificial Sequence
  ENSG00000143333_14 (sequence is synthesized)
tcttggcggtccctgagagtcctgctgaaatccagccagtgttttttgtggtatgagaacaggcaaaaagagatgccccgagatagaaggggagccttgtgtttctttcctgcagacgtg

SEQ ID NO: 378354 - DNA, 120 bp, Artificial Sequence
  ENSG00000143333_15 (sequence is synthesized)
agatgaacactggagtgggcagaggtggcccaggaccatggcacccttagagtgcagaagctggggggagaggctgcttcgaagggcaggactggggataatcagaacctgcctgtcacc

SEQ ID NO: 378355 - DNA, 120 bp, Artificial Sequence
  ENSG00000143333_16 (sequence is synthesized)
tcagggcatcactgaacaaacatttcctgatggcaactcctgcggcagagcccaggctggggaagtgaactacccagggcagcccctttgtggcccaggataatcaacactgttctctct

SEQ ID NO: 378356 - DNA, 120 bp, Artificial Sequence
  ENSG00000143333_17 (sequence is synthesized)
gtaccatgagctcctccaggagattatttaagtgtattgtatcattggttttctgtgattgtcataacattgtttttgttattgttggtgctgttgttatttattattgtaatttcagtt

SEQ ID NO: 378357 - DNA, 120 bp, Artificial Sequence
  ENSG00000143333_18 (sequence is synthesized)
tgcctctactggagaatctcagcaggggtttcagcctgactgtctccctttctctaccagactctacctctgaatgtgctgggaacctcttggagcctgtcaggaactcctcactgttta

SEQ ID NO: 378358 - DNA, 120 bp, Artificial Sequence
  ENSG00000143333_19 (sequence is synthesized)
aatatttatttattgtgacaaatggagctggtttcctagatatgaatgatgtttgcaatccccattttcctgtttcagcatgttatattcttataaaataaaagcaaaagtcaaatatga

SEQ ID NO: 378359 - DNA, 120 bp, Artificial Sequence
  ENSG00000143337_0 (sequence is synthesized)
caccatgggcccagaggcaggtttgctacacagcagcgacgacgcaggcggcggccccagcgactcgcaactgcctccctgaccacagcggccaccgcccaacacccccgagaagccatc

SEQ ID NO: 378360 - DNA, 120 bp, Artificial Sequence
  ENSG00000143337_1 (sequence is synthesized)
gccaccaccggcaggagaacctagggtccataaagccatcttcgcgatcgactaaagctacgtcaacaactatggcgggcgacgggcggcgggcagaggcggtgcgggaaggatggggtg

SEQ ID NO: 378361 - DNA, 120 bp, Artificial Sequence
  ENSG00000143337_2 (sequence is synthesized)
tgtacgtcacccccagggcccccatccgagagggaaggggccggctcgcccctcaaaatggcggcagcagcgatgcgcctgcgtacagaactcctccgtcgcgccagggccggcgggaag

SEQ ID NO: 378362 - DNA, 120 bp, Artificial Sequence
  ENSG00000143337_3 (sequence is synthesized)
tgaggttctcggacgagccgccagaagtgtacggcgacttcgagcccctggtggccaaagaaaggtccccggtgggaaaacgaacccggctagaagagttccggtccgattctgcgaaag

SEQ ID NO: 378363 - DNA, 120 bp, Artificial Sequence
  ENSG00000143337_4 (sequence is synthesized)
aggaagtgagagaaagcgcgtactaccttcggtctaggcagcggaggcagccgcgaccccaggaaaccgaggaaatgaagacgcgaaggactacccgccttcagcagcagcactcagagc

SEQ ID NO: 378364 - DNA, 120 bp, Artificial Sequence
  ENSG00000143337_5 (sequence is synthesized)
agcctccgctacagccgtctcctgttatgaccaggagagggctgcgggactctcattcctctgaagaggatgaagcatcttcccaaactgatttaagccaaacgatctcaaagaaaactg

SEQ ID NO: 378365 - DNA, 120 bp, Artificial Sequence
  ENSG00000143337_6 (sequence is synthesized)
tcaggagcatacaagaggctccagtgagtgaagatcttgtaatcaggttacgtcgaccccctctaagatacccaagatatgaagccaccagtgtccaacagaaggtcaatttctctgaag

SEQ ID NO: 378366 - DNA, 120 bp, Artificial Sequence
  ENSG00000143337_7 (sequence is synthesized)
aaggagaaactgaagaagatgatcaagacagctctcacagcagtgtcactactgttaaggccagatccagggattctgatgaatctggagataaaaccaccagatcatctagtcaatata

SEQ ID NO: 378367 - DNA, 120 bp, Artificial Sequence
  ENSG00000143337_8 (sequence is synthesized)
tagaatcattttggcagtcatcacaaagtcaaaacttcacagctcatgataagcaaccttcagtgctaagctcaggatatcaaaaaactccccaggaatgggccccacaaactgcaagaa

SEQ ID NO: 378368 - DNA, 120 bp, Artificial Sequence
  ENSG00000143337_9 (sequence is synthesized)
taaggaccaggatgcaaaatgacagcattctgaaatcagagcttggaaaccagtcaccatcaacctccagccgacaagtgactggacaaccccaaaatgcatcttttgtcaagaggaacc

SEQ ID NO: 378369 - DNA, 120 bp, Artificial Sequence
  ENSG00000143337_10 (sequence is synthesized)
ggtggtggctacttcctctgatagctgctcttgcctctgggagtttttggttctttagtactcctgaggtagaaaccactgctgttcaagagttccagaaccagatgaatcaacttaaga

SEQ ID NO: 378370 - DNA, 120 bp, Artificial Sequence
  ENSG00000143337_11 (sequence is synthesized)
ataagtaccaaggtcaagatgagaagctgtggaaaaggagccaaacattcctggaaaaacatcttaatagctcccatcctcggtctcagcctgctatcttactgctcactgctgcccgag

SEQ ID NO: 378371 - DNA, 120 bp, Artificial Sequence
  ENSG00000143337_12 (sequence is synthesized)
atgctgaagaagcacttaggtgtctgagtgaacaaattgctgatgcctattcttcttttcgtagtgtccgtgccatccggattgatgggacagataaagctactcaagacagtgatactg

SEQ ID NO: 378372 - DNA, 120 bp, Artificial Sequence
  ENSG00000143337_13 (sequence is synthesized)
tcaaactagaggtagaccaagaactgagcaatggatttaagaatggccagaatgcagctgtggtacaccgctttgagtcatttcccgcaggctctactttgatcttctacaaatattgtg

SEQ ID NO: 378373 - DNA, 120 bp, Artificial Sequence
  ENSG00000143337_14 (sequence is synthesized)
accatgaaaacgcggccttcaaagatgtagccttagtcctgactgtcttattggaggaagagacacttggaacaagtctaggcctaaaggaagttgaagaaaaagtaagagattttctta

SEQ ID NO: 378374 - DNA, 120 bp, Artificial Sequence
  ENSG00000143337_15 (sequence is synthesized)
aagtcaagttcaccaattctaacacacccaactcctacaatcatatggacccagacaaactgaatggcctctggagccgtatttctcacttagttctgcctgtgcaacctgaaaatgccc

SEQ ID NO: 378375 - DNA, 120 bp, Artificial Sequence
  ENSG00000143337_16 (sequence is synthesized)
tgaaaaggggcatctgcttataagaagtgagagagaagaaaaatcatgtcccaagttctgagaattgttcacactttctaaccagagacagaattcagagctctttttgaaagaactagt

SEQ ID NO: 378376 - DNA, 120 bp, Artificial Sequence
  ENSG00000143337_17 (sequence is synthesized)
ttctttttaaagaagttaagtgcttacataaacatggaacatataaatcattcattcaacctaattatctgtgatatgagagaatcatttcagtttccattgagagctctgttaaaggta

SEQ ID NO: 378377 - DNA, 120 bp, Artificial Sequence
  ENSG00000143337_18 (sequence is synthesized)
tcttaggagtgcagattatatgcagttccttagagaatctgttttgattctgggctgagttattacagttatggtatgaccagtgagagggatttgtgtcctttcttatgaaccttcctg

SEQ ID NO: 378378 - DNA, 120 bp, Artificial Sequence
  ENSG00000143337_19 (sequence is synthesized)
attttttaacttagatttctcactaagtttcctgagttattagtaagattgctccctaaatgtaaccagggattttcccattatgttcccttttataccatttaggtgtgagttccttag

SEQ ID NO: 378379 - DNA, 120 bp, Artificial Sequence
  ENSG00000143337_20 (sequence is synthesized)
cttctgcctataggaacataagtaatgaaaggtcatctaggtgtgtgtttggaatttttttcttttgttttttggaaaatggaaagaacaaggcaaggaaggaaaattaatggggaagct

SEQ ID NO: 378380 - DNA, 120 bp, Artificial Sequence
  ENSG00000143337_21 (sequence is synthesized)
gaagggaggaaatgttacagtaatccactgagatgtagtttagtcaaacataggtatatgaactgttaatcttggtggattccgttgggatttgttttttacatctcctttttccttcct

SEQ ID NO: 378381 - DNA, 120 bp, Artificial Sequence
  ENSG00000143337_22 (sequence is synthesized)
tccttgaagaaaaattcttggctgtcccaaggattcttcatgtatattgcaaaatttaatatatttgttcacttgagtcttaagagtaggtcaggccaaggcaggtggatcacctgaggt

SEQ ID NO: 378382 - DNA, 120 bp, Artificial Sequence
  ENSG00000143337_23 (sequence is synthesized)
gggaggcggaggttgcagtaagccgagaccatgcttattgccctccagtctgggcaacaaaaatgaaactccgtctcaaaaaaaaaaaagtaggtcaattcgtaacagtttattttggac

SEQ ID NO: 378383 - DNA, 120 bp, Artificial Sequence
  ENSG00000143337_24 (sequence is synthesized)
tttattttggacacaccctgaagcttttgttttgaattaagaaatgagtttcaggaattgacaaaccatttgttaaccagctgtcctgggctattgaagaagatttcattttccgcgcat

SEQ ID NO: 378384 - DNA, 120 bp, Artificial Sequence
  ENSG00000143337_25 (sequence is synthesized)
ccacttgttgcagtccaagtcctctagtgcaacgccatagcaaatataaagatttactatgcacgtgatacattttatggagtgcctcaagccaagatagtgaatttatatgaagggtgt

SEQ ID NO: 378385 - DNA, 120 bp, Artificial Sequence
  ENSG00000143337_26 (sequence is synthesized)
gaaatgtatttctttactactatagtagtttagttataactttgcatctataattgagctttctcatctgtcaaatgctatggttttcttaaaatgttacaattctagatctatccacct

SEQ ID NO: 378386 - DNA, 120 bp, Artificial Sequence
  ENSG00000143337_27 (sequence is synthesized)
tgtttttttattgtctacaaaccattaaatgtaaatattgtttttagagtcagtcattggctttgtcatttaccctttgagagttccacaagtggtagtagagtggtttaacgtctttcc

SEQ ID NO: 378387 - DNA, 120 bp, Artificial Sequence
  ENSG00000143337_28 (sequence is synthesized)
tctagtactaccagtattcataaatgtataccccttactgtaatttgttcctcttagaagtcagatcatctgatttatagaggattatgaaaaccagagtttttgaaaaggcttatttta

SEQ ID NO: 378388 - DNA, 120 bp, Artificial Sequence
  ENSG00000143337_29 (sequence is synthesized)
tacatacgtattatatagagaaacaaatgtttttattaaatgtttcattgacccaagtaatttaaaagtaatatgttacctatgtctttcaggaaaaataattatagcagctgatctgta

SEQ ID NO: 378389 - DNA, 120 bp, Artificial Sequence
  ENSG00000143337_30 (sequence is synthesized)
agctgatctgtaaatgactttaaaagctattttagtaatttaaataaatttactttcttggtttatactctctatgtgttataaacttaatgatttatcatctttaaaaaaagaaatcca

SEQ ID NO: 378390 - DNA, 120 bp, Artificial Sequence
  ENSG00000143337_31 (sequence is synthesized)
gaacaattgtagcaactctggctaggagaaacaaaaatcaaagaactggagccatttgcaagtacattggttagaagtggaatagccgtaactttccattttatctcggcacttagggtt

SEQ ID NO: 378391 - DNA, 120 bp, Artificial Sequence
  ENSG00000143337_32 (sequence is synthesized)
tttaaaaatacagttaagttagatattcctgacttagcaaaagaatctccacagcagcttttcttttttttttttttaagtagacatgggatctcgctatattgcccaggctgtttttga

SEQ ID NO: 378392 - DNA, 120 bp, Artificial Sequence
  ENSG00000143337_33 (sequence is synthesized)
cctcctaagtagctgggattacaggcataagtcactacacctggcttcttaaccttttctttatcacctccctgaagaacttttttagatttttttcttagtcaccccttccccatgata

SEQ ID NO: 378393 - DNA, 120 bp, Artificial Sequence
  ENSG00000143337_34 (sequence is synthesized)
atttttttcttagtcaccccttccccatgatatttcaacaccagatatatactatgtatctgtttatggactgtaaatgttttttgctttatacaaaatagaatttttttttgtccccaa

SEQ ID NO: 378394 - DNA, 120 bp, Artificial Sequence
  ENSG00000143337_35 (sequence is synthesized)
gaatgcatgctcaagagcatccacgttttagataattgctgcctaaaatgttctatttgctattcatgttactgtgatccttttagaagggaaaatttattttttattttttttattttt

SEQ ID NO: 378395 - DNA, 120 bp, Artificial Sequence
  ENSG00000143337_36 (sequence is synthesized)
ccgcggagcctggcctagaaaggaaaatttaagtaagataccagcttcagaataggagctagggtctagagaaatggagcacattgtaactggctgacaacagtggcccaggaaaaccac

SEQ ID NO: 378396 - DNA, 120 bp, Artificial Sequence
  ENSG00000143337_37 (sequence is synthesized)
agtaacttaatttgaaacttaatttgcttcccttgttttaatgactttttaatatttaaagatgttttctaaacctctaatcctcaaaacaaaaattggaagtaaactgattttcattca

SEQ ID NO: 378397 - DNA, 120 bp, Artificial Sequence
  ENSG00000143337_38 (sequence is synthesized)
gtgaactgccatttagaagtgataggggtttacatactttgtaccattagttaacgcctaagctaaaagtataatatccagtttccctatgatctcaagtttatggaaagtagcctttct

SEQ ID NO: 378398 - DNA, 120 bp, Artificial Sequence
  ENSG00000143337_39 (sequence is synthesized)
tttggcagtgtaaacaagcagttacattaaatacgtaaagataatgcattattctgctattttgtccttatcaagatcatgtagtaaaattttgtggtataagaggatagtgtttttccc

SEQ ID NO: 378399 - DNA, 120 bp, Artificial Sequence
  ENSG00000143337_40 (sequence is synthesized)
taaggaagaggattttattggcattaaccaccaaagatggggttcctgagcctggaaaaccaagctgagaaggctgccattgactggaaaaggaggaaattcctcccttgaatgccctct

SEQ ID NO: 378400 - DNA, 120 bp, Artificial Sequence
  ENSG00000143337_41 (sequence is synthesized)
ttctggcctggattctgagaattccttgtgtgtttaaggacccttgtgggtggtagagaaactagttcctgtcacctgagcataaacagaagaacccctttgtactctacaccccagaca

SEQ ID NO: 378401 - DNA, 120 bp, Artificial Sequence
  ENSG00000143337_42 (sequence is synthesized)
taatgaactacttgcaatttcctaaacacatcattcacttgtcttttgcacattcttagactcttggaatacttcatttcctgccctctcgctttctccaatctcatgttctgctaattt

SEQ ID NO: 378402 - DNA, 120 bp, Artificial Sequence
  ENSG00000143337_43 (sequence is synthesized)
ttatttgtccttaaagtcttcgttttcttagggcagcacttcagtgaaatctttcataattcccttcccccagatactattttaggtgcctcctgttttttttctttctttctttctttc

SEQ ID NO: 378403 - DNA, 120 bp, Artificial Sequence
  ENSG00000143337_44 (sequence is synthesized)
tttcttttttctttttctttttttggtagcttaaacaataagacctttattgttacaaaacccagcagcgtgaggagttcctgggttgggtgaattagaggctggaaaaattcatcgcaa

SEQ ID NO: 378404 - DNA, 120 bp, Artificial Sequence
  ENSG00000143337_45 (sequence is synthesized)
gcattacaagataaccaatgatacccctgatgaaagaaaacctctgcaaactgctagctgaagccagctcctgtccttttatccaaaactgggtagtgtccagccaaaccattttggggg

SEQ ID NO: 378405 - DNA, 120 bp, Artificial Sequence
  ENSG00000143337_46 (sequence is synthesized)
ttgaatgagtcacttcaaagggctcaaatgactggtgaatcttccagataaaaggagagaacacagactttcctgcgcattttaaagtgactgaggtgctccacactctgatttatcctt

SEQ ID NO: 378406 - DNA, 120 bp, Artificial Sequence
  ENSG00000143337_47 (sequence is synthesized)
tattaccctgtggcagcattagcatacccctgctaccacatgcatcttgcaagcagtgatgtgtcatcaatatatgcaccgtggcaatcacagaatgctcaaatatttattgaataaaaa

SEQ ID NO: 378407 - DNA, 120 bp, Artificial Sequence
  ENSG00000143337_48 (sequence is synthesized)
gagcaagccatacctaattatagctaggtaagttgcatcttagtgttttatttgctttccccacccccatcccccattacgcctaagccctatctaaaagttgtatataactcatctggg

SEQ ID NO: 378408 - DNA, 120 bp, Artificial Sequence
  ENSG00000143337_49 (sequence is synthesized)
tttagcaatgctatgaataaggaaaaacaaagaggaccaatctacgccgtggaagggaaatgcacttctctgatagagacagtgatcattacaggtcctcaagggaaaggtggaatatca

SEQ ID NO: 378409 - DNA, 120 bp, Artificial Sequence
  ENSG00000143337_50 (sequence is synthesized)
agggaaaagactgggaagctgtgaggtctttccacagtgatatttggcatttgcattttctaaaaatagctagcaagtattcttccatctttttctgttgcctaagagggtattataatt

SEQ ID NO: 378410 - DNA, 120 bp, Artificial Sequence
  ENSG00000143337_51 (sequence is synthesized)
cagataaaagatggctatggatgtacgaacaagatggataagaaaaatattcgagaattagaactgaccagatttgattgactgtagaagtgctgaaaatttctctttcttctgtttagc

SEQ ID NO: 378411 - DNA, 120 bp, Artificial Sequence
  ENSG00000143337_52 (sequence is synthesized)
tcatatatcttctccccagatactaagcataaagtgatagactaaattcctatctctgcatgtcaatatgttgacttttagtttgaagtagagccacacatatttggtcagaaattgatt

SEQ ID NO: 378412 - DNA, 120 bp, Artificial Sequence
  ENSG00000143337_53 (sequence is synthesized)
gtagagaataaaaaccctgtccaaccaggaaatgagcaaaagagggctggggtgaagattgcaagaatatacatctcagactccaggaaaaggaaaatacaggaactgtgaagactgttt

SEQ ID NO: 378413 - DNA, 120 bp, Artificial Sequence
  ENSG00000143337_54 (sequence is synthesized)
tcatttggagaccagcagccattccctctgtctctctattgctgctacccaattagcaacttcccctttgtgacttaaatgccaaaaagatgacattaatggctcaattcagtgtatgaa

SEQ ID NO: 378414 - DNA, 120 bp, Artificial Sequence
  ENSG00000143337_55 (sequence is synthesized)
ggattcctgagaagaatatatgataaagcatagcttcctaggtcacccttttaacagggaccaggagtttgggttgtggtagggctgtgtcctgaggtcaggccaagaagtgggctgata

SEQ ID NO: 378415 - DNA, 120 bp, Artificial Sequence
  ENSG00000143337_56 (sequence is synthesized)
tgttaaaggacaactgaatacttcttcaactatataaagaccttctatatgtaatgccatgctatgtcattaatggcatttcattttagctttttaaaaaacccaacgaagggaaattca

SEQ ID NO: 378416 - DNA, 120 bp, Artificial Sequence
  ENSG00000143337_57 (sequence is synthesized)
aggtaatggaaacattttaagttttaaaatctgagtcctggtcatgggtctactacaaatgtgatttcttcccattgcttctgtttctctaggctaaaccaggaagatagttgtcaaaac

SEQ ID NO: 378417 - DNA, 120 bp, Artificial Sequence
  ENSG00000143337_58 (sequence is synthesized)
ttcgggtactattttaacatacatcagcacttgttaatttgctgtaattccctcaatagaacaccaagctttagttttcagtatgtttcttgggcaagtgaggtggtaggtggccatgta

SEQ ID NO: 378418 - DNA, 120 bp, Artificial Sequence
  ENSG00000143337_59 (sequence is synthesized)
ctagatcaaacttgattttctagggattgttttcccacttttagagaataccattcttaggctaaactcaattacagaatctactgcatgctatacagccctctatagaaatattcaccc

SEQ ID NO: 378419 - DNA, 120 bp, Artificial Sequence
  ENSG00000143337_60 (sequence is synthesized)
tgagtagttaattatgtttcttaatgggtaaatgttttatctagtccctctttttttttaatttgataaaatccagatctctcagagcttaaatacacttcctcttattttccctacaac

SEQ ID NO: 378420 - DNA, 120 bp, Artificial Sequence
  ENSG00000143337_61 (sequence is synthesized)
aaatatggaaaagatctataatatatatttgaatatgtattaagttgttcctcacccttttctattttttattagctattgagtgtttattaatgcttcaaacacttccaagtgctttat

SEQ ID NO: 378421 - DNA, 120 bp, Artificial Sequence
  ENSG00000143337_62 (sequence is synthesized)
gtatattaactgatttaattcttaagttactctatgagatggtattattatcccaacttaataggaaactgaagcacagtgagctaaagtaactctcgaagtggtggagcagagagatga

SEQ ID NO: 378422 - DNA, 120 bp, Artificial Sequence
  ENSG00000143337_63 (sequence is synthesized)
acccaggcagtctgactttagaacatctatgcttaccactatgatgttctcaaggaccccattctgaatataggaataaacaaattcagtttctcccactttaatctcacaacacccttc

SEQ ID NO: 378423 - DNA, 120 bp, Artificial Sequence
  ENSG00000143337_64 (sequence is synthesized)
tgactccagatgtgtgtggaggggggttccccacgcattaagcaaataagcaattttgcagcagacaccagctgggtgtcctctaattcaattcacttcttacactacctggagatagca

SEQ ID NO: 378424 - DNA, 120 bp, Artificial Sequence
  ENSG00000143337_65 (sequence is synthesized)
tcagataccataggttgaaggctcagtgccacaagatggctcccacttcagatgacaatcagaagccccagatggtgaccaagggtcctaaccaactagctataagttagggttcccata

SEQ ID NO: 378425 - DNA, 120 bp, Artificial Sequence
  ENSG00000143337_66 (sequence is synthesized)
accccttcttgagctccattagtttgctagagaggctcacagaactcggaaacactatacagtcatgctgtacataatgacatttcaatgtcagcctgcatagacaatggtgatcccata

SEQ ID NO: 378426 - DNA, 120 bp, Artificial Sequence
  ENSG00000143337_67 (sequence is synthesized)
tttttactgtaccttttctatgtttaggtatgtttagatagacaaatagtcaatccttgaacaacttgggtttgaactgtgtgggtccatttatacatggattttttttcaataaatgta

SEQ ID NO: 378427 - DNA, 120 bp, Artificial Sequence
  ENSG00000143337_68 (sequence is synthesized)
tttttcaataaatgtattggaaaattttttggagatttgcaacaatttgaaaaaccagatgaacctcatagactagaaatatcaaaaaaaataaaggtatgtgaagagtacataaaatac

SEQ ID NO: 378428 - DNA, 120 bp, Artificial Sequence
  ENSG00000143337_69 (sequence is synthesized)
gtcgcactccttttccccgagacttggtactgggagataggacgggagtctcctacacgcagtcaacacttgccacgagcggctagacttaggacaggcaagttgccctgccatccttct

SEQ ID NO: 378429 - DNA, 120 bp, Artificial Sequence
  ENSG00000143337_70 (sequence is synthesized)
atcgcccccacccctcctttacttaagggcgatggcagagacgtcctcctcccccttctcctcctctttggtgcctccagccaggaggcgggagcgatccacagcagctgacccagctca

SEQ ID NO: 378430 - DNA, 120 bp, Artificial Sequence
  ENSG00000143337_71 (sequence is synthesized)
atagtttgtggtagactattgataggcggaggagtgggttttcagcttagagcacggtgataggctgcaagtttacctgctgactcgtgaagaggatgaagcatcttcccaaactgattt

SEQ ID NO: 378431 - DNA, 120 bp, Artificial Sequence
  ENSG00000143337_72 (sequence is synthesized)
aagccaaacgatctcaaagaaaactgtcaggagcatacaagaggctccagctgctgtagttagagcattcattctccagataattattgagcacctactttgggccagtctccatgcttt

SEQ ID NO: 378432 - DNA, 120 bp, Artificial Sequence
  ENSG00000143337_73 (sequence is synthesized)
attcctctgaaggtgaggaccgcggaggtaacagtcccagccgcgagccagggaacgcgcgggggcgggcgcgcgcctcggtggagctcatgcccgcctggtgtggtggtccctgccaaa

SEQ ID NO: 378433 - DNA, 120 bp, Artificial Sequence
  ENSG00000143337_74 (sequence is synthesized)
aatctgccactttggtggccgtcactgtaacctcaagtagtctggcaaatcagactgacaaagtaacctgaaaaacaagactattaattagagttttcgtctaaatggacaaaagggatg

SEQ ID NO: 378434 - DNA, 86 bp, Artificial Sequence
  ENSG00000143337_75 (sequence is synthesized)
ttcctgagtagctaagactacaggtcaaaacttcacagctcatgataagcaaccttcagtgctaagctcaggatatcaaaaaactc

SEQ ID NO: 378435 - DNA, 120 bp, Artificial Sequence
  ENSG00000143337_76 (sequence is synthesized)
ccttcagcagcagcactcagagcagcctccgctacagccgtctcctgttatgaccaggagagggctgcgggactctcattcctctgaaggtgaggaccgcggagaggatgaagcatcttc

SEQ ID NO: 378436 - DNA, 120 bp, Artificial Sequence
  ENSG00000143340_0 (sequence is synthesized)
cgcgtgcatcagcctctctggcgggggattctccccggactccggccagcgccaatcaggtcgcgcggtacctgcccccagccctggccacctggaggggcgatgaggctccacgcccgg

SEQ ID NO: 378437 - DNA, 120 bp, Artificial Sequence
  ENSG00000143340_1 (sequence is synthesized)
gaggctccacgcccggagcagggcagtcctcggagcgccggggaggccgcggagcctcacgtgtgccgccccagccgctggcgcccggaaggacgcgctgcgaccccgtgggagccgaac

SEQ ID NO: 378438 - DNA, 120 bp, Artificial Sequence
  ENSG00000143340_2 (sequence is synthesized)
gagcggagctgctcagccgcgggactgatgcccttggccagacgcacccccaactgctgtctgctcaggtgtagcccgcgtgactgagtcaccgctgctccagctgtttcacgtcgccgt

SEQ ID NO: 378439 - DNA, 120 bp, Artificial Sequence
  ENSG00000143340_3 (sequence is synthesized)
tccctttactgaatagtttgatggggcgccgggcggatgacagcgggaacggttgtgatcactggcggaatcctagctacggtgatcctcctctgcatcattgccgtcctgtgctactgc

SEQ ID NO: 378440 - DNA, 120 bp, Artificial Sequence
  ENSG00000143340_4 (sequence is synthesized)
aggctccagtattactgctgcaagaagagcggaaccgaggttgcagacgaggaggaggagcgggagcacgaccttcccacgcatcccagaggccccacctgcaatgcctgcagctcccaa

SEQ ID NO: 378441 - DNA, 120 bp, Artificial Sequence
  ENSG00000143340_5 (sequence is synthesized)
gccctggacggcagaggcagcctggcgcctctcaccagcgagccctgcagccagccctgtggggtggccgcgagccactgcactacctgctccccatacagctcccccttttacatacgg

SEQ ID NO: 378442 - DNA, 120 bp, Artificial Sequence
  ENSG00000143340_6 (sequence is synthesized)
acggctgacatggtgcccaatgggggtggaggcgagaggctctcctttgctcccacatactacaaagaggggggacccccatccctcaaattggcagcaccccagagttacccggtgacc

SEQ ID NO: 378443 - DNA, 120 bp, Artificial Sequence
  ENSG00000143340_7 (sequence is synthesized)
tggccaggctctgggcgtgaggccttcaccaatccaagggctattagtacagacgtgtaaatccttccaccccgacccgcacacacacccacactgctgccctggcgggggccatggggg

SEQ ID NO: 378444 - DNA, 120 bp, Artificial Sequence
  ENSG00000143340_8 (sequence is synthesized)
tgatgaatgaccctccaacagccccacatgggttgtttctgtttctttggcttttctcgctccgcagtggagggtttactaggatttaagcttttgagtgcattgagaaccaagacaggg

SEQ ID NO: 378445 - DNA, 120 bp, Artificial Sequence
  ENSG00000143340_9 (sequence is synthesized)
cctggctccaactctgtgggccagaggtgggggactgctaggtcgagtctgcagcttcgccagtttcttggttgggacactcctctggcagccccagcaccaccacaaccccttgcagtg

SEQ ID NO: 378446 - DNA, 120 bp, Artificial Sequence
  ENSG00000143340_10 (sequence is synthesized)
tgccccagtcccctggattcgctggactgcaaaaaggagcaccagggaaagctcagcaaaggctcaggaggcctcccgggtcctcgggagatgaagcatccgtgcctaggaaaaggggac

SEQ ID NO: 378447 - DNA, 120 bp, Artificial Sequence
  ENSG00000143340_11 (sequence is synthesized)
agagggcaaggagagaagtgagagctacaattccagcattggagaagcgaggggcggggcgtcaacggcactgcttcaggacgcgcttgctgaaacgactccaacagctagttcacagcc

SEQ ID NO: 378448 - DNA, 120 bp, Artificial Sequence
  ENSG00000143340_12 (sequence is synthesized)
tgctgtcactgtagctgctcccgtagggtcgttgattcctgaacgtatcacatctcacctgcccccttcctcgtgggacgtgtcaagttgactttaaagcctaaggtggcttgtggggac

SEQ ID NO: 378449 - DNA, 120 bp, Artificial Sequence
  ENSG00000143340_13 (sequence is synthesized)
tgcaccagaaagtgtctaaccttgtgttccccgaaatcctttctctgacttaggaaccagcgccccctgctggagaagttttttcattttgttagccgacttctggtagcttagcaaaga

SEQ ID NO: 378450 - DNA, 120 bp, Artificial Sequence
  ENSG00000143340_14 (sequence is synthesized)
gaccagctgactgtctctcggcccagcccaccacgccgagtagcttgtgtggatgcagtcctgtgagggtgtgcataaccgttcccaggtgtacgcacgcgcgcgcgcgcgcacagacac

SEQ ID NO: 378451 - DNA, 120 bp, Artificial Sequence
  ENSG00000143340_15 (sequence is synthesized)
acacacacacacacacacacagtaaccacgggtaggcaccaggggctttgtacattcaggagctgcagagaggaaaggtctcccatgtaccagagaaggaaaagtctgatcccgaaacag

SEQ ID NO: 378452 - DNA, 120 bp, Artificial Sequence
  ENSG00000143340_16 (sequence is synthesized)
atcccgaaacagcttgaacgaaaggtggttaacacgtgaccaatccccatggcagacagcgggctggtgaacaggaagagcacagaatctctgtggggcgatgctgcagcggctgaaacc

SEQ ID NO: 378453 - DNA, 120 bp, Artificial Sequence
  ENSG00000143340_17 (sequence is synthesized)
acgtcaagtcccccagagcccggcattctatgtaagcatccacctgtgacgccgtggagcaggatcttcattcatctcaccagagcaacagcccagtcctgaggatgggagggacgtgac

SEQ ID NO: 378454 - DNA, 120 bp, Artificial Sequence
  ENSG00000143340_18 (sequence is synthesized)
ttagccttgggattccacgctcgccgccctcccttggccgccctactccccagtttcctggcgatgagccatttattgtgtctcacaccagcctcatttccaactccgacttcctactta

SEQ ID NO: 378455 - DNA, 120 bp, Artificial Sequence
  ENSG00000143340_19 (sequence is synthesized)
gaatgtggcagtggctttgtgagtgagaatcctgatgagttttccagtggcctctgcagaagctggcccccttctaagggcatagctaacccccttcccactcctgagtcactgaattcg

SEQ ID NO: 378456 - DNA, 120 bp, Artificial Sequence
  ENSG00000143340_20 (sequence is synthesized)
aggagggtggggcagggaaagggctggcccccctgctgaaatcttgattctgcatttgaggaaggtcagggtgccgctgggggagcagggagcggggagggaggaagaggggaatgcaca

SEQ ID NO: 378457 - DNA, 120 bp, Artificial Sequence
  ENSG00000143340_21 (sequence is synthesized)
tcttttgcgccactattaaggcacctgtcaccttacatctcaatctggaatcaaagtgccctgggttgagaagcagacctgggctctggtcacactttggtcactcattagctctaggac

SEQ ID NO: 378458 - DNA, 120 bp, Artificial Sequence
  ENSG00000143340_22 (sequence is synthesized)
cagtcactaatctctgagactccattttctccagggaaacgaggcttgcccagatagactaacaaccctttagtgctccaagaagtgagaatttccgaaaaagatctgccggcccagagc

SEQ ID NO: 378459 - DNA, 120 bp, Artificial Sequence
  ENSG00000143340_23 (sequence is synthesized)
actccctcttgccctaatcctggcagggtctggatgtatttacccaactctgatcttgcgtgcagggatgcttgctgatggatgaaagaccacaataaaacaagattagcagcaaaacaa

SEQ ID NO: 378460 - DNA, 120 bp, Artificial Sequence
  ENSG00000143341_0 (sequence is synthesized)
cagcgggattcgggccgcggcgccgcaggctcagagctgcccccggggcatggacccgacgcgccgcccgcactccgccacaggctgtccagggcccgcgggcagatagcagtccaggag

SEQ ID NO: 378461 - DNA, 120 bp, Artificial Sequence
  ENSG00000143341_1 (sequence is synthesized)
caggctgtccagggcccgcgggcagatagcagtccaggaggaagccgcatccagacaaaagctgccgcatccctgccctgcccaacccctggagggattcgagtttggtgcttgtccccg

SEQ ID NO: 378462 - DNA, 120 bp, Artificial Sequence
  ENSG00000143341_2 (sequence is synthesized)
tctgattctcagcgccaaactttttgctagttcagagattccaagagtctgatgagttactctgagaggaaaccctctgcctgttgttgaggaggactgagcacagtgcttaggcgctga

SEQ ID NO: 378463 - DNA, 120 bp, Artificial Sequence
  ENSG00000143341_3 (sequence is synthesized)
gggggaaaaagagggggaaaaaaaagaaaatgatttcctgggaagttgtccatacagtattcctgtttgctcttctttattcttccctagctcaagatgcgagcccccagtcagagatca

SEQ ID NO: 378464 - DNA, 120 bp, Artificial Sequence
  ENSG00000143341_4 (sequence is synthesized)
gagctgaggaaattcccgagggggcctccacgttggcttttgtgtttgatgtgactggttctatgtatgatgatttagttcaggtgattgaaggggcttccaaaattttggagacgtctt

SEQ ID NO: 378465 - DNA, 120 bp, Artificial Sequence
  ENSG00000143341_5 (sequence is synthesized)
tgaaaagacctaaaagacctcttttcaactttgcgttggtgcctttccatgatccagaaattggcccagtgacaattaccacagatcccaagaaatttcaatatgaactcagagaactgt

SEQ ID NO: 378466 - DNA, 120 bp, Artificial Sequence
  ENSG00000143341_6 (sequence is synthesized)
atgttcagggtggtggtgattgcccagaaatgagtattggagctataaaaattgccttggaaatttctcttcctggttctttcatctatgttttcactgatgctcggtccaaagattacc

SEQ ID NO: 378467 - DNA, 120 bp, Artificial Sequence
  ENSG00000143341_7 (sequence is synthesized)
ggctcacccatgaggtgctgcaacttatccaacagaaacagtcacaagtcgtatttgttctgactggagattgtgatgacaggacccatattggatataaagtctatgaagaaattgcct

SEQ ID NO: 378468 - DNA, 120 bp, Artificial Sequence
  ENSG00000143341_8 (sequence is synthesized)
ctacaagttctggtcaagtgttccatctggacaaaaaacaagttaatgaggtattaaaatgggtagaagaagcagtacaggcctccaaagttcaccttttatccacagatcatttggaac

SEQ ID NO: 378469 - DNA, 120 bp, Artificial Sequence
  ENSG00000143341_9 (sequence is synthesized)
aggctgtaaatacttggagaattccttttgatcccagcctgaaagaggtcactgtgtctttgagtgggccttctccaatgattgaaattcgcaatcctttagggaagctgataaaaaagg

SEQ ID NO: 378470 - DNA, 120 bp, Artificial Sequence
  ENSG00000143341_10 (sequence is synthesized)
gatttggcctgcatgagctattaaatatccataactctgccaaagtagtgaatgtgaaagagccagaggctggaatgtggacagtgaagacctcaagcagtggaaggcactctgttcgca

SEQ ID NO: 378471 - DNA, 120 bp, Artificial Sequence
  ENSG00000143341_11 (sequence is synthesized)
ttactggcctcagtactattgatttccgagctggcttttctcgaaagcccaccctggacttcaaaaaaacagtcagcagaccagtgcaaggaatacctacctatgtactgctcaatactt

SEQ ID NO: 378472 - DNA, 120 bp, Artificial Sequence
  ENSG00000143341_12 (sequence is synthesized)
ctggaatttccactccagctagaatagatcttcttgaacttttgagtatctcaggaagttctcttaagactattcctgttaaatattacccacatcgaaaaccttatggcatatggaata

SEQ ID NO: 378473 - DNA, 120 bp, Artificial Sequence
  ENSG00000143341_13 (sequence is synthesized)
tttctgactttgtaccaccaaatgaagctttctttctcaaagtaacaggctatgataaagatgattacctcttccagagagtatcaagtgtttccttttctagtattgtcccagatgctc

SEQ ID NO: 378474 - DNA, 120 bp, Artificial Sequence
  ENSG00000143341_14 (sequence is synthesized)
ccaaagttacgatgcctgagaaaaccccaggatactatctgcagccgggccaaattccctgctctgttgacagtcttttgccctttaccttgagctttgtcagaaatggagttacacttg

SEQ ID NO: 378475 - DNA, 120 bp, Artificial Sequence
  ENSG00000143341_15 (sequence is synthesized)
gagtagaccagtatttgaaagaatctgccagtgtgaacttagatattgcaaaggtcactttgtctgacgaaggtttctatgaatgcattgctgtcagcagtgcaggtactggacgggcac

SEQ ID NO: 378476 - DNA, 120 bp, Artificial Sequence
  ENSG00000143341_16 (sequence is synthesized)
agacattttttgacgtatcagagccccctccggtcatccaagtgcctaacaatgttacagtcactcctggagagagagcagttttaacatgtctcatcatcagtgcggtggattacaatc

SEQ ID NO: 378477 - DNA, 120 bp, Artificial Sequence
  ENSG00000143341_17 (sequence is synthesized)
taacctggcagaggaatgacagagatgtcagactggcagagccagcgagaattaggaccttggctaatctgtcattggagctaaagagtgtgaaattcaacgatgctggagagtatcatt

SEQ ID NO: 378478 - DNA, 120 bp, Artificial Sequence
  ENSG00000143341_18 (sequence is synthesized)
gtatggtttctagtgaaggtggatcatcagccgcttcagttttcctcacagtgcaagaaccacccaaagtcactgtgatgcccaagaatcagtctttcacaggagggtctgaggtctcca

SEQ ID NO: 378479 - DNA, 120 bp, Artificial Sequence
  ENSG00000143341_19 (sequence is synthesized)
tcatgtgttctgcaacaggttatcccaaaccaaagattgcctggaccgttaacgatatgtttatcgtgggttcacacaggtataggatgacctcagatggtaccttatttatcaaaaatg

SEQ ID NO: 378480 - DNA, 120 bp, Artificial Sequence
  ENSG00000143341_20 (sequence is synthesized)
cagctcccaaagatgcagggatctatggttgcctagcaagtaattcagctggaacagataaacagaattctactctcagatacattgaagcccctaagttgatggtagttcagagtgagc

SEQ ID NO: 378481 - DNA, 120 bp, Artificial Sequence
  ENSG00000143341_21 (sequence is synthesized)
tcttggttgcccttggggatataaccgttatggaatgcaaaacctctggtattcctccacctcaagttaaatggttcaaaggagatcttgagttgaggccctcaacattcctcattattg

SEQ ID NO: 378482 - DNA, 120 bp, Artificial Sequence
  ENSG00000143341_22 (sequence is synthesized)
accctctcttgggacttttgaagattcaagaaacacaagatctggatgctggcgattatacctgtgtagccatcaatgaggctggaagagcaactggcaagataactctggatgttggct

SEQ ID NO: 378483 - DNA, 120 bp, Artificial Sequence
  ENSG00000143341_23 (sequence is synthesized)
cacctccagttttcatacaagaacctgctgatgtgtctatggaaattggctcaaatgtgacattaccttgttatgttcagggttatccagaaccaacaatcaaatggcgaagattagaca

SEQ ID NO: 378484 - DNA, 120 bp, Artificial Sequence
  ENSG00000143341_24 (sequence is synthesized)
acatgccaattttctcaagacctttttcagttagttccatcagccaactaagaacaggagctctctttattttaaacttatgggcaagtgataaaggaacctatatttgtgaagctgaaa

SEQ ID NO: 378485 - DNA, 120 bp, Artificial Sequence
  ENSG00000143341_25 (sequence is synthesized)
accagtttggaaagatccagtcagagacaacagtaacagtgaccggacttgttgctccacttattggaatcagcccttcagtggccaatgttattgaaggacagcagcttactttgccct

SEQ ID NO: 378486 - DNA, 120 bp, Artificial Sequence
  ENSG00000143341_26 (sequence is synthesized)
gtactctgttagctggaaatcccattccagaacgtcggtggattaagaattcagctatgttgctccaaaatccttacatcactgtgcgcagtgatgggagcctccatattgaaagagttc

SEQ ID NO: 378487 - DNA, 120 bp, Artificial Sequence
  ENSG00000143341_27 (sequence is synthesized)
agcttcaggatggtggtgaatatacttgtgtggccagtaacgttgctgggaccaataacaaaactacctctgtggttgtgcatgttctgccaaccattcagcatgggcagcagatactca

SEQ ID NO: 378488 - DNA, 120 bp, Artificial Sequence
  ENSG00000143341_28 (sequence is synthesized)
gtacaattgaaggcattccagtaactttaccatgcaaagcaagtggaaatcccaaaccgtctgtcatctggtccaagaaaggagagctgatttcaaccagcagtgctaagttttcagcag

SEQ ID NO: 378489 - DNA, 120 bp, Artificial Sequence
  ENSG00000143341_29 (sequence is synthesized)
gagctgatggtagtctgtatgtggtatcacctggaggagaggagagtggggagtatgtctgcactgccaccaatacagccggctacgccaaaaggaaagtgcagctaacagtctatgtaa

SEQ ID NO: 378490 - DNA, 120 bp, Artificial Sequence
  ENSG00000143341_30 (sequence is synthesized)
ggcccagagtgtttggagatcaacgaggactgtcccaggataagcctgttgagatctccgtccttgcaggggaagaggtaacacttccatgtgaagtgaagagcttacctccacccataa

SEQ ID NO: 378491 - DNA, 120 bp, Artificial Sequence
  ENSG00000143341_31 (sequence is synthesized)
ttacttgggccaaagaaacccagctcatctcaccgttctctccaagacacacattcctcccttctggttcaatgaagatcactgaaacccgcacttcagatagtgggatgtatctttgtg

SEQ ID NO: 378492 - DNA, 120 bp, Artificial Sequence
  ENSG00000143341_32 (sequence is synthesized)
ttgccacaaatattgctgggaatgtgactcaggctgtcaaattaaatgtccatgttcctccaaagatacagcgtggacctaaacatctcaaagtccaagttggtcaaagagtggatattc

SEQ ID NO: 378493 - DNA, 120 bp, Artificial Sequence
  ENSG00000143341_33 (sequence is synthesized)
catgtaatgctcaagggactcctcttcctgtaatcacctggtccaaaggtggaagcactatgctggttgatggagagcaccatgttagcaatccagacggaactttaagcatcgaccaag

SEQ ID NO: 378494 - DNA, 120 bp, Artificial Sequence
  ENSG00000143341_34 (sequence is synthesized)
ccacgccctcagatgctggcatatatacatgtgttgctactaacatagcaggcactgatgaaacagagataacgctacatgtccaagaaccacccacagtggaagatctagaacctccat

SEQ ID NO: 378495 - DNA, 120 bp, Artificial Sequence
  ENSG00000143341_35 (sequence is synthesized)
ataacactactttccaagaaagagtggccaatcaacgcattgaatttccatgtcctgcaaaaggtacccctaaaccaaccatcaaatggttacacaatggtagagagttgacaggcagag

SEQ ID NO: 378496 - DNA, 120 bp, Artificial Sequence
  ENSG00000143341_36 (sequence is synthesized)
agcctggcatttctatcttggaagatggcacattgctggttattgcttctgttacaccctatgacaatggggagtacatctgtgtggcagtcaatgaagctggaaccacagaaagaaaat

SEQ ID NO: 378497 - DNA, 120 bp, Artificial Sequence
  ENSG00000143341_37 (sequence is synthesized)
ataacctcaaagtccatgttcctccagtaattaaagataaagaacaagttacaaatgtgtcggtgttgttaaatcagctgaccaatctcttctgtgaagtggaaggcactccatctccca

SEQ ID NO: 378498 - DNA, 120 bp, Artificial Sequence
  ENSG00000143341_38 (sequence is synthesized)
tcattatgtggtataaagataatgtccaggtgactgaaagcagcactattcagactgtgaacaatgggaagatactgaagctcttcagagccactccagaggatgcaggaagatattcct

SEQ ID NO: 378499 - DNA, 120 bp, Artificial Sequence
  ENSG00000143341_39 (sequence is synthesized)
gcaaagcaattaatattgcaggcacttctcagaagtactttaacattgatgtgctagttccacccaccataataggtaccaacttcccaaatgaagtctcagttgtcctcaaccgtgacg

SEQ ID NO: 378500 - DNA, 120 bp, Artificial Sequence
  ENSG00000143341_40 (sequence is synthesized)
tcgcccttgaatgccaggtcaaaggcactccctttcctgatattcattggttcaaagatggcaagcctttatttttgggcgatcctaatgttgaacttctagacagaggacaagtcttac

SEQ ID NO: 378501 - DNA, 120 bp, Artificial Sequence
  ENSG00000143341_41 (sequence is synthesized)
atttaaagaatgcacggagaaatgacaaggggcgctaccaatgtactgtgtctaatgcagctggcaaacaagccaaggatataaaactgactatctatattccacctagtattaaaggag

SEQ ID NO: 378502 - DNA, 120 bp, Artificial Sequence
  ENSG00000143341_42 (sequence is synthesized)
gaaatgtcaccacagacatatcagtattgatcaacagccttattaaactggaatgtgaaacacggggacttccaatgcctgccattacttggtataaggacgggcagccaatcatgtcca

SEQ ID NO: 378503 - DNA, 120 bp, Artificial Sequence
  ENSG00000143341_43 (sequence is synthesized)
gctcacaagcactttatattgataaaggacaatatcttcatattcctcgagcacaggtctctgattcagcaacatatacgtgtcatgtagccaatgttgctggaactgctgaaaaatcat

SEQ ID NO: 378504 - DNA, 120 bp, Artificial Sequence
  ENSG00000143341_44 (sequence is synthesized)
tccatgtggatgtctatgttcctccaatgattgaaggcaacttggccacgcctttgaataagcaagtagttattgctcattctctgacactggagtgcaaagctgctggaaacccttctc

SEQ ID NO: 378505 - DNA, 120 bp, Artificial Sequence
  ENSG00000143341_45 (sequence is synthesized)
ccattctcacctggttgaaagatggtgtacctgtgaaagctaatgacaatatccgcatagaagctggtgggaagaaactcgaaatcatgagtgcccaagaaattgatcgaggacagtaca

SEQ ID NO: 378506 - DNA, 120 bp, Artificial Sequence
  ENSG00000143341_46 (sequence is synthesized)
tatgcgtggctaccagtgtggcaggagaaaaggaaatcaaatatgaagttgatgtcttggtgccaccagctatagaaggaggagatgaaacatcttacttcattgtgatggttaataact

SEQ ID NO: 378507 - DNA, 120 bp, Artificial Sequence
  ENSG00000143341_47 (sequence is synthesized)
tactggagctagattgtcatgtgacaggctctcccccaccaactatcatgtggctgaaggatggccagttaattgatgaaagggatggattcaagattttattaaatggacgcaaactgg

SEQ ID NO: 378508 - DNA, 120 bp, Artificial Sequence
  ENSG00000143341_48 (sequence is synthesized)
ttattgctcaggctcaagtgtcaaacacaggcctttatcggtgcatggcagcaaatactgctggagaccacaagaaggaatttgaagtgactgttcatgttcctccaacaatcaagtcct

SEQ ID NO: 378509 - DNA, 120 bp, Artificial Sequence
  ENSG00000143341_49 (sequence is synthesized)
caggcctttctgagagagttgtggtaaaatacaagcctgtcgccttgcagtgcatagccaatgggattccaaatccttccattacatggttaaaagatgaccagcctgtgaacactgccc

SEQ ID NO: 378510 - DNA, 120 bp, Artificial Sequence
  ENSG00000143341_50 (sequence is synthesized)
aaggaaaccttaaaatacagtcttctggtcgagttctacaaattgccaaaaccctgttggaagatgctggcagatacacatgtgtggctaccaacgcagctggagaaacacaacagcaca

SEQ ID NO: 378511 - DNA, 120 bp, Artificial Sequence
  ENSG00000143341_51 (sequence is synthesized)
ttcaactgcatgttcatgaaccacctagtctggaagatgctggaaaaatgctgaatgagactgtgttggtgagcaaccctgtacagctggagtgtaaggcagctggaaatcctgtgcctg

SEQ ID NO: 378512 - DNA, 120 bp, Artificial Sequence
  ENSG00000143341_52 (sequence is synthesized)
ttattacatggtacaaagataatcgtctactctcaggttccaccagcatgactttcttgaacagaggacagatcattgatattgaaagtgcccagatctcagatgctggcatatataaat

SEQ ID NO: 378513 - DNA, 120 bp, Artificial Sequence
  ENSG00000143341_53 (sequence is synthesized)
gcgtggccatcaactcagctggagctacagagttattttacagtctgcaagttcatgtggccccatcaatttctggcagcaataacatggtggcagtggtggttaataacccggtgaggt

SEQ ID NO: 378514 - DNA, 120 bp, Artificial Sequence
  ENSG00000143341_54 (sequence is synthesized)
tagaatgtgaagccagaggtattcctgccccaagtctgacctggttgaaagatgggagtcctgtttctagtttttctaatggattacaggttctctctggtggtcgaatcctagcattga

SEQ ID NO: 378515 - DNA, 120 bp, Artificial Sequence
  ENSG00000143341_55 (sequence is synthesized)
ccagtgcacaaatcagcgacacaggaaggtacacctgcgtggcagtgaatgctgctggagaaaagcaaagggacattgacctccgagtatatgttccgccaaatattatgggagaagaac

SEQ ID NO: 378516 - DNA, 120 bp, Artificial Sequence
  ENSG00000143341_56 (sequence is synthesized)
agaatgtctctgtcctcattagccaagctgtggaattactatgtcaaagtgatgctattcccccacctactcttacttggttaaaagacggccaccccttgctgaagaaaccaggcctca

SEQ ID NO: 378517 - DNA, 120 bp, Artificial Sequence
  ENSG00000143341_57 (sequence is synthesized)
gtatatctgaaaatagaagtgtgttaaagattgaagatgctcaggttcaagacactggtcgttacacttgtgaagcaacaaatgttgctggaaaaactgaaaaaaactacaatgtcaaca

SEQ ID NO: 378518 - DNA, 120 bp, Artificial Sequence
  ENSG00000143341_58 (sequence is synthesized)
tttgggtccccccaaatattggtggttctgatgaacttactcaacttacagtcattgaagggaatctcattagtctgttgtgtgaatcaagtggtattccacccccaaatctcatctgga

SEQ ID NO: 378519 - DNA, 120 bp, Artificial Sequence
  ENSG00000143341_59 (sequence is synthesized)
agaagaaaggctctccagtgctgactgattccatggggcgagttagaattttatctgggggcaggcaattacaaatttcaattgctgaaaagtctgatgcagcactctattcatgtgtgg

SEQ ID NO: 378520 - DNA, 120 bp, Artificial Sequence
  ENSG00000143341_60 (sequence is synthesized)
cgtcgaatgttgctgggactgcaaagaaagaatacaatctgcaagtttacattagaccaaccataaccaacagtggcagccaccctactgaaattattgtgacccgagggaagagtatct

SEQ ID NO: 378521 - DNA, 120 bp, Artificial Sequence
  ENSG00000143341_61 (sequence is synthesized)
ccttggagtgtgaggtgcagggtattccaccaccaacagtgacctggatgaaagatggccaccccttgatcaaggcaaagggagtagaaatactggatgaaggtcacatccttcagctga

SEQ ID NO: 378522 - DNA, 120 bp, Artificial Sequence
  ENSG00000143341_62 (sequence is synthesized)
agaacattcatgtatctgacacaggccgttatgtgtgtgttgctgtgaatgtagcaggaatgactgacaaaaaatatgacttaagtgtccatgctcctccaagcatcataggaaaccaca

SEQ ID NO: 378523 - DNA, 120 bp, Artificial Sequence
  ENSG00000143341_63 (sequence is synthesized)
ggtcacctgaaaatattagtgtggtagaaaagaactcagtatctttgacttgtgaagcttctggaattcccctgccttccataacctggttcaaagatgggtggcctgtcagccttagca

SEQ ID NO: 378524 - DNA, 120 bp, Artificial Sequence
  ENSG00000143341_64 (sequence is synthesized)
attctgtgaggattctttcaggaggcaggatgctacggctgatgcagaccacaatggaagatgctggccaatatacttgcgttgtaaggaatgcagctggtgaagaaagaaaaatctttg

SEQ ID NO: 378525 - DNA, 120 bp, Artificial Sequence
  ENSG00000143341_65 (sequence is synthesized)
ggctttcagtattagtaccacctcatattgtgggtgaaaatacattggaagatgtgaaggtaaaagagaaacagagtgttacgctgacttgtgaagtgacagggaatccagtgccagaaa

SEQ ID NO: 378526 - DNA, 120 bp, Artificial Sequence
  ENSG00000143341_66 (sequence is synthesized)
ttacatggcacaaagatgggcagcccctccaagaagatgaagcccatcacattatatctggtggccgttttcttcaaattaccaatgtccaggtgccacacactggaagatatacatgtt

SEQ ID NO: 378527 - DNA, 120 bp, Artificial Sequence
  ENSG00000143341_67 (sequence is synthesized)
tggcttccagtccagctggccacaagagcaggagcttcagtcttaatgtatttgtatctcctacaattgctggtgtaggtagtgatggcaaccctgaagatgtcactgtcatccttaaca

SEQ ID NO: 378528 - DNA, 120 bp, Artificial Sequence
  ENSG00000143341_68 (sequence is synthesized)
gccctacatctttggtctgtgaagcttattcatatcctccagctaccatcacctggtttaaggatggcactcctttagaatctaaccgaaatattcgtattcttccaggaggcagaactc

SEQ ID NO: 378529 - DNA, 120 bp, Artificial Sequence
  ENSG00000143341_69 (sequence is synthesized)
tgcagatcctcaatgcacaggaggacaatgctggaagatactcttgtgtagccacgaatgaggctggagaaatgataaagcactatgaagtgaaggtgtacattccacccataatcaata

SEQ ID NO: 378530 - DNA, 120 bp, Artificial Sequence
  ENSG00000143341_70 (sequence is synthesized)
aaggggacctttgggggccaggtctttcccctaaagaagtgaagatcaaagtaaacaacactctgaccttggaatgtgaagcgtatgcaattccttctgcctccctcagctggtacaagg

SEQ ID NO: 378531 - DNA, 120 bp, Artificial Sequence
  ENSG00000143341_71 (sequence is synthesized)
atggacagccccttaaatccgatgatcatgttaatattgctgcgaatggacacacacttcaaataaaggaggctcaaatatcagacaccggacgatatacttgtgtagcatctaacattg

SEQ ID NO: 378532 - DNA, 120 bp, Artificial Sequence
  ENSG00000143341_72 (sequence is synthesized)
caggtgaagatgagttggattttgatgtgaatattcaagttcctccaagttttcagaaactctgggaaataggaaacatgctagatactggcaggaatggtgaagccaaagatgtgatca

SEQ ID NO: 378533 - DNA, 120 bp, Artificial Sequence
  ENSG00000143341_73 (sequence is synthesized)
tcaacaatcccatttctctttactgtgagacaaatgctgctccccctcctacactgacatggtacaaagatggccaccctctgacctcaagtgataaagtattgattttgccaggagggc

SEQ ID NO: 378534 - DNA, 120 bp, Artificial Sequence
  ENSG00000143341_74 (sequence is synthesized)
gagtgttgcagattcctcgggctaaagtagaagatgctgggagatacacatgtgtggctgtgaatgaggctggagaagattcccttcaatatgatgtccgtgtactcgtgccgccaatta

SEQ ID NO: 378535 - DNA, 120 bp, Artificial Sequence
  ENSG00000143341_75 (sequence is synthesized)
tcaagggagcaaatagtgatctccctgaagaggtcaccgtgctggtgaacaagagtgcactgatagagtgtttatccagtggcagcccagcaccaaggaattcctggcagaaagatggac

SEQ ID NO: 378536 - DNA, 120 bp, Artificial Sequence
  ENSG00000143341_76 (sequence is synthesized)
ctagaagatgaccatcataaatttctatctaatggacgaattctgcagattctgaatactcaaataacagatatcggcaggtatgtgtgtgttgctgagaacacagctgggagtgccaaa

SEQ ID NO: 378537 - DNA, 120 bp, Artificial Sequence
  ENSG00000143341_77 (sequence is synthesized)
aaatattttaacctcaatgttcatgttcctccaagtgtcattggtcctaaatctgaaaatcttaccgtcgtggtgaacaatttcatctctttgacctgtgaggtctctggttttccacct

SEQ ID NO: 378538 - DNA, 120 bp, Artificial Sequence
  ENSG00000143341_78 (sequence is synthesized)
cctgacctcagctggctcaagaatgaacagcccatcaaactgaacacaaatactctcattgtgcctggtggtcgaactctacagattattcgggccaaggtatcagatggtggtgaatac

SEQ ID NO: 378539 - DNA, 120 bp, Artificial Sequence
  ENSG00000143341_79 (sequence is synthesized)
acttgtatagctatcaatcaagctggcgaaagcaagaaaaagttttccctgactgtttatgtgcccccaagcattaaagaccatgacagtgaatctctttctgtagttaatgtaagagag

SEQ ID NO: 378540 - DNA, 120 bp, Artificial Sequence
  ENSG00000143341_80 (sequence is synthesized)
ggaacttctgtgtctttggagtgtgagtcgaacgctgtgccacctccagtcatcacttggtataagaatgggcggatgataacagagtctactcatgtggagattttagctgatggacaa

SEQ ID NO: 378541 - DNA, 120 bp, Artificial Sequence
  ENSG00000143341_81 (sequence is synthesized)
atgctacacattaagaaagctgaggtatctgacacaggccagtatgtatgtagagctataaatgtagcaggacgggatgataaaaatttccacctcaatgtatatgtgccacccagtatt

SEQ ID NO: 378542 - DNA, 120 bp, Artificial Sequence
  ENSG00000143341_82 (sequence is synthesized)
gaaggacctgaaagagaagtgattgtggagacgatcagcaatcctgtgacattaacatgtgatgccactgggatcccacctcccacgatagcatggttaaagaaccacaagcgcatagaa

SEQ ID NO: 378543 - DNA, 120 bp, Artificial Sequence
  ENSG00000143341_83 (sequence is synthesized)
aattctgactcactggaagttcgtattttgtctggaggtagcaaactccagattgcccggtctcagcattcagatagtggaaactatacatgtattgcttcaaatatggagggaaaagcc

SEQ ID NO: 378544 - DNA, 120 bp, Artificial Sequence
  ENSG00000143341_84 (sequence is synthesized)
cagaaatattactttctttcaattcaagttcctccaagtgttgctggtgctgaaattccaagtgatgtcagtgtccttctaggagaaaatgttgagctggtctgcaatgcaaatggcatt

SEQ ID NO: 378545 - DNA, 120 bp, Artificial Sequence
  ENSG00000143341_85 (sequence is synthesized)
cctactccacttattcaatggcttaaagatggaaagcccatagctagtggtgaaacagaaagaatccgagtgagtgcaaatggcagcacattaaacatttatggagctcttacatctgac

SEQ ID NO: 378546 - DNA, 120 bp, Artificial Sequence
  ENSG00000143341_86 (sequence is synthesized)
acggggaaatacacatgtgttgctactaatcccgctggagaagaagaccgaatttttaacttgaatgtctatgttacacctacaattaggggtaataaagatgaagcagagaaactaatg

SEQ ID NO: 378547 - DNA, 120 bp, Artificial Sequence
  ENSG00000143341_87 (sequence is synthesized)
actttagtggatacttcaataaatattgaatgcagagccacagggacgcctccaccacagataaactggctgaagaatggacttcctctgcctctctcctcccatatccggttactggca

SEQ ID NO: 378548 - DNA, 120 bp, Artificial Sequence
  ENSG00000143341_88 (sequence is synthesized)
gcaggacaagttatcaggattgtgagagctcaggtgtctgatgtcgctgtgtatacttgtgtggcctccaacagagctggggtggataataagcattacaatcttcaagtgtttgcacca

SEQ ID NO: 378549 - DNA, 120 bp, Artificial Sequence
  ENSG00000143341_89 (sequence is synthesized)
ccaaatatggacaattcaatggggacagaggaaatcacagttctcaaaggtagttccacctctatggcatgcattactgatggaaccccagctcccagtatggcctggcttagagatggc

SEQ ID NO: 378550 - DNA, 120 bp, Artificial Sequence
  ENSG00000143341_90 (sequence is synthesized)
cagcctctggggcttgatgcccatctgacagtcagcacccatggaatggtcctgcagctcctcaaagcagagactgaagattcgggaaagtacacctgcattgcctcaaatgaagctgga

SEQ ID NO: 378551 - DNA, 120 bp, Artificial Sequence
  ENSG00000143341_91 (sequence is synthesized)
gaagtcagcaagcactttatcctcaaggtcctagaaccacctcacattaatggatctgaagaacatgaagagatatcagtaattgttaataacccacttgaacttacctgcattgcttct

SEQ ID NO: 378552 - DNA, 120 bp, Artificial Sequence
  ENSG00000143341_92 (sequence is synthesized)
ggaatcccagcccctaaaatgacctggatgaaagatggccggccccttccacagacggatcaagtgcaaactctaggaggaggagaggttcttcgaatttctactgctcaggtggaggat

SEQ ID NO: 378553 - DNA, 120 bp, Artificial Sequence
  ENSG00000143341_93 (sequence is synthesized)
acaggaagatatacatgtctggcatccagtcctgcaggagatgatgataaggaatatctagtgagagtgcatgtacctcctaatattgctggaactgatgagccccgggatatcactgtg

SEQ ID NO: 378554 - DNA, 120 bp, Artificial Sequence
  ENSG00000143341_94 (sequence is synthesized)
ttacggaacagacaagtgacattggaatgcaagtcagatgcagtgcccccacctgtaattacttggctcagaaatggagaacggttacaggcaacacctcgagtgcgaatcctatctgga

SEQ ID NO: 378555 - DNA, 120 bp, Artificial Sequence
  ENSG00000143341_95 (sequence is synthesized)
gggagatacttgcaaatcaacaatgctgacctaggtgatacagccaattatacctgtgttgccagcaacattgcaggaaagactacaagagaatttattctcactgtaaatgttcctcca

SEQ ID NO: 378556 - DNA, 120 bp, Artificial Sequence
  ENSG00000143341_96 (sequence is synthesized)
aacataaaggggggcccccagagccttgtaattcttttaaataagtcaactgtattggaatgcatcgctgaaggtgtgccaactccaaggataacatggagaaaggatggagctgttcta

SEQ ID NO: 378557 - DNA, 120 bp, Artificial Sequence
  ENSG00000143341_97 (sequence is synthesized)
gctgggaatcatgcaagatattccatcttggaaaatggattccttcatattcaatcagcacatgtcactgacactggacggtatttgtgtatggccaccaatgctgctggaacagatcgc

SEQ ID NO: 378558 - DNA, 120 bp, Artificial Sequence
  ENSG00000143341_98 (sequence is synthesized)
aggcgaatagatttacaggtccatgttcctccatctattgctccgggtcctaccaacatgactgtaatagtaaatgttcaaactactctggcttgtgaggctactgggataccaaaacca

SEQ ID NO: 378559 - DNA, 120 bp, Artificial Sequence
  ENSG00000143341_99 (sequence is synthesized)
tcaatcaattggagaaaaaatgggcatcttcttaatgtggatcaaaatcagaactcatacaggctcctttcttcaggttcactagtaattatttccccttctgtggatgacactgcaacc

SEQ ID NO: 378560 - DNA, 120 bp, Artificial Sequence
  ENSG00000143341_100 (sequence is synthesized)
tatgaatgtactgtgacaaacggtgctggagatgataaaagaactgtggatctcactgtccaagttccaccttccatagctgatgagcctacagatttcctagtaaccaaacatgcccca

SEQ ID NO: 378561 - DNA, 120 bp, Artificial Sequence
  ENSG00000143341_101 (sequence is synthesized)
gcagtaattacctgcactgcttcgggagttccatttccctcaattcactggaccaaaaatggtataagactgcttcccaggggagatggctatagaattctgtcctcaggagcaattgaa

SEQ ID NO: 378562 - DNA, 120 bp, Artificial Sequence
  ENSG00000143341_102 (sequence is synthesized)
atacttgccacccaattaaaccatgctggaagatacacttgtgtcgctaggaatgcggctggctctgcacatcgacacgtgacccttcatgttcatgagcctccagtcattcagccccaa

SEQ ID NO: 378563 - DNA, 120 bp, Artificial Sequence
  ENSG00000143341_103 (sequence is synthesized)
ccaagtgaactacacgtcattctgaacaatcctattttattaccatgtgaagcaacagggacacccagtcctttcattacttggcaaaaagaaggcatcaatgttaacacttcaggcaga

SEQ ID NO: 378564 - DNA, 120 bp, Artificial Sequence
  ENSG00000143341_104 (sequence is synthesized)
aaccatgcagttcttcctagtggcggcttacagatctccagagctgtccgagaggatgctggcacttacatgtgtgtggcccagaacccggctggtacagccttgggcaaaatcaagtta

SEQ ID NO: 378565 - DNA, 120 bp, Artificial Sequence
  ENSG00000143341_105 (sequence is synthesized)
aatgtccaagttcctccagtcattagccctcatctaaaggaatatgttattgctgtggacaagcccatcacgttatcctgtgaagcagatggcctccctccgcctgacattacatggcat

SEQ ID NO: 378566 - DNA, 120 bp, Artificial Sequence
  ENSG00000143341_106 (sequence is synthesized)
aaagatgggcgtgcaattgtggaatctatccgccagcgcgtcctcagctctggctctctgcaaatagcatttgtccagcctggtgatgctggccattacacgtgcatggcagccaatgta

SEQ ID NO: 378567 - DNA, 120 bp, Artificial Sequence
  ENSG00000143341_107 (sequence is synthesized)
gcaggatcaagcagcacaagcaccaagctcaccgtccatgtaccacccaggatcagaagtacagaaggacactacacggtcaatgagaattcacaagccattcttccatgcgtagctgat

SEQ ID NO: 378568 - DNA, 120 bp, Artificial Sequence
  ENSG00000143341_108 (sequence is synthesized)
ggaatccccacaccagcaattaactggaaaaaagacaatgttcttttagctaacttgttaggaaaatacactgctgaaccatatggagaactcattttagaaaatgttgtgctggaggat

SEQ ID NO: 378569 - DNA, 120 bp, Artificial Sequence
  ENSG00000143341_109 (sequence is synthesized)
tctggcttctatacctgtgttgctaacaatgctgcaggtgaagatacacacactgtcagcctgactgtgcatgttctccccacttttactgaacttcctggagacgtgtcattaaataaa

SEQ ID NO: 378570 - DNA, 120 bp, Artificial Sequence
  ENSG00000143341_110 (sequence is synthesized)
ggagaacagctacgattaagctgtaaagctactggtattccattgcccaaattaacatggaccttcaataacaatattattccagcccactttgacagtgtgaatggacacagtgaactt

SEQ ID NO: 378571 - DNA, 120 bp, Artificial Sequence
  ENSG00000143341_111 (sequence is synthesized)
gttattgaaagagtgtcaaaagaggattcaggtacttatgtgtgcaccgcagagaacagcgttggctttgtgaaggcaattggatttgtttatgtgaaagaacctccagtcttcaaaggt

SEQ ID NO: 378572 - DNA, 120 bp, Artificial Sequence
  ENSG00000143341_112 (sequence is synthesized)
gattatccttctaactggattgaaccacttggtgggaatgcaatcctgaattgtgaggtgaaaggagaccccaccccaaccatccagtggaacagaaagggagtggatattgaaattagc

SEQ ID NO: 378573 - DNA, 120 bp, Artificial Sequence
  ENSG00000143341_113 (sequence is synthesized)
cacagaatccggcaactgggcaatggctccctggccatctatggcactgttaatgaagatgccggtgactatacatgtgtagctaccaatgaagctggggtggtggagcgcagcatgagt

SEQ ID NO: 378574 - DNA, 120 bp, Artificial Sequence
  ENSG00000143341_114 (sequence is synthesized)
ctgactctgcaaagtcctcctattatcactcttgagccagtggaaactgttattaatgctggtggcaaaatcatattgaattgtcaggcaactggagagcctcaaccaaccattacatgg

SEQ ID NO: 378575 - DNA, 120 bp, Artificial Sequence
  ENSG00000143341_115 (sequence is synthesized)
tcccgtcaagggcactctatttcctgggatgaccgggttaacgtgttgtccaacaactcattatatattgctgatgctcagaaagaagatacctctgaatttgaatgtgttgctcgaaac

SEQ ID NO: 378576 - DNA, 120 bp, Artificial Sequence
  ENSG00000143341_116 (sequence is synthesized)
ttaatgggttctgtccttgtcagagtgccagtcatagtccaggttcatggtggattttcccagtggtctgcatggagagcctgcagtgtcacctgtggaaaaggcatccaaaagaggagt

SEQ ID NO: 378577 - DNA, 120 bp, Artificial Sequence
  ENSG00000143341_117 (sequence is synthesized)
cgtctgtgcaaccagccccttccagccaatggtgggaagccctgccaaggttcagatttggaaatgcgaaactgtcaaaataagccttgtccagtggatggtagctggtcggaatggagt

SEQ ID NO: 378578 - DNA, 120 bp, Artificial Sequence
  ENSG00000143341_118 (sequence is synthesized)
ctttgggaagaatgcacaaggagctgtggacgcggcaaccaaaccaggaccaggacttgcaataatccatcagttcagcatggtgggcggccatgtgaagggaatgctgtggaaataatt

SEQ ID NO: 378579 - DNA, 120 bp, Artificial Sequence
  ENSG00000143341_119 (sequence is synthesized)
atgtgcaacattaggccttgcccagttcatggagcatggagcgcttggcagccttggggaacatgcagcgaaagttgtgggaaaggtactcagacaagagcaagactttgtaataaccca

SEQ ID NO: 378580 - DNA, 120 bp, Artificial Sequence
  ENSG00000143341_120 (sequence is synthesized)
ccaccagcgtttggtgggtcctactgtgatggagcagaaacacagatgcaagtttgcaatgaaagaaattgtccaattcatggcaagtgggcgacttgggccagttggagtgcctgttct

SEQ ID NO: 378581 - DNA, 120 bp, Artificial Sequence
  ENSG00000143341_121 (sequence is synthesized)
gtgtcatgtggaggaggtgccagacagagaacaaggggctgctccgaccctgtgccccagtatggaggaaggaaatgcgaagggagtgatgtccagagtgatttttgcaacagtgaccct

SEQ ID NO: 378582 - DNA, 120 bp, Artificial Sequence
  ENSG00000143341_122 (sequence is synthesized)
tgcccaacccatggtaactggagtccttggagtggctggggaacatgcagccggacgtgtaacggagggcagatgcggcggtaccgcacatgtgataaccctcctccctccaatggggga

SEQ ID NO: 378583 - DNA, 120 bp, Artificial Sequence
  ENSG00000143341_123 (sequence is synthesized)
agagcttgtgggggaccagactcccagatccagaggtgcaacactgacatgtgtcctgtggatggaagttggggaagctggcatagttggagccagtgctctgcctcctgtggaggaggt

SEQ ID NO: 378584 - DNA, 120 bp, Artificial Sequence
  ENSG00000143341_124 (sequence is synthesized)
gaaaagactcggaagcggctgtgcgaccatcctgtgccagttaaaggtggccgtccctgtcccggagacactactcaggtgaccaggtgcaatgtacaagcatgtccaggtgggccccag

SEQ ID NO: 378585 - DNA, 120 bp, Artificial Sequence
  ENSG00000143341_125 (sequence is synthesized)
cgagccagaggaagtgttattggaaatattaatgatgttgaatttggaattgctttccttaatgccacaataactgatagccctaactctgatactagaataatacgtgccaaaattacc

SEQ ID NO: 378586 - DNA, 120 bp, Artificial Sequence
  ENSG00000143341_126 (sequence is synthesized)
aatgtacctcgtagtcttggttcagcaatgagaaagatagtttctattctaaatcccatttattggacaacagcaaaggaaataggagaagcagtcaatggctttaccctcaccaatgca

SEQ ID NO: 378587 - DNA, 120 bp, Artificial Sequence
  ENSG00000143341_127 (sequence is synthesized)
gtcttcaaaagagaaactcaagtggaatttgcaactggagaaatcttgcagatgagtcatattgcccggggcttggattccgatggttctttgctgctagatatcgttgtgagtggctat

SEQ ID NO: 378588 - DNA, 120 bp, Artificial Sequence
  ENSG00000143341_128 (sequence is synthesized)
gtcctacagcttcagtcacctgctgaagtcactgtaaaggattacacagaggactacattcaaacaggtcctgggcagctgtacgcctactcaacccggctgttcaccattgatggcatc

SEQ ID NO: 378589 - DNA, 120 bp, Artificial Sequence
  ENSG00000143341_129 (sequence is synthesized)
agcatcccatacacatggaaccacaccgttttctatgatcaggcacagggaagaatgcctttcttggttgaaacacttcatgcatcctctgtggaatctgactataaccagatagaagag

SEQ ID NO: 378590 - DNA, 120 bp, Artificial Sequence
  ENSG00000143341_130 (sequence is synthesized)
acactgggttttaaaattcatgcttcaatatccaaaggagatcgcagtaatcagtgcccctccgggtttaccttagactcagttggacctttttgtgctgatgaggatgaatgtgcagca

SEQ ID NO: 378591 - DNA, 120 bp, Artificial Sequence
  ENSG00000143341_131 (sequence is synthesized)
gggaatccctgctcccatagctgccacaatgccatggggacttactactgctcctgccctaaaggcctcaccatagctgcagatggaagaacttgtcaagatattgatgagtgtgctttg

SEQ ID NO: 378592 - DNA, 120 bp, Artificial Sequence
  ENSG00000143341_132 (sequence is synthesized)
ggtaggcatacctgccacgctggtcaggactgtgacaatacgattggatcttatcgctgtgtggtccgttgtggaagtggctttcgaagaacctctgatgggctgagttgtcaagatatt

SEQ ID NO: 378593 - DNA, 120 bp, Artificial Sequence
  ENSG00000143341_133 (sequence is synthesized)
aatgaatgtcaagaatccagcccctgtcaccagcgctgtttcaatgccataggaagtttccattgtggatgtgaacctgggtatcagctcaaaggcagaaaatgcatggatgtgaacgag

SEQ ID NO: 378594 - DNA, 120 bp, Artificial Sequence
  ENSG00000143341_134 (sequence is synthesized)
tgtagacaaaatgtatgcagaccagatcagcactgtaagaacacccgtggtggctataagtgcattgatctttgtccaaatggaatgaccaaggcagaaaatggaacctgtattgatatt

SEQ ID NO: 378595 - DNA, 120 bp, Artificial Sequence
  ENSG00000143341_135 (sequence is synthesized)
gatgaatgtaaagatgggacccatcagtgcagatataaccagatatgtgagaatacaagaggcagctatcgttgtgtatgcccaagaggttatcggtctcaaggagttggaagaccctgc

SEQ ID NO: 378596 - DNA, 120 bp, Artificial Sequence
  ENSG00000143341_136 (sequence is synthesized)
atggacattaatgaatgtgaacaagtgcctaaaccttgtgcacatcagtgctccaacacccccggcagcttcaagtgtatctgtccaccaggacaacatttattaggggacgggaaatct

SEQ ID NO: 378597 - DNA, 120 bp, Artificial Sequence
  ENSG00000143341_137 (sequence is synthesized)
tgcgctggattggagaggctgccaaattatggcactcaatacagtagctataaccttgcacggttctcccctgtgagaaacaactatcaacctcaacagcattacagacagtactcacat

SEQ ID NO: 378598 - DNA, 120 bp, Artificial Sequence
  ENSG00000143341_138 (sequence is synthesized)
ctctacagctcctactcagagtatagaaacagcagaacatctctctccaggactagaaggactattaggaaaacttgccctgaaggctctgaggcaagccatgacacatgtgtagatatt

SEQ ID NO: 378599 - DNA, 120 bp, Artificial Sequence
  ENSG00000143341_139 (sequence is synthesized)
gatgaatgtgaaaatacagatgcctgccagcatgagtgtaagaatacctttggaagttatcagtgcatctgcccacctggctatcaactcacacacaatggaaagacatgccaagatatc

SEQ ID NO: 378600 - DNA, 120 bp, Artificial Sequence
  ENSG00000143341_140 (sequence is synthesized)
gatgaatgtctggagcagaatgtgcactgtggacccaatcgcatgtgcttcaacatgagaggaagctaccagtgcatcgatacaccctgtccacccaactaccaacgggatcctgtttca

SEQ ID NO: 378601 - DNA, 120 bp, Artificial Sequence
  ENSG00000143341_141 (sequence is synthesized)
gggttctgcctcaagaactgtccacccaatgatttggaatgtgccttgagcccatatgccttggaatacaaactcgtctccctcccatttggaatagccaccaatcaagatttaatccgg

SEQ ID NO: 378602 - DNA, 120 bp, Artificial Sequence
  ENSG00000143341_142 (sequence is synthesized)
ctggttgcatacacacaggatggagtgatgcatcccaggacaactttcctcatggtagatgaggaacagactgttccttttgccttgagggatgaaaacctgaaaggagtggtgtataca

SEQ ID NO: 378603 - DNA, 120 bp, Artificial Sequence
  ENSG00000143341_143 (sequence is synthesized)
acacgaccactacgagaagcagagacctaccgcatgagggtccgagcctcatcctacagtgccaatgggaccattgaatatcagaccacattcatagtttatatagctgtgtccgcctat

SEQ ID NO: 378604 - DNA, 120 bp, Artificial Sequence
  ENSG00000143341_144 (sequence is synthesized)
ccatactaaggaactctccaaagcctattccacatatttaaaccgcattaatcatggcaatcaagcccccttccagattactgtctcttgaacagttgcaatcttggcagcttgaaaatg

SEQ ID NO: 378605 - DNA, 120 bp, Artificial Sequence
  ENSG00000143341_145 (sequence is synthesized)
gtgctacactctgttttgtgtgccttccttggtacttctgaggtattttcatgatcccaccatggtcatatcttgaagtatggtctagaaaagtcccttattattttatttattacactg

SEQ ID NO: 378606 - DNA, 120 bp, Artificial Sequence
  ENSG00000143341_146 (sequence is synthesized)
gagcagttacttcccaaagattattctgaacatctaacaggacatatcagtgatggtttacagtagtgtagtacctaagatcattttcctgaaagccaaaccaaacaacgaaaaacaaga

SEQ ID NO: 378607 - DNA, 120 bp, Artificial Sequence
  ENSG00000143341_147 (sequence is synthesized)
acaactaattcagaatcaaatagagtttttgagcatttgactatttttagaatcataaaattagttactaagtattttgatcaaagcttataaaataacttacggagatttttgtaagta

SEQ ID NO: 378608 - DNA, 120 bp, Artificial Sequence
  ENSG00000143341_148 (sequence is synthesized)
ttgatacattataataggacttgcctattttcatttttaagaagaaaaacaccactcattttataaaatatagtacagctactataaggcttgtttgatcccaaatggtgcttatcttga

SEQ ID NO: 378609 - DNA, 120 bp, Artificial Sequence
  ENSG00000143341_149 (sequence is synthesized)
ttgaacattcagaacaaggatattattttcagtgattttgtgagatcagctgaaccacttatgataataataataaaaaagactgctttgccctcacgtcagttgtacatggcatggaac

SEQ ID NO: 378610 - DNA, 120 bp, Artificial Sequence
  ENSG00000143341_150 (sequence is synthesized)
tttaaaaattttaatataaactttcatccagttagcttcataacttttacgttccagaattttgtttattttcctgtcaatgaaagcaatttttaaagataccagtgggacagatttggt

SEQ ID NO: 378611 - DNA, 120 bp, Artificial Sequence
  ENSG00000143341_151 (sequence is synthesized)
tttttaaaaatctcatgtgttcaaattaacataaatattacacgtcaatacactgtacatggtggtaatagactctaagcaattgccaagatgtattctatttttatgaagtgtatatat

SEQ ID NO: 378612 - DNA, 120 bp, Artificial Sequence
  ENSG00000143341_152 (sequence is synthesized)
attaccttagtgtgcattttctatataatatcttgatggactcttttataaaattattttataaaaaacaatgttacactaaaatcagcctaaataaattttcacaactttttttcataa

SEQ ID NO: 378613 - DNA, 120 bp, Artificial Sequence
  ENSG00000143341_153 (sequence is synthesized)
ttatatatttatgttttatacataggtattgctatttaaaatagtatattaatcttgccaacacattttatgttcattgcattttactttgaaatagtactggcattttatattcgggaa

SEQ ID NO: 378614 - DNA, 120 bp, Artificial Sequence
  ENSG00000143341_154 (sequence is synthesized)
cttatctatcatgtttccatgttaacttcaatgggttatttgaatcacatcagcagttagaaatgtcattataaccacccaaagtcactgtgatgcccaagaatcagtctttcacaggag

SEQ ID NO: 378615 - DNA, 120 bp, Artificial Sequence
  ENSG00000143341_155 (sequence is synthesized)
tgaaatgagaacatatgacaaccctgtggactggccacacaaaaacccgtaatcctagtttatttgatagttaatttccaaattgtatatagagtgattaaagaaaaaaattctctaaaa

SEQ ID NO: 378616 - DNA, 120 bp, Artificial Sequence
  ENSG00000143344_0 (sequence is synthesized)
ctgcggtccagtctagggggtctcagattggcggggatgggcagcagcggcaggtggccttggcttttgctgcagccgtcaacgacctatcatcggggtcctgcgtaaggtccggctggc

SEQ ID NO: 378617 - DNA, 120 bp, Artificial Sequence
  ENSG00000143344_1 (sequence is synthesized)
tgggacttggctgtgggtgggatggactggctgccggaccgagtgccctgcagttggtaggagtatgaggcagagtgatgcacacccgggcgcccagcatcgttctaattgccggagaca

SEQ ID NO: 378618 - DNA, 120 bp, Artificial Sequence
  ENSG00000143344_2 (sequence is synthesized)
ttgcctcagactgtgcgctgctagaggctgcgttcctgagcaggaagcccgtttcctgggattggaactacccttcttggccagcgggaagtccccaaggacggagtcgaaaggtcaaat

SEQ ID NO: 378619 - DNA, 120 bp, Artificial Sequence
  ENSG00000143344_3 (sequence is synthesized)
cttatctgtcagtgctgtgtgacagcatcgcaacgggatctgcagaacctgaactcgatccgtaatgcctcctgcctgcctctttcaagatggaggtgaaacctgtgggagaacctactc

SEQ ID NO: 378620 - DNA, 120 bp, Artificial Sequence
  ENSG00000143344_4 (sequence is synthesized)
aagaggtgtctaaattcaaactttccaccaaggtagaaagcacgggacactggctggtggaagatcatgttcgaatatgggaagttttaaagacagaggagagctcgattcaggactggg

SEQ ID NO: 378621 - DNA, 120 bp, Artificial Sequence
  ENSG00000143344_5 (sequence is synthesized)
gtgaagaggtagaggaaggagctgtttaccatgtcaccctcaaaagagtccagattcaacaggctgccaataaaggagcaagatggctaggggttgaaggggaccagctgcctccaggac

SEQ ID NO: 378622 - DNA, 120 bp, Artificial Sequence
  ENSG00000143344_6 (sequence is synthesized)
acacagtcagtcaatatgaaacctgtaagatcaggaccataaaagctggcaccttggagaagcttgtggagaacctgctgacagcttttggggacaatgactttacctatatcagcatct

SEQ ID NO: 378623 - DNA, 120 bp, Artificial Sequence
  ENSG00000143344_7 (sequence is synthesized)
ttctttcaacgtacagaggctttgcctccactaaagaagtgctggaactactgctggacaggtatggaaacctgacaagcccaaactgtgaagaagatggaagccaaagttcatcagagt

SEQ ID NO: 378624 - DNA, 120 bp, Artificial Sequence
  ENSG00000143344_8 (sequence is synthesized)
ccaaaatggtgatcaggaatgcaatcgcttccatactaagggcctggcttgaccagtgtgcagaagacttccgagagccccctcacttcccttgcttacagaaactgctggattatctca

SEQ ID NO: 378625 - DNA, 120 bp, Artificial Sequence
  ENSG00000143344_9 (sequence is synthesized)
cacggatgatgccgggctctgacccagaaagaagagcacaaaatcttcttgagcagtttcagaagcaagaagtggaaactgacaatgggcttcccaacacgatctccttcagcctggaag

SEQ ID NO: 378626 - DNA, 120 bp, Artificial Sequence
  ENSG00000143344_10 (sequence is synthesized)
aggaagaggaactggagggtggagagtcagcagaattcacgtgcttctcagaagatctcgtggcagagcagctgacctacatggatgcacaactcttcaagaaagtagtgcctcaccact

SEQ ID NO: 378627 - DNA, 120 bp, Artificial Sequence
  ENSG00000143344_11 (sequence is synthesized)
gcctgggctgcatttggtctcgaagggataagaaggaaaacaaacatttggctcctacgatccgtgccaccatctctcagtttaataccctcaccaaatgtgttgtcagcaccatcctgg

SEQ ID NO: 378628 - DNA, 120 bp, Artificial Sequence
  ENSG00000143344_12 (sequence is synthesized)
ggggcaaagaactcaaaactcagcagagagccaaaatcattgagaagtggatcaacatcgctcatgaatgtagactcctgaagaatttttcctccttgagggccatcgtttcggcactgc

SEQ ID NO: 378629 - DNA, 120 bp, Artificial Sequence
  ENSG00000143344_13 (sequence is synthesized)
agtctaattccatctatcggttaaaaaagacttgggctgccgtcccaagggaccgaatgctgatgtttgaagaactttcagatatcttctcagaccataataaccatttgaccagccgag

SEQ ID NO: 378630 - DNA, 120 bp, Artificial Sequence
  ENSG00000143344_14 (sequence is synthesized)
aactactgatgaaggaaggaacctcaaaatttgcaaacctggacagcagtgtgaaagaaaaccagaagcgtacccagaggcggctgcagctccagaaggacatgggtgtgatgcagggaa

SEQ ID NO: 378631 - DNA, 120 bp, Artificial Sequence
  ENSG00000143344_15 (sequence is synthesized)
ctgtgccctacctgggcaccttcctgactgacctgaccatgcttgacactgcccttcaggactacatcgagggtggactgataaactttgagaaaaggagaagggaatttgaagtgattg

SEQ ID NO: 378632 - DNA, 120 bp, Artificial Sequence
  ENSG00000143344_16 (sequence is synthesized)
cccagataaagctcttacagtctgcctgcaacagctattgcatgaccccagaccaaaagttcatccagtggttccagaggcagcagctcctgacagaggaggagagctatgccctgtcat

SEQ ID NO: 378633 - DNA, 120 bp, Artificial Sequence
  ENSG00000143344_17 (sequence is synthesized)
gtgagattgaagcagctgctgacgccagcaccacctcgcccaagcctcggaagagcatggtgaagagactcagcctactgtttctagggtctgacatgatcaccagtcccactcccacca

SEQ ID NO: 378634 - DNA, 120 bp, Artificial Sequence
  ENSG00000143344_18 (sequence is synthesized)
aagagcagcccaagtccactgccagcgggagctctggtgaaagcatggactctgtcagcgtgtcatcctgcgagtcgaaccactcagaggctgaggagggctccattactcccatggaca

SEQ ID NO: 378635 - DNA, 120 bp, Artificial Sequence
  ENSG00000143344_19 (sequence is synthesized)
cccctgatgagcctcaaaaaaagctctctgagtcctcctcatcctgttcttctatccattccatggacacaaattcctcagggatgtcttccttaatcaaccccctctcctcccctccgt

SEQ ID NO: 378636 - DNA, 120 bp, Artificial Sequence
  ENSG00000143344_20 (sequence is synthesized)
cctgcaacaacaaccccaaaatccacaagcgctctgtctcggtgacgtccattacctcgactgtgctgcctcctgtttacaaccaacagaatgaagacacctgcataatccgcatcagtg

SEQ ID NO: 378637 - DNA, 120 bp, Artificial Sequence
  ENSG00000143344_21 (sequence is synthesized)
ccgctgtgatccagagagccatgctgaagcacaatctggactcagaccccgccgaggagtacgagctggtgcaggtcatctcggaggacaaagaacttgtgattccagactcagcaaatg

SEQ ID NO: 378638 - DNA, 120 bp, Artificial Sequence
  ENSG00000143344_22 (sequence is synthesized)
tcttttatgccatgaacagccaagtgaactttgacttcattttgcgcaaaaagaactccatggaagaacaagtgaaactgcgtagccggaccagcttgacgttgcccaggacagctaaac

SEQ ID NO: 378639 - DNA, 120 bp, Artificial Sequence
  ENSG00000143344_23 (sequence is synthesized)
ggggctgctggagtaacagacacagcaaaatcaccctctgaagggagggaccagtggccccttgtttgccaaaggcagagtggggctgagaaacaggctgcggtgattgcaattaccatc

SEQ ID NO: 378640 - DNA, 120 bp, Artificial Sequence
  ENSG00000143344_24 (sequence is synthesized)
cggtgttcgaggatcattggtgaagtcagcagatatttattgagttcctgtggtgtgcaaagcattatgataggcaccgtggggaaactggaaatgaatttgacatgaaaaggatgaacg

SEQ ID NO: 378641 - DNA, 120 bp, Artificial Sequence
  ENSG00000143344_25 (sequence is synthesized)
attcactgattctctttgactcatttgagactaaaatgcagaattaccaacatttaaaacatatatatgcacatgtatttggtatgcatgtgtatctatataaaaatatataagagggac

SEQ ID NO: 378642 - DNA, 120 bp, Artificial Sequence
  ENSG00000143344_26 (sequence is synthesized)
tttatgggatagtatggactatggaaaaacaaatttgcacaatggcctgggaagttgaggtcactttttacagggaaatagaagaaactgagaacctagtctcgtatattctgagtaaat

SEQ ID NO: 378643 - DNA, 120 bp, Artificial Sequence
  ENSG00000143344_27 (sequence is synthesized)
ggaatcagtcctgggaatagagagtgtcctttgtgccagtattacaagaagcccaaactttatttttataaagggagaggatgactttctcaatcaagtgccaccagataaaaacaactg

SEQ ID NO: 378644 - DNA, 120 bp, Artificial Sequence
  ENSG00000143344_28 (sequence is synthesized)
cagaggctggaactgccacaggctgtatgaaaggccactttggaaagggtttggatgagctggtggccttcaacctctgcctgcatctgccactttctgctaccctagggaggccaggag

SEQ ID NO: 378645 - DNA, 120 bp, Artificial Sequence
  ENSG00000143344_29 (sequence is synthesized)
gagcttcggaggaccatcgccccactggtctagccatcatgacacctctggaggtgtcaagctcctgaaacaagctcatttcagtttctggcaaccccgtgtatttccgttttcccccta

SEQ ID NO: 378646 - DNA, 120 bp, Artificial Sequence
  ENSG00000143344_30 (sequence is synthesized)
aagaacatatcataatcattgcacaaataaccatgttctttggtaatgaagccagaaaagaaagcgcaaaagaatggtgactcatttggactcttatctgtcttggaatgtcactgcttc

SEQ ID NO: 378647 - DNA, 120 bp, Artificial Sequence
  ENSG00000143344_31 (sequence is synthesized)
attgccttctctgattgccttttgcatgtaaaactatgtgtctggagtcttttgccatctggatcttagtacctctttattatgtgcaatttattcctcaggtgtggaaatttctactgc

SEQ ID NO: 378648 - DNA, 120 bp, Artificial Sequence
  ENSG00000143344_32 (sequence is synthesized)
aattgactacgtttgattattttgagcttgtgaaagatttctgaacagtgattgtcccgttaatagcccctcagaagatgttccctgctgataacagcatcctattttacttacttttat

SEQ ID NO: 378649 - DNA, 120 bp, Artificial Sequence
  ENSG00000143344_33 (sequence is synthesized)
agcattactgtgcctagtcgtggggaaagagatggggctgtatagattatctgaatcatttgtctaagaggtacattcttccagatggaatcaataacttttttttttccaggttcccgt

SEQ ID NO: 378650 - DNA, 120 bp, Artificial Sequence
  ENSG00000143344_34 (sequence is synthesized)
gcttgctatcacagtatcattgttaagtgacacttttgtctctcataacaccatcacactcttccttccaagtctgagctgtgctggggtttgaactaaaagccatatgtggaatattga

SEQ ID NO: 378651 - DNA, 120 bp, Artificial Sequence
  ENSG00000143344_35 (sequence is synthesized)
catgtgtaagaagcactttcagaatgttgtcctttttaagaaatgattctcaaaataccagtttttattccaaaaatttagagaacaaacccggaatatgaagtgcagattgtaacatgg

SEQ ID NO: 378652 - DNA, 120 bp, Artificial Sequence
  ENSG00000143344_36 (sequence is synthesized)
agctatttttttttcttaatcccataatacagctcctaaaagttgtgtgggatttgcgttgcataaatagccatgtgaattccacaagaagcaccagggaaagtttagagatttgcggca

SEQ ID NO: 378653 - DNA, 120 bp, Artificial Sequence
  ENSG00000143344_37 (sequence is synthesized)
atggaccgaagaacgggccaggaagtcctccaatttcctttggtctttccaggagattggactacacattgtaaagactgactgggtttcaactagtcaaaaagcactttcttctgtttt

SEQ ID NO: 378654 - DNA, 120 bp, Artificial Sequence
  ENSG00000143344_38 (sequence is synthesized)
caatccctgttcgatttgtgcttctgtgcttgtaggagagatggccagggtggcagccctcatgcaggttgaagtatatgtagcctcagcctgatattcttggtgcgaaggtaaaaaaaa

SEQ ID NO: 378655 - DNA, 120 bp, Artificial Sequence
  ENSG00000143344_39 (sequence is synthesized)
aaaaataaataaaaccattggcctggttgagggcgtgaccaccaagacatatatgttgtgcccgtgttcatcctgtgtatttatactgtatatgtagagtctagatttatatactgcaat

SEQ ID NO: 378656 - DNA, 120 bp, Artificial Sequence
  ENSG00000143344_40 (sequence is synthesized)
gtaaaatatatatatatttaccttttttaaagacaatggaaattccaagtagctaaaacttagcttcatttatttaatgccactttaaatgtcttaaatttgtttcctggtggacagccg

SEQ ID NO: 378657 - DNA, 120 bp, Artificial Sequence
  ENSG00000143344_41 (sequence is synthesized)
ggtaatgcttttagctgctcgcatgcttgtctttctgcatctccatcatctgtttaccttttggttaaactaataaactagtttgggacttggctggcatgtgctgccagacccaaaggg

SEQ ID NO: 378658 - DNA, 120 bp, Artificial Sequence
  ENSG00000143344_42 (sequence is synthesized)
gcgggggcagcgcggcgcgtgtctgtgcgctgcggtcgctcgggaccgggaccggggcgaggcgccgcggggctgagcccagcagacattgcgttggcctccgagcagggcgcatcatgc

SEQ ID NO: 378659 - DNA, 120 bp, Artificial Sequence
  ENSG00000143353_0 (sequence is synthesized)
agtggcatcagcgatggcggctgcgtcggggtcggttctgcagcgctgtatcgtgtcgccggcagggaggcatagcgcctctctgatcttcctgcatggctcaggtgattctggacaagg

SEQ ID NO: 378660 - DNA, 120 bp, Artificial Sequence
  ENSG00000143353_1 (sequence is synthesized)
attaagaatgtggatcaagcaggttttaaatcaagatttaacattccaacacataaaaattatttatccaacagctcctcccagatcatatactcctatgaaaggaggaatctccaatgt

SEQ ID NO: 378661 - DNA, 120 bp, Artificial Sequence
  ENSG00000143353_2 (sequence is synthesized)
atggtttgacagatttaaaataaccaatgactgcccagaacaccttgaatcaattgatgtcatgtgtcaagtgcttactgatttgattgatgaagaagtaaaaagtggcatcaagaagaa

SEQ ID NO: 378662 - DNA, 120 bp, Artificial Sequence
  ENSG00000143353_3 (sequence is synthesized)
caggatattaataggaggattctctatgggaggatgcatggcaatacatttagcatatagaaatcatcaagatgtggcaggagtatttgctctttctagttttctgaataaagcatctgc

SEQ ID NO: 378663 - DNA, 120 bp, Artificial Sequence
  ENSG00000143353_4 (sequence is synthesized)
tgtttaccaggctcttcagaagagtaatggtgtacttcctgaattatttcagtgtcatggtactgcagatgagttagttcttcattcttgggcagaagagacaaactcaatgttaaaatc

SEQ ID NO: 378664 - DNA, 120 bp, Artificial Sequence
  ENSG00000143353_5 (sequence is synthesized)
tctaggagtgaccacgaagtttcatagttttccaaatgtttaccatgagctaagcaaaactgagttagacatattgaagttatggattcttacaaagctgccaggagaaatggaaaaaca

SEQ ID NO: 378665 - DNA, 120 bp, Artificial Sequence
  ENSG00000143353_6 (sequence is synthesized)
aaaatgaatgaatcaagagtgatttgttaatgtaagtgtaatgtctttgtgaaaagtgatttttactgccaaattataatgataattaaaatattaagaaataacactttcctgactttt

SEQ ID NO: 378666 - DNA, 120 bp, Artificial Sequence
  ENSG00000143353_7 (sequence is synthesized)
tagacaaacatctgtgcataatttttcagacacaattctgtaaatatttggaaaccttttaagtatttaaacttttaaatttttgaaataaagtattctaaactaatataaataaggaca

SEQ ID NO: 378667 - DNA, 120 bp, Artificial Sequence
  ENSG00000143353_8 (sequence is synthesized)
atgaaaaaacatgaaaggacttagcataatgttattttatcttttctacaactttgtttaaattacctttccaaagatatttgtgtttatgtaattttccacggaataacattaatactc

SEQ ID NO: 378668 - DNA, 120 bp, Artificial Sequence
  ENSG00000143353_9 (sequence is synthesized)
taggtttataaaccggtttcacattatttcatttgatcatcacaagagctttgtgaagtaagccgagaagttgttactggtatttaataatagcaatagaggagttaaagactttcccac

SEQ ID NO: 378669 - DNA, 120 bp, Artificial Sequence
  ENSG00000143353_10 (sequence is synthesized)
agcttgcaggtcaagacaagaaattcaggtctcctaattctcagtggagctctatttctgttaacccaaattgctgctctgttttaggtctcaatttcatctgtaaaatgatactaatag

SEQ ID NO: 378670 - DNA, 120 bp, Artificial Sequence
  ENSG00000143353_11 (sequence is synthesized)
tacttatcccattggatttttgttgagatttaaataaatagccaaaagccaatacataataaacactcaataaagattaaccataaggagagtcatgatctggttccaggaatacattgt

SEQ ID NO: 378671 - DNA, 120 bp, Artificial Sequence
  ENSG00000143353_12 (sequence is synthesized)
tagatgactgaaaaattgtattacttcaatgaaaatactataaataataacattttcatatattagttggttctcatgcatacataatctaattttatttgatcctcacaactgtttaag

SEQ ID NO: 378672 - DNA, 120 bp, Artificial Sequence
  ENSG00000143353_13 (sequence is synthesized)
ttttattaaatatacattatccctatttgtataaatagaatcatacaatacctgcctgctttcattcaacaaaattatcatgagatttttccatgttgtgtacatcaatagttcatctat

SEQ ID NO: 378673 - DNA, 120 bp, Artificial Sequence
  ENSG00000143353_14 (sequence is synthesized)
tttattgctcagtaatattccattgtgtggatgtatcactatttgtttacacattcaccactgatatataagttgcttccagtgtgaggctgttttaaataaagctgctatgaatattca

SEQ ID NO: 378674 - DNA, 120 bp, Artificial Sequence
  ENSG00000143353_15 (sequence is synthesized)
gtccaccaccctcgctttggggccttgtgtcccgccgctcagccagccctccatccccacaacacacctccccattcctcgccccaagtttaaacagagcaagttagtaaggtgattctg

SEQ ID NO: 378675 - DNA, 120 bp, Artificial Sequence
  ENSG00000143353_16 (sequence is synthesized)
agcaggttttaaatcaagatttaacattccaacacataaaaattatttatccaacagctcctcccagttacactgttggaccaagttttgccagatcatatactcctatgaaaggaggaa

SEQ ID NO: 378676 - DNA, 120 bp, Artificial Sequence
  ENSG00000143353_17 (sequence is synthesized)
ggctgcgtcggggtcggttctgcagcgctgtatcgtgtcgccggcagggaggcatagcgcctctctgatcttcctgcatggctcaggtggatttcaattttacgtcctggttttctacag

SEQ ID NO: 378677 - DNA, 120 bp, Artificial Sequence
  ENSG00000143353_18 (sequence is synthesized)
ctcgggaaacatcctcccctcggttaccccagtattgcccaagtggaggtgtcgccgggcccaaatagggcccagtgggtggctcccccgtcgccagccccggctgtagatgcacgggca

SEQ ID NO: 378678 - DNA, 120 bp, Artificial Sequence
  ENSG00000143353_19 (sequence is synthesized)
taaatttaacattcacttaaatatctattgctgtttcttttgggttcttccagaataattttttcttattctttaccttaatttttaagggtattcaagaagatctccatgtttataaaa

SEQ ID NO: 378679 - DNA, 120 bp, Artificial Sequence
  ENSG00000143353_20 (sequence is synthesized)
tgacatagagggaacagggttatttatgttatcgcaggcctttgtctgtgaaacttagagtagacgaaatttctttttagcattctctttaaaggtctccagatattttaaaaatatgga

SEQ ID NO: 378680 - DNA, 120 bp, Artificial Sequence
  ENSG00000143353_21 (sequence is synthesized)
taataggtaagacctttaaatgttggtaatttatcactgttcacttttgtctaattctatacatcaaatcttacttggaacattatttagaagcacttgtatatcattcgatgcattcat

SEQ ID NO: 378681 - DNA, 120 bp, Artificial Sequence
  ENSG00000143353_22 (sequence is synthesized)
agtttcagataaactttacatattgaggatttcaaagatattagaattataaacagcagcgcatgaaactttaattgattttctttttgaataataacggattttgagactcttgtggca

SEQ ID NO: 378682 - DNA, 120 bp, Artificial Sequence
  ENSG00000143355_0 (sequence is synthesized)
agtccccaacccaatctacaggcactgggaacttgcaagcagccagggaacgctgaaaatagcacgtctttttctttctttgtgttcaaaactattttctttcttcaccagattttgttt

SEQ ID NO: 378683 - DNA, 120 bp, Artificial Sequence
  ENSG00000143355_1 (sequence is synthesized)
tcctccccccgctgcagttgtttcccattagtaactcgatctctcagagcagtaagattcgccttctacgcctctttttccctccgcccgaattgtttgttttctgcacatctccttcag

SEQ ID NO: 378684 - DNA, 120 bp, Artificial Sequence
  ENSG00000143355_2 (sequence is synthesized)
ggagccgctgaggcttccccccaactcttcccagttctttttgcttcccctcggccccccaagcagaccgatttccactccatctgtttcttctcctcctttctctccctctttccctcc

SEQ ID NO: 378685 - DNA, 120 bp, Artificial Sequence
  ENSG00000143355_3 (sequence is synthesized)
atcctcgagcgtctctgcgctcctacagggcagccctctctggtcccttgcctccttcactcggatgagctgaaagccccgggcgtgtgtatatggaaatagtggggtgccgagcagaag

SEQ ID NO: 378686 - DNA, 120 bp, Artificial Sequence
  ENSG00000143355_4 (sequence is synthesized)
acaactcgtgtcctttccgccccccagccatgctctttcacgggatctccggaggccacatccaaggcatcatggaggagatggagcgcagatccaagactgaggcccgtctggccaaag

SEQ ID NO: 378687 - DNA, 120 bp, Artificial Sequence
  ENSG00000143355_5 (sequence is synthesized)
gcgcccagctcaacggccgcgacgcgggcatgcccccgctcagcccggagaagcccgccctgtgcgccggctgcgggggcaagatctcggacaggtactatctgctggctgtggacaaac

SEQ ID NO: 378688 - DNA, 120 bp, Artificial Sequence
  ENSG00000143355_6 (sequence is synthesized)
agtggcatctgagatgcctgaagtgctgtgaatgtaagctggccctcgagtccgagctcacctgctttgccaaggacggtagcatttactgcaaggaggattactacagaaggttctctg

SEQ ID NO: 378689 - DNA, 120 bp, Artificial Sequence
  ENSG00000143355_7 (sequence is synthesized)
tgcagagatgtgcccgctgccaccttggcatttccgcctcggagatggtcatgcgcgcccgagactctgtctaccacctgagctgcttcacctgctccacttgcaacaagactctgacca

SEQ ID NO: 378690 - DNA, 120 bp, Artificial Sequence
  ENSG00000143355_8 (sequence is synthesized)
cgggcgaccatttcggcatgaaggacagcctggtgtactgccgcgcccacttcgagaccctcttgcaaggagagtatccaccgcagctgagctacacggagctggcggccaagagcggcg

SEQ ID NO: 378691 - DNA, 120 bp, Artificial Sequence
  ENSG00000143355_9 (sequence is synthesized)
gcctggccctgccttacttcaacggtacgggcaccgtgcagaaagggcggccccggaagcggaagagcccagcgctgggagtggacatcgtcaattacaactcaggttgtaatgagaatg

SEQ ID NO: 378692 - DNA, 120 bp, Artificial Sequence
  ENSG00000143355_10 (sequence is synthesized)
aggcagaccacttggaccgggaccagcagccttatccaccctcgcagaagaccaagcgcatgcgaacctctttcaagcatcaccagctccggaccatgaaatcctactttgccatcaacc

SEQ ID NO: 378693 - DNA, 120 bp, Artificial Sequence
  ENSG00000143355_11 (sequence is synthesized)
acaacccggatgccaaggacctcaagcagcttgcccagaaaacaggtctgaccaaaagagttttgcaggtttggttccaaaacgcacgagccaaattcagaaggaaccttttgcggcagg

SEQ ID NO: 378694 - DNA, 120 bp, Artificial Sequence
  ENSG00000143355_12 (sequence is synthesized)
agaatgggggtgttgataaagctgacggcacgtcgcttccggccccgccctcagcagacagcggagctctcactccacccggcactgcgaccactttaacagacctgaccaatcccacta

SEQ ID NO: 378695 - DNA, 120 bp, Artificial Sequence
  ENSG00000143355_13 (sequence is synthesized)
tcactgtagtgacatccgtgacctctaacatggacagccacgaatccggaagcccctcacaaactaccttaacaaaccttttctaacattggttttttttttttagtttttaaattcttc

SEQ ID NO: 378696 - DNA, 120 bp, Artificial Sequence
  ENSG00000143355_14 (sequence is synthesized)
ctcttctttttattattattctaattattattattttattatttacaagactttttttttcttctaacccacaagatatttggggaataaaaataacagcttggtgtgtagcatctgcag

SEQ ID NO: 378697 - DNA, 120 bp, Artificial Sequence
  ENSG00000143355_15 (sequence is synthesized)
ccacttggcaaatgagtttacagtattgtctcctttaagtgaatatattttgtctacaaagtgtatttggatttaaaaaaattaattaggtctttcagttggtaaggagagtttttgaat

SEQ ID NO: 378698 - DNA, 120 bp, Artificial Sequence
  ENSG00000143355_16 (sequence is synthesized)
aattctaataagtgcctcttaaaattgtatgttacttatttccagaatctcgaagaaaaaagaaaaaagagtggtattattatgggcaaataatcatattcccacttaaatgattaggtt

SEQ ID NO: 378699 - DNA, 120 bp, Artificial Sequence
  ENSG00000143355_17 (sequence is synthesized)
aataaagaaccagataattaattagttactttttaaatcttgcaattgtatgtgtgattatggagttttgaaaacgttacattttttaaatcttaaaactgaaaacttgtttttagtatt

SEQ ID NO: 378700 - DNA, 120 bp, Artificial Sequence
  ENSG00000143355_18 (sequence is synthesized)
tctatttcttacctgaactgttaattcaagtgaggaatatgatgaaataaaagcattaactacagacattttaaatagtaatgattaattaggtgagaaatctattacaggaatgtgact

SEQ ID NO: 378701 - DNA, 120 bp, Artificial Sequence
  ENSG00000143355_19 (sequence is synthesized)
tttccttctcttaggggtgtacaactctaaaaactttttacttggttatttgtttttcaacatttgaaaaatacttaagctccctatgtatccatgaaaattccgcattgattttgacat

SEQ ID NO: 378702 - DNA, 120 bp, Artificial Sequence
  ENSG00000143355_20 (sequence is synthesized)
tccatacttttaacctcctaaagctaaaaacaatagctcggaaaccattctttctagttactttttttcccagggaaaatggaaataagcaaaatataatgttttaagaagtaaaaaaat

SEQ ID NO: 378703 - DNA, 120 bp, Artificial Sequence
  ENSG00000143355_21 (sequence is synthesized)
caatataatttaattaatagctctattaattggcttcagctgtaccatgatattgtatctggcattctatatgaataatgtttaaaatacccagcctggtagacttataccaacaattgg

SEQ ID NO: 378704 - DNA, 120 bp, Artificial Sequence
  ENSG00000143355_22 (sequence is synthesized)
ttttgttttgttttattttattttgacataggttgacttatgtattgaaaataatttttctgatattagagatttgaagttattagtcttaaagtagataaactcagaagccttgtggat

SEQ ID NO: 378705 - DNA, 120 bp, Artificial Sequence
  ENSG00000143355_23 (sequence is synthesized)
gctgatctgaatatatttcctagtttacagtagcatttttttcttttaatttaagctaaaatcttaatggtctgggcagtggtgaatgttcatctattacgcttctgttgtagttaaata

SEQ ID NO: 378706 - DNA, 120 bp, Artificial Sequence
  ENSG00000143355_24 (sequence is synthesized)
ccaattagattgtggatttcctaaaaaaataaaaaagaagtcaagatatatgtcttgctttagtggattgttaagaataactttgcacatattttccactttttggaccccttaaatctc

SEQ ID NO: 378707 - DNA, 120 bp, Artificial Sequence
  ENSG00000143355_25 (sequence is synthesized)
ctttggtggtcgaagtggctatttaatagattttaaaggtgtccttctggctgtataaatgtgtggttacatattgacagttcactgcccacattaaagtgcattattgtaacttttgct

SEQ ID NO: 378708 - DNA, 120 bp, Artificial Sequence
  ENSG00000143355_26 (sequence is synthesized)
cagggtctttagaaaattagcacagaaagtagcttattttttaaaaaaagatgatggaagataagttaacactgtaacagaagaaaggtgtgattgccattatatatttagcaagtatgg

SEQ ID NO: 378709 - DNA, 120 bp, Artificial Sequence
  ENSG00000143355_27 (sequence is synthesized)
ttatcatcttatatggagcttaaatcttgacttttcatacttctattacattttgggcatttaccactaaccagaccaaacaaccttggtaaggctgagatcttattaatacacttttac

SEQ ID NO: 378710 - DNA, 120 bp, Artificial Sequence
  ENSG00000143355_28 (sequence is synthesized)
aggtaaaatattgacacttataaattttgttctttgacagaacaatatatggtactatatagatctactttattaagtagactaattataactcagttctcctatgtgccttatgatata

SEQ ID NO: 378711 - DNA, 120 bp, Artificial Sequence
  ENSG00000143355_29 (sequence is synthesized)
acttggaagtaagtttgtgaaaaatcaggatatatgtgttgtttgttaaattaactgttttaagcccttttaacacctcactagttttgtactgttttacctcttatttctgaaactctt

SEQ ID NO: 378712 - DNA, 120 bp, Artificial Sequence
  ENSG00000143355_30 (sequence is synthesized)
tttatggtgtatcctgttagaggggacaaacatgtcatagaaagcagttgtgcactctttcaaatatagttgataaattcaataatcttatatattgagcttcgtgtttatagtacagta

SEQ ID NO: 378713 - DNA, 120 bp, Artificial Sequence
  ENSG00000143355_31 (sequence is synthesized)
agtggtctagcaaaattgtccatgtttctttgtttattgataaatgcattgtatagaaactatttcccctaaatatttatggaccaaacaattgtgatatatcctattaaatttgtgtga

SEQ ID NO: 378714 - DNA, 120 bp, Artificial Sequence
  ENSG00000143355_32 (sequence is synthesized)
gtgtgttccagcatctatatgtaaaagcttttcaaatggtaatacaacattgttagaaatatttaaacatacaaatagtttttagacttccaaacttctgattcatatgaaatgttacac

SEQ ID NO: 378715 - DNA, 120 bp, Artificial Sequence
  ENSG00000143355_33 (sequence is synthesized)
attgttgcacaggcagtgtaattcaacctagaaatacctttgaatatatttgcttataacaaaagtaatgccccactgatttgactcagtccaatttttagaataaaaaggctaattagc

SEQ ID NO: 378716 - DNA, 120 bp, Artificial Sequence
  ENSG00000143355_34 (sequence is synthesized)
atataaagtaattgcatggaacgaaaccttaaatatgattaagatttcatgttaggtctattgagcacaaatggatatttgtaaatctaaatagaaattgcagacccctaaaagccaagt

SEQ ID NO: 378717 - DNA, 120 bp, Artificial Sequence
  ENSG00000143355_35 (sequence is synthesized)
tgctctgtagttaataaattgtcactatgatttttttcagggagaacaaatcttggggcattacagccaaacatcccgacgtttgaaaattccctaaagtattaaaagaaggggaaaagt

SEQ ID NO: 378718 - DNA, 120 bp, Artificial Sequence
  ENSG00000143355_36 (sequence is synthesized)
ttgatcggaaatccactgcagtgaagacaaagacactattaggttatgataatcatacattaaaaaatttattaagccaaaaaaaaagagagagagagagacttaaatgtcatttactga

SEQ ID NO: 378719 - DNA, 120 bp, Artificial Sequence
  ENSG00000143355_37 (sequence is synthesized)
atgttaacgaaacttgtgttctttatggtgtctaacacaactgaaggcctaaaattatgtggtttaaacaaaattagataaaccatgtacaaaaccagagcaacctggcagtaatatgcc

SEQ ID NO: 378720 - DNA, 120 bp, Artificial Sequence
  ENSG00000143355_38 (sequence is synthesized)
caccccatatttgaaaaaaattattattgaaaaaaatttcacacatttgtcaagcacagttgtaaaataaagtccaaaacattcatttcacctgcttgctaatgtgtattagtcctgtta

SEQ ID NO: 378721 - DNA, 120 bp, Artificial Sequence
  ENSG00000143355_39 (sequence is synthesized)
atggcattttccaactgtaaattcaaagaaaagctatcacccatttaagagtatagggatcaaaccccagtaattttagcattattgtttatcacttcctttttaaacagaaatctctgc

SEQ ID NO: 378722 - DNA, 120 bp, Artificial Sequence
  ENSG00000143355_40 (sequence is synthesized)
atgcacttttacatatgtcacctctagtgtacacctctgtatgatgacttatctttgctgtttcttgtatgataaatagctttcattaataaacatttatttgatgcaaacatagttaac

SEQ ID NO: 378723 - DNA, 120 bp, Artificial Sequence
  ENSG00000143355_41 (sequence is synthesized)
tttatgttaaacacatgctgttgaaattaattttgaacacttaaagaggcagcacagtacatttacaacttgttatactaatgaaaaaatacaaacagcatagtgagattaaattctggt

SEQ ID NO: 378724 - DNA, 120 bp, Artificial Sequence
  ENSG00000143355_42 (sequence is synthesized)
aatctaggataaaattacttacttggtttttaccttttcatgacttattttcatttgttgtattcaattgccacatgtattaaaaataaaaaacaaagtgaacccaaattacaacaaaat

SEQ ID NO: 378725 - DNA, 120 bp, Artificial Sequence
  ENSG00000143355_43 (sequence is synthesized)
aaaccttagaataaactattgtgtaaaatttcagcaacttttttagattactagggtaaaatttatagatcctatgtgagtttacatgtttgctatgcaatgaacaaatttattgatgta

SEQ ID NO: 378726 - DNA, 120 bp, Artificial Sequence
  ENSG00000143355_44 (sequence is synthesized)
tacaaatatattctgaactataaaaagatccaatctttgcatagttcaattacatatgattattacaaacaaaaaagcaaatggaaagacagacaaatatttaggaatgaggtttttttt

SEQ ID NO: 378727 - DNA, 120 bp, Artificial Sequence
  ENSG00000143355_45 (sequence is synthesized)
aattgttaaagggaatatttgaagaataaaattttagctattcctatttagccgtatatccaaagcatatgttaaacaaactaacatatactttccagaaaatttttcattatgatgaaa

SEQ ID NO: 378728 - DNA, 120 bp, Artificial Sequence
  ENSG00000143355_46 (sequence is synthesized)
tttttattatatacaaatgaaccctatgtaaatgatgtaacttttatgaatgacagacattaaatatttcacttacatgtattctcagaattttgaatgttttcttaaatgctttcactt

SEQ ID NO: 378729 - DNA, 120 bp, Artificial Sequence
  ENSG00000143355_47 (sequence is synthesized)
cctgaataataaaaagaaaaaattttaaagaagagagagcaacttactaataaaaaaaagcaatgcaccatgacaagtagactattttgagtgatcacaaatcatgctggttttgtcagt

SEQ ID NO: 378730 - DNA, 120 bp, Artificial Sequence
  ENSG00000143355_48 (sequence is synthesized)
aacttgaatgtttatgcctcattgaaacctcatccacagctatagcaacttaaatagattttccaatgcatttccagccagtttattcaaatctttgccctacagtcttgccttctttcc

SEQ ID NO: 378731 - DNA, 120 bp, Artificial Sequence
  ENSG00000143355_49 (sequence is synthesized)
ctgttctgtcacctgtggcaatttcatttagaagtattttggaacttcgcctggttttacagacctttaaatatttgtctggtatgtgaaatgcaggaagagaccagagagggaaagaac

SEQ ID NO: 378732 - DNA, 120 bp, Artificial Sequence
  ENSG00000143355_50 (sequence is synthesized)
gcaggaagagaccagagagggaaagaacataactgaaattagacatctgaaaaaaaaatacaaatttgaaacaggcacattttttaaaaccaaaaaaaaaaaaaaaaagagagagagaga

SEQ ID NO: 378733 - DNA, 120 bp, Artificial Sequence
  ENSG00000143355_51 (sequence is synthesized)
agaggaagcgtgtgatgcagagctggaaggtctgttgtgctttactgtgatgtaaagcagtctttgagtctgggcaactgcacatttactgtttggtgtggaatagaaaaatgtggacct

SEQ ID NO: 378734 - DNA, 120 bp, Artificial Sequence
  ENSG00000143355_52 (sequence is synthesized)
cttagttgagagcaggacactaaattttcatagcttctacctcccagttgcctgggttagtctaacttctggcagattgatcttgggcaaaaagcttcactgagagttagtgtctgtgtg

SEQ ID NO: 378735 - DNA, 120 bp, Artificial Sequence
  ENSG00000143355_53 (sequence is synthesized)
ctttggttgaatagccaccttaatactgacttacatagtgggtaggtttttgatacctcaaataaggataaaactccataataaaggacccaaagcaaatacttttaaaacttaggtgat

SEQ ID NO: 378736 - DNA, 120 bp, Artificial Sequence
  ENSG00000143355_54 (sequence is synthesized)
ttttcatcacctaaaacataaatagctttatttagcaaaatcccagtggaatctaccacacattcttttataataacccttttttgggagtcaaagtattgtttttttattagccacata

SEQ ID NO: 378737 - DNA, 120 bp, Artificial Sequence
  ENSG00000143355_55 (sequence is synthesized)
taaatatcatctcattttctgttgcagtgtgactgcaaggcatgttgtggtggaaatcattagaactgggaagctctggaatggaaatttggaatcgtgtcattctaggctcttaaagag

SEQ ID NO: 378738 - DNA, 120 bp, Artificial Sequence
  ENSG00000143355_56 (sequence is synthesized)
aatattagggataatactgttgtaaaaaataaatataaacacctaattttgtatgaagttttgctatttaaattttaactatgttataaacaaagctagctttacttgtagagagttcgt

SEQ ID NO: 378739 - DNA, 120 bp, Artificial Sequence
  ENSG00000143355_57 (sequence is synthesized)
gtactcttgagctcattcaatagcttttacattttgtagtctcttccacaacagggcaaaataagcacagtaggacttagtccaaattgacgaaatatcattgaattttctttgaaagca

SEQ ID NO: 378740 - DNA, 120 bp, Artificial Sequence
  ENSG00000143355_58 (sequence is synthesized)
tatatatagataaactctggattggtcttttagatctgttttctgtttttagtaattgggaacaaactcttgatattaaaataaataaaatgcctctaatgtaaagccacagccctgctt

SEQ ID NO: 378741 - DNA, 120 bp, Artificial Sequence
  ENSG00000143355_59 (sequence is synthesized)
ctagccaatgtcaaaaataggaagtttttttaatggtttactgttgattttaaacattttaataatagtgctctgccctcacaacagtttttttttcagaataatattatgatttacctt

SEQ ID NO: 378742 - DNA, 120 bp, Artificial Sequence
  ENSG00000143355_60 (sequence is synthesized)
attttaaaaataaattataattctaacttaaaatattattttaaatgcccctctgggaagatttccgttttattttatgaggttccctggcagttgggggggtggtgaggttgggagagg

SEQ ID NO: 378743 - DNA, 120 bp, Artificial Sequence
  ENSG00000143355_61 (sequence is synthesized)
gaaagtttagaactgtgcatgatactcaaggaaaagtctatgaatatgatgtaagtagtaacattattgccacaactaaatttctgtttaactgtgttgcagaatatgataatgtcatct

SEQ ID NO: 378744 - DNA, 120 bp, Artificial Sequence
  ENSG00000143355_62 (sequence is synthesized)
aacatcactccctacttgcaacattcctctgtgaatattaatatagttaaccctcccttattatgtatcatatcaataagtttctcttcccttggattaatttttgcttctttgcattac

SEQ ID NO: 378745 - DNA, 120 bp, Artificial Sequence
  ENSG00000143355_63 (sequence is synthesized)
attttatcttgtgctaagataacaaaaagcaagcaagaataaagatccagatattagccatatgtagaaagttcctggtgtgcatttctgtgtacttttccctcacatattagaattgtc

SEQ ID NO: 378746 - DNA, 120 bp, Artificial Sequence
  ENSG00000143355_64 (sequence is synthesized)
aggaaagtttttttcttttggaactttctgtttacattttgcatgatcttataaattaacctgaagagtaattggataccttttatggttatttgaaaataaaatttgctacaaataaga

SEQ ID NO: 378747 - DNA, 120 bp, Artificial Sequence
  ENSG00000143355_65 (sequence is synthesized)
ggaagggctgaacgcaacctcagagcgtttctctgggcaccggcccgcgtctgtgccctctgcccaccccttcctcctccccctcccgatttggaagcataaacagaaaataaaagacag

SEQ ID NO: 378748 - DNA, 120 bp, Artificial Sequence
  ENSG00000143355_66 (sequence is synthesized)
cctcccgccgagaaccgagttctagttggggaaacgtctgacatctggacatcaagtgcaaccaccattacggcgtgatccactccttttcctctaagaatgctgaacggtaccactcta

SEQ ID NO: 378749 - DNA, 120 bp, Artificial Sequence
  ENSG00000143355_67 (sequence is synthesized)
tggattaacagggggaccctcagcgagacgcagggactggcccgcacctctggccgccgcctcccgccgagaaccgagttctagttggggaaacgtctgacatctggacatcaaggtaag

SEQ ID NO: 378750 - DNA, 120 bp, Artificial Sequence
  ENSG00000143355_68 (sequence is synthesized)
accctgatggagatattttagtcggagcagttttctgccctcggagtgcgcccggacgcccgggagtttcagggacttcttgggagcctaccggaggaaggcccggctttgctccaagcc

SEQ ID NO: 378751 - DNA, 120 bp, Artificial Sequence
  ENSG00000143355_69 (sequence is synthesized)
gcgtccctacctgaggtctccacgggaggagcggtttggacgcgccccaccggatgggaggaggtgcttggggaagccgggccgtaccgccggtctgactcccggcttttctctgccagt

SEQ ID NO: 378752 - DNA, 120 bp, Artificial Sequence
  ENSG00000143355_70 (sequence is synthesized)
gcaaccaccattacggcgtgatccactccttttcctctaagaatgctgaacggtaccactctagaggcaggtgagttatgtgccaggttccttctgatgttctctgccccttgggccagt

SEQ ID NO: 378753 - DNA, 120 bp, Artificial Sequence
  ENSG00000143355_71 (sequence is synthesized)
cttcgtaggctcaaaaatacacattctctttcagagtctcctgataggactcctgaaaccctccttttgcctttctctttgactgtctttgactttcctcaggatcagtgtccggggcgc
